United States Patent Application Publication US 2007/0048818 A1 - sequence listing, part 5

SEQ ID NO: 8116 - DNA, 7297 bp, Homo sapiens
ggggagaccggcattggcaaatccacactgatgaacacactcttcaacacgaccttcgagactgaggaagccagtcaccatgaggcatgcgtgcgcctgcggccccagacctacgacctccaggagagcaacgtgcagctcaagctgaccattgtggatgccgtgggctttggggatcagatcaataaggatgagaggcaagaggcgggaagggcggccccacccagcctcctcccaccccacctacattggcccctataacagtagcccagccctcacactgcagggggccagggagggcctcttggggaatatctgaggctctgtggtcaccaacagaccagttactcctttaggtgtctggagaaggggtcagctgcctgtatccagtcagggatctcaggcagaagctgttcccagaaagaaaaggccagggggcagcctggcttggccccgagccctgagccccccaagccccaagcccctgatctcagctggcagcctcctgggtgatggagctgtctgtagttacaggcccatagttgactacatcgatgcgcagtttgaaaattatctgcaggaggagctgaagatccgccgctcgctcttcgactaccatgacacaaggatccacgtttgcctctacttcatcacgcccacagggcactccctgaagtctctagatctagtgaccatgaagaaactagacagcaaggtatccctgtccccacctgctgtcacaggctccatagtcttctgctgcgatgcgatgtggtggctgcctcatgcctgaacaccatggtcctcagggacctggtcgggggcttgtgggtggccccccattggctcggtcctctctctgtcttgcgtctgtccctcctgctccagtggcccccaatgctctgggctcattctccagagtcctgtgccctgggtctgaccctgagccccttgcttgcagctgaatcattctcattctcagcccctcccgctcccgatagtgtttgttccccttcgctccagggaacctcccttcccatctcagcctcttctctgctcattttctatctctcaattcctaatttctagctcctcctttcacttcccccttcctccctgacataaatgtcctttggttccttctgagcccatcagggagaggagagttaaggcccagaaatgggatgtgaatgaggggtgggtactgtaggggtagagaagggaggcagcttcatgggaaggactggaagtgctgtgcatcttgaagggcatgtgaccccacatcccttgtcagctctcacgtgactgccctcccatctcaggagttcatttttattgtaaaaaacgggatagcctgggcctgggagattttgggatcttcttatggctactgctgatgggtccttttacctgcttagtggggagcatagcccccccaccactccttctgttaggccccaggccaattaggaccttcaaaggattctgggtcaaagctgggtatgcctagggggaccagttttggggctggatggtgatttgggggaaccagggctgtaagaagcactgcagccaattgttgaaactcatcagaatggccacaggtggctgggtttgcactatggctgcccgtgggagtggctccatctctctggcctccttccccctgcccagggatatggcctgggcatggctatccatatcctgggcatggcatgggaaccaccgctcaaaagagccaaccagcctgctgtcccctcccctgatcctggcaggtgaacattattcccatcatcgccaaggctgacaccatctccaagagcgagctccacaagttcaagatcaagatcatgggcgagttggtcagcaacggggtccagatctaccagttccccacggatgatgaggctgttgcagagattaacgcagtcatgaatgtgagcgttgggtgagggcctcagggccctggggccagagggcgaggagccggcacagatctgacacagccccaggagactcttgttccccaggattccagccttagcttctccaggacagaagggtgggcatctggagctggccagtcctacatctgtgggcaggggacaggaagaatctgatagtgggcctacactggggaccccaggtttgggtgtcataagatctggactcatggaggagcctggaaatggaagcagttgagcaggcttaagggtttgggaacctggaagggagccaggctcacaggtcctttcaggaagctctaatggcccctgggaggcccgagtgctgaaagaacagcctggagaatcaggagcaccagggagggggttgagggttcagcccactcccctgtttggagttctgggacatttctccagaagagagccaggaagtaagcatctggccctggagcctttgttcaggtctggctgcccctccctaggacccaggggcagggagggagagtctgccattagtctgtgtcagctcagggcttacgcatacccgggcccctttccaggcacatctgccctttgccgtggtgggcagcaccgaggaggtgaaggtggggaacaagctggtccgagcacggcagtacccctggggagtggtgcagggtgagtgtggacaggaaatgcatcctgggggtagaactgagttccctggcctgccctgctgcctgtagtaccctgtgctgtttcctcctcatgcccacctgcgtgcctaccctgactctggagtgtgcccgcctgcatgcctgcctgataccccaccggccctctgctttcagtggagaatgagaatcactgcgacttcgtgaagctgcgggagatgttgatccgggtgaacatggaagacctccgcgagcagacccacagccggcactacgagctctaccggcgctgcaagttggaggagatgggctttcaggacagcgatggtgacagccagcccttcaggtgacagcctgagccagagtgagcctgtcttcacagctgtggccagacacaccaccctggcatctgttccctgagggaccccacatcctcttacccctcgtgcccacatgattctacttctctggctctgccctgccctatcccattccgtcataatcccatccttggcctcttttctctgggtctccacagcctacaagagacatacgaggccaagaggaaggagttcctaagtgagctgcagaggaaggaggaagagatgaggcagatgtttgtcaacaaagtgaaggagacagagctggagctgaaggagaaggaaagggaggtatgtgccaggctgggggctgggatggggaagctgagggagggaaggcctggctgagggtagaggtgggggtgccttcctggcccaggctcaagccctcctcttgctccccgcatcttctgccccctttctgatgccagctccatgagaagtttgagcacctgaagcgggtccaccaggaggagaagcgcaaggtggaggaaaagcgccgggaactggaggaggagaccaacgccttcaatcgccggaaggctgcggtggaggccctgcagtcgcaggccttgcacgccacctcgcagcagcccctgaggaaggacaaggacaagaagaagtaggtggcaggctgcgcctgcgctggctcctcttgctcctgtgggctcttgctttcgttcttgtccctcacctcccttctcgctctcctgctcgccctctcttacccctttcctgtttggttttccctcatcttcagtggctctccccccagctttcttggttgcctttctttttctttcactagtgatccagtgtctcgccgtctggattgctctgatactcatgcagtctcacttgcacaggcaatcttgtgctccccctccctctcccttctccctttttctctccttctcttcccccttcttcctcttcctccaactttcttgctcacccattcgctctcccatagcccccttggcagctgtggccctgttgcagcgtggtgaaggtggggctgcacgggtgaggagcagcgtggagagggcgaagctgcagggctctgggaatgctgggaatggtctttcaggccaggggcgggacaggacctgggaatgtcagcatctccagccagattccaaaagccgtggtggtttctgcttggacacctgtggcgcatccctcctcagtctgtggggcagtggtgtggagcccgtattggctggcaggtggtgatggagaactgcgggcactcgcgccagccaacactggcctcctggagactggtcaccacacagctgttctgaagggcccgcagggcttaagggaggaaagcggcttcccacaggggctctgtgggttcttttggggagaagagctgcccctcaagtagaggctggagttgttcctgcagagtggagagaggagagaaagactggatggcagggaggcctttcccagcaccaggagtgcagtcaacggagtagtcaggtggggacaactatgagtcacttctccctggcgatcttcatagcctgtttccacacccttagctggagtccagatgtcctggcttctggggctcaccctcgcccacccacctcattcacagccatgctatgtcacactgtggggatcccatccatccctgcttctccctgccccggcctatcttgggtaccatccttctcttgccaacctaggaactaagcaggtgaacccaacctggccgtcattctcgggatccatttcctcctgggatatttggggatgtgtatgcccaggcccttccttccttggtggcaatggagcctagccattagggccagcgggagtctgtgacccaggtactggcacccaaagtgactttgccctgcttcctgccatcttgttaaagaaaaggtagccaggattccctaggaaataagctgtggagaaaccactcagcaactgcagacaggggtctgtggccagttcagggtctgagggccagtgaaggtgggtgcaggcaggctgaaaggacaccagcacagccctcggggtgggggcttgtcactggtgtctggtctccctgcttttcccatgtggcctgggctccatgatacgttctccaggcctgggcctggaaaacaggtctttcctgttttctggacctgctagaaagcttcagtcagtttggtccctgggagagaaaacgctcttcccatgacggctctgtggaggccaggaatggggtaggtgggttgactgggagtactccttcctgccgccctggtcaagggactagtgtgagtcgggagtgcatttttggaatgggggcaggggtgtttttcatgaccatttatttgagtggttttgattggttatgcatactctttaaatttgaatccaaattttttgcaaaattacttcccaatcagatcttgacccttagcctgggacaccacaaactgaggtgaattctctgctttgctcgtcacaaatgccaaactgactgccctttcacggtgtccatcttgctgtcttttgcttctgtttgatttggtctgcatatcttttaatgtgtctgtttttgttttgtttgttttatttttatttttcagttaacgcacgcacagacttacatgtcaagagtggactttagactttcatgtgttaagttgcttgagttacaccttgtgacccttctcccataacatggtgtgaggacggactgggagccggtacagactccagtgtttacagccttgctttcctcccaccgacccctggccccaggctgccccgggcctggcgggccacccctctctatgcaaacacgtaaaagccatgaatgctggaatccaaaactgacgaggtttatttttttcagagccagtggctggtcttccatttacagtgtcactattccctgacggagctgttatgtgccgctctagcgaaggccccagccgggatgctaggcctaattgttcagcgtggagatggcaactcacgtggtgccctaggtgcagctgcgtggtctggtatacatgctgcaaaattcacccagttcccctcattttaatttttctaacctacagcttaattttaataactttaaaacacttctaaatatttattttgacaccagcgtcaagacaaataatatcctctcccattattttcataagtaacacagattccctgatttttaaaaactaaaaatacagctaaacctttcttatgtataaagtatgcctatcatatacagggagaggtgggtaataaacttcctgtaatgacagtgtttggcatttctttatggatggaattggaacatgaacaagaccatgtccagcgtttttactgtgaatgtaaatggaacagcagcccaaagctgttgtctgtgccccagaggtgctacctgtagacagggaccaactccatgtgtgtgtgttaagtgtttgactccaattaagactcccaagcgaatcctgcatattccaaatgtaaagagtactcagtgggaaaaaggttgttacctcaaagtcattgcttctttcctggctgggtcacagggtgaagagatgaaggtgtctgatgtatatagacaattagggaaaaatgagcggcaaaggagctttccccttcagctgcactctaaaggggaacattttaaggaagtactagcagctttgactcttctatgctcctgttggtttacaagccaccaagaatgtcagtgttgagaatacggcctggtaaaatgggagatgtaaaatgactaaatgaaaggaagggtagttttaatgttgaagcaccgtgctgggcactggagctacccagaggaatgcacaacgctcccctcaaggagctcacagtctagcctactccctggctggaagcctcaggaagacgtgctaatttattgtggaattggtagtttgcttttcatgcccctgtcttccttctcatgaccatttccccctttctgtctggcttgcattattgatttccaggaccaagtcctggcttcctcctgccttcctgagatgatgttctgctcagggagaagtggaggggtgagctgtgtgtgtccactgaggcacggccaggaagaggcagcctttacctgtgaggggctccatgctccagcagcagagcaggttctagtgacaattcaactttttatgctatgaccaggggtggatctaaattttatggggctgaaagcttgaattatttagaaagacttctttaagaaaaacaatgttaatataaaattaggtacagggtcttggaaggggccctgaagatt

SEQ ID NO: 8117 - DNA, 434 bp, Homo sapiens
tcaggatgtccttctgcctcatgcactgtggtcccacttacactggaaggaaggaggcagagggcactcaacggccaccactggaagctgtgagcagcatggcctcagcatctccatctgtaaaatgggttctggactagaggagagttcttgatatgacctaggagatagtgttccaaatgtatctgactctcgcaaggctaaatgcatggtagctcaaaataagactcatacaggatcggaagcaattaaagtgtaattttaacgaaagcaccaacaagcaaaagtgtgtcaagaaaaaatacagatgtatactaactctataatatagacaattatagtatatctggcccttgaccactttgcacctagtaaatctttcccctcccaccccatggcttagcacatttacacaaacacaccaaaaaaaaaaa

SEQ ID NO: 8118 - DNA, 1052 bp, Homo sapiens
atccggatacttgaagtcactttacagcagtgaagtgagggacaatgaacaaaaaactcgcattgagagtagcaggagcccagacccttcaataaggaccccaagttaaatcttccaagttaaggctgagagctacagctctcttccgaaaagctggagctgccaacccttcccttgggacctgccgattatgcagttttcttctgatactagctttggtttctgaggtattctgccctctccctcccctcttctcccaaaacatctgcctctcctcagtccccgtctgggtggtgggtgcacaataccaagtgcctgaaaagcctgagagagagggtctggggtagggtggggaccactggacaccccaagtgcaaactgctgctttctgacccttgcttgcttatgtactcccttttcaactgtgttgaattttaatgacgtttttagtggtgtagaaatgcaagtattttggcttaacagcatgaagtctgggttgcacattgtatcagaggtgctgtaatctttccagtatctctgatatacggctttctggttgaatgtcaccctgggccctcttgactggataaacaaccatgagggctcttctctgtggagctgccgagagcttggtggtagaaagcgatgtttctaaacaactgcagcggctctttcctgtctgaactgcatcgtgtgtctgactgccttgctgtccatacatacagactccttcccaggcccggctctgtgcagaacttccatgttttaccacatttttctctcctgaactccctttgtcagccccagggtgttgaggctgggtcctctctagcaatctctaccttcagaagagacttttctaaatattttgcttttccagttcttgttgcttttgtcattgtgaagagtcacccaggatgctggcacttggtaccctaagatcagaagtggtgtgtgtgtgagctgtgagacatgcacaccctttcagagtgatactgtgtggtggaaggactgttagaactcaaagaatagttaataaatccagtgtatta

SEQ ID NO: 8119 - DNA, 5011 bp, Homo sapiens
aatggctttgaacactcaatttaatttaaaacaggcacaagtgcaaacaattcacaaaaatttctagggaagatgcttttgttttgaaaactctgacccttaaaaaaaagtccttgcaatttctttgcccccaggtaggtcactagggagcagaagaatctaaaaatattatctagatagaaagggtccagacacctgaagttctttcctggaattccatctcacagcagccctgaagtggggcagggccgaggaggacaaggagacagcagtctgtggaggcagctggggcagatggtttgcacacatggatgcctgtgaccttgacatgatggaaacccggaggtggttcgccttctctcccagatagggttctgaagagaacaatgggtccctgatgacctggttattgagataaacttgaaaggtaacacagttgccaatccttacattcctgtctctggccctcacgatgcacagtacaggagaagctcagaagcctcctgagctcccaggagtgttagacttagcatggaccactccactggccaggtagacacaggagtggagaggtggaagccaggccaagaaagcaggtcccttcaggccagaacttagtgggagagaggggcagccttcctgaaactggctgtgggtgacctggagggacctgggctgtcaaggtggctttcctccccttacacacacacacacacacacacacacacacacacacacacgatgttctctccattctgtaaagtgagagcaccttcaccaccgaccccattctttctctttcactcagaaattgtcccctcactccctgcccccagccatggcctggagcaggccattcacagttctgggcggggaggggctgtacaggtgggactgcaccttcaggacatcagacgtgagggaggaagcgggattccggtcataaaaaccaccccgtggccctctcgagactcgaggtttgaagctggagctgagaacagcaggtatctgtggagaccagcagtctgccctctgcagtggcctaggacactagtggacaactgcctttaaaaaaccacagcagccttttctactgtgttggctgcagaggccaggaacgctggcctctgcgtttcttagaaatatccctgtgcaaatatcaaggggtcatcctgtagaaaggggtctccatctggggactcgggagggagagacactgagggggcaggtccggcctggcccagtaggctgaagggcagagggtggggctggggcttcacatttcaatctttggagagaatactgagaggaggaggcaggcaagtcctgccggcaggctggctgcccagtgtgccctgcctgtgggcgtaggtggcaggcatacttggggtgggctcagcaggtggaggtctgctttcggtagagctggatcaggggcaccaggcactcaggtagccctgtctgcagcaggaaggggtggtctaggagctcctgggctgtggctctctcttgggggtcccgcaccagcatccgctccaggaagtctcgcagcactggggagacctgtagaggcagggcagtaagatgaagccacaatttgcagtcacttcggggtgacctgattgcctggacttatcattgtttgaaagtcatgaattcgctggttttttaacttcctgttcccttgtccctccccaccccctcaaggctctcagcattcagatgctatagctctgtggaaggggcagaggattggcatcagtgatccagatctggctctatccgtgatctcaggcaagtcacagttttctctaggcctcagttttctcatctgtaaaatgggctagtgataaagtatgcttgccctgtctgccacatagggcttttgagattttaaaaacaggtcgctgggcgcagtggctcaagcctgtaatcccagcactttgggaggccaagttgggcagattacgaggtcaggagttcgtagaccagcctgaccaacatggcgaaaccctgtctctactaaaaatacaaaaattagttgagcatggtggcacgtgcctgtaatcccagctactcaggaggctgaggcaggagaattgcttgaacccaggaggcggaggttgcagtgagctgagatcgcaccactgcattccagcctgagcaacagagagagactccatctccaaaaaaaaaaaaaaaaaaaaaaccaacaacaacagaaacaaacaagtcaaggatgaggaagtactctgaaaaatagaaaataaagtgagacctgaaaaggaagatttctttgttgctctaggccttaagagtctaaagcaagggcttatcttggttcattttgagccagtatcttgggatgaggctgagtcttgggcagaaggctacatcctctgaggaattagccaactggagatctttatatgctaattttggggttagcggtgcgggctccaaggaccagttgtcttggaagatgtttcctgttggtcctcccatccagctttgtgttggggccacagaactcttgtttttttgctattttagaggagaggcttcagccctctgagacatttcttgttttggccaccagatggcggtgccacttagcagccccgtgctgacctgccagcagggggcgtccacagtaaggcctgcggggttggggccgatttggcaaaaagggttacatgtatacacttccatgcacttatactggctttaaggggaacgctgtggcttagctgtgtcggggtgtgcaacgatggagcatgagccgactcgccgtgatggacagggacatcgaatcatggtatggatctcccgacacgggttagaagggtttgtgctcagtgaagcttctccggatccctccctggacagcagggattgctggtgtcctggctttccctgctcatgggccccactgggcttccgaccagtgcctgccaagcagcaacccttctgccaagcagcaactctcctgccacagccgtgggaggcgacttgtcggagcgcacatgcgaacttgtgcgtagatgcggctccacacccaggtgcgggttttgtgtggggaaagaggagccttttccaggagcccagaccctgtggcttcagtggaagggagatgctgggagcccaggttctggtccccttgcctcaggaggaatggggtctgcgaggtcgcacccttgtgtgccaactgaccttgtgagagtttttcagcttgggtggggggctgtcccggagcctcttcatggcttgcactggggagtcactgaagtacggtggctccccatctaccatctcaatcaccatgatgcccagagaccagatatccacctgcaggaggaaaatgtccctgaccccatggccagaccctggcccattggtagctgcgttctggtggcagcagtggtggaggggggacagctggccccagctctccttggtgggtctgtctccttcctcccctggtcacctgccctgtggccagttactgcctgcatgagtgaccactgcctatagggacacagctgtcagtcactcagagaaaggccatcatacataggaggcccggccataccccattctgcccttgagctgaggaaagcacttgcaggactcgttcctggcagcaaagtcactgggtaagagcagccccatcgaaagggggaagggtgttgactaggtgggactctgaaaaccagggctgcttttggtgagctcactggaggggccacagcagaagagctgccagttgccaagttgcttttgggaggtctggggggtggagggaacggttacctcagtggcatacaaagacctggagatcacttcaggagccatccagtagggggttcccaccagggacttcctcttagggacgtctttgctgatctgagcacagaatccgaagtccgagagcttcacctgcggttgaaaagggagtgagtggtggatcaggaggaagtgggagcgtggctgtgccagggacaggatgggacctaccctgccatcgagggtcagcaggatggagtcactcttgatgtcccggtggatgacaccctgagcatgcaggtaggccagggcctgcagcacagcctcacacacagtggcaatctgctcctcattcagcctggacaggaaggtggggccacccgatgaaagagaacgttagctctggcaggtcgtggggtggctgagcagagtaggagtccctggtgctaggccccacagctcccaggcaatctgtttggcagcacagtcaggccatagccctggtgaaaactggggcctgagctttggctagaagctatccttctcttctccactcccaagacccctgggtctcagttaccccagcaggcaggggagcccaggcatcccaagtcttctgggccacaggcagaagaccacattgccctggcagggccatggtgagggcagcctgcactcagggtccagccctcccagctgcccacctgacttgggagacgatgtctgtgagggctcctccctgcaggaactccatgagcacccacagctcctcgcccaccaggtagctcttgtacatctccaccacgttgaagtgctggtagtcccgcatgatcaccacctgggggcaggcgggggcctgagtgccaggcacagtgcccagacgcatggccacccactgcccctgctcacagatgtccagcctggctggctgctcactgcccatccccaacgcccccgtctgtgtcccaccctgtcctcccacctcgttgaagagcagctccctgcgctgctgcttcctgaggtccatcatcttgacggccacctggcggcccgagtgcttctcccgggccaagcagacgatgccggtggagccctcgccaatcttcacgtagctgtccagcagcagccgggggtcaccctggtccaccaccatcctgagcgcagccttgaactgctcatgtgtcacaacacctgtgtcctcaccagccagggcacccttggcaac

SEQ ID NO: 8120 - DNA, 9779 bp, Homo sapiens
cagggttacggaggatgcagatccctatgtgcagcctgaagatgaaaactatgaaaatgactctgtccggcagctggagaatgagctccagatggaggaatacctgaaacagaagctgcaagatgaagcttatcaggtacagggatccaggcccaccccaccccacctcttctgcctcaaccccttggtagctgggtctttgacatgacttgcagaatcagagccttcttccttccaccctcccttttcaaaatacactgatttcactccttaatccgtgtcttttagacagtaaacattttaaatacttcttttttttttaagacagaatttcactctgttgcctaggctggagtgcagtggtgtgatcttggctcactgcaacctccgtctccctgatttaagtgattctcctgcctcagcctcccgagtagctgggactacgggcatgcaccaccacgcccagttaatttttgtattttttagtagagaaggggcttcaccatattggccaggccagtcttgaactcctgacctcgcgatccacccacctcagcctcccaaagtgctaggattacaggcgtgagccactgcacccactcttatagctgtcactcaccatgtattcttttaaattctgccctagaaagtgataaacagccttcttatattggaaaaaaacaaggtaactaacagtccagactctttcaggcccattaagaaagatgctttttctcataattatttttaaatggatacaaagaacagggcacgaggaaattgaataagcataaacccaccacttcccttgaattatttgccctcagtcttcctcattgcccacctcatgccaagtgtaagtaggagaatggcaaaattcctggagaaatgttgggggaactgcaggcctgtgttcatcaaggtatggacggacagattttcagatgtactggagtatgttagccacctgaaaattcactgaacatgacatatacaattggcaataaatgtaaccagcgactcatcctaaaggccatgcatttccccatggaggtcgttctactaccttgtttgtcttcctggtatgttccttttccctttaattcacaggcgtttacttggggttctggtatttcagggatgtttgcctggttgaacctgggcctcaatggttattttatcctgtcagactttctgtccagtggccagacaagttttctgcacattcttttgtttttcttttttcctttttttttttctttttgagacagggtctcattctgttgcccaggctggagtgcagttgcccaatcatagctcactgcagcctctaactcctgggcacaagctatcctcccacctcagcctcctgtagctgggactacaggtgcacaccaccatgcctggctaatgtttttattttttgtggagtcagggtctcaccatgttgtccaagctggtattgaactcctggtctcaagtgatcctcccaccccggcctcccaaagtgttgggattataggcataagccaccatacccaggctttctgcatattattagggcagcagtgccctgtcttactttgttattgaaaaaaaagggaagcagagagaagaaattatctcctatttctcatatgtctatagataaagccttgaaatatttttccaagaagattgtagcaggagggaaacggaagcccaccaattccatcccagcaatataaaaacaaagttttgcctctttggaatgttccatttgccttttcagtttaacgaccacatttcagaagcaactaaaatgttggtctagccataccaaagaaagagggtaaaagaaaaacataagtgactctatatgtagagccgtgctcccatgcttcagaaacaaattcgcctgattgcaaacccatggagagtgcagttttccttgcgccttctatggctcctccacagaaggaaatcagcctggaatgaaactgccagggtgtctctgggaatcctcagggatggcattcctacacatatctccttaggctctgctgtgtagaaggaaagaaaaatgtgactaaataaccaatgttctggttcatgctattagaagcgtctattaggcctccctctttgagctcgtgtcaccttctgtatttcagtggcagcagtaactgaaattctaggggttcttttttttctttaagggaggcaggcttacaccattccatataaaatattagatttttattcattttaatgaattaaaaatgtaaccttctatgagtaaaatgaagggaatttctactaatgacttaagattcaactggagtttttaccatcgctggtaaatcttaagctccctctccctctcctttcttttccgtgcctcatgacttccaagaaaaggacagggaagaagctgggagactataacaggcctgtgtatctccactcaaaacatactccctggaggagatgtcaaagtggttttccttgaatgctctgtgagcatacggttgttggatggattggaacgctactctcactcaatagactctctctctctctgtgtctttgtgcatggcttcccgccaaataattcaccagcttgactgcatcacagacttgacgtgtcacctttctcgtttgtgtcctttgtcacccacaggtcagcttgcaaggttgaatgcaatatccttttatcacactcctctcaagtaagtaccatcttatttaggaggaatcatggccactgtacactgaattctgataacctgtaatgcgaattcacaatcacttctcttagtcatttctttctatgtgataaaataccctccttaactgctgatatcgaagagtcgtctcagtctgtggagggtttcattataaaccagtggagatttgccagacatccttgggaggtgacttcttactctattagctaggaaaattggcacaaagcttctaaacctagagacgttccagtaatcctctgtggctatgaaacttaccaataagtttgtcacatcaccaatccatgacaatatcggagtttgtagccgctctagcacttgaaaaggaaaagtcagtacctctagagatgggccagcttgttagtcatactatacctcgggctcaagagatcaaatgtgtgtgccttaacgagtgaaagcaaaatcatgcattaataaagagaacaaaagagcccaaacagaggaaaaattctgcagccttatgtttttggaatacctgattcaaatccattgtggaattcagcagtatataaattaatttaaaatattattttcatggcatgtgaaaccactccaaagccctacctaaatatgtggaaaattctcagtaattttttaatgcagagagattagcactggactggcagcatcacttgactgtagtggtctgaagcttaggcgccagactctaatagacccatttcaaatacgggtttcaccaaatcctaacagcagaactttgggcaaattattaaacccgtattacctcagtttcctctatacaacatattgcataatagcctcatagaagaggctggtattatgtatcaccacagaagaggccggtattaaaaaccatatcctactcactgggatgtagtttttaaagagcttggcatagtggaaggcacattatcatttattatgaacattcacatatatgcctgcccctatgttcagtgctttatagcacttcaacacctggcagctgccatattgcttacctaagtgtacgggaaacactgggacccagaactagcttgctttctcttctacttttataaacaaggctaggatgcagctacatgtgatgacttggcacactgtgggccacactgttccgtaagtctagattttttctctggctccagctaatagccatttagatgcctccatggtagttcaaagctaatatacctctcaaaggattctggctgcactggcccaaacatttgagctttcccaatcatggaatcccataagtctgtactgcagtggacagtaaatgctatcaatgttggttgctattaataatttgaaaaaggaataaatatctgttaagtgacatactaattagtaaagaatacatgctagtgcaaatgctactgacatcctgtctcagtcctcaggttaaaattaagcaagtgaaaatcatggagtaattgctatgatcatatatattttatgagcgaagaggaaggagctcattgaccactctctattctgcctctcctggatttgagagtgccaccacacatgctctcctgactcattacaagtagagtgaaaaaattcccaggagctgtttctgaaaatattcactccagttataacaaatttagtcccaaggggcaggccttttcctttaatagcactttctttctcttagcttcagcaatttgatcattgttgttctgcacattatttaaacatcagtagctagttcttagaaaaatatttttgaaagtctaataaaatgtgcttgcgttaaacccagataaaaagtggaatttggtacctaaaagccaaaaatttcagtactctagaagttcctaggccattttttaaatctttggttgcaaatttggcagtgaaaaattagactgttgtagtctttgccatttactgcatcctgtagcctacctagctggaattccacagaactctgaacaagaaccagcctgtcattcaatcagccacataggcaaattcatttaaaacctgatagaatgttgtaaaaactagtggcttttcatttttgcagctggttctatcctattgtactttttcttaatgtaaccaagaaatgcaggtgcattttaggccagtttatttcattaaaatatttttgtttagactttctggctgtactgcaagaccagaaattatcccaaagtatatgtgtctcttatccaagggttctgaagccagattcatcagcttgacattagttagccatccgccaaggcagagagccttgcattgggaagaggcagaaggtggacgccagagacatagaagatgcaacctctgctcaaaaagagctttaggcttatttgaaaataagtacacactttcaacatacaatattaaaaaaagtgaatagtttaaaacctggtttattggttttcaactagccacttttgaagaaacggtatacataatggcactcagcttagggtcctccaagactcaattttagcccatttaggtattcaatttgtccctgttacatcctgtggccacatggtacaccactgtccttggccactcacatccaagtggaaattagaggattggaccatccaaagtagattttttaaaaaccaacgtggcagcctaatcatgggtcactggttttatctctttgtccaaaagacagcacaaatatttctgtttgtgttgcttttcccctccagatgcctctggtacccactaagaaagagatccacatggaggacttcctgtcctctcttccagaaggtgcaatagcacagtgtcctaggactttcattcctgattgtcgtaggaaaggagtgtgtgtgtgcatgtgtgtgtgtgtgtgcgcgcgcactttcttctatattggggaaaggggggatcctaagtttcataaccctaatttagaaacaatttgcatctttaaaaaaaattacacattccttattcccaggcaagctatagtcagacagatgatgaaagtaacatgaaaactggtgatgatggagagccctgtggccacacagaggaggaagacagcagcctggcagcagcctcaccgaagagaggaaccaccacacccagcagctcctgacagacccccacccctaaagatgtgtcctgatgactatagtgcagctaactttttgttctcagatttgtagtgcataggtgtgtgtttcaagaaggaaaaaaaaagacttctgttcaaagttaacttatcagctacatcctctgtaacgtggttcatccctggttaaaaagcaaacaaacacaggctgaaaacccatgctgctgttatacacaatggcagtattaacaagcattttaaacctttgcacatgatattgaacctgttcagtttacaatgacaatattaatactgtttatagctagaagtttgatttctgaattctttgagattttagcaaaacagtttattatacactgtacatttttttcacagcaattggaaaaaaacaaccacttgcaatcattcaataaccctgaagaatttggttcctgagtgtacaaactcagagcccggaagccaagaagggtccttggcctgcacggtctgtagttgactccaagtctctgtgagcagtgacttgaaccaaacacaccaggaataatccattctttggggcctctttccaactcgaggttgttttctttcaagatactctaatcagccatagaatttagtgtaaatatttttttttccaaatagatatcatattcaaaaaaggcagcattcaaattatatagaatctagtttttaaaatcagcacagatcttcttaaaaactgtgaactatgttttgaaatactcgttactaaagctgtttataaaccacaggtgccataagatccccaaacggactaaagttatctctgctcttccatggtcttgttcctctcgttttggctttaggaagcatgtctttaacagcaccgctcgttcacaagttcccccatcaagttgtttggaggccttcagctttaaatgtacaggcttaaagtgcgcttgcaaacgtttgctctcctttttttctgaatgttgattgccttagctggccacctggtgttctgcatgtagccttctgtggtcatgtgaaaggagacaggctcttctaagttgagttgggatttttgcactcagtgaaaagctgaagtgcaaaagagctatcaaagacaagaggataaaagactgggatagtcttttccaaggaccctctttagagggccctaaagacctcctttgggaattctggggaaaaagaaaaagtaatcttctacttgcttcaagatttgatttttttaaaaaagcctgcgacctattcaatacattatgcttaaattagcagtttctctggaattcctgtctctcctttaaaagaaaggagagaacattttagaacaatagttctcaaagtgtgttccccggacaagcagcatctgcaacacttaggaaggtcttcgaaatactaatttgtaagccccacctcaggcctactgaatcagaagctctgggggttgggtccagaagtctgttttagtcaaccctctaggtgattctgatgctcgctaaaggttgagaactactgctttagaatgaagtcgtataataaagtctctgaaaaggccttattcagaataagcaagaaaggttctgtgattcacttttgcttctggggctggcaaaaaccttctctgaacccacacaccaagttcgtagttggtaggtgcccagccaagtcctgacatcttcatgccccctctgcagagggcggctgtacgatgttcacatgtctgcgtttggtcagacatcatctccttggctgccctttgaaaccaaatcacttgccttggggataaagtgctcaattggcattagtgagaagcccatcctatcccttgacatacttaatcatatatctctccagagaactcacctgacaaatgtctctgagcacaggctgacaccaaagtggcacaactgcacagttctcagatttctttgcacagattgatttttattgcgggttttgttggggtgtcttaatgttcatctcttttccactgcccatcctctgtgaacccatacctctctagatggagcaggtggccactggtgcctcatactcagtattgaaaaccactacatcccagctacctataatgctgtcagctcaaaatcatagccaggtagttcttgaactcagaacttaaatcctgcacgtggcactccaccactgactggaccgagctggcatatgttgtttctttgtgtttctacatcaaaatgttcgtctaagatttgaactgttctgctgataaccttccccgttgtcatagctatttcattgccaaccaactccatcacatggttgttgatatcgtcatataaagccattgcaaggactctggaaactgccgccaatgaccaatttctgactaaccagccaccttttctctctcttagctccacgtcagcactgagaccagactcgagcacccctgtcctgtaagcgagacaaaatggcgtgtgttattttggggttttgtgttttttggtgggtttctttccttggctctccagatttacttttggggcctgttctaagtgcaaacccagcaagtttcacttgtcctgtccattagatacaactacatcttgcgggggttgtttctttcttgttccacaatgaattgcacatccatctccatcagagctgatagcctgttaataagcactggtctaacacagccaaccctcctccacagcgccatattaatggaggaggggaggaaggtgaaatctactgcatgggattcaggaaacagttgtggttggtcaggacggaagttggggtaagtttggttggtcagagggagttgtgctggagattgtgaaaaatgggttcttgaatgatctactataaggcagggaaggttcatttgtaagtagtaatgtgaactgaattgcattaagagtgtgtggcctttgttgtgatatactatgtattttcttatatgcatgagccaaactgttgcatcataatttagcactgatgtctgcttttattttgatcatctttgtccacccttattagttcttggctgttaaccgtagatagatcttgtaaatccagcaacctttggttgctgcattccccttggttcgattccacgcaaggagccacaagtgagaactccactgtccttagaagaaagggcatttttacttttgaaccaaaaagagaaaaaaaaatcagaagtgttgcatcttgaggcgaattaactgtaagacatttttaattatgactactgcaatttgacaccatttgaaataatcaattcagagacactaaagatttcacaatattcattggtattgtaaaaaaaaaatactattgtatggatttttgtattgctgttaagtattgttttgtgtgtgtgtgtgtgtgtgtgtgttggaacctcctggggacatgttatattttgaagtgattaaactatttaattgtgtgtctatattttggagtggaataatttcttcattaaaaaatgtttttaaaaacactatatcttgggtggtttattcctttgtttcagtgaatctttcctaaagcaacgtggagtcagtctgttgaaagaaggaaggcaggtacttgcagtttaaagcaggacccattgatggaatattgagccaccgaggcaaaatagctcaccttctcttgccttgggggatgcatggtttttaccattctactgttttattagcatctgtgagcatctaatagaaatactattctgctatttatggaaatccttattataattgatatggaagtgagtttgaaattctaacagctaacatatttcatgtttgtatcacacactgttcttaacactttatgtgacttcactcaattctttgaatcctctgcatctagccatgtattctgcaaatattaagtgctcaatggtttttttgttgaattactgaataaatgaattagtggtg

SEQ ID NO: 8121 - DNA, 16523 bp, Homo sapiens
ctgctccaccccgacgcacacgccgcaggactccctcacaggagtagggggagatgtacaagaggcatttgcacaaagtaagtggctttatttcttgttgtggtctgcttttatgtggcaaataggtcaccaaggtctattgagtggtcaagagttgtcagaaccacatgtgactattgtagggtctttcatggctggtgtcagagcctggcctgccagccattttgggaactccctacaccaatttgttctcacttcacgattttaccttcctttggcttttgttgccctgccttattttttagtaagtctttgttcatcaaaagacaggaaatcttttcaccaatacccccagaaaacttcataaatgtaatctattttttttaattcttagagattttcttatctcatattgtcttttctttatattaaagtcaagactgagataagtaatcacagctctttagcaatgaggtaaccaagaaggacatttagtcatttgacagattccctgttctgatgccccgaagagttgaatcattgcctctgtaaggcagggctacagggttaagcctctgcagttagaggagtacaaagagggatggggatgccagccagcactttcccatgacagggagagtaactttattaatttagaaatatttttaacactttttaaaacctcttcttactatcactttttaaatttatagagaataataataaaaaaatcattctgtagaccttcaccggcagctttcattcccagaagtaaccactattaacagtttgatccttcccaaagttttgcttatgtgtaaatagatatgtttaaggatgtgattatagacacatactctttttttcacacaaataggatcatgcattgcattttggggtctgcaatttgcattttctttaaattagcaatatatcattaacattcttcgaagtcttcacatagagatctaaggaaaagagagacatgtttgaatatgggttttaaggcaaaagagatcataaacaaagttaaaagacagaaaacagtcttgaggaaaccatttccagcatatgtgtcaatcaagtttcataatttcagttatacaaaaatcatgtagagatcagaaagaaaagacaccaccaaaacaaaaacaggtgaaatatacgaatagacagaagaacaaagagaaattgccaataaatatatgaaaagatgttcaacctctaattacagaaatataaattttaataagtatcactttttgcctagaagattaaaaaaatgttttgaaacatcataatatccagggatagcaaaagtgcgaggaaaaaggtactctcgtccatgtagaggggtgataaaatcttaacacacttcaatgagagagaatgatgaactctctactctgagggaaaaggaaggatctatattagaactttttcttctaggcactgaatataactcaagagtttttaaaaatgtaattcacaaaataacttttaatttttagaaagaaaatatcccttctcttaatcatattttaaagaaatgtactatattttaaatcaatttgtgatttccattataattaatgtttttacttaactactctgatttttttaatttaaacatttattattttatttagttagtattactttctgaaaaatgacggaatgaaattccattaacccttagtgtgcctgaaacaaaataataatctttctctgccacaaagaaacatagtctaagttccaatttatagtaccagacatgcatctgcccatgtcttggcagaagaaacaagaatcctcacccctttctcacgctctgggggcattcagtgcatgtgggtttcccattcccaagtggtacttacactggcaggaagagctccaagagccctgataggagacagcgcatgtcctagtagagaccagaatctaaagggctcagccaccaggtaagggcaagaaaaataatagcagctaggaaggcgcagctctcctggaaaacctgatttttcatctgtgtggattattcttaagaagggtgaccacacgcactggtttacctggaaccatcccagttttgccaggtcagccagccttattcatactgctctctttcaccttcaaaattgtccccatttggacaaataatatatgaaactccatcattagccatgtcttcttactgcaggacccactgccctaagcagtgttttgttgttgttgttgttcttgtttcaggaaatgaactaaagcacttctgaaaaggagaagtcttagaagttttcttgctttaggttattaatgggaaggataaataaacaacataaaaatttaggatagaaggaagctttggttttttaaattatttcttcttccctgaaggttcaagaagaaacttaaggaatgacttgctagtggctgcagattccatcactaacactatgtcctctcttgtgaaagagctgaattctggtgagttcctgattccctctcatttgtctgctcatcatggagggatccataagtgctaggggtctctcttagagatctgcttattgtctaatatcaaaagattctttaaagctctatgtgatattttgttggtctattcagatttgaggggttttttttttgtttgtttgtttttggttttttgagacagggtgtctctgtgttgcccggctgaagtacagtggcaccatcatagctcactggtatgtcaaacacttgggctcaagtgatccccctacctcagcctccctagtagctgagactacaggcacatgccagcacgcctggctaattttttgttgttgttttcatagagacagagtctttgctatgttgcctaggctggtctcaaactcctggcctcaagtgatcctcctgcctcggcctcccaaagtgtgtgagccactatgcctggcctattcagattttttaagtaatgtttatattttgcttattaaaagactattaacacatactcaatgtagaaagtttgaaaaaggcagagaagaacaacgaaaaatattcaaactgacctataattctggaatccaaagacagccactgttaacatctatggtgacctaaaacaacatgatgctaaggttattttatagggtcaagtgtattatttatctttttttgagatggggtcttgccttttttccccaggctggtcttgaactcctgggctcaaacagtcctcctgcttcagcctcccgaagtgctgggattcccagcccttatctatttaggtttcattaatttggaatgcctgatcatttaaatttgaatttcaaactgaaatttacctttgcaatgtctctgaagatagatctgcccagaaataaatagcataaaatttaaggagactttttatccttttaatactacaaagagtgttcaaaactttagcagtatgaatatgcaaataaatatcttaccagtcactaatacatctccatctattccttaaggccgacctaccaagagatttgtctggcaagactatggtcttacagctgagattgcaactataagaaataaaacttcagttttaaaaaaatcctggacttcgctttcttaaagcctctcaattgaaaattgttgctgctaatttagattaagattaccaaacggaataaaaagatagtagttaatacatcatgattaatggcaggtaaccactgccctagcaaatgatgagtacaaagttattcttggtgtagaagtcttaagtactgttagtttatactcataattctttaaagtattaagtgatagggttcacttaatattttaagttcatattttaagcattttaggtgaatattttatggttaggattaggttttaactcatagttcttaaattagtgtaatattaagcaaaagtaacaattttagttaagtctcttacagaaaggaaaaagtagaagtcttaaagagttaagtcagttactaagatggcaaaaattcctcataacatttctgagattttaaaaatgctgtataccaaatgattttatagtaattcatgtcaatatcaattcttattttgaaacaataaaaatgtatttgattaaaatatgataactggttaacattttacacagcacaggttgatttgtgaagcctactcctttatttgcaggtcataaaaaaatctaacgagtcattctttatttcttcaattgtatctgctagaggttgggagtgaaacagagagtaatgtggattctgaatttgcacggactcagtttgaggatcttgttccctcaccaacctctgaaaaggcttttctagcgcaaatccatgcccgaaaacctgggtacattcacagtggagctaccacaagtaccatgcgtggcgacatgtgagtatcttccgcttggaagcattttctcagtaacaaaacaatctgtaggagacaataagaaagtaaaagcataattgtttagggtttttttaaccttcagaaggggtgacatagttttctgttctgccagagatatagaagggtgctacatttaaattcggcattgtaatatttcccctcttacaatttccagagagttatcaataacctaaaccaaccagtgcctatcaagagcctgccttgcccaaggcacattgctagtgctatacaaaatagtattaaaaaactgctgccacccttttaggactcacagactagttcaggagataaatcatcctatcttctgaacttattgtatttgcacttagaggataccatgacattggagaggtctctgtccagaattggtgtaaacaacatcacataagtatttggaattgaaataagtacatgtataaaatctcattataaagaaatccagtttggttgacttgttgaatttgtatgaatctgaccctccaaagacttatttgcaaaagttttcacccagttctggagcttgtcagaaaccagcagcatcagtaacgtccccactagactttctgtgaccctggatcagctcaaattagtcaacagagaaaaccaaagctgagaaacaaaggcaaagctgggacagagctgcagagcccaacttgggagaaaaaggagaaaaacaaaagaaatgaagaaagtggcccattaaatgaccatggttcatggagttatgggaaatgtgggcaaaggctgacccaaaagctgggggagggagtttctgaatgctaaaaatacctcagaagggtgatgttgcttaatatgaaaagtacttcagactagtctataaaaataaactggccattttaaagactcagagaagaaactaaacagaggcctttctggtgtttggctctccatccaagcagtgaataaacaatcagtaatcatggagaattatcaagaggtgtggtctgagagtcagctatgaagcagcagagagtaggatcaaaacaaaaccattatcatgggacttaacatggcagtacgctgctgcttaatatagtttgctttcttgtcctttcttctgtattctagaattgttggatttgttattcaaaatggtgaattagttgtcatctgttttgtctggtaaattcatatctatttgactttttattattaagcatttatatggcagttagctagaatttccttgtcctaattctaaaatccaagactattgaggccaccctaatctgctagccctggtatgctgagtagcagtaccagctaccaacatgtgactcaggagttagggaaggaaagttaacagagtcctgggcagacccatttagcctggccccaaacctccaaaaataaccagaacatgttgtacagctataaataaacgcaaacaacgacatttaagttccaacctagaaacttcttcttgaccacttatttcattttagggaataatttaatatttctattgtctaaacatgtacttgtgttttaccctgagactcttttagtcctatgatttaggtagtgagtttatgtccagccccatgaaaagctttgcatagtctaggatgaatagatggagacagagtcccacattagggaatgaggtcatttttatctatttatttgatagtggaattggataattaaaatgcttttttttttttttttttttttttcagatttagagctaaggtcaagagttatgggttagtagccctcctggcattgactagctgatattctaagacttaattctataaaaataaggcatgaatgtggtatgcatgcatatgtgtatgtgcatgtatgtgcgtatgtgtaacacaaaagaggttaaattataaccaaatgtccttaagcattatttcactagagggctcactctccacacagaaagtgatcttgggttctattttaaacaagaataaaaagagccctcagattgggaaaactttgtatcccctcaaaagatgtttgccattttttaaattatagaacatttaaagggccaacccattccagtaaaccctaggaaaagataaatgaccaatgatcgcaactgccataaaaaaaattgtgtatgaaaataccttgatcatatatcgcttcaaacctccaaaatgtttccaagttttttttaggtattgctaaagaagacatgaaagtgacttggagaactaaggggaaataaaggtgccaacgaaactacagctcacacatgaatcccgcttgtaattctcttttaagatttgctctaacatgtcatctgtggtttattttcagggttacggaggatgcagatccctatgtgcagcctgaagatgaaaactatgaaaatgactctgtccggcagctggagaatgagctccagatggaggaatacctgaaacagaagctgcaagatgaagcttatcaggtacagggatccaggcccaccccaccccacctcttctgcctcaaccccttggtagctgggtctttgacatgacttgcagaatcagagccttcttccttccaccctcccttttcaaaatacactgatttcactccttaatccgtgtcttttagacagtaaacattttaaatacttcttttttttttaagacagaatttcactctgttgcctaggctggagtgcagtggtgtgatcttggctcactgcaacctccgtctccctgatttaagtgattctcctgcctcagcctcccgagtagctgggactacgggcatgcaccaccacgcccagttaatttttgtattttttagtagagaaggggcttcaccatattggccaggccagtcttgaactcctgacctcgcgatccacccacctcagcctcccaaagtgctaggattacaggcgtgagccactgcacccactcttatagctgtcactcaccatgtattcttttaaattctgccctagaaagtgataaacagccttcttatattggaaaaaaacaaggtaactaacagtccagactctttcaggcccattaagaaagatgctttttctcataattatttttaaatggatacaaagaacagggcacgaggaaattgaataagcataaacccaccacttcccttgaattatttgccctcagtcttcctcattgcccacctcatgccaagtgtaagtaggagaatggcaaaattcctggagaaatgttgggggaactgcaggcctgtgttcatcaaggtatggacggacagattttcagatgtactggagtatgttagccacctgaaaattcactgaacatgacatatacaattggcaataaatgtaaccagcgactcatcctaaaggccatgcatttccccatggaggtcgttctactaccttgtttgtcttcctggtatgttccttttccctttaattcacaggcgtttacttggggttctggtatttcagggatgtttgcctggttgaacctgggcctcaatggttattttatcctgtcagactttctgtccagtggccagacaagttttctgcacattcttttgtttttctttttttcattttttttttctttttgagacagggtctcattctgttgcccaggctggagtgcagttgcccaatcatagctcactgcagcctctaactcctgggcacaagctatcctcccacctcagcctcctgtagctgggactacaggtgcacaccaccatgcctggctaatgtttttattttttgtggagtcagggtctcaccatgttgtccaagctggtattgaactcctggtctcaagtgatcctcccaccccggcctcccaaagtgttgggattataggcataagccaccatacccaggctttctgcatattattagggcagcagtgccctgtcttattttgttattgaaaaaaaagggaagcagagagaagaaattatctcctatttctcatatgtctatagataaagccttgaaatatttttccaagaagattgtagcaggagggaaacggaagcccaccaattccatcccagcaatataaaaacaaagttttgcctctttggaatgttccatttgccttttcagtttaacgaccacatttcagaagcaactaaaatgttggtctagccataccaaagaaagagggtaaaagaaaaacataagtgactctatatgtagagccgtgctcccatgcttcagaaacaaattcgcctgattgcaaacccatggagagtgcagttttccttgcgccttctatggctcctccacagaaggaaatcagcctggaatgaaactgccagggtgtctctgggaatcctcagggatggcattcctacacatatctccttaggctctgctgtgtagaaggaaagaaaaatgtgactaaataaccaatgttctggttcatgctattagaagcgtctattaggcctccctctttgagctcgtgtcaccttctgtatttcagtggcagcagtaactgaaattctaggggttcttttttttctttaagggaggcaggcttacaccattccatataaaatattagatttttattcattttaatgaattaaaaatgtaaccttctatgagtaaaatgaagggaatttctactaatgacttaagattcaactggagtttttaccatcgctggtaaatcttaagctccctctccctctcctttcttttccgtgcctcatgacttccaagaaaaggacagggaagaagctgggagactataacaggcctgtgtatctccactcaaaacatactccctggaggatgtcaaagtggttttccttgaatgctctgtgagcatacggttgttggatggattggaacgctactctcactcaatagactctctctctctctgtgtgtctttgtgcatggcttcccgccaaataattcaccagcttgactgcatcacagacttgacgtgtcacctttctcgtttgtgtcctttgtcacccacaggtcagcttgcaaggttgaatgcaatatccttttatcacactcctctcaagtaagtaccatcttatttaggaggaatcatggccactgtacactgaattctgataacctgtaatgcgaattcacaatcacttctcttagtcatttctttctatgtgataaaataccctccttaactgctgatatcgaagagtcgtctcagtctgtggagggtttcattataaaccagtggagatttgccagacatccttgggagttgacttcttactctattagctaggaaaattggcacaaagcttctaaacctagagacgttccagtaatcctctgtggctatgaaacttaccaataagtttgtcacatcaccaatccatgacaatatcggagtttgtagccgctctagcacttgaaaaggaaaagtcagtacctctagagatgggccagcttgttagtcatactatacctcgggctcaagagatcaaatgtgtgtgccttaacgagtgaaagcaaaatcatgcattaataaagagaacaaaagagcccaaacagaggaaaaattctgcagccttatgtttttggaatacctgattcaaatccattgtggaattcagcagtatataaattaatttaaaatattattttcatggcatgtgaaaccactccaaagccctacctaaatatgtggaaaattctcagtaattttttaatgcagagagattagcactggactggcagcatcacttgactgtagtggtctgaagcttaggcgccagactctaatagacccatttcaaatacgggtttcaccaaatcctagcagcagaactttgggcaaattattaaacccgtattacctcagtttcctctatacaacatattgcataatagcctcatagaagaggctggtattatgtatcaccacagaagaggccggtattaaaaaccatatcctactcactgggatgtagtttttaaagagcttggcatagtggaaggcacattatcatttattatgaacattcacatatatgcctgcccctatgttcagtgctttatagcacttcaacacctggcagctgccatattgcttacctaagtgtacgggaaacactgggacccagaaccagcttgctttctcttctacttttataaacaaggctaggatgcagctacatgtgatgacttggcacactgtgggccacactgttccgtaagtctagattttttctctggctccagctaatagccatttagatgcctccatggtagttcaaagctaatatacctctcaaaggattctggctgcactggcccaaacatttgagctttcccaatcatggaatcccataagtctgtactgcagtggacagtaaatgctatcaatgttggttgctattaataatttgaaaaaggaataaatatctgttaagtgacatactaattagtaaagaatacatgctagtgcaaatgctactgacatcctgtctcagtcctcaggttaaaattaagcaagtgaaaatcatggagtaattgctatgatcatatatattttatgagcgaagaggaaggagctcattgaccactctctattctgcctctcctggatttgagagtgccaccacacatgctctcctgactcattacaagtagagtgaaaaaattcccaggagctgtttctgaaaatattcactccagttataacaaatttagtcccaaggggcaggccttttcctttaatagcactttctttctcttagcttcagcaatttgatcattgttgttctgcacattatttaaacatcagtagctagttcttagaaaaatatttttgaaagtctaataaaatgtgcttgcgttaaacccagataaaaagtggaatttggtacctaaaagccaaaaatttcagtactctagaagttcctaggccattttttaaatctttggttgcaaatttggcagtgaaaaattagaccgttgtagtctttgccatttactgcatcctgtagcctacctagctggaattccacagaactctgaacaagaaccagcctgtcattcaatcagccacataggcaaattcatttaaaacctgatagaatgttgtaaaaactagtggcttttcatttttgcagctggttctatcctattgtactttttcttaatgtaaccaagaaatgcaggtgcattttaggccagtttatttcattaaaatatttttgtttagactttctggctgtactgcaagaccagaaattatcccaaagtatatgtgtctcttatccaagggttctgaagccagattcatcagcttgacattagttagccatccgccaaggcagagagccttgcattgggaagaggcagaaggtggacgccagagacatagaagatgcaacctctgctcaaaaagagctttaggcttatttgaaaataagtacacactttcaacatacaatattaaaaaaagtgaatagtttaaaacctggtttattggttttcaactagccacttttgaagaaacggtatacgtaatggcactcagcttagggtcctccaagactcaattttagcccatttaggtattcaatttgtccctgttacatcctgtggccacatggtacaccactgtccttggccactcacatccaagtggaaattagaggattggaccatccaaagtagattttttaaaaaccaacgtggcagcctaatcatgggtcactggttttatctctttgtccaaaagacagcacaaatatttctgtttgtgttgcttttcccctccagatgcctctggtacccactaagaaagagatccacatggaggacttcctgtcctctcttccagaaggtgcaatagcacagtgtcctaggactttcattcctgattgtcgtaggaaaggagtgtgtgtgtgcatgtgtgtgtgtgtgtgcgcgcgcactttcttctatattggggaaaggggggatcctaagtttcataaccctaatttagaaacaatttgcatctttaaaaaaaattacacattccttattcccaggcaagctatagtcagacagatgatgaaagtaacatgaaaactggtgatgatggagagccctgtggccacacagaggaggaagacagcagcctggcagcagcctcaccgaagagaggaaccaccacacccagcagctcctgacagacccccacccctaaagatgtgtcctgatgactatagtgcagctaactttttgttctcagatttgtagtgcataggtgtgtgtttcaagaaggaaaaaaaaagacttctgttcaaagttaacttatcagctacatcctctgtaacgtggttcatccctggttaaaaagcaaacaaacacaggctgaaaacccatgctgctgttatacacaatggcagtattaacaagcattttaaacctttgcacatgatattgaacctgttcagtttacaatgacaatattaatactgtttatagctagaagtttgatttctgaattctttgagattttagcaaaacagtttattatacactgtacatttttttcacagcaattggaaaaaaacaaccacttgcaatcattcaataaccctgaagaatttggttcctgagtgtacaaactcagagcccggaagccaagaagggtccttggcctgcacggtctgtagttgactccaagtctctgtgagcagtgacttgaaccaaacacaccaggaataatccattctttggggcctctttccaactcgaggttgttttctttcaagatactctaatcagccatagaatttagtgtaaatatttttttttccaaatagatatcatattcaaaaaaggcagcattcaaattatatagaatctagtttttaaaatcagcacagatcttcttaaaaactgtgaactatgttttgaaatactcgttactaaagctgtttataaaccacaggtgccataagatccccaaacggactaaagttatctctgctcttccatggtcttgttcctctcgttttggctttaggaagcatgtctttaacagcaccgctcgttcacaagttcccccatcaagttgtttggaggccttcagctttaaatgtacaggcttaaagtgcgcttgcaaacgtttgctctcctttttttctgaatgttgattgccttagctggccacctggtgttctgcatgtagccttctgtggtcatgtgaaaggagacaggctcttctaagttgagttgggatttttgcactcagtgaaaagctgaagtgcaaaagagctatcaaagacaagaggataaaagactgggatagtcttttccaaggaccctctttagagggccctaaagacctcctttgggaattctggggaaaaagaaaaagtaatcttctacttgcttcaagatttgatttttttaaaaaagcctgcgacctattcaatacattatgcttaaattagcagtttctctggaattcctgtctctcctttaaaagaaaggagagaacattttagaacaatagttctcaaagtgtgttccccggacaagcagcatctgcaacacttaggaaggtcttcgaaatactaatttgtaagccccacctcaggcctactgaatcagaagctctgggggttgggtccagaagtctgttttagtcaaccctctaggtgattctgatgctcgctaaaggttgagaactactgctttagaatgaagtcgtataataaagtctctgaaaaggccttattcagaataagcaagaaaggttctgtgattcacttttgcttctggggctggcaaaaaccttctctgaacccacacaccaagttcgtagttggtaggtgcccagccaagtcctgacatcttcatgccccctctgcagagggcggctgtacgatgttcacatgtctgcgtttggtcagacatcatctccttggctgccctttgaaaccaaatcacttgccttggggataaagtgctcaattggcattagtgagaagcccatcctatcccttgacatacttaatcatatatctctccagagaactcacctgacaaatgtctctgagcacaggctgacaccaaagtggcacaactgcacagttctcagatttctttgcacagattgatttttattgcgggttttgttggggtgtcttaatgttcatctcttttccactgcccatcctctgtgaacccatacctctctagatggagcaggtggccactggtgcctcatactcagtattgaaaaccactacatcccagctacctataatgctgtcagctcaaaatcatagccaggtagttcttgaactcagaacttaaatcctgcacgtggcactccaccactgactggaccgagctggcatatgttgtttctttgtgtttctacatcaaaatgttcgtctaagatttgaactgttctgctgataaccttccccgttgtcatagctatttcattgccaaccaactccatcacatggttgttgatatcgtcatataaagccattgcaaggactctggaaactgccgccaatgaccaatttctgactaaccagccaccttttctctctcttagctccacgtcagcactgagaccagactcgagcacccctgtcctgtaagcgagacaaaatggcgtgtgttattttggggttttgtgttttttggtgggtttctttccttggctctccagatttacttttggggcctgttctaagtgcaaacccagcaagtttcacttgtcctgtccattagatacaactacatcttgcgggggttgtttctttcttgttccacaatgaattgcacatccatctccatcagagctgatagcctgttaataagcactggtctaacacagccaaccctcctccacagcgccatattaatggaggaggggaggaaggtgaaatctactgcatgggattcaggaaacagttgtggttggtcaggacggaagttggggtaagtttggttggtcagagggagttgtgctggagattgtgaaaaatgggttcttgaatgatctactataaggcagggaaggttcatttgtaagtagtaatgtgaactgaattgcattaagagtgtgtggcctttgttgtgatatactatgtattttcttatatgcatgagccaaactgttgcatcataatttagcactgatgtctgcttttattttgatcatctttgtccacccttattagttcttggctgttaaccgtagatagatcttgtaaatccagcaacctttggttgctgcattccccttggttcgattccacgcaaggagccacaagtgagaactccactgtccttagaagaaagggcatttttacttttgaaccaaaaagagaaaaaaaaatcagaagtgttgcatcttgaggcgaattaactgtaagacatttttaattatgactactgcaatttgacaccatttgaaataatcaattcagagacactaaagatttcacaatattcattggtattgtaaaaaaaaaatactattgtatggatttttgtattgctgttaagtattgttttgtgtgtgtgtgtgtgtgtgtgtgttggaacctcctggggacatgttatattttgaagtgattaaactatttaattgtgtgtctatattttggagtggaataatttcttcattaaaaaatgtttttaaaaacactatatcttgggtggtttattcctttgtttcagtgaatctttcctaaagcaacgtggagtcagtctgttgaaagaaggaaggcaggtacttgcagtttaaagcaggacccattgatggaatattgagccaccgaggcaaaatagctcaccttctcttgccttgggggatgcatggtttttaccattctactgttttattagcatctgtgagcatctaatagaaatactattctgctatttatggaaatccttattataattgatatggaagtgagtttgaaattctaacagctaacatatttcatgtttgtatcacacactgttcttaacactttatgtgacttcactcaattctttgaatcctctgcatctagccatgtattctgcaaatattaagtgctcaatggtttttttgttgaattactgaataaatgaattagtggtg

SEQ ID NO: 8122 - DNA, 523 bp, Homo sapiens
aacttttggaggtgatggctatgtctattaccttgattgtggtgatggtttcacaggtatttaagtatgtccaaactcatcaaattgtatacattaaataggtacagattattgtgtatcaattatacctcaataaaactttaaaacaaacacatacagatataaatcttgcacgcacagatggaagaaatagagtccacagtgatgatcactccttctattcacatctctccctcagaacctctgtgagtcccatgcaatggaagattgggtgtttcacttgctgaaagatctgttttctttacaggatctgtgagtctggctctacgcttcaagaatagcatttttgggaaatctgactctggtgctgaaagtctgtgctcacagggttgggttgatttgaagtccatggaaacaactgtcaacactctagacgcactagagagagaaattaagaagttctccatcaattacaaaggcaaatactgacctgagataatcgtgagagggaactcacacagtc

SEQ ID NO: 8123 - DNA, 523 bp, Homo sapiens; identical to SEQ ID NO: 8122

SEQ ID NO: 8124 - DNA, 13558 bp, Homo sapiens
ggtgtactctgtgtgaccgcgcctatccctcggactgtcccgaacatggaccagtgacttttgttcctgacactccaatagagagcagagcaaggctttctctcccaaagcagcttgttctccgtcagtcaattgtgggagcagaagttggtaagaaccttggaactgtaaaacactattacatctcttcttcctttgtagcgtagagttgtaaaagtggatgtgtataatttagtaattatttggaccaaaagtcaatttatggcttaagatttatgcttttatggaatattagtcttgtccactgatgatagcaataaatcaagtcaaaaactttattgggaaatctctcctttgttagaatcagtattgagtaaagcaaaaaatcctagactgagtctttgaagatttaacttttattctcatctgtctcatccactaacaattattctaacaacacatttcttaaaacttagtttcttttatagaaacatggaaaattcaccttatgacacaactttagatcaaatgtttgtaaattatataatgctccttagataaaaggaataaagaatgtagattgccagactttacttacccatatttgaatttagcatggcttctgagttactgcgacatttctttggaaatataaaattaggttcattattcttttagctgcagtttgggtgtgagtcatttcaaagcatcaaacagtttaggtaaaatagagcagtgctttaagcacaaaagattttagaagtctgatttatttctatagtaattgctttatatttttacaatagaataatgttttctgttattttttatttatttatttttaagagactgggtctcactctgttgcccaggctggagtgcactggcctaacatacggagtacagtaactcgagtgcagccttgacctcctgggctcaagcaatcatcctgccgcaaccttccaagtagctgggactacaggcatatgcaatcatgcccagctaattaaaaaaaaaattttttttgtagagacagcatctcactatgttgccgaggctggtttcgaactcctggcctcaagcagtcctgccttggcctcccaaagtgttggctcattatatgtgtgagctacaaacttttttatatttaactccaaaataatgtatttggagagacatgaaaagattccctttggataaaactaggttcaggaattcctgatatttcttcttactcagcatttattgtgagccctatgttatctgttcattacattttatatatttacaggctaggacccacaaggcttagtcacctctgaggaatgctagcatattgttttttttatttttttattttttttgagacagagtctcgctttgtcacccaggctggagtgcattggccctatctctgctcactgcaacctccgcctcctgggttcaagcaattcttctgcctcagcctcccaagtagctgggactacaggcgtgcgccaccacgcccagctaatttttgtatttttagtagagaccgggtttcaccctgttggccaagctgatctcaaactcctgacctcaggtgatctgcccacctcggcctcccaaagtgccgggataacaggcgtgagccaccacgcccagcctacatattggttaaattcattgaaaataagattctttgcatgggtgaagcacctctttcttctgtatcttgctgtttaaatcattgattgtgtagttggtgtccttccactgacaggtgtatggactggagaaaccattcctgtgcggacttgctttggacctctaattggccagcagagtcactccatggaagtagcagaatggacagacaaggcagttaaccatatctggaaggtcagtcctgatgaaacttttctgtggcttttggctgtttttcttagtaagaggtagttaaaaagttatgataaagtcaaaatcagccagaactgatacagtgccattcactggtcagtcatttatttcacgtacatttttttaaatgttacattcatcattcttggtagccaaattataacatacagcaaaacaccagctactggaaatagaggacaaactgtttttgtctctgttttgtgagttaatccaattattttaaccatttaatgcatttgaattacttgtgactgctgaggccacagactttgtttgtatgataaaagtcttactttgtaattaaaacattcctcaaatgtttatcttaggaaataattctggaataagaagctaagattatttttctagttttctttttttttcttccttgagatggagtcttgctctgttgcccaggctggagtgtaatggtacaatcttagcttactgccacctctacctcctgggctcaggtgactctcccacctcagcctcccaagtagctgaatttacaggcacttgccatcatgcccagctaatttttgtatttttgtagagacggggtttccccatgttggccagactggtcttaaactcctgacctcaagtgatctgcccacctcagcctcccaaagtgccgggattacaggtgtgagccaccgcacctggcctatttttctagttttctaatgaggggttagaaatacaacattttcacatagatatctattgggaatgatgcttgcgaaattgaagtaaggagaaaatgggtcttgtgatctttggaaaggtaaggtaccactgtcattgggaactttaaatttggaatgctaggcccaagtgggaaaatcatgacaagggatgatcctctgcccttaatggacattcagtcattcagtgcctactgtgtgataggtgatgaagacaggtggacaggtagactggttttttgtcttttccaggcaaaggttgaataatcaaaaacaaagtcagtctcttcactgagcactaactgtaggtctctgatggtctttatgtattgctggaaatagggagaatgttgaaatgatagcatgttggagaagtaggaatatattttcccactaagaaagctgggacctactgcaaatgagtaaatgaggtgattgctggcctaagtgtaatgtagtgctttattgcatgtcagtgcatttgacatgtgtgcttgctttctgttggcagatataccacaatggtgtcctagaattctgcatcattacaactgatgaaaatgaatgtaattggatgatgtttgtgcgcaaagccaggtatgagtagtcttggatgagaaaaaatagttaccatttagatgtttttcaataggaagctttgcataaaagaagaaagagttaagaatccaaattacaccaacacctggacatacttaaagcccaaggcagccaggcatggtggctcacacctttaatcccagcacttggggtggctgaggtgggagaatcgcttgaggccaggagttcgagaccagcctgggaaacatagcaagaccctcatctctaaaaaaagtttttttcaaattagctgggtgttgtggtatatgcatgtagtcccagctcttgggaggctgaggtgggaggatcatttgagctgaagagttcaagctgtgatcatactatggtggtgctgttgcattccagtctgggtgacaaagtgagattctgtctcaaaaaaaaaaaaaaaaaaggcacttaccaaggaacaatatagttaccactgaatttgaaagtgggtgccttttctttatattggctgttagtccacccctgagttactggagttaattcttgtttagctagctagctctatgtctttgtcatactgttttttaaagacttcattttatttatcttgtttgcttccaataacagactgtagtgtttttgactacaaaaggtcatcagctaatatgttgaagtaagaattctgtttctctacaactgccttctcatagataggacgggaaattacaaaaacattccagaggaaatagtaaatagttctgcctaagctttcatataggattttgcaatgggggaatgttgtacttagtatgcatttcaaaattaatgtgcttgatctattaaatgtgataactcaggaaccgggaagagcagaatttggtggcttatcctcatgatggaaaaatctttttctgcacctcacaagatatccctcctgaaaatgaactgcttttttattatagccgagattatgctcaacagattggtaagttaatatgtgtttataatgaatctggcttagtaaaaataccaaagaccaggattaaagttttggtaatgatttacatgttagctgaagcaaatcatatacctttgtttgtataaatgcaaactattacttgtatttgaggtgttaaaatctgtgagattcttcacaagctgaatgttattgaccaagcaataattcatatgatacggtcttttatggtaggactttggtttggggcattgaagttccttaggctacttttcgagctagcaccattgagatataaattcatgaaggacagcgaagtccctcggtttgatttaacctgcatatgctttctctttgctgtgctgtttcatgatgacagctaatgtttaagagtttgggtatgctataaaacctaaatattttgcttacaaaagaggccttataatccagtatttaccaagtgctttctttgtgcctggtacactattttattttacttatgtatgtgtgtatttagagataaggtctcactctggcaggctggagtgtagtggtgcagtcatagccaactataaccttcaactcctgggctcaagcagtttcctgcctcagtctcctgattagctaggactatgggtgtacatcaccatgcccagccaatgattattaagttttttttttttatggagatggggtcttgctgtgttgcccaggctgatcttaaactcctggcctcaaatgatcatgccactttgggctctcaaagcactaagattgcaggcctgagccactgtgcctggcccatagtacattattttagatgcccttagtacattattttagttttataggaagtgggcaaattggaaatatggagagaaaggagaactggaagcaatgattgttaatatcaagaacaagttttaagattcaagtattgggagataatgagtaatttttttttaaaaggtgttcctgaacacccagatgtgcatctctgtaactgtggcaaggagtgcaattcttacacagagttcaaagcccatctgaccagccacatccataaccatcttcctacccagggacatagcggcagccatgggccaagtcacagcaaagaaaggaagtggaagtgctcaatgtgcccccaagcttttatctctccttccaaacttcatgtccactttatgggtcacatgggtatgaagccccacaagtgtgatttctgtagcaaggcttttagtgatcccagcaacctgcggacccacctcaagatacatacaggtaagttgtgttggcccatcagaatggaatttttgcaacaattagaaaatgcggtagtaaaggctttgtagagggattgtaggtggagttgagatttgatgtcagagaaagaaaccttcgtggtttaactgagattccttggaggctgtcacttccaattattaggatgttctgctttccaggtctccccaccatagttggaaggtgcctgggaaaatgcacttaataatcaggaagttgatcaatgtgtttggtcttaaatagaagcttctgagtctgagtctgagcctctcattagagctcaccccccagtcaccagccagagccagtttctctcctttaatattattgctcaataaatattgccacagtttattttttgagcttccattttctaaatcccatgcaaaccaacacctttcttttagtactttttaagaaaaaaaaaaatttttttttgagatagggcctcactctgttgcccaggctggagtacagtgacaccatcttggttcactactacttctgcctccaggactcaggtgatcctcccacctcagcctcctgagtagcatggactgcagacatgcgccaccacacctgactaatttttgtatttttaatatagatggggttttgccatgttgccaaggctggtcttgaactcctgggctcaaacagtctgcttacctcagcctcccaaaatgctaggattataggcctgagccaccatgcctggccactaactttttttaataaatactacaaaataactgatggctttagctttcttgttggggtcatcttttctccagatcttcaaaagtttcttccccatccttttgcaacagagaccttatggcccacaaagcctaaaattctatctatcctttaagagaaggtttgctgaccccttagaggaatcttatttttgcattcttggaaggattttgtttcatccctggttttgaggcaatattatatgttttaaaaagatagaaaactataaaatctatcttgtaaaagtatgtttccctatagacacgtcctagaattcatgagttttttttttttttctttatgtttgtgttagggcattaggattataagtcatttttttcaagttttatgtatcacctatacattttttaaaaatacatatttaggtcagaggtcctaaaggagatcaaattaatttactagctttagttgcagaatataaactcaggagctcttgagtggtctcacatagacaaccctagaaagtaaaatgctgcttaccagtcagctctgtttcattcctgcctctgctgcatgcacatatgtgtgcctgtgtgtcttggggatgccagcagttgttttcttcacggtgtaatactttgggctgattgcaggtcagaagaactacaggtgtaccttgtgtgacaagtctttcacccagaaggctcacctggagtcccacatggttatccacactggggagaagaatcttaagtgtgattactgtgacaagttgtttatgcggaggcaggacctcaagcagcacgtgctcatccacactcagtaagttaccctgcagccaagacgtcgttcctcaggtggtgagcctttgtgtggctgcagcccacctgctgattgaagggctggggagtcctggctcatctgtttcatgccttggtaccatggtagatgccttctgtgttccatgtagccaagccaaggttggaacactttttttggtgttatcctggaagatttcagttgttggctttctttttcttacttttcacatgtactcttttttcacatctacaaaaacctagagacaaaaaggactattgactgcaagtggttgcttatagttagacgatagtgtgcatgtgagagagtgatggagtgagaagagtaagagtcagcagccacactatggagaacctttggtcctattaagaaaattcaatttcagtccagaaataatggcgagacactgaaggatctgccagcccctgccattttggaactgttctgttggtgtgtgtgtgtgtgtgtgtgtgtgtgtgtgtgtgtttgtctgaattgcagttaaaaaaaaaaaattgttatcttaactgtttgtaagtgcccagttcaatagtgttagttatattcacgttgttgtgcaagcactataggattttaaggaaaggagtgtcatagtgacatacccattctgttaatacaaagattacttaggcagctgaacagaggatgattgagggtggggaagcctaaatattggaagaccaattaggtatttattgcatgaatccaagtgtaattaaatgtctagactgcattagtcacagtggtcatagaaagaagagatggattttgttgtccttagcttttaacaagtgtcagaagaggaagaaaatgttttcagcttatgttatggaaattctctttagaaatcttaccttcactgaaaacgttatattcttaatgtagaatttggataaacacttggctttgataccagttcttctgtctgcttccttatcacaatgcagcctgagatgctaaacagccaaggagcctggatctacattcctaactctcagaaggatattctaaaacaaagacttctttagttccattgctagcatgaaattttacaaaattagacagaaattatcaaatattacatcaaattgtgcaatattggagccaaaagagatccccggatcatctagtcttaacatcctgtctaggcagctcaggttgtgataataaaataccacagattttgtggctcaaacaacgggagagacacagtgagagaaggcagtcatgagcaagcctggaagagggcccccaccagaacccagccaggctggcaccctgatctctgactccagcctccaggactgtgagaaaatacgtttctgttgagagaatgaaagagaaagaatatgagagttccaatctcttctcataaggacactaatcctacatcatggaagccccatcctcatgacctcatctaaccctaattgccttccaaaggctccacctcacactgggtgttagggcctcaacatgtgaatttggggtgaggggggacaaatatttgtccagaagactgcccattataattgcctggaaaatgtgaaaaacaacaattggtgctaggaccccatccatgggaattctaatttaattggtcagagttagagctctggccttggtattttaaaaagctccccaagtgattctcgtggccagccagggttaaggactactgacttcatccacatgcaagattgatttccacaatgtctctggcaagtggatatattgtttcttaaagatcacacaattatagtttgaggaaaagttttgcttgaatcaagtcgatatcagcctctatcctttcattttacttttgcttaacaaatgtggatctggactccttttcagggtgagaagatatggtaagcctctttgccaaactttcatgggatagaaagaaggttttggactgtcaaaacttaaagctggtataagtcattcttataagaagcactgttccctcaaaatggttttgaatgaggctttaggcttcctatggagatcgttggtaaaattttcagatgcttgtatttttactttggggcatttcaaagtggatatagtagtattagcagtctttttatttatctacttaaaaaaaacagctacagccctaatgccaaatgcaagaggagttccccccctagtgtcccccgagagtggaagggtggtgacagaacctggctttgcccttcctgtaagaaagaggaagtgagcagaagaacagtgatgtttactccccaggtcatcttgtctcatggctttagataccgtcatatgatttatgtctccaccctcatacacctcaccatcactcagcggctctgatgctggatgttcgctaggcaacttaaatcttatgtgtccaaaactcaacccagtattaccccatgaatttgatttcctccagtgctgagcagctcattaaatggcaccaccattattcacctcaatggtcaagccaaacaccttgaagtaattctcaactcagtttttccttccttccttcattcaactaacaccttgtccagaccaccagcttttcttctatggatggcttcagtagcctcccagttgatctccctgccactacttgctgtttctcctcatctactccgcaacacagatgaacacacatacacacagttttctgtccgcagtgccagagcaatccatttcaaatataagtcagattgtgcctgtctccactcatacatctctggtggctttccatcgtatttgtgttaaaagctttttacagcagtcagaaggccctttatgatgtaatagtacttggctacctctcccttcaccttttcttacttttcatattctgctttggccactctgaccctccccttgctactccttgagcatactaagcacatccagtctcagggcctctgccttagaaacttctccctccagatgcctgcatgtcttcttccctccattcaggtttctgctcaaatgttatctcctcaggagggccttccttgactatcttatctaaaataggaccccttcacttttacctggcttcgtgtgttttcgtagtctttattgctatatgataccacgttacacatttgtttatgctataatctgtccacttagaatgtaagcttcatgaaagcagggacttagtttacccacatcctatagccctagcatctagaacagtgcctggcataattagacacagtaaatatgtgttgaataaacatctaaaaaccatcagagtagaagatgaaaagtcagacttttggtaggggttttgttgtggccttgggcaagttccttagtagtttttatgcacatgatgtttcccatctgcagaattaagaggttggattagattggtggttttaaaactgctccagggaattctaagggttcttcagtgccatctgttgctagaagaggatgagagaaatgctaaggaagccaggcttcagaacgcccgactgcaccctctcactccttccaggattttattaataacctgctttaactgtttcatattgggctttcataaagacatggggttcagctactcaaaaaaaaaaaaaaagctaaaaaattcctggtctgtgtgatctctaaggttcttttcagctctgaaatgtctaggccagggttactcaaaccttgacattattgacattttgaccgggttaattttttgttgtggggctgccctgtgcattgtagaatggttagcagcatccttggccttttcctactagatactaattataccacccctccccagtataacaatcagaaaggactccagacattgccaaatgtccccatagaggcagtcgcccctacttgagaaccactagtctaagaaaaggacagaaaaatggtaattccataaaagtggcatccagggaatacaaataacggtgtaatgagataccattatgtactggctaattggcagacattttcaaatttgagtcttccagttgagaatatgggacaaccagaaccgtcaatgatggatgtgtatattgaaacaactacattggaaaaccgtttgtcattatcttgtaaagttgaagatgtgcatatcctttgatttagctatatagttcttgggtatgtgccctagagaaacatgtattgcagagcaccatacaagtataaaaatgttcaaatgccaggtacagtggcatgcacctgtagtcccaggtacttgggaggctgaggcggacagatcacttgagcccaggagttcaaggctgtagtgcatgatgatcacacctgtgaatagccattgcactccagtctgggcaacatggtgggaccctgtctctaaaaaataataataaaaatttaaaaaaatttaaaaacgttctagcacttttgcttgtgataataaaaaactggaaaccaccaaaacattcattagctagagacaaatccagtaccatagataagttgtggtgtatttgtatatttgtaaatagtatacagcagtggaagggaacaaacaactgatacagcagcttgaatgaattttatgagcatcatactgagagaatgcagcaagacaaaagaaatacatatagaatttacatagaatttgagaatttacatagtattctaaaacaggaaaaatgagcctacactgttttaaactatacatgttttatgagtcttctgtatatcacctatgcaaaagcctgattcagaaggatagagctgctctgacaaaggcctgcggctatgaagaataagtgttgcctcagttgttatttgtaaccccaaatcaaatgttttttcttgtgttcctcttagagaacgccagatcaagtgtcccaagtgtgataagctgttcttgagaacaaatcacttaaagaagcatctcaattctcatgaaggaaaacgggattatgtctgtgaaaaatgtacaaaggcttatctaaccaaataccatctcacccgccacctgaaaacctgcaaagggcccacctccagttcgtcagcaccagaggaggaagaagaggatgactcagaagaggaagatctagcagactctgtggggacagaagactgtaggattaacagtgctgtgtattcagcggatgagtctctttctgcacataaataaaaggaaaagaaacaagcaattttggatgaaaatgcaaatggaaaaatacacataaccagttatctactataatggtttttatataaaatggttcctgatttattttcagccagtaatcaaaacagactgggaatgaataaagcacttacagaagagtatcctaatgaaaacactttaaaacagattgggaaaactgagcatgtgtcctgttttaagtggtggactgggagggaagtgtcaacttctgaggtctttatttacatgataatctgggagatgcatttatgcctgaatcaaagctgccttctgctcaaacaaatcagatttatttcacattcttccattattccattttcctgctggtcctgtgacttggtaacattctaaacggtccttgccccatagccatcctgattgctgatagtgttttatgcagactcttgtgacttatactcaccacagaatggattgggacacagcagcataagtgtgctacttggcagctagtaagtttaaagcaggacctgccttaactgctcctggccacttggaagtttagggtagatcttgttttccaaagtttcggcaggtgcctggagggcaaataaaaaagcagcagtcagtcagtagtcagtgatggagagaacaagaggagagatgcctggcctctgcccaagaaattagctttgatggaagcctgagcaagtcacctggttattgtaacgtggagatctttgtaggtttagacatggctccctgtctccagtaaacatccagccattcagacaaagggggcctggagatacagagagcccaaataatgcctgctggattgtctcctgatgagtacatgtggactcacctgaggaagggaaggaagggaataatcttttatgtttcatttaccttatgaaaagtgttaaaacattgccaactcaaaataacattatttaatgcatgtgcaaagttaggtcttcccagttgtctcagtgctgaggaacctcatcagagaagcatggaagatgccaaaggatttttggaaggtaaagaaggctgaatagtgaccacatgggcctgttttcagggtcccagcttagttaagtcacccatgcacctggtcattgtgtctcccatgcacatccagcgtttctcagaagcagacccacccttaagttgacaggattgatggaacatgctctcctgctcaaggcacaacctctgggctggagtagaggactctggtgggaaggttttgctgctaatgtatttatggaatgaatgtatttcattcaaatctgtattcctctaggaaggattaaaattaaacttttttaaaatacagga

SEQ ID NO: 8125 - DNA, 430 bp, Homo sapiens
gtacgatctacttaatgtaagggataatgtacttgattgttgaagtaatatggtgctatttttttcttttattattatttttaattttttttaaacagatgggatctcactgtgttaccccaggctggtcttgaactcctggactcaagtgatcctcccttctcagcctcccaaactgctgggtttacaggcgtgaactaccatacccagccaatttttcattagtgtttctcttatgcactgaataggaaacttgtcctgttggatcaaaagaaaaaaaatcagatcttactgaagtctgaagagtggtgtaagagtaggtatatatgttagtgtaaggaagtgagtctttgataagaatatctctattagaaccgtgcttcttactggatacattttagtaattagcatttaaattaaaacctggggc

SEQ ID NO: 8126 - DNA, 2714 bp, Homo sapiens
aaccaccaggtgggccaccttccctaccgccaccccgaggttccagtggacatcaaaacctcggctccatcagaggctccaggactccgatcgggacagcgcggggggcgaggccagggtgagggcgcggcgaaggagagacgcacagcgcggggcgggcaaggagcctcccttccgcgccaaggccccccccaaccctcgaggcgcttggaccgtgggatagtcctccggcggcgcccgagctccggccccgcccccgctccgccccgcgcctgctattggcggaaagttccgggccgcgccgcgactggccgacacgccgcaggccccgcccccttcccgacccgctccaaggcggccccggcgctggggctgcgcggcaggcggagcggccgcgggcttgggggcttcgccggggccgggcggccggcgcccccggctgctcccgccgccgcccggacccgcgccccgccggggcagcggtggtgagagccccgactccccggacgccgcccgccgtgccatggggttcccggccgcggcgctgctctgcgcgctgtgctgcggcctcctggccccggctgcccgcgccggctactccgaggagcgctgcagctggaggggcaggtacggtccggggggctgtccccgcacttaggacggggtgcgctgcggctaggaccccccaggcgcccctcggagcgcgcagagcgctgggccggtttccccatccgcgaggcggcctcgggagggagcgggggctgcgccgggcggggacccgcccccgtctcagcgccccgtcccgtcctgtccccagcggcctcacccaggagcccggcagcgtggggcagctggccctggcctgtgcggagggcgcggttgagtggctgtacccggctggggcgctgcgcctgaccctgggcggccccgatcccagagcgcggcccggcatcgcctgtctgcggccggtgcggcccttcgcgggcgcccaggtcttcgcggagcgcgcagggggcgccctggagctgctgctggccgagggcccgggcccggcagggggccgctgcgtgcgctggggtccccgcgagcgccgggccctcttcctgcaggccacgccgcaccaggacatcagccgccgcgtggccgccttccgctttgagctgcgcgaggacgggcgccccgagctgcccccgcaggcccacggtctcggcgtagacggtgagtggcggtctggttgggacagggtgggagtcccgaagtcttaccctgcctgggcttggcgggaatgtgccttgtcggccccactgcagaaggaaaaagtgagctacaagggttggatgggcttgtcaggccacacagcctgggactgctggggagggatggcctccccgccctcccttcccgattcatctctggaaagagctggcaggggcagagtggagggaaggggaggccgggcccagcaatcctgggcctctggtccctgaacggttgggggaagagatggtggggacagaatcgaagcctccggccaaagctgtccggggctccctggcccagcggtgacctctctcccctcccccagcccaaccaacaaaagtccagtgtgcagcccggtcaccatggagacgccgctcgcctccctgcagggcaccaggcccagctcttgcttggctctcctggagcttggcgcctgaccctgaaagggatgggctctcgctattctgccccctggccctgggccagggaccccagaccacccttcctctgcccccacttcctatcaccctagctgggctgctgctcttcagacctcagatccgggaaactagaggggtcccagatgctggggtgcatatgtcagatgggagtgcaggagggcggcccaggacagctgatcgctaggcatggcccccaggcccacgtctgtgtgcattcctgccttggaggtacgcgcctgcaagtgtgtttcctgagtacaggtgtcgccgagggcgtgcacatctgctgtgtagctctctgggacccccaggtgccatcaggccctgagcgtgggctctgctcatttgcctgctgcctcctgccgcttgtgcggacaagggacggggcctggggtgatgccgggagagggcagggcctctcctcaccaccccctctgcatgccaggtgcctgcaggccctgcagcgacgctgagctgctcctggccgcatgcaccagcgacttcggtgagtgtccccgccatggggggagcctggagcctgccttcccctgaatgcctaccgcagccacatgcctccccacagtaattcacgggatcatccatggggtcacccatgacgtggagctgcaggagtctgtcatcactgtggtggccgcccgtgtcctccgccagacaccgccgctgttccaggcggggcgatccggggaccaggggctgacctccattcgtaccccactgcgctgtggcgtccacccgggcccaggcaccttcctcttcatgggctggagccgctttggggaggcccggctgggctgtgccccacgattccaggagttccgccgtgcctacgaggctgcccgtgctgcccacctccacccctgcgaggtggcgctgcactgaggggctgggtgctggggaggggctggtaggagggagggtgggcccactgctttggaggtgatgggactatcaataagaactctgttcacgcaa

SEQ ID NO: 8127 - DNA, 146 bp, Homo sapiens
cgcctgtagtctcagctgctcgggaggctgaggcaggagaatggcatgaacccaggaggcagaggttgcagtgagccgagatcgagccactgcactccagcctgggcgacagaacgagattccgtctcaaaaaaaaaaaaaaaaat

SEQ ID NO: 8128 - DNA, 487 bp, Homo sapiens
gtgccgacttcccccatggctgctgtgagcccgcagagtcatccttggccccgtcccgcccttggggaagaatgggcccctctgtcctcaggccccttcgacgtgctgagcatccagacgtggcgaggagcccgaagggtgtggggtcccctctgcagggtcctgcttgttgcctgtttccggcgggcggggtgcacaatggggtctctaaggaccgtttcccgccactggccccattgtcactgtctccgccttcctcctcggcctttcagccgcataaagggccagtgaggtttgggacagccacagcccaaggctccgaggctaaaagcccctgggtgggggtgttccaggacacctggccctgtgtgagctgcctcctctcaccccaacccctcggatcctgggaaagagacagccatggctcaagggccagggacccctgggctgagccccagaaatggctttccattctcgcctgggccgg

SEQ ID NO: 8129 - DNA, 8614 bp, Homo sapiens
ggagggggggggggcgtggcaggagcaagcgtctgccgcggtggccgggtgccggtaagggtttccagcgcccccggcctaggttttggaggcgcgggaatgcgttcgttgctcagtgtcggacttccccctcattcccatcggccgaggctgtcactttacgctcataaccgtttttctttactgcactcgtgtcgggaggaaagggacttgcgtggcacccccagacctccccgtctccgcttccacgtttggtacatcctgcctgaggcaggaagccgcagctgagggacggcctgtcgtacggtgcggatggtggtggcctgcgaggctcatttctagcaaggaacaaggctttcccgctttgattttataaatattatgtttacaaagctgtaatatatagaaattgataagacgtgtccctgtccctggaaacgcaggcaccgcgtgtttggaaagacattcatctgggctgtttgacagactccccagttggtgccatgctctgtgcttagggaactgtgagacccctggaggggtgggtaccgggaccgcactcagcctggggtttggaggcggcctcctataggaagcgacctgggacctaagatttttagactgactgtgggttcactggaataaaaaggaagaaacaaagagcattgcaggcatcgggactgtcacgtgagtaagaaaagtttgttcaggaaacagtggtcgtactgggtgacgagtacttgggacggtggctttaatacacaagataatcagtgtgccctgggcattgattatcttgatgcttcccatccttccagccccttatgagggaaggcaccttcgcgcctaatcccggaaatgggatgttgaccttcaagagctgacgcctgcgtttatcttgaaaggaagagtggcattagtgatgtggaaaagggggttttaactgtcaaggctggaaaatgtgacagggttggaggtgtttggagaagggacaggtgaaaaagattgagaccaaatgtggaaagatctactaaggaatcatgggtacaaaatgtacacgtaacagttggaggcaataatacctgagcaattgaccacaaagctgacctagcttgtttagtagattaagttaggacaagaagcaagagttcaaggatagaaggcctactgaagctcgagtgatttgagaaaactttacaaaggtggaaaatctacgtgggcctccgaaagtcaggtttggatcagctgaggaaagtgagaagggtatcccaggagacagagcagcaaggacaaaggagtagcagcaggaaagtggggagcacttgtaagacagggacttcaaaagtataaccaaaacttcgtcttgctttgagttatccactgggtagtactcggttaattattgagtactggattaattaagccctcacctggctcaccggtgacagaagtagcagggcgcattttgcttaacttttgccgagatccttgtcatgggggtgtaaaccctttcccacaccaatctgtgtataatttttgccaaggtgttagggatatcttgcagttatcctatgggggacagctgtgagcctttttggttttttttgtttttttttttccgagacggaatcttgctctgtcgcccaggctggagtgcagtggcgcgtggcgctatctcggctcactgcaagctccgcctcccaggttcacgccattctcctgcctcagcctcccgagtagctgggactacaggcgcctgccaccatgctcggctaattttttgtatttttagtagagacgaggtttcaccctgttagccaggatggtgttgatctcctgacctcgtgatccgcccacctcggtctcccaaagtgctggattacaggcgcgagccaccgcgcccggccctgtgagccatttttacaaaaacttccacctgccttggcccaaacctcagcgttcttaggcacaggagctcatgaacatactgagataacactaaactggactatgcgaagggaccaactacagacctgacacaaatcctcaaggcaagacgatgtctgaagttgagcttgtaaaggaaatggcttccttccttaaaatatcacccaggctgagctctgaaaaaagcacctccagatggtgggttccaccccgctccaccaccccaaaattgcttattgtgtgagtctccatagtctcagaaactgagagtacctttgatgccagtggcttccgggctttttggattgtcacttggtagcagggagcacccataggatgatgcctatgatgagtcagggcccaaccttggaaacagggaaatccagaagtatcctacaagctagccagccttttggattagattatagcagtttcagagaaaaatggggaatcagccatggtcaaggagctaaataagcatcgtgaccatttgggccagaaattgaagggagtgtagcgttaagaattagaggaaggaacctccgaggaaggagctaccccaaagggaagcagaaactggagaaactttagcagtatgaggttctaccactggtgttcacctagaagtgctttattcagatctcagcctgggtactattttagggaaggaagccgtttcctttacagtatgttcgtgtgactcctgtgcctaagaatgctgaggtttgagccaggggctagaaaggaaacttagctggccattatgaatcagggactcatcaaaggcatcacaaacaggaaaaggtgaatgttcaagttagaagagaagagctacattgagatgcaacatattaatatttgagggcctcgtttaacgtgttgctctcctgtcacactctatgacactggtctgtcagctgggctatgcctgtccagtatacactataaaatatgtatcagttggggttggagagaggaactgtgatcaaagtagtcacccggcccatatgagaaaatgaaccttttcccaaaaggtggccccagactaaaaagcctggagaatcctaatagtggattataccatctcttcagtcttcgtgtttaagaaataacctctttggcttacagatttgacaagatcaaagctgcaggaaaatggacagtgaggttcagagagatggaaggatcttggatttgattgatgatgcttggcgagaagacaagctgccttatgaggatgtcgcaataccactggtaggttatgatttgagctgaggatgggttaaaggtattgatctggcagtaactagtggaggagggatatcaatggaagataaactagtgtggcaaagaaatcaaagctgtggaattctctaactctagaagcttctggagagcatccagttgtatgttttatttgaagaaaaatgtggttcagggagctaacatggccaggtcagttaggagtcatgccaggactagagccccgattttctgagccatgttctgtccaccacacgaaaaccagagaaaccaaataatgagagtttaatgcgcaagatggggaagaacaagaagcagcagcatatgagctctgtttcttacttccctgcctgtggctcatcagtctttcagcatttttagaaacttacattcttggagcatacacctatcttaggttccctggaaaatattcagaagatacctgggtattcttttgcgtttaggccagtggccttctggaatactcttttcttccccatctttggaaaactctgctgcagggagtttgttaaacctcatgtaataagtgatccaaaagttttgcttatataaatgtttgtttaaaatcctatttatgtcatagaggcctaaaaaagggaaaacaggactgtttttctttaaagcatgccagctgccctgagaagagtagttagtattgaataaaatataatttatagttagaatatctgctgttgctgtttgcaaagaaataaaatagttcatctgtattttcatttacgaataagagatagtaatatgttcaatgaataatatacatatcaaataagtcatagcttagttcaagcttaggaaaatagtcaaaagagagagcataataagaattatagatgtcatttattgaataccagttttatgccatggactgaggttggaaatatacattatctctaattcttaaacaaccctgtgagggaggtgctgttattcccattttataggaaaagaataggatcagaaagggcaacttgcccaaagtctggtagcaggtaagtagggcttcatataacatatacctaggtctgtgaagttccaaatcctgtcttgtgaacttctgttcattcattcatttgacaagcattttttgaagcctactgtgtgccataagactatgtgaacataagatacagttcctcctcctgaggggtctagaaaggcaacacttatagataagtaattgtgataataaatattctaggtgggggcataaacagccacatcatatacgaagtggctgattgcctggtgggcatcagaaaggcttctgagagaatgtcatgtttaagctgggtcataaggaaggaccagaagtttagtggaggtagacaagggtattgcagcagaggggacagatgtgtaaaggcccagagttttgaaaggctttgggacatggtgagtcattcactgtggatgaagaatacatttgtcacataagtaggctgaaaagttgggcttggatcagattgagagtggtatttgatatcacacttagacctcatcctcaggagatccaggaatgaatggtcttaaaagcaagactgctatgctcagatttggcttttggaaaatcagtttagccagcattgttagagatggtgtgacatggagataggggcaagtgagaccaattggcaagctgttgtggtctaggcaagggaggagggcctaaacaaagtcaagaaaataaaggagacgtccatttctggagaagtttatggctcagattggagaacatttgggtggcaggggtggaaggaggtttccctgctgacttccaggcgaagttggcttggccctgctgctaatccacacctttcgcttgtcttgcgattctaaggcaatgtgtatgccagttaggttttgctgcataacaagtcaccccaaagcttagtgacttaaaagagcaactgtttatttcatgattttgtagctcagctgggagggacttctagtctgcaccagctcagctgatccctgccaggcttgcctgtgttgtgcagtcagccaacagactctggaggctgggtaatctaggactgtctcacatgtctggcagttaacaagctgtctgctgggtgatggggtgactatgccatggtctctggtatccagcaggctagcccagacttctcaatctcagggttccaagagcaacctgagaggaaacggcagagcttcttggagcttaggccaagaactggcccactggcatgacagcttcattctgttggccaaaacaactcacagggccagtccaaatccaagattggggaaatcagtttcaccttttgataagagtagctgcaaagaactaagggcattttacagtacaccataatgggtggctgggtttatgatacttttgtttttgttttccaggcatatatgccattttatgtgttggcatgtattgcaagggacagtagataccaaatgaaagacacattattttagaaagcataccacagataggatgaaattaagcaacgttgtctgcttctgaattaaagaattcattaaccaaggacctatttattctttgtcatctataagtaattattaggactgaactttctttttaagtttaagataatatattattgcgttacaataaatgatagctcttctcaatctgttcaagtatgtttgaatctgtcttgtagaacaagatgtatgtgattcaaatatagataagtaaatatcatttaatatatattgagcataattttagaggggaaaacatattcacatactacaaattagaatccagtggaaaattttaagtctggatatcgcataacagtttgctaaccataaaacaaaacacagataattgaaaagaaatatattggtatctgtgaactctggtacaaagcagagtttcagtagtaatacatttaaacttaaaatacaagtaaatgatcccagatcctacagtaagtgtggcccatgacttaccattttaagaaaattgctggtagggtgtgaattggtcatttgttgtgttttttgttgctctgctccaccactagagggaggtcttatctattaattacattttcagtgtttcctgccctacctccatttttattataatatagacatgttgggccaggcgcggtggctcgcgcctgtaatcccagcactttgggaggctgaggcgggtggatcacctgaggttgggagttcgagaccagcctgaccaacatagagaaaccccatctctactaaaaaaaaataaaaaaatacaaaattagccgggcatggtggtgcatgcctgtaatcccagctactcgggaggctgaggcgggagaatcgcttgaacccgggaggcagaggttgtggtgagccgagatcacgccattgctctctaacctgggcaacaaaagcaaaactccatctcaaaaaaaaaagacatgttgggtccaagataattttttggatacatttcttgtgtctaaggaatatgccagcaaactagtattcttttaaagcacgctcccgctaaagaagatttaggattcactcatctcagtgttcctagccgctaataataatagcaaatattccttgagcactggataccccacagagtgctcagcacttgatctgaattacctcacctaatccttacagtagtcctgtgaggtgatggctcttttgttctcccatttgccaaggaagaaacaaaggccccaagggtttgcataccttgcccaagtaacccagcaaatgggagagttgtggtcttggatcctagttggcttccaaaagcctctgcccttaacctttctgccacagtgcctccttcacaaatgtcagagtcaaaatgcccatcattccctactgaagaaggcccgggccatgtttgaatgatacttctgatagtttcctcacgtgtatgattttagcttttttagaatacacatatcaattatgttgcctgttcctaggaactcacaagctttaattctaagtgttcttgagttccaagaagatgcagaatatattactgttctgaatttctattgtaccttttcagaatgagcttcctgaacctgaacaagacaatggtggcaccacagaatctgtcaaagaacaagaaatgaagtggacagacttagccttacagtacctccatgagaatgttccccccattggaaactgacgcttggctcctttcttgtggatggattttctcaaagtacacagataaagcatggtttgtttcagtctccaaattcaaacctttgagtaataaatcagcactcaaaaatgtacacccatttagtttgtggtagcaaagtgcaatgcgaaattgaatgagaaactgagatttctcagtaatggtgaatatttcgctctttaaacctaaaactcttcattgagtagcttatatttgaacatgattggttaaacatttgcctctacctctgattttgctttgctgtcaaagtttaacaccttccaactacttatgtgtgtcctgtaacacaggtgattgaacgtatgagagggaaaggcaaagaaaaaggaagccagacactaggagaattattaacttctcatacttccccacattgagaagcattcggagtgtatttagcctgtagatgttgtgatatgcaaatatcccattccctggttactggcattcctaagattcttcatggtattttcaaactttggataaatttacagattagaaagatatctgacagttaatctctgttctccttacaaattccttttgtgctgctggaaaggatctttggctaggtggatgactagttttattcaaagccttttctcaaagccctttcagttacaaccaccccactatggaatcagtatttagttatacatttgtataagaacctgtattttgaaaaacacattcatgtatatttattcctggaattatttgcctgttaaacagtgtctttcatgttctctccccagattgtaaactctgtaagaagctgcttgtatctgtatcccttgttgaaactctgaaaacactgaataactaaaatctcttctcatcctttttatgctgggtctttttgtttacttagcttttaggaggaagaggtacatgaaaaaacaaattagcttattttaggttttcaatcacaaacatgattttagcagctatcctataatccagatacatccaggctgatttcttctctttgcatcagtagttctgcctagaaatcttttatcttcagaataaagaccccaaggcaccagtcccttcagtaagcaaagaaagacaacctaatagaaaagagacttacaatattaaaaaaacttatacaagagaaaaagcttttcaaaaaattaaaatacctagaacgcc

SEQ ID NO: 8130 - DNA, 364 bp, Homo sapiens
taggagtagtggaaagctgtgttccactcagtaccacagtgagatggtgaacttcagagtttcatggtttgttgggtgctccagaggaaacctgcacctcaacactgagtcttccagaaaaggcaaagacctccaagcttggaaccccctcctacaagggccccctcagacttggcagtgaagataatagcaacgacccagatagactgaagagtagaggtctttacccatttttccaggtcattcatgagtgtcctaaatgcttgcaagaccctaagaaggggaaaggacaccccagggaccacagaattaatttctgcttgcagtgcagcagagtgaggccaaatggacttaatttgctttg

SEQ ID NO: 8131 - DNA, 6927 bp, Homo sapiens
  SITE (4599): n equals a,t,g, or c
ccttctgccagtcaccaacatcagagccaagtcctggggtctttcagtcaatggcattggccactccaagcatcacaagagtctggagcctctggccagccctgcagtccccttccctggggggcagggcaaagccaagaacagtcccagccttggtttccatggccgggcccgccgaggggccctccagtccagcgtgggccctgctgagcccacctgggcccagggccagtcaggtacttgctgcacccctgacactacccagcccagcctggcaaggctcactggccagggcccacctcagcccagtcatgtgactgtctgggttcagacttgtcagtcaatagacgtttgctgagcacagaataaggatcaggaatcaggcctgcagccttacatagatcatcccatttagtcctcacagcactcctgcaagaaaggaattgttgttcctattgttcagctgaagaaatgggatggagactaaggtgaagtgacctgcccagggttatacagcccctccgaggcagggcttgtatttgatcccgagcctggctcctccttcgccatgccagcaccaggagggtgctatactgggtctcccctactatttcccaaaccttggatctttggttttaacaaagctacagaaccttttattgtagttttcaaactgggttcctctgaggtaccctgggggctgcgctgggggctgccctgggggttgaaggggaggctgggaggcttcctggcttcaaccaggcagctctgctctcaccaactttcatctgatggattttgtggcttcaagaaaaagaaagcctggaaaatgtggcttacagagatggaaattcaatgtgatgggggaaccccatgggggagatgtttgccaggcacctgtttactgagctgcctgccactctgtggctggctctgtacaggggactgggggtgatgaagatggacacgcccctgtccccaaagacctcacagagatgaaaacacagcagtgtgatgaggctctgaggggacatgcaggtagctttgggactggggaggacacttaatccggacgaaggtggggaggatcagggaaaacttctctggagttggtgacatttgagctgactctttaaaggacctttggaatttgcccagaagggatgtgggaagggcaccttccatctcgtctgtatctgatacctgtcctgaccacacagggtgtcctggatcctgttggggtccttgggtccctgggtcatgcctcagagctgaaaacgtaccaggtccagcaaatgttcagcggccccagcttcccccttcctgggtggatagtcaggcagcagcaagactgtatgtgaactagatgagcaagaagtcctgtctcccccatctgacttgtcacacttcagtcccacccctacccagccagccagcctgcagtcggtttgttcagggaggctgcgaggagcagcgtgctggtagcggtgtaatcatcggcctcggggcagaggggagcctgatttgtgtgatgctgtcaacactgctgatttcaagctaccagtgtaactgatgtttctgaacccagaactgggagagatgcccgcagtcaggaacacaggcctcgagcgggctcctgcacacctggcaggggatgtgaagacccatccctacttctgggtgttccagttcttttgaggaggcagacgtcaggctcatgggaactgggtagtcctagggctgctgaggaaagggtgtagtgtgatgctggccattgtggaggtctggaaaaaaataacctggaacttattcatactaaggtgtgagtgactgcttcaagtctggcaaggaaagacttgccagcttctcatttgtgtcctgccttgtcaccttactcctgccccaacagcctctctccttgcagagccagtgccctccctgacctccatccaggtgctggagaattcgatgtccatcacctcccagtactgtgctccaggggatgcctgcaggtgggctgggctccctcccctcacccagggaggtcctcaggtgacatgagcccaggtggtacagatcacccggaacttgccctttcagggaggagcctcccccataaggaagggtagcccctttccaggctacccttggacactgtctcttctggagggctccagtacagattgggggctgaggagtccctggtgggggtggggggtggcacggtaccctcaggctaaggtgccagttttgcccctgcaggcctgggaacttcacctaccacatccctgtcagtagtggcaccccactgcacctcagcctgactctgcaaataaagtgagtgccggtgtggggaagtgggaggcaggagaggagccagggagaatctcccgcagagcttcagaacagccgagtctgaggacagccggagagtctctggtatttcctgcatggtgggataagtgctgacttcattgcctacttcgtggttaactggctaaatgacctggcctcatgggctgaggaccacatgggatggtcgatgggaaaggttttgttcgagggccctggttattatgcggtgtttcaggctgggtggagattcagaggcgtgtggcaggctggctgggagggggctggggttgagggactctagaacctcatttctctgctaactgggcctgtctacagctcctcctcccccgtgtctgtggtgctgtgcagcctgaggtcaaaggaggaaccatgtgaggaggggagccttccacagagtctccacacccaccaggacacccaggtaggtgggactgggaagctgcgggccggccaggcccgagctgcttctctcctggcacaactgggccccaaaatgggcaaggagcagaagctgggagttatagagtaaagccttctccacaagggacactctggggcctgggcctctgtgtcccagggaggggcacgcgtgcccgtgtttgttcattgcactctgctgagcatctcccagccctgccgtgctggagacgtggggaagacagcagatcacaggtgctaatgtggatgagtgcaatgatggaaacaggcaggtgtctgggagcccatggcggggagggctgtggctcactggaggtgtctgcagaagcaggaaggagccgacctcatgctcaggttggggaagtggcacagctagatgtacagcatcagagggcccctcaggttccatgtttggccacctcttctgggagaactggatggtgagctcctccctggccaggtaaccggaagttatgactgtccctggggctgatggacccccagtttcttcttgagcctaagaggccatgggagaagacgctcaggacaaatgaagggaagtagtgattattttttcttgcccattcatgtgtttactcagaaaatattgattggggccccatctgtcccaggccctgtgctgggtgggcctagctgcaggggagagaggtggagtagacacaggttttgacttccaagaacgtactctatagtgagggagaaaagacgtgcagaaagcacctgcaacagaggtgggggtgcttctgagggaggcccgagccctgtcgccctgcagaagagacagggtccaagacagagggagagcccagctagacacacagcagacatggtgctcgggcctgaaaccacatcacagacgcacagccaaagcctcaggtagatgggcaagctgcctgcagccaggctgcatgccaccctgtgagggagacagccagacagacctgggtttgaatcccagctgtgtgattttgccacactgtgtgatttttaggaagtggctcagtttcctcatccagaagatggggctagtagcagcactgtgtcactggattgtactgaggatggggctaatgaaatactttgatgtgcccagagcatagtgggtgaggaacccaccacaacaggactgggaaggaggcagggcccacgtggaggtggctgtggacctgccagtcccgggcacggtctgcatggagtagctgccattgctccttctgccaaagcagaacatgctccttcctatctcttcaaagttctctgcttttttccttcataaaactccccacagaccccaggactgcgacggccgtggtgagagatgctggttgggataagggcagcagtctgtcctgacccctctctcccttctctccagggcacctctcaccggtggccaataaccatcctgtccttccgtgaattcacctaccacttccgggtggcactgctggtgagcaggggcatcccacctaccctggaggtctgggcacccctgtctgcgacgtggggcttgaggaatggggggtttgcacagtatgtggtagggctgggggcacagtgtcaagcaatgtcagcagggagtgccatctgccccgcacccccagagccacctcaccttcccactgccttccacccagggtcaggccaactgcagttcagaggctctcgcccagccagccacagactaccacttccacttctaccgcctgtgtgactgagctgccctcctgaggcagcaccacaccagggaccaggggtgcccangcaccccccaacactggatgcaatggtgttacactggagcccgctgcaggccagctctgctgttcactggccctacccgagactggtgaaactggaagtcttcacactggagttgctgttccagctggtcgcccctcacggctcagaaggaacctgagagccagagacttcttgggccttcctgcctgccaccccctaggggccaggacaggaccagtttacctctttccaaatatggtggttggagggctggttcaggtgccctggaaggaaggggaagcctgtggccctgatttgttcacaacccattctcccttgcctccccttttgagactggagccaacccttttggagagaggacctgcccacctttgagatcagcagggggctcggatccagccctaagagacttgggtggacccccatgagtcaatggagggcagacggctctcccccttaaagctgttccctgggggatggcttggtagtggactttctggggtttgcctgttacgccagactcggacttctaagctttaagtgtggcccaggaggtttcttctccctgggagggcttggctcccaagaagtcccagggcagccgaggccagccctgcctgggttggagaaactgactttgtgccttaagtctactcagtgcctggtgaagccaccctcagcccttcacaggcctgaaccagtaggggccagtgggccaggtaagccctagagccttgaaccaggaatatccaggaagaggaaattccctttgagcccccagatggtattgcagcttcactgcctgcgttcctgggagcgtctggagctcacagtgatcagtgaccacatcattctctctgagcagaggagcaggaatccctcaagcagcagcctggtcttggctggtgggcagatgcaaatagcttttgctgttattaatgaagtaattactaaatgcacttaaaccagggcaggaaggaatggaaggatggagctagaaagctcagagtgggccagagcaggggtgtgacacttgcaaagacagggctctgactctgatccctcccagggagcctccgacacccatcccactcccaaccaccaagaccctgggttagggaagaagttgtatcttaagtgccaccttcaagtttcttagtggtgcctggtgcattccgaggctacatccaggctcatggaaggagtgtagtattcatttagccatgtctgccatgggtccagaaatgggaaagggaattgctgtccttgccctgtggtatgctgccacctctttgggaagcaggccttgcccctgtcccaccactcattctcagctttgaatgggaggcctttctatagtggaggcctttccttgaagcctatgaactgcaggcccccttttgccattgatctcaaagcacttgtcctcaggatagggaagagcacggggatgcaggaatagcagggatagcttgctcccagccccctccccaatttggttccgttgacataggaattttacgattcccaaaccatgcaggggctgagccttccttatgatgactttgttctccctcccactgggggaatcctccctatgccttaaaactgccgagccccactccatgtaataggattcctgggcttcctcaatgggggttcatgttcttggactgcgggccctcagtccttaactggaaagtgaccgtccactgccccatggagcccatctggacacagcacagccccaaaaccgttagcagctggctctgtttccaagcctggggaggggttcctcagtgcaggagttggggacaggctggggatccaagctgcttgagggggtcaaccttggaccaaagttgccttaagcctgtggtaaacaggcttcacggaaagtaagtgggccacctgctggaagctgccactgcccggctggcaatggtgtgagtgtcttggccctgtccctgccctggggttcagcaggtcatcccaccctacatctctctcctttggcgtttgttcctgtagtcactgcgctaatctccccctagcttcaagctgtacatagggcctcccagtgcaaatcctcctgcccataccgtgcacccttagaagcctgcgtgtgcatagagcgccccctacttcccagttaactcccagttcttctccctgagcttggtatttgtcatgtgccaactctgactctgaggtgggcagtgagggaagcagccccgggcctgcttgcttcctgtccccgaaatgttcgtttcttctgaagtaaatatacatatataaataaatgtataaatactgctttgtatctga

SEQ ID NO: 8132 - DNA, 6930 bp, Homo sapiens
ccttctgccagtcaccaacatcagagccaagtcctggggtctttcagtcaatggcattggccactccaagcatcacaagagtctggagcctctggccagccctgcagtccccttccctggggggcagggcaaagccaagaacagtcccagccttggtttccatggccgggcccgccgaggggccctccagtccagcgtgggccctgctgagcccacctgggcccagggccagtcaggtacttgctgcacccctgacactacccagcccagcctggcaaggctcactggccagggcccacctcagcccagtcatgtgactgtctgggttcagacttgtcagtcaatagacgtttgctgagcacagaataaggatcaggaatcaggcctgcagccttacatagatcatcccatttagtcctcacagcactcctgcaagaaaggaattgttgttcctattgttcagctgaagaaatgggatggagactaaggtgaagtgacctgcccagggttatacagcccctccgaggcagggcttgtatttgatcccgagcctggctcctccttcgccatgccagcaccaggagggtgctatactgggtctcccctactatttcccaaaccttggatctttggttttaacaaagctacagaaccttttattgtagttttcaaactgggttcctctgaggtaccctgggggctgcgctgggggctgccctgggggttgaaggggaggctgggaggcttcctggcttcaaccaggcagctctgctctcaccaactttcatctgatggattttgtggcttcaagaaaaagaaagcctggaaaatgtggcttacagagatggaaattcaatgtgatgggggaaccccatgggggagatgtttgccaggcacctgtttactgagctgcctgccactctgtggctggctctgtacaggggactgggggtgatgaagatggacacgcccctgtccccaaagacctcacagagatgaaaacacagcagtgtgatgaggctctgaggggacatgcaggtagctttgggactggggaggacacttaatccggacgaaggtggggaggatcagggaaaacttctctggagttggtgacatttgagctgactctttaaaggacctttggaatttgcccagaagggatgtgggaagggcaccttccatctcgtctgtatctgatacctgtcctgaccacacagggtgtcctggatcctgttggggtccttgggtccctgggtcatgcctcagagctgaaaacgtaccaggtccagcaaatgttcagcggccccagcttcccccttcctgggtggatagtcaggcagcagcaagactgtatgtgaactagatgagcaagaagtcctgtctcccccatctgacttgtcacacttcagtcccacccctacccagccagccagcctgcagtcggtttgttcagggaggctgcgaggagcagcgtgctggtagcggtgtaatcatcggcctcggggcagaggggagcctgatttgtgtgatgctgtcaacactgctgatttcaagctaccagtgtaactgatgtttctgaacccagaactgggagagatgcccgcagtcaggaacacaggcctcgagcgggctcctgcacacctggcaggggatgtgaagacccatccctacttctgggtgttccagttcttttgaggaggcagacgtcaggctcatgggaactgggtagtcctagggctgctgaggaaagggtgtagtgtgatgctggccattgtggaggtctggaaaaaaataacctggaacttattcatactaaggtgtgagtgactgcttcaagtctggcaaggaaagacttgccagcttctcatttgtgtcctgccttgtcaccttactcctgccccaacagcctctctccttgcagagccagtgccctccctgacctccatccaggtgctggagaattcgatgtccatcacctcccagtactgtgctccaggggatgcctgcaggtgggctgggctccctcccctcacccagggaggtcctcaggtgacatgagcccaggtggtacagatcacccggaacttgccctttcagggaggagcctcccccataaggaagggtagcccctttccaggctacccttggacactgtctcttctggagggctccagtacagattgggggctgaggagtccctggtgggggtggggggtggcagggtaccctcaggctaaggtgccagttttgcccctgcaggcctgggaacttcacctaccacatccctgtcagtagtggcaccccactgcacctcagcctgactctgcagatgaagtgagtgccggtgtggggaagtgggaggcaggaggggagccagggagaatctcccgcagagcctcagaacagccgagtctgaggacagccggagagtctctggtatttcctgcatggtgggataagtgctgacttcattgcctacttcgtggttaactggctaaatgacctggcctcatgggctgaggaccacatgggatggtcgatgggaaaggttttgttcgagggccctggttattatgcggtgtttcaggctgggtggagattcagaggcgtgtggcaggctggctgggagggggctggggttgagggactctagaacctcatttctctgctaactgggcctgtctacagctcctcctcccccgtgtctgtggtgctgtgcagcctgaggtcaaaggaggaaccatgtgaggaggggagccttccacagagtctccacacccaccaggacacccaggtaggtgggactgggaagctgcgggccggccaggcccgagctgcttctctcctggcacaactgggccccaaaatgggcaaggagcagaagctgggagttatagagtaaagccttctccacaagggacactctggggcctgggcctctgtgtcccagggaggggcacgcgtgcccgtgtttgttcattgcactctgctgagcatctcccagccctgccgtgctggagacgtggggaagacagcagatcacaggtgctaatgtggatgagtgcaatgatggaaacaggcaggtgtctgggagcccatggcggggagggctgtggctcactggaggtgtctgcagaagcaggaaggagccgacctcatgctcaggttggggaagtggcacagctagatgtacagcatcagagggcccctcaggttccatgtttggccacctcttctgggagaactggatggtgagctcctccctggccaggtaaccggaagttatgactgtccctggggctgatggacccccagtttcttcttgagcctaagaggccatgggagaagacgctcaggacaaatgaagggaagtagtgattattttttcttgcccattcatgtgtttactcagaaaatattgattggggccccatctgtcccaggccctgtgctgggtgggcctagctgcaggggagagaggtggagtagacacaggttttgacttccaagaacgtactctatagtgagggagaaaagacgtgcagaaagcacctgcaacagaggtgggggtgcttctgagggaggcccgagccctgtcgccctgcagaagagacagggtccaagacagagggagagcccagctagacacacagcagacatggtgctcgggcctgaaaccacatcacagacgcacagccaaagcctcaggtagatgggcaagctgcctgcagccaggctgcatgccaccctgtgagggagacagccagacagacctgggtttgaatcccagctgtgtgattttgccacactgtgtgatttttaggaagtggctcagtttcctcatccagaagatggggctagtagcagcactgtgtcactggattgtactgaggatggggctaatgaaatactttgatgtgcccagagcatagtgggtgagggaacccagcacaacaggactgggaaggaggcaggggccaggtggaggtggctgtggacctgccagtcccgggcacggtctgcatggagtagctgccattgctccttctgccaaagcagaacatgctccttcctatctcttcaaagttctctgcttttttccttcataaaactccccacagaccccaggactgcgacggccgtggtgagagatgctggttgggataagggcagcagtctgtcctgacccctctctcccttctctccagggcacctctcaccggtggccaataaccatcctgtccttccgtgaattcacctaccacttccgggtggcactgctggtgagcaggggcatcccacctaccctggaggtctgggcacccctgtctgcgacgtggggcttgaggaatggggggtttgcacagtatgtggtagggctgggggcacagtgtcaagcaatgtcagcagggagtgccatctgccccgcacccccagagccacctcaccttcccactgcccttccacccagggtcaggccaactgcagttcagaggctctcgcccagccagccacagactaccacttccacttctaccgcctgtgtgactgagctgccctcctgaggcagcaccacaccagggaccaggggtgcccaggcaccccccaacactggatgcaatggtgttacactggagcccgctgcaggccagctctgctgttcactggccctacccgagactggtgaaactggaagtcttcacactggagttgctgttccagctggtcgcccctcacggcacagagggaacctgagagccagagacttcttgggccttcctgcctgccaccccctaggggccaggacaggaccagtttacctctttccagatatggtggttggagggctggttcaggtgccctggagggaaggggaagcctgtggccctgatttgttcagagcccattctcccttgcctccccttttgagactggagccaacccttttggagagaggacctgcccacctttgagatcagcagggggctcggatccagccctaagagacttgggtggacccccatgagtcaatggagggcagacggctctcccccttaaagctgttccctgggggatggcttggtagtggactttctggggtttgcctgttacgccagactcggacttctaagctttaagtgtggcccaggaggtttcttctccctgggagggcttggctcccaagaagtcccagggcagccgaggccagccctgcctgggttggagaaactgactttgtgccttaagtctactcagtgcctggtgaagccaccctcagcccttcacaggcctgaaccagtaggggccagtgggccaggtaagccctagagccttgaaccaggaatatccaggaagaggaaattccctttgagcccccagatggtattgcagcttcactgcctgcgttcctgggagcgtctggagctcacagtgatcagtgaccacatcattctctctgagcagaggagcaggaatccctcaagcagcagcctggtcttggctggtgggcagatgcaaatagcttttgctgttattaatgaagtaattactaaatgcacttaaaccagggcaggaaggaatggaaggatggagctagaaagctcagagtgggccagagcaggggtgtgacacttgcaaagacagggctctgactctgatccctcccagggagcctccgacacccatcccactcccaaccaccaagaccctgggttagggaagaagttgtatcttaagtgccaccttcaagtttcttagtggtgcctggtgcattccgaggctacatccaggctcatggaaggagtgtagtattcatttagccatgtctgccatgggtccagaaatgggaaagggaattgctgtccttgccctgtggtatgctgccacctctttgggaagcaggccttgcccctgtcccaccactcattctcagctttgaatgggaggcctttctatagtggaggcctttccttgaagcctatgaactgcaggcccccttttgccattgatctcaaagcacttgtcctcaggatagggaagagcagggggatgcaggaatagcagggatagcttgctcccagccccctccccaatttggttccgttgacataggaattttacgattcccaaaccatgcaggggctgagccttccttatgatgactttgttctccctcccactgggggaatcctccctatgccttaaaactgccgagccccactccatgtaataggattcctgggcttcctcaatgggggttcatgttcttggactgcgggccctcagtccttaactggaaagtgaccgtccactgccccatggagcccatctggacacagcacagccccaaaaccgttagcagctggctctgtttccaagcctggggaggggttcctcagtgcaggagttggggacaggctggggatccaagctgcttgagggggtcaaccttggaccaaagttgccttaagcctgtggtaaaagggcttcagggaaggtaagtgggccacctgctggaagctgccagctgcccggctggcaatggtgtgagtgtcttggccctgtccctgccctggggtccagcaggtcatccctcccttcttctctctcctttggcgtttgttcctgtagtcactgggctaatctccccctagcttcaagctgtacatagggcctcccagtgcaaatcctcctgcccataccgtgcacccttagaagcctgcgtgtgcatagagcgccccctacttcccagttaactcccagttcttctccctgagcttggtatttgtcatgtgccaactctgactctgaggtgggcagtgagggaagcagccccgggcctgcttgcttcctgtccccgaaatgttcgtttcttctgaagtaaatatacatatataaataaatgtataaatactgctttgtatctga

SEQ ID NO: 8133 - DNA, 6930 bp, Homo sapiens
ccttctgccagtcaccaacatcagagccaagtcctggggtctttcagtcaatggcattggccactccaagcatcacaagagtctggagcctctggccagccctgcagtccccttccctggggggcagggcaaagccaagaacagtcccagccttggtttccatggccgggcccgccgaggggccctccagtccagcgtgggccctgctgagcccacctgggcccagggccagtcaggtacttgctgcacccctgacactacccagcccagcctggcaaggctcactggccagggcccacctcagcccagtcatgtgactgtctgggttcagacttgtcagtcaatagacgtttgctgagcacagaataaggatcaggaatcaggcctgcagccttacgtagatcatcccatttagtcctcacagcactcctgcaagaaaggaattgttgttcctattgttcagctgaagaaatgggatggagactaaggtgaagtgacctgcccagggttatacagcccctccgaggcagggcttgtatttgatcccgagcctggctcctccttcgccatgccagcaccaggagggtgctatactgggtctcccctactatttcccaaaccttggatctttggttttaacaaagctacagaaccttttattgtagttttcaaactgggttcctctgaggtaccctgggggctgcgctgggggctgccctgggggttgaaggggaggctgggaggcttcctggcttcaaccaggcagctctgctctcaccaactttcatctgatggattttgtggcttcaagaaaaagaaagcctggaaaatgtggcttacagagatggaaattcaatgtgatgggggaaccccatgggggagatgtttgccaggcacctgtttactgagctgcctgccactctgtggctggctctgtacaggggactgggggtgatgaagatggacacgcccctgtccccaaagacctcacagagatgaaaacacagcagtgtgatgaggctctgaggggacatgcaggtagctttgggactggggaggacacttaatccggacgaaggtggggaggatcagggaaaacttctctggagttggtgacatttgagctgactctttaaaggacctttggaatttgcccagaagggatgtgggaagggcaccttccatctcgtctgtatctgatacctgtcctgaccacacagggtgtcctggatcctgttggggtccttgggtccctgggtcatgcctcagagctgaaaacgtaccaggtccagcaaatgttcagcggccccagcttcccccttcctgggtggatagtcaggcagcagcaagactgtatgtgaactagatgagcaagaagtcctgtctcccccatctgacttgtcacacttcagtcccacccctacccagccagccagcctgcagtcggtttgttcagggaggctgcgaggagcagcgtgctggtagcggtgtaatcatcggcctcggggcagaggggagcctgatttgtgtgatgctgtcaacactgctgatttcaagctaccagtgtaactgatgtttctgaacccagaactgggagagatgcccgcagtcaggaacacaggcctcgagcgggctcctgcacacctggcaggggatgtgaagacccatccctacttctgggtgttccagttcttttgaggaggcagacgtcaggctcatgggaactgggtagtcctagggctgctgaggaaagggtgtagtgtgatgctggccattgtggaggtctggaaaaaaataacctggaacttattcatactaaggtgtgagtgactgcttcaagtctggcaaggaaagacttgccagcttctcatttgtgtcctgccttgtcaccttactcctgccccaacagcctctctccttgcagagccagtgccctccctgacctccatccaggtgctggagaattcgatgtccatcacctcccagtactgtgctccaggggatgcctgcaggtgggctgggctccctcccctcacccagggaggtcctcaggtgacatgagcccaggtggtacagatcacccggaacttgccctttcagggaggagcctcccccataaggaagggtagcccctttccaggctacccttggacactgtctcttctggagggctccagtacagattgggggctgaggagtccctggtgggggtggggggtggcagggtaccctcaggctaaggtgccagttttgcccctgcaggcctgggaacttcacctaccacatccctgtcagcagtggcaccccactgcacctcagcctgactctgcagatgaagtgagtgccggtgtggggaagtgggaggcaggaggggagccagggagaatctcccgcagagcctcagaacagccgagtctgaggacagccggagagtctctggtatttcctgcatggtgggataagtgctgacttcattgcctacttcgtggttaactggctaaatgacctggcctcatgggctgaggaccacatgggatggtcgatgggaaaggttttgttcgagggccctggttattatgcggtgtttcaggctgggtggagattcagaggcgtgtggcaggctggctgggagggggctggggttgagggactctagaacctcatttctctgctaactgggcctgtctacagctcctcctcccccgtgtctgtggtgctgtgcagcctgaggtcaaaggaggaaccatgtgaggaggggagccttccacagagtctccacacccaccaggacacccaggtaggtgggactgggaagctgcgggccggccaggcccgagctgcttctctcctggcacaactgggcccccaaatgggcaaggagcagaagctgggagttatagagtaaagccttctccacaagggacactctggggcctgggcctctgtgtcccagggaggggcacgcgtgcccgtgtttgttcattgcactctgctgagcatctcccagccctgccgtgctggagacgtggggaagacagcagatcacaggtgctaatgtggatgagtgcaatgatggaaacaggcaggtgtctgggagcccatggcggggagggctgtggctcactggaggtgtctgcagaagcaggaaggagccgacctcatgctcaggttggggaagtggcacagctagatgtacagcatcagagggcccctcaggttccatgtttggccacctcttctgggagaactggatggtgagctcctccctggccaggtaaccggaagttatgactgtccctggggctgatggacccccagtttcttcttgagcctaagaggccatgggagaagacgctcaggacaaatgaagggaagtagtgattattttttcttgcccattcatgtgtttactcagaaaatattgattggggccccatctgtcccaggccctgtgctgggtgggcctagctgcaggggagagaggtggagtagacacaggttttgacttccaagaacgtactctatagtgagggagaaaagacgtgcagaaagcacctgcaacagaggtgggggtgcttctgagggaggcccgagccctgtcgccctgcagaagagacagtgtccaagacagagggagagcccagctagacacacagcagacatggtgctcgggcctgaaaccacatcacagacgcacagccaaagcctcaggtagatgggcaagctgcctgcagccaggctgcatgccaccctgtgagggagacagccagacagacctgggtttgaatcccagctgtgtgattttgccacactgtgtgatttttaggaagtggctcagtttcctcatccagaagatggggctagtagcagcactgtgtcactggattgtactgaggatggggctaatgaaatactttgatgtgcccagagcatagtgggtgagggaacccagcacaacaggactgggaaggaggcaggggccaggtggaggtggctgtggacctgccagtcccgggcacggtctgcatggagtagctgccattgctccttctgccaaagcagaacatgctccttcctatctcttcaaagttctctgcttttttccttcataaaactccccacagaccccaggactgcgacggccgtggtgagagatgctggttgggataagggcagcagtctgtcctgacccctctctcccttctctccagggcacctctcaccggtggccaataaccatcctgtccttccgtgaattcacctaccacttccgggtggcactgctggtgagcaggggcatcccacctaccctggaggtctgggcacccctgtctgcgacgtggggcttgaggaatggggggtttgcacagtatgtggtagggctgggggcacagtgtcaagcaatgtcagcagggagtgccatctgccccgcacccccagagccacctcaccttcccactgcccttccacccagggtcaggccaactgcagttcagaggctctcgcccagccagccacagactaccacttccacttctaccgcctgtgtgactgagctgccctcctgaggcagcaccacaccagggaccaggggtgcccaggcaccccccaacactggatgcaatggtgttacactggagcccgctgcaggccagctctgctgttcactggccctacccgagactggtgaaactggaagtcttcacactggagttgctgttccagctggtcgcccctcacggcacagagggaacctgagagccagagacttcttgggccttcctgcctgccaccccctaggggccaggacaggaccagtttacctctttccagatatggtggttggagggctggttcaggtgccctggagggaaggggaagcctgtggccctgatttgttcagagcccattctcccttgcctccccttttgagactggagccaacccttttggagagaggacctgcccacctttgagatcagcagggggctcggatccagccctaagagacttgggtggacccccatgagtcaatggagggcagacggctctcccccttaaagctgttccctgggggatggcttggtagtggactttctggggtttgcctgttacgccagactcggacttctaagctttaagtgtggcccaggaggtttcttctccctgggagggcttggctcccaagaagtcccagggcagccgaggccagccctgcctgggttggagaaactgactttgtgccttaagtctactcagtgcctggtgaagccaccctcagcccttcacaggcctgaaccagtaggggccagtgggccaggtaagccctagagccttgaaccaggaatatccaggaagaggaaattccctttgagcccccagatggtattgcagcttcactgcctgcgttcctgggagcgtctggagctcacagtgatcagtgaccacatcattctctctgagcagaggagcaggaatccctcaagcagcagcctggtcttggctggtgggcagatgcaaatagcttttgctgttattaatgaagtaattactaaatgcacttaaaccagggcaggaaggaatggaaggatggagctagaaagctcagagtgggccagagcaggggtgtgacacttgcaaagacagggctctgactctgatccctcccagggagcctccgacacccatcccactcccaaccaccaagaccctgggttagggaagaagttgtatcttaagtgccaccttcaagtttcttagtggtgcctggtgcattccgaggctacatccaggctcatggaaggagtgtagtattcatttagccatgtctgccatgggtccagaaatgggaaagggaattgctgtccttgccctgtggtatgctgccacctctttgggaagcaggccttgcccctgtcccaccactcattctcagctttgaatgggaggcctttctatagtggaggcctttccttgaagcctatgaactgcaggcccccttttgccattgatctcaaagcacttgtcctcaggatagggaagagcagggggatgcaggaatagcagggatagcttgctcccagccccctccccaatttggttccgttgacataggaattttacgattcccaaaccatgcaggggctgagccttccttatgatgactttgttctccctcccactgggggaatcctccctatgccttaaaactgccgagccccactccatgtaataggattcctgggcttcctcaatgggggttcatgttcttggactgcgggccctcagtccttaactggaaagtgaccgtccactgccccatggagcccatctggacacagcacagccccaaaaccgttagcagctggctctgtttccaagcctggggaggggttcctcagtgcaggagttggggacaggctggggatccaagctgcttgagggggtcaaccttggaccaaagttgccttaagcctgtggtaaaagggcttcagggaaggtaagtgggccacctgctggaagctgccagctgcccggctggcaatggtgtgagtgtcttggccctgtccctgccctggggtccagcaggtcatccctcccttcttctctctcctttggcgtttgttcctgtagtcactgggctaatctccccctagcttcaagctgtacatagggcctcccagtgcaaatcctcctgcccataccgtgcacccttagaagcctgcgtgtgcatagagcgccccctacttcccagttaactcccagttcttctccctgagcttggtatttgtcatgtgccaactctgactctgaggtgggcagtgagggaagcagccccgggcctgcttgcttcctgtccccgaaatgttcgtttcttctgaagtaaatatacatatataaataaatgtataaatactgctttgtatctga

SEQ ID NO: 8134 - DNA, 131 bp, Homo sapiens
ggggcacccccttaaccgctcctccgacctccagcagagcccactggggacagcctcagcctggccctctttgcatttgcacttttcctcttggtcctcagtcatcgtccgtggttccggaccaggcctgc

SEQ ID NO: 8135 - DNA, 3562 bp, Homo sapiens
  SITE (184): n equals a,t,g, or c
actgctatacatctgcatttattatgagcagcaggtgggacacttccagcaacagtaaaaaaaagtaatttacaaaagcaggtttcagtgaagccatctggttgttacctaaaagaggagaggggtatcaaaataagaccaatggcccttctttcctccttctctccctgcacccctgtgctcntggggcaagggctattgagcacacacctctgaggatgagccaccagagctgattcctactggcctgtttggtggattgtctgcagcaagttttaagccctggatcttgaccccttttcagccagctgacttcccagcagcctctccaagtcactggggtctgacttctaagaatgtaaatgtacagccatgggatgcctgcgtccacactctaggtggtacatcccaaaggcagatcgaggccttgggccatgtgagctcagaactgagagtcacatttggctcaaatccgtatgaggggcagggaaagaggcacaaatgtctagtgtccctacccattccactgagtctgtctccatcaaccaaggggtcatgctggtaagagctttaaggaccctgctgacctgactctggggaggcttccctgggctgtgccttggaggctcacgcatccatcccattgcagctcttacccttgggtgctcacacgtagatgccaacccagagcagcaggaagaggactccaaagcccatgaagagtgaggccactaaggagatgaggagctctttatagatatcacgagtgtacttggtagaggtgacctcgtaactgggcacagcagttaaggcaaagcgaaggggtggactgtggagtgcagagagcccagcccacggcaatctgaggagaaaagcattggctcaatgccttctgggaggcctatctggctcagaacagccaggcagaagggcctaagagatgccttggactctggtgctccactgccatgaagaaaatgagacccagaggagttaggtcacttgccccaggtcacacagctcatgagggccggagctgggactagccctcagacctcctgacacctgagtgcacccttccttataccacctttccaactgtagcacccctattccccacctccactccagccaggtcccctgctcactgtcctggaaatccaaagaacaaactgagctcacctgaacttgggaaataaggctataacctgcccctgggcatcactagccctcctctcctccttaccttctctcagccccaatccaatgtacaaaaccggcggggtccatgtacctagcgtggtttctccctgagcttcccacatcactaatgctggtcctctggctgctcagtgaaaggatacacgaagaaccaggcggtgaagaacatgccaatggccaaaagcaccacggtcagatgggggaagacagctgggttcactgggctggtatatctgctcatggcctcgagctcctagaggagggaaagagatcagagctatcaaagaatcccacgatttcagcctggagagaacatgcggttatcaaggagcctggtgctgccgtgaaacagaggctgattttagcccggaaatgtagctgcagatcaatggcccttattagcattttctgaggccaataatctgaccactatgaaaacgtgactaaaggtacgaactctctgcctgagaaaaaccacatacaagaaaaagtttgcctacaatttccggagctttgtggaccagtgtctatagacaccaagctgagaacccccgctataagtcactgactggtggtacccagatctcaatatcttttttttttgacggagtctcattttttggacggcgtctcactctgtcgcccgggctggagggcagtggcacgatctcggctcactgcaacctctgcctcccgggttctagagattctcatacctcagcctctcgagtagctgggactataggattacaggtgcgcaccaccacatctaatttttgtatttttagtagagatggggttttgccatgctggccaggatggtcttgaattcctgacctcaggtgatctgcctgcctcggcctcccaaagtactgagattacaggtgtgagttgccgcgcccaggctcaatttttttttttttccagacagtcttgctctatcgcccaggctggagtgcctggagtgcagtggtgccaactcggctcactgcaagctccgccttctgggttcaagtgattatcctgcctcagcctcccgagcagctgggattacaggcgtgaaccaccatgcccggctaattttttgtatttttaggagagacagggtttcaccttgctggccaggctggtcttgaacttctgacctcctgatccgctcgcctcagcctcccaaagtgctgggattacaggagtgaaccaccgcgcctggccctcaatttctaattcagtattttcctcactacctatgctattatggaatcttgtgagctatggtcaagacattcaagttctggttctgagtaatctgagtctgagtaaagcgactgtaatatctatttcacagaactgaaaaataagaaagatgatgaatcaaagcatctagtgcctagcagggagtattttgctcaacaggtatttgcttccttcctaaggctgtagggaagatgatgagataatgtcttttatgaaagagggctgtaaacgtaaagatctgtacaaatgttaacttcattgtcaccggtcagccaatgcttctaaaatccagaacataacaactctagagaagtaaactgcccccattgttctgagacactggaattcaattcagtaaacaatcacggcccccttcccccaaaatgataaagacaatcactgccatttattgagcttccaattacgggccctctgtttggcactgagaatacaaagatgaatagacatcatcccagagctagatgcgcgtcagacggtggtcactaggaggcgtggccgaaaacaaagaagtccatggaacgtggccagagatctgtacagaggctgtgggcgctcctaggaaagtctggccaagtgcctgagagttggaagtgcttcaccaataaacatttgcccagggcattgtaggatggcacgggttcggcagaagaactttcccaataaagataacacaccaccgataacagagatatacaaactggaaggtattcaaaattcgccccacgcctctcgcccttagaaatcgcgagctgagaaacctaaggagttcatggcaaggggcttcccccttccccacccttcagcccaagccggaggttccaggagcgtctagccctctggatctccggcgtctgaggagataagcgcggtgtgggtcagaccccgaggggtcctcgcatctccgtctggaactcccctcaacgctctcaccattttgccccgcgaaggctaatccgccgctccgccaccggaagaacacgtcggcaggagcaggcgcctagcacaaccggaaaaggaagtgcctccggcgcaagtggcattgagggacttgtagtcctgcgatttc

SEQ ID NO: 8136 - DNA, 3564 bp, Homo sapiens
actgctatacatctgcatttattatgagcagcaggtgggacacttccagcaacagtaaaaaaaagtaatttacaaaagcaggtttcagtgaagccatctggttgttacctaaaagaggagaggggtatcaaaataagaccaatggcccttctttcctccttctctccctgcacccctgtgctcctggggcaagggctattgagcacacacctctgaggatgagccaccagagctgattcctagtggcctgtttggtggattgtctgcagcaagttttaagccctggatcttgaccccctttcagccagctgacttcccagcagcctctccaagtcactggggtctgacttctaagaatgtaaatgtacagccatgggatgcctgcgtccacacttctaggtggtacatcccaaaggcagatcgaggccttgggccatgtgagctcagaactgagagtcacatttggctcaaatccgtatgaggggcagggaaagaggcacaaatgtctagtgtccctacccattccactgagtctgtctccatcaaccaaggggtcatgctggtaagagctttaaggaccctgctgacctgactctggggaggcttccctgggctgtgccttggaggctcacgcatccatcccattgcagctcttacccttgggtgctcacacgtagatgccaacccagagcagcaggaagaggactccaaagcccatgaagagtgaggccactaaggagatgaggagctctttatagatatcacgagtgtacttggtagaggtgacctcgtaactgggcacagcagttaaggcaaagcgaaggggtggactgtggagtgcagagagcccagcccacggcaatctgaggagaaaagcattggctcaatgccttctgggaggcctatctggctcagagcagccaggcagaggggcctaagagatgccttggactctggtgctccactgccatgaagaaaatgagacccagaggagttaggtcacttgccccaggtcacacagctcatgagggccggagctgggactagccctcagacctcctgacacctgagtgcacccttccttataccacctttccaactgtagcacccctattccccacctccactccagccaggtcccctgctcactgtcctggaaatccaaagaacaaactgagctcacctgaacttgggaaataaggctataacctgcccctgggcatcactagccctcctctcctccttaccttctctcagccccaatccaatgtacaaaaccggcggggtccatgtacctagcgtggtttctccctgagcttcccacatcactaatgctggtcctctggctgctcagtgaaaggatacacgaagaaccaggcggtgaagaacatgccaatggccaaaagcaccacggtcagatgggggaagacagctgggttcactgggctggtatatctgctcatggcctcgagctcctagaggagggaaagagatcagagctatcaaagaatcccacgatttcagcctggagagaacatgcggttatcaaggagcctggtgctgccgtgaaacagaggctgattttagcccggaaatgtagctgcagatcaatggcccttattagcattttctgaggccaataatctgaccactatgaaaacgtgactaaaggtacgaactctctgcctgagaaaaaccacatacaagaaaaagtttgcctacaatttccggagctttgtggaccagtgtctatagacaccaagctgagaacccccgctataagtcactgactggtggtacccagatctcaatatcttttttttttgacggagtctcattttttggacggcgtctcactctgtcgcccgggctggagggcagtggcacgatctcggctcactgcaacctctgcctcccgggttctagagattctcatacctcagcctctcgagtagctgggactataggattacaggtgcgcaccaccacatctaatttttgtatttttagtagagatggggttttgccatgctggccaggatggtcttgaattcctgacctcaggtgatctgcctgcctcggcctcccaaagtactgagattacaggtgtgagttgccgcgcccaggctcaatttttttttttttccagacagtcttgctctatcgcccaggctggagtgcctggagtgcagtggtgccaactcggctcactgcaagctccgccttctgggttcaagtgattatcctgcctcagcctcccgagcagctgggattacaggcgtgaaccaccatgcccggctaattttttgtatttttaggagagacagggtttcaccttgctggccaggctggtcttgaacttctgacctcctgatccgctcgcctcagcctcccaaagtgctgggattacaggagtgaaccaccgcgcctggccctcaatttctaattcagtattttcctcactacctatgctattatggaatcttgtgagctatggtcaagacattcaagttctggttctgagtaatctgagtctgagtaaagcgactgtaatatctatttcacagaactgaaaaataagaaagatgatgaatcaaagcatctagtgcctagcagggagtattttgctcaacaggtatttgcttccttcctaaggctgtagggaagatgatgagataatgtcttttatgaaagagggctgtaaacgtaaagatctgtacaaatgttaacttcattgtcaccggtcagccaatgcttctaaaatccagaacataacaactctagagaagtaaactgcccccattgttctgagacactggaattcaattcagtaaacaatcacggcccccttcccccaaaatgataaagacaatcactgccatttattgagcttccaattacgggccctctgtttggcactgagaatacaaagatgaatagacatcatcccagagctagatgcgcgtcagacggtggtcactaggaggcgtggccgaaaacaaagaagtccatggaacgtggccagagatctgtacagaggctgtgggcgctcctaggaaagtctggccaagtgcctgagagttggaagtgcttcaccaataaacatttgcccagggcattgtaggatgggcacgggttcggcagaagaactttccaaataaagataacacaccaccgataacagagatatacaaactggaaggtattcaaaattcgccccacgcctctcgcccttagaaatcgcgagctgagaaacctaaggagttcatggcaaggggcttcccccttccccacccttcagcccaagccggaggttccaggagcgtctagccctctggatctccggcgtctgaggagataagcgcggtgtgggtcagaccccgaggggtcctcgcatctccgtctggaactcccctcaacgctctcaccattttgccccgcgaaggctaatccgccgctccgccaccggaagaacacgtcggcaggagcaggcgcctagcacaaccggaaaaggaagtgcctccggcgcaagtggcattgagggacttgtagtcctgcgatttc

SEQ ID NO: 8137 - DNA, 131 bp, Homo sapiens; identical to SEQ ID NO: 8134

SEQ ID NO: 8138 - DNA, 131 bp, Homo sapiens
ggggcacccccttaaccgctcctctgacctccagcagagcccactggggacagcctcagcctggccctctttgcatttgcacttttcctcttggtcctcagtcatcgtccgtggttccggaccaggcctgc

SEQ ID NO: 8139 - DNA, 3564 bp, Homo sapiens
actgctatacatctgcatttattatgagcagcaggtgggacacttccagcaacagtaaaaaaaagtaatttacaaaagcaggtttcagtgaagccatctggttgttacctaaaagaggagaggggtatcaaaataagaccaatggcccttctttcctccttctctccctgcacccctgtgctcctggggcaagggctattgagcacacacctctgaggatgagccaccagagctgattcctagtggcctgtttggtggattgtctgcagcaagttttaagccctggatcttgaccccctttcagccagctgacttcccagcagcctctccaagtcactggggtctgacttctaagaatgtaaatgtacagccatgggatgcctgcgtccacacttctaggtggtacatcccaaaggcagatcgaggccttgggccatgtgagctcagaactgagagtcacatttggctcaaatccgtatgaggggcagggaaagaggcacaaatgtctagtgtccctacccattccactgagtctgtctccatcaaccaaggggtcatgctggtaagagctttaaggaccctgctgacctgactctggggaggcttccctgggctgtgccttggaggctcacgcatccatcccattgcagctcttacccttgggtgctcacacgtagatgccaacccagagcagcaggaagaggactccaaagcccatgaagagtgaggccactaaggagatgaggagctctttatagatatcacgagtgtacttggtagaggtgacctcgtaactgggcacagcagttaaggcaaagcgaaggggtggactgtggagtgcagagagcccagcccacggcaatctgaggagaaaagcattggctcaatgccttctgggaggcctatctggctcagagcagccaggcagaggggcctaagagatgccttggactctggtgctccactgccatgaagaaaatgagacccagaggagttaggtcacttgccccaggtcacacagctcatgagggccggagctgggactagccctcagacctcctgacacctgagtgcacccttccttataccacctttccaactgtagcacccctattccccacctccactccagccaggtcccctgctcactgtcctggaaatccaaagaacaaactgagctcacctgaacttgggaaataaggccataacctgcccctgggcatcaccagccctcctctcctccttaccttctctcagccccaatccaatgtacaaaaccggcggggtccatgtacctagcgtggtttctccctgagcttcccacatcactaatgctggtcctctggctgctcagtgaaaggatacacgaagaaccaggcggtgaagaacatgccaatggccaaaagcaccacggtcagatgggggaagacagctgggttcactgggctggtatatctgctcatggcctcgagctcctagaggagggaaagagatcagagctatcaaagaatcccacgatttcagcctggagagaacatgcggttatcaaggagcctggtgctgccgtgaaacagaggctgattttagcccggaaatgtagctgcagatcaatggcccttattagcattttctgaggccaataatctgaccactatgaaaacgtgactaaaggtacgaactctctgcctgagaaaaaccacatacaagaaaaagtttgcctacaatttccggagctttgtggaccagtgtctatagacaccaagctgagaacccccgctataagtcactgactggtggtacccagatctcaatatcttttttttttgacggagtctcattttttggacggcgtctcactctgtcgcccgggctggagggcagtggcacgatctcggctcactgcaacctctgcctcccgggttctagagattctcatacctcagcctctcgagtagctgggactataggattacaggtgcgcaccaccacatctaatttttgtatttttagtagagatggggttttgccatgctggccaggatggtcttgaattcctgacctcaggtgatctgcctgcctcggcctcccaaagtactgagattacaggtgtgagttgccgcgcccaggctcaatttttttttttttccagacagtcttgctctatcgcccaggctggagtgcctggagtgcagtggtgccaactcggctcactgcaagctccgccttctgggttcaagtgattatcctgcctcagcctcccgagcagctgggattacaggcgtgaaccaccatgcccggctaattttttgtatttttaggagagacagggtttcaccttgctggccaggctggtcttgaacttctgacctcctgatccgctcgcctcagcctcccaaagtgctgggattacaggagtgaaccaccgcgcctggccctcaatttctaattcagtattttcctcactacctatgctattatggaatcttgtgagctatggtcaagacattcaagttctggttctgagtaatctgagtctgagtaaagcgactgtaatatctatttcacagaactgaaaaataagaaagatgatgaatcaaagcatctagtgcctagcagggagtattttgctcaacaggtatttgcttccttcctaaggctgtagggaagatgatgagataatgtcttttatgaaagagggctgtaaacgtaaagatctgtacaaatgttaacttcattgtcaccggtcagccaatgcttctaaaatccagaacataacaactctagagaagtaaactgcccccattgttctgagacactggaattcaattcagtaaacaatcacggcccccttcccccaaaatgataaagacaatcactgccatttattgagcttccaattacgggccctctgtttggcactgagaatacaaagatgaatagacatcatcccagagctagatgcgcgtcagacggtggtcactaggaggcgtggccgaaaacaaagaagtccatggaacgtggccagagatctgtacagaggctgtgggcgctcctaggaaagtctggccaagtgcctgagagttggaagtgcttcaccaataaacatttgcccagggcattgtaggatgggcacgggttcggcagaagaactttccaaataaagataacacaccaccgataacagagatatacaaactggaaggtattcaaaattcgccccacgcctctcgcccttagaaatcgcgagctgagaaacctaaggagttcatggcaaggggcttcccccttccccacccttcagcccaagccggaggttccaggagcgtctagccctctggatctccggcgtctgaggagataagcgcggtgtgggtcagaccccgaggggtcctcgcatctccgtctggaactcccctcaacgctctcaccattttgccccgcgaaggctaatccgccgctccgccaccggaagaacacgtcgacaggagcaggcgcctagcacaaccggaaaaggaagtgcctccggcgcaagtggcattgagggacttgtagtcctgcgatttc

SEQ ID NO: 8140 - DNA, 1075 bp, Homo sapiens
taaataagatatggcttaggtttctggttacctgagacatactataccttctcagatactctcagacctgaatcatttaacaaactaaggcagaaatactaaaaatatctggttcaataacataggggcatggagtagacatgcagaaaatgcttgttcacttgccttgaaatggctccaggtggcctgaaggaatcaatgaaacttctcaagtatctacattacaaccactggtccccactacacatttatttctaaataaaggaggagaaactctagcaaagtaatatttaacattttcattgcttccaggataaatcttattgaatatggaggatctgatagtggtaggtctatcaggaatatcacggaaaatgcttttgatgttgttggcaaagtcaattcctatcatttgtacttgacaccagctacctagcaggctcattgtgaacttcaggtttcgcccacgttatttatataaagtatctcagtgtaatatagggagttgctggttatttgaaaatagtaacaaaaaataacccaaacgagaaactccatttccataattagctttcctgaaagtcaggcatgtctttgaggacaggttttggcagtattatttttgtgcacaggaggaaaattgttagtaggtttatagatgttatttttataatagaatgttaaacccctgaaaaacatcaaaaattgtctcctagaactaattctatgttttaaaaacttgttttaaaaaggattctaaatagcaatagggtctttcctcctttctccactccaatggtttaatgggatagaggaatcaatgtttatatttttaaacctgtaaatattttattttgggtattttgtatatttgttgatataattccattttgtgcatatgtaccattgtgcatgttgctgtttttgatagtcactcttttaatgaatgtaagaagcttgggctaatagcacttttcttgttccattcaaacatctgaaaatgaaattacaacactgccattttactgttgtgtttaattcagtcaataaattttgttgctcctttgcatttaaa

SEQ ID NO: 8141 - DNA, 119 bp, Homo sapiens
gaagatgagtatttcatattgaattctactaacatatcctgtatgtttactatgttgccagagaggatgctgtgtgctttttttacattgttatctttactcttcacaagaaccatgta

SEQ ID NO: 8142 - DNA, 2730 bp, Homo sapiens
ctgtggagggctgctgcccccagatagagctgcctctctgctgaggctgccaccagccaccagcaatcccttttcatgtgacctgcagttgtgcatgatgatctctatcaatcctttttccccaggctcctggtagtgcatagcattgcaccaggtgcttcaggagaaaagctgcctccactgctaatctgaaaagcactttgcctggaaagacacctgagacgtgtaagatattaatagctgcagaagtttcatccctgtgtaatttaaatccctttcccgaggaacactcttacggtgggggtggaagagaaggagagaaaagcctagaataattatgagaggttgtgggaaaaatttttttggggatgactgaaatattctagtttaatcatccaccctggtgcttgctggatttggtaatgaacatttttactttctccttaaagtcagaggctattttgacagctacagatgctgtaaattacaagtgttctgatatggtcctgtgagaagctcttgaaaaagtgttccactaaataagtttgggaagggctgtaaataccatctgcctcctagtgagccccagtgcacatcggcatttgaggggatgagagatccttcctacagaaacctcttatgctctggttatccttggatttaccatattgatgtgaagatagatttcctcaaatgtattgccctatctctgataggttgctaataatgttcaagggtaaaaactttgttgaaggggaatggaatgttatggaaattgaagtgtagactgtgtagttgttggggtagatgggggagggtctcaggcttattttggtaagagagggagactgcctcctagcacctttttctgtgctctggcccttaggcagtgggatatacagatgtcaggtattccaggatttgttgaaatctctcctttggagagatttgaggtggtctgttccatgcatggagtctaaagttgagacaagtcaaggcagttatcacacagagtgcagtgggagagccatgcagagggtaagatcaggtggctttgtaaaggaatccatgcagaacagtgtgttttagggcggacagactttaggctttaagggcaggccctttgctggacccattgacaaagtcactgacagctgtttggaacaattgcctaggaaagcctgtccccacaagactcttgtcttaacacaggcatcctaggtggtgatattgttactccatggacttctctggggccatcagaagtcctgaatgaactgggggtcaagctcatgaagcatctggctcctactcaggaaagcatggcagcctgtacttaggcttctctggcagcaccagggtgtgtccagaaagcatcaatcagggaagaacagtgtgagtgcctaatgaggatggatcccagtgagcaaagagacccaaatcaatagagggaaaacaaatgcaggtgaaaacctttggagtaacacgaatatagggttaaaacccagctctactttcatacctttgcacaaattacttaagctctctaggcctcatttttctcatctgtaagatgagaataataaataccactttgctaggcattgggaggatgaaatgatttcacacatggaatactccagcactgtgataaattccatccattcattctgctgccacagatcaagaggagttgaatgatagtgagaccatcattcacttgagccaatccttcccctagtgctacgattctgatcctgttcacttttaccccactttttcaagggtgagtctcacagagcttttaagtttggcctctcacactctcccacacctgctaaatccttataaatgtttcttctcttccctcaaacttccctcactgtcttatttgtttcttgccctgtggaaggcagtagggtacacattcttcttagtgtaaatatgccttgaatttgcacaagggcaggacaatgtgttcttttttccaacagctgttttgatgatgcttggcaacatgttggtatttttggcccgagtagcacatattgagaccacatcctcaaggaatactttttgatctctcccaagtctcttttctagactgaatggtttggattttccattgatgaaaaacattccccttttcttgcccacatgagagtttatctgcccgtttttctgatcatctctctcctcttgtttacagcacatgcaaaagtctcttgggctcttcctatagtttataacttttgttttagttttatattacctggaatagcttaggatcatctcagagggactctggcatagtccctcttggagatcagggatgccaggaggggcattaaggatggagagatcaggtgaatagtgaaggagtgatactggacaaattgtaaagctctaaagctccaccaggtggaggagggcacaggtgctgaaagacaagagaggtaagggaaagcctagaatcaagtcagaggcacagcaaacagaagtaccccaagcaagccagttagaccaagagagaggctcattgtcctgtcttttctttcttatgggtgcgtggccctgaagcaggagattctgctcttgaatgggaaagggttttcaagagactctttgaccagttctccatccatgagaatacatctcaattaccatggagacttccatcttaaaaatagccattgagtggaatcttagtgcaaaaaaaaaaaaaaaaaa

SEQ ID NO: 8143 - DNA, 2265 bp, Homo sapiens
cagctacagatgctgtaaattacaagtgttctgatatggtcctgtgagaagctcttgaaaaagtgttccactaaataagtttgggaagggctgtaaataccatctgcctcctagtgagccccagtgcacatcggcatttgaggggatgagagatccttcctacagaaacctcttatgctctggttatccttggatttaccatattgatgtgaagatagatttcctcaaatgtattgccctatctctgataggttgctaataatgttcaagggtaaaaactttgttgaaggggaatggaatgttatggaaattgaagtgtagactgtgtagttgttggggtagatgggggagggtctcaggcttattttggtaagagagggagactgcctcctagcacctttttctgtgctctggcccttaggcagtgggatatacagatgtcaggtattccaggatttgttgaaatctctcctttggagagatttgaggtggtctgttccatgcatggagtctaaagttgagacaagtcaaggcagttatcacacagagtgcagtgggagagccatgcagagggtaagatcaggtggctttgtaaaggaatccatgcagaacagtgtgttttagggcggacagactttaggctttaagggcaggccctttgctggacccattgacaaagtcactgacagctgtttggaacaattgcctaggaaagcctgtccccacaagactcttgtcttaacacaggcatcctaggtggtgatattgttactccatggacttctctggggccatcagaagtcctgaatgaactgggggtcaagctcatgaagcatctggctcctactcaggaaagcatggcagcctgtacttaggcttctctggcagcaccagggtgtgtccagaaagcatcaatcagggaagaacagtgtgagtgcctaatgaggatggatcccagtgagcaaagagacccaaatcaatagagggaaaacaaatgcaggtgaaaacctttggagtaacacgaatatagggttaaaacccagctctactttcatacctttgcacaaattacttaagctctctaggcctcatttttctcatctgtaagatgagaataataaataccactttgctaggcattgggaggatgaaatgatttcacacatggaatactccagcactgtgataaattccatccattcattctgctgccacagatcaagaggagttgaatgatagtgagaccatcattcacttgagccaatccttcccctagtgctacgattctgatcctgttcacttttaccccactttttcaagggtgagtctcacagagcttttaagtttggcctctcacactctcccacacctgctaaatccttataaatgtttcttctcttccctcaaacttccctcactgtcttatttgtttcttgccctgtggaaggcagtagggtacacattcttcttagtgtaaatatgccttgaatttgcacaagggcaggacaatgtgttcttttttccaacagctgttttgatgatgcttggcaacatgttggtatttttggcccgagtagcacatattgagaccacatcctcaaggaatactttttgatctctcccaagtctcttttctagactgaatggtttggattttccattgatgaaaaacattccccttttcttgcccacatgagagtttatctgcccgtttttctgatcatctctctcctcttgtttacagcacatgcaaaagtctcttgggctcttcctatagtttataacttttgttttagttttatattacctggaatagcttaggatcatctcagagggactctggcatagtccctcttggagatcagggatgccaggaggggcattaaggatggagagatcaggtgaatagtgaaggagtgatactggacaaattgtaaagctctaaagctccaccaggtggaggagggcacaggtgctgaaagacaagagaggtaagggaaagcctagaatcaagtcagaggcacagcaaacagaagtaccccaagcaagccagttagaccaagagagaggctcattgtcctgtcttttctttcttatgggtgcgtggccctgaagcaggagattctgctcttgaatgggaaagggttttcaagagactctttgaccagttctccatccatgagaatacatctcaattaccatggagacttccatcttaaaaatagccattgagtggaatcttagtgcaaaaaaaaaaaaaaaaaa

SEQ ID NO: 8144 - DNA, 1934 bp, Homo sapiens
ggagaccgagagtctgaactatcagaagtcccagaggcaggcggggaggggctgacaacccaggacgcgggatgtggaactgaggagggagaggcgtctgtctcagagaaccaggagctggacggaagcacaggggcagacgcagggccttgcccgtcactgggagaggcctatgccagagaaactgaggatgaggaggcggaggctgacagaacatccagaagaggctggaggctgcaagcggtggctgtgggcctcccggaccgtgaggatgcacagactggctctgtggctgctgggattatggggggtgatgtggtcccacacatcagcgctgctggcgctggtgaagctttggaaggggcgcttgggcaaggctgggactcgaaagaaaaggaagaggcagcagcaggagagcatgcaggtgggcaagaatttggtctggagggctcagcagaggaagaggtgactggcagaggcagccaagtagaggcttttgagtccagggagggaggaccttggggagggcgggtagaggccgaggaatctgcaggcgcagaggacagctgtgggctggatcccgcgggctcccagacagcgagggcagaggggatgggagccatggtggaggctggggggcttctagaaaagtggacgctgttggaagaagaggctgttggatggcaggagagagaacagagggaagacagtgaggggcggtgtggggactaccaccctgagggagaggcaccaaggctccttgatgcagagggtctcatggtgaccgggggccggagggcagaggccaaggagactgagccagaaagcctggaacatgtcaggggccaggaggagcagccaacacaccaggcccctgcagaagctgcgccggagtcagtcggggaagccgagacggctgaggccatgggcagtgccagaggaggtgctgccaacagctggagcgaggtgagggctcttggtggggtctcggggggaacgagtggaatcccgaagccggccccatggtcctctgtgccccctttcctgcaggccccgctccccgggtccctcctagacgtctctgtcccaaggagtcgcgtgcacctctcgagaagctcctcacagcgtcgctcccggccctcttttcgtcggactccggcctgggagcagcaggaggagcccccagcccccaaccctcctgaggaggagctgtcagctcctgagcagagacccctccagctggaggaacccctggagccaagccctctgaggcatgatgggaccccggtgccagccaggagaaggcccctgggacacgggtaggcacagggcaactcagctggggtggggaagagaccgcgggcacctgggaacctgttctcacgggcctgacttccgcctccaggtttggcctcgcgcaccctggcatgatgcaggagctgcaagcccgtctgggccggcctaagccccagtgactgagacccggtgctctgggagccaggccctgagtgggtgccagaaggcttgctccaatgccactgagccctgctccctctgccactgtggacacatcctctccaccctctgggcctcagtgtcttgatgtatcattcatggagcaggcaaaaccagacgtctgggaagaccgtgaacttaaggagtctgattctccgacacaggctggtggaccacgtaccccactgagaccacctctcagggtgcctgccctggttcctccccagcctgagtcagctgtctggactgcaaggaggctgggcacgggggctcacgcctgtcaccccagagctttgggaggccaaggtgggaggatcgcttgagaccaggagttcgagaccagcctgggcagcatagcaagatccccatcttttaaaaacaaaataaaacaataaagactgcaaggaagactgagggaa

SEQ ID NO: 8145 - DNA, 1934 bp, Homo sapiens
ggagaccgagagtctgaactatcagaagtcccagaggcaggcggggaggggctgacaacccaggacgcgggatgtggaactgaggagggagaggcatctgtctcagagaaccaggagctggacggaagcacaggggcagacgcagggccttgcccgtcactgggagaggcctatgccagagaaactgaggatgaggaggcggaggctgacagaacatccagaagaggctggaggctgcaagcggtggctgtgggcctcccggaccgtgaggatgcacagactggctctgtggctgctgggattatggggggtgatgtggtcccacacatcagcgctgctggcgctggtgaagctttggaaggggcgcttgggcaaggctgggactcgaaagaaaaggaagaggcagcagcaggagagcatgcaggtgggcaagaatttggtctggagggctcagcagaggaagaggtgactggcagaggcagccaagtagaggcttttgagtccagggagggaggaccttggggagggcgggtagaggccgaggaatctgcaggcgcagaggacagctgtgggctggatcccgcgggctcccagacagcgagggcagaggggatgggagccatggtggaggctggggggcttctagaaaagtggacgctgttggaagaagaggctgttggatggcaggagagagaacagagggaagacagtgaggggcggtgtggggactaccaccctgagggagaggcaccaaggctccttgatgcagagggtctcatggtgaccgggggccggagggcagaggccaaggagactgagccagaaagcctggaacatgtcaggggccaggaggagcagccaacacaccaggcccctgcagaagctgcgccggagtcagtcggggaagccgagacggctgaggccatgggcagtgccagaggaggtgctgccaacagctggagcgaggtgagggctcttggtggggtctcggggggaacgagtggaatcccgaagccggccccatggtcctctgtgccccctttcctgcaggccccgctccccgggtccctcctagacgtctctgtcccaaggagtcgcgtgcacctctcgagaagctcctcacagcgtcgctcccggccctcttttcgtcggactccggcctgggagcagcaggaggagcccccagcccccaaccctcctgaggaggagctgtcagctcctgagcagagacccctccagctggaggaacccctggagccaagccctctgaggcatgatgggaccccggtgccagccaggagaaggcccctgggacacgggtaggcacagggcaactcagctggggtggggaagagaccgcgggcacctgggaacctgttctcacgggcctgacttccgcctccaggtttggcctcgcgcaccctggcatgatgcaggagctgcaagcccgtctgggccggcctaagccccagtgactgagacccggtgctctgggagccaggccctgagtgggtgccagaaggcttgctccaatgccactgagccctgctccctctgccactgtggacacatcctctccaccctctgggcctcagtgtcttgatgtatcattcatggagcaggcaaaaccagacgtctgggaagaccgtgaacttaaggagtctgattctccgacacaggctggtggaccacctaccccactgagaccacctctcagggtgcctgccctggttcctccccagcctgagtcagctgtctggactgcaaggaggctgggcacgggggctcacgcctgtcaccccagagctttgggaggccaaggtgggaggatcgcttgagaccaggagttcgagaccagcctgggcagcatagcaagatccccatcttttaaaaacaaaataaaacaataaagactgcaaggaagactgagggaa

SEQ ID NO: 8146 - DNA, 1931 bp, Homo sapiens
ggagaccgagagtctgaactatcagaagtcccagaggcaggcggggaggggctgacaacccaggacgcgggatgtggaactgaggagggagaggcatctgtctcagagaaccaggagctggacggaagcacaggggcagacgcagggccttgcccgtcactgggagaggcctatgccagagaaactgaggatgaggaggcggaggctgacagaacatccagaagaggctggaggctgcaagcggtggctgtgggcctcccggaccgtgaggatgcacagactggctctgtggctgctgggattatggggggtgatgtggtcccacacatcagcgctgctggcgctggtgaagctttggaaggggtgcttgggcaaggctgggactcgaaagaaaaggaagaggcagcagcaggagagcatgcaggtgggcaagaatttggtctggagggctcagcagaggaagaggtgactggcagaggcagccaagtagaggcttttgagtccagggagggaggaccttggggagggcgggtagaggccgaggaatctgcaggcgcagaggacagctgtgggctggatcccgcgggctcccagacagcgagggcagaggggatgggagccatggtggaggctggggggcttctagaaaagtggacgctgttggaagaagaggctgttggatggcaggagagagaacagagggaagacagtgaggggcggtgtggggactaccactctgagggaaaggcaccatagctccttgagcacaggtctcatggtgaccaggggccggaggcacatgccaagagactgaaccataaagcctggaacatgtcaggggccaagaagagcagccaacacaccatgcccctgcagaagctgcgcctgagtcagtcggggaagccgagacggctgaggccatgggcagtgccagaggaggtgctgccaacagctggagcgaggtgagggctcttggtggggtctcggggggaacgagtggaatcccgaagccggccccatggtcctctgtgccccctttcctgcaggccccgctccccgggtcccttctagacgtctctgtcccaaggagtcgcgtgcacctctcgagaagctcctcacagcgtcgctcccggccctcttttcgtcggactccggcttgggagcagcaggaggagcccccagcccccaaccctcttgaggaggagctgtcagctcttgagcagagacccctccagctggaggaacccctggagccaagccttctgaggcatgatgggaccccggtgccagccaggagaaggcccttgggacacgggtaggcacagggcaactcagctggggtggggaagagaccgcgggcacctgggaacctgttctcacgggcctgacttccgcctccaggtttggccctcgcgcaccctggcatgatgcaggagctgcaagcccgtctgggccggcctaagccccagtgactgagacccggtgctctgggagccaggccctgagtgggtgccagaaggcttgctccaatgccactgagccctgctccctctgccactgtggacacatcctctccaccctctgggcctcagtgtcttgatgtatcattcatggagcaggcaaaaccagacgtctgggaagaccgtgaacttaaggagtctgattctccgacacaggctggtggaccacctaccccactgagaccacctctcagggtgcctgccctggttcctccccagcctgagtcagctgtctggactgcaaggaggctgggcacgggggctcacgcctgtcaccccagagctttgggaggccaaggtgggaggatcgcttgagaccaggagttcgagaccagcctgggcagcatagcaagatccccatcttttaaaaacaaaataaaacaataaagactgcaaggaagactgagggaa

SEQ ID NO: 8147 - DNA, 1934 bp, Homo sapiens; identical to SEQ ID NO: 8144

SEQ ID NO: 8148 - DNA, 866 bp, Homo sapiens
ggcctgtgaaagcactagggcatgggggacgtggggcccaggggcagagcctgaggactggggaatcttaggcagagaggaggccaggacaaccccaggtagggaagaggccagggcaattttagatggggaggaagccaggacaatctcaggcggggaggaggctgagacagcctcaggcggggaggaggctgaaacagcctcaggcggggaggaggccgggacagcctcgggaggggaggaggccgggatagcctcaggcggggaggctgggacagcctcaggaggggaggaggccgggacagcctcaggaggggacgaggcctggacaacctcaggcaaagaggaggctgacctgctgggagtcagacagacagaatatggagcagtcccaggagaaaggctcctagaggctactggaaaagtctgggtcctagaggaggagggggatgaggagagagaggctgaggtgagccctttccccaaacaggcccaggtcctgggcactgaaagaacagaagaggctgctgagagccagaccgcagggagggaagctgtgggaggccaggaggcaggggagagctttgagggccaggtagacctgcgtggtaaggaggctgagatgaggcaggacttggggatcagggccgaccgggccaggatggaagagctggtacaggcagaggaggcccaggaggagagagggagcagcagggatccagtggctgagctgccctcagatggagaggctgaaggcactgccgacttggaggcaactccagaggccaggcctgaggaggagctcacaggggaggagagtgaggcggcccagactagctgtggcctactgggcgtggaatggggtg

SEQ ID NO: 8149 - DNA, 348 bp, Homo sapiens
tggatgagagtgctttattgggcacccagcatgggggcttggcccgaggaggaccatcgggccccaagacaataaataaaccatcatctccctaaacaataaataaatatccaagaaataaatagctggcgaggaccagaggggctttcagttactgggtagggcctggggcagggggctggaagagccctcccttgtccaaggctgatgatgcgaaggctgccctgatgccaagactccagtcctaaagttctaaagggtggggggcagggggctaagaagccaccgatcagggctgggggctcaatgttgggaaccccaagggccagactgagtgcccagccttgg

SEQ ID NO: 8150 - DNA, 348 bp, Homo sapiens
tggatgagagtgctttattgggcacccagcatgggggcttggcccgaggaggaccatcgggccccaagacaataaataaaccatcatctccctaaacaataaataaatatccaagaaataaatagctggcgaggaccagaggggctttcagttactgggtagagcctggggcagggggctggaagagccctcccttgtccaaggctgatgatgcgaaggctgccctgatgccaagactccagtcctaaagttctaaagggtggggggcagggggctaagaagccaccgatcagggctgggggctcaatgttgggaaccccaagggccagactgagtgcccagccttgg

SEQ ID NO: 8151 - DNA, 893 bp, Homo sapiens
ggcctgtgaaagcactagggcatgggggacgtggggcccaggggcagagcctgaggactggggaatcttaggcagagaggaggccaggacaaccccaggtagggaagaggccagggcaattttagatggggaggaagccaggacaatctcaggcggggaggaggctgagacagcctcaggcggggaggaggctgaaacagcctcaggcggggaggaggccgggacagcctcgggaggggaggaggccgggatagcctcaggcggggaggctgggacagcctcaggaggggaggaggccgggacagcctcaggaggggaggaggccgggacagcctcaggaggggacgaggcctggacaacctcaggcaaagaggaggctgacctgctgggagtcagacagacagaatatggagcagtcccaggagaaaggctcctagaggctactggaaaagtctgggtcctagaggaggagggggatgaggagagagaggctgaggtgagccctttccccaaacagccccaggtcctgggcactgaaagaacagaagaggctgctgagagccagaccgcagggagggaagctgtgggaggccaggaggcaggggagagctttgagggccaggtagacctgcgtggtaaggaggctgagatgaggcaggacttggggatcagggccgaccgggccaggatggaagagctggtacaggcagaggaggcccaggaggagagagggagcagcagggatccagtggctgagctgccctcagatggagaggctgaaggcactgccgacttggaggcaactccagaggccaggcctgaggaggagctcacaggggaggagagtgaggcggcccagactagctgtggcctactgggcgtggaatggggtg

SEQ ID NO: 8152 - DNA, 349 bp, Homo sapiens
tggatgagagtgctttattgggcacccagcatgggggcttggcccgaggaggaccatcgggccccaagacaataaataaaccatcatctccctaaacaataaataaatatccccgacataaatagctggcgaggaccagagggggctttcagttactgggtagagcctggggcacggggctggaagagccctcccttgtccaaggctgatgatgcgaatgctgccctgatgccaagactccagtcctaaagttctaaagggtggggggcagggggctaagaagccaccgatcaaggctgggggctcaatgttgggaaccccaagggccagactgagtgcccagccttgg

SEQ ID NO: 8153 - DNA, 348 bp, Homo sapiens; identical to SEQ ID NO: 8149

SEQ ID NO: 8154 - DNA, 893 bp, Homo sapiens; identical to SEQ ID NO: 8151

SEQ ID NO: 8155 - DNA, 1546 bp, Homo sapiens
attgttattccaataggaaaagcattttatctcttcactttagcctttgctgagtattgtacaaaaagaatgatgctgcactaaataatgaacttctttttgaagaatttaataactagatgcattttgccttcctggaatccttttgtctgtctctttgcatcgttgactcttgcttatccagagatctcagcttaaatatttccttaaaggtacctttcctgagattccagctggaattgagtccccttagtatactctgccatatcacctcttgcagtttataattacccagctgtttgtatgaatgttatgtctgtgtctcacatcacactttgaatttcagagagagcagtggccatgtctgtttcggtcactgctctataactccagtgtctctcataacagtctgggaaataataagtactaattaagtatttgttaagtggaaatactgctgttagagcttctcctaattagagtgttaaaaatgagataatgtgtgcatgggggaaggggaaggagagggagaggaagtagataaacttgtgatattaccgtgagataatcctcaagtaagtcctctcacctccagggcctttgtttcaccttgtctgtaaaataggacagactgggttcaagatgccattaatatcctatattttgattccagtaacaatgatgacagattatgtaagctcatttgaatggaatatgtgacagctagctccccaaaagaatatttgacaagttctaaataaacatattagaaatgcttgccaactagatgatattatttagagcctcgtacccctgttagaaacaagcatatataattggtatatagtttgtaaattaataagatgtactcttctttcagttttctaattgaagcgtaaagacaaaattaagcagcatatcaaggttcatgtaagttacagttattaggtttaatatttagttttaatatttttcacccaacatcttgttgcatcttccagagtaaatctggggtccataaaccaaaccaggagagggaaaatggaaagagtgggcagaaatctgacagctcttaggtttcttctatttgtgttaatactgagacttttaaaaatcatttttatatgtagtgtttattatgaatagttgtaatttgttctgataaattagttgtattaaacactgttatttggctaatattactaggtataataaaatgatatttagtgggaagacattcatcaaagtagaagtagttaatttgggccaggtgcagtggctcacgcctgtaatcccagcactttgggaggccgagatgggcggatcacttgaggtcaggagttccagaccagcctggccaacatgatgaaaccccgtctctactaaaaatccaaaaatgagccaggtatggtgatgtgcacctgtaatcccagctactggggcggctgaggcacaagaatcgcttgaacccgggaggcggaggctgcaatcagtcaagatcgcgccactgtactccagcctaggcaacagagcaagtctctgtctc

SEQ ID NO: 8156 - DNA, 349 bp, Homo sapiens
gcttctccagccgccagaacttgaaaccgctctacaaatctccaggccatgattatatctgtctttttgagctctttctccaagattgcaggagtcagctttgtgattacatttgtgaattgctttagtagtatggaatggactgcatctggacccagagactcaaactcatgtaaagttgttatagtcttagtcatttgtctcaggtttcagttctcaatgcctttctgcagttttagtttaaaactgtggagaagataagcaaaatacaagttgagcagtctgtctttctgtgcgatttctcaaccttagcaacatcctctgagcagtgattcttagttccttgttc

SEQ ID NO: 8157 - DNA, 10198 bp, Homo sapiens
ttgcaaagaagattgctttgtattttatttacaacagaatgtaagaaaaagtaagttattaacaataataaataactaggaagaaaaacacagaacagccacaaaatgacacagaaggatggcatatgtaaggatcaacttttgtttgctttgcttatagtctgtaatgctgtgtattccaacacctggtccttcagcagtggcagtggtatgtggattaatttaaccaatcaagatcccagcttgaatgtaaacactacaaattacacttgagctacatgtgagtggtacaggtacaacaccaactcagagaccctctcctgggtgatatatagaaactgaagggagacttgcaatttgacagacatgctttcaatttaaagcaaaaaacatcaagaggcttatcctaaagtccttgttaatttaacaacaaaattacaattattaatggcatctgaaaatttcccaacatattcacattctcttattacactaactcctaaaaagcttaaacacttatatttcaaatgcaaacagattgttttgaaggtagaacacaaaagaacccaatgttttgcctcagcatgccaacagtgtgctattgtgtacacttcagtttcagcaagaatgaatagttaaaatagtttattcataatcagattgcagtcactggacagactttttaaatctcaagaactatggctcagatgacagattgtctcctagcctactgagtcagatgatcagaaaggtactaaaactatttggacaattcctctctattggattatctgattacacattatatgtagagtcagctatacactggcccttcttaagagtaaaattcctatcgacgtaagccagccaatgacctattactttgttgtcgctgagccatgaagagatgccaaagaaagtagaatttaaaaatacacataaatacattagccctgaaacttttgcagagaatgatttatcgagatgtatcagaatctattctcttagttcactgtttattacagtgtcttgaaagaaaaccacagttacttttgcaggtattgtggtaagtgtctgcataatatacccacaactgtgctacttagagatttattttcaggaccaacaacatggctaataaatacttccaaataaattaaaattttcctcacacacagatgcaaaaccgtaacagaagccttgataaatcagttcaccaacaaacccatattgtttgagttacaacggtggcaactaaaaatgtcacggcctccttcattgtgttccttttcctttgctttgtcttgcaacaacccaaagtgagaaaatgaaatgatcttcagaggtgatttctaacaaagcttatgtgttaaatacaccaagatcttctcatcccaggaaagcacagctaaagcaagaatgccgtgctatggccaagaaaatgcacaggggcacttcacatttgaaatcttcccagagttatgaaatgtacagtcattttgatggtctccactaacttcagagatgaagatggagtgaacgtatgtgatattctatggattatttatttaagtttggctaccagagacttaaaactgatggtgtctgattcactatactatatttatatttatatatatatatatatatatatatacacaggtataatacaattttggtgaacaaagttgaaggtttccatatcgcagacagaggcactgagttaaggattctatttccccccaaacatgcttagcaaattcaagtttctgctttttttttcttctaatttccatcatgcagccatttggcttccatccttctaagaattattaatgttctgtatatatacatccattgcaggcttgtattccacaataacaaagtcatgtatagagaatgtgaaatgatacttgaaaaccaagatatataaaatattgaagtcatttatgccttttgatgactgggttaaatatgcaaagcagctaaaggaatatttacaccacccaccccctttttaactcacacaaagcatatgtagacagaaaaactgaacatactttaagagcacacgcttttttttcggctaagaatcacactatcatcgtagctttgcaactgatgtctgtggtaacatactggttataaaagaaatgaaactcacaaaaggaaattagaacttagcttcctaaagcatatagaattgttaaccttgacagcagaagctactttataaaaagggaaaatagcaatgctcttaatggaaaaactaggtgccagatgtgtttaacagcctgcacaaaataaatacattctatgtgaaaataatgaccccatcccaccttgattttagcttgcaaatggtaagcaaatacatatactatttcagtgtcttctgaaagtagcattttgctctctaaagcaaaacattttcattaagtactactgtgtggagagggagggattgagaagtccgaggggtctgataaaatattaggttttcccacaagcaaaaatcatgcttccataccatgcatagaaggtgtcttactaagatactatcattcttagggaagagatacactgttgatctaagctatttgcaacaggtttcctttgagttctaggtttattctttttttttaagctaaatatcaacctatagataaagaaatgatcttgacagtctgacctatgacttagaaaactttggtgctgggctcatggggccagcgcctgcaccttgggagagtgtatcaacctgaaagacactacacagagtgctgagcactgagagggaagcaggcagggtccactggcagagaggctgtgtgagagaagcagattatgctccttggtctattttgtttcctttgggatctgtgttttgggaaggtccctttcctgaggttggaggttacgatcaggaaggctagctggggcgtgggcctccaagttgcccaattacttcttctcttcctctcttggaggacaaaagtcaatgctgagatttggcctgccctcccgtctgtgtttaaaggcagtgaggtgcaaaggtgacagatttctctctttggagcaaaggagaattgtctttctgtcacttcagtgagtgaccttgcctcctgtcaaccttgattctaatcttgcattaccactagttgaagaaaggaaagctagacagaagggcatctattatcactcctccttttcactctacaaataggagtcagcaattctgctcattctctcctcccacttgacagtagttgcttgatgtctgtgacattcccaatatttgtatttcaagtaaggagcaagagaatgacagtcttttctaaggtctggtggtaggcaatctgttccagggaattctggatgttactaagagtaaaacaaggaaggggatgggagacagttctcttttttatagttcatgcaccagacattctgaccatgttaaagcccagttagcttactctacccttgtacttctttgagtgggcagatagtaaatgaattctattcaattaattgcaaattctgagaatcttaattgatgatggaagctgacaagtcaaggtttgttggtacctgtagagaaaaaagatgttgcctcacctgggcctcttggttcctaaactgaaccattccaaaatcagttatggtcacattcatccatgcaattcttaaggatttctgaggccacaagggcacaaaaggggaaagttattaaaagacagaaacaagtagaatctttattaaattctgtggaaggtataaatgagttattattaattgcacttggagcctctatagcttgatgattaaaattttcaaaagtttagagttaattaggctccaaatcctgagtcagactaaccacaaaataggaatctcagtaactattggtattcaagtattagtaattagcagttcaaaatttaacagctaagtatgttatgcctgagagtattttggagaattttagatttgatgagaggaaactgacttcactattttctaccgtaccttgtaacaaaagtggtgcaaagttttcattcatttatccttgaagtccatgccaaacctcatcaaatgcccaataacaaggcttcctctctggcatacagctatgtggttacagaagattccttctgtcctttgcaagtcttacatcttacatctaatatgatgctgtgtagcatacttagggaatcatattctatgtgaagttactgagtcacatgcacactgaaaggtcgaaggaacatgtttgagtgacaaagcagtctttttctctatcagaagattcttaaaaaaaaacaacaacaacaaatgaaaatataaaaccccatgagatatttatataaagttactcagatttgggccgacatggcttatctgaagagtgcatgccgggtaaattcagggtggcttttttctcagggtctggaagtgtgagagtttctggggcagactttttccggggccgatctttgggaacggacagaaattcgggtgcgtctgtggagagaggggtggatggagcactagaaggcgcactgcggacggaagaaggcagcagggggatgctggagatagaaattgcaggtgggaaaatgccgattttcttgttggtggcttcctgagtggctcgttcaaattctcggacttcatccattgtcatgtcttcaaggagaaaaacagaaagaaaaacgagcagttatttataagagaggcaaatagattcatcactacccttgtttttacaggaactatgggaaccctatcataaaggggcctctcccgattatacacccaaagtatcattgaaataccaaacccccaattttttctattggaagctacaccctgaaaacaatatccctttatgattatccatttaagattttccaaagcactcttcacagtgagtattttaagtattctcaataaggacttaacagtagaatacagaactagacgggggaaatatgtgcctgtgtgtgtgtatgtgtgtgcacccgtgtgcatctgtgttgttgtgggtctggtgtggggtatttggagctataattaactggtcatatttttcataaagagaaggtaattaaaacaatcaatggccctgaaatgacacatattattgtcattattgtcaactttagatcatgaaagtatacctttatagggtaaacaggtaaatcatcaggatttttcaacatactatcttcttttttttttttctttctgagacgggatctcactgcatcacccaggctggagtgcagtggtgcgatcatgactcacggcagtctcgacctcctgggctcaagtgatcctcctgcattagggccccgtgaggctgaaaccacaggtgcatgccataatgcctggtttaatttttttgtattttctgtagagacagggtctcgctatgttgcctaggctggtcttgaattcctcacctcaagtgatccgcctgcctaagcctcccaaagtgttgggattacaggcgtgagccactgtactcaggccaacatgctatcttcttaatcaatacatatacttttttattctgaggggccacaaagatgctgttgtttctggtttcctgactgtgtgtcgatcctaagaaggttcagagattgtgttttaataaattcagtttcaaaaacacgtaaatcaacaatttcaccacaccctgctaatcattccaaagccaagaaaataaaaccatttcttgaggaaacttaaaaagaatagagaatgaaaggagaggatcatttaatagtgaggattctatttaaaagaaaaaaaagcatgacttggaattcaacaaataagacagtgataccactgttaataatcattgttggataatgtaggttttccaaatacctgaaatgttcttatttaagtgagaaagtaaaaacagtatttaaaaaatgtaaatctttccctaatgtgtttaatgtattatacatacttcctacatttgagacataatatgttgaagatatatcactgtgcaaaaatacagttccttagttccttctcagggtctatttgctctttatggcttgatatctcttctctcatgctcagaaactctattattactgttattatttatttatttatttatttatttatttgagatagagtcttgctctgttgcacaggccggagtgcaatggcgtgatcttggctcactgcaacctccacctcctgggttcaagtaattctcctgcctcagcctcctgaatagctgggactacaggcacgtgccaccatgccctgctaatttttgtacttttagcagagacagggtttcaccatgttggccaggctggtctcgaactcctaacctcgtgatccacctgcctcagactcccaaagtgctgggattacagacctgagccaccgtgcccagccttattactgttattattaattattgttaccctggctatccctggtatcctttgccatttttacttgctgggaacagggaaaagaggaacctgggcttattaaagactgagtcaaggcccaaggcttatcctggagcaaaatgcaaaatttagtgcccgcggattttctgtatctgttttggccccccagagacccatttttcattgtttcttgtccactgccatgtacttagcagttgaaacttcattagataatattggagggaataaccagcaggaaacaatatagccactttggaaatactgagtatgtaatgaatattcataacacagtattaatccttaggacttttctttttctttttttttttttttgagacagagttttgctcttgtctcccaggctggagtgcaacggcgagatctcggctcactgcaacttccgcctccggggttcaagcgattctcctgcctcagcctcccgagtagctgggattacaggcgtctgccaccacgcccggctaatttttgtgttattagtagagatggggtttcaccatgttggccaggctggtctcgaactcctgacctcaggtcatccgtccacctcagcctcccaaagtgctgggattataggcatgagccaccgtgcccagcttaatctttaggttttataacatctgagcaaaccagaagtatttttcacaaaatgaaatccttaagaggatttcctgggaacaattattaaaattttctgaaagggaaagtttttacaaaggatataagtcattatgactatgtggataagatataaaattcagcatatatcaagaaaaattgtacctataaacttaccaatttttaaaaacatggaagactattaaatgagctaagaagtgagattaaggttatataaaaagaggcatttatttcacaataaagttgagactgagaaaaattttagtgtatcagggtatgttatgtttttgctatgataaatggatattatctttgaaaaagcagactttcttaatcaagtggctgaatacattgttctactccacatagccagcagggggcagaaataatctaaagcacagaattttgattttccactcccagaggctcttagaagttcccgtccttgaaggctttgaacctgctcaattgaaaagacttatttcctcactgctgtgttcatggatgttaattttgcctaatttcaatctaatttgtccctgcttgggttgatgatctaaaattcatttagcacccatgcagtttttatttgtgacaaagagccacctcctgattttcactgcttttcattatgatacaggagaaagactaaggaaaaataaatgtgctccaatttcacggaattccaaaggataatggaaatgtcataagcattcaaaataaccactttgtgtaacttctccggtggcaggcatctttcaccctgaagtcacgggaacaacgctgaggggcagccagagattatgtgggcttttccatgggaagaaccactctacgttatcaccttctacatagtaagtggactttattttttattttactttatttatttattttactttatttatttatttatttatttgagatggagttgcactcttgttgcccaggctggagtgcagtggcacaatctctgctcactgcaacctccatctcctgggttcaaacgattctcctgcctcagcctcccgagtagctgggattacaggcatgcgccaccacgcccagctaattttgtatttttagtagagacggggtttcttcatgttggtcaggctggtcttgaactcccgacctcaggtgatacgcccgccttggcatcccaaagtgctgggattacaggcgtgagccaccgcacccagccatggactttaattataaagtaataatcacagtaaaactgaaagaaagccaagccaaggggcttataagctgtgagaaaatcactgagcttagcatcttttagccatctggtgtctcctctttacctgtggcttcttcctttgtttgcctggtcatatttatagtgaatggctttcagagtggctgagggggaactggggcccaacatttctaaaagaaaaggtaattgaaagtgatagaaattcaaggagagtttccttaaagagcacttctagggggaagtcctactggaattggtctgtgcatagagaggaaacgcctcttgctccaacagtttcctgcaaatcagatcactgcatgcaaaatgggagaagagttagggcccttgcaacctcaagggcaatcacatgcaaccagttgcagcacatgagacttgcagggcacattccaaagacatgctccaaaaatttaactaaaaatttccaaagtgcaatcagaaggtcttcacaattctaaaggatccatttatgacaacagccacatctaaatttcctagaactacagcattgatttttttttttttgagacagaattttgctcttgttgcccaggctggagtgcaatggcgcgatcttggctcactgcaacctctgcctcccaggttcaagcaattctcctgccttagcctcctgagtagctaggattacaggcatgcgccaccacacccagctaattttgtattttaagtagagacgaggtttctccatgttggtcaggcttgtctcgaacccccgacctcaggtgatccacctgcctcggcctcccaaagtgctgggcttacaggcatgagccaccgcgcccagctgatttttttttttttttttaacacctactatgtattattctggagactgggctaatggacatgaggactcaaggcggaacccaaagagatcacagctctggctgaagatgcaaagaaatgatttggtgattacacttttctttgttatctctagctacccttcattagcatgaatgattgagagattacgatacttaaaatgctggcatacaatatacagtcagctctcaatttccagtgtgcaacgaaataactgaggctctctaaggcttaccctaagtcccagggatctgctaggcagctcagcacatccccagctcacaccccttcactgctcagcctgtgtgtctgcacagactgcagcccatcttgagattatcctaagtaaaaaggaactgattgggtaaaacagctataaagagccacagaaagcttttcaaagcaaatgtaaagaaacctaaaatagctgatgagccagaagccctcccttgaatgaataagtgagtgttagctatgtttttaaaagttactgacatgttattctagtttacatatgacatcgattttcactcctctgctcttttatggtgcaggccgttttactagtcccacaaaagtgtttccactctccatgttcttggttttatgaccgaaataacctccacgtcaagcaactttaagggatcgaaatgtctggaagagagaggtgacactgcccaatttagatccagctcaggttctgcagcaacagggtctgggtgacgacatgtttctatggaaggttgcgaaccgggcatctgcagtatttcccagatcagtttacatgtgcatttgtgaaagggtgggcaacatgttttaaaaattctacgtacacttgtttgggcatgactctctatgtcatccacaggggaggaatgctgattgcaaacttttatgttggtttgttcatgcatgtttttctcgtattcccgaacatcatccattgtcatat

SEQ ID NO: 8158 - DNA, 10198 bp, Homo sapiens; identical to SEQ ID NO: 8157

SEQ ID NO: 8159 - DNA, 659 bp, Homo sapiens
tcttgtaaagtgagctaggtttgggtagaaagtattagcatgtgggcagtaccatagcctgagatctcctaaagcatcattagaagatcccattggggacagagggtcagttttgcttggtttaatacttaccttccacatagctttcaaaatagatttagaggttgtttaaatcaatgcattcaacaacagaaaggacactttcattgctgttataggaggcaggatgtagaaggcagagcaatgatattcactggtacaattgagatttggtgcaacttgcacacagatgtaaatttgcacagaatgcatggcgtcagagagtgcaggtctatactgaacctcaagtcttggctaacagcttgaagatggctggcactacttccacccacactgatctaaaaataaaatggcacatgacatgatttttggcccaagtctgcagtttttcagtatttcaggataatgatctcttaatctagtggttctcaacgggggacaattttgtgacatttttggttgttagaactagggaaggggtgctactggcatctagtgtgcagattccagggacactatggagcatcctacaatgcacaggacccccagcccccaacaaaaaattatctggtccaaaatgtcaatagtaccaaagttga

SEQ ID NO: 8160 - DNA, 272 bp, Homo sapiens
tttttttttttttgagacggagtctcgctctgtcactggagtgcagtgatgtgacctcggctcactgcaagctccgcctcccgggttcacgccattctcctgcctcagcctcccgagtagctaggactacaggcgaccgccaccgcgcccggctaattttttgtacttttagtagagacggggtttcaccgtgttagccaggatggtctcgatctcctgacctcgtgatctgcccgcctcggcttcccaaagtgctgagattacaggtgtga

SEQ ID NO: 8161 - DNA, 264 bp, Homo sapiens
ttttttttttgagacggagtctcgctctgtcactggagtgcagtgatgtgacctcggctcactgcaagctccgcctcccgggttcacgccattctcctgcctcagcctcccgagtagctaggactacaggcgaccgccaccgcgcccggctaattttttgtacttttagtagagacggggtttcaccgtgttagccaggatggtctcgatctcctgacctcgtgatctgcccgcctcggcttcccaaagtgctgagattacagg

SEQ ID NO: 8162 - DNA, 659 bp, Homo sapiens; identical to SEQ ID NO: 8159

SEQ ID NO: 8163 - DNA, 21799 bp, Homo sapiens
tcacctgctcaggataggagactccgctggactggcttccctgcttgtgaataggaaggtgctgtgaacagtcagtatctacagaacctcactgtgtttaactctgccctccagccttccattgtggtttttaattcaacttggtttctcctccctcctttctctcctcagccattgatctgatgtacggaggcatctactgttttctgtgccaggactacatctatgacaaagacatggaaataatcgccaaggaggagcagcgaaaagcttggaaaatgcaaggtttggttccacctcagtttacctgcttgatcctgcagttccctcatgtccatcaagggcagacccagtaggagaaagagaagtacctaggtgggaagtggcaggctggtgggaagaggccgtccccaccttcccctaaggcccacagtggagtcagctgaagctctgcatgacaggggaggtggctagtgtcgaggcatgcatagctgcccgtgtgcttgggaccacttccagggtgcttcccttgcaggtcccccatgggcctgcagctgggccaagggaacaaccccagcattacttaagctctcccagggcgcacctgcagatgtggggctgaacgagtgtggcgaggtcacacctctcggggacaggtgactccgtatctggacatccctgagtggtttgccctcagctctgccgaattctagcaagcgatctctttgcagtaatgttatatgtaaacatacctccttcctcccaggagagcagactattttcggatcaagttgtggtagaatctcttttaaaactctggactgtttgggtgatgttaaatccatgtcaacagcgtgcacccaccagatggaaactagacccaccagatggaaactagacccaccagaaggaaactaggagagtctcccagcagccccactgcacagtcagatccttgccatcttgtgagctgccctcacggctctcgcaccagtgtgggttttgcacttgccgtcgccaccgtgtggccacacacactggttattggctacacagagtgagaggagcaaacatgcagtcattttctttattttttatttcttcttggcttccctgagttttttttcctttttttttttttttttttttttttggtttttgattctgacagatgctcatagtggttgacagtgatagtgacatagtgacaggtgtggtttaccccagttgacaggtgagcatctgatctccctggtagcaaagccatcactgtttgcaaaggaaacatatgaacctgacacctgttttacattcttgccttgattactctccattgaaaacaccccagtgttttgagaagggaagaatagcaacaggggctctttcagtgagcagaattatttgtgtttaacaagtcttctctggagagcaatctctgacttgtgttcgctgttcttttccctctcagaaatttaataacattgtgactaagtgtgggtgtattattctgtgcagagcacttaaagcacgggcctaagaaatgtatgtccaggattaaaatggaattcttctagaatcattttataattctgtctatccaacatgctgtgtcttttaaagtattttgaagtattcagaaatgttggttggcatggaacaagtacttctgagcgcatagggtgtgcgttgaatggaatactatgccaattagcatttaccaccactctctgaatattttgtggcacacacgtttttaactgttggatctatcttagtttggtaactcgacgctgagtttatgctatttcagtttgctgaaaagtgcaagctctctccttcaatttcacttgtttgcgggagaatccttcatgtaagttcccattggtgctgatgctgccatctctgtgctgaaggatggaagacatttgaaaaacaactgttttggcattggcgttggggtagttttgactggaggtgctgcttttcttgcaggaaacgtagctcacatcctcataccctctgtgagaagctcctttaagtgttgtgtgtagcccctctcagcacagtagagtttgagaaagccctggtgctgtggatgttgctcactgaaatgcaccctgacagacagcatagcgccacagcttttatgtgtaaacacacttgatgtgaaaatctagctaatagcgcttggaactgtccttcatctgcttaggcgttggagagaagttttcaacttgggaaccaaccaaacgggagcttgaactgctgaagcacaacccgaaaaggagaaagatcacctcgaactgcaccataggtgggtggagcgtgtcgtcactctcagctaggcttctttccagggtttaaaagtaaatacagaattgtgggtttcttaagtccacatgattctgttgaagccctgcataactgtcactcatcaatgtgctcagcaaccagctcttgagcacctgttctctgcagggacctgcagtgggcttggggcgcagagtgatgcgtagcaacagccctgccctcacagccttcagcgtctgtgtgggtaaagggactcaagttgattttggccagggtgaggctgggcacagtaatcttcagggagagaaatgatgtgtgtgagtgtaagtgttcgctgaattttctacaaattgagggaataccctttaaaactttttctttttcttttttgagacagagtcttgctctgttgcccaggctggagcacagttcactgcaccctctgtctcctgggcccaagcgatccttccacctcagcctcccaagtagctgggattgcaggtgcacaccaccatgtttggataatttttgtgttttgcgtagagacatctcaccatgttgcccaggctggtctcgaactcctgggctccagtgatcctcatgccttggcttcccagagtgctgggttacaagtatgagcccctgccctggccctagaacatttttaaaaacctgttttgtttgttcattaggcttcactctgacctggcctgttgtcgtagaaactatatttgtgtaattctgtcaaagcatacaatggctgaagtgggaggggtccatggtggtggacattcttcaataccgttcatgtaaaagtggcataaaaactagcagaatgcgatatctcatcgtgttctggcttgaatgaatgaataaaagaaaatgagtatgtagaggtagaggaagccgctgggatccagcgacacctgtggttcagcacacaggtaactcctgctctctggtgatttgtgtccaggtctgcgtgggctgatcaaccttgggaacacatgcttcatgaactgcatcgtgcaggccctgacccacacgccacttctgcgggacttcttcctgtctgacaggcaccgctgtgagatgcagagccccagctcctgtctggtctgtgagatgtcctcactgtttcaggaggtgagcgccattgacttctgcaggggaacatttctgttactttgttttcaccttcaaaaaaaaaatttaaggtggaccatgataaaggaagatacatttagaaccttttgtagtaagttaatgtttaatatacatgtctattatggaaaacacagttttccaaaaagggaagacctggcgtgatttttggggacgcactgctgactcagaacaaggagaagccctttgagaggcttgtggcagagacttccctggtgggtgacatttgtctctaaagacgggtgattctcccccttcctcttcctccatggtctaccttcctggctcagaaaggcacgcatgtgtcaccctcctgtgtcctcctggtatgcgagtctcctccaccgccaggtctctctaagcatgccccatcagagcctctgtcctcatgagctacgcgctgcacgttggctgttcctgtgggctgcacgtgtggcgttcctgtccacttctgtccccggcatcagagcatggcagcgttcagagcaaggcgttcacggctgccgcctcagccctcaccggctccgtgacctagacatgcttctcagagctgaagcagctcagttacctcaactaataagcaggctggtgcctgttcttcaggtgccttgcacaggagccagccaacagccctggcctgttcccattcgtaacctctgcgagagatgcagccacgccagctcactcatgtctgtctggtcactggtcgcttttgtgggacagccacagagttgagcagttggacagaggctatccaacctgcaaagctgaaattatttactgtccaagcctttcaaaaacagattgccagcctctggtcgagcctaaccgatttcctcaaagtacctgcaatgtgccataactgctggggacacggcccaaataggagaaaggagggtgcagctgggaagttggtgggtggttgtatcactgactttagtgataagctcacttgtgttagattgtttttagactccggcttgttaaggtgtaaattacagtcacacccaccttctagcctatagatagatgagtttcgacgaatgcatagttgtgtaactgctgctactcaagatgaagaactgttacctctccgaactccctcgtgcccctccgaagtcaacccccagtccccagaccctggtagctgccgatctgtcttcggtcccttgagtgtcctttaccagcgcatcatacggatggatgcatgcaggaagtagcctttctgaatctggctgtccctacttaatgtaatactgggtggattcacccgtgtcttgcgtgcatccatgatgtgtgctttcgatgtctgagttgggttccattatgtagatgggttatggtttagttgtctgtttcccagttcagacacatttgggtggtctgtggttttgggttttttgatgagaaataaaactgccctgaattctgtatttgcacaggcaagacccctctgtgggttctgacctggggaggaagccgtgggatggaaggtgtgctgctgggtctgcggctggagttgagctgttggagaggactggctggcaagccctcagctaattgccattagcctcagaggcagagaatcctgtggctgatgctggtgaattctgcataatcacagtgatgtgcttccctttgcggaggtgctggtgtccatgggcctgagtggtttggctagtgctttgaggaaactagtattgggcaaatcgagtcacttttatttgcatgtgatctcatagtagcaagtcataattcattttttaggcttatatgtggaaaactagatggtagaaaggaaaaaattcatatgaggactcgaaaagtccagtgagcccagataaaaatagactttgcaaaaagtagaaaagtaaaatccaaacatttgtgtcaaatgagccacagccaatggtaggcatctgataaaggttttgattgtgtgtactctgtgttcagagtctacatttattcctgacaaggtttccttccccgccctctggcagttttactctggacaccggtcccctcacatcccgtataagttgctgcacctggtgtggacccacgcgaggcacctagcaggctacgagcagcaggacgcccacgagttcctcatcgcggccctggacgtgctccaccgacactgcaaaggtgggccctgggctctgcaccctccaccagggcaggatgttttccttgaaggggaaggaagcaaagcgagtgtatgactcgtgcaaaaaggggcacaggtgacacattccattgttttgtcatcatagcccttgtcgtcatttgtttctgaagtcaccataactaatgacctcagagaggctcctcctagtttatttttaagaggcgaggaagtagttccagcagtatgacaggtcctcagtgaccgatcacagtgaacagcaaactcttggagccctcttgggcctgtgctttgaggcccctgcctgccctggcatttctgggaccctgtgggttatcaggcctgaggcttctggacatcccccaaacacaacttaatcacccaactgtctccttcccattggggactctccaaaaggactgatggttgctctgaaatagccagagagctgggacacaggacgagcaaagcttctcttggggtctcattggacctgggccatctcccccaacatagtcccacagcctggccccagggtggtaccctgatgatttttcagagttgtgtggtgttggtagttggcaggggcagctcttagcgctggaggtgggaggctgggaatgaatgacttgagccaagatcggctcctccccactcctcatggtggagatcccagtgtgagggacctgcagctgaagtctatccatacaggcagagagactgagaggtgattctcagatgagtgtgggctggtcacttgcaggtcttcctaaagcccgtgctggcgtttctgattcagcagatctgtggggggcaggggcttcttcactcttaatcagttcccagctgatgttgatgccgctggttcagatgccatactctgagaacccatgcgctcaggtcacagggcacctggctgcttgtgagtttcctgtggtctctgggctggcacagctagttgtagccgatatcctatcagttaattttaacttggagtcttttagagaacagagtcctgttctgacggttcaccgagttgaacagcttggtgggctggccttcccatcgcttctcatccgtctcaaggctgtgcacccgggccctaggcgcttacgtacaacctatgggttctgagatcacagcccagaaacaacccacagttgagctaaaatggctggttttggtcaaatgtgactttgggttctgttttcttttggtacttactttttttcctctgaaaaactacgtgatccttttaattcttacctagaaatcaaaggaaagttacttagtagcttaggtagaatttcatgtcctagtatgatttataagagaggaaagagccactgtggaagtgactatgctgttaccccaagcacctagtgagaataacgaagagccttctgtaagcagcagaaagatgttctaaaaatcacttgttcaaaaatgcattgctgttaaatgttcacatgacaaaatgtgacctctgacgtgcttctgacagaattcccttggaaatgtctgaaaagaaatgtaaggttcttctgtttagaaacctggttgccagagctgttcagcgaggtggcctggccacatggccttggttacgtgcattttgtccttgtggccttcacggcatctttctgttcatcttttgttttgttttgttttgtttttgagtcagagtctcgctctgtcgccaggctggagtgcagtggtgcgatctcagctcactgcaacctccgcctcccaggttcaagtgattcttctgcctcagcctcctgagtagctgggactacaggcgcccgccaccatgcccagctaattttttgtatttttagtagagacggggtttcaccgtgttagccaggatggtctcggtctcctaacctcgtgatccgcccgccttggcctcccaaagtgctgggattacaggcgtgagccaccgcgcctggccattctgttcatcattctttgcgccttcctgtatggatattcttgtcctctgaattttgtcccatgaatttgagatccctctgggaagcatttttctctctaatcttaaaccttctgctctcagaagacttagtggcccttctctattcctctgtcatgattcaacgtctttgaactgtgatgtatatacaggtgtcctcgtgccctgtccccactgtctagtgaagttatgtagaatatgtattccacacacgaattaagttctgctacttaagtttctttttcacagatctgcacacatggatatgaatgaagtgtgtattgaatagagagggtgggagtggcacttccagatgcaactgactggaagacacgctgtcccctgggggctctagctgatgaggacagcctgtgtcctgcggtgtcactttctgaacttggggcaccatgatacctactcagggagggaggttgctggggcttccccgggtgtacctggcccaccatatgttcagctgtctcactggaacaatattgattcagtcattctttatatgataatgggaatcgattattctgctcagtcactgggcattaggtgggttttcttggcaagactgaagctgtggggctcttgttagggaatgagaaaaaggagcattgaaaatccaagtgctgtgatttctcgtcatattaaaataacaaggacaccctctgctaaaatgaggagtgtcctcacatggccttttaaagcgttggccctggctcccccaggcttctgcagggtgaactgctcttcccttagagactccccatatttggggagacactaatcccagagccgtggtctgtctccaggtgatgacaatgggaagaaggccaacaaccccaaccactgcaactgcatcatagaccagatcttcacaggcgggttgcagtcagacgtcacctgccaagtctgccagtaagtgagaggctgcgtgctcggcaatatcaaaccctctggggccgtactgacatcctcccagtctccagagctgtgtgtgctctgagaggtctttaaggaggctatgagataaatgattaatagacgccatgagagcgaaggttgtggggtgggggtgcttcctcttggggaggtcgtagggcaggtgtcccctcgggatgcgagcccttcgtgttgaggtcttggctgttgtctacagccagcagtgtgttcttggaagcttcccctaccattttgcatcttacagtccttgaccagggaccaagtgaaagagccctcttcaagaaggcgtggatcatgcatggtggattgtttttctacgtgcttcgaagtgtgttagttttcattattttatggtttctggttccattttctgatgtagtggccctaattcttctcagatgtggtctctgcttagagcctcaagtgttgagtgcagggagaatccattgctttgttaggtcaggggaccctctcacccaacctcagtgcatgctacaggttttttgtttttgtttttgtttttttcaggcatggggtcttgtgtatgttgcccaggctggccttgaacccatgggctcaagcgatcctccctccttagcctcccaagtagctgggactacaggcatgggccaccgtgcctggctctgttctttacttcagttgaagtttaaaaaccctggacatgatccaccgaaattatttcagaacccgaaatggactgtcacttctaaactgcataagacgagcaaatatcgggaaaggccagtgctgcctgtgtcacgggggccattttctataaggagcatagaccgtttggggccttgtctctgagtattagaaaccgagtttgctctgagcaatttggacctcctcgctgtcccttaactactgaattccattagtaggagattgtctcaagatttaaatcctgtataaatatcgagagtaaatttcccagtctgcaagttttcattttttatattgttaaataaatttctagcaaggaactggccttgtgaaatgcagcattgactgtccagtgcaggccaccgggcctggcctgggcacgctctgtgaaatgtgcaggggtctccagtgttgcctagggtcacaggccccaagttctagatgcagctgagatagacctgtggattcagagcctctgacagggcccatgagtttatcctcctcccaagtccctcagtgactgtgatggtctccagactgggaagtccttgcttgaggagcgcccctcgccttccgagttcacacacacccctccccagggccaccttgggagccaggacacgttgggtgtgagcactgctgctcttgctcctgccccatcccacctgagtgtcactgtgacaaagggcacagcggggaagggatgtgggaacggcttccaccccgggttgcctctggagctgggtgggtgtcagtcctcacagccattgttttccctctgcttccagtggagtctccaccaccatcgaccccttctgggacatcagcttggatctccccggctcttccaccccattctggcccctgagcccagggagcgagggcaacgtggtaaacggggaaagccacgtgtcgggaaccaccacgctcacggactgcctgcgacggtgagaggcctgcacccacacggcgggggcgtgtctcctggccagaaggctgtgctccatcaggaccaaagcagggctctttcacatgcccaggacagagcctgggcaaaggtgcagcatgagcctggattggctgcagtctcttgtgctagtttgtcctttgttttggccagatgactcaatatttctgtcccccagcttcgcacagcaccaggtgtcagtgtcagcagctgctactccaacctccgcatgtaaatgaacccagagccaaactggctgctcccttagcccttgcactaatcacctaccccggagtgtgagctgagatgcgcccgggcctctccccatggtccacggccttctctgcacatgattaaaacttagttgtgatgttctgtactcttagggctgtttttgaaattgtgcatgtactgcttcatttgggataagtaataatatttacaaagtgatttttttttttttttttgagacagagttgtgctctgtcgaccaggctggaatgcagtggtgcgatttctgctcactgcagcctctgcctttcaggttcaagtgattctcctgagtagctgggactacaggtgtgcaccaccacgcctggctaatttttgtatttttagtagagcgggggttttaccatgttggccaggctagtctcgaactcgtgatatcaggtgattcacccacctcggcctcccaaagtgctcacaggcatgagccaccacacctgtgagtgatttttaaaaaaaaatgtatttaagtagctgtagcatacaattgtaaagacagcagaaaaccttcctaaaatttgtctattattttatagcctttgttttatttgcatcaattaaaggtaatgcagaagagtccttgttgagtggaagtatcccttagaagaggtacgagcctttggtttctgtctggctgcatagtcagcacgaccaaagttgcatgtttattttgttttttgagatagggtcttgctctttcatgcaggctggagtgcagtggtgccatcatagctcactgcaacctcgatctcctgggctcagcctcagtgtccagggctcagccttggtctcctgtctcggcctcctgagtagttgggactataggtgtgtgccaccatgcccagctgattttgtgatttttttttttttaattttttttttttgagacggagtctcgctctttctagagtgcaggctggagtgcagtggcgcgatcttggctcactgcaacctccacctcccaggttcacgtgattctccggcctcaacctcccgagtggctgggattacaggtgcttgctaccatatccggctaacttttgtatttttagtagagactaggtttcgccacattggccagggtagtcccaaactcctgaccttaggtgatccgcctgccttggcctcccaaagtgctgggattacaggtgtgagccagcatgcccggccaaccaaaacctttttaaagaaagtctttgcagctaaattaaatttaatcataaattccaataaaatgaaagctttgccaaaacagcaggccatgaggtagaaaccacacttcacaaactacaatgtgtgggaagcctgtgttgttaggagagacatgatgtggtgctgactcccgggaaggtggaggagaggtagagtgcacccgggtccccactttgtattgcaagcaaaggctccttttcgagtcctttggagagcagatcacaaagctagcaacgaaacaggtgcagctttgcccagaggccccctcgtcttgccctagttaagatggcagaatttccagagcataaataagggctttccatacctgcttgtgaaaagagtgaattttttgctggtgtttcagcttcaaaatttggcgtgtgctttgttgaatcatctgttctgcaggttttgtcagtggcagctgacacctgtgccagacacgcttctgatgcagccctcctacctcctgcctctgcacggtcaggaaattacctttcccagtcctcttgcctttttttttttttttttttttttttgaaatggagtcttgctcttgttgcccaggctggagtgcagtggcacaatctcggctcactgcaacctccatctcccaggttcaagcggttctcctgcctcagcctcctgagtagctgggattataggcatgcaccacctcgcccggctaattttgtatttttagtacagacggaatttctcttatgttggtcaggttggtcttgaacttccaacctcaggtgatccacctgcctcagcctcccaaagtggtgggattacaggtgtgagctgccgcacctggccgacctctcacctctctacattaaactgcttatgttgagatcattgtagattcacatgcagttgtaagaagcctttaggtaccctttaccccggtcccccgatggtgacctcctcagcactgtggtgcgacgccctggccaggattcagacattcatgcggaaagtacccagcatctccagtgcctcctccctcaccacccactctgtaaccgcagtcaccctggactcctgcatttccatacgcctgacaattccagaatgtcatgtcaactgaatgatataacggaaccctttgagattggcttttcttgcacatcctaattctctggggacgcatccagggtacagcttgggatcagtagttccttccttttttgctgctgtctcatactccatggtacagtgttccacagtttctttaattattcagccatgggaagaaacggggtgtttccagttttgtgactctcgtgagtaacattctggtgcacatttgtggacagtttgtgtgtgaacattagttttcatttctctggctcaaattcaactgctgggtcatatggtacttagaaaattattaccatttccccaggcctttcctggaaaaaaaatatttaagataaatattctgtagagacaggcagcaaaggtggacaacattttctctttttttcattgtttcatttttagttgtaagtgtatgtttttggtagggaaatcaacccaatgaaagagataaaatacctctttcctctcatttttctgtctcttgcatctcccttaccgctcctgtcttttttgaacgcctgtagattcaccagaccagagcacttgggcagcagcgccaagatcaagtgcagcggttgccatagctaccaggagtccacaaagcagctcactatgaagaaactgcccatcgtagcctgttttcatctcaaagtaagttttccagaaagccaactctaatggcagacttagtttttagtccacagtacggtcctcagccttttggtttgctgtgcagttacattttttataattgcagcaagcaggaagaacaccgaggaagggagggtgtgagggaattgtcctcccatctgtgaattgtccttttgtctgtgctgcggtaaacaaaatcagtggcttcgcagtgaaagtagaatgtgagttttcttgggagcagagtggttgtgaagtttttattacttctaccattcctccagctaccccctcctcaggttttctgttttattttaagacaaaggccctcagcatgcagatctggtccaggagttggcaagctctttctctaaaggcccagataactgaagatgtcgagctccacaggctgcgtgcgatcatacgattctctgttacatgttctttgtttcatttcaccaccctttaaacatggaaaacgcccattcctagcttgctggctggaatgggtgactcctgatctaggcaaaggactgtcttctgtctggtgaaaggaacaatttgttcatttttgctgccatgggccacggatctttgttttgttttctgtgctttgctgggtttgctgtaagattactttttgtacccttggtgttaccactgaacagtcccatcatttgaagacttgaaccctgtaaatgaggacttgggtggattgccactgtgtttttgaatctgtaattctagatgtagctacaaggcagttcaataaaatacaaaagagataacacagacacctgtcatcagaagaaggccctgaagcttccagtgacatttctgatcttctttcctcttccctctgtccccttcctatttctgcagcgatttgaacactcagccaagctgcggcggaagatcaccacgtatgtgtccttccccctggagctggacatgacccctttcatggcctccaggtatgtggggttgtaggcccgttctgtgtcctgaggggctgtgatcctatcaggacaggaatccagctcggagctcctattaagatgactgttggccgggtgcagtggctcccgcctgtaatcccagcacttcaggaggtcgaagcgggcagatcatgaggtcaacagattgagaccatcatggccaacatggtgaaaccccgtctctactaaaaatacaaaaattagctgggtgtggtggcaggcacctgtagtcccagctatttgggaggctgaggcaggagaatcgcttgaacccaggaggtggaggttgcagtgagccaagatcgcgccactgcactccagcctggtgacagaacgagactacgtctaaaaaaaaaaaaaaaaatgactgtcgatactaatataaaccccaccttccccaaatctgtttatcctgatcttaagatacagcacatgttaatgagttgtttttcatcagataccctgtttttgttttgaatttctcaacaattatcaatccactttcaaaccggcaaagtcctcaaggtgggatcacagcgagaaggcaacattttagttcgtggaacagatgttgaagtacaggcagacatagttggttttgcagttgtagattgcattttccttttcaaatctgcctattctggggtacttggaattcagctgcttactaatgcatgagacacataggagtttcctgtggttctgtgacaaatgaccaaaaacctggcggcttaaaattaatttcctcacagttctagaggttggaaatctgaaatcaaggtgttggcagggctccatgtcctacaagggtcttggggattccattcctcaccgcctccagctgctggtggttccacgtgttccttctgtggctgtcactcccctggcttccgggtcacatggccagctcccctgactctgtgtccagttccctctgcttctctgtcatgaccgtggtcattggctttaggacctaggcagatcatccaggaggatctcatctcaacatctttactttgagtctctgcaaagactggttttacaaatgaggtcccagtctcaggttctgagggttgagacgtggatgttgttatttgcagggtgttattttttggtggccacagtcccagccccagcaccgtggaaagcatgttgctttttggtagttagcggcctcttcctggtgtcctctcatggctgtcccacccctgtggcacacagatgacctcctgaataaaacaagaccagagtcagagctccatatcatcagtctgaccacgatggtcacgtactgagggaggtgacagtactgttctaaggtcagggtctcaaagatcttggtgtttcctgccaaacacagctgtaggaaaatgcagtaaataatgtgcatggcttcctgttcccagcactcctctcccccatctcaccaggggaggtgctggtcatgaaataatgagcagcaatctttgtcccttttgaggaggcacctgcctaggttgtagaatggattcagcgtaccctttcaagctaaccctttacatgtgggaggaagagcaccttcaccatctgctttgtcacaaaccaaactcacattcctccagatccagctcccattaccagccctattcaggacccaccttggaagaaccaggggccacgccaggtggcctcaggacccaggtgtgctctgaggcaggggcctccacagcttgagcgtcagtgtcctcacgaaacatggggagatttctgcctgaagcataaagtgcacctcggtgcagcatctgcatggtcaagcttggataagtgttggtttcacgagagccttgtgtctctgggcctgatgattttaatgatgctgaatcctgccgttgtctgttacagcaaagagagcaggatgaatggacagtaccagcagcccacggacagtctcaacaatgacaacaagtaagtggtgcttagcggtgtgggtgtccagggcctctggccaagagctgggggtgggctcctgtctgccttgtagggcgcccagggatcccccgccactgacctgcttcccgcttggctgcccgcagctccactattggtgcccgcagctccactaggaaaggccgctccacgtggtgccacaaatgctccctcctgttggaggagcccagccccactcttgcctctggcaggagggaggttccatctggaaagctcggtgttcattcttcttgccttggggttgtagaaagtatgaaaggctggggtgttccaggatccccactgctgactgcagtcaccactcccactagatggagttccaggaagcgcctggacccggctagagccaaggggggtgaccaggctcccttagttcctgcagcctcctgtgcatcagcctgaggccctgggggttgacagcccacaggcctcccgctccctgcctgggctgcctggtttctgatggtgatgacctcaagtgacggcatcaagtcacctgcgccctccctctcctttgctcctgcactaggtattccctgtttgctgttgttaaccatcaagggaccttggagagtggccactacaccagctttatccggcagcacaaagaccagtggttcaagtgtgacgatgccatcatcaccaaggccagcatcaaggacgtcctggacagcgaagggtgcgtcctgtggggtgggaggaaggccctacggtggctacggtgcttcccctccggtatagctgagactagcccatgtctgagcctagaaccactcgaaggtgttgaccttcatttgccgaagtaatgaagcctgttctggataggatgccagcctcgatgggtgctcaggtgggagaagaggtgcctgagcaaaggccctctctggaggcattcccttagcacagagaacgtcagagcagttgttttttaactgcgtgaactgaacacatcagttctttttttttttttttttttttttgagacggagtttcgctcttgttgcccaggctggagtgcaatggcatgatctcagctcactgcaccctctgcctcccaggttcaagtcagtctcctgcctcagcctcccaagtagctgggattataggcatgcaccatcacgcctgcctacttttgtattttagtagagatggggtttcaccatgttgaccaggctggtttcaaactcctgacttcaggcaatcctcctgccttggcctcccaaagtgttagaattacaggcatgagccaccgggcccggcccacatcagttctttatcagctcctctcctttccagtttcattccttcatggcatagagaaacctgttgaccctccaggggtcagggggaccccagctgccatgaactccctgagggctttgcacttcacattctgagcaacacggaagccaagccctcttgagaggttttatttggaagaatctgggataaaggacagccttcagggcgatgaggtggatctggacggagccacttgaaaacagtgggctctgcacaagggtggggctgtcacaagtgggggagaggctgtgggaggttgggtgaggcaatgggtgacctcgtggcaggtgggggtggtggtcgggctgcagagatgggcagggccagtgccaccagccagtgaagcactctttcctccttgcggactaaaaagccaaaaccatcaactcgggcctggccgacctgtgcagagcgcagagcacgtaggcttttgtgtagggtgggttgttctggctcctgtcttaggagttagaggtgagcctcctccctctctctgcctccacaggtacttgctgttctatcacaaacagttcctggaatacgagtagccttatctgcagctggtcagaaaaacaaaggcaatgcattggcaagcctcacaaagtgatcctccctggcccccccctcccccaagtctcccgccgcctccccggcctggtgacaccacctcccatgcagatgtggcccctctgcacctgggacccatcgggtcgggatggaccacacggacggggaggctcctggagctgctttgaagatggatgagatgaggggtgtgctctgggtgggaggagcagcgtacacccgtcaccagaacatctcttgtgtcatgacatgggggtgcaacgggggcctcacagcacagagtgaccgctgcctggcgttccccagcactcggtgtggaaaggcccctacctgctgtaagattatgggtccatgaaagcagtaagctggacacagaggtgtagtgtgcgggacagagggccttgcagatgcctttctgttggtgttttagtgttaaaatacggagagtatggaactcttcacctccattttctcagcggctgtgaagcagcctcctagcttcggaagtacggacactacgtcgcgttttcaagcgtgtctgttctgcaggtaacagcatcaagctgcacgtggaagcatctcgcggttttctagaaacaggcattttcttatccctctcccgctcctttttccacaaaggtgaatttcataaatgtaatactagtaaagtgaatgaattactgagtttatacagaaatttaggtaacttctcctttagtctcaagagcgagtcttgctttttaatgggtgccgtttatgttgctgcccgccctgtgtgcctggctcctctgggtgccttggtgtctgctggtggctggcagtgggcgcagcggaggagagttgtgctgcagctcatacggtgtgtctgtcatctcagtctggagtaaatgcagtgtctgccggtgtctgatgggttctgtccctcgtattttctttgccttctatcccattgcctggctaccgctgcctggcagccaagggtgttggtcgcgaagctggagtggcctctggtggagcctgcatcttgtctcgtctgcctctgctttacatttggtgtactttcgggcgtggtggcagtaaaatgacaccgtgattgagcttgtcagcagagctgaaagagaaagtagaaggatgtgcattgtttcttgtaagatatcttgcatgtatctgtgtattcaaattcaaacagagatggtttgtccatttgtccactgagaaattagaaactagggacaagggggaggaaaagtactgaaatacagtttatgaagcaagtgtgtctcgggctgtgcttgtcccaggagccccagcagcatctgaactgaggcttcttcagtcctgcaggaacaggatcatctgtctcagcggtgggcagatgttttcatagacagccagggagtaaacactgttggctctgtgggctgtatggtctctgccataaatagtacagagatgtggctgtgtctagtacaacttttagacacagaaatctgaatgacatatattgttctgtgtcaagaaacttagattttttttttaactatttaaaaacgtgaaacctattcttagctcacaggccatggagaagctggtggggaccagacccagctccttagctggctgggctggggagggggtagtgacagtggcagctgctactcactgctcagtgtggaaaacacaggacttggcaatcacagcccgcagaaccatcatgtgtggcagaagcctgagggatgcggtttcttgcccacgtgctctgttcattttctgttgtttttctgcacttaaagaattcacatggaagcatgttttataaaatgaattaccagagaaacagagatgggccgagattttcagaaatggtcccatgtgaccaagttctgctgtttgggtgacagtgctttgaagatctcctttgaggatgtgcagtctttttttttttttttttgagatggagtttgttgcccaggctggagtgagtggcacagtctcggctcactgcaacctccacctcctgggttcaagcagttctcgtgccgcagcctcccaagtagctgggactacaggcatgcaccaccacgccaggctaatttttgtatttttagtagagatggggtttcaccatgtctcaaactcctgacctcaggcgatccacccacctcagcgtcccaaagtgctgggattataggcgtgagccaccgcacctggcctatgagtggtcttttaattaggaacaaatctaatggaaaggagagttgactgaagttggcccacaggattgtgagctgggcagtgccttcatgaaggcttgccaccttgggacgccccagtttactggggtgtcttgcggagtgcagaaggctttctggcagctgcctgggtttggccagaccctgcctcccctcccgccggccaacccctagtccccttcctgtctccacttgcattcaggggtggctgctgttctgagaacattagaactgggaagagagatggagtcacatggatttttggtgggcattattctaaactttcgtatccaagttagtcccccttattccactgtggcattgccgttctaagcagttacctgatgcctgctgctgaagagctgctcacaggaggcggcggcggccctggcactgccccttgcattaggtcttgtgtttgatgtgttcttgtgaatttactttgtcagaacaaaatatttacgcgttgggttcaggaatttcttttagctccccatctggctgtgaaattcaggaaacctcccgttgcctagtaatcaccccatgtaggtgtacattgtgacaaagtgcatctgaccactaaggggcccccttggtgaccccagcacattcacagcagtgttaaaatggcctgcattttggagatgctggctggcctttcagtgcctcccaggaagacacatggcctttccctcttcagatgcctgaagggagtgctttgaggcaggtgatgtgctgggagtgtgggcggcctccctctggccccggggccctctgtggaccttggctccctccgtggacctgggcttcgtggtgagcactgcagcctccctgggcattccctccagcgccagcaccactgcaacatatagacctgagtgctattgtattttggcttggtgtgtatgctcttcattgtgtaaaattgctgttcttttgacaatttaagtgattgttttgtttactgtaagtttgaaaataaaaatgaagaaaaaaattccaatgactgtgctgtggttggagactttatttaccaagatgtttactcttcctttccccttccattttgaggagctgtgtcactcctcctcccccccagtgctttgtagtctctcctatgtcataataaagctacattttctctgagaa

SEQ ID NO: 8164 - DNA, 232 bp, Homo sapiens
tttttttttttttttgagacggagtctcgctctgttgcccaggctggagtgcagtggtgagatctcagctcatagcaagctccgcctcccaggttcacgccattctcctgcctcagcctcctgagtagctgggactataggtgcctgccaccatgcctggctaattttttgtacttttagtagagacggggtttcaccatgttagccaggatggtctcaatctcctgacctc

SEQ ID NO: 8165 - DNA, 371 bp, Homo sapiens
ggctggtctcgaactcctgacctcaagtgatccacctgcctcggcctcccaaaatgctgggattacaggcatgagccactgcgtctggtccttggctgtttcttagccccactcctggcagtgtctcttctcttcagctatgactggggagtagatgaccgtgcttgtttctgacacacagcacagtgtcctctctgtacacaagctggtggttcaagggccaatggttccagagagatagtggttcccttccttccctcctcaccaataggcagcctcaggccttttctgtgtataactgtgtatatagacataaaaacctacaaatgtgaaataaatctatgctatctttcatagtgttaccacacaaa

SEQ ID NO: 8166 - DNA, 145 bp, Homo sapiens
ctttttttttctttttttgagatggagtcttgctctgtcgcccaggctggagtgcagtggtgtgatcttggctcactgcaacctctgcctcctgggttcaagcaattctcctgcctcagcctcctgagtagctgggattacaggc

SEQ ID NO: 8167 - DNA, 415 bp, Homo sapiens
aaaaaagccccagatgggctggatttttttttttttctgatattttcttcctcaaagtccagttgctctccaagttcctacccctcccctgcccttgcctcagacctttaagaccaaagactgcaaaaccacagtgctgtacctgccacctccaaggactggcgtcgaggcccaacccaggaatgttggcttatttacctcctgggggaagcagtttaggcctcatcagagctggggagcacatcccttcagagcccatgggtttcccattccctcctgtcagccctggccatgaaatcctggggatctggagggagggaggatagttagagagtgagaggggcgagggctagccttttcctaatacccctgggtttgagtttaatttgcaataaaatggaatcccagcacatca

SEQ ID NO: 8168 - DNA, 364 bp, Homo sapiens; identical to SEQ ID NO: 6478

SEQ ID NO: 8169 - DNA, 364 bp, Homo sapiens; identical to SEQ ID NO: 6478

SEQ ID NO: 8170 - DNA, 288 bp, Homo sapiens; identical to SEQ ID NO: 6482

SEQ ID NO: 8171 - DNA, 288 bp, Homo sapiens; identical to SEQ ID NO: 6482

SEQ ID NO: 8172 - DNA, 2350 bp, Homo sapiens
cggccgccatggcgaccccggccaggcccggcgaggccgaggacgcggccgagcggcccctccaggatgagccggcggcggcggcggcaggcccgggcaagggtcgcttcctcgtccgcatctgtttccagggagacgagggcgcctgcccgacccgggacttcgtggtaggagcgcttatcctgcgctccatcggcatggacccgagcgacatctacgcggtcatccagatcccgggcagccgcgaattcgacgtgagcttccgctcagcggagaagctggccctgttcctacgcgtctacgaggagaagcgggagcaggaggactgctgggagaactttgtggtgctggggcggagcaagtccagcttgaagacgctcttcatcctcttccggaacgagacggtggacgtggaggacattgtgacttggctcaagcgccactgcgacgtgctggccgtgccggtgaaagtgaccgacaggtttgggatctggaccggggagtacaaatgcgagatcgagctgcgccagggggagggcggggtcaggcacttgccaggggccttcttcctgggggccgagaggggctacagctggtacaaggggcagcccaagacatgctttaaatgtggttcccggacccacatgagcggcagctgcacgcaggacaggtgcttcaggtgcggggaggaggggcacctgagcccttactgccggaagggcatcgtgtgcaacctctgtggcaagcgaggacacgcctttgcccagtgtcccaaagcagtgcacaattccgtggcagctcagctaaccggcgtggccgggcactaaacacccgcctgcctgccagggtgaacacacagccagcttatccctcttaagtgccaaaacttttttttaaaccattttttatcgtttttgaaggagatctttttaaaacctacaagagacatctctctatgccttcttaaaccgagtttactccatttcagcctgttctgaattggtgactctgtcaccaataacgactgcggagaactgtagcgtgcagatgtgttgcccctcccttttaaaattttattttcgtttttctattgggtatttgttttgtttcttgtactttttctctctctccttgcccccctcccgccctccccgccccataccttttcttcccctggattttcaccctttgggctgccttgctcatctttatgccccagcactaggtacggggcccaacacgtggtaggcactccatcagtgtttgctgaattgaaaacattgttgactgtggcttctatcagagtgtctaccttttgcagctcttcccctccctcatttaatttgctgcttttaatctacgtggtctgagaatttgtgaaaccagtgttgttagaagtgtatataatctgaatcaataagctctgaatggtggccaagggcctctcttatggcacaaagatgcatggacttcatgacagctcttttggtggctcagaagccattttttatagaatcatggaatctagaatattcctgctggaaagaacctgagagttggtttggaccaattccctggttttccagcagatgaaacaggcccaaagaggttaaatgactgggtgaaaatcacatagctgtctggtgccagagccagcctatagtagagtcccctgaccccaagcccggtgctcattccactacctctcacacttcacaacaatttcctcaacacttgagggcccagaaagtctgatctctccagaatgatcagcccagaggaatgctgagaaatcacctggaggagggagcagaaagagaaggtttttaaggaggggcttctgaatacttgggagatacggaacggaccaaggaccacactccagggtgcattcgttgctccctggggcaccacttctggattacagtgtgccaggtcctttggaggccctaccccttccccattcattgccaccagtgagaaatgggggtgcccctgtgtaaagaaacctaccaaaggtttacatttgcaccttagcctcaatagctacgaaccctagagaagcagctagctggagctcatgtgcaactcctgattctcaggagaaagatggattttaacccaaaattatgagtgagctgttaactctaaaatgtacttgggagataggccaagcgagaggtcatgggccaactaagtgttatccagtagaaaagacagtacactgcttttcttttagtgtttgcttttcctttgctatatgttttgctatttccttgtggcttagaatgtaaaattgattgttaaaagttttgttctgaataaatatttatcttttgtattgctaaaa

SEQ ID NO: 8173 - DNA, 2350 bp, Homo sapiens; identical to SEQ ID NO: 8172

SEQ ID NO: 8174 - DNA, 823 bp, Homo sapiens
ggaagattccatgtaataaagtctgaagtgtgcttaacacagtactgggaacttaagcagcactcacacttcatcctaaatacgacgaaagtcttttcaaaaaaataaaaattaatgcaatatgacttacttggaaatgtatcaaaaaataaagaccgatgaatggatcgaggcgtagtgtgacagagtaaaattttaatgataaaaagttaatggtaaaatgttcactgtaaaactttcaacttttcttcttgaaaacgtgcataatccgacgtgggaaaaaaaataacgcattgcagtcagttctggggaaacggaaagctaagttttaattttgctattgcttttgcttttttaacagaaaaggtacaaaaaagaaaaaatgggagagatgttgccgaactccgtcccgcctgtgggctgtgggccgttagcaaagctgctagcatgaaatcgtcgagcaccgcttgcgaaacgccaaatcctcgagagcgaggccggaggctgccaaacccgcgctggggaaagggccgcctccgggcgccccatcccgctgcggacggaggtgaggttggagcgagcgctggcggaagagaggctcagcgcagggggcgcagagccggcgctggccaatatgcgccgcatgtgatacctttgagggcgcggcgggggagggtagcgtcaaatttcaaaaaaaaaaaaaaaccaaacccacacagccccggcgggcgggcgcgcgcgatgggcgccctttggctgcgggagcgagtggaggatgctgggaaggaggtaaaatggccaccggcggcggcgcggaggaaga

SEQ ID NO: 8175 - DNA, 823 bp, Homo sapiens; identical to SEQ ID NO: 8174

SEQ ID NO: 8176 - DNA, 1169 bp, Homo sapiens
gattgttatattctcttgctcagttgacctctttattattatatagtgaccttatttttctcttcttacagtttttgtcttgaaatctattttgactgatacaagtgtagctactccagctcttttttgcttttgtcgccatggaatatctttttttcatctgcttattttcagcctatgtgtgtctttataagtgaaatgtgtttcttgtagacaacagataattgggtcttgtttttttatccattcagagccactctgtgtcttttgatttgagagtttagtgcgtttccattgttattaagaagtaaggatatgttctgccattgtattgtttgtcttttgcttgttttgtggtcttctcttcctttcttcattccttcatttcttttattgaaggtgattttgtcttgtggtatgatttaatttcttcctttttattttttaggtatatgttatatggtttttgatttgaggttatgatgagtcttgcaaatattatcttacaacctattattttaagctgataaccacttaacattgcataggcaaaaacacacagaggcaaaaagaaaaccaataaaagctctacactttagcctcttgctttttaactttttgttgtctctgtttatatctcattataatttctatgtcttgaaaagttgtcattattagttttggttggttcatcttttagtctttctccttaagatcagagtattttatatatcacatttacagtgttataatatgctgcatttttttgtgtacttactattaccagtgagttttggaccttcagttgatttcttattactcatcaacttccttttctttctgattgaaaaactcccaggctggacacggtggcccatgcctgtaatcccagcactctgggaggctgaggtgggctgatcccttgaggtcaggagttcgagaccatcctggaaaatgtggcaaagctccatctgtactaaaaatataaaaaattagttgggtgttgtggcgagcacctgtaatcccagctacctgtgaggctgaggcaggagatcgcttgaacccgggagacgaaggttgcagtgagccgagatcgcaccgctgtactccagcctgggtgacagagcgagacgccatctcaagaaaaaaaaaaaaaagaaacagaaaaa

SEQ ID NO: 8177 - DNA, 1169 bp, Homo sapiens
gattgttatattctcttgctcagttgacctctttattattatatagtgaccttatttttctcttcttacagtttttgtcttgaaatctattttgactgatacaagtgtagctactccagctcttttttgcttttgtcgccatggaatatctttttttcatctgcttattttcagcctatgtgtgtctttataagtgaaatgtgtttcttgtagacaacagataattgggtcttgtttttttatccattcagagccactctgtgtcttttgatttgagagtttagtgcgtttccattgttattaagaagtaaggatatgttctgccattgtattgtttgtcttttgcttgttttgtggtcttctcttcctttcttcattccttcatttcttttattgaaggtgattttgtcttgtggtatgatttaatttcttcctttttattttttaggtatatgttatatggtttttgatttgaggttatgatgagtcttgcaaatattatcttacaacctattattttaagctgacaaccacttaacattgcataggcaaaaacacacagaggcaaaaagaaaaccaataaaagctctacactttagcctcttgctttttaactttttgttgtctctgtttatatctcattataatttctatgtcttgaaaagttgtcattattagttttggttggttcatcttttagtctttctccttaagatcagagtattttatatatcacatttacagtgttataatatgctgcatttttttgtgtacttactattaccagtgagttttggaccttcagttgatttcttattactcatcaacttccttttctttctgattgaaaaactcccaggctggacacggtggcccatgcctgtaatcccagcactctgggaggctgaggtgggctgatcccttgaggtcaggagttcgagaccatcctggaaaatgtggcaaagctccatctgtactaaaaatataaaaaattagttgggtgttgtggcgagcacctgtaatcccagctacctgtgaggctgaggcaggagatcgcttgaacccgggagacgaaggttgcagtgagccgagatcgcaccgctgtactccagcctgggtgacagagcgagacgccatctcaagaaaaaaaaaaaaaagaaacagaaaaa

SEQ ID NO: 8178 - DNA, 702 bp, Homo sapiens
tttttttttgaatttttaaaattattattatactttaagttttagggtacatgtgcacaatgtgaggtttgttacatatgtatacatgtgccatgttggtgtgctgcacccattaacctgtcatttagcattaggtatatcacctaatgctatccctcccccgtccccccaccccacaacagtccctggagtgtgatgttccccttcctgtgtccatgtgttctcattgttcaattcccacctgtgagtgagaacatgtggtgtttggttttctgttcttgcaatactttgctgagaatgatggtttccagcttcatccatgtccctgcaaagggcatgaactcatcattttttatggctgcatagtattccatggtgtatatgtgccacattttcttaatccagtctaccattgttggacatttgggttgattccaagtctttgctattgtgaatagtgctgcaataaacatacgtgtgcatgtgtctttatagcagcatgatttataatcctttgggtatatatccagtaatgggatggctgggtcaaatggtatttgtagttctagatccctgaggaatcgccacaccaacttccacagtggttgaactagtttacagtcccaccaacagtgtaaaagtgttcctatttctccacatcctctccagcacctgttgtttcgtgacttttaatgttttctt

SEQ ID NO: 8179 - DNA, 702 bp, Homo sapiens; identical to SEQ ID NO: 8178

SEQ ID NO: 8180 - DNA, 361 bp, Homo sapiens
gtgaacacagagaaatgaatttattccccatatgggtatgtttgccccctggcaatgcatttccatactctttaacttggggactgaaatgttataaattgacagttctactcagaagacctttcaagcatcttgtgtttatgagaatacaggggcatctgcggaatgaattcgaacacatggatgaattaaatttgaaaacacacagaccgagaggcagacagttcctaggctgtggtcgttgcatggattttacaaaactgttaacctacacctttggctttgctgtgttcattgtcctgggaagaattgtgggtttaagaattactctttgattaaactacttaaaaaaaaaaaaaaa

SEQ ID NO: 8181 - DNA, 4203 bp, Homo sapiens
cgccggcggcatcaacagaaagacccaggcatgagtcagtcacacaatgaccttgtgttcctggagcagccagagggttcccggaggaaaggcatcaccctcaccaggatcctgaacaagaagctgctctccaggcacagaaacaagaacaccatgaacggtgcccccgtggagccctgcacgtagggcctgaggtcatcacctccaagccagaagacgtgcacccatgttaactaccctcaccaggacgcagccagtgtgtccgccggatgtccagatgccccgcttgtcttgctgggtttcttccaaccatctcgtcatttaaagggaaaacaaaatctgagtctccagccaggaggcttctcccagagaggacaaaaaagcccaacttgccaccagatgctaaatgagacttgacagctgcagagcttgggctgtgctcatagctaagggttagggttcaatattagaaggagattaacattataagtgaaataatatgctctaatagattgtggagggcaggtttgagggacttagtttacctattctacactaacaagtgttgttttgggtccatgcctggaccatgtcacaaaaaggaggtgcccccctgtgctgtcactgtgaatggaaaggatgggtcacctctcttcatctgctgcttggaataaaaaatgcagctggccctgagtacagggaagtggaacataggcaggattttggattaatagagaaattttgataagaatggagacgctacgacagatgtaggaagtcatctacctttgatattagccatagaacttgaacactaactatatcctatgcatagtatgcagaacacttttctaagtttactttgagcctacttgcaagtggaagatatatatattctcacatggtttttacatttttctctatcgtgttaaaagctctaataatgctagtggagcagttgacatccagggttttttttcctgcctgtcatacttgctaaacaagagcacagcgggcctgtcagatgaagtcaggagccatacgtgaccgctcgtagaacacagtaaccaaacacatacatggattttgccaagtgctgccagtagccaaaacaaagtctttttagggcaatagaggaaattattttgtgtctcaggtgtcagtcttaggaatggaagtttaataacaaatgggccaaactcgcaggacattccttctatgagcgcttcagaattttgctgtgaacagtcctcttggacacaggttggggtgcccttgtttgggtttgttttggtggaaaacatcacaaacctggcacaccatttgaatatccctaatatcattccagtcgctttcctcatcagttgcctttctatttcagttcattcacagatctcacttctgaatgtgccacttccagtagacatgctggtcaaagagcagtcatcattggggtgaagtgttcttgacagtttaatatgattcacttttctccaaagacatgtaaaaggctgttacgaaagcttggcttctgtcatggagacggaaatgggcaagcttccttccgtagcctcttgttaatccttaaacattaaatatttcgggggtaatagagccactggtgagtaaaaacctatataaaaaccaaaattataggattttttcttttttagtaaaaaccggtatcaaaaccaaaattataggatttttttcttttttagtaaaaacctatataaaaaccaaaattataggattttttcttttttagtaaaaacctatatgaaaaccaaaattataggatttttttcttttttagtaaaaacctgtataaaaaccaaaattataggatttttttttcttcttttttagagagagagattagaaaacgacattaggaatttcactttaaaatgcgcattacaaacttcttaggtgttccaggaattatcaagtgactttaaaatgacttttccaacctgctttgtttttaaaaattatattccagttttaatcattgtaaaaaaagcacctggagtttcaaaacatgtgaatactaccaagtttctgtccccaaagtcaggcatcactgttagtcttttgggacagatgggacagatgttcactttaatgttttacttgaagttttactgctctttgccatgtggtaaaaagaggctgagacatatttaagaattccaagaggatattatgtgtcagaatttcagacactgatgagaagtttttaattgttcttttttatttgattttggaattcaggtgcactctattcaagtgcaaggatatcagaagtttttttttatttaaaaaatttttttttcgagatggagtttcactctgttgcccaggctggagtgcaatggcagcttactgcaacctccacctcctggttcaagcgattctcctgcctcagcctcccaagtagctgggattacaggcacgcgccaccacacctggctaattctatttagtagaaatggagtctcaccatgttggtcaggctggtctcgaactcctgacctcaggtgatccacccaccttggcctcccagcgtgctgggattataggcatgagccaccaggccggccccaggattttatattaagccttcttgctctcaaaaaaaaaaaaaggttttaactattccatttccagatgaatcccatgagcgctgcttactgttgaataccaaggtctagggctctgcttcctgtagacacgcacacgttgtctccatccaatggccttttctgaagttacagaaaacaccaacatgggagggagtttatgaagcaaaggcaaaggcaacacgtcggctagcttcagggtagcaccgtgagaaatgggctgtattgatactgtgaatgtttgttttccaagctgttttatacaggtttgttttttcatggtgtagggtatttatgacaaagtaaatgttgtgaaggttaaagataaattaagattatccaccaaatgctaaaaatactgatgtgtaaatcacctttatcgcctcacctcttctacaagcttttgtggcttgagggcttttgtttttggcttttgtctggatgaaagttttgcccagttgtgttttaaaaacaattcctcatgaacactaagattaattgtgtctgtatctctggaactgggtgctcatgttggttttaatgagcttgcaacccttccccgtttgctttgtttaaggaggtgcctctgttctttgtggaggagtgaaatggagctttaagtgtgtgtgtgtgttatgtgtgtttgcacacacgcgtgtgttattgtagcaataacaaaaagtagccatctccttgttccagctgaaaacctgctgtgagagttttgacagagcactttattttcgtcaagtttcaagtctgagttcaaaaccagccctgatcccttatgaccaactgctactcgaccagtcgccactcagtggccacctggtgcccgtttagatttttgcttgggttttactggccacctctatagacgagagttgcaaagttgctttgagcagagagggaaagattaatttacactgctggccaccgaaggcaggtgtttcctgggtagtaatctcacggctcttgatctggaaacttcagagtacaaattggtggatggtggaaggcaggacacgtatctctgtctgacggaaaacagacctcggggctggcgtaaaccctgctgccaggccctctccccactgccccaaaccggcctagacacgaagaccaaagcagcctgcacagggcaaggcccccgcggaatcctgcagagcaaactcaggttaacttgggtccatgaccgtttgcattcgaaacacaatacactgcctcgttctctcagttagcagctgggcagcagcgcaccattcatcatttaggcttgtggtttgttgtttactctaccaatgttatgtcgaaactgcattgtaaaaagagaagaaagtggcaggttttccaggtccacggaaaggtttggcctgacgctggagtgcggtgatgaacttacgtgacaatgattgtattcctcagtagcactttaaacgccgaagacagccctgcagcaagcctgcacacgggcttgggtgggttcctttggagaagatgtggctggaacacaaacaatctttgaaagaaataaatgtgcacacagaacactacactg

SEQ ID NO: 8182 - DNA, 505 bp, Homo sapiens
cattcctaagaaagtgaataccattgttctcagggtcttaattgggttttatgagtgtgaccatcctttctgggacatagtactgctttgccagctacacccttcctaatgaggggaagtgggtggcacagaggggacccaggtatcccaaccgaggcaatagctgtctgcctccatttggtctgatagaaaatcagggatataagccaggtgtggtggctcatgcctgtaatcccagctcccagcactttgggaggctgagggaggggtggatcacctgaggtcaggagttcgagaccagcctgaccaacatggtgaaaccctgtctctactagaaatacaaaaaaattagctaggcatggtggcacacacctgtaatcccagctatttgggaggctgaggcaggagaatcgcttgaacctggaggtggaggttgcagtgagccaagatcgcgccactgcagtccagcctgggcgacagacagcaagactctgtctcaaaaaaa

SEQ ID NO: 8183 - DNA, 8048 bp, Homo sapiens
atttcagcctggagtcagtcaaaaaatcttagaggtctgtaaaggagatgactatgctgttagggctgtggtagaaacctttaataacaagtgaaaagagcttgtatttgccaaaatgaacacaggatatgattctttttttgcttttgctttggagttgtatcagctctgtgcggtcacatgggtatctacaaatcaaagcacccatcaaccagatgcatctctgagagttaacagcagaaggtggcataataaaagaagttctcggtagtgaaaaaggttggaaaccaccagctaaaccaatcctcttgtaccaataggagattcaagttgagaggtgggaaagggcctatctcagagtaggtgcttgaatacttcttactagaatgaaagaaggaacttaagatcacacagccatgttactgcaggacggggaatggaacctaggtcttcttatttttggttcagtgttaactcccattctctaagcagactgggcctgttattcaaactgccttcccataggtgcttccctgcttctctcctcacccagagaaggacttacaaacagcttatcttcagaggttttgtgcctgatagttatggaatgtgctggtttgagcagggaggatgtaaggggagggaatgctaaaagcctgtctacttagagtcaggtttcctgggtaagtccctggaaccccatccccttcccctttcttgagaccccaggacttgctccagtaactgccaccctgtgcctttgcttcagggccatgctggataaggagctggctgcctctgtgaacatcctactcaaggcatcttcactgtgagttttgctgttgccattggagggggagtggggggagtgtggggagtgctagggtcaggtcctggctggtgtaaagaacactgaattaaaggaattgtcagaataactcaaaggcatttagataatcaacagtccatttcagtgtttttattcagagatcgatcgatcagtgggatgttgtccaacaaaagcaaaaatagactgtatagagaaggaaggaaaaactgcataatttaggaacagtatatcttgtttgcacattctttggttaaatcaattagcctgctgttaggaaggaagtctgggcattttatccttgagtaaaccaactagggatatcagagaaaacagtttccaatgcttttggattctccagaaaacagacagtttagcatatatgacaggctgcttctgcgtattgtctacctttcatttcattaacaacttcactttagaagcctggtctgcaccatttccctcatcacaatactttagcatcctggcactagctgtgcaggatttgtcgtacgtcttcctttccctgatgatcatgtttctcatttccttccctctctcccttacaccctcaaaagagagagacataatatacattctcaaggtcatataagctatataatgaaagctacctttttctccccagtgatgttatttcctcagtggctcacaccatctgtagtcatagttcccaaatttggccatgcggtctatccctgaactccagcctcaatctattcaattagtcgccctgaggatggggcccaggtctctgaatttttaaagacttgtatagataagtcacatttagccagtctgggaaccagtgttgggaaattgaatagaatttcatcctactatttcctttatatgcccatcctttctcgtgatgtattattttgccacagtcctgtgacacaggaagggccagtggccttggtcatcttagatttgcccttgttgatcttctcagggtaaatgtctttcctttcccctgatggtgttcttatactgtcttctgatcatcatttctgactttgttttcagcatctaaaagtttccataactataaggcttacttcttccctgcagtcttccgtgtttttagttattcatttatgggcactctccttggaaagtcagtgatcaaaatagcactagtgtgtaggatgagcactggaagagctcaagcagagaagacataggagtttctgcagggctgtcctggggtggttcttgatgaggccagttggggaaaaagctaggtggcagatgttggcacactataagaaaaagcatcttgtgaaaacctttaagttagatggacttcatcaagagatgatgaacctcccacctccaggaatgttcaggcaaatgccagatgcatgcattggaatcgttggaccagatgacatgtgaggccttggtcaactctagacttgtttatataggcttggaaagattttaaagttttctcctcagtaggtcacttaggtgggccaggtttgacacttcactgagctcctcttaggagcatcataatttggttttgttcccttctccaggtacttttgggagggaaaaatagaagccactaacatcctgttagtgaggatgtgagtgtagggagtctttttttttttcttttttttttgagacggagtctcactctgttgtccaggctggaatgcagcggcatgatctcagctcactacagcctctgtgtcccgggttaaagcgattctcctgtttcagcctcccaagtagttgggattacaggtgcccgccaccatgcccggcttattattttttttgtctttattttttggtagagacagagttttgctatgttggccaggctggtcttcaactcctggactcaagtgatccacctgcctcgccctcctacagtgctgggatataggcatgagccaccacacccagcctgttgtttgttttttcttttcttttcttttttttttttttaaccattagtgcaaatgtcaacatagtaaaaggataaataataaaataatattgttatgaaagtagttttgaccccatggaccccctagagtcctggagatccccatgggtcagtggaccttcactttgagaacctctagtataaacctttatcattcagaagtggaatttttggaattggcatcacctgggagctttcaagaactgtagaatctcctgctcaccccagacctaccgaatcaaattatagtttaacaagacccccaggggatttctgtgcacattaaatcttgagaagcactggtctaaaccagtgtttctcaccgctggctgctatgtattagcatcacttggaaacatttttcaaactaccaatttaggccccacctcacagatttcgacttaatttggccagggcggggatcaagtatagtggtactaaaaagcacctttctttttagatgactctaacgtggtcacctgaaccttctgaggttgactctaacgtagggccagagatgcaaaccacctatatggatgatgaaaccttttctttactccttagggaactaagattctgtgaatacaccgttcccctgggtctcaaactagctctagaggaggccctcatgataccacctcagcagaggtgagagagtaaggaaccattggtagagccagtactgtggagaaattaaaatttaactggtgagggacagcttcagggttaagagagttggacctcctaccttgaaacctggctccccacctgccactgttccatagtgcttggaaaatatgaatattttatgtgcctcagttgccccttctgtaaaattgggattatactaatgggttgttatgcatatggaaattaatatgtgaaacctgtacatgaaatgctttatcagtctcagctcttattcctaatgtgttaaaaatgtctttgaattctgtatgtctgcttataaaaacacataagttaacaaaattcattatcctcaggcacccaacgtacagaatatttaagcatacatttgaagcaacatgtgaatgtatacatatgctgtgatttattaagcatgttacgggaactttaaaacacctcattcagcagaaaggaggcagaggattataatcctcatttgacagatgggacactgaggcccaagtcctcatgttccttcagtctagaaagtgaagagaacttgcactgtgtgacaagggccaggcgaaagacacaggagaggaagatagattcctgtagaccttgtttgtcagggaagatcccttgggaaaggtcagtggttgaattggaccttgagggacagagaagtttttttttttttaagcaagaataggcttttgattgatcagcaggagcaggtggaatctaggtgggcaaaagaatacagagatactgggggaggggggattgttttgggaagtgatgtgtataggataataataaaaagagtagctcacatgtaatgaatgcatacagtgccagctggtatactgggtaagtgctttgtataccttgtgttaattaatcctcagcagtccagtcatgtagggccttttttttttttttaaaaataggagcatttaaagaaaactaagtgacttgtccatagtcagacagctagtaggggcaaagttagaatttgaacccatgtctgtgagactctaaagctatctggcctaactggccacttattgacagatgggaaacataggctagggagtgacaggccgtgggcctggacaggtggggtgcggcaggttgcagagggcctcccttgaggctggccagttgggttttatcacgagttgattctaatcatagtcacttatagggctttgctttctctccaaaggctgtacatccttttgaaatcccagagatcttcagtctccctgtggattaaggagatgtgcagtatttaaagtggcttcaggaaggcatggaagaggactgagtggggaaagctttttgtgcatgctgctggctacctccagcggctgcctccagcctccatcagctgcactctggggaagaggaggctgccttctacctcccagcatctctggatttcatgttcctgtcagcacagaggagctaaatggcctgtagaggctgaaggtctgaggctcctaaagctggaagaaaaggctgggccagtcaggccaagcaagaacacagtgtaacttgtctctgagtgcttcatggttaagggggctaagcaggcacaagggcatgaggatggttatatgtacagactgaggggaagaagcagtgaagatgagacttgccatcttcttgagtcagtaggcctgcctcaggtgcctaggatgtaattgctctgctgcttctcatggggaggagtggccctcatgaccttgtttacctggaagagtgtgggatgaatgcctcctcctatggggactcgcaagtgctttagcaaaaggataaattgctaattgtggcatttcgtggatcagcaggattatttctccttgctaaagaggattttgttggtcctgaattctgaggaggtgggactaggaatgggctccatgagcctgtgtatgactcagggaatattaggactttggcacagcctcatgggttgggagtaagtcttggctcttccctagcctgaatgacagacatcagatcattctggtgctttgtccatgaagatgtagattctgagcccacccaactaatcttttcacttgagcacagaaacagccccgggaatcggacagacccgtgtctttcaggtttgcttcacagagccccaggggttgacaataggtgccttggagactgcctgcatggggatttttaaaaagctttctttgttaaaggtttgtaaaccactcctctgagcctgttttcattttatagattattcagggaactgaactgcacagagatccagaaagtgggtagtgcaggctgtagtgctgataactactgtactacttggatctttgtgctcccaaataccaaatggaagaggatctctgagagtcctttgcaaagatcttgtagggactttaggctggggccttcggaaaattccagaggattccaatggagattttgagggactgactcagaagaacaaagagaatgataatggtgatgtccctgctttttacaacagatcatgttctgatatatatgcaaatctgtgtaaagtaaaccctacctaaaatgtactggggacccaagatggactgcctgtattgcttccaggataaagtccaatttctagctctggtttttataaccttgcttcagctcaccttttccgtcatcatcccctccatctcctctcccacgctgggaaatggatggctgcactatactgtgtgatgttattgctatgttcatgccatcccctctgcctggaatgcccttctgcatgaatgcctgtgaaatgttgttgctcctttgtatggcctggcttccgtggttggcaggaatctcttctttcgtggtattcctgtcatctttgtgcatcacagtcagctttgtattcctagcttgtaagctacttgaggataggggcatgtctgaatctatttaatctcttgcacctgtttggcaaattgatgttttaagtatttaaataactaaagctctctctacagtacatactcacttttgatttatgaattggcaaaattcaacttttttccttgaatattcttaaagtgagatgaattccaaaggagagtgttctgtgtgtggccttcattgagtggttttctgttaccagaaagctcttggtggccttcctcttccctggtgtcaaggttgactgttataggaaatgggaggggagagggccgtttctgccacgcattgtcctaggttcttaacattatttaatccttataatgcaatgttatcctcattttacagatgaaacctgagaccaaagaacatgtaacacataaagtacattgcagagttaggatgtgaacccaactctgattctaaacctaatgctctcactctttcattcagaggttcagtcagttctttgtaggctgtagatccagagaagctgccgtagccaacaatgaagttgttagtttttaaaacatctatgtggtaagttggtctggcacttaaaaatgtattgtttcccaggcacggtggttcacacctgtaatcccagcattttgggaggccgaggcaggcggatcattaggtcaaaagattgagaccatcctgaccaacatggtgaaaccccgtctctactaaaagtacaaaaattagctgggtgtggtggcgcatgcctctagtcccagctacctgggaggctgaggcaggagaattgcttgaacccaggaggcagaggttgcagtgagccaagatcatgctactgcactacagcctggcaacaaagcgagactctgtctaaaatatatatatatatatatattgtttactactcaccacagatctgcaggagttcactgatctctaggatctgccttaactccaacttacatgttttggtcactattacaaactgtcatcccagaatgatgctgcagaggctagggctaggacacagaccagtgtttccatgtgggaattccctcccagtatttcttaggaaatgtatgttttttgaatccataatccctagaaaaatcagttgaggaaatgagaagtattgtaattattctgtgaatagtaacacttaccattatggagacatcactagtttgaaagaatccaacttcatcaaatattaacgtaccgagttgaaggctacaagaactgagacaggagcatagcagagagaaacggtcaccatctcattagccctatttttggttgttgtgatgccattacatctgtatatctggccatatcagctgctaatggtgagttcttgcaaacaaaatgatttgataaacaacctaccatactttatacaaatcttatggtgttccgagaaataaactttggaagcaaaataagttaacagtctggacacgattgattctatattctgtttaccttgctctaggctattcaaatgttatatttatttgaacactatccaatatatgttccctggcatcttcctgtcttttaaatattctctgtacgctacagttctttgtaagtaaaaataagcttaatatgtctacttagcaaacaaagtttttccagata

SEQ ID NO: 8184 - DNA, 532 bp, Homo sapiens
ttggaactttccaaaggaacgatgatggtggcggtaatgtcacattagtatggagcccttaaattcagcagtgttcaacctgagggaagacagagtaggtcaattctcttggcagcagctgagggaaggagagagcagggagcagggctcagataaggtttgtttggcagggtccaagcacttcatggaatggagacctttggctgtcagagatctgaggaagatttgtcagggcctgctacactctgagggcttgcagtttggatggttgggaacacttcttccttgcactgatggtgctcctatttctatgacacgtgtactagttcagacacaatttattgtgttcaccaattctatgcacagcaatcagactgagattgaaatccagtataatattaaaggtgatctgggccaggcgcagtggctcatacttgtaatcccagcactttgggacgctgagttagggggatcacttgaggccaggagtttgggaccagcctgggccagaaaatgagaccccatctgtaaa

SEQ ID NO: 8185 - DNA, 2620 bp, Homo sapiens
tgattgttcaaagggaggttttaaatcataaatcagacacattaattataactttaacaaatgttattaaaagcagcaattaaaaaccatgaatctttttgaaggtgcagagggttataaggtcagttggcagtaatgcagctattatctggtatgaatgaaatgctggggtggggagtcagggtgacctcattaggccttgtgctatcttcccaggtggtgcagacaccccctccctccttttccctctccaggcccacagcctccccagagcccaggtagggaaggtccagatgtactataacaggattgctcatcccaggctatctcagaagtctggaaagcaggcctagaaggttgctgggctctctgaagccaggcaggaagctacaaattggatcccagttcccacagcacccctgggctaggggttggcttctcagctccccttccacctggccctagttggcccctgtggcagcagctgtggggctgaaaagggggaagaactgggtccaacgccagctcgtctatgcctgggctgtgccagggaagcagaggaaagtgggtgggctgtgcacaggaggtgaggtcccccttaaaaggcactgtgggagctgaggtctaagatgggggggcatctaaactatctcagggaccccctgaacgctcacaggtagagaggggtcaggcctagcaatggaaaaacagctcctgcaggcctgctgccccgccagtgcctcttgctgtactaccaccttcgccttcctgctggcggcctgcaaaaccagccaagctggaggccacagcagcagttggcaaggctggtccccatctggtgcccaccctccacgtcaaggcacttttgtccattttccaatcaagtgagtcagtttctaatatctctggaagcagcaaaacatcaggggtcctcttccccctcccaattttggtttccctccagatgaggcagaatttgaatgttggttccaaaaattctctttcaaacccccactggcaagggcttccctttgagggaaccaaatgatgcaggctctttaaaaatttcaacctatcccaaaaagtgattgtccatttcagggcagggcaagggatatgaaagagggtgagtcccctgtgcttccctatgggaccaatgctggttgatgggctgaaagaaggagcggccactgagctttcacatttagttgcagcacctgggccctggaagtgggccaagggaaagccaagggaggagccagcaggcccagagggacggtgtggctctgtgtgtgtacacttgggcatgtggtggtgtggccgtgtggggttgtctgcatgcctagagctgaaagtacaacacatgtggatggaagcttgtgcgagtgggtgtgtattgtctgctgtgtggtgtctggtgggtctggggatgggaggcaccagaaacaggtttagcaagacatggttttccctcccaccactaccaccccccacccccgtcccccaggtttggaaggatgcctccattccagcaaggccaggcccagctctatggcgactgagggggtgaggccagagaacagaagacttctgggacctccaaagctgacattggcagccttcactctcagccttaatacctgggccctggtgctggtgccttctgaggcagacccagccctttactcttcagatcctcacaggctttcacaggggctctctcccatcccaccacctctctccgagggtagtggggagtggcaggaaagtggaagagaaaagcactgagcagcatcctcttatccaccttctcccatgctctctcaaaggtgcctgttatgtagtccctgggaggactggctgccccacgggtcacgtgtgaaggggatccagtggagggacagctgtgcacacacaggatgtgcgaacacacccagaaaggggcgagagaggtcaaggcacacaactggggacaaagacctgggcctcaggaggaagggtcccagcgcaggggacacaaggtcagagaacagataaacagagtttgagggggtgtggagtgtgtagagacacaggcacaggggtaacgagcctgaggaggccctggaacagagctggtacagcagagagacgcaggccttggcctggcaggcaggcaggcagggcattctgccaggcacttgcagctctgtcctgcttccttctcccaccccagcctggagaaagctggggagcctatggcttctgctgctcctcctttggttttcaggacccctggcacccccgggggctagtcagtaaggggtggtcccttcccactccaccaggtactgaaccttgccctcaggtgtgaccctccgagccaacacctggtacttctccccacaggccaaccgcccagctgcaccaaagtagttggtgatagatgacttgaggtgggacagggatgagtcatcttcactgatgctctcaaatgtgtggctgtcaatgccttcgtctggccgctcggggactgaagccccctctgcactgctgtccgaggggcagcgtccatccagctcagctgcccaccgctttgcccgcaggggcatgtatgccttggctgccagcttcctctttc

SEQ ID NO: 8186 - DNA, 1528 bp, Homo sapiens
gaactggggtaagtttcccttgttcctcaagtaagacaggatatactttgcaataatctaaaaaatctagatgtgacctggacaaagagagagagacaaagtataaaatgctttcttagggataactcatactcttggtgacaagaaatgttaatggtgtcctgaaaccttttggtcagtgattgctccattatgtgggaaaaacataggaaaataaacataggaaaaacaaaggaaaataaaagactcatagtacttcaataaaagttgtcaccaaatcccaagaaaatgattgcattggaaggaatattctttttgttttaattgatagtattttaggaagtagctaacacttgttcttatttcctagcttaaaaagtgaatatatgcacacacatatataactagaaagtgatatattaacattttctattaacaagttttttatctcataaaagatattctttggctttcgaagagagaagccaaaataaatatcacataggcatttcagatatcccttcctttaaatgtttatagtgatacataaaatagaaattgcaaatatttgatattttaatattatttttgctttacaatagcatttttagtgctccattttaatttattttatctctccaggttaataatctatcataatgtccaaattacacagtattgtattggtcagctttaagtgcccagatcaatgacactgaacctggcaaatgcaatgcacatgcacaacgcctagcttctaacatcatggctgttgaaactgtctcctctccaaagcattttcccagccccatctctgccatttgggtctcatctgataaggtttaaccatgagttgttatactccatgcatggcctctgcatttgtgtgtattgtgattcttacgtcaaatggtaaagaataacattagattattcgcttttattttgacagagttcaaatagcaaaataaattagatatactgtcacagcttaagaaatttaaaatgaaatatgttgtagtcaggtggaagtttctgccggggaaatattaacacctaatttcccagaatacttatttcatgcattgcaaatatctatctcctgtcatgacactgagatgaaaaggatcggttaaaagtttgctaactgaactatttcccacagtgtaaataactaagtgttggtatagactagtatggaaacatactaattacactgggtgtaagctatgtgagttgccttatcttttcacataacatttatatgtattgcatttcccatatcgtttccttttgttttgctgataacaactaatgaggaaaagaaaggaagcattaaaaaaaaagaaaaaaaaagtcttccaacaaaactgctagagagagaaagccaactattataaaatataagcacaattctattgaaatatcagctccagattcaagtaattttgggcatgtgtattatgtgccaggagatttcacttacatatgttatggaacgcagtgatttaaaaaacaaaacaaaaaa

SEQ ID NO: 8187 - DNA, 1528 bp, Homo sapiens; identical to SEQ ID NO: 8186

SEQ ID NO: 8188 - DNA, 9974 bp, Homo sapiens
  SITE (235): n equals a,t,g, or c
  SITE (265): n equals a,t,g, or c
  SITE (275): n equals a,t,g, or c
  SITE (325): n equals a,t,g, or c
cgctggaggctgcagtgagctacgatcgctctagcctgggcgacaggatgagaccttgtctcaaatagagatagacagacagacagacttcagaatttattagggtttgtaatttccaggttccaaagcacagcaagggaaagggcctggctgggtagtacgttacacccggaagtaaagagacgcctacaccgttgggtgcacttatgagtctggctggcaaacaagcgacacngacgcgcagagttaagtgctgggacttccnaagcctgganagcagactgtgtctctgcaactacgcggctgccacgagcgctgagcggcngggcatttggcctcgaggaggaggcactgtaagggcggcgcaagagggcggaacgcgggacgccaggcaccctagctcccgacggacgcagttttcagttgcacgggcgagctccgggccggctgcggagcgactccccgccgccaagtgggcggcgtggctgtcgggaaagaagggctggggcctgccgttcttcctcccgagtatcccctccagctggacgaccccacgctgcagcacgggcttccggcttctctcctcagtggccaattcgagggcacagcgggctccggaggcgcggcggcaagcctatcccgcctcccaaccacagcctccagcacccgagagaacggccgcccacagcacacgttctccggacaggagggcgaaggcccaagacctggagaggtgggctcgagggaaagatctgggtcccaccactacttcctggagacgccggggaaagcaggccatccttcgagccacccatctcttctccgattggttaactgccttcttattgcgctccgctggctggtgattggttgggatgcaccgtctatcacctgcttccttgtgagaatctaggtctctaagggaagcgttacttgaggctcggttgggaagaggttggttgggcctcttgagcccactttatttatcgtagtggggatcgtcccccggcgcgagcttccgtcgcaacggccgggaaagaaaccagtagcgggacggagggcgggggtggcaagaaagtcaaggtttagaagtaagccggagacgcctaaccctggtaacatccgaatgggaacgggataggaaggaaggcctttgagagaggaggcgtaaacccaggaacagtgacagtgtaggacgaaaggcctaagtttgttgcggaaggtaggggccttgcgggaggttttcgtgacctaattgtatggggatctaattttctagatgtgtctaacaaaatccactggagaatttgctttggctttgcagcagagtggggagactaccacccgttcctggcctttaaagaaacagtttattgaattattcaactctcttttattgcttcagatgggcagctctcaaaaaaggcacaaacaattgaaggatggataccatggcatatgttaaaagcgtgttgaaaggaaaataaggtattcgctttgttttcattgtgattaactgtataagaaaattacctttaaggagaagctcaagttttaaataatattagggtaacttgattttatgataggcttcaacttgtaaaattatttattacaaaaatcctattattgctgtacctacgaaatatgctctttgctaattatggtcttaatctgaagatagagatcttgagtttttagtagtgttaattcatatttgagtggataatgttactaggtcatttgttcaaaatgacataataaaataaccacagtgaaaaaaatccttgaatttgtaatttagtgttacaggtgaaattgaatagttgcttactccaacagtattttagacttgtaggctaatttcaccttatatttaaagcagcttgcttattaaatacctagtgtatttcgagaggcagagttgcacagttgcttcactggtagcctagccatttgagcctccagcctctactgagtcaggtgctgtattactcataccctttagtgacatgccagaaattgtcgaggaatagtttatttcatctgcagaacacccaaattagctcttaacagcagacctggtcctaccctggaaaactctaatcaaggattggggatgagatttgggcatctagatttttaaaaatacccttaagtgagtttgagaaccattgctttagtgtgacttactgaatagatgtatttaagaaattctaaaatatttgtgaaacaaacatctttctctcttgatttccatgtaatttaaaagtgagcttctcaggagtgacacttaaatataatccaaaaatagtggtttcttaggcaaagtcaggaagtttcactggcattctgaaactcctgggactaaccattccaggcttaaggatgaggcttgatatggggtgatacaaagtgctctgatgcactttcacaatccttgagccatacatgatgtcttgtttcctgttgggtttcaaagtcttcctggtaagctttaataagagaccaccttccagtttgttcagtagatattaattaggctaaatgattttcacctcatcaaagtgcagtgggggataatattacattcatgagccttattttggaaagaataccttgctgaaaacaaatgtaaattatatcatcccagtatccctttgctcattaagtgaagaatgtgcataattcaagcctaaaatttgtaattaatgtgaagtacccagatcctgaaacataaatgaggacttctggatcaacttttccagatcgtcaacatggtcaaaaatgagataatcactatggtattcaggcatgagcattgtgtggtaaacccaaatccagtctgacttaatggctttaggcaaagaagtaagtgccaattgtgttgtatttcctagaagctgtttttcattttatatgtaagcttctcactgcaagatttggcaaatacagtatttgggtaggggacaacatttaaaaattaagaaaaactgcaagttaaaaatacaaagccaaatgtggtccatgacttaacaccttgaatgttgtttatattgtttgaacagaaagccaggaatctcaggatgaatcagtctagatcgagatcagatggtggcagtgaagaaaccttacctcaagaccataatcatcatgaaaatgagagaagatggcagcaagagcgtctccacagagaagaggcctattatcagtttattaatgaactcaatgatgaagattatcggcttatgagagaccataatcttttaggcacccctggtaagagatgggtaaaagaggaaacacccttttttcatcatttagatggaaggatttcaagataaggagaattggtattctttttccttgcttctctttatgaaaatatagtatattgtttttgtgagtttaagaactttttagtataataaagtagaaaatcactggcttctgtattttataaggtgaaaataggggacatggagcactattatacaaatgccaaactaagaaacaggttaatgtacataatggtgttaagtatttacatatatggtcctatttgtaatttttatacaaataaaatatgacttaaaacccaatttgaactcatttggggtattataatttatttattcagctgaattaatagctccccccaaagcccaatgtgttccataaagtttttacaaatgaactaatggaaatttgtatgtttatatattgtgtgtttgtatattgatgacccatataatgaagtatttgggataaaattcaagtaaatatttgaagttttctctataaatgctcccttaatttctttttaactgacaaaaatccacagttatagcttatagattcctaagtgtatcaactggcagcactttaccaactattcaaattaaatcttattttaataatttttaataaaagattaataaatgaagcacaaccgaattgatgcacatttgtaccagttgaatatttttaactgtcttcaatttacagaacatatgaaagtaataagacatttgtcttctataggttactaaagattagtcttacccttcatgaggtctcataaaacttaattcagaattcttaaatgagcagtttttcattgttttaggagaaataacatcagaagaactgcaacagcggttagatggcgtcaaggaacaactagcatctcagcctgacttgagagatggaacgaattacagaggtactatggagtcctttccataaggaacaggcttgattggagcacttgcagaaatgaaattcttagaccttgtatagtatgtttgtcttcaattttttccagttttaatgtgatactcattcagataatatatatatgagtagtaaagcagtatggttaagcagtataggacagaggaatgaatgcaaagatgtcttaaacacacagattgccttcagagagctttatgtaataatatacaattaagttaattcccagcatgcttctttttaatcttggaatgtacacattactttttctaaagtgatattacttagcttctaaaaatttatatacagaaccgtgtagaaagactgagttaggaaacctgtttttgtttctttgttctgtttgatggtttacatataaaaagttcttataaggaaagtactgtaaaagaacttcaaactaaatgaagtatgtagagttaaaaggaaaagccacttttgtgttcctcttaaccagttctacttccctcctcagaggtatttattagtagtttcacatattatatcaaaatcattgtattagttaccatgaagtctatgtaaaaaccccaaaatgcaatggctcaataagctagaagtttcttacttacgttaacagtccagggaaggaaatcctcttggaacccactcagctaacagaatgattctacaactgtgctgttcagtacagtagctgctagccacatgtgactatttaaatggaaattaattaaaatcaaattaaatttaaaatttagctcattcatactagccacattcaggtgcttaatagtcacatttggctagtggcttctgtattggacagcacaaatacagaacatactcattacttcagaaagatttatggggcatcactgctccagggtaccatttgtatgatcaaggtaagtcgcaaccatatctaggttctagctggtaggaaggaggtccacgcactagcgtgagagtaggatgtatcgcttactctcccattccattcatgagaacttagtctcatggtcacacctaactgccaggctgtccacgagccaatttccgatgcttttacaatggaagaagagtagggtagctttgagtaggtacttggcaaactctttcacatgcaccatcatcactacacttaatcaaatgttaatcaaagaaggaagtagcatttaaaataattcatgttcacctgccttttactcattctttttccaaacaaatgggaagtggacattaacacattttattatttgtgtttagatatgtaagttgtactatatagatgcaataattaatactgatcttttgaatatgtttcagtggaaaatgtactcatcaaatataaaatagctcatcatctctggaatatggctcagttgctgtttattttattggcatcaacagctgattaatagcttcaacttcagcatttaaaaaagtcttacgagagagattgcaggaatgaaatgaaatcagaatgatgtcatataatagctattttatttatttgtttatttattttttgagacagagtcctgttctgtcacccaggctgtagtacagtggcacaatcttggctcactgcaacctctgcctcccgggttcaagcaattctcctgcctcagcctcctgagtagctgggattacaggcgcacgccaccatgcctggctaatttctttgtatttttaggagagacaggtttttaccatgtcagtcaggctggtctcgaactcctgacttcatgatctgcctgccttggcctcccaaagtgctgggattacaggtgtgagccaccgcgcccggcctataatagctatttttgagtagaacaaactttaaagttgaagtttgtgtagttaatgtgttgatgctttttattaagttttgtactttatataatatctactggttataaatggaaaatttaagcttggcacagtggcagtatcttagtcaaaaaagtttatgggtgacacatttctaaattgattaattgagcaatattaattgaaagtctgatttatactagatactgctgtagaggctggagatgtaacagtgactaaaactacaaaaatctttgttttcctggagcttacgttctaaatgaatagaaaatgtattttattatgtataacagctaacatttatggggtggctttttatgtgccagatattatgctaattatgttatatatagcgtcttattttatcctcaggataaccctatgagattgattctattattaactccagtttatagacaaggatcagccatagagaccttaagtaacttgcctggtttctcagcttcacacaaagacaaatacagtaatgtggttttaatgttatattcagaaactcacatttcttgatgtgtacatttttggcagcacctgagaaataggaaaaatttctaagattacagaaatacctagttgcaaaaatgactgagttggcttttccagaaagattccacaaatacaggacaaattttacataaagtttgtctttgtattttattgatattactatattgataaagcaatttaaatgtaaacttttggtagtggacatgtttctcatttgccttagtattttgctagtaatgggcagatagaaagtaagaatgaggatttctccatagcgttgcataaatagtatttaaagctttgtaactatgtaaatagtaatttaatttttataatatgcttatagtagatatacttttcttttagaaagttgtctttttgccatctttcattcattaaaatccacagatgttctttaatttattacaaactttgtttttcttacaagttttcaataaagctgtaaggtgtgtcttaggaattgatcttaagttgatttgctttgctttctagactcagaagtccctagagaaagttcacatgaagattctcttctagaatggttgaacacctttcggcgcacaggaaatgcaactcgaagtggacaaaatgggaaccaaacttggagagctgtgagtcgaacaaacccgaacaatggagagtttcggtttagtttggaaatccacgtaaatcatgaaaatagaggatttgaaattcatggagaagattatacagacattccactttcagatagtaacagagatcatactgcaaataggcaacaaaggtcaactagtcctgtggctaggcgaacaagaagccaaacctcagtgaatttcaatggtagtagttccaacattccaaggactaggcttgcttcaagggggcaaaatccagctgaaggatctttctcaacattgggaaggttaagaaatggaattgggggagcagctggcattcctcgagctaacgcttcacgcactaatttcagtagtcacacaaaccaatcaggtggtagtgaactcaggcaaagggaggggcaacggtttggagcagcacatgtttgggaaaatggggctagaagtaatgttacagtgaggaatacaaaccaaagattagagccaataagattacgatctacttccaatagtcgaagccgttcaccaattcagagacagagtggcactgtttatcataattcccaaagggaaagtagaccagtacagcaaaccactagaagatctgttaggaggagaggtagaactcgagtctttttagagcaagatagagaacgagaacgcagaggtactgcatataccccattctctaattcaaggcttgtgtcaagaataacagtagaagaaggagaagaatccagcagatcctcaactgctgtacgacgacatccaacaatcacactggaccttcaagtgagaaggatccgtcctggagaaaatagagatcgggatagtattgcaaatagaactcgatccagagtagggctagcagaaaatacagtcactattgaaagcaatagtgggggctttcgccgaaccatttctcgtttagagcggtcaggtattcgaacctatgttagtaccataacagttcctcttcgtaggatttctgagaatgagcttgttgagccatcatcagtggctcttcggtcaattttaaggcagatcatgactgggtttggagaactgagttctctaatggaggccgattctgagtcagaacttcaaagaaatggccagcatttaccagacatgcactcagaactgagtaacttaggtacagataacaacaggagccagcacagggaaggttcctctcaagacaggcaggcccaaggagacagcactgaaatgcatggtgaaaacgagaccacccagcctcatactcgaaacagtgacagtaggggtggcaggcagttgcgaaatccaaacaatttagttgaaactggaacactacccattcttcgccttgctcacttttttttactaaatgaaagtgatgatgatgatcgaatacgtggtttaaccaaagagcagattgacaatctttccaccaggcactatgagcataacagtattgatagtgaactaggtaaaatctgtagtgtttgcattagtgactatgtaactggaaacaagctcaggcaattaccttgcatgcatgaatttcacattcattgtattgaccgatggctctcagagaattgcacttgtccgatctgtcggcagcctgttttagggtctaacatagcaaacaatgggtaaggtgatgggatctactcaaatactgttttttagtagaactgaatgttcaagcattgttttgctgagttatttgtgattagctaaccaggatgaaaaataacagattatatatagtttgaactatttttcgtgtgcttttttaaacttgttaaaaagaaatttatataaaatttaaaatacaaatgttaaattatccagaaatacagaatagttaatattgctagaaccaaataacctctaaaatgtttttattttggtaattttgtcatgctaagcacttttgtatctgcacaattcagtaggttaagaatcaatcttctttttcttaatagtacagcagactttagcttcaagtttcataggcttagtacttatatctagacatttgtgtctaaataagcttttcattaactttttattttaaggacagtatcttttcatgaaagagtatttggctgaatgtttgctatatatatgttacttgaaatgttaaatttaatatgcagcataccataggtgtatatataggtatataattttaaggttaaaatattcagtctacaagtttggttcttatttaagcttttgggctaatactgcatatggcacaatgtttaatattggcaagttcatctcagagaaaggggattcagatataattttaaagtagagataatttactgaagcgtctctgacaatctaacttattagacagcaagcaatatataatactgaaaaagtattcagaaatggaaaatttacatcatataggttatttaacttgtgttcagcctttttgtaacttttttgaaagtgcaaacaattctttggattattaaataaggtatacagtatgcatggtttctcaaatttagttttaaaatctaaaagtctataaagaatcagatgcataggcaatatgttaagttcacttggaggctaaaaatctccagtgaaaacaaaacgaaaacctttaagagaatgtagagtttatataaacacaaagtatgcattgaagatctgtttctaccaataaacattaaaacaaagactgtatgtgaa

SEQ ID NO: 8189 - DNA, 9974 bp, Homo sapiens
cgctggaggctgcagtgagctacgatcgctctagcctgggcgacaggatgagaccttgtctcaaatagagatagacagacagacagacttcagaatttattagggtttgtaatttccaggttccaaagcacagcaagggaaagggcctggctgggtagtacgttacacccggaagtaaagagacgcatacaccgttgggtgcactttatagtctggctggcaaacgagcgacaccgacgcgcagagttaagtgctgggacttcccaagcctggaaagcagaccgtgtctctgcaactacgcggctgccacgagcgctgagcggccgggcatttggcctcgaggaggaggcactgtaagggcggcgcaagagggcggaacgcgggacgccaggcaccctagctcccgacggacgcagttttcagttgcacgggcgagctccgggccggctgcggagcgactccccgccgccaagtgggcggcgtggctgtcgggaaagaagggctggggcctgccgttcttcctcccgagtatcccctccagctggacgaccccacgctgcagcacgggcttccggcttctctcctcagtggccaattcgagggcacagcgggctccggaggcgcggcggcaagcctatcccgcctcccaaccacagcctccagcacccgagagaacggccgcccacagcacacgttctccggacaggagggcgaaggcccaagacctggagaggtgggctcgagggaaagatctgggtcccaccactacttcctggagacgccggggaaagcaggccatccttcgagccacccatctcttctccgattggttaactgccttcttattgcgctccgctggctggtgattggttgggatgcaccgtctatcacctgcttccttgtgagaatctaggtctctaagggaagcgttacttgaggctcggttgggaagaggttggttgggcctcttgagcccactttatttatcgtagtggggatcgtcccccggcgcgagcttccgtcgcaacggccgggaaagaaaccagtagcgggacggagggcgggggtggcaagaaagtcaaggtttagaagtaagccggagacgcctaaccctggtaacatccgaatgggaacgggataggaaggaaggcctttgagagaggaggcgtaaacccaggaacagtgacagtgtaggacgaaaggcctaagtttgttgcggaaggtaggggccttgcgggaggttttcgtgacctaattgtatggggatctaattttctagatgtgtctaacaaaatccactggagaatttgctttggctttgcagcagagtggggagactaccacccgttcctggcctttaaagaaacagtttattgaattattcaactctcttttattgcttcagatgggcagctctcaaaaaaggcacaaacaattgaaggatggataccatggcatatgttaaaagcgtgttgaaaggaaaataaggtattcgctttgttttcattgtgattaactgtataagaaaattacctttaaggagaagctcaagttttaaataatattagggtaacttgattttatgataggcttcaacttgtaaaattatttattacaaaaatcctattattgctgtacctacgaaatatgctctttgctaattatggtcttaatctgaagatagagatcttgagtttttagtagtgttaattcatatttgagtggataatgttactaggtcatttgttcaaaatgacataataaaataaccacagtgaaaaaaatccttgaatttgtaatttagtgttacaggtgaaattgaatagttgcttactccaacagtattttagacttgtaggctaatttcaccttatatttaaagcagcttgcttattaaatacctagtgtatttcgagaggcagagttgcacagttgcttcactggtagcctagccatttgagcctccagcctctactgagtcaggtgctgtattactcataccctttagtgacatgccagaaattgtcgaggaatagtttatttcatctgcagaacacccaaattagctcttaacagcagacctggtcctaccctggaaaactctaatcaaggattggggatgagatttgggcatctagatttttaaaaatacccttaagtgagtttgagaaccattgctttagtgtgacttactgaatagatgtatttaagaaattctaaaatatttgtgaaacaaacatctttctctcttgatttccatgtaatttaaaagtgagcttctcaggagtgacacttaaatataatccaaaaatagtggtttcttaggcaaagtcaggaagtttcactggcattctgaaactcctgggactaaccattccaggcttaaggatgaggcttgatatggggtgatacaaagtgctctgatgcactttcacaatccttgagccatacatgatgtcttgtttcctgttgggtttcaaagtcttcctggtaagctttaataagagaccaccttccagtttgttcagtagatattaattaggctaaatgattttcacctcatcaaagtgcagtgggggataatattacattcatgagccttattttggaaagaataccttgctgaaaacaaatgtaaattatatcatcccagtatccctttgctcattaagtgaagaatgtgcataattcaagcctaaaatttgtaattaatgtgaagtacccagatcctgaaacataaatgaggacttctggatcaacttttccagatcgtcaacatggtcaaaaatgagataatcactatggtattcaggcatgagcattgtgtggtaaacccaaatccagtctgacttaatggctttaggcaaagaagtaagtgccaattgtgttgtatttcctagaagctgtttttcattttatatgtaagcttctcactgcaagatttggcaaatacagtatttgggtaggggacaacatttaaaaattaagaaaaactgcaagttaaaaatacaaagccaaatgtggtccatgacttaacaccttgaatgttgtttatattgtttgaacagaaagccaggaatctcaggatgaatcagtctagatcgagatcagatggtggcagtgaagaaaccttacctcaagaccataatcatcatgaaaatgagagaagatggcagcaagagcgtctccacagagaagaggcctattatcagtttattaatgaactcaatgatgaagattatcggcttatgagagaccataatcttttaggcacccctggtaagagatgggtaaaagaggaaacacccttttttcatcatttagatggaaggatttcaagataaggagaattggtattctttttccttgcttctctttatgaaaatatagtatattgtttttgtgagtttaagaactttttagtataataaagtagaaaatcactggcttctgtattttataaggtgaaaataggggacatggagcactattatacaaatgccaaactaagaaacaggttaatgtacataatggtgttaagtatttacatatatggtcctatttgtaatttttatacaaataaaatatgacttaaaacccaatttgaactcatttggggtattataatttatttattcagctgaattaatagctccccccaaagcccaatgtgttccataaagtttttacaaatgaactaatggaaatttgtatgtttatatattgtgtgtttgtatattgatgacccatataatgaagtatttgggataaaattcaagtaaatatttgaagttttctctataaatgctcccttaatttctttttaactgacaaaaatccacagttatagcttatagattcctaagtgtatcaactggcagcactttaccaactattcaaattaaatcttattttaataatttttaataaaagattaataaatgaagcacaaccgaattgatgcacatttgtaccagttgaatatttttaactgtcttcaatttacagaacatatgaaagtaataagacatttgtcttctataggttactaaagattagtcttacccttcatgaggtctcataaaacttaattcagaattcttaaatgagcagtttttcattgttttaggagaaataacatcagaagaactgcaacagcggttagatggcgtcaaggaacaactagcatctcagcctgacttgagagatggaacgaattacagaggtactatggagtcctttccataaggaacaggcttgattggagcacttgcagaaatgaaattcttagaccttgtatagtatgtttgtcttcaattttttccagttttaatgtgatactcattcagataatatatatatgagtagtaaagcagtatggttaagcagtataggacagaggaatgaatgcaaagatgtcttaaacacacagattgccttcagagagctttatgtaataatatacaattaagttaattcccagcatgcttctttttaatcttggaatgtacacattactttttctaaagtgatattacttagcttctaaaaatttatatacagaaccgtgtagaaagactgagttaggaaacctgtttttgtttctttgttctgtttgatggtttacatataaaaagttcttataaggaaagtactataaaagaacttcaaactaaatgaagtatgtagagttaaaaggaaaagccacttttgtgttcctcttaaccagttctacttccctcctcagaggtatttattagtagtttcacatattatatcaaaatcattgtattagttaccatgaagtctatgtaaaaaccccaaaatgcaatggctcaataagctagaagtttcttacttacgttaacagtccagggaaggaaatcctcttggaacccactcagctaacagaatgattctacaactgtgctgttcagtacagtagctgctagccacatgtgactatttaaatggaaattaattaaaatcaaattaaatttaaaatttagctcattcatactagccacattcaggtgcttaatagtcacatttggctagtggcttctgtattggacagcacaaatacagaacatactcattacttcagaaagatttatggggcatcactgctccagggtaccatttgtatgatcaaggtaagtcgcaaccatatctaggttctagctggtaggaaggaggtccacgcactagcgtgagagtaggatgtatcgcttactctcccattccattcatgagaacttagtctcatggtcacacctaactgccaggctgtccacgagccaatttccgatgcttttacaatggaagaagagtagggtagctttgagtaggtacttggcaaactctttcacatgcaccatcatcactacacttaatcaaatgttaatcaaagaaggaagtagcatttaaaataattcatgttcacctgccttttactcattctttttccaaacaaatgggaagtggacattaacacattttattatttgtgtttagatatgtaagttgtactatatagatgcaataattaatactgatcttttgaatatgtttcagtggaaaatgtactcatcaaatataaaatagctcatcatctctggaatatggctcagttgctgtttattttattggcatcaacagctgattaatagcttcaacttcagcatttaaaaaagtcttacgagagagattgcaggaatgaaatgaaatcagaatgatgtcatataatagctattttatttatttgtttatttattttttgagacagagtcctgttctgtcacccaggctgtagtacagtggcacaatcttggctcactgcaacctctgcctcccgggttcaagcaattctcctgcctcagcctcctgagtagctgggattacaggcgcacgccaccatgcctggctaatttctttgtatttttaggagagacaggtttttaccatgtcagtcaggctggtctcgaactcctgacttcatgatctgcctgccttggcctcccaaagtgctgggattacaggtgtgagccaccgcgcccggcctataatagctatttttgagtagaacaaactttaaagttgaagtttgtgtagttaatgtgttgatgctttttattaagttttgtactttatataatatctactggttataaatggaaaatttaagcttggcacagtggcagtatcttagtcaaaaaagtttatgggtgacacatttctaaattgattaattgagcaatattaattgaaagtctgatttatactagatactgctgtagaggctggagatgtaacagtgactaaaactacaaaaatctttgttttcctggagcttacgttctaaatgaatagaaaatgtattttattatgtataacagctaacatttatggggtggctttttatgtgccagatattatgctaattatgttatatatagcgtcttattttatcctcaggataaccctatgagattgattctattattaactccagtttatagacaaggatcagccatagagaccttaagtaacttgcctggtttctcagcttcacacaaagacaaatacagtaatgtggttttaatgttatattcagaaactcacatttcttgatgtgtacatttttggcagcacctgagaaataggaaaaatttctaagattacagaaatacctagttgcaaaaatgactgagttggcttttccagaaagattccacaaatacaggacaaattttacataaagtttgtctttgtattttattgatattactatattgataaagcaatttaaatgtaaacttttggtagtggacatgtttctcatttgccttagtattttgctagtaatgggcagatagaaagtaagaatgaggatttctccatagcgttgcataaatagtatttaaagctttgtaactatgtaaatagtaatttaatttttataatatgcttatagtagatatacttttcttttagaaagttgtctttttgccatctttcattcattaaaatccacagatgttctttaatttattacaaactttgtttttcttacaagttttcaataaagctgtaaggtgtgtcttaggaattgatcttaagttgatttgctttgctttctagactcagaagtccctagagaaagttcacatgaagattctcttctagaatggttgaacacctttcggcgcacaggaaatgcaactcgaagtggacaaaatgggaaccaaacttggagagctgtgagtcgaacaaacccgaacaatggagagtttcggtttagtttggaaatccacgtaaatcatgaaaatagaggatttgaaattcatggagaagattatacagacattccactttcagatagtaacagagatcatactgcaaataggcaacaaaggtcaactagtcctgtggctaggcgaacaagaagccaaacctcagtgaatttcaatggtagtagttccaacattccaaggactaggcttgcttcaagggggcaaaatccagctgaaggatctttctcaacattgggaaggttaagaaatggaattgggggagcagctggcattcctcgagctaacgcttcacgcactaatttcagtagtcacacaaaccaatcaggtggtagtgaactcaggcaaagggaggggcaacggtttggagcagcacatgtttgggaaaatggggctagaagtaatgttacagtgaggaatacaaaccaaagattagagccaataagattacgatctacttccaatagtcgaagccgttcaccaattcagagacagagtggcactgtttatcataattcccaaagggaaagtagaccagtacagcaaaccactagaagatctgttaggaggagaggtagaactcgagtctttttagagcaagatagagaacgagaacgcagaggtactgcatataccccattctctaattcaaggcttgtgtcaagaataacagtagaagaaggagaagaatccagcagatcctcaactgctgtacgacgacatccaacaatcacactggaccttcaagtgagaaggatccgtcctggagaaaatagagatcgggatagtattgcaaatagaactcgatccagagtagggctagcagaaaatacagtcactattgaaagcaatagtgggggctttcgccgaaccatttctcgtttagagcggtcaggtattcgaacctatgttagtaccataacagttcctcttcgtaggatttctgagaatgagcttgttgagccatcatcagtggctcttcggtcaattttaaggcagatcatgactgggtttggagaactgagttctctaatggaggccgattctgagtcagaacttcaaagaaatggccagcatttaccagacatgcactcagaactgagtaacttaggtacagataacaacaggagccagcacagggaaggttcctctcaagacaggcaggcccaaggagacagcactgaaatgcatggtgaaaacgagaccacccagcctcatactcgaaacagtgacagtaggggtggcaggcagttgcgaaatccaaacaatttagttgaaactggaacactacccattcttcgccttgctcacttttttttactaaatgaaagtgatgatgatgatcgaatacgtggtttaaccaaagagcagattgacaatctttccaccaggcactatgagcataacagtattgatagtgaactaggtaaaatctgtagtgtttgtattagtgactatgtaactggaaacaagctcaggcaattaccttgcatgcatgaatttcacattcattgtattgaccgatggctctcagagaattgcacttgtccgatctgtcggcagcctgttttagggtctaacatagcaaacaatgggtaaggtgatgggatctactcaaatactgttttttagtagaactgaatgttcaagcattgttttgctgagttatttgtgattagctaaccaggatgaaaaataacagattatatatagtttgaactatttttcgtgtgcttttttaaacttgttaaaaagaaatttatataaaatttaaaatacaaatgttaaattatccagaaatacagaatagttaatattgctagaaccaaataacctctaaaatgtttttattttggtaattttgtcatgctaagcacttttgtatctgcacaattcagtaggttaagaatcaatcttctttttcttaatagtacagcagactttagcttcaagtttcataggcttagtacttatatctagacatttgtgtctaaataagcttttcattaactttttattttaaggacagtatcttttcatgaaagagtatttggctgaatgtttgctatatatatgttacttgaaatgttaaatttaatatgcagcataccataggtgtatatataggtatataattttaaggttaaaatattcagtctacaagtttggttcttatttaagcttttgggctaatactgcatatggcacaatgtttaatattggcaagttcatctcagagaaaggggattcagatataattttaaagtagagataatttactgaagcgtctctgacaatctaacttattagacagcaagcaatatataatactgaaaaagtattcagaaatggaaaatttacatcatataggttatttaacttgtgttcagcctttttgtaacttttttgaaagtgcaaacaattctttggattattaaataaggtatacagtatgcatggtttctcaaatttagttttaaaatctaaaagtctataaagaatcagatgcataggcaatatgttaagttcacttggaggctaaaaatctccagtgaaaacaaaacgaaaacctttaagagaatgtagagtttatataaacacaaagtatgcattgaagatctgtttctaccaataaacattaaaacaaagactgtatgtgaa

SEQ ID NO: 8190 - DNA, 10292 bp, Homo sapiens
  SITE (2498): n equals a,t,g, or c
  SITE (9168): n equals a,t,g, or c
tgcagcagaaagatctcagagtaaagaagaacttaaagaaattcagatatgtgaagttgatttccatggaaacctcgtcatcctctgatgacagttgtgacagctttgcttctgataattttgcaaacacggtaagtgctgcctgagaataaacagaattgagtctgcagtgctcaaaatgccccagatgctttgtgcgtgattaaaactgcttgctttttgcctacatttctatacagccgttatgaaaatacagtatgcactataatttcatttcactttttgctgtggttctaggtagtaattgttggaggtagattagctacttattctatccttttgaaatgtcgcctaacctaacatgcatgatgatttgccataacaactcagaaatcatttgtaaacctctgaaccatttttctttgtaacaaaagctgttctcttgtagtgcacttgtaaatgtgatttgctctctgcacggtttatggaaaattggttcttgaaaaagaaaaaaaatgcacaaccgcatttatttatttattttacagaaacctaaattcaggtcagatatcagtgaagaactggcaaatgttttttatgaggactctgataatgaatctttctgcggcttttcagaaagtgaggtgcaagatgtattagaccattgtggatttttacagaaaccaaggccagatgtcactaacgaactggccggtatttttcatgccgactctgacgatgaatcattttgcggtttctcagagagtgagatacaagatggaatggtgagttcgagaatttcaccagtttcaagaagtaagatacatttagaggcatgacatatttttagaaatttttttcttgtgattttgattttagtcatgccagcagactttgttgaccttttaaaaatttttagtgttttcttcatgtcttaaagcagtgtttactaatgtagtcggacttacaaatcatgaacattttgtaggctctgaaaatttggaaactggtaagataaaattggccaatctccagattttcgtttccacaaaaatccagcctaatcaggaagcacactagttctaaatattatctacatttgcatttaagttcaagtgcccagcctagtgcctgtcatagagcagacctttgataaatgttggtctcatagtagatctgtggctgcatcttgaaaacctgtgataacttacgtgcaggagctccattgcagataatgacattgagggcccttcctgctgctacttttgctccttggttggcttttcctatgcacgctaccttcctttaactgccgctgccactgttgtgctgtgcctcggtcccactcttctgagcatactgcttaattctgcacacattttcctgttccaaagactttcttgacaaaggaagcagtgcattcactgataatcaagtgcatgctcttcaactcactggtctgacatggatccactgcctgaggttcatggtttgagtaacattgatagaagtggcagtgcctggccaaggagtgttttggtccaaatcagtgcatactggagtttgttgcagggggtccagtctgcagatctggatgcgacacaaacattgtcaatagcctgaataatttctgggcagtgtttcagttctttgaagatactgtcatgattaataaaatgccaattcattataattgttaggaactcatgaaaggtttttgttgttttgtactctctcaatccatggacactaaaagtacaaaaagctgtttgtgggcatgtaagacttttgagacagggtcttgcactgtcaaccaggctggagtgcactggtgtgatcatggctcactgcagcctccacctcctgggcttaagcgattctccctcagcctacccagtagctgagactacaggcgtgtaccaccatgcctgggaacttttaaaaattttttatagagatgtgggctcactttgttgctcaggctggtctcgaactcctaggcccaagcaatcctcccgtctcggcctccaaaagtgctgggattacagccaagagccaccttgctggccttgataaatattttaatgttaaaactgagtctttatgggtgaaattctgggatttatgggtgatttttttcttctctctctctttttttttaacctgcaaccattaccatagtcaattttggaataactttatgaccccaaaaaatgactctgtacccattaacagtcactccctattctttcccaacacccccagctcctggcaaccatcagtctgctttctgtcgtcatagattagcccgttgtggatatttcataaaaattgaatcatgatatgtggtcttttgtgactggcttctttcacttaggataatgatgtcaaggtttatttatgttgtggcatgtgttagttcttcattttattgcagaatattctgttgtgtgaatcagccacatttgatttacccattcatcagttgatggataagntgggttgtttgcacttttttggctattatgaataatgctactgtgaacattcatgtacaagtttttgtgtagtttttgtgtatactcttaggtatatacataggaatagaattgtgggtcatgtagtaactgtttaaccttttgagaaatagacaaagtggctacaccagtttacattcctaccagcagtgtgtgagggttacagtttctccaaatttttgctaatacttttttttattttccttttgctttttttttttttttttgagacagagtctcactctgtcacccaggctggcgtacagtggcataattttggctcaccacaacctccgcctcctgggttcaagcgattcttgtgtctcagcatctgagtagctgggactacaggcatgtgccaccacacctggctaattttttatatttttagtagagacggggttttgccatcttggccagactggtctcgaactcctgacctcaggtgatctgcccatctcagcctcccaaagagctgggattacagatgtgagccaccatacccagccttcttttgctttttagctctactatgaagtggtgtctcactatgttttgtgtttttttttatttttatttttcggagacggagtcttgctctgtagcccaggctggagtgcagtggtgtggtctcagtgatctctgctcactgcaacctccgcttcctgggttcaagcgattctcttgcctcagcctcccaagtagctgggattacaggcgtgtgccactgtgcctggctaatttttgtatttttagtagaaacgggatttcaccatgttggccagactggtgtcaaactcctgacgtcaggtgatccgcctgccccggccttccaaagtgctgggattataggcatgagctaccgcacccagccttgcattgtgattttgatttacattaccctatggctaatttggataaatttttaatgatgaaaacctatattacttttggaatctggaaatattttcattttgaacttctaaaagtagattagagaagtacctagagaagtcaaatgtatagacagaaaataggatgatggttgccaggggcggagggaaagagggaatgaggaattactgtttaatgggtatggatggagttttagttggagaagatgaaaacattctggagatggatggtggtgatggctgcacaacaatgtgcatgtatttaatgccattgacttgtatacttagaaatggttaaaatgataaatcttatgtatattatattatatattttttaaagtagagaattgagatctgttaatataatttaatattgccataaacattgaagccatatttataggggaacacatttttttccctttttttttttttcaagacagggtctggctctgtaacccagccctggcatacagtggcacgaacacggctcactgagcctctgccccctgggctcaagccatccacccacctcagccttccaagtagctgggaccacaggcatgcgccaccatgcccagctaatttttgtatttttttttgcagagacggggtttcaccatgttgcccaggctggtctcgaactcctaggctcaagtgattcacccgcctcagcctcccaaagtgctgggattacagatgtgagccactgcacccagccaggagaacacatttgttcttgtcagaattcttttaaaatacataaagatctgtttctaaagaaatgaaaagcaggtggtaggaattttaacattttaaaaaaaggctcagaaccacaggcctagggactatgaaaatagcttataacagtgtggtccagatgggctacatggaattaaactgcactctgttgatgtactctttgtggttcctgattttgttacccagaggtatcaatgttcagttaaaattcatttcatacaagtgtctcattgaaaagggactttgtagttatactgatgcagcttgtctgctgatcaagtcctaatgactcaattgttgtgattagaggctgcagtcagttcgggaaggctgtaggacccgcagccagtgcaggcactctggacctctcagggtggcgatgaagtttccagcgcggagtaccaggggagcaaccaacaaaaaagcagagtcccgccagccctcagagaattctgtgactgattccaactccgattcagaagatgaaagtggaatgaattttttggagaaaagggctttaaatataaagcaaaacaaagcaatggtaggtatctgactttgtgttagaattaatttttcctctctaagcgactcattacttaaatctgttccatcacgcaaaagttatttttttctgttacatgaataaaaagttatttttgtttacctgtgaagtcttcaatgtgtgcctcaaaatgtgtttctttccctgaactactttttttaaatctgttaaaggcctggttaagtgtataggggaaatcagaaactctgaatgtgtcagcttactatcaaatataaaaccatgagatgtacttgagtattttccagaagttagttgctcattttcgacagttattctaagccaatgatatcagtttaatttcctccctttttagcttgcaaaactcatgtctgaattagaaagcttccctggctcgttccgtggaagacatcccctcccaggctccgactcagtaagtaccagttcttgtttatatacagtagtgttttgggcacacctaaggtcgatctgtgttgtatttaaaaatctaatttctttatttgtgtggccttctagacaaacgaaggggacctagaggaaaccccctgacagatctctggatgatcctccttgaatcctgggcagtttggtctctccttgctgtgctcctgtggcactaaactccttttgattggttctttctttccttcccagctagactaagcccctcatgggcaggtaatgaagattgaaaacttttttctgttctccagtgtgagcacattcctcctacatggtagatgtgcaatagatgtttttaaaattggagaatgaaaataaaagaagaaaatcacaatttcttatcaagttgtagcttggtatcatacacaattgcattctgaggaattaaggtggtacaacttagggagatttggtgtgtctgctgtgatagaaaagatttctttttcctggctttccctgaggaaaggaaagatggaaagagggaagccatacagatatccctctattttgcagtgtagaaactgaatgtgtttctacagggtcaagagacatcagagaaaatttttttttttagaacagaagatcatttcttacatcttcattaagtaaaagaataaatagctcatctctcaagttgaaagaaactgggcttggtattacaaaagcaaaattaagatggccatataggttttaggctcattttgccatgcattatgcaaaggacaaagaaaaagaaaaaatagagctctctttacttaaaacatccttaaggagaagctatgaattccccaaagtactacttctctttattatggaataaatggattcccttatacgtgctttgtttagcaatcaaggagaccgcgaaggcgtacattcccgggtgttgcttccaggagaaaccctgaacggagagctcgtcctcttaccaggtcaaggtcccggatcctcgggtcccttgacgctctacccatggaggaggaggaggaagaggataagtacatgttggtgagaaagaggaagaccgtggatggctacatgaatgtgagttctccgcattggtacttgctcttctgattctcatcttcggtaggcctggcatcatacacagcacaggtacacgcacatccttaacaccaggcgatccatagtaaatgttttcctctaaccattcagaactgtaaacgtcacataagcttacttggtaattttattagcaggcgagaattgggttttcttcatctcttcttaattgtaggcatcgtttccaaaatgtccagttaggctacagtaagcgtatggcctgttcccctaccataagctctaggagagatttccaggttgaagtttgtgtgaagaaattacaagtcaagtatctgagattcaaagctggggagagccagttttgaatctctgtgtttcatatttgaatctgttttttcagttttgaatctctttcagtttttcagttttgaagttctgtgttttgtattccttgtaatgcaggaagatgacctgcccagaagccgtcgctccagatcatccgtgacccttccgcatataattcgcccagtggaagaaattacagaggaggagttggagaacgtctgcagcaattctcgagagaagatatataaccgttcactggtgagagcctctaaattacacctgagaatgtaaacatctgtgagaggaagagagcttctgtccctaagcgttgcccaggttctaaagggcctagcatgtgaaatctgtacctatatgtttttttcacacaaggaaggaaaagttttacagtatccctgggatttagccctctttcacagtggaattatctgcttagtaagtctgtagtcatggtaaatcttttctcctaatttagaaatcaattcattcaacatatatttactgcatatctattatgtgtgtatacatagctaggtgctggagtgtggtggtacaccaaagataaaagtggatttgggtaggttattttttaataagaccttttcttaaagggaaagcggttttaccacaccaggctaatttttatatttttagtggagatggggttttgccatattgcccaggctggtcttgaactccttggctcaagcgatccactctcctcagtctcccggaatgctggggttacaggtgtgagccactgcacctggttgagttatttttcataccctggcatatacatgtgtatgtagagattcatagacaaaatgtaagcctatactacgaagagggacattctgtaaatatgccatttcctctgttgaaaaacagtggttttttttgttttttttcttaatggcttatttgtagggctctacttgtcatcaatgccgtcagaagactattgataccaaaacaaactgcagaaacccagactgctggggcgttcgaggccagttctgtggcccctgccttcgaaaccgttatggtgaagaggtcagggatgctctgctggatccggtaggtgcctgccaggggttggtcctgtgggcttgaaggtcagccacaaactgtgatgaggccagaaaaaggcattggtgaaggggtggagccctttctgttatggggtgctcttctttttttttaagatggagtctcattctgtcgccaggctgcagtgcagtggcgcgatctcagctcactgcaacctcctcctcctgggttcaagcgattctcctgcctcagcctcccaagtagctgggactacaggcacgcgccaccacacctagctaatttttgtatttttagtagagacggggtttcaccacattggccaggatggtgtggtggtacaagatctcttgacctcgtgatccacccgcctcggcctcctgaagtgctgggattacaggtgtgagccaccacgcccggcccagggtgctcttaattcagaacacaaatgaattcagagggatggtgctgcataggcatgagccgcttctacgatactcgggtctgaactgtccctgggaagttgctgctccatttatccctggtagctgcttgtaacttccactcctggaaggaagcattaggcattaggaaacattaggcatgactaatgcctattaatcatataaatttttaaccataaagaaggggttaaatgtaatgtagataagttggtgggggaggtaaggtttaacttaattgtgccgtttgacaatcctccttcagaactggcattgcccgccttgtcgaggaatctgcaactgcagtttctgccggcagcgagatggacggtgtgcgactggggtccttgtgtatttagccaaatatcatggctttgggaatgtgcatgcctacttgaaaaggtagtgggtgtttttttttcccttccacatctgaattttatattcatttatgtcttaatgagaagatgatagatgtcagaagagtggttatctctggcggggtggagactgactggaacggggcacactggaagggatgggaacattttctgtcttcacttaggtggtggtaacccgggtgggtgggtgtgtatgaaaaagtcaggtaatatacttgaagatgcgcacacttgaccatagtgatgttataactcaataaaaatggttttaaaaatgaattaggctttcaaaagagaattctttggttgaaaactatgtcctgacacatttccttttgtttttcacagcctgaaacaggaatttgaaatgcaagcataatatctggaaaatttgctgcctgccttctacttctcaaatctttcttgtaaaagtttccaattttttcactgaaacctgagttaaaaatcttgatgatcagcctgtttcataagaaactccaatcaagttaatcttagcagacatgtgtttctggagcatcacagaaggtatattgctagttacactttgccctcctgcagttttttctntgctcccaacccccatctcacagcatccccctctatttccaatgctcctctccaaccgcttagtttctgaatttcttttaaattacagttttatgaaagcatattttatttacttggtgttgaaatagccctcataaaacctaagcacttggaaacacaataatagtattaactaactagatctattgaatttcagagaagagccttctaacttgtttacacaaaaacgagtatgatttagcattcatactagttgaaatttttaatagaatcaaggcacaaaagtcttaaaaccatgtggaaaaattaggtaattattgcagattgatgtctctcaatcccatgtattgcgcttatgttacaagttgttgtcacagttgagacttaatttctcctaatttcttctgcccgaagggtaagtggtgcgtccagcttacacaatcataattcaaaggttggtgggcaatgtaatacttaattaaaataatgatggaagagctatctggagattatgagtaagctgatttgaattttcagtataaaactttagtataattgtagtttgcaaagtttatttcagttcacatgtaaggtattgcaaataaattcttggacaattttgtatggaaacttgatattaaaaactagtctgtggttctttgcagtttcttgtaaatttataaaccaggcacaaggttcaagtttagattttaagcacttttataacaatgataagtgcctttttggagatgtaacttttagcagtttgttaacctgacatctctgccagtctagtttctgggcaggtttcctgtgtcagtattccccctcctctttgcattaatcaaggtatttggtagaggtggaatctaagtgtttgtatgtccaatttacttgcatatgtaaaccattgctgtgccattcaatgtttgatgcataattggaccttgaatcgataagtgtaaatacagcttttgatctgtaatgcttttatacaaaagtttattttaataataaaatgtttgttctaacttgtctgcttttttaaaaataatcttactgtacttaattctaattttttcctcatatttaaataaaaggccatttccaccttttctaaaaaa

SEQ ID NO: 8191 - DNA, 14150 bp, Homo sapiens
tcggcgcgcccagcctgccagccgcgctgctgctgctcctcctgctgtgggaccgctgaccgcgcggctgctccgctctccccgctccaagcgccgatctgggcacccgccaccagcatggacgctcgccgcgtgccggtgagggctgggcgggcgaacccgaggggcgggcgcggtgggtgctggacgcaggcgggcgcgggccgaccctctccaactccgcagcctagcgctgccttaactggtggcctgcctaggcgttgcccgcttgggcaagcccctgattttgtgcacctgggataactgagggccatggggacgttcctgcgtggcgtgcgcacccgaagtgcgggcggcgtggagacttgagtcgtttgcaggatggctagcagcgctggaaagccctaggcacgtgcgtccgccaaaggccggacagcggccgggagcgctggccggtcccgattttgcctgccaggcagagccagcctgcctgccccctgggaggttgtcccgcagcggcccagccctttcccgcacacaactcggagccagtgcgtggctcgccgcgtctatacccgcgctcagtgggtggcccttgggcgcgcaccccgcccggcaagagacgcgtccgcttctaaccgctgagggccagcgcgtctgaggtttaaggtcttgcgaaccggtctcctagaacttgggctgcgcacgcagtgtgaagcgaccgtagtcccgggcggtggttaagtgcatttaaagggcttggtgggtcaaagcgttcgccgaccatttgctcgtttcctacttcctccaccccaacccccaaccccccaccccccaccccccagccttactcttagctgcaggacgttgctctgagtggaacgttactttttgctctaacggaagccagaacgtagggtcgggctcctggagagggtagaagagtgggggttgggtgaaacggaagacaatgacatgtttaaaataaatatcaggggttagggaccctcgcgggggtgggtgcgatggggcgtggtttcagagctgagtcgccgccccggtggagctgggcattggctttccggatgaagaaaaccatgtgtagctggtcttggaacctgacatgcctgagttcaaatctgagccaccatgggacttgagtaatccatttcgctttcctgagcctcagtttcctcattggctaagtgagaataacgatagcacctttgttgcaaagaattaaacctgacgtgaaagtgtacttaacatagtgcctggcacgaaaaacgcctactataaatggtattagttattacttacctgccaaagaagttcatctccgtcttgactatttgccttgctgcttttttgtggcttttcctccaaagatacgtttgcctggtaaataactcttggcttgtgctgacttgttaaagctcagcctgtatttctcggacagcttccaatagaatgccgcctttgaggctgtctggggcctctgactgcttgcaggtagattgatgagtaaagggtggtaattcctgcagtaatgcgatgaacactgctgcttaagaagatggcagacttgagttctccttcctgcccctgtgatcttgcagtctattacaccttcctggggccttgaatatcctcatctggaaaatgggatctgagatccttttcagctcccaacattcattgtgtcccaggctggagtgcagtggcacagtcacggctcactgcagcctaccgggctcaagcagtcttcccacctcagcctcccaagtaactgggattacatgtacgcaccgccacatccggctgatttttgtgtttttagtagagacggggtttcaccatattccccacgctggtctcgaactcgtgggctcaagtgatcctcccaccttggcttcccaaagcgctgagattacaggtgtgagccacccccctacacatacacctaacctttatatttagtagctctaccttttacacgttgtcctgccttgttaagagggcaaaagacaaaaacttcctaagatgattgaacggagtttacttaggggtatagggatgttgggagtgccatcatcatgaaaataactttatctgcaagagactgaaatgcgtaatgttaggccaagaaggagggcaagaatgttctggtcacctgacatcttacatcttagcatattttgtagaatctataccagagcttgccctttcaaagttttcagtgtaaggaatcacttctgctattccatggccccatttaaggaataaaaacacaggacctaatgcaacacttaggaaatctcgttaaatattaagaaatgacaaaccactatcctttttttatacaagatagatgccaattacattttctgagagcagtgccaggctgttcagtatttatgaatgaatgaagcatttctatgtaagtaatttgcactttataaaaggacttttaaaaacttaagtcttgtatagcaaagggacagcaacaagaactgaatgacagcctcaagtaatagagtgctaaaatggaatccggtatcccacctgcatttggagtgctatttgatctttaacttggctccttgtaccatttgttgaagcgtttgatgtatttgctttgtaaggacttctgtggaaatcacgatagccctcttgattggaaaggggcctgcttggaagcctgccatcttgaagtagaggtcctgcccagtttttgtagtttgtgaaattagcatcacagtacatagcccaaagcttacataaaaatacctcattagcttgattttggctgagggagaaaatctttctccccttttgtacttttgaaatttccttttagaagtacagtttaatttttttaaaaaaacaggttggattttaggagtttagcattaaaatctcctgtggggctcagtataatgctaagagctaaagattaggggctcataaaggtgggttgagaggtagctctacagatgtttgaataaattgataaatgtctttacaattttcctgcaaagggatcccttcttagaatttgacctggttttggccgggcgcggtggctcacgcctgtaatcccagcactttgggaggccgaggcaggcagatcacgaggtcaggagattgagaccattctggctaacacggtgaaaccccgtctctactaaaaatacaaaaaattaaccgggcgtggtggcgggcgcctgtaatcccagctactctggaggctgaggcaggagaatggcgtgaatccatgaggcggagcttgcagtgagccgagatcgcgccactgcactccagcctgggcgacacagcgagactccgtctcaaaaaaaaaaaaaaaaagaatttgacctggttttaaagatttttgggtccagatacagtagctaatgcctgtaatccaagccctttgggaggctccggtgggaggatcacttgagcccaggagtttgagaccaacctgggcaacatagcaagaccccatctctaaaaagaaataaaataagttagctgggcatggtggcacatgcatgtagtcctgtctactcaggaggctgaggcaggaggcttgcttgagctcaggagttccaggttgtagtaagctatgatctcagcactgcactttagcctggaagacagagcgagatcctgcttcttacaaaaaaaagaaagaaaaaattttttgtagcagttaacaaacttccttttctatgtagggtatgataaatggacatatctactctgtgctgtttgaacctactaaactaaaaaaaaatgatgtctttagttaaataaagtaagcatcacgcttaataggattgctatttccatttgcagcagaaagatctcagagtaaagaagaacttaaagaaattcagatatgtgaagttgatttccatggaaacctcgtcatcctctgatgacagttgtgacagctttgcttctgataattttgcaaacacggtaagtgctgcctgagaataaacagaattgagtctgcagtgctcaaaatgccccagatgctttgtgcgtgattaaaactgcttgctttttgcctacatttctatacagccgttatgaaaatacagtatgcactataatttcatttcactttttgctgtggttctaggtagtaattgttggaggtagattagctacttattctatccttttgaaatgtcgcctaacctaacatgcatgatgatttgccataacaactcagaaatcatttgtaaacctctgaaccatttttctttgtaacaaaagctgttctcttgtagtgcacttgtaaatgtgatttgctctctgcacggtttatggaaaattggttcttgaaaaagaaaaaaaatgcacaaccgcatttatttatttattttacagaaacctaaattcaggtcagatatcagtgaagaactggcaaatgttttttatgaggactctgataatgaatctttctgcggcttttcagaaagtgaggtgcaagatgtattagaccattgtggatttttacagaaaccaaggccagatgtcactaacgaactggccggtatttttcatgccgactctgacgatgaatcattttgcggtttctcagagagtgagatacaagatggaatggtgagttcgagaatttcaccagtttcaagaagtaagatacatttagaggcatgacatatttttagaaatttttttcttgtgattttgattttagtcatgccagcagactttgttgaccttttaaaaatttttagtgttttcttcatgtcttaaagcagtgtttactaatgtagtcggacttacaaatcatgaacattttgtaggctctgaaaatttggaaactggtaagataaaattggccaatctccagattttcgtttccacaaaaatccagcctaatcaggaagcacactagttctaaatattatctacatttgcatttaagttcaagtgcccagcctagtgcctgtcatagagcagacctttgataaatgttggtctcatagtagatctgtggctgcatcttgaaaacctgtgataacttacgtgcaggagctccattgcagataatgacattgagggcccttcctgctgctacttttgctccttggttggcttttcctatgcacgctaccttcctttaactgccgctgccactgttgtgctgtgcctcggtcccactcttctgagcatactgcttaattctgcacacattttcctgttccaaagactttcttgacaaaggaagcagtgcattcactgataatcaagtgcatgctcttcaactcactggtctgacatggatccactgcctgaggttcatggtttgagtaacattgatagaagtggcagtgcctggccaaggagtgttttggtccaaatcagtgcatactggagtttgttgcagggggtccagtctgcagatctggatgcgacacaaacattgtcaatagcctgaataatttctgggcagtgtttcagttctttgaagatactgtcatgattaataaaatgccaattcattataattgttaggaactcatgaaaggtttttgttgttttgtactctctcaatccatggacactaaaagtacaaaaagctgtttgtgggcatgtaagacttttgagacagggtcttgcactgtcaaccaggctggagtgcactggtgtgatcatggctcactgcagcctccacctcctgggcttaagcgattctccctcagcctacccagtagctgagactacaggcgtgtaccaccatgcctgggaacttttaaaaattttttatagagatgtgggctcactttgttgctcaggctggtctcgaactcctaggcccaagcaatcctcccgtctcggcctccaaaagtgctgggattacagccaagagccaccttgctggccttgataaatattttaatgttaaaactgagtctttatgggtgaaattctgggatttatgggtgatttttttcttctctctctctttttttttaacctgcaaccattaccatagtcaattttggaataactttatgaccccaaaaaatgactctgtacccattaacagtcactccctattctttcccaacacccccagctcctggcaaccatcagtctgctttctgtcgtcatagattagcccgttgtggatatttcataaaaattgaatcatgatatgtggtcttttgtgactggcttctttcacttaggataatgatgtcaaggtttatttatgttgtggcatgtgttagttcttcattttattgcagaatattctgttgtgtgaatcagccacatttgatttacccattcatcagttgatggataagtgggttgtttgcacttttttggctattatgaataatgctactgtgaacattcatgtacaagtttttgtgtagtttttgtgtatactcttaggtatatacataggaatagaattgtgggtcatgtagtaactgtttaaccttttgagaaatagacaaagtggctacaccagtttacattcctaccagcagtgtgtgagggttacagtttctccaaatttttgctaatacttttttttattttccttttgctttttttttttttttttgagacagagtctcactctgtcacccaggctggcgtacagtggcataattttggctcaccacaacctccgcctcctgggttcaagcgattcttgtgtctcagcatctgagtagctgggactacaggcatgtgccaccacacctggctaattttttatatttttagtagagacggggttttgccatcttggccagactggtctcgaactcctgacctcaggtgatctgcccatctcagcctcccaaagagctgggattacagatgtgagccaccatacccagccttcttttgctttttagctctactatgaagtggtgtctcactatgttttgtgtttttttttatttttatttttcggagacggagtcttgctctgtagcccaggctggagtgcagtggtgtggtctcagtgatctctgctcactgcaacctccgcttcctgggttcaagcgattctcttgcctcagcctcccaagtagctgggattacaggcgtgtgccactgtgcctggctaatttttgtatttttagtagaaacgggatttcaccatgttggccagactggtgtcaaactcctgacgtcaggtgatccgcctgccccggccttccaaagtgctgggattataggcatgagctaccgcacccagccttgcattgtgattttgatttacattaccctatggctaatttggataaatttttaatgatgaaaacctatattacttttggaatctggaaatattttcattttgaacttctaaaagtagattagagaagtacctagagaagtcaaatgtatagacagaaaataggatgatggttgccaggggcggagggaaagagggaatgaggaattactgtttaatgggtatggatggagttttagttggagaagatgaaaacattctggagatggatggtggtgatggctgcacaacaatgtgcatgtatttaatgccattgacttgtatacttagaaatggttaaaatgataaatcttatgtatattatattatatattttttaaagtagagaattgagatctgttaatataatttaatattgccataaacattgaagccatatttataggggaacacatttttttccctttttttttttttcaagacagggtctggctctgtaacccagccctggcatacagtggcacgaacacggctcactgagcctctgccccctgggctcaagccatccacccacctcagccttccaagtagctgggaccacaggcatgcgccaccatgcccagctaatttttgtatttttttttgcagagacggggtttcaccatgttgcccaggctggtctcgaactcctaggctcaagtgattcacccgcctcagcctcccaaagtgctgggattacagatgtgagccactgcacccagccaggagaacacatttgttcttgtcagaattcttttaaaatacataaagatctgtttctaaagaaatgaaaagcaggtggtaggaattttaacattttaaaaaaaggctcagaaccacaggcctagggactatgaaaatagcttataacagtgtggtccagatgggctacatggaattaaactgcactctgttgatgtactctttgtggttcctgattttgttacccagaggtatcaatgttcagttaaaattcatttcatacaagtgtctcattgaaaagggactttgtagttatactgatgcagcttgtctgctgatcaagtcctaatgactcaattgttgtgattagaggctgcagtcagttcgggaaggctgtaggacccgcagccagtgcaggcactctggacctctcagggtggcgatgaagtttccagcgcggagtaccaggggagcaaccaacaaaaaagcagagtcccgccagccctcagagaattctgtgactgattccaactccgattcagaagatgaaagtggaatgaattttttggagaaaagggctttaaatataaagcaaaacaaagcaatggtaggtatctgactttgtgttagaattaatttttcctctctaagcgactcattacttaaatctgttccatcacgcaaaagttatttttttctgttacatgaataaaaagttatttttgtttacctgtgaagtcttcaatgtgtgcctcaaaatgtgtttctttccctgaactactttttttaaatctgttaaaggcctggttaagtgtataggggaaatcagaaactctgaatgtgtcagcttactatcaaatataaaaccatgagatgtacttgagtattttccagaagttagttgctcattttcgacagttattctaagccaatgatatcagtttaatttcctccctttttagcttgcaaaactcatgtctgaattagaaagcttccctggctcgttccgtggaagacatcccctcccaggctccgactcagtaagtaccagttcttgtttatatacagtagtgttttgggcacacctaaggtcgatctgtgttgtatttaaaaatctaatttctttatttgtgtggccttctagacaaacgaaggggacctagaggaaaccccctgacagatctctggatgatcctccttgaatcctgggcagtttggtctctccttgctgtgctcctgtggcactaaactccttttgattggttctttctttccttcccagctagactaagcccctcatgggcaggtaatgaagattgaaaacttttttctgttctccagtgtgagcacattcctcctacatggtagatgtgcaatagatgtttttaaaattggagaatgaaaataaaagaagaaaatcacaatttcttatcaagttgtagcttggtatcatacacaattgcattctgaggaattaaggtggtacaacttagggagatttggtgtgtctgctgtgatagaaaagatttctttttcctggctttccctgaggaaaggaaagatggaaagagggaagccatacagatatccctctattttgcagtgtagaaactgaatgtgtttctacagggtcaagagacatcagagaaaatttttttttttagaacagaagatcatttcttacatcttcattaagtaaaagaataaatagctcatctctcaagttgaaagaaactgggcttggtattacaaaagcaaaattaagatggccatataggttttaggctcattttgccatgcattatgcaaaggacaaagaaaaagaaaaaatagagctctctttacttaaaacatccttaaggagaagctatgaattccccaaagtactacttctctttattatggaataaatggattcccttatacgtgctttgtttagcaatcaaggagaccgcgaaggcgtacattcccgggtgttgcttccaggagaaaccctgaacggagagctcgtcctcttaccaggtcaaggtcccggatcctcgggtcccttgacgctctacccatggaggaggaggaggaagaggataagtacatgttggtgagaaagaggaagaccgtggatggctacatgaatgtgagttctccgcattggtacttgctcttctgattctcatcttcggtaggcctggcatcatacacagcacaggtacacgcacatccttaacaccaggcgatccatagtaaatgttttcctctaaccattcagaactgtaaacgtcacataagcttacttggtaattttattagcaggcgagaattgggttttcttcatctcttcttaattgtaggcatcgtttccaaaatgtccagttaggctacagtaagcgtatggcctgttcccctaccataagctctaggagagatttccaggttgaagtttgtgtgaagaaattacaagtcaagtatctgagattcaaagctggggagagccagttttgaatctctgtgtttcatatttgaatctgttttttcagttttgaatctctttcagtttttcagttttgaagttctgtgttttgtattccttgtaatgcaggaagatgacctgcccagaagccgtcgctccagatcatccgtgacccttccgcatataattcgcccagtggaagaaattacagaggaggagttggagaacgtctgcagcaattctcgagagaagatatataaccgttcactggtgagagcctctaaattacacctgagaatgtaaacatctgtgagaggaagagagcttctgtccctaagcgttgcccaggttctaaagggcctagcatgtgaaatctgtacctatatgtttttttcacacaaggaaggaaaagttttacagtatccctgggatttagccctctttcacagtggaattatctgcttagtaagtctgtagtcatggtaaatcttttctcctaatttagaaatcaattcattcaacatatatttactgcatatctattatgtgtgtatacatagctaggtgctggagtgtggtggtacaccaaagataaaagtggatttgggtaggttattttttaataagaccttttcttaaagggaaagcggttttaccacaccaggctaatttttatatttttagtggagatggggttttgccatattgcccaggctggtcttgaactccttggctcaagcgatccactctcctcagtctcccggaatgctggggttacaggtgtgagccactgcacctggttgagttatttttcataccctggcatatacatgtgtatgtagagattcatagacaaaatgtaagcctatactacgaagagggacattctgtaaatatgccatttcctctgttgaaaaacagtggttttttttgttttttttcttaatggcttatttgtagggctctacttgtcatcaatgccgtcagaagactattgataccaaaacaaactgcagaaacccagactgctggggcgttcgaggccagttctgtggcccctgccttcgaaaccgttatggtgaagaggtcagggatgctctgctggatccggtaggtgcctgccaggggttggtcctgtgggcttgaaggtcagccacaaactgtgatgaggccagaaaaaggcattggtgaaggggtggagccctttctgttatggggtgctcttctttttttttaagatggagtctcattctgtcgccaggctgcagtgcagtggcgcgatctcagctcactgcaacctcctcctcctgggttcaagcgattctcctgcctcagcctcccaagtagctgggactacaggcacgcgccaccacacctagctaatttttgtatttttagtagagacggggtttcaccacattggccaggatggtgtggtggtacaagatctcttgacctcgtgatccacccgcctcggcctcctgaagtgctgggattacaggtgtgagccaccacgcccggcccagggtgctcttaattcagaacacaaatgaattcagagggatggtgctgcataggcatgagccgcttctacgatactcgggtctgaactgtccctgggaagttgctgctccatttatccctggtagctgcttgtaacttccactcctggaaggaagcattaggcattaggaaacattaggcatgactaatgcctattaatcatataaatttttaaccataaagaaggggttaaatgtaatgtagataagttggtgggggaggtaaggtttaacttaattgtgccgtttgacaatcctccttcagaactggcattgcccgccttgtcgaggaatctgcaactgcagtttctgccggcagcgagatggacggtgtgcgactggggtccttgtgtatttagccaaatatcatggctttgggaatgtgcatgcctacttgaaaaggtagtgggtgtttttttttcccttccacatctgaattttatattcatttatgtcttaatgagaagatgatagatgtcagaagagtggttatctctggcggggtggagactgactggaacggggcacactggaagggatgggaacattttctgtcttcacttaggtggtggtaacccgggtgggtgggtgtgtatgaaaaagtcaggtaatatacttgaagatgcgcacacttgaccatagtgatgttataactcaataaaaatggttttaaaaatgaattaggctttcaaaagagaattctttggttgaaaactatgtcctgacacatttccttttgtttttcacagcctgaaacaggaatttgaaatgcaagcataatatctggaaaatttgctgcctgccttctacttctcaaatctttcttgtaaaagtttccaattttttcactgaaacctgagttaaaaatcttgatgatcagcctgtttcataagaaactccaatcaagttaatcttagcagacatgtgtttctggagcatcacagaaggtatattgctagttacactttgccctcctgcagtttcttctctgctcccaacccccatctcacagcatccccctctatttccaatgctcctctccaaccgcttagtttctgaatttcttttaaattacagttttatgaaagcatattttatttacttggtgttgaaatagccctcataaaacctaagcacttggaaacacaataatagtattaactaactagatctattgaatttcagagaagagccttctaacttgtttacacaaaaacgagtatgatttagcattcatactagttgaaatttttaatagaatcaaggcacaaaagtcttaaaaccatgtggaaaaattaggtaattattgcagattgatgtctctcaatcccatgtattgcgcttatgttacaagttgttgtcacagttgagacttaatttctcctaatttcttctgcccgaagggtaagtggtgcgtccagcttacacaatcataattcaaaggttggtgggcaatgtaatacttaattaaaataatgatggaagagctatctggagattatgagtaagctgatttgaattttcagtataaaactttagtataattgtagtttgcaaagtttatttcagttcacatgtaaggtattgcaaataaattcttggacaattttgtatggaaacttgatattaaaaactagtctgtggttctttgcagtttcttgtaaatttataaaccaggcacaaggttcaagtttagattttaagcacttttataacaatgataagtgcctttttggagatgtaacttttagcagtttgttaacctgacatctctgccagtctagtttctgggcaggtttcctgtgtcagtattccccctcctctttgcattaatcaaggtatttggtagaggtggaatctaagtgtttgtatgtccaatttacttgcatatgtaaaccattgctgtgccattcaatgtttgatgcataattggaccttgaatcgataagtgtaaatacagcttttgatctgtaatgcttttatacaaaagtttattttaataataaaatgtttgttctaacttgtctgcttttttaaaaataatcttactgtacttaattctaattttttcctcatatttaaataaaaggccatttccaccttttctaaaaaa

SEQ ID NO: 8192 - DNA, 303 bp, Homo sapiens
ttggccgggcgcggtggctcacgcctgtaatcccagcactttgggaggccgaggcaggcagatcacgaggtcaggagattgagaccattctggctaacacggtgaaaccccgtctctactaaaaatacaaaaaattaaccgggcgtggtggcgggcgcctgtaatcccagctactctggaggctgaggcaggagaatggcgtgaatccatgaggcggagcttgcagtgagccgagatcgcgccactgcactccagcctgggcgacacagcgagactccgtctcaaaaaaaaaaaaaaaaagaa

SEQ ID NO: 8193 - DNA, 13334 bp, Homo sapiens
atccggaagtggattgcgagccaggaggaggaagccggcggtggccccgtcagcagccggctgctgagaggccggtaggcggcggcggtcccgaggggcggcggccgcgctgctccctgagaacgggtcccgcagctgggcaggcgggcggcctgagggcgcggagccatgaagctgtacagcctcagcgtcctctacaaaggcgaggccaaggtggtgctgctcaaagccgcatacgatgtgtcttccttcagctttttccagagatccaggtgagcggcacaggctggtgggccgtggcggtcgggcggagaggactggggtgggggtccgagtcggagtgggcctggggtcggcggagggatgaggggagggtggaggaggccaagggtaggggcagggcggggtggccgagtgcccggggtctgagaaggctggtgtccgagtcagaggcggggcggggtggggagggcccggggtctgctgtccgggcttggtctcctataatggaatctggccgtggactctacctttgaggaaccaacattagctctttaagagcttataccattctagaatatagttctctactcagtgtttttcaaatttctgtcgtgtaaaaattttaaggagactgtgaagtagtgcagatttccaagcttcatgccaagatgttctgaattagtagattgaggcctcggtatttatattttagaccaacacttcccacccagtgattctgactctgggagcttgggtgccgcatcttgagagccatattttgattttcttgcggggcttcccaacaattctgtatgagagatagtgatatacttttttttgtttgtttttaatgggtgaagtcactgaggtaccaagaggttatatcacaaccagctagaactgaaagccaggtttaacgctttttagttggacactagtggtacaaaaggattccacacggaagatgcaaatgaagcatgggatctgtagggcttacaggcttttacttgtttctggggcgctttaattgctggaacgtgttagaagtaacacagacacttccagaccattcgtgggagggattggggtgactcaggcacgaaagaaggaggaccctacatggtcggtatctatggtcatcttgtctcaaaatctgatggaatctgccgtttggattctgttttccctgcttcagtgcagctggttcttgatgagagttctttgccaaggacttgctggatgtaaaaaaaaaaaaatgttattttgttgaaactttctgcttctttgagttcttttaaaaaaatatttttaattgtggtaaaatggtacacaaaatttatcttcactatctttaagcgtgtagtgagtgcattgatatgaaatagattgatagtgttgtgcagccatcactgtcaatcgtctccagaactcctttttatcaaattcgtgtctattaaacacattcccttctcccccagcccatggcaactgccattctaatttgtctctgtgattttgacttttctggcgaccttagataaatggaatcatatagtttttgtgtgtctggcttatttcatgtagcataatgtcctcaaggctcatgcatcttgttgcatatatcagaatttctttcctttttaaggctgaataatccattgtattattcaccacattttgcttatctgttcatctgtcagtggacacctgggttgcttccacatttcagccattgtgaatgatactgctatgaacatggatgtacaaatatctcttcaagaccctgctcgcatttttttggtatttacccagaagcggaattgctgcattatcttttagctccttcttggggttcttggtctttgcagtctttaccatggcctacattcactgctctgtgttgttgcttttctcagatggaacttttggtgccaacttggctctgattctttttcctttttccttcccattagtacttaagattctcagagatttcacttgtaggacttatacctcacctgcttgggatgcccacactagtttccaatgactaacagctgcaacactaaagggacatctctactaatatgtcttaaaacaacacatgtcccagctgatttatttatttatttattttattttagatggagtcttgctctgtcacccaggctggagtgcagtggcacagtgtcagctcactgcaacctccgcctcctgggttcaagtgattctcctgcctcagcctcccaagtagctgggattacaggcgcgcaccaccacacccggctaatttttgtatttttagtagagatggggttttaccatgttagccaggctggtctcgaactcctgagctcaagtgatccgcctgccttggcctcccaaagtgctaggattacaggcttgagccaccacgtccggcctgagcttgttttcttataagaccgctttacttacgtcctttgtgccctataattacccgattccaaagttgaaaaagtagtttcccagcttttttggtctttgtatacatgctgtcacaatgcagttcttcctttgtctctttatagccgtgtctcaaatgctgtctctaggtttactgcaaagccttccttgtttgaggtcttcttttctgaggggttattttgatcacttcagtccctcaagatattaacaagtaatactgtgtgtgcaggcattgttccaagtgctttacacgtattacctcgtttaactgttgcacaaatcttgatttttttaatgtggaggcacagcacacaggcccagagtcaggccttcagttacctatatggctctgctggagcctgctgcagactcccatttgagcaccctgctttgatggccctggttgccctttatatcacatcctcagttggaggctccttgtcagcacctcttcctctggctgtaccatctcctgtgactgttctgttctggatagatctctctgttgagcccatgatggaccttctccctttcaccctttgtatgagccatttcccacttctttgtcttggatgagcagttttccttttgttccatccagagtgtcttgcgctcgttctgtggacgagccccagcagacctgagccagcactcactatgggtgtatgtggcattgcgagggtctgtcatgtggacacagccataaatggttgtgcatttctgcctgacagtttttgcacactattcttctagtgcagttcttataaatgtcctgcttcttggaagttattgggaccttgagagcaggacctgcctcttgtttttccattgcattccaaattatgcattcaccaaaatgtaaaattgactgtatcctgtggaaaaaccccccagaaaattcacctgttttggtgagccaggtagcaaacagatggagctttcatggtgatgataattcataattatcagtatttgtgctcatttatagagtgtttgttactagggatgggagggaaaggaatgaaaccaagaagcaatgtctacttaatgtataagcccagaggtcactttccactgtgttggggacaaggtgataagaagtaggcaataaatacattttgtgtttcttagcgttcaggaattcatgaccttcacgagtcaactgattgtggagcgctcatcgaaaggcactagagcttctgtcaaagaacaaggtaagaagaccctccaacttctgtgcgtgtgctggcctggctgccatgcctcacctcacatagcacccagctttctcctttctactgggaccctactcctcctctagcttgttctctctttcccacctcttccttttcctatttatgcagaattctgtgcccactgttgaagtctgagcttcccagataaaattgccctcaaacttagactcatttaagattagggtctgactcttttggagcagtaagcagccttcatatcgtattcttccctatcctcttcagagttgcagacccctcaaaaaaggatttccagctagcactgttgaggtactatatgtattctgtgcatcgtagattttttgatcaggaatctgaaaaaactattttttctttctgataattcaggtttaggcatttatttagatgtgtatgttatacagacagatcaggaaagagttacatgagtttcatcaggtagggacaaagatcatctcacacttatgctaacctcaagtcacgtgacatagagttactgaattgatgatataaatgtcagttatgatacaggcaggattgactatatacactttatgtgggatctctgtgctattaacatcatagaagtgaaatcgcatcacaaatatttcagtgttcttgctctgttcttcaaactgtgcctgcccttcccacgtttattacttaaagacaattcctccactgaccaggttctcagtttctttggagggtatgcactttgaccccatgtttgaatcttaattggggatggtatacaaaatctggagagcattggtgacaaccccctgtcctcttcctcctcctcattcttgttctcatttatctctgctcttttctgatttcaggggctcaccatcattccctcctcttttatttgtttttctgttgtttagcattggaatcttctgggtcagatccttaaggacaagaaggttcttatttgtaagctgtaatccttacatttctctttccttggggatatggttagctgtatcaactctgaatcctttcaaagtgatggaaatgaacaatcctgtggattgtgaatattttgcggaagacctgtacaactgtacctttcaatcatatgaggattttagcacagtgctctggaggccttagctggcagtagctaatctttttctagactaacccccctactcccagtcacccaccagagtggagcaaacccagcaggttgctataatatggaagactgaggccctggggggtaatttcctgtcttttggctgctctgaaaagattttttaagaaagcagaggcctcttggcttgtccagggttccctaagtttgggagcagcacagagccccaagggctccagatccctaagatatagcttggcctgacccgagcttaaggaatacacttggaaatgctcctggggccatgttgtcaagggtgtgttttctgcaccactggctgtttctttaagccctggctttgcatactgggcctctgggtatttactggtcctaaagcaggcgttgggccaagctcctgtgtgtggcccattgggctgtgctgctaagcctctccacaagacttgcccagagctattgagcttccgagtggcttcatttggcctaacattggatgctttgatttggggggattaaaagaagtctgaagccctcatgtcagcatccatgtgtctgatctcttgtctccttagactatctgtgccacgtctacgtccggaatgatagtcttgcaggtgtggtcattgctgacaatgaatacccatcccgggtggcctttaccttgctggagaaggtgagttttttatttgcctctcctggacttggatgatgaatgggcacatttatggactgggacaggggttgatggcagtccctgagacataagggatgaaatgatgtgtccaaagtcaacacatttttcagcccccttccctgcaacccaagagacaatttggcatccctgtatgggtttcctccccggtgctgtccctcatgtgagctgggtctaggccactgagtcatagcatctattctctgggatgggaccctcggagacagctgtgccttgtgttctcgccccctgtgcttctgctcaaggagtctccctcttgaatgccttcactctccccattgcctcctgcagttgctgcatccctctaccttgatgtcagtcagttgcaccacagagcttagcacctaagcattctttaaatttttttgcgtacggtgctaattactaatattaactctttgaagtcagaggcttcatcctataccccagagcaccaaaatacctccaaacacatggaatctggtggtttcttaaatctaggggacctaattctcttttttaaaaaattgctttggaaaattagaggaccagtgccccttttttctggaaatctgtagtttaaaattcaaatacctttattactccccaagtgaggttcatctcgggctgggcatacttttgattctcagaatatttaggatatgttttaatgataaaaatttggaaagaactttagcctagattttctctgttgccattatatgtccccctcattcctccttcctgggctgtgaaggccaaggagcctcattcagggtgaggtgctcaggggtgaagccctgtcattgagaccactggtgagtgcacagtgggaggcttgttgagtctcctttgtcttgcaggtactagatgaattctccaagcaagtcgacaggatagactggccagtaggatcccctgctacaatccattacccagccctggatggtcacctcagtagataccaggtagggttaaaggaagcttcagcagacaccatgtggcccagaatccatgtgaaactgaaaaagccaactgccctgatagttctggtctaattacttctgacagcttctgatgctggtgtcctctctcaagccttactgtttggaaaacagagaatctacgttcagaccggggaacccaagctctaggcaggctttgggtttctgttacatgttaaacaggctgtgggtttttttttttgttttttgttttttgagttggagtctcactctgtttcccaggctggagtgcagtggcgcaatctcggctcactcaacctgcacctcctgggttcaagcgattctcctgcctcagcctcccgagtagctgggattacaggcatgtgccaccacgcctggctaatttttgtatttttagtagagacggtttcaccatgttggtcaggctggtctcgaactcttgatctctggtgatccacccgcctcatcctcccaaaatgctgggattacaggcgtgagccactgtgcccggcccaggctgtggtttttaacctgtgaaagtttgtccagcttcctcagttttaggttttgtttgcaggtagccactccagtcctgactttattatttttcactctttcctagaacccacgagaagctgatcccatgactaaagtgcaggccgaactagatgagaccaaaatcattctggtaagcaggaagatggagagcaagcccaagaactgaggcgggggtgcgatttccactggccaggcatgcacagatccatcctcgttttaatataatagtaaccacggcactctccagcaagtgggattgcccaccccttcccccaccccgggcatcagactgtctttcctatacccttctcttggttaatggcacccattgtttctaggggaccaagctgggaaccagtggaaccctcaagtctcccttcctcatggctactgcctgtctgaccatttactgggttcctagggtttggcttctgaagacctggattcccaccctggtgcctttgttagggtttcgggtgcctccacaccccacaggtgcctccccttgcagcgtttgcattgaaggtgaacagattgaagcaccgtgcactgaccacagggcagcttctggaatatgggcccagggttgtcacataggcccctttgaaaagagccagaaccctgcattttgagctgaaatctcctgatttgtaactgttgcttcaactctttttttttaaatttttgcatacaagtggaatgtaagcagctatctgtttttctcaggtttttctcttacagcctttgcctctaagtggtccccttgcctcctgctcacctccagtctgtccaccagagagtagtcattgatctgcacaacttagaacccttcagcagctctcagatccgccccaggataaagtgcaaactaactcacagtctcctgactgggccctgttctctcttataccctttcttgcccagctcacacacaggcgcctgaaggttgggcctttctgaccagatgtcacagttttgtcactgcttgtttacatgtctccctgaccagcgtatgagcactgggacatctttccatcctgctcatgatacagtgcctagtttataccatgctcagcagttgatagatacctggagtggattgaaacccacatacaaagctttaccatttacacaggcatagctttagtgtgtacatcagcgtctcctggggttggagttgttggcctgcgatggagcctgggaacctgcattttataaaaagcatcccaggggcttcaaacacaggtgtgctgactgcactccaaataacgtggctttggaatgaacgatagatgtgaaagtctcatggtatctgtgtcttttgaaaccttgtgagctttcttaccacctaggtggcatttctccgttttctcctcaagccatctctttctgttgctcaagtcctagtctgagtaccatgacacctgggacacccgctgtttctcctctccccacggtggggagtggatgagtcctattcacccagcctcatctagctgcagttgtaaaatctagatgattggtgtgcatatctgaatcagttaactttctgtgttaaaaatttgagtcgctcagctgtgtgtagggatgaaggacattcttgctggctccttgttctatggcgcttcatgtgtgcatctagctgctgcagcagtggccatctgaggagagaagcgagctgctgcttcctgagggccctggcagcagagctgctggctcttgtgaggtctccatctctagaccccttcccatggggtcagtgttttcatttcctaagtcagagtttgtagtgatgacatttaggacatagcccatttagaaggcaggacatgttctgtcatagtgctgtctggtatatatttggggcatgtgtgtaacttagaattttctaggagccatattttaaaatgataaaaggaaaataggtagaatttaatttaattatatattttacttaacgcagtatatccaaatacaatttttccaacatgtaatcggtataaaacttgtttttttttcagtataaaacttactaatgaagcatgtgtgagtttgcatctgaaatctggtgtgtctgtactcagagcgctgctcagtttggacttgcctcacatcaagtgctcaatagccatttcccaccgccttttgtttcctgtggctgctgtcaacagaaaccctcaaatatttgcttttaacagatagctctgtgggcctggctggtgtcttttggggctctgagtgtctgtcccaggcctctctccagcctctggtggctgctggccatccttggcattccttggattagaggtgcatcacttcaggctctgcctctgccgtcacgtgaccttctgtgtgtgtgtttccgtttcttaccaggacatcagtcatggaattagatgccaccctaatccagtattacctcttcctaactagttacatctgccaagaccctatttctaaatatggtcacattcagagattctggggatgttaatttctgggatgcggttggggttggggggtgcggtgtgggtcactctccaacccagtacaatcatatagtgcccagctactcttttttccaaagctccatgcacacgcacatgtgcgtgcacacacacacacacacacaaatgtatatataaatgtgtgtgtatatatatatatgagttttcctggagtgctggttatctaagcctgtgctggggacagctttttgggaagtctgctacatcccagttagatcttctagatttcacgggaatgtcaccaggttctgttccatccacttggacagtaactattcttggaccgagtctcgacacctagaggtgaagtttgtgtgtgttggagaggaacccaggtaaggcactttcccccatgactgaaatatgaggggctcatgtcagggcacgtactgaacagagctggattctcttttcttttttgtccagcacaacaccatggagtctctgttagagcgaggtgagaagctagatgacttggtgtccaaatccgaggtgctgggaacacagtctaaagccttctataaaactgtgagtacccagcacctgctgcctcctgggtgttctctctagagagcagtcgcagcttgctgcttctggcactctccactatgaacgggtctttcttagactgttgaatcatggtggatgattccttgtgcggcaagagcctaaggtgagcgcctcaggcccaggtggttggaggcagttcacttgggcgccgttggagtcgatgcgggccgaggccttgttccactcctgcctctgctctgccctctgctgctctggctgatttctgaactcctactcccagtccaggaaggctggttcaagttctgatcaccagagatttactgttgaatcttattcctctttctgctgagtagacataagtctttaagatgcaagcaattcagccttcctgaagaggttcttaagcttttaatttccctttgacagaaaatatttaattgacaaggatgggtgctgctgactgccgctttctctcaggtcagtgctcatgtcttcctatgtggagatggcactgttggcccatggttggatagtcatagggacaaatttacttggtctgtccacacacatttgctttcatgtgcacattggagggagatggctaggtgggattaggaagatagtctgtgaccagaaagcaagagagaaggtggcaacagtggtccccacaaaccacatcccaagtgggaaccacatctgttgtcctcaggaccatcttctaggaagaaacaccaccgtggtggtcagatagcattgtgtgaagacaggagtggggcaaagttaagatattctgccaatcccatttgtattattggtcctttgtttgtacctggcctaactgtaggaattttactcactttttgatagcattaatggggtgtgagaaaagaaaggaaaaaggatcccagactagttttggaagccggggcccgccttgtgcttggtgatgggaattgcttgtggacagcttccctcaaggcctccacccccaccctgttctagtgctagtttctctgcctggctgtgtcctgtggagctccctctgccacgcctgccaggattggggcttcccttacttcgtcagtcctccttctcagctcctctttgtttttttccaaggcccggaaacaaaactcatgctgtgccatcatgtgatgcagcctgccagaggcccaatgctggaatggcaccatcattcacatcagaactgcagcccctggaaaagaagagacagccatagacgaggagccagagtgggggcagactggccatttttattttgaagttcctgcgagaaatggatggtggaagggtggcgaatgttcaaattcatatgtgtggtagtgattcttggaaagaatttgaggtccccaaaggtgtatttttgggcaaatgaaaccataaactccgactggcttctgtagatgccaaagggctctttttcagctaaccctgggaaggctctgtgggagggaggtcggagccagctgtttctcgatctttggtatatctttggatcttatttgtacattaatgatattaacactccagtggggggtggggagtccctgatgctagggctggggtgggtggagtttgaagactcttgggaaagcctctcctggggccactgttgggggtgggagtgagcccaccacagaggccacaggcaggcccccacttcaggcccaaggcctggggcggggggaacagtcactgggtctcagattctgagactgttgtttagcttacctttctgctaggattggcttcccgcagagggcagggcccatcctaagcagcttccaagtcccacaaaggtggcttgtgggaggatttggaaggagctgcattgtgggcggggagtgtgtgggttgggttcgtaccagcaagtagactaggaactgagcccaggaaagggggatgttttcctggtgtttggatggtcagctgggagtgtccatcatcaggggaagatcaaacacaggtgcactcagctgcccagggcctctgggacacttgccttgacttgcaacttgccttgaacatcacgatcaaagcagcaggtgctgtggtctctcaaaattgatttttatttgactctgtggctctaagactgccttgaaccgcctgaggcctatgcatctgaacaagtgggtctctcccttgagcaccaggagtgggtgccagccggccccgaggattcccagcaccccacctatggtcttgccagcataggcttgctagttccttcttggtcagaggtagctgcagaggggggaggccaagggtttggtctaagctgtgccctgccacctggcaggaggcccactcactgcccaagtcatggcaacaggctggagcagcccaggagatgggcctaaaatgttctggatcccttgggtcctagtgttatgttccagtctgcccacctgtgctcaggatgcagccctgggatccagcacccatggaagcttctgctgggatggtgtcacctatgggttttgaaccagtgtggtatggtccttgggagctctgctctgagcttgccacactgctgagagcacccactgtcctgaccagagtctcagtggtcctgacccccaatgtgggcaggggctgggcaggagggtggggtctgctgtgggttcagaggactccacctcctggctggtttacctgctgctgcccattttctctgggtactgctggccagaggactttagcctacccctgaagagcctgtccatgtcattttcctactgccatagataccctaagcccagggccccttgaggcccagactcagcctgcccactggtgccggagacggagtggagtgggcctggatccgagggatgctacctctccctttcccacttgaggaccctggggagagatgggggcggggaaaatggaggtatgaatttggggtaagaggaagtgagatctccgcttgcaggtcagcccctgccttgcagggcgggctggcttgactcaggccctgtgagatagagggcccagcccagccccacccacagatcccctgctcctgttgtgttctgttgtaaatcatttggcgagactgtattttagtaactgctgcctaacttccctgtgttctatttgagaggcgcctgtctggataaagttgtcttgaaatttcacagtggt

SEQ ID NO: 8194 - DNA, 2558 bp, Homo sapiens
catttgggttggttccaagtctttgctattgtgaacagtgccacaataaacatacgtgtgcatgtgtccttatagcagcatgatttataatcctttgggtatatacctagtaatgggatggctgggtcaaatggtatttccagttctagatccctgaggaatcgccacactgacttccacaatggttgaactagtttacagtcccacgaacagtgtaaaagtgttcctatttctccacatcctctccagcacctgttgtttcctgactttttaatgatcaccattctaactggtgtgagatggtatctcattgtggttttgatttgcatttctctgatggccagtgatgatgagcattttttcatgtgttttttggctacataaatgtcttcttttgagaagtgtctgttcatatccttcgcccatttgttgatggggttgtttgtttttttcttgtaaatttgtttgagttcattgtagattctggatattagccctttgtcagatgagtaggttgcaaaaattttctcccattctgtaggttgcctgttcactctgatggtagtttcttttgctgtgcagaagctctttagtttaattagatcccatttgtcaattttggcttttgttgccattgcttttggtgttttagacatgaagtccttgcccatgcctatgtcctgaatggtattgcctaggttttcttctagggtttttatggttttaggtctaacatgtaagtctttaatccatcttgaattaatttttgtataaggtgtaaggaagggatccagtttcagctttctacatatggctagccagttttcccagcaccatttattaaatagggaatcctttccccattgcttgtttttgtcaggtttgtcaaagatcagatgcttgtagatatgcggcattatttctgagggctctgttctgttccattgctctatatctctgttttggtaccagtagcatgctgttttggttactgtagccttgtagtatagttagaagtcaggtagtgtgatgcctccagctttgttcttttggcttaggattgacttggcaatgcgggctcttttttggttccatatgaactttagttttttccaattctgtgaagaaagtcattggtagcttgatagggatggcattgaatctataaattaccttgggcagtatggccattttcacgatactgattcttcctacccatgagcatggaatgttcttccatttgtttgtatcctcttttatttcattgagcagtcgtttgtagttctccttgaagaggtccttcacatcccttgtaagttggattcctaggtattttattctctttgaagcaattgtgaatgggagttcactcatgatttggctctctgtctgttattggtgtataagactgcttgtgatttttgcacattgattttgtatcctgagactttgctgaagttgcttatcagcttaaggagattttgggctgagacgatggggttttctagatatacaatcatgtcatctgcaaacagggacaatttgacttcctcttttcttaattgaataccctttatttccttctcctacctgattgccctggccagaacttccaacactatgttgaaaaggagtggtgagagagggcatcccagtcttgtgccagttttcaaagggaatgcttccagtttttgtccattcagtatgatattggctgtgggtttgtcatagatagctcttattattttgagatacgtcccatcaatacctaatttattgagagtttttagcatgagggttgttgaattttgtcaaaggccttttctgcatctattgagataatcatgtggtttttgtctttggttctgtttatatgctggattacgtttactgattttcgtatgttgaaccagccttgcatcccagggatgaagcccacttgatcatggtggataagctttttgatgtgttgctggattcggtttgccagtattttactgaggatttttgcttcaatgttcatcaaggatattggtctaaaattctttttttgttgtgtctctctctgccaccctttggtatcaggatgatgctggcctcataaaatgagttagggaggattctctctttttcttttgattggaatagtttcagaaggaatggtacaagctcctcctaaaatgtggcacatatacaccatggaatactatgcagccataaaaaatgatgagttcatgtcctttgtagggacatggatgaagctggaaaccatcattctcagcaaactattgcaaggacaaaaaaccaaacaccgcatgttctcactcataggtgggaattgaacaataagaacacatggacacaggaaggcgaacatcacacaccggggactgttgtggggtggggggaggggggagggatagcattaggagatatacttaatgctaaatgacgagttaatgggtgcagcacaccaacatggcacatgtatacatatgtaacaaacctgcacgttgtgcacatgtaccctaaaacttaaagtataataataaaaaaaa

SEQ ID NO: 8195 - DNA, 8498 bp, Homo sapiens
  SITE (4979): n equals a,t,g, or c
  SITE (4980): n equals a,t,g, or c
  SITE (8440): n equals a,t,g, or c
ttcagtttcagatcagtttagtgtagaatttgaagttgaatctctcgactcagaagattatagccctagtgaagaaggacaagaactctcagatgaagatgatgaggtagtattttttttcccctctaattatattggaaaattattaaatattttctatgttcattgactttgagattgaaataatattattcagatttcacttgaaatctttacctcttgatttgtttaaactaacacattggtttgtggacttgaggatttcatagttctttatcatctgatttatattattatattactactaattgccaagaagtcaatagacctcaatgaacatgcttattataatggtctgttcacttttaaaaacatataattcaactactgttttaatattaacttactttctataaaagtaaaacatgcatacagttaaagtcaagtagtacccttagagatctgtttcccagaagtgactgcctttaacatttctagctatttccctattatttaatatctccatattagttatttatgaagtaaaaccacctagctgaatgttttgttttattcatcctaaacatcctttgtattgacttttaccattgtgggtaaggatttctctctcctccattttttccccctttacactcacttactctatttgatattgtctaaggctttctcatatattgtagtacatgatatttgtttaggacttattactaggaagccttctgattgaaggaaatagggcgatgaattgatgctaatgaatgtgttttattaggtatatcaagttactgtgtatcaggcaggggagagtgatacagattcatttgaagaagatcctgaaatttccttagctgtaagtatacatctacttttttaagaaataaaaatttcattaaggtcaagattaggagactatatctagcttctttctgaaatgaactgatttttataaagttaaaatgtttttgtaaagtctgaataatttaaagcatttttcttttatttgttgtgatgagacctgtagctataatttttatttttaggtgctggaatttgaacttttttttttttttttttaaacagggtcttacccttctcccaagctggagtgcagtggtgcaatctcagtgcactgcagcctccacctcccaggttcaagtgattctcgtgcctcagtctcctgagtagctggaattacaggcatgcaccactataccccactaatttttttatttttagtagagatggggtttcaccatgttggccaggctggtcatgaactcctgacctcaagtgatctgcccaccttggtctctcaaagtgctgggattacaagcatgagtcactgcccagctgaatttgtacattttgatgttattttggaaaatttcagtgtatctccagtatactcatcacccagctttaactattaccaacattttgccaaccttgtcaaacgtaaacttttttttttttcaattgagatagggtcctgccctgtcttccaggctggagtgcagtgatgtgatcatggctcactgcagcccccacctcccaggctcaagtgatcctcccacctcagcctcctgagtagctggaataacaggtgcatgccatcacaccccagctaatttttgtattttttgtagaaatgtcaccatgttgcccaggatggtcttgaactcctgggctcaagtgatccacctgcctcagtctcccaaagtgcaaggattacaggtgtgagccatcacacccagccaaatgtaaacatttttattactgatttgtattatagaatgtggtaggatttgccattaaagaaattaacacttaaatgtttacatctcatgcatacttcactgagttcctgaggtattataggtttttttaaaactattgtgctttagtttttgttcttaatattgcctttattatatttgaataggaaataaattccattttttctgagttatagacagttactaattattcaagtgcaaaaaaggatgaaaattcaagagtttccaaaatttttactgtattagaaaataaataactaattgaatcatttgatgtcaagttgagtaaaatattttagatacttttaattttttaaatctattttaagactcaaattattttagatattcatcttggaatttattggactttttgatgcacttttactcccatattgcaagacctttttctttggttttatgagctgtgaaaaacccccttctataacttgaaaaaagaagaatgaatagtctatctttattgctcctgtcttaacatcatttgtgaggcaatctcaaaatggttacggaaatacctcttacttaagagttttcacttgttaaatgtcctcaggcaagaaccatgcttcagctaaggcaagaagataggttatgtaaaaaggctggggatgtgggagagtttgttatccaaattgcatggtggaaaggtttgtgggataaaacgttgggaaaaggaagaagcattgagcagttacaaagatgagaacacaggaaaggatagacaggtaaaggaaaggatattacggttagtgaccaaggatgataggttttagcagcaatacttgctgtgaaaaatgttttagcatttctcttgtggatggagttagggaatactcagttaagccatggttttagagtacttctaaggtagttctagtcactggtggattaggaagtctttctcgaggaggcaggtttcatctagattgatgggatggactcttggaatagcgcctagggttgagcctttaagggagtggatataggctgcatgacagagtaaaagatcccatagacttgcttcaactaaaggaagcaactgcatttgtatcctgaaacagataactttataggtacatgattaatatcacatcacagttaatatatttttagtttagaatttttcaggatggtaagggtgaaaaaaatgggtgtacttactctactttaggagagactgttacatattgacctttaaaaatctgttttgtgtataattgagacatataacgtgatgttttgacacacatgtaaatagtgaaatgatcactacagtcaagcaaattaatgtaatccattatcttgaatagttaacctttcttgtgtgtatggttaaaatacctaaaatctattcttttagtaaatttccagtataccaatatataactaactatagtcctcatgctgtttacagtgactattttatataaaacatgaaacactgaatattgagccctatgatatactttaccttagacatagcaaagttgctagcattcctgtgactgagcagttaaagggttacagaaactgactgtgtgtcttatttcattgaaggactattggaaatgcacttcatgcaatgaaatgaatcccccccttccatcacattgcaacagatgttgggcccttcgtgagaattggcttcctgaagataaagggaaagataaaggggaaatctctgagaaagccaaactggaaaactcaacacaagctgaagagggctttgatgttcctgattgtaaaaaaactatagtgaatgattccagagagtcatgtgttgaggaaaatgatgataaaattacacaagcttcacaatcacaagaaagtgaagactattctcagccatcaacttctagtagcattatttatagcagccaagaagatgtgaaagagtttgaaagggaagaaacccaagacaaagaagagagtgtggaatctagtttgccccttaatgccattgaaccttgtgtgatttgtcaaggtcgacctaaaaatggttgcattgtccatggcaaaacaggacatcttatggcctgctttacatgtgcaaagaagctaaagaaaaggaataagccctgcccagtatgtagacaaccaattcaaatgattgtgctaacttatttcccctagttgacctgtctataagagaattatatatttctaactatataaccctaggaatttagacaacctgaaatttattcacatatatcaaagtgagaaaatgcctcaattcacatagatttcttctctttagtataattgacctactttggtagtggaatagtgaatacttactataatttgacttgaatatgtagctcatcctttacaccaactcctaattttaaataatttctactctgtcttaaatgagaagtacttggtttttttttttcttaaatatgtatatgacatttaaatgtaacttattattttttttgagaccgagtcttgctctgttacccaggctggagtgcagtggcgtgatcttggctcactgcaagctctgcctcccgggttcgcaccattctcctgcctcagcctcccaattagcttggcctacagtcatctgccaccacacctggctaattttttgtacttttagtagagacagggtttcaccgtgttagccaggatggtctcgatctcctgacctcgtgatccgcccacctcggcctcccaaagtgctgggattacaggcatgagccaccgcgtccggcctaaatgtcacttagtacctttgatataaagagaaaatgtgtgaaagatttagttttttgtttttttgtttgtttgtttgtttgtttgttttgagatgagtctctctgtcgcccaggctggagtgcagtgtcatgatctagcagtctccgcttcccgggttcaagccattctcctggctcagcctctggagcagctgggattacaggcatgcaccaccatgcccagctaatttttgtatttttagtagagatagggtttcaccatgttggccaggctggtcacgaactcctgacctcaagtgaggtcacccgcctcggcctcccgaagtgctgggattgcagatgtgagccaccatgtccagccaagaattagtatttaaattttagatactcttttcttttttttttttttttnntttgagacagagtcttgctccatcacccatgctagagtgcagtggagtgatctcggctcactgcaacttccgccttctgggttcaagctattctcctgcctcagccttccaagtaactgggattacaggcatgtaccaccataccagctgatttttttgtatttttagtaaagacagggtttcaccatgttagccaggctgatcttgaactcctaaactcaagtgatctactcacctcagcctcccaaaatgctgggattacagatgtgaggcacctggcctcagatttttgatactcttaaaccttctgatccttagtttctctctccaaaatactctttctaggttaaaaaaaaaaaggctcttatatttggtgctatgtaaatgaaaatgttttttaggttttcttgatttaacaatagagacagggtctccctgtgttgcccaggctggtctcgaactcctgggctcaagagatcctcctgtcttggcctcgcaaagtgctaagtaggattacaggcgttagccaccacacccggctgtaaaaatgtacttattctccagcctcttttgtataaaccatagtaagggatgggagtaatgatgttatctgtgaaaatagccaccatttacccgtaagacaaaacttgttaaagcctcctgagtctaacctagattacatcaggccctttttcacacacaaaaaaatcctttatgggatttaatggaatctgttgtttccccctaagttgaaaaacaactctaagacactttaaagtaccttcttggcctgggttacatggttcccagcctaggtttcagacttttgcttaaggccagttttagaaacccgtgaattcagaaaagttaattcagaaatttgataaacagaattgttatttaaaaactaactggaaagattgttaagttctttctgaattattcagaaattatgcatcattttccttcaagaatgacagggtcagcatgtggaattccaagatacctcttgacttcctctcaagctccgtgtttggtcagtggaggcccatccgagctcagcactgagaagtgttagtttctttgggacccatctaccctgaccacatcatgatgttcatctgcagctgttgcaaggtgttcagattgtataaacataaatgtcacaaaaactttaaaagaagtgcaattctcaaaaggttaggtggactaaagcattctgtaaagcaactgctaataatgagcttacagtggatttgaatttgaaaaatatagtaacaagcctgtcaaatatctgcaagaactatggaataaaactactgatgcagtgaagacagttgaaaagatcaaacaaatgccaagctatatttataatgaacaaattcaagaaaaaggactacggaaagttcaggacatcaaagaagtcaggcaaaactcatcttgacccctgttgcaggcaaaggaacgcagctggaagaaaagatgatataacagttaacaggatgcagacatggcagaggtttcctaaaaatctcattatctataaccatttctatatttacatttgaaaatctcctttggagacttacaacctctaaattattgacttattttttatataagggcactccgatgaaaggtgattacaaaatcatctacattgctgtctacaaaacagattatatggatgtttgatcgcatctcattgttaactctttactgatatgtttgtaaatacaaaagtgaaatgtggacataaaatagttacgctatttggttaatggtactagacaacatgtaattaatgacattcaaaaatttatggctagtgatatatataaagtaaaattttctttgcagtaaaatatgccctttattatagaagggaggatataaggaaccaacagtttgtatgaaaatagctcaaataatatcttttattttgattttaatatttcttattttggtttattagtgtcttagaacaaaatggccttatataatgaagcctagttatgctggactgttttgatctcttttaattgttctgacagatagttggggatgagagccgaataaggtttgcctgaaataactgacactatataatttctgctttggcaaatactaagttctaacttgtcattcctggtagaacaagctttatttttcgagcctagcaatgatctagaagcagatgttatctcagtgccttttgcaatttgttgtgtgggtttttttttttttaaagccacacaataattttggaaaacaatgtatgggtagaacatgtgtctgttaattgcacacaaaaccacttttaatgggtacagagttaaatttgaaggaataagttctagctgaagtattatgaactccaaataatgctttgaggacctccaaaggtaaaagtactaatccctttggccatttattgagagagagagagagagagagtagggtgactatagttaatgtattgaatgttcttgctacaaataaatgatatttgagctgatgggtgtgctaattacactgatttgatcaatacccattgtatgtgaaacagtacatacaccatatttacaattatgtatttaacatttaaaatttctaatataagtatctctcaaactgtggattaacttcttgatttatatttaaatatgaatcttaagcaaaacagtgaaaataaccatcttgatttagtgtttttctcccatatgtgaattgtatatacttaggtgaagacaataaaatcaactgaactgtaagcttagaataggactgaggtaattctgcacagcaactttactaatggtacattgttgcttcaaaactctctctctctctctctgtctgtctcaataaatggccaaagggattagtagtttacctgtggaggtcctccaagcattatttggagttgataatacttcagctacaaccaagcagaatctcttttttttggaggtcctcgaagcattatttggagttgataatacttcagcttcaatttggagttgataatatttcagctagaacctagtagaatctgtttttttcctttggaggtcctcaaagcattattggagttcataatactgaagctagaaccaagcagaatctgtttttttctgaggagtatcggtagcataaatgtgattataaacatagtacacttgatatatggaggcagtgacagctatttttacaaaatttaaatctgcaaatggattcaacatgtttatgggttattaaaatggcctgatttcttaggttctttatagtacacgtgttgaaaatatatgattaagaattgtttcaagaatgcaattatttgatcttaaatttttatgagttgttaaaatagaaattatttgaatatcatatatttgggtaacaaaaggcacaagtctgaatgtgtttctttttctggaatggccatgcctgcccactntagaaatacaaatatcacttgggcagcttgaagcagtggagcctcaatgagaccacct

SEQ ID NO: 8196 - DNA, 882 bp, Homo sapiens
gtaagattgtactggcctgtttagttttcggcctcttcttggaaagttcccccaagctgggaacctcttgattgtgaggcacaaatgtaagtacatcagaaaaaaacaaaaaaactggctttaaagcaggagcttgtgggcccctaagccagacggggactagcttttggcattatataattaagattttttaaatccttaataagggttttattttatttttatttattttttgagacggagtcttgctctgtggctcaggctggagtacagtggtgcaatcttggctcactgcaacctctgcctcctggctgtgttcaagtggttctgcttcagcctcccaagtagctggggttagagcaccctgtcaccacgccccgctaatttttgtatttctagcagagatgaagtttcactatgttggccaggctgggctcaaactcctgacctcaagtgatctgcccgccttggccccccaaagtgctgtgattacaggcgtgagccgccacgcccagcctaataagggttttaaagataattagtgtgtaggtctgtaggcttatgatggtaaccacaagttgttaatggcattgtgaaaagtttttagttgcgctttatgggtggatgctgaattacattttgatttgatacttataaaaagaaaaagtatttcttcagcttaaaaaattgtttaaaagtttgtgatcatattgtctaccatgtagccagctttcaattatatgtaagagggactttttgacatttacaaataatactttgaggtagatatctgaaagcaccagcacttggaaggtgttcagaagtaacaaattataaaatgagctaacaaacgaaaggcaaaataaaaccgtaaagcaagca

SEQ ID NO: 8197 - DNA, 594 bp, Homo sapiens
attatacaagtagtaaggataattaaaggtggaagagccttttcagttatggtattgacaaaggcttagtcaaagaaggatgaataggattttgaaactgaaattattctagttagagggggaaagtgtggaagttgaaatgccaagattagttgaggaagcaatctagatctggcgggattatccatatttagtaagggaggaggggtgtctagttgaagacagacgaagatgttaatacagtcacactgtaggtactttcgatgccaagaggctttggtgtttttcctttatgcagtggggttttgaacagggaaaataatgtagtaataaccttgaaaccttaatctagtttcagtatgcaggatggatctgaggaggaaatgtgcgtggcaaccggctccgggatggctggctggggggcctagtcttctgcccgccgatctccctcgggaagtcccggatcagagcagcaggcccatcccccaactgttacaccctgctggcagcagcagaggcacagggatgagttaggaaacagatacagaggtcaagaggtgatgtttattaagttatatatttttttcttgtttt

SEQ ID NO: 8198 - DNA, 5295 bp, Homo sapiens
caccctgactcctgtcactgtctccatccccaaataaagctgaaatatttttttaagttagctgccgagaaaacattttgcatgaaggataaagttctgttaaaatacatccttaaaaaaagtttttcctatgcattgcctatgctttaaatcaacaaactcttcatttctaaactatgatctcatatttttctaatttctttgccaaaaataattgccatgttttgtcatagaacatgaaattcatttaccttgatttttaagaacagaccagtgtagaaatgttccttttgacttatagcagtataaaagtttaatgtacagtgaaagagactatgaacagacatagatttatcttattccttgagcgctaaaaactttaataaaaaaaactgcactaattttttacagcaatgcactaaagtctgagatttctcagaacatttatttatatataaaaataaaataccattatttaaattgcctttgggattagccccttccctttccttataaacacaggtagcaggaactgtgctgctcatttttctgttagtagtgtgtacttcatgccaggacattgggtattttctttaaagtgaatatagaatctcaagatatacgtagcttcatcattgacatttcccagagccaatagtcagcggatcggtcttgtgaacaccactgccagctcctgtgtctacatctcagaggagcccatgtgctctgcttctctccaccagagcaagctctgctgggcgtgcttctgggaagaaaacaattttctttaagaagaagatgaatgtccaggaatttaaagaaaggatcgattgccttttatttatgagtttctagctcttgaagttattcacatgcagttcagttagtcaagtaaaattttttttcaaataaaagtatccaagtggtgcagttattattatatccctctttaataattttgctttttatttttcccctcttctttttctgttacttgaattttatttcctgtaatttatagtgtgtagctgtaaattgaaatatttataactgtgaaattgacttaattcatatgttgtctcataactttattttttttaaatgcatattcagggaaatatattactcatatttacaattgggcgatataggaacttcaatttagatttaatttgcaactcttagcattttttaaatccttgataaaattttcccttttggtgtgaaactccaaagaaaattgtacatctcctctgagcatttaggagcagccatctttctaccccttgtgaataaatcattgaaagaaacaggtaaaattaattttaatgatacattttgtttcacccagtatagtcaaagtattactatttcatcatatgtcactagccatatttcaagtactcaatagctacatgtacctagtggctactgtattagacagtacagatttaaagtatcttttgttgaggtgacagaagagagaagctgtttttcctaccaattctgatgtagatctcacattatagcataacattacagtagaaggaatgaaaactaagaaagtaaatagtgaacatacagaacttactgcatttccactttaaaacctatttattttccctttttctaattttaaacttttgtggtcattcagaacctaatgtgccttgtgttgacatttccatagacttcacactttacaaaatttactgtttaaaaatacttgtcaaatgatttactgaacctttatacaaaagtaccctttctaaattgaccatttaaaaatgtatttttgtgataccgtcattatgttctgcatttgcctcattttggcagatctacagtatgccattaaagtttagtgttgtttttggttttggagggtttttttctgaaactgaatttataatctatttctctgtatacgtatatttttaaaatcttctgaaaggaactatgttccctgctgcttcttccctttctgaagtgaatatgatcttttcatggtcattgcctagataaaagtagagccttttcaatcttagatggaagataattcattttcccacacagaaaaaaaatctgacctttacatgatttaatctgaagggctagaattttttaatttctagcccctcctccaaaaaaattttaaacacatcacatactctgaaaagtcagatttcaaatgcaagactagactttatatggaacatatatgttgggttttgattttgggtagcaattgacatatatttttctcaaaacaagttgaattttgttaacatatataattctttagtgaatttataaattaggaaccctgagaagaagccctgttgtttttcttaagagtctaaaactgacaatcttttaaaaatcataatacttttctagtaattgcatcagggaattggtgataattgaagaaagatccatttcttaagaataatttgatctaaattattatatggaaataaacatacttgtgttaactaaattgatcataaattcttgttcctgcctcacccctcaccccccagagaatagtgagtgactcgtttagattctctgctttttttcagttatgtacaagacttcagcatacattaatgtctttagtttataaatttgccaatgctttaatttccataatttgaaagttaaaagatgtaactaaaatactagcttttttattcatttccttttggtggagttgtatgattgaaaactttgctttttcttgtttaattcttccgccaccccctcttttgagagaaaggtaatcgtggaatgagttataaattattgcctttttttcctttatttctttcattcagtggcaaaaaacattttataactcctaagtttttggttaatcttccaacttataccttggtgtgaactctctttttacaccattttcaacactggataaaactttaatgttgactttttgctaaagaactttaatttttccaagaatctagattaacataagatgttgatatttaaggaacttggaagagtaagtggtgaggctgtatgtatattttttaagagattaccttttaggaaattagtgaacaaacttaaccagtgttctgccttctttgactttgttactggaggatgataatctatttctattagattcgaagtattttggaaaatatttcaagtatatctgaactacttataattcttaaaacagaagtagtcagacaatatttgtatcctaagtgagatatggaaaattactctgtatactaaatgtcaggcaatgaaaatgtaagtttttgtgtagaaaacccattaagaagatgtgtttttctttctgaattagtttatttttccatcacataccaaaatataaaaatcagcctcacatttttcagcaagtttagcttatagccttgataaattcctctgtgcttctgagcagcatccttctgcctctgcttagcagctctgcatttggtggattgctgttgtgagtcattcatccagcactgggccttttaagctgaagattcacccagtgtctaaagttgtccttttcttatagctagctttcaagcatctttcctcctaaataaatatgtgacttgagaaaaaggtaataatgattttgtcagaattctttgaatttatatttactagctacttaaccataaactgctgtccagattgttaatttcatttatatttattttaattaatttgtcatgaatatggacaaagccttttctggggtgtgtgtgtgtgtgtatgtttgttttttaagtcgtcattattcattcgtattctttttctgtgtaatgtaatcatataaagttactttggacagagacccagttaattttctcttttgataggatacatggtttagataaggtataaagtgtccctttttattctagaggcttttcctttaattcagagattagtggagataataacgtcagtcaaggctaatgtggtacatggaacttgctaatggaggttggacattctgtttcagtcttacatggatattgtttcattggtgttgaggaagaaaaaaattagatactaccatgcattgggacagcataattctaatattacattgaatatggctttttaaaaataagtattaaaaagccaatcgttttctccatttatctatcttttttgtttgtttttaatttggttgattgatatgcacccaggccgtcttatttttacttgttaaatgtctgtctaggaagaactgtgattggaaaggaattaattattatacaaataaatctggtaggatatgagtggagtaagtttgcttgaaacagaagtatattttctactttgaatcacctcaccagagtcatctgtcaagaattatgtataacaatttatctttattgcctacatacaacatactttttctgaattaagataacttctatttgtgagttgaacttcattatctgccattttgtggaatcaaccttacattctttggtggaactagagctgattgtcaccacaaggttatatgacaactctgttctaagacttatacctattatatagggttataccttttttcttatgcctcagctctgtacctgacaatttatgattcagtggagccaagctagaaggaacaaaggtcatctaacactgtgatggggatgaattcctgagttttacctgcacaatgaggtggtgccccggaattcacaacagagtagtgatagagcataagatggctgctccagatgactcttgggtttagtgtacttgtgattgaacaagattttttatctatgaagcttgattctacaaccaaaataatagaaatgggggggggggggggaatcatgtctgcttatgctttttaaaagcttatagtttaagtaaaagtaaaatgtaaaaactgattaaacctatacaagtctggcaatgagctctgcatgaggaaatggaaggaggaatattgaaaatgattctaggaaagtgaacgtaagaaaggaaaatgggttttccttttctgatcatgggctctggaaagtattcatggcctttaccagcattcagtataaaccagagataaggacatatgtacttacgtgtgtctgtgagtgtgtgtgtgtctgagtgttattctgaacagcttgtaaatattgtagttgtttaaaatggaaaataaaagctgagttcttttggcaaatatattgcatcaaaaatacagtattgacagtggataaaacactgaggaaataaattttttttcattttgccttctgt

SEQ ID NO: 8199 - DNA, 5141 bp, Homo sapiens
tttttaggttggtcttcctgcaaaatctggagttgctgggggcattcttttagttgtccccaatgttatgggtatgatgtgctggtctcctcctctggataagatgggcaacagtgttaagggaattcacttttgtcacgtaagcatattttcttaatgtaaataatggtgttacaagttgagccatccaatgattcttttttttaacccattttccatagttcattaactcttggccctccgcctatagtgtgccagttactagggagccgtggaaatactcccagaggagcttcaagttgtctctgtcagacagctcccatttaattattcccacagattatatttgttagatgctaatattttaattttcatggttataattagtatgaattttcaaaagctcaacaaaaggtattaaacttggagaagtaatttaaaagccagtatatcttaagaattattttggtttattatatctttaatctgcatggttaaatatctttatccattgactacctttaaacatttttttgaggaaataagcactgaaaattaaaaaaagattaaaccatttttaaactgttactgctcttgatagttctgtattttgttgttacccagttcctgctaatgtttgagcttctagttttagttacattgattacttgcttgagttcatattaagtaccatactcaattaaaattgttttattttccagtcttttatattttacaaaaactagagtatgaccttggagtgcatataaaatatagtagattgtaaccagagtacttatttatattttaatgtggctttacacttatttgatagaagaattctttcatggggccggttataaaccctattttgtagaagatgaaagatgatttgattggctgagccctaggatcatgttagtaagcagtgttcttaaaacttatatccatatcttactctgattttagttctcttcttgatgcattatactactttattagcatgtagtgatgatttctaggctggacgatataagcagagtttgttaaaatatggatatatataaccaatgaatagccaatttcttatacctgctctgtataactgtttacaggatcttgtttctctgtgtaatttccataactatgataatttgagacactttgcaaaaaaacttgatcctcgaagagaaggtggtgatcaaagggtaagcaaaattcttatttagataagtatataaaatttttaagaagagaaaaagtgagatttgcctgtataaataaaatcttagtttgttagtggcctcgggtctttgctaatcataaatgagtgtaaacaaattgttgacatataaatccgggatcaccagtattaaatacttaaagattgtttaatagatagttaatagatacagatatttaaatattgctgttttgttatttaaattgaaactagttagcctagtgtcagggatttccccttccattttctgctattttaagcaagatttttagaattgattctgttaaaaaaagaacaaaacaaaacattggaatgtgctgcatgctataaagaaagcatcgttttaatatttgttcgtcctaaattgaagtttaacttcttgcatactgtgtagatggatatgtaaatggaaaaggattatcatattagtgagagaccgtatgaagcctcaaaagttttataagtcactgtagatgaaatatttttttccaccgtgtttaatgcaatattcctaataatcttacggtcctatttgtttgttacgagtttatttggcttcatactattgtacacatatattcctttttttagaagtagtattaagagtcaggacttaacttttttggtctatatagtttttcactgtaccaaggggcttgtgctgagaattttgattcagtttctttgcgtaccatattgaaaatgtttgtagtaaaattacctaattagacctcaagataatatgaagaacttctaagtagaaaatatttttaatacatactaagtacattttctgtagtgctaaactaaatttttgttagtttttatcaaattaatttctgttactatgtaagaattatgcaaaaccaacagaatagaaacttccatgggagtcgacctgagtaacatgaagcaaaatgtcagaggtggtggtttaaaatgttaacattttaataatgctcattgaaaaataccattttatagcttggacctttcttcactcaagtgcactaataaattatgtatgttgcttgaacaactagcattcctttggaccattggactatgaaagtctccaacaagaacttgctttaaaagagacagtatggaaaaaagtgtcacctgagtcaaatgaggacatctctacaactgtagtatatagaatggaaagtctgggagagaaaagctaaagaaatgggttctagtttcagaatgtttcttcatttaatctttcaaacatctttagcttttttttgcaagttataaatatttatttgaggtattttttgttctcaatcttgggtgctggagccataaagcttttttttccttttaatctttgtataaaggcagtagattaagaagtgcatttgttggtctttaaaaagtatttacaagtacataaatttgctttatttttaaaaatacaaaaaggaaaaatttaaattttttttgatgtaattaaaatgttaactatgtggtcagataatcccattttacaatagtaacagaaaattgtaattcttagttctaaaattcacaaattaaactcataagttttgttgcattttgttttttcttttccatttttaaaactaatgtgatgtctttagtggcaatagaaggtacttctatgctaaatacaaaactaaaaaggcaaaataatgaaccccaaattattttatttaaaatagcagtggattataaaattagcttgtgtttacatttatgccatttttggtgatagattggctttacattttaaaaaatttatttaaaaatttatcaaatgctttaaaatatgactcctactttttttattttgcaactcctctgttctgtcagagttgttatatacaggagtgtcttatgttactaaaacattccagccaaagaatttcagatgtgagataatgatgtttcatcaataaaaagctataatggttagttactcagaaggagaaacagtgagtgtcttcaagtgaattgttcacctaaacaattttattttcatattatccacataactttttctatgttatatttaaatatgaatggcaaattttggtttttagcttttacattttattatcttaattttataaatgctaatatttcttttgtgataagttatagcatctcataaagtttgttctatttgaagttttttagagtacttgagaaatgaatttagtctgcaggtagtaagtatgctactaaaatacgttagatctaaatccttttatttggtataaaaatgcaatattgagaatcaaaacttgtttttaagagaactatagattctacacaacctgatttcaagtaattattcatagtatttatagttgtcttggcaaagtgattgtaaaattctgtaggacctattcacacttcttccttcttccatatacttctctggttttccccatagttcccctataatttcaagtttgttgaaacctgttaattttagtgggggattagaagaaaaacttggtggtttcttagcatgatggtgtatgtatgtggtaatggaaagtctgtaaaagtaaatatagtgtagcaaaaaagatttcactgagtattttagatactagtgcaaataaagatagaaaatcttgatcataatgtcttaagtttgggaactgtgatattaagaaaagaaattcccttctagaggtgctggccaaaaagccttttgggctaacttaagtattaaatttatatatttaaataattatattttaagttgtagaggattttcccaaggattttatgcttacttgaatgttctttgaatgttcagatgcatatcctaactggatgcttctcaaggccttactgcatatttgtgttgcatatttatgttagttgcaccagggccatttgtagtttgggcaaccgaatgccttaattggaaaaaaggcattgtggtttcccctatgatctaaattgttacattttaccatttcattccgaagttggttttactttattaaatgaagatttagttttcatatcgtatacatagctgtatagatttcaaaattaggttgttaatttgtgtcacttactatttttgtgttggtaatgctttaaatgcatacttaaaaatgaagtactgttatctaagctactgtgtttagaaaatgttaagaatgagcagaaatttttatagaaaagtataaacggaagaagagataagatactgcgaataggccctcaaacttaaaaaagaaaaaactttgccagttttaaggacatattttgattctttcagtattcttaacacctttttaaacaaagttcttgatagtacccactattattgggtttgttttatgccattattgattcttgatattcaagcatttacaatgtagcatatttgattttcttttttctttctttttttggcatcattaacatttcatttgaaatgcatattgttcttgaagtactttgtttttagcataaatgttgtgcattttatcttagtgtttggatgaaaacatttgtgttgtttagctttcatttgctttgtatatttaataatgtacctttattttccagtatgcctacattttgtattgcacaataaatttattttaagctgattttattgttttttttgttttgttttgttttgtttttataaaagcaacttcaacattttaagtacaaatacagttgggattttaacttagaaaaaattattctttatgaagatactgttaaagtgtttgctattctgaagctgcctcaaagtaaactagaaatattcaaaagggctttatttgattttttaaaatgcaatatagcattagtggtttttttgggaggaggacttttcttattggttgtactagaagtatttgaataaaaacttttctctcaa

SEQ ID NO: 8200 - DNA, 102 bp, Homo sapiens
aggctggagtgcagtggtgcgatcttggctcactgcaacctctgcctcccaggttcaagcgattctcctgccgcagcctcccgagtagctgggattacaggt

SEQ ID NO: 8201 - DNA, 6823 bp, Homo sapiens
gggtcgtctgtgaagagggacttcctggtgaccttgtacctttctgggcagatggaggctggacagtaattcagaggcgccacgatggctcagtggacttcaaccggccctgggaagcctacaaggcggggtttggggatccccacggtaggtgtttctagtggggacagaggcaggggaggaagagggaccctcagaagtggccctgcctcatggagtggcctctcccactccaggcgagttctggctgggtctggagaaggtgcatagcatcacgggggaccgcaacagccgcctggccgtgcagctgcgggactgggatggcaacgccgagttgctgcagttctccgtgcacctgggtggcgaggacacggcctatagcctgcagctcactgcacccgtggccggccagctgggcgccaccaccgtcccacccagcggcctctccgtacccttctccacttgggaccaggatcacgacctccgcagggacaagaactgcgccaagagcctctctggtgagcaggccctgccatgccacacccagccagcagcttccctccttatctttctgctgctctgtcctgccttcaaccccacattgcatctgtttcctgcccccacctcttccttacatgccgtgtgtgtgattgggccactaacttagcctatctggcctcagttttcccatcctgaaaagggtcttgaccgtctttacttttatttacttatgtgtttgtttatttatttatttatgtatttattttttgagacggagtctcactttgtcacccaggctggagtgctttgtggcacgatcttggctcactgcaagctccacctcctgagttcacaccattctcctgcctcagcctcccgagtagctgggactataggtgcccaccaccacgcctggctaatttttttgtatttttagtagagatggggtttcaccgtgttagccaggatggtctcgatctcctgacctcgtgatctgcctgcctcagcctcccaaagtgctgggattacaggcgtgagccaccgcgcccggcctacttatttattttttgagacagagtcccgctgtgtctcccaggctggagtgcaagtgacgtgatcttggctcactgcagcctccgcctcctgggttcaagtgattctcctgcctcagcctcctgagtagctgggattacaggttcccgccaccatgcacagataattgttttgtatttttagtagagacggggtttcaccatgttggccagggtggtcttgaactcctgacctcaagtgatctgcccacctcggcctcccaaagtgttgggattacaggcgtgagccacaatacccggccacaaacatctttataatggtgctccacaggattctttttttttttttttttttgaaacagggtctcactctgttgcctaagctggagtgcagtggtgcgatctcggctcactgcaacctccacctcccgggttcaagcaattctcaaaaaaaaaaaaaaattaggcacggtggctcacacttgcaatcccagcactttgggaggctgaagcgagtggatcacttgagcccaggagaccaatctgagcaacagggcgaaatcctgtctcaattaaaaatacaaaaaactagctgggcatggtggtgcctgcctgtgttcccatctacttgggaggctgagttgggaggatctcttgagcctaggagataaggctgcagtgagctgagactgcgccactgcactcaagcctgggtgacagagtgagacccctgcctcaaaagaaaaagaaaaaatgcaggcatggtggctcacacctgtggtcccagctacttgggaggcccaggtacaagaatcacttgagcccgtaaggttgacgctgcattgagccatcaccacaccactgcactccagcctgggcaatggagccaggccctgtctcaaaaaaaattgtttttaaacttaaaaataaggccgggtgtgggggctcacacctgtaatcccagcactttgggaggccgaggtgggtggatcacctgaggtcaggagttcaaaactagcctggccaacatggtgaaaccctgtctctactaaaaatacaaaaattaggccaggcgcagtgggtcatacctgtaatcccagcactttgggaggctgaggagggtggatcacatgaggtaaggagtttgagaccaacctggccaacatggtgaaaccccctcactactaaaaatacaaaaactagccaggcgtggtggcgggtgcctgtaatcccggctactcaggaggctgaggcatgagaatcccttgaacctgggaggcagaggtgcagtgagccgagattgtgccactgcactccagcctgggagatagagtgagactcagtctcaaaaaaaaagaccaaaaattagccaggtgtggtggcaggcgcctgtaatcccagctactcgggaggctgagggaggagaatcacttaaacctgagagacggaggttgcagtgagctgagatcgcaccactgcactccagcctgggtgacagagtaagactcaatctcaaaaaaaaaaaagtcaagtccaaagcccagcctggtccccaacctgcctcatcctcaaccctatccctatctcctttcagccccatcggtggctcaaagacctgaccatgttccctctcccctgaccccggcaggaggctggtggtttggcacctgcagccattccaacctcaacggccagtacttccgctccatcccacagcagcggcagaagcttaagaagggaatcttctggaagacctggcggggccgctactacccgctgcaggccaccaccatgttgatccagcccatggcagcagaggcagcctcctagcgtcctggctgggcctggtcccaggcccacgaaagacggtgactcttggctctgcccgaggatgtggccgttccctgcctgggcaggggctccaaggaggggccatctggaaacttgtggacagagaagaagaccacgactggagaagccccctttctgagtgcaggggggctgcatgcgttgcctcctgagatcgaggctgcaggatatgctcagactctagaggcgtggaccaaggggcatggagcttcactccttgctggccagggagttggggactcagagggaccacttggggccagccagactggcctcaatggcggactcagtcacattgactgacggggaccagggcttgtgtgggtcgagagcgccctcatggtgctggtgctgttgtgtgtaggtcccctggggacacaagcaggcgccaatggtatctgggcggagctcacagagttcttggaataaaagcaacctcagaacactttgttctttgttcttgtttgttttctttcttttttttctctttctttagttcacagatctagtaagttaccctcagtttgttttaaaaagtgaacaaagtccatgtaaacatgttcccagggccaggcacggtgtctcgtgcctgtaatcccagccatttgtgaggccgagacaggcaggtcacttgaggtcagcagttcgagaccagccgggccaacatggtggaacccccatctctacaaaaaaatacaaaaattagccgagcatggtggtgcacgtctgtagtcccagctactctagaggctgacgcagaagaatcacttgagccaaggaggcagaggctgcaaataagccgagattgcgccactgcactccagcctgggcaacagagcaagactccatctcaaaacaaaaataatttttttttcgtagaggcagggtctcattctattgtccaggctggtctcaaacaccgagactcaagggatcctcctgccttggcttcacaaagtgatgggattaaaggtgtgagcgccactgcacccacccctgaaggctctaattctacatctgtgttttgttaaaaaaaaaaaaaaaagatggcgtggtcgctcatgcctgtaatcccagcactttaggaggccgaggcaggtggatcatctgacattacgagttccaggcccgcctgaccaacatggtgaaaccccgtctctactaaaaatacaaaaattagccgggtgtggtggcgggtgcctgtaatcccagctactcaggaggctgaggcaggagaatcacttgaactcgggaggtggaggttgcggtgagcagagatcatgccactgcactccagcctgggtgacagagcaagacttgatttcaaaaaaaaaaaaaaaaaaaaaaagaatagggctgggcgcattggctcacacttgtaacactagcactttgggaggccaacgagcggatcacccgaggtcgggtgatcctgctgtattgctctatatagtgagatccctatatagggtctcactctattgtccaggctggtctggcctggccaatgtggtgaaacctcatttctactaaaaatacaaaaattagctgggcatagtgatgcgcacctataatcccagctactcaggaggctgaggccggagaattgcttgaacccaggaggtggaggttgcagtgagccgagatggcgctgagaggtgacagcgtgctggcagtcctcacagccctcgctcactctctgcgactcctctgcctgggctcccactgtggcggcacttcaggagcccttcagcccaccgctgcactgtgggagcccctttctgggctggccaaggccggagctggctccctcagcttgcagggaagtgtggagggagaggcgcgagccggaatcggggctgcgcgcggtgcttgtgggccagctggagttccgggtgggcgtgggcttggcggaccctgcactcagagcagccgtccggccctgctggccccgggcaatgaggggcttagcacccgggccggacagcggctgcggagggtgtactgggtcccccagcagtgccagcgcaccggcgctgcgcttgatttctcaccaggccttagctgccttcccgcggggcagggatcgggacctgcagcccgccatgcctgagcctcccaccccctccatgggctcctgtgcggcccgcgcctccctgacgagcactgccccatgctccatggtgcccagtcccatccaccacccaagggctgaggagtgcaggcgcacggcgtgggactggcaggcagctccacctgcagccccggtgcaggatccactgggtgaagctagctgggctcctgagtctggtggggacgtggagaacctttgtctagctcagggattgtaaatacaccaatcatcaccctatgtctagctcagggtttgtgaatgcaccaatgaacactctgtatctagctactctggtggggccttggagaacctttatgtctagctcagggattgtaaatacaccaatcggcactctgtatctagctcaaggtttgtaaacacaccaatcagcaccctgtgtctagctcagggtttgtgaatgcaccaatcgacactctgtatctagctactgtggtggggccttggagaacctttgtgttgacactctgtatctagttaatctggtggggatgtggagaacctttgtgtctagctcaggaattgtaaacgcaccaatcagcgccctgtcaaaacagaccagtgggctctaccaatcagcaggatgtgggtggggccagataagagaataaaagcaggctgcccgagccagcagtggcaacccacttgggtccccttccacactgtggaagctttgttcttttgctctttgcaataaatcttgtactgctcactctttgggtccccactgcttttatgagctgtaacactcactgcgaaggtctgcagcttcactcctgagccagtgaaaccatgaacccaccagaaggaagaaacgctgaacacacctgaacatcagaagaaacaaactccagacgcgccaccttaagagctggaacacttaccgcaagggtccatggcttcattcttgaagtcagtgagaccaagaaccccccaattccggatacagtgccactgcactccagcccaggcaacagagcgagattctgtctaaaaaataaataaataaatatgaaataaaataaaaattgtaataattggataccctacatctaggacatgtatttgaggaaaaccacatctgtccattttctgaaccccagctgctgttaattttttttttttttttttccgagacaagagtctcactctgtcacccaggctggagcgcggtagtgcgatctcagcttactgcaacctccacctcccgggttcaagcgattctcctgcctcggcctcccgagtagctgagattacaggcgcctcccactgcacccagctaatttttgtatttttagtatagatgggtttggccaggctggtctcaaactcctgacctcaagtgatctgcccgcctcggcctccgaaactggtgggattacaggcgcaagccactgtgcccggcctgttaatttatttttgccccagtatctccctccaaatattccttatagatgtctcttggggaggtggtgggggttcttgcgctagaagaaaaaatatctgtgatttccttgtcttgacccttcctggcaggtgctggggacacagctgtttccctggggctgtggctgggtataggtgacaaactttttagctttgtagaggtaggtcctacagctgccaggccagggaggctagaggctgccctctccaggttccttgtttgcctgtgtcctgtactgagcaggcttagaggatctcctctgagcccactgtcactggagctggtggtgagtccagtctgcag

SEQ ID NO: 8202 - DNA, 356 bp, Homo sapiens
ccgtgagccgtgatcacacctgtgaatagccaccgcactccaacctgggcaacacaacaaaacctcgtttctaaaaaaaaacaaaggctgagcacggtggcttacacctgaaatgccagcactttgggaggctgaggcgggcaaatcacttgaggtcagaagttcaagaccagcctggccaacatggtgaaaccctatctctaccaacataaacattagccgggcgtgcctgtgattccagctgcttgtggggctgaagcacaagaatcgcttgagccccgaaggcagaggttgcagtgagctgagattgcggcactgcgatccagcctgggcaacagagtgagactccatctcta

SEQ ID NO: 8203 - DNA, 93 bp, Homo sapiens
gagaatcacttgaacctgggaggcggaggttgcagtgagctgagattgcaccactgcactccagcctgggtgacagagcaagactctgtctca

SEQ ID NO: 8204 - DNA, 1398 bp, Homo sapiens
ggctctctcatttccagcagacacccttcctcttacccagtggagaggactcagggaatcttggcagaaccctgctggcaccatcagcggcgtatgctcctcctcgtttctgtcttttcacccgttctcttctctcggtcttccactgtggagatggatgtggaacctttttgcttagtcctgtcttctgcctttcctgagattaccccaccgatctcctgtttgtgtctcaatatgttcttttctctgctcagatctccccattcttaaaagaactgtcccctcctcctcgcctccttcttcaatttctgcccctcctgtgtctgagaccgttcacaggaacgctctgccaaggatgcctgactggcccccagcaagccactcctggggcccttgtgtgctggctcccttccagccctgccttcctgcttctgctctcagactccgtggtctctcttgggcttcagggcctgggacctcctggcagcagtgggctaccccaccccccaaccccacacacacgggaaaccaccctggtgaccagatatatatatatatatatatatacacatatatatatgcatgtgtatgtatttacacacacctgggaaatatatatatctggtgtatatatatttacacacacctgggaaactgccctgatgaccagagcacactgtctttctcctctgccctctgagcacctcaagctgctgtgcctggcgctcttcttctgttctcccctcacagaattcacgttcctccacagtctcagagaacatctttgaggaaatggtctccccatatgggactctcacttctgtcagtcctgaacatcagtgggtgaggacagggctgggcttggccctcagagaggagaggagcacctgcctccggggagggtccctatcccaagaggctctgtccctaggctgggatggggcttcttggtctccacaggttcactctccaccagccagctcttcttcctgactcccctgtgtctgtgctgggcacctcctcctgctgcccaccaggcttggagtttgggaatcatctccaatacttttctctccctgtcctgcagctacctgtttgtttggtcttaacgggtcccccttccctttcctccctaccccagtgcccacagagaatatctaacagcaaaacgtacttttcctccactggactccaccctggcttggagcagatatggaattcccagttctgcccacagcctcctcccttagctcccgtccccagctgctcacccccaaacacccccatcctcctgccacagttttaaaaagtgttgcttggattgggccatcgcctgcttagaaacttaaatgtcttttgtggcttctcaaataaacatttaggcccttagtttgggaa

SEQ ID NO: 8205 - DNA, 1000 bp, Homo sapiens
ggggacacgggaaaggcccgtgggaataggcctttgaggggaagcacgctgatctcttgttctgcagcgcatgcttgggatggtatgcgcatgccttctctcactaagactaggactgcttacagaatgcgaatataagtatccttatttgggagaaaagtacattttcaagggctggtaaaatgacgtggaggaagggaggatccagggagccttctgaagagtattgtcaggatgtctcttctctttcagccacctggatatgtttcacattttgtttcccaaacaaggactagattggatcccagaagggaatggtttccttagtatacattccgaattcctttgtaagggaaaaatccacttcatctggtctaagaatacgtaagaacaaatgaaaatgttgtggctggagatgttcctgagttaatatcaggatgtttgcctgctggtttctgttttaccaaacaaaacatagctgccaattcatccatctgtaaaagtgctccttgtggaccccctcaagagaagtactggttattttatttgcagaaaacgttttattgggagttgtttactttctgtgactgaagtggggaacatgagggtccctttacggagccctcatattccatgtgtactctgtattttattgaggctgtttcccagtcagaacagcgtctctctttgtttgtcattccaaatctttcagtgtctttagagctctgagggccctggagagcctcacccaacctctcatccttccatggctgtccccacctctgtgcacttatgagtcaatgttgccgcacttcattacatgctgttcatattacagcattataagattttttcttttaaaagcctatcttcttcaatcgggtagtaagaccattgtgggttgaggcatgtttcatacttcccacataatcactccagacttaaaacagaaccggaaatacatgaaataaaaaattatttttctgttctcaaataaaaa

SEQ ID NO: 8206 - DNA, 1000 bp, Homo sapiens; identical to SEQ ID NO: 8205

SEQ ID NO: 8207 - DNA, 578 bp, Homo sapiens
tttcttatggctgcatagtattccatggtgtatatgtgccacattttcttaatccagtctatcattgttggacatttgggttggttccaagtccttgctattgtgaatagtgctgcaataaacatatgtgtgcatgtgtctttatagcagcatgatttatagtcctttgggtatatacccagtaatgggatggctgggtcaaatggtatttctagttctagatgagttcatgtcctttgtagggacatggatgaaattggaaatcatcattctcagtaaactatctcaagaacaaaaaaccaaacaccacatattctcactcataggtgggaactgaacaatgagaacacatggacacaggaagtggaacatcacactctggggactgttgtggggtggggggaggggggagggatagcattaggagatatacctaatgctaaatgacgagttaatgggtgcagcacaccagcatggcacatgtatacctatataactaacctgcacattgtgcacatgtaccctaaaacttaaagtataataataataataaataaataaataaataaataaataaa

SEQ ID NO: 8208 - DNA, 578 bp, Homo sapiens; identical to SEQ ID NO: 8207

SEQ ID NO: 8209 - DNA, 1071 bp, Homo sapiens
agacaataggggaagagatttttatgttttgttcactgctgttttcacagtatgttcaatggctcttggcacagaatagacaatattcgttgactgaatgctattggacattatctgtttattgaattagtgataaatattttaccctacgttgatataaatggacatattctacaggtaacaaccctttatttctaaagcatgatctcaatgtattataaattactgaagtagattagttcttttctttttttttttttgagacggagtctcgctgtgtcacccaggttggagtgcagtggcgtgatctcgtttcactgcaacctccgcctcccaggttcaagtgattctcccgcctcagcctcccgagtagctgggattacaggcatacaccacccgcccagcgaatgtttgtagagacggggtctcgctgtgttgccaggctggtcattaactcctgacctcaggtgatccacccacctcggcctcccaaagtgctgggattacaggcgtgaaccacctcgcccggccgattagttcttaaagtagtaatagacatctcccctccacctttgggaactgcctcctctagggagaagagtaccccgtgagttaggaagccaggtgatatggtttgaatatttgttctctccaaatctcacgtggcaatgtgacctcctgtgttggaggtagggcctggtgagaggtgtttggatcatggggcagatgcctcctgaatggcttggtgtcatcctgtaacaagtgtattcttgccctatttgttcccatgagaacctactgtttaaaagagtctggtacttcctcttctcgctctctctctctctcgcttctgtctcaccatgtgacatgctggctttccttcaccttctgccatgagtagaaggttcctggggccctcaccagaaaaaaatgctggtgccatgcttcttgtacagcctgtgggaccatgagccaaataaacctcttttctttataaattaccctagcctcaggtatttctttgtatcaacaacaacaacaagggcacacacccaaaaagaaaaaaaaaaa

SEQ ID NO: 8210 - DNA, 1071 bp, Homo sapiens; identical to SEQ ID NO: 8209

SEQ ID NO: 8211 - DNA, 1071 bp, Homo sapiens; identical to SEQ ID NO: 8209

SEQ ID NO: 8212 - DNA, 1071 bp, Homo sapiens; identical to SEQ ID NO: 8209

SEQ ID NO: 8213 - DNA, 8637 bp, Homo sapiens
cagactcctcctctcgtttatcctgttgggggcggaagtgagaaagcccttattcgtattggcttagatttgcaagcggcagttgtctatcaaatctatcaagtcgcccttagcgctcaggaagtacgacaccggaaggggtgggctttgcgaagatggcggcgctggtgagtttggtgtggtttcttcctcgcgtagctattgtggagttgtcctttgccttcagcggctggaggcaaactgttggtaccagggaagggtggtgatgaaagttgcttcagggaggcggcctccctagagttaccgttcctgtccggtaacccaaggggctggctttaaggcgagtctgtgaacccgagtgtgaaggccccgagtctgggtgtctgacggagagagggcagtttcccaccctagacgttccactttcctataatcctgaggaaagaatgacttttctttacgcctcctctcccttctgtagggggtgctggagtccgacctgccaagtgccgtgacacttctgaaaaatctccaggagcaagtgagtagtgtcgcctctggaataaattagtcacggattggctttgagtttgtgtacttcacctcaaaactttggtgattgagatacgtgaatgcttccaaaaaccttagagtaaaatgatgtaatcaaaaccttttcacgccagaattctaagtaattgattctgcacccaagggaatacaagaaactccaaaaagaaattatatgaatagttttcctttattcatatagctaaggaaaccagtgcttggaatggtaacatgacttgccctttgggtgcccaggtaatacacacttatatacagatgcttctcgacttaacgatggaggttatggcctgataaacccattgtaattcgaaaacctcataagtcgaaatttaggcttgatgccgctgcccagcatcacgagaaaaggacggtttctaccgaatgcatatttcttttacaccctcgtaaagtggaaattaagtcataagtcggggagttatgtagttctatgcattgtaagttcaactagtacaaacaaaattacagtgcttcagtcactactctctcagtccttttctcctccctgtggttcagtaaaagatggtctcttctttaagaagtggaaagtttttttttttttaaactttttgaagaaccatctctcctatgctttccgagaagtgagaagatagtactatactttagacagtgtttcagataatttttaggtggcattgtttagcttttgctcttcacagtttgcagacataatttgatataatctaatcacttgttttatttgggctaatttcaggtgatggctgtaactgcacaagtgaaatcactgacacaaaaagttcaagctggtgcctatcctacagaaaaggtaagatgtactcaaacagtaagcatcccctgacttaatgttctcagtagttctttcattgtatgtttattgtgtcttatatatcctaagtgctcgagcttcaaacataaatatgatccagtttctgtgctgaagtctagagggaagacaaagcaaagcaatagatgtaagtattaatagtagcagtcacattacagagttatgagtctccagccaaagagagggattaattaactgccagaagagcagagggattcaggacaggcttcccagaggaggtgataggattttgaggaataaatgggagggacagaaagaaggaacatgtgcaaaggcacaaaggcctgaaagtatggtgataagggaaaggagtaagtcatttttgtgataggatgtactttctgtgttatgtgtgttgggggtaggaaataagactggaaaagtcactctgaagattactgtaggccaactgaggagttactttcagatttcatctaatctaagacacttattaattgggacatatcacttattgtatatattaagaaaaaatgtgacaggccgggcatggtggctcatgcctgtaattccagcacttcaggaggctgaggctggaggatcgcttgagctcaggagttcgggaccaacctgggtaacatagtgagaccctacaaaagttaaaaattagccgggcatgatggcatgtgcctgtagtcctagccactcaggaggctgaggccagaggattgcttaagcctgggaggttgaggctgcagtaagctgtgattgtgccactgcattcagcctgggtgacagagcaagaccctgtctcaaaaaaaaaaaaaaaattgcttatgacataataccaagatgccagtgactgaaacatgcatcctgatttcagagatgttaaaatatgaaaaccatgtgcatcttaaaattgaaatatgcgcctgtaatcccaacactttgggaggccagagtgggaggattgcttgagcccatgggtttgagaccagcctgggcaatgtggtgagacctatctctataaaaaaaaattagctgggcgcagtggtgtgtgcctgtagtcccagctactcaggaggctgaggtgaatggatcggttgagcccaggaggtcgaggctgccatgagccacggtcgcaccatcgcactgcagcctgggcaacagagtgagactgtcttaaaaaaaaaaaaaaaaaaaaaaggccaggctaagaagaaaaggtggctcacacctataattccagcactttgggagattgtggcggatggatcacctgaggtcaggagttcgagaccagcctggtcaacatggcaaaaccccatctttactaaaaatacaaaaattagccgggcatggtggcgtgtgcctgtctgtaatcccggttactcgggaggctgaggcaggagaattgtttgaactcaggaggcagaggttgcagtgagccgtgatcatgccactgtgctgcagcctgggcagcagagcaagactccatctgaaaaaaacaaaacaacaacaattaaaatattgtagttttcaaatgaaggtctggtagaaccttctcagggattactggttgggggcaatgtggaagaacaactctggatctctcatccctacttaactggaaaactctggtattatctgtttttatatattgagcttttgtcctaagatatttaggccaaatattctatgggtaaatacaagtatgaaaatcattgtaataagagtcactgaaggagttttaagcacaggagttacagcagatttgtgcttacagaaagataactaaaaacagcattcaaaatatattcccttcttgtctttatcattcacttatgttcttattgtccatttttatttaaaaaaaatttaaatctttgtttttctctcatatgcttgtagctcagtttgaatttgacaatgcccaagcacgtcggaagagcctgcttctcaaattcttacctgtttttgtcctgggtaccatgcttttttgttttgttttgtttcgttgagatggagtctccctctgtcgccccggctggagtgcagtggcacgatcctggctcactgcggcctctgcctcctgggttcaagtgattctcctgcctcagccttccgagtagctgggattacaggcgcccgccaccactcctggctaattttgtatttttagtaaagacgaggttttaccatgttagccaggctggtctcgaactcctgacctcaggtgatccacccacctcggcatcccaaagtgctgggattacaggtgtgagccaccacaccaggccttgggtaccatgccttgaaccatttcagtgccttttggagatggatgagttgccagcatccttcttagatccctatatatttgtttatttattgaacaaatacatattaacttatctttttgaccaaagacttttactaggtgctttataggttacaaagttctttcacattatcttatttgggcctcataattattctttgtggcagggaggaaatgtacatattttactgataagactgaggttggcctggtgcagtgggtcacggctgtaatcccagtgctttgggaggctgaggcaggtggatcacgaggtcaggagttcgagaccagcctggccaacatggcgaaaccccgtctcttaaatcttaaacaaagatttaaattttttttaaataaaaatggacagtaagaacataagtgaatgataaagacaagaagggaatatattttgaatgctgtttttagttatctttctgtaagcacaaatctgctataactcctgtgcttaaaactccttcagtgactcttattaacaatgattttcatacttgtatttacccatagaatatttggcttaaatacaaaaaattagccgggcgtggtgggaggcacctgtagtcccagctacttgggatgctgaggcagaagaatcacttgaacccaggaggtggaggttgcagtgagccgagacagtgccactgcactccagcctgggcgacagagtgagactccatctcaaaaaaaaaaaaaaaaaaaagactgaggtcacaaggttaagtgacttactcaatatttgactaccaaacacctaattcagaacttaaactcagtttgtggactctaaatcctttgctctccttctataccacagtagtgttgatctcaagagcttagcatgttggcttaaagacatccagggatgaggtgttggagtcagattgagtttgaatcttagctctacttgtattactgtgttatcttggccaagtatttaacctctctgaaataggttttctcagggctgtgaagtttggaagatacataaaagcccaaagaaaaaaatgaaaaatcagtataatcaccactctgagataaccactgtggtaatatttttgagatttttaaaattataagaataatatatgcaacactttttcacactctaaagtacaccatttcttccttttcctcatctcaccctaggggtagcagttacttgtgtgttgtcttgtagacatttttctatgtgtataaaatgtattcatcatatccccccctacacacacacactttcacaattgaagtcatattacactttctacaacttgtggtgacatggatttaattcgatgtcattatatataaatcattgtttttacctgtatcatataattccattgtatggggggaaattggtaattactttgattaaattaatttaaaacttggcagtctgtggagacatttttgattgttagagcttggaggggccatccgtgggaagaggccaaggatgctgctggaaacctacaatgcccaggacagccctcaacaaaaaatgttctggcttcaaatgtcaatagctctgagattgagaaaccctgttatagtcttttttgggggggtagtttattgattttcctcttctcattgtcttctattaattttctgagcgttgtttctcttgtattagcataactttctcattggccttcttaggcatagctacttcttgagactattccagatacctaatatgaactgattgggaaaatcttgaacttggaaaaacatcccgtttaccctaggctttcatctggttctttggctaaaaccaaatctgtttttctttctgttttgttcaactcagggtctcagcttcttggaagtgaaagaccagctgctgctcatgtaccttatggatttgacccacctcattctggacaaagcctcaggaggatctcttcagggacatgatgcagttttgagactggtggagattcgcacggtatgaagcatttggcttcttggagttttaggtttctaaattttgagctccaagggtatcacacagtagctctcatttaagtgagtcttctcatgtttaaggaaaccaaatgagaaaaggtatttttctattcatttgctctactttgtacatattttaggtgccttatgtggcaccttaatatagggactctggtgtgtgcttcattttgggaaggaaatataatcctgattaactaccatgttgtaggttttggaaaagcttcgtcccttggaccaaaagctgaagtatcaaattgacaagctgatcaagactgcagtgacaggcagccttagtaagtgaggagaccatcatgaagttgtggggaccatcagaaagttccaaattttgtaaaattcattgggttatttatttcaggtgagaatgacccacttcgttttaagcctcatcccagcaatatgatgagcaaggtaaggggttgtagtattctcctgatttttttctgaggcagctatacctagatgagcctcttggtgatcctggataccctgggattctcttaggacttgattttccaacttgtgtgttagaatgctgagtttgagattcccttttttccctttttatattcccaccaccccagggtactccagctttgggttttcttctcacttatctcatgaatgcttcctaaatttgcagacattgtttcttttgtagttgagctctgaggatgaggaggaagatgaagcagaagatgaccagtctgaggcttcagggaagaaatctgtgaagggagtgtctaagaaatatgttcctccacgcttggttccagtacattatggtataaactttggctgctgcctcctcagcatgaactgtttctcttttctctgttcttggataaccctgcttattttcatcatgtagatgaaacagaagctgagcgggagaagaagcgtctagaacgagccaagagacgggcattgagcagctctgtcattcgtgaacttaaggagcagtactcagatgctccagaggaaatccgtgatgctcggcatccccatgttacccgccagagtcaggaggaccaacacaggtctgagcccttgcattagaaattattcctgcactctagagtcctgtcctcatgctttatactaatgtgactaagtttggtaccaagagaattaatgttacatagaaaatggagtgaaaactttgggatgatagtttctaagaatcaggagtttggagttcaggatagaaactaggaaaatttttaccccaactgtttagttcaaagcaaaagcagtacattgcaattcgacatgagatttgagggggaaaaaagcagtacaaagaggaatgtatgcagttccacatagtacaactttaagattctgtgtttcactgtcacagctctcacttttgtgcagaaggcaataaaggtaggtttttatagtgacattgtgagtgctagataagttcagggaaggaaagtagaaaagcagtgtaattgaatacagactcgtcaactttgctcaggtgcagtctttgcagttgatggatttgcatgaaaggacacgtttagggaaacctgcttatagagctgaaataaaaaaattttggtgtaatattttaaataatattgtggataggctatggattcatatctagcatgagggaagttctagcacagagcacatttcattgaggaagctcagtattgagcattcaatatgtccttactaaatactatgttgatctgctgtgaaacttcttgagaactccctgaacaagagatgagtagatacttgggcccaggttgtgggctggagctttccatctccatggtctgagcctgctggaaactgtctttctctggcaggattaactatgaggagagcatgatggtgcgtttgagcgtcagtaagcgagagaaaggacggcgaaaacgagcaaatgtcatgagctcacaacttcattcccttacacacttcagtgacatcagtgctttgacagggggaactgttcatcttgatgaggtgaggttgagatatggttgtagtaggatgtgactttcatgctttcagcaaaatgtatgtggggcttattaccatgaggaacttgggaagggatgctggctctcagaaccacagtgccattccatcacttctccatctgtctccaggatcagaatcctattaagaagcggaagaagatacctcagaaaggtcggaagaaaaaaggtcagtgaactgctgggacttaggtgatcaggtgcaaggtggggagtacaaattgagtctctttggatttgccattctgggtctcaccaagccctgtagtatctcttccatactgggcaataatctccttaggtgggcttttattttttgctttcctgagctggaaatcagcatcattcacaaaatgaatctctggattctgcctctaaggtcccacagctcctgttcaggcttccctaaatagaactggtaaagtgtcacttgaaggaaccattatcccatttcaattttattcctacttctcgtcttttgtcctgggaagatattcagggtactgcctaggagaccccacccctgtgagcccttccctctagatgtcctgttttcctgtccctttagcttttccaactgtcctttgcctcattcttggtttcccttcctttcaggttttcggaggcggcggtgattatgggtgtacatatttgtatattttttgtcatcctgagatacttctaatttcattgtatataggtggttttccctggaattcattaattgtttgctttggacatgtggaaagagccttactaataaaattgattttgcttatgaattaaagcccctttttgcacatgta

SEQ ID NO: 8214 - DNA, 132 bp, Homo sapiens
acgcctgtaatcccagcactttgggaggctgaggcgggtggatcatgaggtcaggagatcgagaccatcctagctaacatggtgaaaccctgtctctactaaaaaaaaaaaaaaaaaaaaaaaaatcagccg

SEQ ID NO: 8215 - DNA, 450 bp, Homo sapiens
agtcgttgggtttgggatatttttggtgagtggttggtgaaaagggaaattttttttggaagtgcaaaacatttgtattgttttctttgataatatatttttcccaaaaactaaaaattggttacgtcacaaaaagtattgagagacgaggctggtataatcaactctttcaacccatgttgccacaacttcctgtatgatttgttataatacaatacagattgagatattaacacatgaattttaggttttattagtgttatctgggctggccaccaggtggcataagtggttcaagaaacttgagcttggctgtaatcaaaagcaagatagaacctttccacatcagcaagattattcttatctccacttctctgaatgtttttcatttctttctgaaatagcatgaacataaggctgatctttggtcagttactgagggagtttgta

SEQ ID NO: 8216 - DNA, 5324 bp, Homo sapiens
aagaaaagcacattgtcatctttaatcctttccatttatttgcctcttgatagatgacctttatatttttgctttttgacaatttctacctgaggcatgatgtaactaaaatttctaacatgatagtggtagttctctggattaatttatgctcatggttttgctttgtttctcccttaccaaaatgctcttttcagtattacacaagaaaaagatcatgatttgcatcatgatgtacatagcaaatttcatgtatgatcgtgtttcctgttccatcacatttctggcattttttttaacccactgggacattaggatgtcataacataattggatgttagacataggttgagaaatcaagggtagtggtagatggaggctgacagacaccttccagatccactttagaggtactgagtattcctaaaccagttatgtaatttgcatgtggtcatatagctagttggtggccaaatcagggatacaacatgtatgtgagtatcattctatcatctatctatctacttattgacagataagaatatacttgctttgtgtaaatgattaccctttgattttgtggttgtcacaaacacatgaaactattcatggatggacctacctgtctgatgatggtggtagtgatgatgatgatgatgttatcctaggatataaccactattctttaacccttgaaactgaggtgcataaggtacaataattcgcccaagctcacatagataacaagtttgcagggctagaaatcttactgagtttcatctgaaatgcagactttcagagagagagagagaggatgcttagtgtgccatatcttacgtctaacaatggctaatgaatctttaaagagaggactactccctagacatgagcgtgttaggactctgttcccatttctacacatttatgcttatatgagggccattgattggccaattttagcatttctttgtactcgtgggatgatatttaaaatatttaacaactgccaggcacggtggctcacgcctgtaatcccagcactttgggaggccaaggcgggcggaacacctgaggtcgggagtttgagaccagcctgaccaacatggagaaaccctgtctctactaaaaatacaaaattagccagatgtggtggcccatgcctgtaattccagctactcggaaggctgaggcaggagaatcacttgaacctgggaggtggaggttgcagtgagtcgagatcgcaccattgcactccagcctgggctacaagagtgaaactccatctcaaaaaaaataataaaataaaataaaatatttaacaactaatatgtcatgagcattgaccaatcaaaatagatgcaatcgtaggctgaactggagtctaagaggcccttgctttgccaggtaccttttagctaacaggtcacgagtatgtctggggagttctgggatgaggggctagtgcagctaggacagaagttatttaccaacttgtatgaaaatatttttttagtattttaataaccaatgcagctatcctaatgtaatctgactaaatattagcacagcatcttgcccagcaagccaagacaacagtggttgttgtgatgttcataaggacatctcttcttggtgtttatgcatgcaatacatgagagttacaagattcctgggctaggcacagtggcccatgcctgtaatcccagcactttgggaggctgaggtgggtggatcacctgaggtcggaagttcgagaccagcctgaccaacatggagaaaccctgtctttactaaaattacaaaattagccgagcatagtggtgcatgcctgtaatcccagctactcgggaggctaaggtaagagaatcgcttgaacccgggaggcggaggttgtggtgagccgagatcgcgccattgtacttcagcgtgggcaacaagactaaagctccgtctcaaaaaaaaaaaaaaaacaaagagttacaagattcccgataagtgaatgaacatgttattgagtcatggtgcaaaggcaaactatatgcatcaggcacatttttttctctcgccagcctcccaggaagttctcaaattgtgaatatttggagttagagagagagagagaatgcttagtgtgccatatcttacttgtgtatctatctcttttctaagctatgaatacctagaaggcaagggctataacctcatttctatcccagtcccctagcacagtatgtggcacagagcactcaatagttattgaacaaataaaagcattcaaccccactgatgaaaagccattctatttgtaatctagagacataaattaaagatatcagtttcctaatcttgcagaagtcattaacctagctgcaagattacttctttataaaacaatgaaaaacagtacagtgtcaccattacaccaagtgtgaggccaactggaaaatgtttataacaatcagatttgcaatgaaagaaacctggaagcaaacccagttatttgaatgaattattccccttccacctttcttgtattttatgcataatgacatgaacctttcaaattcagctttctagaatgcctgtaagattcagttatggggccgggcgcggtggctcatgcctgtaatcccagcactttgggaggctgaggcgggtggatcatgaggtcaggagttcaagaccagcctgaccaacatggtgaaaccccgtctctactaaaaatccaaaaaaaaaaaaaaaaaaaaaaaagattcagttatggtcaggctggcagtctgtataattgtttcaaatgctatgttgcatctttttgcaatagtacatcaatatgtcaggatggatactacaaacttggttattgctataatcctgaacttttaacctatatgtaggatgagcataacccgtagactaggatcaatacacaattgtgtctcctgttactttttttttttgaaacggagtctcactctgttgcccaggctggagtgcagtggcagtgatcttggctcactgcaacctccgcttcctgggttcaagtggttctcccacctcggcctcccgagtagctgggactacaggtgtgtgccaccatgcccagctaatttttgtatttttagtagagacgaggttttaccatgttggccaggctggtctcaaactcctgaccttaagtgatctgcctgccttggcctcccaaagtgctgggattacaggcgtgagccactgtgcccagcctcctgttacttctttaatatttattttgtggggattaccttgtcctacacctagatgaaaatctaggccgtttccatgacttttctgcttgcttttaggtctctaaagtttctgtgagttgctaatacaatctcagcccagaaactttttttttttttttttgagatggagtctggttctgtcgcccaggctggagtgcagtggtgcgatctcggctcactgcaacttctgcctcccgggttcaagcaattctcccgcctcagcctcccaagtaggattacaggtgggattacaggcacacaccaccatgcccagttaatttttgtatttttttagtagatacggggttttaccatgttggccacgctggtctcaaacttctgaccttgtgatctgcccgcctcagcctcccaaagtgctgggattacaggcatgagccaccgcgcctggcccagaaactattaatagaatgctaccctctagcatgctagcaatagtagcaatctaaactctcgggttttaagttaaaagtaaactgttttctgcttccaagctgggctgttgcaatgctagagggggcaaggtacttttctgctttgagaccctcctctgcaattcccttaatgtgggtaatatatttccttcagcttgccacttgcatgttgtcccagtcttctcagagctccatgccacacatattttaacaaggattctctggcggagtacgcctgaactcccagatgttcctcttggataggactgaaatacgggcacctctcactcccacgtggctcacttctagtccatggaaaacactcatgcaggtctttgccctgaaaaactctgagactacagagatcgaatcctgtctgtataccactggcatggggcaccttggcctcttcaggaatgacccagatacccctcttctgggtcccgcaacttcaaggaacacattccttttctgaatagcctgatcaatgtcccttcacttcgctcaacttgaagaatgtagcatctctgtccacatacttggcagtggggtaaggagcaagatggagcaggtgttatcatggcaacaacttcttccaaagaatgtctttcaaaatcctcttttcctccactacatttaccctttcatatttgtgaaatggatgagcaagcttccaacaaagggaatatgagaattataaaaatgattttaagaattttttggagcctggacaacatggtgaaaccccgtctctactaaaaggacaaaaattagctgggtgtggccatgcgtgcctgtaatcccggctatttattctctggcataaaaatcacttgaacctggaggcagaggttgcagtgagccaagatcatgccaccgaactccagcctgggcaacagagtgaaactccgtcgggaaaaaaaaaaaaatttgttttggggaaaattctgcatatggaaatctgtcttatacacacttttctatgtactgtttagctgatacacgtttttctatctactgtttatctgatattgccaatcactgaaaaatgcgaagagtcaaattttaatatctagttacacacaggtatgcttttgttttgttttatacctggaatgctttatatatcagtaggctatataaaattgtcaaaggcatttatgtactttgtagtgattttaggtatgggtgttgggtgctttcatttgtcaccacaaacaaacatattaccacagagtttagatgacacagtattagagtatggaatcaagctcttgtcttttgaagttgatgttgtgacctgtgtaaaaagaagttttaaaagtcaattatttaaaaaaaaaaaaaaaaagtaaagaaaagaaagaaaccagcctggccaacttggtgaaccctgtctctactgaaaataccaaaattggccgggcctagtatgcacctttaatcccagctactcgggaggctgaggcaggagaatcacttgaacccaggaggcagaggttgcagtgagccaagatcgcaccactgcaccccagcctgggtaacagagtgagactctgtctcaaaaaaaaaaaaaaaaaaaaaaaaaaaa

SEQ ID NO: 8217 - DNA, 84 bp, Homo sapiens
ctcactgcaacctccgccacccaggttcaagcgattctcctgcctcagcctcccgagtagctgggattacaggcacctgccacc

SEQ ID NO: 8218 - DNA, 2454 bp, Homo sapiens
cgagcgcggaggaaaggggtgaagagccggcccccctcctgaagaagactcttcagatccccgcgcgcggggaccgtttggacgtaaccgcctcccgtctcggtgcccgtccatccagccggggttggccctgccactgtcgccacatcccgcctccaattcccgccccgcttccgctcggctttgacaccgcgcttcacagccaccccggtccattcgacccgctccgcacctcacacacggcccgccggcggccgccgccatcttcgcgcgcccgctcgccctaaccccgcccccagacgccatgcccacgtgaccgctcgcccccggacccggagcgtgggcggggatttcgtcacgtgacgttgccgcggggcggtgccaagatggcgaggcccaaagaggtgaggagccggcagcgggggcggctgtaactgtgaggaaggctgcagagtggcgacgtctacgccgtaggttggaggctgtggggggtggccgggcgccagctcccaggccgcagaagtgacctgcggtggagttccctcctcgctgctggagaacggagggagaaggttgctggccgggtgaaagtgcctccctctgcttgacggggctgaggggcccgaagtctagggcgtccgtagtcgccccggcctccgtgaagccccaggtctagagatatgacccgagagtgcccatctccggccccggggcctggggctccgctgagtggatcggtgctggcagaggcggcagtagtgtttgcagtggtgctgagcatccacgcaaccgtatgggaccgatactcgtggtgcgccgtggccctcgcagtgcaggccttctacgtccaatacaagtgggaccggctgctacagcagggaagcgccgtcttccagttccgaatgtccgcaaacagtggcctattgcccgcctccatggtcatgcctttgcttggactagtcatgaaggagcggtgccagactgctgggaacccgttctttgagcgttttggcattgtggtggcagccactggcatggcagtggccctcttctcatcagtgttggcgctcggcatcactcgcccagtgccaaccaacacttgtgtcatcttgggcttggctggaggtgttatcatttatatcatgaagcactcgttgagcgtgggggaggtgatcgaagtcctggaagtccttctgatcttcgtttatctcaacatgatcctgctgtacctgctgccccgctgcttcacccctggtgaggcactgctggtattgggtggcattagctttgtcctcaaccagctcatcaagcgctctctgacactggtggaaagtcagggggacccagtggacttcttcctgctggtggtggtagtagggatggtactcatgggcattttcttcagcactctgtttgtcttcatggactcaggcacctgggcctcctccatcttcttccacctcatgacctgtgtgctgagccttggtgtggtcctaccctggctgcaccggctcatccgcaggaatcccctgctctggcttcttcagtttctcttccagacagacacccgcatctacctcctagcctattggtctctgctggccaccttggcctgcctggtggtgctgtaccagaatgccaagcggtcatcttccgagtccaagaagcaccaggcccccaccatcgcccgaaagtatttccacctcattgtggtagccacctacatcccaggtatcatctttgaccggccactgctctatgtagccgccactgtatgcctggcggtcttcatcttcctggagtatgtgcgctacttccgcatcaagcctttgggtcacactctacggagcttcctgtccctttttctggatgaacgagacagtggaccactcattctgacacacatctacctgctcctgggcatgtctcttcccatctggctgatccccagaccctgcacacagaagggtagcctgggaggagccagggccctcgtcccctatgccggtgtcctggctgtgggtgtgggtgatactgtggcctccatcttcggtagcaccatgggggagatccgctggcctggaaccaaaaagacttttgaggggaccatgacatctatatttgcgcagatcatttctgtagctctgatcttaatctttgacagtggagtggacctaaactacagttatgcttggattttggggtccatcagcactgtgtccctcctggaagcatacactacacagatagacaatctccttctgcctctctacctcctgatattgctgatggcctagctgttacagtgcagcagcagtgacggaggaaacagacatggggagggtgaacagtccccacagcagacagctacttgggcatgaagagccaaggtgtgaaaagcagatttgatttttcagttgattcagatttaaaataaaaagcaaagctctccta

SEQ ID NO: 8219 - DNA, 309 bp, Homo sapiens
ggtggctcatgcctgtaatcccagcactttgggaggtcgaggcgggcggatcatgaggtcagaagatcgagaccatcctggctaacacagtgaaaccctgtctctactgaaaatacaaaaaattagccaggcgttgtggcgggtgcctgtatccccagctacttgggaggctgaggcaggagaatggcatgaacccgggagacagagcttgcagtgagccgagatcgtgccattgcactccagcctgggcgacagagcgagactccgtctcaaaaaaaaaaaaaaaaaaaaaaaaaaaaaaaagtgggg

SEQ ID NO: 8220 - DNA, 306 bp, Homo sapiens
tttttttttttatttttttttgagacagttttgctcttgttgctcaggttggagtgcaatggcgcgatctcggctcaccgcaacctccacctcccaggttcaagcgattctcctgtcccagcctcctgagtagctgggattacaggcatgcgccaccatgcccagctaattttgtattttgagtagagacagggtttctccatgttggtcaggctggtctcgatctcccgacctcaggtgatctgcccaccttggcctcccaaagtgttgagattacaggcgtgagccaccatcccagccttgttg

SEQ ID NO: 8221 - DNA, 6149 bp, Homo sapiens
gctccctggcattgggcagtgttacagtgcactcttctgaacctgaagtcagaattcctgagaataatcgtgagttgggaggggccatggagggtgtgagggtgagcagttgccggccgcctggggatctagagagcacccagcccagcctgcagtttggggctgttccccatctcgtgtatttgctgctgcttcttccttcggctcattttgaccctgtctgcagctgtgaagttgtcctgtgcctactcgggcttttcttctccccgtgtggagtggaagtttgaccaaggagacaccaccagactcgtttgctataataacaagatcacaggtgagttgcttctcctccttcctgattgcctaggttgtggagggattatcatgcctggattctacgatccagactttgtgcccttatcccagggcacaccctggggctgaagtcctcatggccttcctacccccctttctgggggaagaggagagcacttgcgtaccttggatgcccccttcatcagcctcccttagctctccagttcactctgtccttgctcttgcctcctcttgtggtagcttcctatgaggaccgggtgaccttcttgccaactggtatcaccttcaagtccgtgacacgggaagacactgggacatacacttgtatggtctctgaggaaggcggcaacagctatggggaggtcaaggtcaagctcatcgtgcttggtacgtgccccatgtcttctgggtgggcctggagttagttacttctcatagcaggctctgctgcactttggagctctttgatggtgagaatacccacaggtgggctattcagagtcctggagctgccagagagggagatgagcccctggttaggtggcagccaggggcatggtgagagtaggaggcttgagctgagtagttgggggtaccattgtagttggttacttagactcaagcagcccccaccctgtactcagcaccttctgtctttctcttccacagtgcctccatccaagcctacagttaacatcccctcctctgccaccattgggaaccgggcagtgctgacatgctcagaacaagatggttccccaccttctgaatacacctggttcaaagatgggatagtgatgcctacgaatcccaaaagcacccgtgccttcagcaactcttcctatgtcctgaatcccacaacaggagagctggtatgtatggggtggtggtgaaagatgtgtgggggatgcagttatagaaccccaaaaggtgggaggaagaacaggcaacagggtgaacttggaactggggtcaagagacattaaaaaatgtctattttgcttcttcagcaggaagccaatttgttttccttcctcaggtctttgatcccctgtcagcctctgatactggagaatacagctgtgaggcacggaatgggtatgggacacccatgacttcaaatgctgtgcgcatggaagctggtgagagttagggcttgagcccagacctggggtggggattggggtctgcttttcatcctgccattggtgatactgtaggtgccgtgagtgagtatccccgtgcctgacttcttatttgtgtctcgcagtggagcggaatgtgggggtcatcgtggcagccgtccttgtaaccctgattctcctgggaatcttggtttttggcatctggtttgcctatagccgaggccactttgacagtaagtatctgcccccagaggctctcctttgtactgcccccatcccagggcctggcatgggtgtcatctgagtactgaccctgatactgtgctcatgtgtgtgggtgttgtcccctggggaacactgatcacccatctaacaccaagagctgggggcctgcccctccatcttcccaagccatgctgtcttctgtcctgctgacactcatgatcccatttcttctctttcaggaacaaagaaagggtgagtgaggtgctgtcctggggttctccaagtttgagagcatggatgcatgtggtttgaagctgaagtgggcctaggggaatgggttgaaggcagaagcaaccagtttggagggaaggcatttggatatccagccctttctctgtggccttggccctgggtctgtcctgttaccccacccatacctgtctgctgcgcactctgtgcttctgtagcattctcgcttctggcctttaaagttggcaaggggaggttaataagcacctaggtggctgagtgtctctgtcttctggcttgttcacaggacttcgagtaagaaggtgatttacagccagcctagtgcccgaagtgaagtgagtatgcctcccctgggcaggggtgggccacctggggctggagtgaggagatttctagcccatgtttatgtgttttggggattatcagctaaagaagactattgagagttgactggatgttttatttctgcagggagaattcaaacagacctcgtcattcctggtgtgagcctggtcggctcaccgcctatcatctgcatttgccttactcaggtgctaccggactctggcccctgatgtctgtagtttcacaggatgccttatttgtcttctacaccccacagggccccctacttcttcggatgtgtttttaataatgtcagctatgtgccccatcctccttcatgccctccctccctttcctaccactgctgagtggcctggaacttgtttaaagtgtttattccccatttctttgagggatcaggaaggaatcctgggtatgccattgacttcccttctaagtagacagcaaaaatggcgggggtcgcaggaatctgcactcaactgcccacctggctggcagggatctttgaataggtatcttgagcttggttctgggctctttccttgtgtactgacgaccagggccagctgttctagagcgggaattagaggctagagcggctgaaatggttgtttggtgatgacactggggtccttccatctctggggcccactctcttctgtcttcccatgggaagtgccactgggatccctctgccctgtcctcctgaatacaagctgactgacattgactgtgtctgtggaaaatgggagctcttgttgtggagagcatagtaaattttcagagaacttgaagccaaaaggatttaaaaccgctgctctaaagaaaagaaaactggaggctgggcgcagtggctcacgcctataatcccagaggctgaggcaggcggatcacctgaggtcaggagttcaagatcagcctgaccaacatggagaaaccctactaaaaatacaaagttagccaggcatagtggtgcatgcctgtaatcccagctgctcaggagcctggcaacaagagcaaaactccagctcaaaaaaaaaaagaaagaaaagaaagctggagctggtggcttaggccatcacccttcccttggctggaactactggacagacccttttgagatgtgcctgtggtgctgtggagatgtgtgtagtggtcttagctctttgttgagcttgtgtgtgtgttgtgtagtcttagctgtatgctgaaattgggcgtgtgttggagggcttcttagctctttggtgagattgtatttctatgtgtttgtatcagctgaatgttgctggaaataaaaccttggtttgtcaaggctcttttttgtgggaagtaagtaggggaaaaggtctttgagggttcctaggctcctttgtacaacaggaaaatgcctcaaagccttgcttcccagcaacctggggctggttcccagtgcctggtcctgccccttcctggttcttatctcaaggcagagcttctgaatttcaggccttcattccagagccctcttgtggccaggccttcctttgctggaggaaggtacacagggtgaagctgatgctgtacttgggggatctccttggcctgttccaccaagtgagagaaggtacttactcttgtacctcctgttcagccaggtgcattaacagacctccctacagctgtaggaactactgtcccagagctgaggcaaggggatttctcaggtcatttggagaacaagtgctttagtagtagtttaaagtagtaactgctactgtatttagtggggtggaattcagaagaaatttgaagaccagatcatgggtggtctgcatgtgaatgaacaggaatgagccggacagcctggctgtcattgctttcttcctccccatttggacccttctctgcccttacatttttgtttctccatctaccaccatccaccagtctatttattaacttagcaagaggacaagtaaagggccctcttggcttgattttgcttctttctttctgtggaggatatactaagtgcgactttgccctatcctatttggaaatccctaacagaattgagttttctattaaggatccaaaaagaaaaacaaaatgctaatgaagccatcagtcaagggtcacatgccaataaacaataaattttccagaagaaatgaaatccaactagacaaataaagtagagcttatgaaatggttcagtaaagatgagtttgttgttttttgttttgttttgttttgtttttttaaagacggagtctcgctctgtcacccaggctggagtgcagtggtatgatcttggctcactgtaacctccgcctcccgggttcaagccattctcctgcctcagtctcctgagtagctggggattacgggtgcgtgccaccatgcctggctaatttttgtgtttttagtagagacagggtttcaccatgttggtcgggctggtctcaaactcctgacctcttgatccgcctgccttggcctcccaaagtgatgggattacagatgtgagccaccgtgcctagccaaggatgagatttttaaagtatgtttcagttctgtgtcatggttggaagacagagtaggaaggatatggaaaaggtcatggggaagcagaggtgattcatggctctgtgaatttgaggtgaatggttccttattgtctaggccacttgtgaagaatatgagtcagttattgccagccttggaatttacttctctagcttacaatggaccttttgaactggaaaacaccttgtctgcattcactttaaaatgtcaaaactaatttttataataaatgtttattttcacattgagtttgtttaaatcctgaagttcttaccttaagagaattgggactcctagagtgattggacattcaaaatattcctgatagtcttgttaattaagagattaggatatctttccattaccttgataattacgttttaatttagcttttttcattggcctgtgtttaaatgcaaataaccccacaatggacatttcctatgttaaagtgacatttaggggataaaaaatgagagcagttccatggattttggtgtttcccctgagacatgaactcagcataatctgggataaaatgattgagtgttaaggatgtgtttgttgttcctgtcgtttttttattttcttcaaagtatacaacatggtttgatatgcacatacatttgtgtaatgattgccatggtcaattaacacatcaccatttttgtgtgtgtgtgtgtgtgtgtgtgtgagggagtcttgctccgttgccaggctggagtgcaatggtacaaccttggctcactgcaacctccacctcctgggttcaagcaattctcttgcctcagcctcctaagtagctgggactataggcgtgtgccaccatgcccagctaatttttgtatttttagtagagacggggtttcaccatgttggccaggatgatctcgatcccttgacctcatgatccgcccacctcggcctcccaaagtgctgggattacaggcgtgagtcactgcacccggccacatcacctcccatgttctatcttacgtattcagaacttgttcatcttgtaactgaaagcgtgtaccctttgaccaacactgtttttcctgtcttaacaggatctacagatcaaggacaggggaggggatagtggaggaaaacggagttagtctgtttctaaatgaggggacagtatgtttcttggggcctgaggacagcttaataaagtagacaaatgaagaaaaacaacaatttgcattaaaaaatatccaattctttagcttt

SEQ ID NO: 8222 - DNA, 3667 bp, Homo sapiens
tcagcttcgcatcgaaggtgccactttactctatattcataagctgtgccatgtcttctttaccagccttctcgagactgcaagagaatttgagatcgattttgcaggcactgacagcggctgctactctgcctttgtggtctgggcaagatcagccatgggcatgttcgtggatgcttttagcaagcaggtgtttgatagtaaggagagcctctctacagcagctgagtgtgtaaaagtggctaaggagcattgccagcaactgggtgatatcggactggatctcaccttcatcatccatgcccttctggtgaaagacatccaaggggccttgcacagttacaaagaaatcatcattgaagccactaaacatcgcaactctgaagagatgtggaggaggatgaacttgatgacgccagaagccctgggtaagctcaaagaagagatgaaaagttgtggggtaagtaactttgagcagtacacaggggatgactgctgggtgaacctaagttacacagtggttgctttcaccaaacagaccatgggcttcttggaagaggccctgaagctgtatttcccagagctgcacatggtacttttggagagcctggtggaaatcattttggttgctgttcagcatgtggattatagtcttcgatgtgagcaggatccagagaagaaagcttttatcagacagaatgcatcctttttatatgaaacagtcctccctgtggtggagaaaaggtttgaagaaggtgtggggaaacctgccaagcaactccaagatctgaggaatgcatctagacttattcgtgtgaatcctgaaagtacaacatcagtggtctaatgcttgggtctgtttatatgtgtatatatgcagagagagagcttatatattatttatatttatattaagttgtattagcatactctatagtttcaaacacaacttgaaaattaaaagtgccctcttaaaaatacaaaaatcaaaaagaggaaaataagttaaattaagcccaagtaacaaaaatactggaattattaaaacgtatagtatgctagctatccttttaaattatgctaattctcttcttctgaaattatggtcacactatatactatagcatttcggttttatcctttgataaaacttttcttttttcttttttttttttgagacagggtctcaccccgtcgcacaggctggagtgcagtggcaaagtctcgactcactgcagccttgacctcccgggcccaggtagtcctcccacctcagcctcccatgtagcaggaaccacaggcaggcaccaccatacccagctaatttttgtattttttgtagagatggggtttcgccatgttgcccaggctagtcttttctttcttctttttttttttccccacagtatatattatacagcagtcataatatctataaatacatagagtttatgttgtgaagtttcccagttcactgaaatgttaggtttcctaaagggtacagtgccgtataaaacaacctgcctcatatatttctcctcaaaacgttggactatttgggaaaaggaaaagagttgggaaaattggttttaaggtaagttttagtcaaaagaattctttcttgaaactagctggtttgtggattcagatactctgatccttacagaatccaagaggaagctttcataaaaacaattcagcaaatatttccaatataatttgaatggctaattttcagttgctaattaattagcagctttgtaatacttgatttgggagcatttacttggaaatcctaaggactataataaaagttttcaacatatttctaaattgtgtgagtttccagctgtagcttttgtctttgtcacattttaaaaaataataagcaagacacattggggacactggcagcagttgccaggttttagctgccaccgcttcagtatgagatatagctgtcccatcttcccccattcagggtaggagatatagtgacccagacttcatgcaaatggaaaaaaagttttaactgaaatatttatttagatttcagggtctagatggatgggaaagtagaaaaacatatgcaaatctcagtgttctcactatgaccactctgagcagagatttggttttgtttccttttgtaacaaagtgaaaacaggtgagacaatgtgcccaaaacaaagggaagaagagaaccttctgtgactcctaaaatgttccatgctgcatttttgtttcattttttatttttccttgctttgtttttaaacatgaatataatgcttacttcaaattgtttagtaaaacaaaataactaaagaaatgtgagcttcccaaggtttctaaactatcgctgttgtatattctatagcgttccttattctttgagggaaactgtgcttgctgtgatccattttgtctctagcttctagttgtgattcttgtccataagcaccaaatttgatgcccatgatttcaaaaggtcatttcttttatctgaatgaaaatggtggtactaagactgtgaaaattatgtgaaacctaaagtagttgccaaagtggctcagggttgtaaaattcattgacttaattattcatgtgccagatcaacccctttattttctctttagctgtgcatatttaaaatattggaaagtatcagatttacagattttctttgactaatttttttcacataactttaggattttcgaaagttgtaaccataactggatatcttagctgagcaaaggcggttataatttgtctttttaagatcactggaaattgataaaattttgtgataattatgattattctgtgccatttacagtttctaatactatactgtatgaaatatgtataaatatatgatgctgagtctgtggaatgatacttctgaaatcaaaattcctcataaggcatgaagttgtaaaaacttgaatgtgtatagttagatatttaaatggttgcttcttcatagaattgtctgctttttaaaactggaagtacaggattttcttcaggtaaaatctgtgtgttccaattacagttgtagctgaaggaagtatgctttggtgagtcaattagtatgggaacttgactaaagacccccagtgttgtaacgtacctttgtacccagacaaaacaattatgttacattcctcaaagtggcatgggctttcttctctaattcttctgttttattagacccaagacaagttctaaaaattgaatgcaatgagagattgtccagaaatgtaatatatactaaaatataccacttaagcattgattgccttttcttgtttgcttcaagaatataaaacttgttacttgagcttggaatcatgggcttgattgaattaattactcttggggaaaaaagacaccttgtggcattaagtcttgctttggttaaagccttatttcacataattgctaaaaactcatttttgtttaatatactacctatagtttaattatcggcacttgtattttgtaacttgatatcttacctaggattgggaatttgggacatgacatgtactataaaagtcagtctatgtacatactgcttattgatgtgctgtgatatgagggaatctgaaatgtttcataaaaataaagcttaaaaattgtcttacactggataaaa

SEQ ID NO: 8223 - DNA, 87 bp, Homo sapiens
agcctcctgagtagctgggattacaggggcccgccaccatgcccggctaatttttttatttttagtagagatggggtttcaacatgt

SEQ ID NO: 8224 - DNA, 17032 bp, Homo sapiens
ttttaatacctatttataagtatttattaaaatgttttaatgctttaaggaatatcaaaatttgtgaacagccaaccagtctaaaacgaaaagggctgctaacagtgttatgaatggtgaacaactaaaactctcatacattgctggtaggagtgtaaactggcagaatttactaaagctaaacagaaatataccccgtgactcagcaattccattcctgtatatatacccaacagaaaagataagaatgttcttagcagcattatgcttaacagccccaaactggaaataattcaaatgtccattaacattagaatggatgaataaattctagtatattcatacaaatgcaagagcaatgaaaatgaactcctgctatacataggaacaaagatactacattataaaattaaaaaataatctgcgacgatggggtgaaaacagtggggacctctggaggtggtgagggtcatgggtatcaactgggaacagacacctataggaagccttctgtggcaatggaagtgttctctaacttgatccgggtggtagttacacaggtgaacactgtaaaagtttacccagctgtgcacttaagatttgtgcacctgtattacaacaaagtgaaggaaaattgcaacaagaaaaaagaaaacttgtgaacaactgtgttagggctatgccaacagcatgtacagccacaagacaaaaagcaaactgataaaagtctctttgtcctttccctataacatggaaaatattttttttaaaaaagattacttaaaatgcacaaatggtattccttttattataatgttttaaacttggcttaaagttcaaaatactatttccagataactttccactgttacatcaactaggcaactttgttatgtttatgttatatgtatcagttacttatcagcacagaattttaaccactctgctaaattttgagaaaacagctaaactcaatataaaatttggcctacagaattatagtggctatttgttactaaaaatattccaaaagaaatttacttattttactatattccatattctttaacttaaaatctgctgccactgtttagtaaaagtgggacaaataaaattctttaaaatatagaaaatacagttcctgttaagattttgcaaacaaaaaaattaataaataatacaatttgagtactctaaaacaatatactttgtagtctagattgtggttttggtcagtatgtctgacactatgaagatttacatcagttcagggaatgagttctaatactattaataaatagtcaatataaccaaacacctgacaggattccccatatgaatatttttaggaaagtatacaaataaaaagattaacaggtttttaaaatccttaagagcaagaaagaacaaaagtatctaaaacttatacacgacaggcagaacctgggttacagtatacctaaggcaagagtgaatgtagcaccctgagacacaaaacatcttaaaattacaatcttatatgcgtatatataaaataggacactttctattggttatgtgaactagattataacctacaaatcttagtattaaccagaacttcctgactggctgacatagcacattagtgagataatacaggtggtacttgagactttgaaacctttttcaaagactttcttcgcttttgactttgatgctgtcaccttcaaggcaccagtccaagtgctcattaatctgagactccagaacttcattctgacaaactgggcaattaaccattttgctctgactggatgaactgctggaattctgagctgtggttgtactatactttggatcattaccactgctttttatttgctctttcttgataaaaaaattgtcaaaaacagtcttatcttctagcctaggtcgtttatttgggaatgtatcttcagacccactcacatcctgggatggcatcacagatgctgattccgttacttttgaagaatttcttagggatatcttagaagatgaaacccttctctgagaactagaagagactgagtttttagggatgttgccaactgttacacttatccttggagatccattcacacctctgaaagccttttggttggcaaatgatactctaggaaagtagttgcttagaacattttggtgactgttactaacagcaggggagaccagatgagaatttttacttgaaccattctgttcaaatttcaccttgattttagaattaggtcttacagcatttgctgaatggttttgatttaaaagatcttgggttttattaatggcatgtgaagtgatcagtttcccaggtgaaggtaaattgcttgtttctcctagaacatatcctttcccactaaaagggattactagctgggcctcacctctgttgggtttatctgccaaaaaagcaaagaagattgttatgtaagtgcctcaactcaaaagaaatacagtaacaaacattaaactaatgtacagttttctcaaaatgaagaactagtattttattccatcttacatccatacaatcctattaatgggaggagggcaatcttcagaattcaggagttctgatattgagagaatataaaggataaaaaaaaattctctcatatttaaataaagaatcttatcatgccaaagaccaacaacaaggcaacatttaccttgaaaattgcttagtgtcctttatgtgtaattccaggagggaaaatctgctgcctcattcttatctttccttctactcacgaaaatgaagatacggtctttccatatcaattcatctatagctctttcactcaataattaaagatttgggaaatataacctatgttcttgggtcaacaacttcccaagggaagaagcatcttcagtaactctgaacttcacaggaaaagggtaaatcttgaagatgaagtactggcaaatatatgtcatatccttttcccattctttgaatgaacatacatacatcaatagagtcacttggatagaatccagctgataggaaggggtgtagttaggacgtatattccgggcattgttacttgaattattgtttttattttgacaatctttttgccttctgtttcctaataactcagtgagtcaagatagggaaaggaactttacctcaaatattatcagagattgaattttgtttctttgaataaaaagaaactgaaaaaagttaataaaaataaaaatatccatggaaactattcctacttttacttacttctgtacagagcaaagtctgttttcctaccatcatttcatggacagtgggattttttccttaagtctacacttgaagacttctacaccagaaacgatccttaagtttatcttaataccagttctctgaaggacagtattgtctttacatcatagctatggtcacataaaaatcagaagaatatacacgaaggtacctttattctctgcggccaatactggttcctttcctagttttgcctttcctttgcctttttttgagtaattctctggttccttgatttttatgtaagtgcctccacaggttttctggtgctcagcccaccaatagtcatgagcagagggttccctgttagtagctcgtttgacatagccgtaatacggtggcctgtgctggcacggcccattgcagcgccaccagtgtcgccgatactcatccacctcatcgtgaaaagtatggtatacctgagtggagacagaatttttagtattcaataagcaagttaacaactgcaagaaaacaatttacataagcagtcttttttttttttttttttttttttaatttttgaaactttcccagagctttctgaaaagttctattttaggagagaaagcaactatatttagtttctgttcaaaagttgattttaatgggaaacagcagcagttaatacttcataaactgtgtaaagatagatgcacatgggattagaggacaaaaaaatcttttaaaaacaaaaccacagaaaatcttcatgaacactaaaagtttcagaaatcaaatttgtaaatgatcaaaaattaggataaagataagattttatgtaataccatactaaaataagaatcattcccactgctaaattgaagttttccctataagtaaaaatagcaaagggttctaaaggactacattactccctataaatgcctgactgacgctaacaacacaagtatcttacccagtgaagcttctgctaagctcactctccacattctccaagttctgtgcttatgtctctgtaataagccttatgaggtaccattttatctgtttataaatatttctattaccagactgaaaagttctccaggatctgaatgttttaattttttgtgtccctagtggctaatatagtgcttttggcaccaagaaggtgctcagtcagaaaagcatcattcattgagtcaaataaaattctctgaagtgtgcttttcaggccttaagtaggatgccttctttttcaccctctagacaaaaatcctatttggaacccaagcagaaaacaggtaagggaaaagacctgactgaaaagagggtcagccctcccagcatggtggcactgaagactatagagcaccatttgaaatgactcctaaatgactatgggcaccttattcttctgccttctcagtggaactctctgtgtaagagtgagaagcatctgtatgtaagattttggtgttttaccaaagacatttagctttctaataaattccccttgtgggaaagaatgctaagctttctataactctatagatagttttaaactcactatcgctccatcctaagcaaaaaatttctacttggtaagcatgcaaagaatgcacattatattaaatgcagaagggactgaaggacataggttttaaggcaaagaagcacgggaaaccacgcactctattatgttcagaactcttaattcattacccaaaaagagagacaaatggatctgttttgtttgtttgttctgtgacatggacttgctctgtttgcccaggctggagtgaggtggcatgaacctggctcactgcaacctccgcctcccaggctcaagtgatccttccacctctgcctctcgagtagccgcgaatacaggcgtgagctaccacgattagctaatttttgaattttttttgtggaaacaaggtctcactaaattgcccaggctgatctcaaacacctgggctcaagttaccctcccacttcggcctcccaaagtgctgggattacaggcgtgagccaccacacccagcctggatctgttctgcttccaattcctgtaactcctaacgcttgggaatgtgacttttaacaatgtagtcactaaaataaaattactctacaatgtagataccctgcagagttccttataacaggatgtaacctgtaaaagcaaggagtgttcactccttacaacctctcctaaataaaaacacacagatatctaagataaaagaacagatactcttccagctgaacaatgggacgtatacaagggctttgcttaaagtataagttctggttaagaaacttaatgtattttatacaagcaagtctataattctcttgctaacccggattttatgtctgatttttttaaaaactgcaagacactttcctaatgttgaagtaactgtgtctaataatgaaatgaagtctttagaaaattaaaactgatagctagaaaatagtaatacatggagaggccaggcatggtagctcatgtctataatcccaccactttgggaggctgagatgggaggatcacttgaacccatgagttcaagaccagcctgggcaacatggtgagaccctgtctctaaaaaaaaaaatttttttttaaattagcttgacatggtggcacacatctgtagccccagctactcaggaggctgaggtgggaggatcacttaagcccaggaggttgaatctgcagtgggctatgaatgcaccactgcatccagcctgggcaacagagcaagaccctatcttaaataaataaataaacaaaacatggcggttgagcactgttcattttctatcacagtggattttgttgccttttaaaggaaggaaatacccaaacataagaaagaatttaatctatcctattaatattcaattcagtacattatacaccttatacagatgtactataaagatgggcaagacctaccctgcgttcaaaagtatgaaagtagcataaaaaattgtaatagcttaaatatctgctgaggattcaaaagagggagaaatgagatgccactggaacgatgaaaagcattcggacacaaaacagagcagtggcacgcctcagggaagctacacctgaggaaaggcagggaggtcaaaagtgcagttaaagagacaggacacaggcagcagagttggaggcagtaaaaaaggaacaaggttatttaataaaatgaatacaataaaactaatatttaattagtgtcagattgggctaaaatgttttgatgtgctttctcctttaatcctttctcctcacaaggatccaacagataggtattgttactactctcatttgccatgggtataaaatgaggcataggaaagttaataattggtggagccaggatttgaatccaagcagcctgacgcctccagctttttgaacctgaggctttgctatctcctacaatgctatacagagatatgaatcaaagaagaattctgatgagggaatgacatctgcaatggtagcaggatacaggatggactaaaaaagacaataataaggaaacaaagttaagagatcatgatgattccagaagtgacgtactgcaggcctgaattacctgtgtgtaaaatgttgactcagaagaggtcagaggcctcagggatatcactggctctgctgccattccaccatgtagtcccagacaagccaatttgcttctctaggcctctcgttcgctgtggaaaatcctcaaagatacttgtttctacctagttctctacttttaattaaatctcaggagttattgaataaacaactactaaacatcataaatagatatggctttctataccgttatattggctccagtcaggctgttgatgcgatgcatatgtttacaaaattctggaccatgcccttctcggtctttgtcgttattagtgacaaataaataggcatgtatcatttcatgcaggagggtctggaacataaaatattcaaattagttttagagtctgtatgacactttggaaaatataaattttcttattctatctggtgtctaaccttttctgtatcacaggcttccttcagaactgataaaactcattctaggccgggtgcagtggctcacacctgtaatcccaacactttgggaggcaaaggtgggagggtcacttgagcccaggggttggagaccaacctgggcaacatggcgaaaccctgtctctacaaaaaaatacaaaaattagccaggtgtggtggtgcatgcctgtaatcccagctacactcaggaggctgaggtgggaggatcctctgagcctggggaggttgacgctgcagtgagctgtgattgtgccactgcactccagcctgggggacagaatgagacactgtctcacaaaaacaaaacaacaacaacaaaaaacccacctcattctataaaaattatataagcactcattcacaaaatattgcatatgagttgagcatcccaactctgaaaatccaaaatgctccaaaatcagaaactcttgagcaatgacatgacactcaaaaggaaatgctcattggagcattgcggattttcagatttgggatgctccacctgtaagaataacacaaatattccaaaatccaaataaatctgaaatccaagacacttctagtcccaggcatttcagagaaggggtactcaaatttgtgtaacatctaaagctctgaaaatcacaggttaagaactccctgttctaggaagacctttttgactatatatcaaaatccagaaaaatcaatgaattcaactacataaaaactttaaaattcttttttttttgagacagggtcttactctgttgcccaggctggagtgcagtggctcaatctctcctcactgcaagctctgcctcctcggtccaagtgattctcgtgcctcagcctcctgagtagctggcactacaggtgtgcaccaccatgcctggctaatttttgtattttagtagagatggggtttggccatattggcaaggatggtcttaaactcctgacctcaagcaatctgcccgcctcagcctcccaaagtgctgggattataggcgtcagccactgcacccagacaaaactttaaaattctataggaaaaaaacaccaagtaaaaagacaaactcagaaaaatatatgtataactcttatcacaggctattcctaatatacaaggagctcctaatgtcaacagggaatgacaacccaatttcaaaatgggcaaagaccatggagttcacagaagaagtataaatgacccacaaacaaatgaaaaaacgcccaacttccggatcacgaggtcaggacattgagaccatcctgctcaacatggtgaaaccctgtctctactaaaatacaaaaaaaaaaaaaaaaaattttggctgggcatagttgcgcccgcctgtagtccgagcagtatactcaggaggctgaggcaggggaattgcttgaacctgggaggcagaggttgcagtgagccgagaatgcaccactgcactccagcctgatgacagaccaagactccatctcaaaaaaaaaaaaaaaaaaaaaaaagaaaagaaaagaaaaaatgcccaactttatttataaaaagagaaatgcgaattaatactacactaggatggtcaggcgtggtggctcatgtctgtaatcccagcactttgggaggctgaggtgggaggattgctcgaggccaggagttcaaaaccagcctggtcaacatagtgagaccttgtctctacaaaaaaataaaaataaaaataaaacaattagcttgtgcatctgtagtcctagctactcaggaggcggagatgggaggatcacttgaggccatgaattcaaggttgcagtgagctatgattacctccagcctggacaacccagcaagaccctgtctcaaaaaacaaaaaacccccacaaaaacccaacactacactaggatgttatttattgcttatcaagattggtaaaactcctaaagtttgacaccattagtaaagctaagggaaaataaacattcctatatactgctggtgggagtgcaattctcctatggaaaatttggtagcatctaacaaaattacaaatgcatttgtcttctgagagagcaatacctagactagcatgcaaggtcatatgcacaaggtgtattcactgtgacactgcttataacagcaaaagattagaaataactccagtgttttatacatccatataatggaattctatgcagccacaaaaaagaatgagaaggatctacatgaaatggtttggagaaagctatagagcgtattaatgaaaaagacagggggctgggcacagtggctcatgcctgtaatccccgcactttgggaggccgaggcaggtggatcacctgaggtcaggagttcaagaccagcctggcccacatggtaaaaccccgtctctactaaacacacaaaaattagccaggcatggtggcgggcgcctgtaatcccagctactcgggaggctgaggcagaggcaggagaatcacctgaacctgggaggcagaggttgcagtgagccgagatcatgccattgcactccagcctgggcaacaaaaaaaaaagaaagaaacaaagaaagaaagaaagaaaagaaaagaaaagaaaaagaaaaagacaaagtacagaagaatgtacatagtattttgtgtaagaaaaattttgtatggtggggaggaggaataaaaatgaatagaaatatttgcaaaacagaaaaatgaaaagaaactaacagctcctacagcaagtaaggagttcaagatagaggaggacactgaacaagacatctttgtgtatagctttctacagcttttgggttttgattcagaaatcatgaaaacttgaaacaaacactaaaacctactgctcattccacaccaaagatgcacaagtttctgtgcaaaattaacaaaagcatttaagattgctggggtttttgctctaaaaaatataaataatttttttaagcaaaaatcagaaagatcttcaaagacatacctttttcatgatcctccataatttttttaaaaaacaatttccatcagaagaactagactgtcattaatgaattttagtcttataaaattatgctgaacagaaaaatgagagaatcaaacattttaacttggtcattcatatatccctctaaaaattatcaactgtatctcttaaaaggaactttatttatttatcttattatttctcagagatggggtctcactttttcacccagactggagtgcagtggcatgattatatttcactgcagcctcaaattcctggcatcaagggatccctctatctcatcctcctgagcagctgggattacaggcgcatgtcaccacacctggctaattttttttcaattttttgtagagacaaggtctcaccatcttacccagacaggtcaactcctgggctcaagcaatccatctatctgattacgtgcatgagccactgtacccagccagaactttatttttcaagtaaatgccgctcaacgaagaagactcaaattcaagaaaggtactgcaaaagtttctcaatgttctaaattagagcaatgataaagatctattctcataaaggagaaacaaatttaggttcctgatttttggttcaatttaattaaacattaaaaaacatcttgaaaatggtactgaactttttaaatatctatcattttccatatttagtcttaattcaaggatctatacacaacacagtcccaaaatacctctgttttccatgactgttctatcgggttaaaatgaactacctctagtcctaaatatgcccccagttgtctgaactcacttttgttcacattattcccatgctttctgccaagagtagcctcctgtcctatctctgcttgtcaaaagtacaattcgtcctttaatgctcacctctccatgttttaatcgcaggagtgatgagttgaatggtaaaggggacagaacaagagccttagagtcagggaaactggaacctaaacccacaatcacagcatgagacctgggacaggctccaagtggctcctcatccctaaaatgggatatcctcattttgcatggctgtggtaaagacgacgtttagtccaaagtctgacacacaataggtgctcaatagtgagcagcaggagtggtgatggtagtaacaaaatgtacagttataaagcttttcttgacctcctcaaccagataaagtctgttccttttctgaacccccttctctatgatttaggtaactacagttgtgcctcacttggcagggatatgttctgaaaaatccattgttaggcaattttgtcattgtgcaaacatcttaagagtgtacttacacaaacctaaatggtatagcctatgtaatatatatatatatatacacacacctaggctatagagtatatatacctaggctatagagtatatatacctaggctatagggtatatatacctaggctatagagtatatatacctaggctatagagtgtatatacctaggctatagagtatatatacctaggctatagagtatagcctgccgctcctaggcaacgaacctgcacaggatgttactgtactgaatgctgtaggcaagtgcaacataatggtaagtatttgtgcaactaaatataaagaagaaaaaaggtacaataaaaatatagtcttggccaggtgtggtggctcacgcctgtaatcccagcactttgggaggctgagtcgggcggatcacgaggtcaggagattgagaccatcctggctaacatgatgaaaccccgtctctagtaaaaaaaatacaaaaaattggcctggcatggtggcgggtgcctgtagtcccagctatgtgggaggctgacgcaggagaatggcctgaacccgggaggcggagcttgcagtgagtggagatgcgccactgtactccagcctgggcaacagagcgagactccatctcaaaaaaaaaataaataaatatagtcctggccgggcatggtggctcatacctgtaatcccattcactttgggaggctgaggcagaaggatcacctggggtcaggagtttgagaccagccaacatggtgaaaccccgcctctactaaaaatacaaaaatcagccaggcgtggtggcgcacacctttaatcgcagctacttgggaggctgaggtaggaggatcccttgaaccagggaggcggaggctgcagtgagccgagatcatatcattgcactccagcctgggcaacaagagcaaaactccatctcaaaaaacaaaaaataaaaataaataaataaataaaaatatggtcttataatcttatgggaccactgttatatatggggcctgtcattgacgaaaatgtcattttgtaactttctgccaacaggaaatgctcacttgatactattatacattccccattctcttctcacccactacttaaaaacatttttttctcatgtgtttatgtaatcatttacccaatacatattcattaagcaactcttccagttagggctccttctaaggctgatttggttaatcatgctgttcaactttttaaaatgtgtattatttttttccgcttattcattgggttactaagaaggttgtgttaacattcttcaagtatgagtctgggtgtcttggctgacacctgtaatcccagcactttgggaggctgaggcgggaggattgcttgggcctgggaggttgaggctgtagtgagacagggtcttgctctgtcaccccaggctgtagtgctgtggtgtgatctcggctcactgtaacctccacctcccgagttcatgcgattcttgtgcgtcagcctcctgagtagctggtactacaggctgtgtcaccacacgcagctaatttttgtatttttagtagagacggggtttcaccatgttggtcaggctggtctcaaactcctggcctcaagtgatccgcctgtctcagcttcccaaagtgctgggattatgggcgtgagccaccgcacccagcctgattgtatattctttttgcttctgctaatttatgcctcataaaatttaaagttatgttattacttttggagagattatgtattgttgcttaatagattattttattattataaaatatcccacttttcctctagtaaaacttcttcccttgaagtctttagtctgatactaatactggttgaacatccctaatttgacaatccaaaatctgaaatgctccaaaatctaaaactttttgagcacttacaagatgattaaaggttaagttctaaggaaatgctcactaaagccatttcagatttgggacttttggattagggaagctcaaccagtaagtataatgcaaatattccaaagtaaaaaaaaaaaaaatctgaaacacttctggtcccactttggataatgagtactcaaccttatagccacaatagttttctgcttttaagtgtttggatgattacttttcctcatccttttaaacttaaaataagtgtgtctttactgtaagcatgtctcttttaatctagcatgccattccatgtatttaatggagtgtttagtccacttacatttaactgatattttgtttacacctacctttctctttatcatctgagctctgttctttttcattaatcaagtatttctactgtaccactttacatttagtagctactttttaaacaaactgtggtaaaaaaaattaacaaaattccccaacttacccatttttatgtgtacagttcagtgttgagtatattcacactgttatgtaatccattgccttttattatccttaaaaacagcatctctcatctccaagcatgttttaacatgcttcccaccccatgctcagaaactaccactgtgctcttttgtacagataattctttctttttttttttgagacagagtttcgctcttgttgcccaggctggaatgcaatggtacggtctcggctcactgcaacctccgcctcccgggttcaagagatcctcctgcctcagctcccactgctccattctgctagcagaagtaagtaccagctctaaatgtgaagcgtgccctcacactggtttgtgctgccagctcagctaggtgtcctgagagcacagcagtgttgcagcccaactgaggagaatcaaaatttgtgtttctcaacaggaacatgtggatcctgttttctctgtttctaaataagtaacttaagccagttacttaacctctctgaaccttaatttctttactcataaaaatgaaaacagcaacacatgaacataaacagggctgttgtaaaatcaaaacagataatatacctagaaggcttttatttttttgagacagagtcttgctctgtcacccaggctggagtgcagtggcgcgatctcggctcattgcaagctccgcctcctcagttcatgccattctcctgcctcagcctcccgagtagctgggactacaggcgccggccaccacgcccggctaattttctgtatttttttttttgtagagacggggtttcaccgtgttggctaggatgtttttgatcttctgacctcgtgatccgcccgcctcggcctcccaaagtgtcgggattacaggcgtgagccagcgtgcccggcccctagaagccttttttttgttttttttttttttactatgaagcactataaaaaacataaggtgttcattattgtttgccccataattcaagctttcactgagggcaaagtgactttttttaacgatacatacaggcgaattcacagcagtctaaatcattgacaagtatttgtaaattactgcgctaggaagcaagtttacacgaaaaatacctctacaagatcctttcttggcctcaacttcaaaaggggttcgctgagacggatggaacacattccacccttcccttcatagctgcatatcccagcacacctagaaaacaatcaccataaaaatgtgttacattggccaaatatgcccaagtccttacacattcttgggcagttcacactaactcagttggcagatggctttcatgaaagtataccccccttggttagcagatacttgcatttcacctaattaattagttacaacccccgcgggcgcctcccgcgatggctccgatccccgccgggcaaggaaggaaagcagcgtgctctcaccaccctgcttgagaaggtggaaggctgcaggcacctgctagagacgccaggaccgtacctggtgtacaacggggacctagtggaatacgatgcggaccacatggcccaactgcagctccccttgccctagctaggctgcaacagctcaaaggcaatcctattctgctactcccagtctccttccgacaagttacagttcggtgttattaacaagcagatatctccagtagcatatctccaaaatcataacagacgcctgtataaaggaaattggtactttaaacacaatttaatatcatatcttaatttgtttgacagtaggttgttttctatcaactcaaaaacaagcatgctgggatacaactgtatcttaaacttaaccctgttcacgtgcaggagtagattattatttcaaatagggatttctgaaatttagcgtgtagaaaaagaatcgttttaaaagcatcactgaagatccccaatgcaacacacgagctaactaaagtgggtttcctaacgggaatagaggaggagaacacacatcctttggcagttactctgcgtcctcagcactttcttaggtgcagatttggttgcttctcccttctgggtcctacagcactatcataaggcaaatcaggaacttgttattttcaagtgaagtgagattcaaataaaaatctcttttttgttacggccctgagtccaaccgtggcggtgtggtctacacagctttcttattgttcgagtgggagaaaaggtaaggaagacagaaacacgccgaggcaggaattgccaggtccaaaaccagactcccctcatttaacgccccctgggaccgtcggactagagaaaggagagaaaaccagggccgggggctgcaggaaagctgccagtcccgcctctttccccagcggggctcggaactcacagggtcattcgcacgctccacttcacctcgacggcctccagctggccccagaagaattggtcgttaaactgaacaaacagtgcctgcaagtccggtgtggggtccaccaactcccacgacgcgtccactagcgacagggactcctgggcatgatcgcgctccgcctcctgcaagttccactcctcctgaagccgcagtgccaacatcaagtcatcatccatcgttgccaggatcacaggcggggtccgccggcgtcaggctggctccccagttacgccgcgaccccaagccgcctagccgaggaccaggactagctcctaggagatgccggctctcgagacggcccgtcaatcccgcgagagttcgcggaaacgcgcttgagaacgagaacggagcttaccccaaacgccgaagccaagattctagggctttaaaaaaagcagtcagcatgacacctcctagtgggcgcagaacctgggctcacagggctcgggccctacgaagctttcaggaagctagtttcagcctttactctttgccggttatttcaaacctcaacgtcacgctcggttcatgcgcagtaccgaaatttctctcggcctctccc

SEQ ID NO: 8225 - DNA, 1772 bp, Homo sapiens
gactgcccgcagcgggccggccgccacgagtacgcgctgcccctggcgcccccggagcccgagtacgccacgcccatcgtggagcggcacgtgtgcgcgcccacacgttctctgcgcagagcggtaccgcgtcccagggccccagcccggccacaaacactccctctcctcgggcggcttctcccccgtagcgggtgtgggcgcccaggacggagactatcaaaggccacacagcgcacagctgcggacaggggctacgaccggcccaaagctgtcagcgccctcgccaccgaaagcggacaccctgactctcagaagcccccaacgcatcccgggacgagtgacagctattctgcccccagagactgcctcacacccctcaaccagacggccatgactgcctttttgtgaacacaatgtgaaagaagcctgctgtggtactgagcgtcgggctgtcacaaggcactggaagaagggagcctgctggtccagagtgtgcgtgtgtatcggtgtgtgtgtacacttgcatgtgtgtgtgtgatccagtaggatcctagagacaacctgtcatactgtttacaaaattgtgcagctggtttcgtgctgacccttagggtgcgtctgttgggttttgttgggctagaaaaatgaaaattttcagatggcgttttcattcctctgactgatattgagctgctttggtgttaaaggtgtaatgtgtacagagttgtatttaacaataataaaagtaacttaagtttgctctatcagattttagttctgcacagaggttaagtgggaaaatgcagctgttgcaaaatgtatataaatagtatgttcatttttttcagtatattatctgatactgtgttagcagcaggtctgcttaaacctagtcttgttgttattgagtcatttcctctcctttgataactagaactgaaagcatttttaacattcttctcctggaagaaatgaattacttgaagcatgaaaagcacaccagggtggttgtttatttagcaattatgactgtagatttaaaaacaagcaaagaaacaacacctcagcagctgcccgtttccttagtctccacttcagagggggatgcgaagaggtcggcccagctccggtgaccatgaaggtggcacaggaattacagtgtgaatggctgtgtcagatgttttcgtacctcagattaaaaatattgctgaggtcagacgccacaattttcatgactttcttcagaagtagcacattttcgtgacttccgctgtcctctgaaaaacaaagttatttggaacatgttcatgcaaaagtgattctgaccaagtctaaatcgagcttttctactgacatgaaactgttggaaactgatctcattttataagaaatgattttcccctcaaggaggcgtctgtaattccagaacagtccagacatcagctgtacctcatgctcagtagtttttatttgagtttcttttgtgagttaactatgggagatttaacctcttttgccaaagagggaagtgtgtgtgtttttttaatagaaaatatggaccaaaaatttttttccctgaagaatgtattataaccctatttgtgtggttattacatcctgtgaaatgtatatatgttaaaataatgggggtgctggaaggtcatggcagactagctgctggttagtgtggaggggaaatggtttactttgtagagtttacatggttttatgcgcacactaattgtaataaactatgccaaaccaaactg

SEQ ID NO: 8226 - DNA, 120 bp, Homo sapiens
gctaattttttgtatttttagtagaggcggggtttcaccgtgttagccaggatcgtctggatctcctgacctcgtgatccgccatcctcggcctcccaaagtgctgggattacaggcgtg

SEQ ID NO: 8227 - DNA, 7225 bp, Homo sapiens
cttgaaggtggagctcattggttgccagattacacaaggtagggctcagggcaagccagtgagttactcaagtttggtcatattttttttcgcctatcattgttactcatgtggttttcccgacatccctcctctctcaggtaatgattcattggtgtggcgcaagacaagtcaaagcaccagtgtttcaactaagaaagaagatgagacaatcacaaggcccatcccctcggaagaaacatccacaggtagagccgtgattgtctgtggtttcataaggagcataactggtaacccacccaatatcagtaacttcaacaaaatttctttttctctgtcatataaacattggaggtggatgatccagtggtattggcacatatgtaaaatgatgtatgtttacagcttttcattgcagtattataaatagaaaaagattaggaatgaacttatgtgcccttcaaacactaggtacatattttgtggaaaaataaaacattagcacatccatgcagtggaacactctgcagccatacaaaaaaaaaatggaaatatagaaattggtaatatagaaagctgtctgagatatagtggcaacttaaaaaaaataagcaaaatatagaactatctaagtagcacgccaccctttctgcaaaaaggagaaacaaagaataaatattcattccagtatctctagaaaaatttcaagaaaacataatgcggctttctgtgaaggaggaacagaggtaggagggacacattccattccatacttttgtatacggtttgcattttgaacatataagtatataatctattcaaataacattaaaagtacattttttcagaatataaaataatttgcatatcaattttataagaatttggaaagattagaaaaacacaaataagaaaacaaaaattagtcataaatcagtatccgtagataatcaccaaatctcactgtttctagtcaactatatttatgtttctaactttaagacaaaaatggtagcatatcatattattctgttctgtagcatatatttttcatttaacattgtattatgagcattttccaatgttattggaaggttgaaaaccccaattattaatgtctttatagtattttttcacatggataaaccattatttacttgaccattcccctgctgttggatgctttaagttatttgattttccccaaattttcactcttaaaaataacaccgctaccgggcacattggctcatgcctgtaatcctagcactttgggaggccgaggcgggcggattgcctgagctcaggagtccgagaccagcctgggcaacatggtgaaaccccgtctctaataaaatacaaaaaattagctgggcgtggcagcatgcgcctgtagtcccagctactcgggaggctgaggcaggagaattgcttgaacccagaaggcgaaggttgcccaagccgagatcacaccactgcactccagcctgggtgacagagcgagactccatctcttaaaaaaaaaaaaaaaagaaaaagaagtaataataacacttctgttacttatacacaaatttggttttcatctaaatcccttttccccttcttcatgaattgcatttttccactcttaagcatccctttattttcttcccagggatcacagaagagaaagatgaagagcaaatatttttcctttactttgtgtattttctacaaacttggggcctgccttggtggctgtcaaagtgtcctttttttagagcagaaagagttgcaggaaaacatgatgtggtgtttcatgcaacatagtggaaatgcagttttaggtcatcaggctgcacttcctctcagtccgcagccccagagctctgtaacgaggatcccagttttccagactattgttatggtacaggtccaaacccgcctgccatctggggaaatgtgttgcttgagccaaagtaggagctccacactgtgcttaaatcatttacctgtctaaatagttctcacctgaggggtgggggaggggttaaactctcccctcatttcagatttttggagtttaatatgggccaagcaacaagcccagtgtgcctgttagtccctgaggaacattggaaactgtctctggggggctgggggagaaattttactttcccaaactttagccaggattttgaatcctttctttttgctttccagtatcagtaaatgcctaacatgtattcattttccccctatattaaatgcttaaagacttttcaattccatgttcagttttaaatcatgaaaagtggttgttggtcatttatgttgtaacgtgatggctttccgtcttctttaggaataaacattacaacggtggctattccattggtgctccttgttgtcctggtgtttgctggaatggggatctttgcagcctttagaaagtatggtgactttacatgtttaaatttcttctctaattatgcgaacaataaaaaaccaaaaagtttattcttcagaaatgcatatgtacaaaagcagcatggcttctttcaaaataaaatgttaacttatattttacaaacaagttagataaaagtagaaatgatcgagtattactttattaatctttttttatagacagggtctccctgtgtctcccaggctggagtgcagtggtgagattgctcaaactcctgggctcaagcaaaccccctgcctcaacctcctgagtagttaggattacaagcatgtgccaccatgcccagctaatttttttatgttttgtagagatgggatcttgctttctcacccaggctggtctcaaacttctggtctcatttgatcctcccaaagcactgggattataggcatgagccaccgcaccccaccatgtattactttataagcagttcttgtcatttagagacctttggtaaagacttaacctttgagtattgttgaagtatcctgaaattgatatattgctttagaagtatctgtgcttctcctccctgaagagtaaaaggaatattaaataggctgcttggggtatcaccaagctgccccgtaactcagcctccccaagcctgtttccttatgtataaaatatagtttacccagatgaattctgaatctcttccagaaccctgagatccatgtttattttgacaaatgttagatgttggatctaaacaaaaaatggaaagtattctgaagttttctcttcttatattttaagcaacttcagaatctataatgtgtatattagtacaaatagaatgaagaatagtttctgccatcatgagagaaggtacaaaagtctctggttcaggtagatattcgtaagttaaagcatgccttagtgtaatgtgcttgtatgaaatgcttctaaagacacccacagttttggactggagtatagtagagatgaagtgagaccatgtggtcatgaggaattgcttcaggatgactgcatgagctagtgataaacttaataaggcactgatttctaatatgcaaaataagattagtatatattcttctagtgaaatcttgtgacctttcttataaatgagataaatttatagataattctacatatttgtatgattttctaaagcacatggcagctgccatctcatttaattctcacatcaaccctatgaggtaagtactattatgatccttatgttatatagggagagagaggcagatacattggcttataaatattcagtaggactttttgtcttgataggaagaagaagaaaggaagtccgtatggatcagcagaggctcagaaaacaggttggttgaaaactctatctacaattttatctgtctttgaggaagggacaggatctgctgattgaaagcataaggaggccagtggcccacatttatttggttaaaagacataagccctgtagcctttaaagtagcatatctataaggaagaaatttattgtgttctgtctctttattttaatggccactttacttttgttcaatgtcatcccctatcatttgtcaacatccttttttcttggccactggagtttaggccacgacactgtctgccatcaaggaggtatgacaaaagccttatcagtgaactgaagtaggcccgtgttgttagcatctgcaggcctgtgctgtactttccaccctgagaaagtgagaaaaagaccaggcagggctggtgtgcaggtttcagataatcctgcacaccagccccgtctggtctttttctcactttcccagacacaggtgcccaagcaatgagttagccatggtccagagagagagggcagtggggcaggacccctgagaaagctcagggaccatttgagactccacctccccagggtctaaacaccagctgcagtgtctcctctgcctcacagatgccatgccagtgcagattgtcggagaccatacccagatgatctcacaaagggagaatctgggacctgatgagggcaaaataccttttaaaggcacagcggaaagcatggttagagtagtgtttgctgttgtggttaatgaccttggcatgctgttcttagcacacacacctgaggaggacattgatcactgtcagctgtcaggaggcagcctgacctctgactcatcaaggaacatgttctggaggacgcgcattacatttctgacatattcatttggtttatgttacctttattccagactgttggaagcagattaaatatccctttgccagacatcagtcagctgagtttaccatcagctatgataatgagaaggagatgacacaaaagttagatctcatcacaagtgatatggcaggtaagtgtcatatttctaggactgtgctattagattggaggtgctgcttgtgggggagggagacaggagagaaataaggcaaaatccttttctatttagatagggtccagtaaatctgaaatgtgttttttctgcattctgcacagaattacaaactgacactgagatattacttaaaagccctattcagccagtcttttcacctgcaggggatatagtgacatccatagtgatagccctgatgtactacttgtatctggaagccctgaatctatttttgttaccaaagctttgattaaggcactggtacagaggggctgaaaggaggaattaaatacagttcctgccctgaggaaggtgagataggaaataaaggaactctctcagtatgagaagggcctcagtgtccctgacaagccacatcaagagtcgagcttcccaaaccatctatggggaaatgctttttgtttctttttttaaaatttctactccatcatgaatgaatacactgtaaaatgcaatataaaatactagtaataaggaaattttaaagatacaaaatacaaagctctaattttttattattagattcaacagacataaaattaagagtaataaagagtaactaagagtagtttcttgacacttagtctcaatttctgcacctgtctctatggcactgctaaaaacagctctcagatacataggactctgtggggcatgctctgagtagcactgcgctctggcttctccctcctcacgtgcagcctgaggacctgcagtataggcatcacctgggggcttgttagaaagggaggccatagaactagaagctcccaggtgacgcctgtgcacatcagtgactgggagttgtcagcctaagggttggttgagtcactttgtggacaaggagagcatcctctgcaaccaaaatccatcctcttgttccttggaagtgacatgaagggagaacctaatttctgttgtcttatgcctttcattctccttcagcttctaattcagtctctcctccctcctccctgaatgatcctcaggctccttaaatgtgcaatgacccgggttctgtctcacccccactcaccacagtctctcccctaaacagtcccacaccctccccaacttccagcagtgcccttccctgcatgtttgtccatgctgcttctcacacccagacttccctctcagtccccagtccataattctcagcagcctgctggacacctccacctgcagatgtcacccgttcctcagcaaccacaatcgaatccactgttcctaaccctcaccacagatgctctgtgcattccttgtctaatggcttctcgactgcacatcccagcctcaaagagtccttcgtcccggctttcctcacaccccacctctcattggtaacaaattcctgattcctgtcccaaagggtcacttttcctctttcctagtttgtgacttctatgtgcatttctctttgcttttttacctctcactttttgatcttttcctcttgggtcaacctccacagttacctctgaaagtgccagtctttcgtttcccatagaattaaaccagacttcctagcaagacaatcaatgcttttccatgctctaacgcgtggctaacagcatatactcaggatgtgcgttcgaatcctactccatcgccccattgtgtgacctaggaaaagttagtctctctctgccttggtttcccatttgtaaaatggagtaacagttcctacctcgggatttttttgaagattattaacatcttgctattggaatagcgcctggcaaagagtaggagctctataaatgggagctcctggcatcatcctcactgtcaccactaggccctgacctgttgctttggtcctcatatcctattaaacaaactactctgtgtccctcatactctggccatatcaactctattttcgaggctgtttttttctccatttccacactgtgtgacttccacctccatagcttctccagagccagtttcagagccacttcctccctgaagtatgtccccatgccccaggacgtcgtcgtcgcccccatctctgagaagaccctgcgaagcttcctgagcaggcggtgcggttgtgtactgcctgcgggtggcttctgtggctttcacatcagggttttccgcagtgcctgggacacctgagggcacccggggggaaagtcagtcaccacgacctgaagcagagtatccccgtctgccactgacaggccggcccgtgtgtggtgcccgctagctgccatctgtcttgtggtttcagattaccagcagcccctcatgattggcaccgggacagtcacgaggaagggctccaccttccggcccatggacacggatgccgaggaggcaggggtga

SEQ ID NO: 8228 - DNA, 38894 bp, Homo sapiens
ggagccgctgagcgggccgacggccattttgtgaagcggcgaaggaggtggtggctgcgttgggctccgggaagccgttcgggctggggctgtcggccgcggggcggaggcactcgcgcggggggtaattcggggtctgggttctggtgccgcgcagctttccccggtaagactcccgcagcccctgaacgggtggggctgtgcggggctcgtggtgccccttggtggcccggggcggggccttcggaggccttcgagcccgcggcaactagcgccccacacaaagggtcgaggcagggctgcagggggagtgggatgccacttaggcctctgagatctgagaggatgcaaggaggacgcaagaggatgagcctgcgtaccgaagtggggacgaggccatagcgaggactcccccgtggtctgagagggggcaggccagagctggctggctcagcggcctgcgagctaacggggactgcagtaaaaacacgcctacatcccgagtacggaggatttcttgtctcccccagtgaagcagaggttataactacatctctgtgcctggaggtggggagataatcgtagtgaggacactccttcaacccgaaatggaaaggaggcctttgtggcctaccagcaaaaggggacccaggtcacacctgtggggaggaagctgtagtcggtacactcctgtgagttcagaaaggaagtgtcacaaccggccgccttcgtggcctgaaggtggaggggtttgcagtgaaatgcctccgaggtccattgctggggaggggctttactcgagggtgtagcagttttgagaagccggcgtctgaagctaggaggtgagggggtggggtgagtacgcctcctgaggctctgagaattgtagtaagatgccaggcctttggtcccccagtagggaaggggctgctgtgagcagcacatttacggctccctcgggagaggatcctgtggcatttcaggaggacgagatccagtgggctgcggagggtgggtgcttttgatggagagttaattgagtttctctgaagcttggctgcattagtttgcagccacgtgaattgggtggtgggagggactttgaggatctacaggttagtgacggggttggacgccagtgcagcaggcttagctgctaggttgtaaacgtacgggctttttgtgtgcctccaacgtgtgctttatagtgacaaatctgaggggctcttgtgagggttactcagtattaagtgctaaacatttactcatctgcgtggtgtcatgctgagaattgcagactttaagagatttctgggccctaaaaccctccttggctccaggattctcagagataacctaatataaattgaagaagttggtagggaccgttttatattattcaataatagagtcagtataacccactggaaaaaagtgtgatggcaactgaaggtttgttgaagggagaggctaggcttgtgactgcagtattttagagcttcttgcttgaatggtttgaaatggtgtaatttttgcaaaatgcagtcttagcaacaagaattgtctgggaccttgttaactagtgtatattgttaatgcatctcagagcatttgcagtcgagaaaaatccctcaagtctggacacatagggaaatcttgttttttaaattatagaactacaatacaagactggttgtacttgtttttgaaatttggcagttttgataagaatggaggatttctggatttagtggaaagtgtgcagacattttcaaagagtataaaaagttgggaagaactgttacaggtggttcaaataacgttatggtaatttatgaagaaagtgaaatgtttggcgtgtttatacaaaacaatgaagatgtgcttagtatatattattggacagatttttaatgaaacagggaatacatttttatatatgctcgattaaatgtgattactttgcttatggattgtaatgtataattttcattttctttatgttcaaatctgttagatgaaaaatgtgaagctttagaaataattgtgtggttacttgcaacgtattgttacatgctaataccagtactctttgggcttctttcaccttctttgacacgtcaaatgttttgatgattgagtattgagagtttgggagttgttagtacagtctttaggtgtgaaacttgatgttgtgggccagtgtgttccaggtgctggaatccagtgacagtgttgatagtttttactccattttgcagagagccattctgtcattgtatgaatgtatgttttcttctgtagatgttgtaggaagaaccaagtgtcagtagttggttgcacaaaagatgcttttagatgtccctccctaaaatgcagagactgatgatgtccacttttatatcttttgtctggcccacaagtgcttaatagtaaatgttcatggagtaaaggaatattgttaaatgttttcaactaaacagaaaagataattttatctaaactacagttttatcagattttactaccacacccatataccttttggtttgcacaaaatttaattaagtttaaagccagcttttaagactcaaaaacagagtgaatgtggttgtttaggttagaagtataattttgctctgaagtgaaaatgaaggtagcaacatttttgttggcatttggggggattgaaacataacttaatatttttgacaggaggaatatcttatttagaaatgtcttctgatttgctgcctttgagtacggaatggaggttaatggaaaaattgagtaatgcgttataaaaagtacacatctccatcagtgtcagaataattttttcattaagagtgatcccagactttgatatatggtccatttgggaatggggaacaaaatcaagtggctgaaactgtggttgtttcataatgtttattataatgtgattatactgtttttagcattgtgcccgttgtgattggttctctgttgctaatctctgaggtgaacatttgagagtttgtttcttttggatctgaagaacctagctctgctgtaccctggttcttgttgattaaagagtgataactgaacaaagttaaagttcacttttggatgtttactaccagatgaagagtgaaaatagtcgttttagtttgtgccttgacttcttgatgaagagatttgttgtcagacatttttttctgaaattccaagtgattagaatggctagtaaatacgaaagtctgtcttgccataatatgttaaatttttgtagcagatacttgtgatttgtgcatgcatccggtattttgtcaagttgaagcaagcctttatgttaggactaattcctgataatatgaatggaaaacatactaaagccagcttcttgttttagatcttctgaagtatatcagtggctttaatgacaaatcaggcccattttctcctttcctatcattatgctgtatgtatagatagaatatgtattttagatgttttattgtttagttattattttagtcttatccttctaaagttcagcaaagctttaggtaaatggcgtggatttttgaaatcctgcattcagtcgctagctgacatttagaatacaggaatagtagtttcctggaaaacagtgacacttatgttaaattcttgtggtttttacaaagtgaggtgtcaacacagaagtatttcagttctatttccatttacctttcccttttgaagaggtataataccaagggttgtgaagttctgacttgtagcatcaactttctgcatggttttccttggtatggggtggggtgggtattcctctttgctgaaatagaagagaatcataaatttctatctggattgattttgtgctttaagttgtacacataaaacttgaactaggcatttgtcaaattcagctgggcctttcagccttgccttgtggaatgagaaatatcttccttttaaaggtaatttctggtaaccttttagaaatttttgagagtagacctggtgagttccctttgagcttaactggctgaccccagatatgtccttctcaagatagacatacggtatcttttgagtttgcaagggaagaggctgagaggaaccttcttaccttatattcaggcatatgccctggccccatacctgaccttttgaattggaatctccagtagggatcagatgtttattacaagttctagaaactagaaagttaccctgttatgtggctgctggagtcaaacctgtacataaatattacagtacttcatgctcttgctcattgctttacttgaagcaggtttttttctgtttcacattttcctttgtgacctgttaaactactagatatggctttcaaatgaagaatttttaaactccttagacttagttaggctaggccaggcgtggtggctcacacctgtaatctcagcactttgggaggctgaggcgggtggatcacttgaggtgaggagttaagagaccagcctgggtaacataatgaaacccctgtctctactaaaaatacaaaaataagctgcgggtggtggcgcaagcctgtagtcagtcccagctactccagaggctgaggcatgagaatagcttgaacccagggaggcggaggttgcaatgagcctaatgagcctagatcgcgccactgcactctagcctgggcgacagagcgataccctgtctcaaaaaaagaaaaaaaaaagaggctagatttctacaacatgtaaaagattaatacaatgctctagacttttgattgtgttgattacatatttgcatagctttttgtggtaaaaccatctcactattctttagcaacttgagtagttgactagacgatgaatagtttgtcctttagaaaatcacacagatttttgaaatatgttttactttttggcgatgaatattaaggtcattagttgtattttggtcttggaagatactaatttaagatgagcatcatttggaaaagtagtcgtaggtaatcttaatactgaacagtggcaaatttcttctctctccgaattaaaacatgacctttgaaaaaaaataaaaagcaaaaaatgacctttgaatatagttgtctagacatttggtcatatatgcttgtgacttgttaataacctcaccagtttggaagaaatgacagtgaaagatgagtgacctgtttttattttgggatatactcttaatatgtcaggcatttttagggtgtttttaaattttattttattttatttatttaaattttacaagtttttgagaactgttgtgatgtcagaggaaaaaacactttcccttaatattttgttaatattttgagctccagtggaattagtccttatagcaagaactcatacttcatttgttttgtgatgttggatgctattttgtgcaaaataaaatatattgaaagaataattgcagtaatttccatgagtacccttgaattgctatcttaagttgtccaagaattgttattgtgcgaacttgtgccttttcatcacaaatttggtgagaacctggggaaatagacttgtgttacggagttttctggactggtttaattataaagtgatcaaagcaattagctgtgaagctgagctttatgactgttttaattttcagtggattcgttattgggctaagttaatgacactcttgtaaatatataattattttgagatactcaaatttgaaagcaataccaactaaaaagcatgtgtgggattttgttacggtgtctttctttttttttttttttttgatatgcattctaatgaagtactctggtggtttcagactcgccttcgtaatgtacagtgtggcctgtgcgtgttgttttgtgtttcctgcattgatttttgcctccgtttattctctattgcagtctaaaagttggttttaattggttgcccacaggattgacttggcctctacttcttgttaaggaaattcatctcttgttttatcaggtaagagattttgaatagagagttcgtttttatacaaaataaaatgagatagcttattaagaaatatgaaaatatatgtagcaactatattgtgtgtgtgtgtgtgtgtgtgtgtgtgtgtgtgtgtttttgtttgcttgttttttgttttgagacggagtcttgctcagttgcccaggctagactctgttgcccaggctggagtgcagtggtgccatctcggctcactgcaacctccgcctcccgggttcaagcacttctctgcctcagcctcccgaatagctgggattacaggcgcctgccaccatacccggctaatttttttgtatttttagtagagatggggttttatcctcttggccaggctggtcttgaactcctgaccttgtgatccacctgccttagcctcccaaagtgctgggattacaggcatgagccgccacccaggccggtgtggttttttacaagtttatctgagggataggggtggggtagatgggtgctttgaacagttgttcctttgggggtcaatttcatttatatggatctatttatcttgtgattttcctgataggcagtaagttttattccttagtagcattttagactaattacaaatacagatgcttgttattgatatgtttatttatatttcctaagagtttaagtatagataatgggtcacatgttttagagtacaaattttagactttaaatggaaccttagcaagtggaatctaaccctcttgtttaagtaactaagataggcccaagttaggttgaaatgacttagctgtcaaacagttacttagtaacagaaaagcagatacttttttaaatttttttttaaatttttatttgttttatttatttatttctttttgagacagagtttcgctcttgttgcccaggctggagtgcagtggcgtgatctctgcctcccgggttcaagtgattcttctgcctcagcctccctagtagctgggattacaggcacctgccaccatgcccagctaattttttgtgtttttagtagagacggggtttcaccttgttggccaggctggtcttgaactcctgacctcgggtgatccacccacctcatcctcccaaagtgctggggttacaggtgtgagccaccgcacctggctgcggatattatttcatattttttggaagctagaaacaatttttctcatcagatggctttatgaataaatcttgtattccactttggtttaatattcagccctttccagctggtaatctgaggcagattttcaatagcatattctcatgtgtaccttgtacaaactttcagtaaatccctgctcttaacagaaaatggcttgaagacttaactgtgtatgtcactttagccctgtgtttaatttttgtgttcttgggactatatcaagtttctgtttgattgtcccagtgcaaactagtctctctctctctctcaagttgttttgagtacctggattgcccatgatgtttcccctatacaaagtgattaaccgttttttgaagttgaacaggaaatgctatcacattttgcatacagccacatattctagattgagcaaggaatgtgaatttgatttaatgacttggaaactgcttgatgaacctccttataggctgctaaatagtaaatgagaaaagagactgttggtgtgatgttttttagcgttaatttttcttgttgactcttgaagtttgtaaatgaaaagcttccccacacttcccaaatttctagtgctttataatggcctcacaaaaagcattttctgtttgctagtccatttttctggattaaatttgaaggtggctttttatttttgtgtatgtgtctgtgagaaaactgtcaaagccaagcagtttgtttcttgtttgtatacggcagttgtaatattgagatataattacagattttgttgcattagtatttatataatatttgacaatgaagttacagaattcttagagcttatagtagaaaatcttgccccttctaatattcttgagaagtgataaaaccaaatctcttcattaatttataacctttctgagggtcatgagctgattttatgggcttatatttaaaagttgacttttcaggtggggcgcagtggctcacgcctgtaatcccagcactttggaagactgaggagggtggatcacctgaggtcaggtgaaatcccatctctcctaaatacaaacacttagccaggcatggtggcgcatgcctgtaatcccagctacttgggaggctgaggcaggagaattacttgaacctgggaggtggaggttgccgtgaaccgagatcgtgccgttgcactgcagcctgggctacaagagtgaaactctgtctcaaaataaataaataaataaaagttgacttttcagatgggttggaaaacaccctatgttattgaccaccttaatttcaaagtagtatgtttcccaggcccaataattcggtttgtgtcactttccaaagggctgcccttgaatttgctcttagaagcctttggaactgaaatactgaaatttgaggggaacatttcttttttgattatgtcaaaacaggcatgatctaaggagatcacagagatcctgtaggagttgtgtaggtccaagactgtaacaaccactgagtaattcacactctggttctaaaacaaaaacaaaaaatatttttattgtcagccctctcctaggggaaaataatactttaaaaaattttattaaatagaggatttggttatgagtcattggacctgagttttaattaaaatagtcacagtgaatgggactataaccaggttctacttttgggggtaatgaatcaaggtaactcagattttagctgtcctattcagtagttcttttggcttcttagtatgtcttaaccttgtttataataaataattccatatgtagttttttgtaatgtacaaggcagattgaaaagttttaggatgaataaaataatggaaccagttctcatttaagacttgaatctacttttagtcttaagtattatttacaattcattagtattctagttttttgcttctgttggatggattttgagactgagctctataaaatcacactcttgataattctatgaaattatcaagtatatagggaagatgctaagccagttttaaatactaacttctatatattctttgcatgttttttccctatagattgttaaactttgtttcctgatttgacttagacatttcttttaaatcttactgaatgattagtggtctgaatgatgtatatgtattttactgtcctacagttgttttttcttgaactttttgagtcttgggactgaactgtttccaaaattaatgccttctggaagttgaaattgtctacgttttacattgtaaatggcacgtaatgttcagtttttagaatatctaaattaaagacattgcctgtgatagcttgagggaatatttgagggcctaatatggtagctggtcattcttgtagctaaaaacttggtgtgataaacaggagtctgacctggccgttgccttttctcatctgcaggtgtgtgtggtttcagcgcagcatggctgtggtcatccgtttgcaaggtctcccaattgtggcggggaccatggacattcgccacttcttctctggattgaccattcctgatgggggcgtgcatattgtagggggtgaactgggtgaggctttcatcgtttttgccactgatgaagatgcaaggcttggtatgatgcgcacaggtggtacaattaaagggtcaaaagtaacactattgttgagtagtaagacggaaatgcagaatatgattgaactgagtcgtaggcgttttgaaactgccaacttagatataccaccagcaaatgccagtagatcaggaccaccacctagctcaggaatgagtagcagggtaaacttgcccacaacagtatccaactttaataatccatcacccagtgtagttactgccaccacttctgttcatgaaagcaacaaaaacatacagacattttccacagccagcgtaggaacagctcctccaaatatgggggcttcctttgggagcccaacgtttagctcaactgttccaagcacagcctctccaatgaacacagtcccgccgccaccaattcctccaattccagcgatgccatctctgccaccaatgccatccattcccccaattccagttcctcctccagtacctacattgcctcctgtgcctcctgtgcccccgattcccccagttccttctgtgccacccatgaccccactgccacccatgtcgggcatgccgcccttgaatccgccacctgtggcacctctacctgctggaatgaatggctctggagcacctatgaatttgaacaataatctgaatcctatgtttcttggtccgttgaatcctgttaaccctatccagatgaactctcagagcagtgtgaagccactccccatcaaccctgatgatctgtatgtcagtgtgcatggaatgcccttttctgcaatggaaaatgatgtcagagatttttttcatgggctccgtgttgatgcagtgcatttgttgaaagatcatgtaggtcgaaataatgggaatggattggttaagtttctctcccctcaagatacatttgaagctttgaaacgaaacagaatgctgatgattcaacgctatgtggaagttagccctgccacagaaagacagtgggtagctgctggaggccatatcacttttaagcaaaatatgggaccttctggacaaactcatccccctcctcagacacttcccaggtcaaaatcgcccagtgggcagaaaagatcaaggtcaagatcaccacatgaggctggtttttgtgtttacttgaaagggctaccatttgaagcagaaaacaaacatgtcattgatttttttaaaaagctggatattgtggaagatagtatttatatagcttatggacccaatgggaaagcaactggcgaaggctttgtagagttcagaaatgaggctgactataaggctgctctgtgtcgtcataaacagtacatgggcaatcgctttattcaagttcatccaattactaagaaaggtatgctagaaaagatagatatgattcgaaaaagactgcagaacttcagctatgaccagagggaaatgatactaaatccagagggggatgtcaactctgccaaagtctgtgcccacataacaaatattccattcagcattacaaagatggatgttcttcagttcctagaaggaatcccagtggatgaaaatgctgtacatgttcttgttgataacaatgggcaaggtctaggacaggcattggttcagtttaaaaatgaagatgatgcacgtaagtctgaacgcttacaccgtaaaaaacttaatgggagagaagcttttgttcatgtagttaccctagaagatatgagagagattgagaaaaatccccctgcccaaggaaaaaagggattaaagatgcctgtgccaggtaatcctgcagttccaggaatgcccaatgcgggactgcccggtgtgggactgcccagtgcaggacttcccggtgcaggcctgcccagcacaggactgcctggttcagcaataaccagtgcaggactgcctggtgcgggaatgcccagtgcaggaatacctagtgcaggaggtgaagagcatgccttcctgactgtaggatcaaaggaagccaataatgggcctccatttaactttcctggtaattttggtggatcaaatgcctttgggccaccaatccctcctccaggattaggaggcggggcctttggtgatgctaggcctggtatgccttcagttggaaacagtggtttgcctggtctaggactggatgttccgggttttggaggtggaccaaacaatttaagtgggccatcgggatttggagggggccctcagaattttggaaatggccctggtagcttaggcggtcccccggggtttggaagtggccctcctggtcttggaagtgcccctgggcatttgggtgggccaccagcttttgggcctggccccggccccggccccggccctggcccaatccatattggtggtccccctggctttgcatctagttctggaaaaccaggaccgacagtaattaaagtgcaaaacatgccctttactgtgtctattgatgagattttagatttcttttatggctatcaagtaatcccaggctcagtgtgtttaaaatacaatgaaaaaggtatgcccacaggtgaagccatggtggcctttgagtctcgggatgaagccacagctgctgtcattgacttaaatgacaggcctataggttcaagaaaagtaaaacttgtattagggtagccattcacatcattttttatagggtagatcttcatattgctgtgattaatgcatccagattgttttcctagtatttccaggttagaacctgtggattgtttcaattgcatatagcttggtttccataacatagagcattggttgactgtttacagaagactcactcaccaggataaacattgctgtatgttacagtaaagctatctggagagaacacataaatgattttggcataccattagagaaaccatttgtaaaactcaaatgaccacataaagcttatcaaggagtctagattggttttgttttataccatatgggatgaagaaaatagaaatgtcagtagaactcattgagggtgctcttgccagctgctgaaaatagaagttggctactctcagaatttggtttaaagctggacagatttgctttgttatagggtaaagctttgtctaaagtcctcattttcttttaaaattgaataaaatttctgtatacagattcattgtatgtacctttattgcttcttaagggtccttgctgtatagacagtcctgcttcagaagttgctgctttgtttgtctaattgactcatttgtaaatgagcagaactgttttgttggtttttttccctaaatataaaagtccacacttcgtttgtgctataacctcaaactttgatttctaatgtcacacttaaaactgtgtggaataagacttttgccataaaaataaactatggagtcctttatctaccagagcctttttggtttgaccgccacgatttaggttagtcagtttaaaaattgttcatgttgtttggatggtatcgaaaaccagaaaccacttttaataatgtgtttaagatacttgatttgaagtccttttcatatggactaattgtagtatcaatttcctcctgtcccgattatgtgaaattttggcctttaaacaaagaggggcccattcataagaaagtgttatatctaggtttttaaaactgaagttgaaattatctttgttagcagtagtagtatagaataaaagatccgtatgctggttcgtagattgatacgtgttagtcctgttatttggaggctttttggcatagttgttcgatcaggagcctgtttactaaaagtcttcatacagagtacaagtgcagccgccagaggagaaaattgagattcttgaccctttcatactcttttctttggtattcaggacactaaggcaggaggaccacatgagttctggttggtaagtgtccttgtcatgaaaacacttgccttacaaggctctaattatgatttccctagtcagtgctctgaagatgtgtcacattatattataaacaatacggaaggggagataggtgagatgatatgaaaaacaaattttctcactgtcataaaaggctctaattatggttactttccttgtgatgaaaaacttggccttacagggctctagttatggttactttccctagtcaatgctctgaaaatgtgtcacattataaacaatacagaaggagagatagatgagagatcatgaaaaccaaattttatcttttacatggcccctttgtcttcgtttgaaacatccccaacatttcctacaaatcagcgtagttacaaaggggtcagtcttttaaaataagtatttcctattaaactatatatatatacagtgcctttttggtgttgtgagtcagtggaacactgaaatacagcggttgtgtaatttaagagtggcaacagtttcatttgataagatttgaaaaggctttttatcactacaatcttagaggattgacagtacaggatttttgtttaagagaaggattgtttagactcaagaggtgactatgttgtgggtcttttgataattcatgaatacagatttgctttgaccgatcactagatactgcctcctcaatttcaaaagcaatataacgtttgtatatgctgtttaatttaagttaatgttaagtaatcatttctcattccaaagacaatgcaaaaaacttcagcactgcttgagagttgtatttcagccacagatattttctccattggaaagctattttcattttagaaaaatgggttgtttgaagatgaaagtcttttatcttttttcacaatttattttggttatatgttcgtacattcttattaaatatttcatacactttattgcaactactttgttatttctacatcttagataaatgctgaaaaggaaaacgatttcattgttcatctaattaaataaattaaaagagcggtttgtgtagaaattggagagaactatgttttatatgaatcacaacagtgctcgttgtggactgtaattaaatgctttgccctctggaacttgatttttgtgtatctgagatttattaacagtgctaactgctaaggatactgtttatcttgttctgggcattggagtttcagtttttaaaaaattcttgaaaatgtattctgtgaaactactcatacctctcttcctgcgaattttctcctaagaactaggtttggggtagaaatgaattgacattattttctcatttgctttgtatggtatgaaggatttgtaaagctttgctcaaagttgtgtgcatttgtaaacactatcatgatattttcaattttatgtgtaaattttattgtctgtttttggtgactctgacattaatggaagagaatattttccattagatttaattttttttcctctcccttctgattttttttttattggtgttcatttttcttttgatttaaaggattagagaaatctacaaatgtatgtcataaataagcaaatttgtaaacttttctgaactttagtgaaacatttagttcacaagcataatttggaggtgtgttctgtgtttacacagtagtttggatgtacaattattattagtggctttttaaaaaatgaaacagtgttaagtgaaatgtagttcctagctttgtactccaagttgtcaaagcatcaacaatgaaaattcgattaggaaactttatttaaaatttcaggtagtaatattcagtgtagttaaggccagtcttaacccactggatgaaaatctaggactgtatggaagtaagcaaacattacatttttaggtggaaatagtcagccttgcataaaaacaaggatgcgtgaaagccttaaattccagctcccttttactggagtctgtggttgtgtacaggtatgggccaagtgtaaaatctcatcaattttaagaacactcgggaaatgagtaaagaaaatgtaaaattgctgctagtcaaatcttttggaaagaatttctggaagtggtcactttaaaaattattttccacccttgcaaaattgccacatttaaattgttttactggcagttctatagtagtccagactttagaaaccaaacacaacaaaatggcttgttgccaatatggccacaacattgccagcaaatactgccttggcatcactcagcagaggtttttgtttataaagatgaagtcttgaatactgttcaataaacttgtcaaaaaataaaacaggctgatgcttttaatgctttaactgcacaaaagtactttactgagctataatattatcttgtcagggtttttgttttgttttgtttttaaacctgaaaatattttgtgcctttggagaggtagatttggtaatcttggagaggtaaaaattgttgcttatccttgcctgctaatgctgaagtgtcaagagaagaggatacttggaacagcagggaggaaacttgattcaagtccatagtatccaccttttcagaattttatgtgtatgatgtgttggcaaacaaagcccttaaatgttgaaaactttttatcttgaaagagtttagcttgtattagaatttggatacccagtgtgttttagagggggctagacatataattccaggtagtagctgagccattattaaataatcgggatttgactaagcaatggacaaatcactgagtgaaatcagctgcctacagatatccaaaatggcttttaccatctgaaaggggtggactgtgtgataatatgtctccttttcttgttcaggagagatcagttatgtaattcattgttacctgctttccagtgttttacagcaagaaatagtttatcaactatgtgcatcatcactaatctcccaaaagtagagcttttacagggtatggtagaatcaaacttatggctttccttttttattaaaaatggctttatttcagtcttatctttttagtatagaatctgatcattttgacttgtgaaatgttctggaaagagtgtactctggtagtagcacaattctctgatgttacagtgacttttctgggaaaacccctgtctattcaacaacataagcaagttcatctcctgctcaggtaaatggtaatttttttttttttttgagatggagtctgtatctgttgcccaggctggagtgcagtggtgcgatctcggctcactgcaacctccacctcctgggttcaagcgattctcctgcctcagcctctcagtagctgagactataggtgcgtgccgccaagcccagctaatttttttttttttttttttcatttttagtagagacggggttttgccatgttggccagcatagtccccacctcctgatctcatgatccgcccacctcggcctcccaaagtgctgggattacaggcgtgagccaccgtgcccagctggtaaatggtaattctttaccatgctgttcttgggtttattcttggtgctttggctgctttgtgttagagtctcaaaagcatcctagagtatgactccttttctggatcaacgttaactagcagtgagtagccacggtggcttgctactctacatactgctctatcactggagtccagaaggaggaaaaagccacctgacataaacatttcagacccagggacagaaggacagcactctgaaagtctaagggcaggaaagagtgctgggaaaaatcacaaccaaatcccttgaattctgtcaatagccccacggacctccttccagtgaaaatgtttaagatgtgcttgcttcagcagcacatattaaaaacgaattaaacagagaagattagcatggcccctctacaaggatgacacgcaatttgtgaagcgctcttttttttttttttttttttttgagacaaagtctcacgcttgtcccccaggctggagtgcgatggcgtgatctcagctcactgcaacctccgcctcccgggttcaagcgattctcctgcctcagcctcccgagtagctgggattatgggcatctgccaccatgcccagctaattttttttgtatttttagtagagatggggtttcaccatgttggccaggctggtctcgaactcctgacctcaggtgatccacccacctcagcctcccaaagtgctgggattacaggcatgagccaccatgcccggccctatttttttttaattaaaatgttaaaggttagggcatagagactcagcaaacgtcatatagagaagtggtaaatggcacagctgagcattggaattggctccccagttgttccagacatctggatattgatcttagtaacttactagtttcaagtcattttgcttaattaatggcttgccatttcatgataggagatgactatttcgttgtggggcaatgcccagcaagagaacataattcagtatgaacagtcaaaggtgttgagtgtatttaactcattttaggaatgagctgtactgtattcaaatgggctacttgatggttcattacctccattctgctgctgttcatttcctccctttgcttgcttatatagtaaacctgctcgtaaccaggacttaaaactcttagactgaagccccttcactgctgtctctagcctcagcctcctaatgggtgggagtagttcattcatagcttttgattggtggataagacttgtcaggctgggtgtggtgggtcacacctgtaatcccagcactttgggaggccgaggtgggaggatcgcttgagcccaggaattgagactagcgtgagtaacatagcaagaccctgtctcaaaaaaaaaaaaaaaaagccttgtcacttagagtttgtgcttcatatcaaatgataacaaccacattgtgctacaccacaagtcacacagtgggaaggatttaagagggttaaatagtttttttgtttcttttttttttttttttttttttttttgagatggtcttgctctgctgcccaggctggagtgcagtggtacagtcagctcactgtaacctcgatgtcctgggctcaagcaatcctgcttcagcctcctaagtagctatttttttttttttttaatttttttgtagagatgaggtaattgctggggtaggggtgatggtggagtggaggggtagtttcactatgtggctcaggccggtcttgaactccggggctcaagtgatgctcccgccttggcctctcaaagtgctgggattacaggtgtgagccactatgcctggcctcagtttcttaaaaggttttaaatcacaccaactggtaccagtgcctctgattgccttgatttttctgtgatcccacttggaagtttgttaatgccacactccactatactccacacattagattgcagtgggggctggagagtggcccagcctttatacataactcccttctgtggtttggcctgtgggaccagtagggtccctgtgctgtaactctgactgaagtgatggacattaatgcaactactaattactgatgtagatgagctgctttacttctatgaccattgaattgacagattggaattggaagcacctgtcaccttcaagcttttaagacaacttcacatgaatgtacagcttagccatagctgtatctcatactaacagatttttgcagtggtgtgcacccagcacttatactttggtggaaaagcaaaataaggttcctgttcttcaacagttgagggttttaagtcacaactaagtgcttggttgtgcttatactaggtacattcctataccacgggaaccaggtagtggctttcctggccatttgctaagttatggttagacaggaacaagtgtaaactagtctttgtcatagtgtagtttcctgttgttgaaatattcctttgctttctcggcttccctaacatgtaaattctgaagacccatcttaaactctccccagtgtcccaaatgaatttattccagtgaagggtaaggggcttgcattatgaacaataggtaggtttcttttccaagagctctggtctgcttttgttcatttactcatctcattttgtgctgtaggagatatacactccttttgtgcacactgtagatgcacaggtatttggtgatgcctcagtcctggagatcatcaggaaggcggtatagtactgttgtctcagacaccccacaggtgatagacattaaaagaatgtagatttcagccgggagggatgggggcagaattgactaccctatagatgtcctttgaaaattttgatacagatcacattttttagaggtgagttctaccttatttgcactatgcatgcttgctacttaaaatttattcctttgatcaactcctgtaaatgtggagtccaggatttcctaccttccttccccagcagtcagacaaatagggagaattatattccatgtttgtgcaaggctaacattagcatagatcatgaggggagaccatgtgagtctcactgctgttgtagtggcagggtagatttcagattggggtgaattacaaaatgtgaactgttgctaaaatggttggatatagaaataacattctcagaatcggttcgtggttccatcagttatgtgacttaggacagattatttccctctggcctcagtgtttcttttacagtatgggattaaattagataagcttgtgtccagttttaagcttctgtgattgtatgaacctagccattcggtttctggaaatctgtactgagtttggaccttaaactaaagtgaccaggaatggagctccaaattttgatctgggtactgctctcctggtttccctagtgtggtagtgattctacactgcagcttgagaaattcaaaggggaagagtcttcatctctccttttgggggctgtccctgtcctgctagttatatcctggagcaggtagaccagaggcattcctcctggatccactcctccttggtccaattaaccaagaaggagttaatgatactgcagaaggacccaaaggtgcacttccctgtttgtgagcacctacagggacagttgacactgggtacttactctgtgccgggcaggggatactttctatgactgtcctcatgtaatcctcacaaataacactgtaaagttaacattatcatccctactttacaggtggggtaatccaggcagagaaaaataattaatagtaaggggaaaacaaagatgttttaatcatggatgcttgtatgactcctcaggtagaaaccctccctcaactatccccagcccctccctgacttttagggaaagtgggaggccactggcagcagtcttctgtcatggattctgagctgctggggaaggagccttttcagtttgccaactccaactatagtgtggagggcccttacctattggtagggcttcttggcctccacggtcaagcttatgattgcagagggggacctgaacttactttgttgtttttttgttttcgcaacagagtctcactctgttgcttaggctgcagtgcagtggcgtgatctcagctccgcctcctgggttcaagcaattctcctgcctcagcctgccaagtagctgggattacaggtgtgcaccaccacacctggctaatttttgtatttttagtagagacagggtttcaccatgttggccaggctggtctcgaactcctgacctcaggtgatccagcctcccaaagtgctgggattacaggtgtgagccactgcaccctgcctgaacttattttgaagtactcacgtgaagactttgtgttggtgtgttcagagtctctgggcagagaaaaacacccactccgctacagtcctatcctgcttttgagagcctgtttgcaggttctagcaggggagcactcgtatatccttgaccaaagaccagtcctcctctctcagggatggtcgtcttcaatcgagcatgcagcttcgggacagatgcatgtggagcggtgagggaggaaggggacacccacctagtcagccagatcagccaaatcaaccctggtgatcaatggggtgacagatgtcacagccagatggccctatcctgcttttgaagaccatgtagtcctcctcagtttgcttctttccttctccatatccagttttgtcgtcaagttaggttctttttgaagagttagttgtacagtggtcagatttgttcaacttttggataagcctttggggatgttggggttagattagtggctttggttttttgtttttgaccttcacccagtacagtaaagtggaaaaccttgtggccatcttctttttcatattttcccaccttttagtttttgtgtgcacatgttaagctttgtagtgttgccaaatactttgtgtcagcctgactccttagtagtatatggatctaaaccaaatttattgaaaatttcagtttatgagtaccattcagtagcccttagtcatatgtatgaataaggaatgtgtagttttatagaaaggattttcatttttggttcagtttgtgacctgtgaggaatatccttagagctgctgatgtaaatttggagaatcctcgagttagaaaagtagggataagaaaacttgtctaccttctccatgtcctttgatggggccaaaaaggaaaaagaagagtggtggtggttggtgtagtttgtcttttcagtcttacgggaaacaatgttccatgggtggtcctttgtaagcctatggaggattttctgattggctttcaagacttgatcctgcatctgtgagctgatccagcatgccaaggtaggcaataggagtgtgagcatgacattggtttattaaaggagtggccctgccacccagaccttcagccctctatgccaccttcttgcagcctctgtacaacttctggtcattacctggggtggataaggaattgggaattgcaggctggtgcctttctgggttaggactttggaagtggaagagggaagtgttaaggactgacaaatgaatttcagctcatttggcactgaattagatcccactggacccaggagaaatctgttcttggttatgaataggaaaattagaacctcccaaggcaagggaagggtggccatagaaaatgaagggcaagttactcccttgtagcagagaatgggattccctatcgacagtagtatgctggtaaactggctggcagggtgaaggaagccatgactttttgcagttgcccaatttctacagttttaaacttaccaaggccacctgcttcaacgatttcctgatatgtaacagttggctcttgcaagccatacaagcttgcgccagcacactgctgcagacttgcctcaagtatttgaattcccattatgtgctcaggtatatgctgtgtggcaggagatgctgaaacagtgtttattctgaagagctttgtcatttaattgacaggcaagaagctggagaaacatcgacagaatacagtcgtgtggcatgaattgaatatagtggtccagagtgagaagttgagtgctggaaagatcatgaaaaggggagcatatataagctaggcttgaaggataacgataatagctaacacgtggtcatagcagttccagcctctgtactaagcatcatgcatacattatttatattaatcttcagaaatagatactatcccccagtttacacctgaggaacctgaagtttagtgagattaagtatttgcccaagttatatagatatgacatcaatttagtgttgtagtatgtcattattgtggctaggaaggaataaggccagtatttggagcctggtcacttcactgcagaacccacactcttgcccactgcatcagattgcaacaatataaaaaggggggcttttcaaagagaggaaaaaagtctaacaacagtccaaggtttgagattaggtaggaatcagaatatttgagttctagtcttcatttcacttaaccatatatgtggccttagccaaaccacatcttccctctatgccttggattgagggacttgaattagatggccactcagttcttttttatttctgacattttgtgaattttaagttataaaaatgggaatgagtatgcctttcttaagggacactgagagaatgtgccctgctagggcacattgaggttggcagagggagtaaacagaagaaaacaaactataaagggtaactcctaagtggtagaaagcagaggcagaaaaatgttggagctatagactcagctgttccattcgcaacacccgactagtcccaaatggaagggtcagggggtggggacctaacagagaagataaattggtgtttggtgttgggtgttcctagaaagcctacttctctcagtgtctcagtagcaggtcagagctagatttgggtcatttctgaggatccttgagtatcactcctttcctagcattcataaatttaacagatatcagtagagcacctgctgtgttccaggcgttggcacagaagcaagactaatctggtccctctgcttgttgaagttacagtccaagaggagaaatacataataagcaagttacacattttgataggattataagaattggggttttgttggattagagtcagggaatgtctgtgacttcaacataacagataggaggggactgagagtggaaatggtaaaaccagttagactgttagagacatcgagccaagatgtgctcggtgatgaaagagtgcacaaatatcacaaaaataaatgacaaattttttttattgactcaaatgtgatatttaatatggttctggaagattttggtcctaaaaaggaggttgaaagtccatggcgttaattataatggcagtatatgaaaaatacatgagtctggtttaaagtaggtagttgttcaagagatgtaggacagaagagtgacatgaacagttttaatcacagatttctaagcagagataggcttagaggtagatttcaaaggagattaaacatgttttggaagagattaataatcccgtggtttatagatcatttaaaggaaatgttgctcaaaggatagaaaactacagatggaaaagatttgtttataaagagttgattccaatgagaaagaaaaggagacaaatctgtgaacaaaactgcttgcacaggaagctctgacctcagaatggaagccaggccaccttaggggctcacatcagtgagagttcagccccttatcctactgaggcacacatgagcccacaacagtatggctggggtttgattctgggttcaaaaaactgaaaaaggatttagtccaggaaaagtggtgtaatggtaatgattaggaaggaatagtccaccagaaattgaggcctacacaggaagatgataatagtagcccactacacgtgtttggcccagaccaagggcatctcttttggggacatttgagaagtcgtggagtgagaagacagcagctccagttgtggcctgtaatcttaccaccccaaataatcactgctaatgcttttgtcattcacaacaacctcttaccagggggaggacctgtagttctccaattaaaaatttccctagctgggtgcggtggctcatgcctgtaatcccagcactttgggaggccaaggcgggcggatcacctcaggtcaggagttcaataccagcctagccaacatggtgaaaccctgtctctacaaaaatatgaaaattagccgggcatgatggcaggtgcctgtaatcccagctactctggaggctgtagtgggagaatcgctggaacccaggaggcggaggttactatgagccgagatggtgccattgcactccagcctgggcaacagagtgagactctgtctaaaaaaaaaataatagtttccccaacattttattatgaaaattttcaacatgtagcaaagttgaaaaaaattatacccatatatccgccatttcagatcctacaacttaaaatcttgttttatcacatttcttcaacaactccttttattttttggtggatttcaaaaaagtttcagtcatcggtacacttgtaaacatttcaacatgccttaactttagtgcaacatttgtttatgggttgttgggttttgttttttttttttgtaaaattttacaatcagatgtgtacactcagtgttcctttagatggaagtggcaaatgcacacactcctgtgacccatattcttagaatgctaagaacgtttccctttccactgggagctctctgcctctgctcagttaataccttcccttcccctgggggagaagggaggacaaccagtgttctgaatatttacatcacagattcgttttgcctgttctgaaacttcataaatggaatctgtttactttattcttcatttttattcatgttacagatactaatagatttttttgttgctgaatagttttctataaacatcacaattggttctcatattgatgaatacctgggctgtttcaagtttttggctattgtgaataaagctgctgtgaacattcttatacaaatctttgtggacataatgtttccatttcttttggctaaaaatgtaggagtggaatcgctcttgggctaggtgtttgttaggttttttgataagctgccagactgttttccaaagtggtacatttaatgctttcactaacaatatatgagagttccatatccttgccagcatttggtggtggtggtctttttaattatacttttagccattgtggtgggtatgtaacagtatctcattgtggttttatttttcatttccctgataattaacgctgtggatcactttgcttatttctgattcacatattttcctttatgaagtgcctgatcaaatcttttgcccattttaattgactatcatttaatattgagttgtaggagtcctgcatttaaatttcaaagttgaactatacaagatcaggataggggagatttattgttacacatcagttcaaggcctgaagtgtgacttgagcaaaagcacattcaccatttgttcagcaaatggttattagtaccagctatatactaagtactaatactagtgatacagagataatatccagccctagttcaaggaccccatagtttacagggtagacagacaaaagtaaaaattatggtgtggcttcaatgttaagtcagtcactaaatacttactgatgagtatctactgtaggatagatagatactgctgtgggtcctggagctagccagagttcctactctagtatagcttattttctgtagtgtataaggagggagacagagtgcaaaagccctgaggtggtaaataaggttggtgttaggtatatgtggatcagaaaggccaacctggctggaggatagttgcgtggctagatgattagttaggcaagggtaaggtcttgcagggccttgaagaccatggtaagaactttgggttttatcttaagtgttttggaaaggcattccagagttttcagtggaaaaatgacatgatcaggtttctgtttggctaataaacccagaaatgtgtgtgtatggtcgcagaaacactaatgaggaaacatcgcagtcatccagagcagagacaagaaaatccttggggaaaacaggcaagggttcataaaggaataatgtcatattagaaccatggatgacaggacatttgctaggcaggaaagtcaggcatgtgtgttagatgaaccagaaataactttggatgactagttcggtgggtgggtgagtgagcggcaggaggtagagctgatggcaaactgggaagagctttgaaggttgatctagggatgcagggttaccagattgcaaaactaccaaattctatgtaggtatgtcctttggagttgtgcagcaaggtagctttgctagggagtttggctccgaacctaaaggcagctatacggggcttttacttggaatagagactggaagctggcatctgggatgaccaggtggagcagtgctaggacagaaaccaagcaggacgcaagagactaataaggcctgaagttaggtaggggttgttgaactggaagtggaggctttgggcttagaatgaacagtcaagaagatttgaggtgtggatttggggggaaagctgatgaggcctttttatttattttgcttgttttgtttttgttttttatttcatataaggccttttaaaaaatacaaaacagtataaaatattgaaacaatacagaattatggagttcacaaaattcttatcttccactcctttgagctacctaaaacatttgatgcatcttctatttttctgtgtgtgtatttatttatgtttgtattcaaatctgttataaagatacacctacaattgaagtttaaaatggaagtttacaattgaagtaaaaaatggtcatactcttcctattattattattattatttgagatggagtcttgtgtacagtgccatgatctcggctcactgcaacctccaactcccaggttcaagtgattctcctggctcccgagtagctgggactacaggtgtgcaccaccacacccagctgatatttgtatttttggtagagactgggtttcaccacgttggccacgctggtcttgaactgacctcaagtgatccgcctgcctcggcgtcccaaaacgctgggattacaacagtgagccactgcgcccggcctatttttgattttttcataggataccaatataatatagttctggcttgttttttagccactattcagcattccgttgttcagatgtatcatatttagttgatagacctttaagctgccttagatttttcactattcccagcattagtgaaatgagcattcttttttatttgtctctgtactgtgtaaacactgcctgggagagcatgtgaggtgacatgcatggagttcagattgtgacttgggggaagctgtgatcctgatcccttgagggagcatgtattctgctctgggtctgtccttggggaacccccaagggagtgatcaggatggtcagaagtctgcaggccacattctaggggcaacagccaaaagaactgcggctgtttctccagatttcagctgggactgttcacagcttccaggtatcagatgagttctcatagggagatagggtaaggccttcccatggagccctaggctggggaagaactaccaggtagaagtaagaattccacagagttaggtcagtttgggtaggatttgtatggacctagactttctgatgattggattgtaagactgggttttctatcactgggactgttcatgcaggggccagggtgctgtggaggggcagtatgtgaagcaagttgaactctgaagcattccaactttgataacagcattccagatggaaactatgagggaccaagatgaggtgctgtgggctgcgagggaggagcgattgactgaggatcagtataggggagggctgacgctggaggcatctcagggtatagctttgggaaacatggaatgctgagtgaagctcagtgaaagatctgacctcgtgtgcactgctggtggagtggtcttcaggtatatgggccaagggggacacagggataacaagaggtctgagggtgattgttatggtggctgcaggaggacggaattacccaggtgttgtcgtggtgaaccatgcaagaaaataatgttcccagcagagggaaggggtgaatcagagaagcttggtgctgcctgattacaagggcgagacatcagttagtttggagctggctgggcagggagctggggctggagatgaactttcagatttcattctgcaaatatgtattgtctaggtgcttgggatagagcaataaacagaacagctaaatattcctttctcacagaatttatattctagtgggggaaacagtatatacatgtatataatgttagacattgagaaaaagcaaaaaaggggtatgcaatgccaggggcagtggggttgaaattttagaggggctaaaagggagagcctttatatatatatgtatatataaaacagggaagattattttgagtaaagacttgtggggaaagggagcagtgagccatgtggatataatgcagagaaagaacacattccaggtactgcaaagtgtttggggtagaaacaaacttggctggctgggtgtggtggcacacactatcatgccaggactttgggaggctgaggtgggtggattgcttgatccgaggagttgcccagcagcctgggcaacatagtgagaccctgtctctacaaaaaaaaaaaaaaaaaaatagctgggtgtggtgatgcacacctgtagtcccagctacttgggaggctgaggtgggagggatcgcttgaacccaaggggcagaggttgtggtgagctgagatctcaccactgcacttcagcctgggtgacagtgagactctgtctcacgaaagaaggaacaaacaaacttggcttatttgaggagtgacaaagtggctgaaatggagtgagcaagagagacactccgagatcaggttaaagaaatctggaccttccaggaccttataggccatggtatagtttggactttttttcttttcttttctttttggaaatggagtctagctttgttgcccaggctggagtacggtggcgcgatctcggcttacttcaacctccacccgccaggttcaagcgattctcctgcctcagcctcccaaagtgctaggattacaggcgcccaccaccataccagctaattttttttatttttagtagagacagggtttcaccatgttggtcaggctggtctcgaactcctgacctcaagtgagccaccatatctggccaagtttggagtttttctaagctcagtaggaaatgggaagtactagagggttcaggcagaggcgtgatatgacctcacttttttttttttttttttgtgacagagtcaacctcggtcccccaggctggagtgcagtggcgccatctcggctcactgcaagctctgcctcccggattcacgccattctcctgcctcagcctcccgagtagctgggactacaggcgcccgccaccacacctggctaattttttgtatttttagtagagacagggtctcaccatgttagccaggatggtctcgatctcctgacctcgtgatccacccaccttggcctcccaaggtgctgggattacaggcttgagccaccgtccccggccttttttttttttttttttttgagacggaatcttgctcttgttgcccaggctggagtacagtggcacagtctcggctcactgcaacctccacctcctgggttcaagcaattctcctgcctcagcctcctgagtagccaggattataggcacacgccaacatgcctggctaatttttgtatttttttttttagtagagacggggtttcaccatgttggccaggctggtctcaaactcctgacctcaagtgatctgcccaccttggcctcccaaagtgccaggattacaggcatgagccactgtgtccggcctcacttatgttttaataggatcgccctgattgctgtatttagaatagcctgttggggtggacatgggggaacggaggtggagacagcatagaataagggagaccagttgaagaggctaatgctgtaagccaggtgacaaacagtgatggcttagattgggcagcagcagtggaaatagtgaggagttgaacattagcagtagaggtgaggagaattagtagggggatcataactccaccacaagagttagatccccagggttagtgagaaattattggaagaagataatttgtggaggatattatctggatcatagttatatttggggttatgttaggatcagaacttggattagggtctggcctggggccagtaagggggtcagaaagatttattggtctttgcaaagaccaagattagagtctgggtttggacagccctattgggattaagacaaattttagggtgaggatagtttggggtcacagttgtagatggaggctagtaccccttttcaatatcttcagaccagggttggttgtatctgccatcttctgtgccagtgagctcacctaggggtggaggggtttggaggctatgaggccttctcttccttgggtgtcacgggggtggacgtatgctcagccctgcctgggtgatgcctgctggccttcccaagctgggacctgtagtcggggaaggggagagaaggctccctggtgcttgacccagctccttttccctcagatggcccactgcgtgaccttggttcagctgtccatttcctgtgaccatctcattgacaaggacatcggctccaagtctgacccactctgcgtccttttacaggatgtgggagggggcagctgggctgaggtgaggcggattatggaggttaaggttgtggagggaggctaggattgtgttttggggtggaggctgtgactgtgatgcttactggcctctgcccacagcttggccggactgaacgggtgcggaactgctcaagccctgagttctccaagactctacagcttgagtaccgctttgagacagtccagaagctacgctttggaatctatgacatagacaacaagacgccagagctgagggatgatgacttcctagggggtgctgagtgttccctaggacaggtatgtagggctggggattaggatccttcagatgcaggtctgtgagacaacctagcctgcctggaggtagggggcaagcaggacctaaccctgcctgttatcctgaaactcccttccctgcttttccccagattgtgtccagccaggtactgactctccccttgatgctgaagcctggaaaacctgctgggcgggggaccatcacggtaaggaacccagcaagggttgaggagggacttaacatcaatgaattcatgaggtgatgtagtctcccctacctaggtctcagctcaggaattaaaggacaatcgtgtagtaaccatggaggtagaggccagaaacctagataagaaggtgtgtctggaagtaggccctggtaatccaagagttaaggggccaaggatggtgtatgggggatgggggtgtggacagagggatggcataatggttgtttgttcctgagtcttgtaactggggtctcgcattggcaggacttcctgggaaaatcagatccatttctggagttcttccgccagggtgatgggaaatggcacctggtgtacagatctgaggtatgagacccctgggattgggtgggctggggtaggagataatctcctggggcctgtgactagcaaggtttggaactcagaaagagactgcaggtgggtagagaagtgtggcagctcctcagggggccatgccagagctcactggaggccttggcctccaccttcaggtcatcaagaacaacctgaaccctacatggaagcgtttctcagtccccgttcagcatttctgtggtgggaaccccagcacacccatccaggtgaggagcttgccccctaagtggactgcgctggagaagagaacctggggagggacttattctcatctgccacctggcttgtttatgtccacacacacctttccctcaggtgcaatgctccgattatgacagtgacgggtcacatgatctcatcggtaccttccacaccagcttggcccagctgcaggcagtcccggtgagtgctggtcttgccaggggtgtggaaatgggcctagatagctgaagcttgtgggagagaggaaggagaaggcagctcgagtccttgactgatgctctgagaatttcctaccctaatttttctgtcctcaccaggctgagtttgaatgcatccaccctgagaagcagcagaaaaagaaaagctacaagaactctggaactatccgtgtcaagatttgtcgggtgagacaaaagcccatgtaaccaaggctctgattcctgagctccatgacaccaactgctatcaccccaggcatgaccctggtttcatttgcaggtagaaacagagtactcctttctggactatgtgatgggaggctgtcagatcaacttcactgtaagttactttaccaagggcaagagaacaggtctggggctcagggtggcctttagctgccttcctcacctcctcccaggtgggcgtggacttcactggctccaatggagacccctcctcacctgactccctacactacctgagtccaacaggggtcaatgagtacctgatggcactgtggagtgtgggcagcgtggttcaggactatgactcgtgagtacctgcttctctgggctatacccgctccctgcagatgcttcagcctctgagcttacagtcccctcactgccttttgcccaatacactgtcctcccacagagacaagctgttccctgcatttggatttggggcccaggttccccctgactggcaggtgagctccctctctttctgccactcctgttttcagtttcagggtcctgattttgggggatgtggtaaatttacttgctacttggcactcagctttaagaggagatgcagggttggattcctgcaggcacgtagacagcaagtgctcaggactccatagctcctataggaatcttggcacacgccagtgtcctttttcattcttagcagaggtcatggggaaagaacctcattttcattcttgtctccaggtctcgcatgaatttgccttgaatttcaaccccagtaacccctactgtgcaggtaagtttccccatccaccctgaggcaggtctgtccacacaaagaggggcaagcctgcatgagtaaaagggagagtgggggcagatacctgccttcattgtccagagggtggattttatttaattttagtttaatttattttttgagaaagagtcttgctctgtcacccaggctggagtgcggtggcgcaatcttagctcacttgcaacctctgcctactgggttcgagcaattcttctgcctcagcctcccaagtagctgggactacagtcgcttgccaccgtgcctggctaatttttgtatgtttagtagagacggggttttgccatgttggccagggtggtctcgaattcctgacctcaggtgattgacctgccttggcctcccaaagtgctgggattacaggtattgagccacagcgcctgacccagagggtggattttagagctaggcctctggaatcaaatcgtcatgccaggccaggagtggtggctcacgcccgtaatcctagcactcagttgcgaggccaaggtgggtggatcgcttgagcccaggaatttgagactagcttgggaaacatggcaaaaccccatctctactaaaattacaaaaattagccgagcatgatggcaggcgcctgtagttctagctactcaggaggctgaggtgggaggatcacctgagcccaggaggttgaggttgtggtgagccatgatcatgatcatgccactatactccagcctgggtgatagagtgagaacctatctcaaaaaaaaaaaaaaatgatgccacatgacttggggcaggttgcttaatctctgtgtgctttggtttcataagactaaacataggaaattgagtactcaaggagaggatacaagtaaagcagtaagcctggtacttactaagtgttctccgaaaaatggtatctgttatattatcgttattatctttgcctagaagctaacaggtacttacttgagcatcagtggaagccttgtttgcctccttgcagggtgcattttgccagagtccaccaagcccttttgtttagggccaaaccttttgactccccagtacccccaagggggcacaagctgaagtggaaaatctgacctgacctgatctgatctgggttttaaaattttaattttgtatttcaacataagttcagacttagagaaaagttgcaagaatagtcataggagctcagtcccttggaactcaggggtcagggcctgagttcacaggggctcttcacctttatcccaattaccctaacataacattttaccacatttgttttctcttttctcatacatgtatacagtgtgtatgtgtgtgtatatgtgtgtgtgtgtgtacacatgtatacatatacacacacattcacacatttcaagggaaaaaagattaaaaatatgtgtttatgtatgtacacacatgtatacgtgtgttggagaatgctgtagtgaatagccctgcctcaggtttgcttctatggccctaccagctttgtacccatcattatccacctggctttttacctctgagtacttcagtatctcctaaaatcaaagactctttcttacattatcacagaccaatcctcaaaatcaggaaatgaacatctatgctattatccagcctatagcatttattcagatgttgccaattgtcctaatgtcttttacagcaaaagaaaatctcagatcacacattgcgttcagttagcacatatctttttatatggaagacttcttgcctttcatgacattcacatttcatgatataaacagtataggccagatattttctagaatgtccctcagtttgggtttacctgataaatcctcaggattagattcaggttgtacatttttggcaggaataccaccaaagtgatgctgtatattctcagtgcatcatattcagaggaacatgatgttgatttgtcctattaccagtcatgttgactttggtcacttagttaaggtaagatctaccaggtttctccactatacaagtactattttctcctttctatttagtaagtatattctgggaagagactatacaaatactcatcacacacacatcaacattcccctctagtttttttttttttaatttattttttattttttattttttgagatggagtcttgctctgtcacccaggctggaatgcggtggcgcgatcttggctcactgcaagctccacctcctgggttcacgccattctcctgcctcagcctcccgagtagctgggactacaggcgcccaccaccacgcccggctagttttttttttgtatttttagtagagacggggtttcactgtgttagctgggatggtctcaatctcctgaccttgtgatccgcccgcctcagcctcccaaagtgctgggattacaggcctgagccactgcgcccggccttagtttttttattttttaagtgacgggggtctcactatgttgcctaagctggccttgaacccctgggctcaagcagtcctcccacctcagcctcgtgagtagctgggactacaggcacatgccactgtgcctggctatactctctagttttaacatccattgatgatccttgcctgaatcagtcatttctgtgattgtcaaatgattgtgtaattcttccttttacatttattaggagctttcccttctccctcagtaattaatccatagtacggatccttattgtatcaaatggatcattattaaataggttataatctgatgctcaaactctcctggatttgtccaggagaatccctctcatctgggtgctaattcaagctgtgatttagggcaagtcccctcctctctttgaaccttagtttcctcatgtgtaggagacagttaagtaccctggtttacaagggtgaatgaatgaaatgcacccaggttccgagatctcctgggctgggatggggtgatttcaggactggtgtagtcctgagaggtccaggattttacggtatttcttgctctcctctgcaggcatccagggcattgtggatgcctaccgccaagccctgccccaagttcgcctctatggccctaccaactttgcacccatcatcaaccatgtggccaggtttgcagcccaggctgcacatcaggggactgcctcggtgagagtcgtgggtggcagtggcagtggtggcaatcaagggcttccttgagggttatggaacaaaggacttttttttttttttttttttttgagatggactcttgctctgtcacccaggctggagtgcagtgacgcgatctcagctcactgcaacctgcacctcctgggttcaagtgattctcctgcctcagccttcctagtagcttggattacaggcgtgtgccaccatgcccagctaatttttatatttttagtagagacgggctttcaccatgttggctggggtggtcacaaactcctgacctcaagtgatccgcctgccttagcctcccaaagtgctgggattacaggtgtgagccatcgcacccggcctgtaacaagggacttcttatgagtgtggggatgtgtggctggggtgtttgcaggggtttaggaggaggatctgcttcaggacatgaatgggcttgtccccagcaatacttcatgctgttgctgctgactgatggtgctgtgacggatgtggaagccacacgtgaggctgtggtgcgtgcctcgaacctgcccatgtcagtgatcattgtgggtgtgggtggtgctgactttgaggccatggagcagctggacgctgatggtggacccctgcatacacgttctgggcaggctgctgcccgcgacattgtgcagtttgtaccctaccgccggttccagaatgtgagtaggtgcaaatttgatctgggagtttaccctttcacctttccctgatgtgagtagggttgaggcccaagggatgctcaccttttcctctaagcctgggatatggttgggttcttgagcatgaaatacagactttgggcagctgttctgggccaccactgacttttcccttttcttggcaggcccctcgggaggcattggcacagaccgtgctcgcagaagtgcccacacaactggtctcatacttcagggcccagggttgggccccgctcaagccacttccaccctcagccaaggatcctgcacaggccccccaggcctaggttcccttggaggctgtggcaagtcctcaatcctgtgtcccagaggtccctctgggccacaacccaacccttctcactctcctcagtgctagcactttgtattttttgatacttttatacttgtttctgcttttgctgctcttgatcccacctttgctcctgacaaccctcattcaataaagaccagtgaagaccaatgctttgccacc

SEQ ID NO: 8229 - DNA, 121 bp, Homo sapiens
ccaggtgcagtggctcacacctgtaatcccagcactttgggaggccgaggcaggcggatcacaaggtcaggagattgagaccatcctggctaacagggtgaaaccccgtctctactaaaaa

SEQ ID NO: 8230 - DNA, 315 bp, Homo sapiens
taaactttttttttttttttttttttttttgagatggagtcttgctctttcgcccaggccggagtgcagtggcgcaatctcggctcactgcaagctccgcctcccaggttcacgctattctcctgcctcagcctcccgagtagctgggactacaggtgcccgccaccacgcccggctaattttttgtattttttagaagagacggggtttcaccgtgttagccaggatggtctcgatctcccgacctcgtgatccgcccgcctcggcctcccaaagtgctgggattacaggcgtgagccaccgcgcccggccccc

SEQ ID NO: 8231 - DNA, 9308 bp, Homo sapiens; identical to SEQ ID NO: 5756

SEQ ID NO: 8232 - DNA, 224 bp, Homo sapiens
ttttgtatttttagtagaggcggggtttttccatgttggtcaggctggtcttgagctcctgacctcaggtgatctgcccgcctcggcctcctgaagtgctgggattataggcgtgaaccatcacgcccagcccatagtgctcttcagtgtcagttataatgaccaaagttctagcactgtggcctcaacctctaggtctacaactgcattttactaagtgctag

SEQ ID NO: 8233 - DNA, 428 bp, Homo sapiens; identical to SEQ ID NO: 5751

SEQ ID NO: 8234 - DNA, 6149 bp, Homo sapiens
gtccgtgttcaccctgggagcagcggccggaggcctgagtgccatgatcctcaacgacctcctgggccggaagctgagcatcatgttctcagctgtgccgtcggcggccggctatgcgctcatggcgggtgcgcacggcctctggatgctgctgctcggaaggacgctgacgggcttcgccggggggctcacagctgcctgcatcccggtaaggccaggccttcccacccaggcgccccaatgcctctgtattggtgctgagcctccatctgactaaggcctcccagcctccatgccttctgggcaatgagaattgtttgccttccctgcggatgcccagggcgcctcagctcacccccagcagggcagctaatttgggggaaattgtctccaggtccccagctgcccccactctggactttccaagccttctaccccgtttcttgaccggtcagatgtattactcaattggagaaaatccgcattgagcaatgggtaggagagggaagtccctgccctacaccctccccgggaccttcttatcttatgtggtactccacacggggcctggtggtgagcccagcagaggagacaaaactcactgggaggcatggactcacctgctcagccctgaagcctgggagccctcgggcctccttcccagcgtcatgctgcccatttccgagctgcgtacttccacccacgtcacagttagggaaactgaggacagagagagatcaggcaggccgcccaaggtcttgcagtgagtcatgaccaggactcagccccaccagaaagcctccacttcccactttccggggttcacaggggctgactctcccatctcggccgggcctaggaaccagtattttcagcaaaacctggtgcggcggctgtgtcttgcaggtgtacgtgtctgagattgctcccccaggcgttcgtggggctctgggggccacaccccagctcatggcagtgttcggatccctgtccctctacgcccttggcaagtatggccccgcactcctgtgtgcaggctggtgggaggggtgggtgccgccaaggtagacgtgggtggaaagggaatgatttgtcccagaacagatcctgggctgagaggcaagagatctggcatcccggccccactcagtcagcaccttgctgggcacctccaggcagggcctgcccctctagccacaggcccagtctctagctggggcagccagggcttctcctggacccacagtcgccagactatcttttaacggcagaaagcttccatcaaatgccatctcagatgggaagtccagatagaaaagaaatcacagtgcgtgcagctgctcagttgagggggcgtggaggtcttgggtggaggcctagggccttgcctgcccaacctaccccttcctcatcctgccctggccctaagactttccaaggacttcccactatgtgccaggggctgagcaatccctgcagccccaccctgcctggggcaatcagggtaggcttcctgtaggagatggcccttggactagaccttgaagggcagatgaggttattcagaggctccagagggaaggggctgtaccaggcctggacctggcccctcacccacccctcgcccccaggcctcctgctgccgtggcgctggctggctgtggccggggaggcgcctgtgctcatcatgatcctgctgctcagcttcatgcccaactcgccgcgcttcctgctctctcggggcagggacgaagaggccctgcgggcgctggcctggctgcgtgggacggacgtcgatgtccactgggagttcgagcagatccaggacaacgtccggagacaggtgcaggagggtgtgcgcccgaaccgggcaggcccacctccagcacttcagctgtgtgtggccgtggaggcttttcctggaagacaggaccacagtagttcccactaatccaagtgcctgggttggggtggggggctgttcccagagcctgggtggcctggtaagctggttctttcctggaggagggaaaaaggaggtctcccacacaacccctggcggtccagggcaggatggcgcctgctggagaggctggcccaacgccctcagcggcggccttgtgtttcagagcagccgagtatcgtgggctgaggcacgggccccacacgtgtgccggcccatcaccgtggccttgctgatgcgcctcctgcagcagctgacgggcatcacgcccatcctggtctacctgcagtccatcttcgacagcaccgctgtcctgctggtgagagcccagccccggccggcgcccacccacggggtcccctggaggctggcagggcaggggaggcagggcctgctcctgcacttacccaacccctggtcttacccacacctgctctgtgccgggtgtcagggatgccacagcaagatctgagatctgggccttgtggagacagttccagtgccttcacctgttctcagaatgtttttaagataagcttaagtgttttaaaataaaatactggcaaaatcccaacacgaggccaaggcgggaggatcacttaagcccaggagtgtgagactgcagtggccacgatctcaccactgcgctccatcctggtgacagagcaggaccctgtctctaaaaacatatagaaattttaaaaattaaataaaatacatgggattacaaaggaaaccagctttatagaaacgtggaccccttgaggccacagaccccaggttcagagccctgtggcatctgccacttaatgagggaagtcactttcccctctgaacctcaacttcctcctctgcaagatgaagatagcagcacatctccatcagcctgccccaaggctcaaagtgagatgagatttgaagattagtaacagcacggttcagcaagtcatcatcacgcctggattctgtgccagctgggcatagtggtgggcagagcagatgtgtccctgcccaggagccccataggctcggacagtatagatgcccagcacgctgcaggtgccaggccactcagtactgcactgagctgctggcctgagcccctgcaatgcctgccgggacaagctgggtcctggagggggatgggaacagcaggcaggtccctcagccctggtggtctccccccgatagccccccaaggacgacgcagccatcgttggggccgtgcggctcctgtccgtgctgatcgccgccctcaccatggacctcgcaggccgcaaggtgctgctcttcgtctcaggtaagcaccctgcaggcagccctcctgccccactcctccgcatgggtcagggctgggctgggtgtgcaggcctgcctcggggtggggctgtgtggctgggaactgcagagcacctgcctccctagcatcggcagggccctggcccaggccagtggtccagaaaggtccgctggggctccgagtggacacactggctgtgacactccacggtgggagcctaacacgcggctggagacagagcttgctgccctgctgggggtctctagtcccagacacgagctggaccacgcaagtatcaaggggctctgcagaaggagctctgagagaaacagctggctcagagggtcctggccccacgaggccacctgtctgtccacagcggccatcatgtttgctgccaacctgactctggggctgtacatccactttggccccaggcctctgagccccaacagcactgcgggcctggaaagcgagtcctggggggacttggcgcagcccctggcagcacccgctggctacctcaccctggtgcccctgctggccaccatgctcttcatcatgggtaggtgtggtggtggctcagaggggcaggctgtcttgggtgttaagggatgggtgatgtgtctggggtggctggagaggggggtctccagcagctcagcggagacagacacagccgcctccagtcaccccacagggcctgaacctgcctcctcctccgagcaggctacgccgtgggctggggtcccatcacctggctgctcatgtctgaggtcctgcccctgcgtgcccgtggcgtggcctcagggctctgcgtgctggccagctggctcaccgccttcgtcctcaccaagtccttcctgccagtggtggtgagtgttcagccccaggccccaggcccctaggccctcgctgactggccaggacccttctcagtgccaggggctgtgccaaggcctgctgtcaggaccctaactctcagtgaccctaggagatgagcacacaccccctgaactcagagaccccagagtggtcacgtgatagcctagcaaacgctcttcattataagaaacaggaacgggcgtaggcaactgttctgggaagtcaggttacctcctgggccagggcaggacatggcccaggaccctgccaggggccccggaagccacctccccaccgtgcctcatctcccgtcctcctgggcgctgggtctcagcagcagccacactcccccctcaaccccacccactccccctgcctcctggttcaaaactacgggccctgtgaccagccagaatctgtgaggcccagagtaagttcccatgagggagaagctggctagggcagcctaggccagcgcctaagctgtccctgcagtggtcagggcaggggggttgggggagggcaggcaacccagagtgagtccatcagcctagagggtccaagaagaacctgcgtgcccaccaggctgcagggcgggcctcctgcaggccgcggcatggaacagctgggatgccagcgctgggtagggggtgtggagggggtacctgagctgacgccagagggcccagcccctgaggaaggccgaggggcagacgggatgcagacttcaagggctacttcggatttgtcctggggacagtgggggagccctggtgtgggggggcggtctctgaacacaggaaggaccagatgaaggccccacagggctggtcactaccagcagcgcccacgagctcctctggggcaggaggaccctggagcttctccctgtgacccggccccgctcttcacccgcagagcaccttcggcctccaggtgcctttcttcttcttcgcggccatctgcttggtgagcctggtgttcacaggctgctgtgtgcccgagaccaagggacggtccctggagcagatcgagtccttcttccgcatggggagaaggtccttcttgcgctaggtcaaggtccccgcctggagggggccaaacccccagtggctgggcctctgtgttggctacaaacctgcaccctgggaccaagaggcagcagtcatccctgccaccagccagagcacaggaagagcagtgtgatggggcctcagcagcgggtgcccctggctcgggacaggtagcactgctgtccagccacagccccagcccaggcagcccacagtgctgcacgtagccatgggccgcaggagtgcatacaaccctgcatccagggacacggccctgctgggtgacctcaggcctagtccctttcccttgcgtgaaggacacgccccacagaaggctacggggaggactgagaggacagggctggaggcagccaagtaacgtagtcatatcatcgcgctctgatctggtggcatctggctgtgcaaggaagacccggctttgccctcacaagtcttatgggcaccacagggaacatcctggacttaaaaagccagggcaggccgggcacagtggctcacgcctgtaatcccagcactttgggaggccaaagcaggtggattacccaaggccaggagttcaagaccagcctggccaacatggtgaaaccccgtctctactaaaaaatacaaaaaagctgggtgtggtggcacacacccgtagttccagctacttgggaggctgaggcagcattgcttgaacccgggaggtggaggctgcaatgagctgagatcatgccattgcactccagcctgggcaacgagagtgaaactccgtccccaccccctgccaaaaaaaaaaaaaaaaaagccagggcaaaggacctggcgtggccacttcctcctgccccagcccaacctctgggaacaggcagctcctatctgcaaactgtgttcacccttttgtaaaaataaaggaactggacccgta

SEQ ID NO: 8235 - DNA, 8031 bp, Homo sapiens
gctgctggccccgggcggctgctccagtctgagcgccctccgctcgccccgagagagacccggccatgcaggagccgctgctgggagccgagggcccggactacgacaccttccccgagaagccgcccccgtcgccaggggacagggcgcgggtcgggtgagagtcgctaggttgggggctgcgggtggggcctgggggtggccctggttccctccagccggcggcaggctcccgccctgggcctcccctgacctagtcgccaccgaggggccatctggctccctcctgtcccagacacgctactcctatttaaggaactggtccccctaagggaaggaacgatccacgagagtaccgggcccagccccccactgccacagacagtgagactgaggccccagcgagcaggggttctgcctgaggtcacacagcaagcctccagccgccgccctgggggcagaaccagagcctcctcttccggagaaaaggccccagcaccagaggctcagccactgcggatgagctaacaatggcctgggaatttcccaggggagctggggctcaggccctgggaacgtgaatggccttggacccaggcgtccctagcactgcccgctgagccgggcagccactgggttcagaaaaggcaatggtccctggaggagggactcagagaccctggtctttttgtccgccaccatcaccaggaccctgcagaacaaaagggtgttcctggccaccttcgccgcagtgctcggcaatttcagctttgggtatgccctggtctacacatcccctgtcatcccagccctggagcgctccttggatcctgacctgcatctgaccaaatcccaggcatcctggtttggggtaaggaccatcctctggaggagggtgggtgcaggaaggagggacctgctgagccttatctccagctaggaacctcccaaattctccaccttgggggtccctccagggccctggtcccccctcccccagccatccaggccactagtgggtggggtaaagctacaggattcctctgaaatgaggaactgaaagccagtggagagggtgagggaaggagcaggtggggaggtggctgtcagggtctatactaggtggggctgaggcttccccgggtccccacacccacagttggctggatgggggcaagggtatcaggtgtcagtggggagaggcactggctggggcaaggagagtccgcaggacagattgtgggctgatggagaggaagatcccagagtcccagagtctaaaattataatcttaatagcctcatatgtagagttgttaacatagtagttaagataaaaattcccaaggtttactgagcacttcctatgtgccaggcatgtgttgggcactgaacgttcattgattctcagggccaacgccacgaggtagaacttgcgctctccccataagacagctgaagaaactgaggtgcagacaggctgggcaatgtgcccaggtcccactaccagttagcagagtccagagggggtcccagttgctgctgtacagggaacttaagaacctccaaatcttaaagcccagtaccttcaagtcacagaattctcctgtattaaaatattagacatttaaacatcaggctggacagaaccactgtggatatgtggcgcagcacctcttccttagagcagaattccccgtttgggcatccctaacaaatggctgttccttgaagacaggaggctccctgtttcaagtgcttgacttggccaagtgcttgaccagctcctggggtcggcctagggaagaagctgtccctggactctgatgagactggggtgccaagtgcccagacatatctgccctgcacccccttcccctgcagtccgtgttcaccctgggagcagcggccggaggcctgagtgccatgatcctcaacgacctcctgggccggaagctgagcatcatgttctcagctgtgccgtcggcggccggctatgcgctcatggcgggtgcgcacggcctctggatgctgctgctcggaaggacgctgacgggcttcgccggggggctcacagctgcctgcatcccggtaaggccaggccttcccacccaggcgccccaatgcctctgtattggtgctgagcctccatctgactaaggcctcccagcctccatgccttctgggcaatgagaattgtttgccttccctgcggatgcccagggcgcctcagctcacccccagcagggcagctaatttgggggaaattgtctccaggtccccagctgcccccactctggactttccaagccttctaccccgtttcttgaccggtcagatgtattactcaattggagaaaatccgcattgagcaatgggtaggagagggaagtccctgccctacaccctccccgggaccttcttatcttatgtggtactccacacggggcctggtggtgagcccagcagaggagacaaaactcactgggaggcatggactcacctgctcagccctgaagcctgggagccctcgggcctccttcccagcgtcatgctgcccatttccgagctgcgtacttccacccacgtcacagttagggaaactgaggacagagagagatcaggcaggccgcccaaggtcttgcagtgagtcatgaccaggactcagccccaccagaaagcctccacttcccactttccggggttcacaggggctgactctcccatctcggccgggcctaggaaccagtattttcagcaaaacctggtgcggcggctgtgtcttgcaggtgtacgtgtctgagattgctcccccaggcgttcgtggggctctgggggccacaccccagctcatggcagtgttcggatccctgtccctctacgcccttggcaagtatggccccgcactcctgtgtgcaggctggtgggaggggtgggtgccgccaaggtagacgtgggtggaaagggaatgatttgtcccagaacagatcctgggctgagaggcaagagatctggcatcccggccccactcagtcagcaccttgctgggcacctccaggcagggcctgcccctctagccacaggcccagtctctagctggggcagccagggcttctcctggacccacagtcgccagactatcttttaacggcagaaagcttccatcaaatgccatctcagatgggaagtccagatagaaaagaaatcacagtgcgtgcagctgctcagttgagggggcgtggaggtcttgggtggaggcctagggccttgcctgcccaacctaccccttcctcatcctgccctggccctaagactttccaaggacttcccactatgtgccaggggctgagcaatccctgcagccccaccctgcctggggcaatcagggtaggcttcctgtaggagatggcccttggactagaccttgaagggcagatgaggttattcagaggctccagagggaaggggctgtaccaggcctggacctggcccctcacccacccctcgcccccaggcctcctgctgccgtggcgctggctggctgtggccggggaggcgcctgtgctcatcatgatcctgctgctcagcttcatgcccaactcgccgcgcttcctgctctctcggggcagggacgaagaggccctgcgggcgctggcctggctgcgtgggacggacgtcgatgtccactgggagttcgagcagatccaggacaacgtccggagacaggtgcaggagggtgtgcgcccgaaccgggcaggcccacctccagcacttcagctgtgtgtggccgtggaggcttttcctggaagacaggaccacagtagttcccactaatccaagtgcctgggttggggtggggggctgttcccagagcctgggtggcctggtaagctggttctttcctggaggagggaaaaaggaggtctcccacacaacccctggcggtccagggcaggatggcgcctgctggagaggctggcccaacgccctcagcggcggccttgtgtttcagagcagccgagtatcgtgggctgaggcacgggccccacacgtgtgccggcccatcaccgtggccttgctgatgcgcctcctgcagcagctgacgggcatcacgcccatcctggtctacctgcagtccatcttcgacagcaccgctgtcctgctggtgagagcccagccccggccggcgcccacccacggggtcccctggaggctggcagggcaggggaggcagggcctgctcctgcacttacccaacccctggtcttacccacacctgctctgtgccgggtgtcagggatgccacagcaagatctgagatctgggccttgtggagacagttccagtgccttcacctgttctcagaatgtttttaagataagcttaagtgttttaaaataaaatactggcaaaatcccaacacgaggccaaggcgggaggatcacttaagcccaggagtgtgagactgcagtggccacgatctcaccactgcgctccatcctggtgacagagcaggaccctgtctctaaaaacatatagaaattttaaaaattaaataaaatacatgggattacaaaggaaaccagctttatagaaacgtggaccccttgaggccacagaccccaggttcagagccctgtggcatctgccacttaatgagggaagtcactttcccctctgaacctcaacttcctcctctgcaagatgaagatagcagcacatctccatcagcctgccccaaggctcaaagtgagatgagatttgaagattagtaacagcacggttcagcaagtcatcatcacgcctggattctgtgccagctgggcatagtggtgggcagagcagatgtgtccctgcccaggagccccataggctcggacagtatagatgcccagcacgctgcaggtgccaggccactcagtactgcactgagctgctggcctgagcccctgcaatgcctgccgggacaagctgggtcctggagggggatgggaacagcaggcaggtccctcagccctggtggtctccccccgatagccccccaaggacgacgcagccatcgttggggccgtgcggctcctgtccgtgctgatcgccgccctcaccatggacctcgcaggccgcaaggtgctgctcttcgtctcaggtaagcaccctgcaggcagccctcctgccccactcctccgcatgggtcagggctgggctgggtgtgcaggcctgcctcggggtggggctgtgtggctgggaactgcagagcacctgcctccctagcatcggcagggccctggcccaggccagtggtccagaaaggtccgctggggctccgagtggacacactggctgtgacactccacggtgggagcctaacacgcggctggagacagagcttgctgccctgctgggggtctctagtcccagacacgagctggaccacgcaagtatcaaggggctctgcagaaggagctctgagagaaacagctggctcagagggtcctggccccacgaggccacctgtctgtccacagcggccatcatgtttgctgccaacctgactctggggctgtacatccactttggccccaggcctctgagccccaacagcactgcgggcctggaaagcgagtcctggggggacttggcgcagcccctggcagcacccgctggctacctcaccctggtgcccctgctggccaccatgctcttcatcatgggtaggtgtggtggtggctcagaggggcaggctgtcttgggtgttaagggatgggtgatgtgtctggggtggctggagaggggggtctccagcagctcagcggagacagacacagccgcctccagtcaccccacagggcctgaacctgcctcctcctccgagcaggctacgccgtgggctggggtcccatcacctggctgctcatgtctgaggtcctgcccctgcgtgcccgtggcgtggcctcagggctctgcgtgctggccagctggctcaccgccttcgtcctcaccaagtccttcctgccagtggtggtgagtgttcagccccaggccccaggcccctaggccctcgctgactggccaggacccttctcagtgccaggggctgtgccaaggcctgctgtcaggaccctaactctcagtgaccctaggagatgagcacacaccccctgaactcagagaccccagagtggtcacgtgatagcctagcaaacgctcttcattataagaaacaggaacgggcgtaggcaactgttctgggaagtcaggttacctcctgggccagggcaggacatggcccaggaccctgccaggggccccggaagccacctccccaccgtgcctcatctcccgtcctcctgggcgctgggtctcagcagcagccacactcccccctcaaccccacccactccccctgcctcctggttcaaaactacgggccctgtgaccagccagaatctgtgaggcccagagtaagttcccatgagggagaagctggctagggcagcctaggccagcgcctaagctgtccctgcagtggtcagggcaggggggttgggggagggcaggcaacccagagtgagtccatcagcctagagggtccaagaagaacctgcgtgcccaccaggctgcagggcgggcctcctgcaggccgcggcatggaacagctgggatgccagcgctgggtagggggtgtggagggggtacctgagctgacgccagagggcccagcccctgaggaaggccgaggggcagacgggatgcagacttcaagggctacttcggatttgtcctggggacagtgggggagccctggtgtgggggggcggtctctgaacacaggaaggaccagatgaaggccccacagggctggtcactaccagcagcgcccacgagctcctctggggcaggaggaccctggagcttctccctgtgacccggccccgctcttcacccgcagagcaccttcggcctccaggtgcctttcttcttcttcgcggccatctgcttggtgagcctggtgttcacaggctgctgtgtgcccgagaccaagggacggtccctggagcagatcgagtccttcttccgcatggggagaaggtccttcttgcgctaggtcaaggtccccgcctggagggggccaaacccccagtggctgggcctctgtgttggctacaaacctgcaccctgggaccaagaggcagcagtcatccctgccaccagccagagcacaggaagagcagtgtgatggggcctcagcagcgggtgcccctggctcgggacaggtagcactgctgtccagccacagccccagcccaggcagcccacagtgctgcacgtagccatgggccgcaggagtgcatacaaccctgcatccagggacacggccctgctgggtgacctcaggcctagtccctttcccttgcgtgaaggacacgccccacagaaggctacggggaggactgagaggacagggctggaggcagccaagtaacgtagtcatatcatcgcgctctgatctggtggcatctggctgtgcaaggaagacccggctttgccctcacaagtcttatgggcaccacagggaacatcctggacttaaaaagccagggcaggccgggcacagtggctcacgcctgtaatcccagcactttgggaggccaaagcaggtggattacccaaggccaggagttcaagaccagcctggccaacatggtgaaaccccgtctctactaaaaaatacaaaaaagctgggtgtggtggcacacacccgtagttccagctacttgggaggctgaggcagcattgcttgaacccgggaggtggaggctgcaatgagctgagatcatgccattgcactccagcctgggcaacgagagtgaaactccgtccccaccccctgccaaaaaaaaaaaaaaaaaagccagggcaaaggacctggcgtggccacttcctcctgccccagcccaacctctgggaacaggcagctcctatctgcaaactgtgttcacccttttgtaaaaataaaggaactggacccgta

SEQ ID NO: 8236 - DNA, 10827 bp, Homo sapiens
gcagaagggagcagagggcaggcacgcgagccacggccacgctttattgcttaagacgcacacagaacacagaggaacaaacaagaaggaaagggcgccacacacagcccagaccaggcaggagcggcccagccgccggaagagacgttccttgcaaggcagggcccctgctggacagcacgccccctgggcgacagggtcagggaccccaggactgcacagctgcagacttgctgggaacctgggacaggtgacacgcccactctcgcctgtggcccagggccttccacctctgcatccagccatgcacccaccatttccccacagggtacaggggcagccttccttgatccacagccaacccttctcctgctgtctctggctgtcagtgagacccctctggaaagggcagaagcaggcaagccaggcagaagggggcccggggtcccactacctgggtaggaatgagcagagggcgggcagagcccttgctccttgtgggaggtagacaggtctcactgcatacatgggacagatgtgtgcacccacacacatatacatacacacacacacacacacacacacacagccctttgaacccagcactggcctgaggaaggtggccccggaggaaccctgaaggcacatgtccaccaggctataatgcccctgccaccctggggctcagctggccagactcccaggggtgggatgctgctgacccaggagcccaccaagtccccagggcagtactgggcagggcccagaaaaccccacgcccagcccaccagcctgccactcctggcctcagatgccactcccggcctcagatgccactcccagcctcagacgcagatgggcccgagaggtgttcctgggaaacagttcacttagcaagacccagtacctgcgctccagaagctcagcgcaggcccagcctggggttggccccagatggaatatcttccacacccgcccgcttctgccaagccccacctgggctaagccaggcccgaccaggcacctgcccgatggctgagagccagcctcacggtcagagaggccagcgggctgaggccacagggcagagggaatatgggggtgcacatcctgggcaccagctctctgcatcctccctgggtaggcctggctccggacagcctggcacccagggcagtggggacagctctgtgtggggaggtgactgtggcctctgcccagttcttaaaaggcagaagctccctgagggcagggcttgggcaggccagcaggagcacctgagtggggctgaggtcagacccgctaacccactaatggggctgggctgtggctgatgttgacggggccacaccagggagagggtgggcaccctcggtgccagggagagcctgctctccccacttccttagcaccaaggccagcaggggcggggggtgatgggcagaacctaggggccccagcaggcccagggaggaggggcagccgaggggccttgaggtggcctgtccaaggttcccagggccagcagggagcatcccccacccagctgtccagtcactgccaaggctgcagttccaggtaccggggtgcaccttaggagccctgtgggcttcttcagaaggcagggtgacagtgggcgctgcaccctaggcagcagtgggaggttgctggcagcggcaggctgtcccaggccctggggctccacctgctaagagagctgggggaggtccctctgctcagtgcccaggtggcagggtcccacttgcccctcccctcaagccaggaccagcatctccaggggaagctgctcccaggtcacagcaggtcacaggcagccctgtctgtggtgtgagatctgcagacccacccagcagaggagtagggctgggtagtgtccacacagctgctgcaggctctgcctcaagtccagcagcccagaccctcacaccagcagccagtggctcctggcttaagccagtctggagaaaggagcagaggactccaggtgtagggacacgtgcaaaggcccctctccaggctgtgcctcagcgtggacagtccaggcctcacttggacccacacagagccagaagaggggacagggagggaggggcgcccagcccttcacagctccccctccagggtctccgcgagcttctcctcatccgcctgctgcctctgctgctggatcctggcataggagatcgcatcgcccctggggagagagagaggcagcgtcacgtggagcaccagccccatgcccacagccctcctgaccactgcccggttcctgccctgtgacccaggtgtgacctgcaggcattctgatttccccagagacaactgctggggtggcaaaggcctgtcttgtcccctctgagaatggcccaggctccctgggatgctgggctgtgaaggaaccagcctcagtctgggctctgcaggagagagggtggcaactgagtacaatgcccggtgcagacctgggaggggaaggggctcccaccagccatgtttttgctatccttgctgcaggccgtgacggggcaagactgggccacgcagaagtgttgtaagtcctctgtcttcacccactcgagctgagccctggaggcaccaatgagttactgggacctctgcctcggtctccactagctaaaaggggccactctcagatcctcctcactgaaggacttcggggggcggagggaggaaggccctgcccaggggctgggcctggcagacgcactttttgcccagagcagagagtccgtacagcacccccgtagcaaaggcgatggcgttgcccagcagcgtggtcagggtcaggctgatgacgatgggaacgaccgccatcctggggggaaagcagaggtcaagggggcactccggccccacagccaccacatccttccccgcttcccagactcggcccagcatccttcctagacacccagggcacaggaaggatccccaaaaatcaactgagacacagcttcagaaagtccttcatcagccctgaacttgtctgtaaaactgttccattctgggaataggatccaaagctttcatcagatttttgaaggggtctgtgatcccaaaaagagctaaacagtaacgagatggtccagtgccctcactgtgagaaaaactggccagaaagtgcctgtgacagagaatctggcttcccatccaggacctactagcttcgcgggcaagttactcggaatctccaccgcggagaggggatcaaagcttgtccgaggtcagtcatgttacctacacaatgctgaccaccacaggcactaaataaatgctctgagttatagagtaacaccagccacatcgccacaagtaaggtccctggaattcaaccacatggaacacagggtctcatcatgggagggctgcaggctgcggggtctgcggggtcggcccagaccttgctgcagtttggcgtcacctggtggcagggtccactggggcttaagcgtccccggggctgattctccatcctggctggaatttccaggccagcagcaattcctgggctaactgggccaggaggatacctgcagcctggaggccagcgctctgtcctgtcgcctccctagaggaggctgcctgtgcaggaggacaagactcgtggccaattgcattctacctcagtttccattcttgtagacatgtggttgtgagatttttctgtcgttaaaaaatttcaaaatgataaaataataatagaaattacaaagaaaaagaccacggcggggaaccttctgacaaaaacaaaattaaaggcaaacaagagcctggaaaaatagttgcaggaaatacaaccaaggatcatgaaatctttaatacagaaaacacactgaacttgctaagcagaacactgaggttcccacaggttaaaaagtaaactcgaaaattttcatatcagaaaatgcaatggaaacacgtgggaaaatatttttccctcttagataacaaatagataaatgcgaatgtgaagtggtgtgcagccctgggctggggtgggggcgggggagagactcaagggacctctttggaaagcaacgtagccacgcatcttaaaatatttttaatgatcagaatctttgacccagtaattccacacctgaaaatagatattaaggaaatcatcataaacacagaaaaagttttagcagacacatgtttatcacacctcgatttacaccagttaagaaattaagaacagcatgatacatccagctgaatgaatattcctgtattgaaagaatgttataaagtctgtggtgatgttcaaatgcttatatcattactctaagtgaaaaaaggcaggatacaaacttattcataatggttataactgtgttaaaagcaggcttttaaaaaatgcctgcagacaggaagcacacacatcagaagattagcaggcagcgggcttcgagtaacattgttctatattccaaattattgtgaatgaatttctatgatgtctagcatttttaaaatacagttttttgaacccctaaggacatgacactgcgtgtagataagagctttgtgatcctgtgttcttcgtgatttagatatggcacaagatggctccagaactaagcatgtggcttgtgctcttaccatcaaaactaccgggcctctctgaaggggaagcaagcttgcatctagacttctttctaaagataacctagacaataatgaatacagctgccaccagcctcctatgcactagaggcattattctaggagtttccgtgtattaagcttatcctgaaattagttccttcttatgactgagaggagaagtattacatattgatttcattgttagaaatgggaaaatttttaacaagtgtatttagagggcaaccacattttctgctctgcaacctgcttctcccccttcacgtcaggacatctagatgaacccactcttcggaaaggctgcagagaaacatgtcctacagacctactatcatctggttaacaactcccagtggacggaccaaaattccagacgcttcccactttctctccactgcacggatgctgccacacatgctcatatacctctgaaccttccagtgactacggcacagcgacagctgagttcctgggcgcagaaccactggggcacgttttggcagctatgagcaaatcactgtgcacaaaggcaatcccagtttacacttccacagagaggaactgaatacactgcccaccctcacctgacttttgggtcctattttgtcagtggggttttggggaactgtgtcacgggaccctgcccagcaacccctcacccgcagtagaagacagccttctgccaggagcgcagccggtccaccttctccgccactgtgtttgcaaactcgatgaactggcagcagaagggcgcctcacacagcaacaagatgaaggcattcatgctgcagggaccagggcaggagaagagcagcgactgacaatcccaggaggatgagggcggcccccagtgccagtgccataaggaatgccacctccctcaccctcctgccctcatccctcctcctctgggaagccgcccggctgctccagggcacctgctcgtacccctcggagagcctctgctgaagactccagcactccccagctgctcctgcacacccatctccccagctgaactgaacactcctagagggaagcccctgggcttctgcttccctttatcctcctcctgtgtgacatggaggaaaggggaccccacatcatggcactgctacaacgctgcggcaggttcatccacagatggagcactggcagctgtgtcctctgtctgctgttagtattatcgccatggccaccaaaagccgtcagtggcaccagcaccaggaaggctgccccaccagggaggcagagagctggagccacgcagtcccgaaacagtcacggagagctgcccacacacctgatgccaccggccccaggcccggggacacccaggggaagcccacgctggggaggaagaactttagcaagtccttgcatccagccctatgtttggggtgggaacagctaagccactggtgacggaaggtgtctgctgtggtcttggtattctctatgcatggataacaatcagttagcagacactgagccaggcccttctgtccccaggcctgggagaaaagtgccatcattatgcctgtgtaacagaaatgcaggctcaggacacctaagagccaccccaagcccggggcaggcactctcttcacaactcttaaccactgcacccgccccgagcctcccacacaccaggcctccaagcacgggctcactctgtgctgggccagcccttccacttcaaactcggccaggctccgactccaccccctgaagctgggctgggcgcctctctgtccatcccccttccctatccaccactggccagcacaagcactgaggaccccaccacagcaggcccccgaggctctccactggccataggtcactggggacgggacctgaatctcgtctagctctgtacccctcaaggcaccaagccccatgaggacactcatcaattcctggtgcaccgccacttctcacgtgccccaagccacacgggcctgccctcaccccgccttcccttccgatgggatggcgaaaccctggcaggaggtgggcatggaacgcacatgagggtgttctgaccacgggttcccgtgacaactccgacccgcctctcccatctatctttggcacagctccgagctcgagtgccctctcccagcagaccattcaacccagtcctcagccagccccaatgaacagccttccccaccccagtcctgggagctcccagagggcgagggccccagtatagtggacttggcatctgcagtctcagtggatgctccagaaatgtctggagcactgatggccttgcccctgcaccggatgaaggccggggtgggcattccctgggccttgacctctcattaggaaactaaacatggtgggggtatgaaggggaagaagccgcatgctgtggccagaaactcacatgcccgaggcacccaggctggagccagtagccatggcaaccacaaggatgcccactcccacggcccctgccactcctctgtcccgggaggtgcccagcagattcccgaccagcaagacccccggggtgggacggccatgcattactcacatcatccacacgccggccgcgatgttcagagggtggatggtgatgcagttgaagaggccagagatcgcgcaagcttgaaacaagagacacgggcaggagtcagcagggaggcaggcggagcccgctgggaaggcggccttgggagatgactggaaaggacgagagtctctgcggatgctcagcacacagttctcacagcacccagaagcctgccctctatcgtctgagacaggtgaggagacgcagagaggtgcagtgccttgcttgccccaggccccacagcaaggtggcagcaaggtggcaggtggatctcacagcatcctctccccgtttcagggctcagaggagctggccctctgaccccagctacatcaatatccacctcaaagggaggttaggattaaagaaggattaaagagtgaatgtccctcaaggattcaggccagtgctcccccaagactcagccttcggtaagggtcacttgccaccattcacagggccggccacacaagaagtcctctgactcagaaaatgtggcttggattttggttgggacaaggggtgcctctctcagaacagagatgggaaccaggtaagactgagcagcagttccagctctaacttcctcaccagccctgtgccactggcacgctatcttcatcttcctagacccgtttctcctcttgcacatgagcaagtcccacagcccagccacccaccgctgaaatgccataaggccaggaaggggagggggcatcgttttccaccccagaacgtggcttctctgatgctcagatgtgcagccttgacgccccgcctcccagctgcacctcaccagcagggtctcttgcacccaactccctcctccacccacagcctgcagcctggcttcaccaggaactccaggagccttcaaggcaggtccaaggaggtggctgctgggcagggagcaagcccaggccatcactgaggggggccttggaggcagcaattagcacccagctcattaaacttgcagcagctcctctgcacctgatccctccacctgggtctggaattctgctgttttccattttcccaggtaaccttatgcagacagcaggcaaagaagccagataaagtgagccgaactgcaatgggactgcttcatgggcccccagggtctccttctaaaacaaaggactcaagcgttgcactgctcctcagcacagccttagacatctgccttcagacagcaaggtgttccagaaccacaggtacacaggggcctgcctgtcctagcagagtgcccaaagggtgacacggctccctgcctctctgctgtgcctggcctcacctgacagctcggctgtgcttcctgctgcagtcagcatttggcctccagctccaaccctaccccagctgtccaacccacagccagccttgggggaggaccaggtgtcaagccagaccagcaggctccagccaggaatcctttagcaataaagggctggaggatgtccacttgggggcctcaatgctgatatcttccacgtgagggggctgtcaccatgcaatcctgtcccctcccaaggtatcacctccagatgctcttaggacccagggtagaccctctccaggtactctctctgatcccctcaccctggaggaggaaaaccttacccaaggaccagcccggcacacaacccttgtctgaactcctgccgcatctctaaaacaccctgcatttttgcattctaccctgtaatacagcattttgatgttcacataaccatgcccccaaaaatctgcagatgcaactgacaactcagggcaatgccgcaagtttctcctgaagcttcatctgtagacccaacagagccccaggaactcccaggaaaggcagaggtacctcactttgagaggcacagaactgagtaagactccacagcaaatctgggagtcggcagggccactgaccaagaaggaaggaggtgtggcctacaggccatagtcaggacctttcctttctcaccactgaccatgtcaccccactgcactgcccaccctaatctgcagggaaaacagctaaccagacatgacaggactggatccaatgcctaacttcaaacccaccagtctctactacaaagtcaaaagcgtacttgccctgaagagcagtgacacaaactcggggcctttttgtgatttgggggtagggcctgccctaccgtatccgttgcctctggataagggcatgcctagcgagggcagcacactcctagcccagcaccctcctgcctcaacctccctccaccctctacccacctggaaaggctgtggaacccaaggtgaccctgaaaaggtggtccttctggcaggattgctgatggggcctgccctgcccaggcccagagctagccctctctgccaggcaggcactgtttaaaccctgcagacatcctcgacagacattctctaagaccttgcccactccagtaatccacaagattgagggcagacaggaaaggaaagggtatcactcagacagacttgtctttccctggaaggccagctgtacggcttccattcactcctggagctgacctgcctccctctttgtccttttctggctgtgcttaagagcctagcttccctggcagcctaaggtcagggtctgtgactgggatgcgtgcggagaaggggaggaaggccggtgacaggcggctaaggcagcagcaacgggggagatatgagagcggacagaggacccagggagaggccgggccctcagctcactgccccgcggccccaggggccacctgtgccctgacaccacctgaccctcagcaaacttccgcccagtggcttcctgccagaaatctagccagccgtgcacccgcctcccttacaaacaatccttgcccaaaggttagcaatgtggctgccgtcacctacgcccaagtcaacagttgacgctttagtacgggccaggtgggcatgcgccccgtgagcatcaccgagaaagtctcacaaaagcccctggggagcggggggagggctcagtcacgtgccccaggccggtgccccacccccgcccccgcccccgccgcccccccgcccccgccgcccccccgcccccgccgcccccccgccctggggtttctggtccctccgggaatgttcccagaagcgccagcccagcccagcccggggtaccaaggcgcccaggcccgagcgggtaaccatggcaaccccaggacgccggctcccggcggccccgccattcctccgccccgggaggcgcccggcagacccccgacccccagcgggtcctttcccctggggccgccggggcggggcggggcagggcagggcgaggagcgcatgcgcggcggggccggcccctctccccgactggatactcacagactgcccccagcaccccagacaggcgacacagccagcggtaccaccacgtcatgccctcttcctgcgcgggcggcgcagagctggcggacgccccgggcgccccacctgagctgctcatggtgccaccgtcaggcgcagctcacagccctcacaaagggctcggtagccggccgcgtccgagccggcgcgctgcc

SEQ ID NO: 8237 - DNA, 128 bp, Homo sapiens
gcctgtaatcccagctacttgggaggctgaggcaggagaatcgcttgaactcgggaggtggaagttgcagtaagctgagatcgtgccactgcactccagcctggccaacagagcgagactccgtctca

SEQ ID NO: 8238 - DNA, 10828 bp, Homo sapiens
gcagaagggagcagagggcaggcacgcgagccacggccacgctttattgcttaagacgcacacagaacacagaggaacaaacaagaaggaaagggcgccacacacagcccagaccaggcaggagcggcccagccgccggaagagacgttccttgcaaggcagggcccctgctggacagcacgccccctgggcgacagggtcagggaccccaggactgcacagctgcagacttgctgggaacctgggacaggtgacacgcccactctcgcctgtggcccagggccttccacctctgcatccagccatgcacccaccatttccccacagggtacaggggcagccttccttgatccacagccaacccttctcctgctgtctctggctgtcagtgagacccctctggaaagggcagaagcaggcaagccaggcagaagggggcccggggtcccactacctgggtaggaatgagcagagggcgggcagagcccttgctccttgtgggaggtagacaggtctcactgcatacatgggacagatgtgtgcacccacacacatatacatacacacacacacacacacacacacacagccctttgaacccagcactggcctgaggaaggtggccccggaggaaccctgaaggcacatgtccaccaggctataatgcccctgccaccctggggctcagctggccagactcccaggggtgggatgctgctgacccaggagcccaccaagtccccagggcagtactgggcagggcccagaaaaccccacgcccagcccaccagcctgccactcctggcctcagatgccactcccggcctcagatgccactcccagcctcagacgcagatgggcccgagaggtgttcctgggaaacagttcacttagcaagacccagtacctgcgctccagaagctcagcgcaggcccagcctggggttggccccagatggaatatcttccacacccgcccgcttctgccaagccccacctgggctaagccaggcccgaccaggcacctgcccgatggctgagagccagcctcacggtcagagaggccagcgggctgaggccacagggcagagggaatatgggggtgcacatcctgggcaccagctctctgcatcctccctgggtaggcctggctccggacagcctggcacccagggcagtggggacagctctgtgtggggaggtgactgtggcctctgcccagttcttaaaaggcagaagctccctgagggcagggcttgggcaggccagcaggagcacctgagtggggctgaggtcagacccgctaacccactaatggggctgggctgtggctgatgttgacggggccacaccagggagagggtgggcaccctcggtgccagggagagcctgctctccccacttccttagcaccaaggccagcaggggcggggggtgatgggcagaacctaggggccccagcaggcccagggaggaggggcagccgaggggccttgaggtggcctgtccaaggttcccagggccagcagggagcatcccccacccagctgtccagtcactgccaaggctgcagttccaggtaccggggtgcaccttaggagccctgtgggcttcttcagaaggcagggtgacagtgggcgctgcaccctaggcagcagtgggaggttgctggcagcggcaggctgtcccaggccctggggctccacctgctaagagagctgggggaggtccctctgctcagtgcccaggtggcagggtcccacttgcccctcccctcaagccaggaccagcatctccaggggaagctgctcccaggtcacagcaggtcacaggcagccctgtctgtggtgtgagatctgcagacccacccagcagaggagtagggctgggtagtgtccacacagctgctgcaggctctgcctcaagtccagcagcccagaccctcacaccagcagccagtggctcctggcttaagccagtctggagaaaggagcagaggactccaggtgtagggacacgtgcaaaggcccctctccaggctgtgcctcagcgtggacagtccaggcctcacttggacccacacagagccagaagaggggacagggagggaggggcgcccagcccttcacagctccccctccagggtctccgcgagcttctcctcatccgcctgctgcctctgctgctggatcctggcataggagatcgcatcgcccctggggagagagagaggcagcgtcacgtggagcaccagccccatgcccacagccctcctgaccactgcccggttcctgccctgtgacccaggtgtgacctgcaggcattctgatttccccagagacaactgctggggtggcaaaggcctgtcttgtcccctctgagaatggcccaggctccctgggatgctgggctgtgaaggaaccagcctcagtctgggctctgcaggagagagggtggcaactgagtacaatgcccggtgcagacctgggaggggaaggggctcccaccagccatgtttttgctatccttgctgcaggccgtgacggggcaagactgggccacgcagaagtgttgtaagtcctctgtcttcacccactcgagctgagccctggaggcaccaatgagttactgggacctctgcctcggtctccactagctaaaaggggccactctcagatcctcctcactgaaggacttcggggggcggagggaggaaggccctgcccaggggctgggcctggcagacgcactttttgcccagagcagagagtccgtacagcacccccgtagcaaaggcgatggcgttgcccagcagcgtggtcagggtcaggctgatgacgatgggaacgaccgccatcctggggggaaagcagaggtcaagggggcactccggccccacagccaccacatccttccccgcttcccagactcggcccagcatccttcctagacacccagggcacaggaaggatccccaaaaatcaactgagacacagcttcagaaagtccttcatcagccctgaacttgtctgtaaaactgttccattctgggaataggatccaaagctttcatcagatttttgaaggggtctgtgatcccaaaaagagctaaacagtaacgagatggtccagtgccctcactgtgagaaaaactggccagaaagtgcctgtgacagagaatctggcttcccatccaggacctactagcttcgcgggcaagttactcggaatctccaccgcggagaggggatcaaagcttgtccgaggtcagtcatgttacctacacaatgctgaccaccacaggcactaaataaatgctctgagttatagagtaacaccagccacatcgccacaagtaaggtccctggaattcaaccacatggaacacagggtctcatcatgggagggctgcaggctgcggggtctgcggggtcggcccagaccttgctgcagtttggcgtcacctggtggcagggtccactggggcttaagcgtccccggggctgattctccatcctggctggaatttccaggccagcagcaattcctgggctaactgggccaggaggatacctgcagcctggaggccagcgctctgtcctgtcgcctccctagaggaggctgcctgtgcaggaggacaagactcgtggccaattgcattctacctcagtttccattcttgtagacatgtggttgtgagatttttctgtcgttaaaaaatttcaaaatgataaaataataatagaaattacaaagaaaaagaccacggcggggaaccttctgacaaaaacaaaattaaaggcaaacaagagcctggaaaaatagttgcaggaaatacaaccaaggatcatgaaatctttaatacagaaaacacactgaacttgctaagcagaacactgaggttcccacaggttaaaaagtaaactcgaaaattttcatatcagaaaatgcaatggaaacacgtgggaaaatatttttccctcttagataacaaatagataaatgcgaatgtgaagtggtgtgcagccctgggctggggtgggggcgggggagagactcaagggacctctttggaaagcaacgtagccacgcatcttaaaatatttttaatgatcagaatctttgacccagtaattccacacctgaaaatagatattaaggaaatcatcataaacacagaaaaagttttagcagacacatgtttatcacacctcgatttacaccagttaagaaattaagaacagcatgatacatccagctgaatgaatattcctgtattgaaagaatgttataaagtctgtggtgatgttcaaatgcttatatcattactctaagtgaaaaaaggcaggatacaaacttattcataatggttataactgtgttaaaagcaggcttttaaaaaatgcctgcagacaggaagcacacacatcagaagattagcaggcagcgggcttcgagtaacattgttctatattccaaattattgtgaatgaatttctatgatgtctagcatttttaaaatacagttttttgaacccctaaggacatgacactgcgtgtagataagagctttgtgatcctgtgttcttcgtgatttagatatggcacaagatggctccagaactaagcatgtggcttgtgctcttaccatcaaaactaccgggcctctctgaaggggaagcaagcttgcatctagacttctttctaaagataacctagacaataatgaatacagctgccaccagcctcctatgcactagaggcattattctaggagtttccgtgtattaagcttatcctgaaattagttccttcttatgactgagaggagaagtattacatattgatttcattgttagaaatgggaaaatttttaacaagtgtatttagagggcaaccacattttctgctctgcaacctgcttctcccccttcacgtcaggacatctagatgaacccactcttcggaaaggctgcagagaaacatgtcctacagacctactatcatctggttaacaactcccagtggacggaccaaaattccagacgcttcccactttctctccactgcacggatgctgccacacatgctcatatacctctgaaccttccagtgactacggcacagcgacagctgagttcctgggcgcagaaccactggggcacgttttggcagctatgagcaaatcactgtgcacaaaggcaatcccagtttacacttccacagagaggaactgaatacactgcccaccctcacctgacttttgggtcctattttgtcagtggggttttggggaactgtgtcacgggaccctgcccagcaacccctcacccgcagtagaagacagccttctgccaggagcgcagccggtccaccttctccgccactgtgtttgcaaactcgatgaactggcagcagaagggcgcctcacacagcaacaagatgaaggcattcatgctgcagggaccagggcaggagaagagcagcgactgacaatcccaggaggatgagggcggcccccagtgccagtgccataaggaatgccacctccctcaccctcctgccctcatccctcctcctctgggaagccgcccggctgctccagggcacctgctcgtacccctcggagagcctctgctgaagactccagcactccccagctgctcctgcacacccatctccccagctgaactgaacactcctagagggaagcccctgggcttctgcttccctttatcctcctcctgtgtgacatggaggaaaggggaccccacatcatggcactgctacaacgctgcggcaggttcatccacagatggagcactggcagctgtgtcctctgtctgctgttagtattatcgccatggccaccaaaagccgtcagtggcaccagcaccaggaaggctgccccaccagggaggcagagagctggagccacgcagtcccgaaacagtcacggagagctgcccacacacctgatgccaccggccccaggcccggggacacccaggggaagcccacgctggggaggaagaactttagcaagtccttgcatccagccctatgtttggggtgggaacagctaagccactggtgacggaaggtgtctgctgtggtcttggtattctctatgcatggataacaatcagttagcagacactgagccaggcccttctgtccccaggcctgggagaaaagtgccatcattatgcctgtgtaacagaaatgcaggctcaggacacctaagagccaccccaagcccggggcaggcactctcttcacaactcttaaccactgcacccgccccgagcctcccacacaccaggcctccaagcacgggctcactctgtgctgggccagcccttccacttcaaactcggccaggctccgactccaccccctgaagctgggctgggcgcctctctgtccatcccccttccctatccaccactggccagcacaagcactgaggaccccaccacagcaggcccccgaggctctccactggccataggtcactggggacgggacctgaatctcgtctagctctgtacccctcaaggcaccaagccccatgaggacactcatcaattcctggtgcaccgccacttctcacgtgccccaagccacacgggcctgccctcaccccgccttcccttccgatgggatggcgaaaccctggcaggaggtgggcatggaacgcacatgagggtgttctgaccacgggttcccgtgacaactccgacccgcctctcccatctatctttggcacagctccgagctcgagtgccctctcccagcagaccattcaacccagtcctcagccagccccaatgaacagccttccccaccccagtcctgggagctcccagagggcgagggccccagtatagtggacttggcatctgcagtctcagtggatgctccagaaatgtctggagcactgatggccttgcccctgcaccggatgaaggccggggtgggcattccctgggccttgacctctcattaggaaactaaacatggtgggggtatgaaggggaagaagccgcatgctgtggccagaaactcacatgcccgaggcacccaggctggagccagtagccatggcaaccacaaggatgcccactcccacggcccctgccactcctctgtcccgggaggtgcccagcagattcccgaccagcaagacccccggggtgggacggccatgcattactcacatcatccacacgccggccgcgatgttcagagggtggatggtgatgcagttgaagaggccagagatcgcgcaagcttgaaacaagagacacgggcaggagtcagcagggaggcaggcggagcccgctgggaaggcggccttgggagatgactggaaaggacgagagtctctgcggatgctcagcacacagttctcacagcacccagaagcctgccctctatcgtctgagacaggtgaggagacgcagagaggtgcagtgccttgcttgccccaggccccacagcaaggtggcagcaaggtggcaggtggatctcacagcatcctctccccgtttcagggctcagaggagctggccctctgaccccagctacatcaatatccacctcaaagggaggttaggattaaagaaggattaaagagtgaatgtccctcaaggattcaggccagtgctcccccaagactcagccttcggtaagggtcacttgccaccattcacagggccggccacacaagaagtcctctgactcagaaaatgtggcttggattttggttgggacaaggggtgcctctctcagaacagagatgggaaccaggtaagactgagcagcagttccagctctaacttcctcaccagccctgtgccactggcacgctatcttcatcttcctagacccgtttctcctcttgcacatgagcaagtcccacagcccagccacccaccgctgaaatgccataaggccaggaaggggagggggcatcgttttccaccccagaacgtggcttctctgatgctcagatgtgcagccttgacgccccgcctcccagctgcacctcaccagcagggtctcttgcacccaactccctcctccacccacagcctgcagcctggcttcaccaggaactccaggagccttcaaggcaggtccaaggaggtggctgctgggcagggagcaagcccaggccatcactgaggggggccttggaggcagcaattagcacccagctcattaaacttgcagcagctcctctgcacctgatccctccacctgggtctggaattctgctgttttccattttcccaggtaaccttatgcagacagcaggcaaagaagccagataaagtgagccgaactgcaatgggactgcttcatgggcccccagggtctccttctaaaacaaaggactcaagcgttgcactgctcctcagcacagccttagacatctgccttcagacagcaaggtgttccagaaccacaggtacacaggggcctgcctgtcctagcagagtgcccaaagggtgacacggctccctgcctctctgctgtgcctggcctcacctgacagctcggctgtgcttcctgctgcagtcagcatttggcctccagctccaaccctaccccagctgtccaacccacagccagccttgggggaggaccaggtgtcaagccagaccagcaggctccagccaggaatcctttagcaataaagggctggaggatgtccacttgggggcctcaatgctgatatcttccacgtgagggggctgtcaccatgcaatcctgtcccctcccaaggtatcacctccagatgctcttaggacccagggtagaccctctccaggtactctctctgatcccctcaccctggaggaggaaaaccttacccaaggaccagcccggcacacaacccttgtctgaactcctgccgcatctctaaaacaccctgcatttttgcattctaccctgtaatacagcattttgatgttcacataaccatgcccccaaaaatctgcagatgcaactgacaactcagggcaatgccgcaagtttctcctgaagcttcatctgtagacccaacagagccccaggaactcccaggaaaggcagaggtacctcactttgagaggcacagaactgagtaagactccacagcaaatctgggagtcggcagggccactgaccaagaaggaaggaggtgtggcctacaggccatagtcaggacctttcctttctcaccactgaccatgtcaccccactgcactgcccaccctaatctgcagggaaaacagctaaccagacatgacaggactggatccaatgcctaacttcaaacccaccagtctctactacaaagtcaaaagcgtacttgccctgaagagcagtgacacaaactcggggcctttttgtgatttgggggtagggcctgccctaccgtatccgttgcctctggataagggcatgcctagcgagggcagcacactcctagcccagcaccctcctgcctcaacctccctccaccctctacccacctggaaaggctgtggaacccaaggtgaccctgaaaaggtggtccttctggcaggattgctgatggggcctgccctgcccaggcccagagctagccctctctgccaggcaggcactgtttaaaccctgcagacatcctcgacagacattctctaagaccttgcccactccagtaatccacaagattgagggcagacaggaaaggaaagggtatcactcagacagacttgtctttccctggaaggccagctgtacggcttccattcactcctggagctgacctgcctccctctttgtccttttctggctgtgcttaagagcctagcttccctggcagcctaaggtcagggtctgtgactgggatgcgtgcggagaaggggaggaaggccggtgacaggcggctaaggcagcagcaacgggggagatatgagagcggacagaggacccagggagaggccgggccctcagctcactgccccgcggccccaggggccacctgtgccctgacaccacctgaccctcagcaaacttccgcccagtggcttcctgccagaaatctagccagccgtgcacccgcctcccttacaaacaatccttgcccaaaggttagcaatgtggctgccgtcacctacgcccaagtcaacagttgacgctttagtacgggccaggtgggcatgcgccccgtgagcatcaccgagaaagtctcacaaaagcccctggggagcggggggagggctcagtcacgtgccccaggccggtgccccaccccccgcccccgcccccgccgcccccccgcccccgccgcccccccgcccccgccgcccccccgccctggggtttctggtccctccgggaatgttcccagaagcgccagcccagcccagcccggggtaccaaggcgcccaggcccgagcgggtaaccatggcaaccccaggacgccggctcccggcggccccgccattcctccgccccgggaggcgcccggcagacccccgacccccagcgggtcctttcccctggggccgccggggcggggcggggcagggcagggcgaggagcgcatgcgcggcggggccggcccctctccccgactggatactcacagactgcccccagcaccccagacaggcgacacagccagcggtaccaccacgtcatgccctcttcctgcgcgggcggcgcagagctggcggacgccccgggcgccccacctgagctgctcatggtgccaccgtcaggcgcagctcacagccctcacaaagggctcggtagccggccgcgtccgagccggcgcgctgcc

SEQ ID NO: 8239 - DNA, 2052 bp, Homo sapiens
gcagaactaagatttttgactctaaagagagaaaattacaagggtgttgccttatagcaaacccttgggacaatccttcatgtgagcaaagtgttgatcttaatattggttgtctgtggtgtgcttttttgtactgtaaaaatatgtggttcatgtctaactctgctgttttattgtggttgtggttcaagtttttaatgtttaaagttgatgctgttttcagaagagctttttactaatttatttgtcagtgttccctatttgttacttaaccatgatcctccagattttttggagtattcttttctaaccttaaccctgccaaaccttgatccattttgacatttgttatgcactatttttatatctctgtgagagatttttccaacagtcagctattttatggcacactttttttgactgatgacatctcctttgctatacctcaatttttggaatttagagaagaaatcagtagttttgcaatgttaattatttagatatttaatttcgcagatttttaaactttattttcataatttctgcttaatgtttaaaattgaagagccttttcatgtattaaataatgaacacaaattatataattaaaataattggagatgttgaaaatcattttcccttcttaaacagaaataaatatttggaatgaaggggaatgtactagaacaccctttttgccacgggtaaaaataacagaaatgtatggtttgttttaccttcatttctgtacaagtaaagcttattagtctaatgttttgttcctttcccacctcacccctacctcttttgttttgttttgtttttgccctttatgtactacattcttattttctaacttttaaacactgtattggaggtttttttttaatttacagatcatatttattttactatttttgtagaaaattattaattttgattgtatttttgtattttaaaagcttcttcacttgtgttccctaaatattcatattgctgcccaaaagtatgactgtggaggaaaaaaaaatactttaaaaatccacactttttgttaagaaggaaacatttagcatttatatatttgtgtatggaaaacacttgatattttatccctgttgcatctggctgcacagagcctctcctcaaagatgctacaaaacttgaatataacacattttggaaggctgactaacctcgattctgtgttgtgatgtgcaatactgtttctaatgtttgtataaaaaaaaacagtgtaaacctttttaatgcaaatttatttttttcattgcatattttgcagattttatccacagtgtcattttttactgtcagaaaagataccccttttgtcattgcaactattttttaaatccagaaatctttgtactgatgtaaatgattgtagttattttggatagtgttttgctaacaaaaggagagacttttttcatgcatatttctattttgtttttttgggttttattttattttaatagtagtaaaatacttggaataatttttcatattcttgtcattaatattattttgtatttttatgtggaaatatataattttatgacactaattgctaaagtttattttatgttgaattatttttggagctgaaatctttgtaatattaaagcaactagtttctaattcccagtttctgtatagaatcgcacaagtggtttatggagtgtttggattgtaattataaatggttctttgatatgcaaattaatattttcagttgattttattttatattcctaatggggtgttaaagccgttttttatttttttctaaataaaaagagaacccatgcttttatggacactaggtaaacaccttcagcttaaatttttcgttaaatattttagtttattttattgttatcttccaggtgtctaaatctccagtctgtctgttgtactggtaatttaactctgtaatggaatagtttgctgccaactatttatattaagtaatttttaaatatttgtaatattgttgactgactaataaactattaagttattggcata

SEQ ID NO: 8240 - DNA, 312 bp, Homo sapiens
ggttttagcccctttgatagtccatggttaagacatcctttataaaccaaagatggccagcacactgctaaccagtcaccaaatgtaagacccataagaaacccatatttaaaaatctgaattttttagaagaatgcaaaactttagtaaaccctaagtaaagtcaaaatggagaaggggaaatatacagatggctagttgcataaaattaaattttacctttataagacaatggtgaaatctggcttgaacttgcttatgtgtttaacctataaatattggggtcttctgtctaaactggggtcactgttg

SEQ ID NO: 8241 - DNA, 148 bp, Homo sapiens; identical to SEQ ID NO: 6787
  SITE (136): n equals a,t,g, or c

SEQ ID NO: 8242 - DNA, 158 bp, Homo sapiens
taaaaaaaaaaaaaaaaaaaaaaaaaaaaaaaaaaaaaaaaaaaaaaaaaaaaaaaaaaaaaaaaaaaaaaaaaaaaaaaaaaaaaaaaacaaaaaaataaaaaaaaaaaaaataaaaaaaaaaaaaaaaaataaactaaaaaaaaaaaataaaaaaa

SEQ ID NO: 8243 - DNA, 125 bp, Homo sapiens; identical to SEQ ID NO: 5842
  SITE (33): n equals a,t,g, or c
  SITE (49): n equals a,t,g, or c
  SITE (61): n equals a,t,g, or c
  SITE (90): n equals a,t,g, or c
  SITE (91): n equals a,t,g, or c
  SITE (116): n equals a,t,g, or c
  SITE (117): n equals a,t,g, or c

SEQ ID NO: 8244 - DNA, 3431 bp, Homo sapiens
aggaatatgtttatccagaagccagagacagacaatacttactatttttccataaaggagccaaaaagtcacgttttgacctagagaaatacaatcaactcaaggatgcaattgctcaggtaagttttacaaaaattaaaataaatcccagccctatcttgcatggttattattattatccacagccacggttcttcaaatgagtaaactgaaggaatgttccaaccctcttcttcctgtataaattattcctcagttgattacagtaactattttaggcatggacatttctctagaaagttttataaaaagcaagtgagaagatggtgtgtttgctccatcctgttaacactagcacattgacatttttaggcctacttttacttttttttttttttcattttatttctttgtagttgtctgtttctacttttccctctgctttttgattatttctgtaataatttatctaagatttttcacaaaaatgtgtggtagcagtggggaaaagtaaaacccaggtaagagggaaagactgctagagatctttgccagggacagtttagagattattaaactagaagatgcttggaaaagattgatatattttatttttcataaaagctacctctttcaaatttctggatgtgcctccctcactctgttatctttgattttggtgaataaaccctcattccttttctctgtagtctttgtgactttagagatttttcagcaatctctagaagcttttccatcctctttaatgtttagttgctcttctctgcctttcctgtctcttcttgatgatagggttgtgctttgaataggcttaatccatcttcctgctttggcctaagtggagttctgtcttcctttgctatgtatggtgattctaaactggagggaatacatcagaatcatgcctggagctgttaaaagtacagatgcttcagtctcaccctaggcttgctcgttagtccagctcctcccgggtgaagtccaagcatgtgtgagttttgaaagtactacagttgactacacacgctgttccaaaattcactggctaagtaaaaacttaaacaggtactggataaataactaaaatcttgagtagcataaagttctggctcttagcccttgtgaaagggcttctcactggagaaacaccatcaagatgtatgtctcagatgctccttacattcttagcctctgagtcctaccctgttgatagcactgatttttctggaggctttgttgagggctgaaactgccaaggatggcttccattttggattcaccctttgttgtcctatgccgtgagttaaaatgctttgtctttcaaggcactcttattttgagagttattgagatgatctctctgacttatagtaatggagaacagtttccttttcttggtagacagtaatatcattgaaagcttcactagccagttttctcaccttttgtttctattttaggcagaaatggaccttaagagactgagagacccattacaagtacatctgcctctccgacaaattggtgaaaaagattgatctgcaaaaagcctctgaatcctggcagaaggaacacctgtttgcctttttaattaaagcattgcaggtggaagctgggagccatgtggggggtagagcgtttttacctttaattataaaacaaaaacagaaaggatctgagggaagaagggaatgttaaaacctgaggatcaggcattgtggaatataagctcaaagggcttagtgaatattgtcttaaccaagtatctcagtttctggatgaaaatgatgcagttatatagttgagagattcataaagagaaaacaatgctgggggtgttcgtttcttgcatcttctttgcagagtcagcaaaagagtaacacaccagcaccccactcgactctatttgtttttaatttaactgtccctatttttgacataggagtaaataaatatactagaaaagcaaattctcatgatatgctaaaatatcattagcatttattttaaattggacccagtctctgcagagttaccaggaatctttccttccagcatccctttactgaccacctacctgtacctcttggttacactcattttttccatttgataattggaaccaacttataactgtttaataattgacactttagattatctcttaataccttcttaaatgtctatatatcccagtgctctggatcagtgtctaaaaatcactggcaacactgcatgaggttgttggttttgttttgttttattaattagtctttcacaggaggaataattgccctcctttatatacttatctattgataatcccctctccctccagaacacaaatcagagggaaagggggtgttcagctgtactaccaaatcaggaagatgtaaggtttacaaattggctaagaatcatggctctgtagccatttcaaccagaataattttattgctaatctgctttgtgtgacagcattccaggccagccagatgggactgccttgtctggaggctttgttcatctcgaaggacacacacttccacactgtttgtgagccctcccacctccacaacttcagttgtaaatcaagtgtgtggatctcaaagggtgcaatttatctttatataggaatacatttctagggcttccttcaagcccactctcttcaccctattttttcttatcttaaattgagagaaagagaattaatcttatactttgtcaaaacattttctaccatatttccagatgacatctgcgcttgaagagtcaaaggaatctgtgtctaatatcctgtttttaactgctgtaggggcaggatggaaaggatgatgggggctgccacaccactgattggccttttctttcacgtgattcatccttcctcattgtggcaaggagtttctttctctttttcttcctcctttgggatcattgtgtatgaaaagaaaaactttaaatgacaaacccagactccaggtgccttgcaaaggttgaaggccagccaggattgctgctgctgctgctactcctgccaacacccctttcattggcatgacggaatgaaaggatgcatgtctccacttcctgaccctccgcccacttccttctccctccaccacccccagtcgtcagctccttccctcatttatttttgttaagttgtgtgaattatttttaacccatttatcctgtttgtgcatagggtttttaagaagaaacagcacagtgcaacgagcaaatctttttggggtgtgtgggaagcaagggagggaggacatggagaaaagttctttaaacaaatagcaaactattgaacatgtgtaaaatcctgtatcatttatgaaatatgtataaaaagcaatgtaccttctggaacaataaatacttattcaatttttgaa

SEQ ID NO: 8245 - DNA, 973 bp, Homo sapiens
tgttgtgggaagtcagggaccccaaacggagggaccggctgaagccatggcagaagaacgtggattgtgaagatttcatggacatttattagttccccaaattaatacttttataatttcttacgcctgtctttagtgcagtctctaaacacaaattgtgaaggtttcatggacacttatcacttccccagtcaatacccttgtgatttcctctgcctgtctttactttaatctcttaatcctgtcagctgaggaggaagtatgtcacctcaggaccctgtgataattgcattaactgcacaaattgtagagcatgtgtgtttgaacaatatgaaatctgggcaccttgaaaaaagaacaagataacagcaattgttcagggaataagagagataaccttaaactctgaccgccagtgagccaggtggaacagagccatatttctcttctttcaaaagcaaatgggagaaatatcgctgaattctttttctcagcaaggaacatccctgagaaagagaatgcacccctgaggttgggtctctaaaatggcccccttgggtgtggccgtcttctatggtcgaaactgtagggatgaaataaaccccggtctcccatagcgctcccaggcttattaggaagaggaaattcccacctaataaattttggtcagaccagttgctctcaaaccctgtctcctgataagatgttatcaatgacaatggtgcccgaaacttcattagcaattttaattttaccccggtcctgtggtcctgtgatctcgccctgcctccatttgccttgtgatattctattaccttgtgatgtatgtgatctctgtgacccacaccctattcgtacactccctccccttttgaaagtccctaataaaaacttgctggttttgcggcttgtggggcatcacggaacctaccgacatgtgatgtcccccccggatgcccagctttaaaatttc

SEQ ID NO: 8246 - DNA, 12244 bp, Homo sapiens
ctgtttctcttcctcacttcagggcaaggatctcacattatcagtctttgaccgacacagaatgcctggcatttgataaatgtttgttgaacttgaagagacatatggacaatgaatctgcaaaggtgagttgaaaccagattgtgaattttgttgaatggtaagccaaggaattctgactttttccaataggcaatgggaagccatttgatttaagttttaaaaagagtaagtctagcagcagtgtagagaatagatgacatacaaagagagattggaggaagggataccagttagaaggcagcagaaatctctcacgttctatatgtcaaaagttgaaagcataatgccatttagattaatggttcataaatttttccaccaggatcatgcctaagacacacagagtaagaaccacttcttattatctttaaccctactagtttttctcctattgatccagcacagatgtatcaagataccttatcatgccttgcttattgttcaggattgagcgtgatggtagttctggtaatgagttagtgagtgagatgggaaatagggatactagagctccagatgctgttgtagctattggtccactaatgacccaaattctaccctgtggttcagtgtagtaggaattgtcatagtatgacaataaccagcatctaacagttacatttctcttaatttatttagggagaacacctttggtcctacagttttgctgacactgacatttttctaagtggtcacaaatagcctactttttacataaataactggctagacctcgtatttttcactacagaagcctataatctaaagttgccaggatttaaacacattacttttaggttattgtctacatttatcctgagacctcttctcttcttattccaaaatgttgagatactggggagagataccaatatcatcaagccagaccaacagaagttccttcgatttgctcccacgggagttccgtctggtggaagtccatgacccacccctgcaccaaccctcagccaacaagccgaagccccccactatgctggacatcccctcagagccatgtagtctcaccatccatacgattcagttgattcagcacaaccgacgtcttcgcaaccttattgccacagctcaggcccagaatcagcagcagacagaaggtgtaaaaactgaagagagtgaacctcttccctcgtgccctgggtcacctcctctccctgatgacctcctgcctttagattgtaagaatcccaatgcaccattccagatccggcacagtgacccagagagtgacttttatcggtaaggcaaggctttgctgtatcttacttttctcaagtcatcttcccaacaaccctgttaagcctataatagcatttccattttcatgcgaggaaactgaggataagagtaattgacttggccaaggtttctccaggtaattagtgggatatctaagttttgaatgccagtcttcagaattcagggtctgtattttttaattttttgagtgcttactatgtgccaagcactttactaggagcagggtaatacactggtatgtaaaaaaggccatggcctcatagttcttaggatctagtctttctatttaatataaaaaaaaattatgggtttagctcgttgtcttcaaattgggattcatggacttattctggtatttttaggaatccgcaagtctacacaagaatctttaaattgtgtgttttcattttgataacatagttcaagaaataataatataagctgagcacagtggttcatgcctgtaaccccaagactttgggaagccacggtgggtggatcacttgaggccaggagttcaaaatcaacctggccaacatggcgaaaccccatctgtactaaaaatacaaaaattagtcaggtgtagtggcgcacatctgtagtcccagctactcgggaggctgaggcacgagaatcacttgaacccaggggaggcagagattgcagatcactccactgcactccagcctgggtgactgagtgagaccctgtctggaaaaaaaaaaaaagaaataataatataaaaatgttattgatccctgctactcaatatctggtccaagatctgcagcatcaacatcacctggcagttttttagatatgcagaatctcaggcctcacccagtcctgctgaatcagaatctgcattataacaagatctccaggagatttgtatgtgcatttaagtttgagaagctctgctccacatcctctgaacgtgactgccttataacctagagctgctactagatgtcagtgtgcaagttgtatttaatgccaattacttttttattttcattttgaaatttgccaaacctacagaaatgtgtaatagtcaacaaacatccaaataccttcaccatgactcactaatgtttaacattttgccacatttactttctcacatatgtgtgtgtatacacatatatacacacatatacaaacatacatatatgcatacttgtatatgcacacattttttcccccattttaaagtaagttgcagacatcaccatatttcacccctaaattcctcagcatgcatatcctaagaataaggaaattttcctgcataatcataataccattaccaaagtaaatgaacattaagtaccatttaataagttcatattcacattcttccaattatcttttgtaagtatatttacaaaatatcttttgtaaatgtcttttccctcgaatccaggatctaacaaagattcatgcattgtacctggttgttatgcctctttagagtcttttatgagttcaggtcgcttgtagaatgtcccaattactggatttgctgattatttcctcaagattagattcagattaaatatgttcggcaagaatactacagaagtgatattatatgttatttattacatctacctgttgctggtaatactattttagtggttcccaaactaatgagaaaagtacagaaatagactaaatacacaggggttgcattgcagttgggccaggtgaaggccagattatatcaaggtccattgtaatcaaaggttctgaagtcactggaataatgaaaaggggaggcataactgtgttattacatgcacagcatatgctagcatagacacgcccaactcaaaaaacttgctctgtggtgatcaatactgtattcacatattgagggcaatttaatttcaacaatataatgttatctatcatattaaattgatgctgtttattcatttttagttttgtatcaaatttatatagtaagagccatgaccatcaaaagtttgtacctggttttattttatacatatttaggaaactgtataacaaaaataatttgcatcagttatgggggcaccaaaaaattactttcctttgaaagaggtccagatattattctaggaaagtgatattggtttagttgtctctgtttattaggtacttatgaggcctttagcttttggcccagagacactggccatggaaatgatgaagatagtaaatgaaaagttacttggcaattagttatcttattgtcaaactattatgtaaactgcaatagttgctattgaacaggtcagagtttagtgggtggataaccactcaggcacttttgtacagtgcgtgatgacacatgccaagtacgaaccaaggaaaaatgattttctgtgctctattttatttttattggtaaaataaattcctttgtcaggggtaggcagaagccagtaggaaatttcaagagacaggtaaattattaaaagcttcttaagttatttttagatcaaatagctttcttaatttttttcttggaaaattaagatttctgcagtagtgattaggggcaaaatggtgtattatgcaggatacggtttctggagtcagaagctttaccacttactaattatatgtaaacaaattttggcaagtcagcccttctaaacctgtttcctctcctggcaaatagaaataataataatacagaccctacccattgcacaacacaggataggatgaaaatgctttgtaagctatatatgttttaaattgcttttataaaattgagttgacttccctgttttgaaatggtcccttgtaactttataagaatctaagaatcttaaactcctgggaactgtgaagaatctctttattggaactgtgaatttctaaaagtttgtattaatatattgcccagcatgtatgaaaactaggttatggtaaaataattagagcatcattgagcagtgtctgggctatactgttaaacttaatcctaaaagtgatcaaaattgaacagttgctagaaggaaactttcttttcactagatatccttttggattgtgtattatagacatgtattgcctattcaaactatgtctttggaggagctcaaagatatgaccatgggttgctaagacatgcccagatagcagcaggatgaaactgagctatgtaacttggatggaatttccctggaaagctaggccagtggcttgactggaattgtaaaactcctggggaagacaggaggggtcacccctttgcaagaacattaataacaccaccgtatctccactttcagtgggaaaggggaacctgtgactgaactcagctggcactcctgtcggcagctcctctaccaggcagtggccacaatcctggcccacgcgggctttgactgtgctaatgagagtgtcctggagaccctaactgatgtggcacatgagtattgccttaagtttaccaagttgctgcgttttgctgtggaccgggaggcccggctgggacagactccttttcctgatgtgatggagcaggtattccatgaagtgggtattggcagtgtgctctccctccagaagttctggcagcaccgcatcaaggactatcacagttacatgctacaggtgaggcgaccctgttgaaaagtgggcacagatgtctgtgcaatctcggagtgttcagcaggatcccacaacacttggtctagagtgcagagcacagagtcttggaacagagtgaacttaacatacttttatgatggccctagcgatgttcctggccaaataccatgggtctcctttagtcagtgaatggccacattcactgatacttcctctggaagaaactatccacaagtatatggaatctgagagaatgcagttagtctgattttattcaacaagtatttattgagtgcctgttgagagtcgagcattgtgggattcagcagttactaagttacctgagtttacattgtttttgaagggagacaaacacaagtcaataaataacaatcaaaacaatttcaggagctgggcatgatggcacatgcctgtaatcccagctacttgggaagctgaggtgggaggattgcttgaggccaggagttcaagaccagcctggacaatatagtgagaccccatctctacagaaaattaaaaaataaaaattagctggacatggtagctcatgcctgtggtctcagctacttgggagtgtgaggtgggaaggtcacttgagaccaggaagttaaggctgctgtgagccatgattgtgccattgcactccaacctgggtgacagagcaagaccctgtctgaaaaaaaaaaaaagagaacacagacctactgacaatcctcctgcctcagcctctcaagcagctaatataatggtttgactggaattgtaatatatatatctaatatagctgcttgggaggctgaggtgggaggattgtttgaggccagaagtttaagaccagcctgggcaacatagcaagaccctgtctctaagcacatacacaaaaaaatacaattttggataatgttaagtgctatgaaaaaaacagagtaaaatgatattgcctggaggatgggttggtggggggtgatgattttgcttggaaccagaaatatctaatctcttcagcccttgtgctcttaagtcatttgttcactgtttcagtttctgcaggtctaaaatatgattaggaatttttaacacccaagaaaaaagtctttgctaagtgatccagatttcccacaccattgattattcacctaggatacatatgtcaacttttttttccctttttttagacagggttgcctgggctggagtgcagtggcacaatcacagctcactacaagcgatccttccacctcagccttccaagtagctgagaccacagatgtgaaccaccatgcccagcttttttttttttttggtagagatggggtctcactagatactgcccaagctggtctcagactccgaggctcaagttgtcctcccaccttggcctcccaaagtactgggatgacaggtgtgaatgaccgtgcccagcctactgttaatttttatagccaaaaaaatgtaatcttttgtcccagttctaacacatttttttacctttatgtaacttttaattaatgacatacacattctctgccaaaccaattttctttacatatctctatcactcataaatgcaaactcagcaccttaaacaaatccctcccattggcagtgaatgttttaaaattctgttattcatgttctgttggcttttccatgggacgtcacaagctgactatccaacttgcttttaacatttccttggaaaattgactcttgcttgccaacagattagtaagcaactctctgaagaatatgaaaggattgtcaatcctgagaaggccacagaggacgctaaacctgtgaagatcaaggaggaacctgtgagcgacatcacttttcctgtcagtgaggagctggaggctgaccttgcttctggagaccagtcactgcctatgggagtgcttggggctcagagcgaacgcttcccatctaacctggaggttgaagcttcaccacaggcttcaagtaagacaaataaacttactcactttgattctgggagatctgccaatttcagtactttttgctttttggaatcaagctcaagaggtagaagaacaaaagcagcagtgggcagaatggaaagtcctaaaacgaatacagtttcacctatctagagatcccagcattcttctctttctaattagtgaagagaggattagcacagctttacaggcattctttaaaataatccctagttaagatgtagatgcaatgtgttgtcacgttgattaccaaggctgattcagctgatccagctggttgggaagatatccccttcctcctttagtattttatttttagtattctgtattggtccttcctgatgcttgtacttcattgaataagacagctgccagatagatgggggagtgttaattgctcaaggatgttctcagagtttggcttccctgctagagtattctaacaaactgaagatgaaagacattgaaatagggcttccggctgggcgcagtggctcacgcctgtaatctcagcactttgggaggctgaggcgggcgaatcacgaggtcaggagatcgagaatcatcctggctaacacagtgaaatcctgtctctactaaaaatacaaaaaaatatgctgggcgtggtggtgggcaccgttagtcccagctactcaggaggctgaggcaggagaatggcatgaacccaggaggcggcttgcagtgagccgagattgcaccactgcactccagcctgggcaacagagcaagactccgtctcaaaaaaaaagaaatagggcttcccagttagaggtagctggcttctttttccagactctgtgattaccttaggagccaggacaactgactggttacgtgtcagttaggttgcaaattagtctggacactcagttgtttacaagtataaattgtcatcaatgcacaaatgactcaaatagcaaatcctcaaatgtggtctaaatggaattaggtcatacttttaaaagtgttgggcagagagcctttcactatggaagaataaccataagagaacagcattgctagaatacatagagagatgcgagggccaaagagaaattgttgcggacttcgggaccatgtctcttcaaagaagaccaggtagagaactgctgttagcattatgtagtgaccattaacttttcataatgcaagagatgaccagagacccaaacaaaaggcaggaaaacaagatggccccataaaagaaggaaggaaggacaggcaaactaaacaactgaacaagtcctgtggttgtgcatgtctttgggctgtgagacaggggatctttccacctgcctagtttcacttccctggtttaggggaaatgggggtgggtgaggtagaggaaagaaaggtagaagaaatggaaaagaagataatcagagctggtaattttttgggatggttaactttttgaagcagagagtaacaaccgatattctccagccaagtacagaatcagagtgaaaactgagctcaaagcatattagttggttctgagtgatatatttactctttgttctacacttggctacacatatacacttggtgtatgtccatctttcctctgtttctaggtgcagaggtaaatgcttctcctctttggaatctggcccatgtgaaaatggagcctcaagaaagtgaagaaggcaatgtctctgggcatggtgtgctgggcagtgatgtcttcgaggagcctatgtcaggcatgagtgaagctgggattcctcagagccctgatgactcagatagcagctatggttcccactccactgacagcctcatggggtcctcccctgttttcaaccagcgctgcaagaagaggatgaggaaaatataaaaggaaaagagggagatgttttgtccagacctactagacccaacagaaaaggtttttgtattagaatctgtttccttaaaaattgatttgactcctgttcttaaacacaagtggtttttcctaattccagaggaactggacgtcaccaaacaaggttgcattttacttttgcatccagtttttatagttttccacaaccaagccacccttcacagataaaatatgatgctggcatggcaatcagaccaaagcactgtccccaattgttgtcttaactatgactagacatgttatacagccatttatcttgtacaactgagaagaatcatactttgacctaccttgtagagatgtgaggatttagatgtttgctaacttcaaaactgtgcttgaatagactaataatatatgctcatatcagatgtcagttttcatttaacttgattcatttttggctcaggtcattgggaacccattactaatacctaacaggaaatagctaaacacaacacaccttatctattagtcaccttcttaaaactgtttttgctacttttgaagtgtcttatttataagatcagaggtctgacaccttttttgcttagacagctctctatctcatccatttattttcttctctagacttactccatctctcctcatccttttgcctttgttatttctgctcggactcacatactttcaccatatacatattttcaattgtttctttccttttctcctttgtgagcaaagcaaacaagtactgtccaaggacagccttgtgcatatttcatttgttgcatttgcttggtcatcagaggacagcagtccattaagcacactttgctgcttctactgtaaaggcagcctttaaaacatagcaatatgcacctttcaactttacatcatgtcctgaacaacatcactgtggttactcatccatcagactatctgtatatataagtactgaatcagtatttattaagtaaatgatgtagcactgtagtgattaggaatcattagcaaatgtgttgcttcatgccttggtgatggatgccagcatgttaaactgctgaagtttgattttctgatgcaaaatatatcttgtaaaatttagaccactcctttaatgcagaccaaaataaggcacagctttaattcattattgaatgccttaaatgtcccaggtattgagaataaatgaatatgatacaaatgaggttatagtttaacatataattttaaatttgccaattgtaactctttagcacatttctctaaaccctttctgtcacagtcttttttttaatttatttatttatttatttatttttgagatggagtcttgctctgtcacccaggctggagtgcaatggtgcaatttcgactcactgcaacctctgcctcccaggttcaagcgattctcctgcctcagccacctgagtagctgggattacacgcacatgccaccacacccagctaatttttgcatttttagtagagatgaggtttcaccgtgttggccaggctggtctcaaaactcctgacctcaagtgatctcgccctcgggctcccaaagtgctgggattacaggcgtgagccactgcacctggcctctgttgcagtcttatcttcattttcctttgtttataatgaaagtggcgattaggcagttagtttccataaagtggccgtatgggaatttagttcattcatccagcaaacattgagtaccaattatttgctaggtcctgtgcaaggaatacaaaaatgattaagacttcttccttacccttttggagcttgaagcataaggaagacaagttattctgtaaggaagataaagcattcaaaagtactacagagaaaaaccaagtatgcttgagttttgcgaatgttctcctcttaaagaatagcttcaaattttgagaccagtggttcccactaagtatagaacattaaaattaatactttataataaaacacttttattgctgcagaatgttaaactgcataacaggcaccagatggtcaagacgagggaaatatgagaaggcaaatgatgtgaggattagtatcttgagattcacctggtctggaattatgtcataggctactatgcatcagaatcacatggagggctttctaaaacagactgctcagcccacccccagggtttctgagttcataggttataagaggtaagttgaacaattccccagatgatgctgatgctcctggtccacaatgtgagaaccactaagttggagtactgactcatagagataaaattctttgaaagaaatgtactgttttaagatactgtaaaatgtggaggcagggcaaacgtttataagggctgttatgtatgaaatgtgcctctgacccaaatccacggactttgcgaaaatcaccaaggagactttgcattaagttcagagtacaatacaaactgggcctagctctgtatttagtcagtatgtgcacgtgggaaactttagtaaaatatcacctccttattgagacaagtttggacatctggccttaagcctctgttgaacaggagaagtgaagctgtttgcaattatataattttctaatttgaaatcatgacaagcagtcttagaacaaagttaaaattaaaaagtctttatccaagtcaccaatgaaacaggattctgattcattaatcatgtcttgcccacttttttcaacaaacctgacgtcctataatgagctatacagtgtgaggcatatttcatagcaacgttggttgattgccaaggagactctgccaccgttctggataagctcatgtttcccttttccttggctgctaatagaagggcaacttacagtgcagggtcaagagcaagaagctgggggagtagaggctatacatctagcctaataatagagatctgaggtggtcaccaggagactacgttcttttgattccattcctcagcagcaaaagtacttgagttcaaatgataaaacttgaagttgtaggcttggaagagtatcagctcagtatatccttccttgcataaatacaagggaaaggccaaggaataatcagcattaacctgccaggtccaagggtcttctatccctgacttcatctgagtcacaagatttctctaataagagaaactttgctactctgaggaaaattatcccttatgggagcccccagttcagaggtaagaacagttctttcacgtggaggtccaaaattctggacttctagaaacaagtgaagtgtgctaaagtctcctatttattgtttctcttccagtattgtgccatcgattcttgcataaaattctggaatgctggctcttcatggctttcctctgtaactgcaaggaaaaaagggcaattctttttcaactctttcattagacaaactgattag

SEQ ID NO: 8247 - DNA, 16367 bp, Homo sapiens
caatgtgagtggctaccagggaccttctgagcagaatttccagtggtccatttacctgccttcgtcgccagagcgagaggtgcagatcgtcagcaccatggactcttccttcccctatgccatctacacccagcgcgtccgcggagggaagatcttcatagaaagagtccaggggaactcaaccctattgcacatcacagatcttcaggcccgggatgccggggagtatgaatgccacacacccagcactgataagcaatactttgggagttacagtgcaaagatgaacctagtgggtaaggagaagctgtcttcacgttgccagcgtctggcctgactcagttctttagtagcgtaattttgctttatgccatgcatttgactttaaaaaaaatcccaaaactcccaacatattttaggggtcaacagatagcacaaggaaactaaatttctgtgttcacttctaaataataggtggttgagggtgaaactttaaaaaggtctaatgcagatgttaagaatttcataagttaactaaccctgtaactggtgaaaagggatatgaaaatataaggcaaggatgtttgtggttgatgatctgaatgacaaggaagatgagacgtatgacatcagttggaagagaggagaaacctctcagaaggataggcctttgggcagctctgagacccacggggcactgctgaagcaggaagcacatgtggctgtgggtccttgctcagaccttgtacattgaaggtcctttggctccatgcgtaaggaactatgaactggctgtctcccttgttgctccttaatgctgaaggaaacatgaggaagagggatgcaggagcttccattgtgggcagcactggtcatagtgtttgccagtgtcaaagggttaaccattatcaaggctgttctgtttttctgcctatcttaatgtccagtttttattatcacaactaagcagtgggtgttgctagttcttttattaatacacatactatcatttgtttatttttactttctctaactagtctgtgtcccagcaggagaccttttttttttcgtgtgtgtgtgtgtgtgtgtatgtgtgtatgtgtgatggagcttcgctcttgttgcccaggctggagtgcaatggtgcgatcttggctcactgcaacctccacctcccgggttcaagcaattcttctgcctcagcctcccgagtagctgggattacaggcatgcactaccatgcctggctaattttgtatttttagtagagacggggtttctccatgttggtcaggctggtctcgaactcccgacctcaggtgatccgcctccctcaccctcccaaagtgttgggattataggtgtgagccaccgcacttggccgttcccagcaggagacccgtaagacccaagccttgggtgagaacagggagaaaacacatactagttgtgactagggtactctcatcagacagaaaggtggtgctatttaatctccagaaaggtgcaagcaaggatcagggtatgattctgaccaagggatcacggagaaaatctcttctcttgcctgaatctctccagactgtggcttccttccagtgaggacccctttgatcgatgaattacgcgaaaattaaacccactaaaaatagggtatgatgattattttttctaccaaaaatggttttttaaaaaaatcatcttcctagggctgcattgctgaagtaagttacaggatggggatgtgggaaggaaagaaaggatgttgtatagaaatgtaaaactaaaagttccaggaggcatttccattacaggatcagtcagaagtgaagttaaagtatctcagagaagtgccagaatcaacagcaaatgttatttgacctataagacaattgtttaaagacagtattttcagggagtttatttattatgtaatatgaaatacaccccatgttttatccaagtgttattaaaataccagacaggtaagtgtaagcaccaaaataatgcatttccaaatccaaacagaaaactttctgtttatgtgcatttggggctgtctgtggccttgaatcgatggttcaaggatgactgttaggggcgcagtgcagtgacgcctgcgtggaatgggagcttagccctgggagtctcagattctgtggctttgtgactgcactctcaggacatttctgtgttgcagtgatcccagactccctgcagaccactgccatgccccagactctgcacagagtggagcaggacccgctggagctcacttgtgaggtggcctcagagaccattcagcacagccacctgtctgtggcctggctccggcagaaagttggcgagaagcccgtggaggtcatctccctgagccgagatttcatgcttcactccagcagcgaatatgcccagaggcagagcctgggggaggtgcggctggacaagctggggaggaccaccttccgcctcaccatcttccacctgcagccttctgaccagggcgaattctactgcgaggccgccgagtggatccaggatccggatgggtcgtggtatgctatgacccgaaagcgttccgagggagccgtggtcaacgtccagccaactggtcagtccctctgagcctcttgtcctgtcctttacttggtggtgaaggctgtcagatactgggagaatgtggagactccttctttgggcacctctaccaggacagcaggttttcatgtgaagttaaagccggtcttgtgtgcggctggagggagctgagggatgtgtgggacataggtatcctaagacctgagtcacaggcaggtgccacacagactgagtcctgcttagagacatgctttctttgacctacatggtgtttatacttttttgaattagaaactcattttaaaaattgggagatttctgagaaaccatttgtatcttaaaagtctgggctttcattcccattaggcacagttgctgccccgtttaatgatgttgccttcctcaggtacccatctggtttcatttgcagaagccatttgagataatgagacttccatccaaggtctaacattatgaactagagaaattttggcttaaattattattttttatctaataatagtctttggtgatattttttaatttccaaaatgctttatcacatattacttcaccatcccccagacgttctgtgaggtgagtaggtggtagtactcctattttgcaggtgaagatgctgaatgcagattactttatgttggggctcaagaggagtcatagggcatgttgatgaggccagtctgagagtaccaagttccactgtagatgttttcttaagtgaaggcctggaaggggtcctgaggaggttgcatgatgtctttagagctgaggcaaaatgatggtggcacagccagctgaaaccctccctggcttctcttggtatctcctgtggccccagactctactccccagtctcctgagcccaccaggctccaggccagagctgacagctgttgctggctgcctctgctgggctgagggcaggttctcacatgggccttcagatcccccagctttggttggagcatggttgttgtgccatcactaagttggcgatgagtggcctgaaagcctttccttgtgcggaagctcacttctggtgaggactgtggtggttctggtgagtgagtgtggcttgtgggaaatgacctggtgagttgcagtacaggtggggtccttcgtcaggacctgtctcttgggctccctgttccatttgctgcagtcagttgtctgggtctttgcatactttctctgccattctagagtaatgcttcagactcagctaacagtatacattttggggcttcgtcccagaagtcttcaattggaggctcctgggatgggacctgggaagctggatttccggcacgcttcccaggtggttcttctgctatctacatttttttcaagcaaagcttctagggcagaagcaattctctggacatcactttaataagtcatctaatggatgtgaaatcttttaccgtaggggttggtagggatagggagcactttatctgctctgtaggacatttagcagcttctggatctttcaatattaaaaaatctatccaaggggctttattttatatttatcctttcccttcctggatagttttaagatcaacttcaaaaatttgggccaaattttgagtcttaatgcttttaaattaggttgcatcagttaatcttctttattttaatcttaccaatttggaattagaactttttgaatttaccctgaaaatgtatctagactaagccagcaaaaggaaaactaagtgaaaaaaaagttgatgacttcaccctgcattcctgtgctgtttaggttcagcagttgcatctccaactctacccttcttagtttatttcagtaaacatgtagccagtctccacagcattgaaggtgtgatggtgataggcattaagggcttcaaagatgactagcactggtccctgcacttaggcagacctgagaaccaatggacaagtaaaatgtgctaagtgcattgatagcatttgtatagagtgctctgggaataccggaaataggaagtgttcttgcaaccacagttatctctgaatgggatggttgataagacaaatccaggaacaccaataagtttcttgagttgaactgagtctggaagcttgaggagtcagcaggaggagaagcataaaagtgcaaaagtgtttgatatgtttgccaagcagaaaggagtcaagtatgactagttccggatgttgagttccagatgtgtgtgatgagagaggaaagggaccccgaagccccaaatgcagtgatatagagccggggcttgactctgtgagccaagagttttcaagctgttcttggaaccctggaagcccctcaaaggtgcctaggaggttagacatgggtgtgtgttggtgttcatgtgcacgtatgtgcacccaggagtgcagggagaaggcatgcgagggcctgggtggtcccctcttgcttcaactatgttgggcagcagaagattttgtatgaataaaaagtccccttcctttgtcctcttcttaataaagtttgaaaacctctgctgcagacagttggagaggaggtagagatttttaagcagggagtaacacaatcagatcagggtttcagaaagaaaaacccatggaggccacctggaggttgattaaatctgttgagtctgaagccaagagaccaggtagaaaagagctaataagagctaaggctaggtcagtgggtgccagaggcaaaagaataaagagcaagtggaaggaggggtccaactgtctagaagtccaggggctaggactggggctctgggggttccttgaactgtgggagggaaggaacaataatgaggacatgtgggacttttgcatttgtggcagcattggctgccttttgtttttgtaaattctaatgaaagagcccatccatcaggtagactctgatagagatgctcagtatgcgaaacacccagtgggtcctcagacacaggggtctggggctcagagaccgagcctgagagtgatcagggccctggaagagcccatggggtaaaaatgggaaaggacctgggagaacagcagcagtaagaggtgaccagagaagcaggtgagagagtggaacagagtgggcaggccagcaagaagaagagcaggagagaagggatcatggagcaggctcagaggcctcaacctgcttgaggaaagcctttggttaggatgggggtaggggtagggtggatcatttgtgacatttgctaagtcagtgaagcctaatttcagtgagatgaagtggaaggggtattggaaaaagcacaggtcagtttctagagatgtaattgactgggcataaccaagggcagaaacgggggtgatgtgggtaaatcttgtgtcttcaacctgggaacatgaaggtgtcaccaaggcatggggggattcccttgagatgagaagagtctttggccgccgaaagaagaaagccagagttacagccaggctaacctggagcaacggaaaggtctgaggtctagggtaccccttgcacagctccagtggtgtttatgtggaaggagtgcttttctgtcattgatgttgggttataaatgactaactgggttgacctgagagataatatccagcagataacacggggactgtcccatatgggtgtgttcatccaggcagatggtggcagagtgaaatgtgcttccttcaatccatgcctcttaagactggtctcttgggagctagaagctgtgacagcagctacttcattggaggggaggccctggagttgatgatgtggttttccctgtcaggaagtttggctgctagaggaagtagttaggtcactggaaagaaggggtatttgcagcaggacactggcctatatcggggggaggggctggagagcctgaggagcgggaggggtaaagctgagctggggctggaaaagaagaatgtggatgctgcttatgcatgattcttatgttttcttggggaaacagaaacctcatctgcttgaagagtgcctaggacgggatgaatgggcaagatcttgaagatagtgggaaaggctagacatgccagtctagggaaggcaggcaaggtcagagctaatgaatctacatggaattcaaacgtctctgccatgggattttttccacctcggtgttctttttagaggaacagagctagaactgggcagtggtcacagctccagtctctaacccttaactccgttttcttccccctgacttctgccgtgggtgcctatgagatacgatagctgtctaatgagattaatagccactgtacactggtacacaggttgtgatgatgctgttagtggtaatgagcccctctttggtcaccccctcatgcctggttaagcacccaactcaacaaaaattagctggatatggtggctactccggaggctgaggtgggaggatggctggagcctgggaagtcgaggctgcagtgagccacgatcatgccactacactccagcctgggcaacagaacgagaccctgtcacaataaataagtaaataaataaaaattaaaaaaacacctagatcttaggaggctgcttgggtttagtaatcatttcagaggctgtctggctttcagcagaagtaggtacttttcctactaaagtacctactaagtacttactcagtgggaaagtacctactaaggtttaaccaggcgtgagtacttagtaggtactttcccactaaagtaggtactttcctactaaagtaagtacttagtaggtacttcactgggaaagtacctacttccattgaaatctgactagagatttgatctgacaggtggtaaactagtgaacagacattagtttttattttttctatgtaattctgttagggtttgtcatacctacatcttatttctagtattcacatggcggggggtagagagggaattttaatatagtcatctttgagcatttgttaggattgggccagcacctaggccactctgtaattttttcccacagacctcagtggggtaagtcttacaatatctgctgaaaatgtttataatgctgttgcttaaatagagttctgggtgcatatatcaaggctagatatttgtaatctaccatttgagtgatattagtagcttctcactgacctgggggtctcatctaagacatctaaagcttcagactgagccccattggtcttaactggggtaacagtttgcttagaccgtctgggctgaagtagttttgaattctctctgtgatattcaggcgtttctctggaccttagataacctgggtctgagttggattttactctcaagctaagtgctgtggtcctccccgcagttagtattgtaaagaagaggaaggatagtgggaatgtgctaatgtggtttagttggctggggccctcattcacccaggatgtgtctcttttcttacttgttctctcagacaaagaattcactgttcggctggagacagagaagcggctgcacacggtgggcgagccggtggagttcagatgcatcctggaggctcagaatgttcccgaccgttactttgctgtctcctgggccttcaacagctcgctcatcgccaccatgggtcctaacgctgtgcctgtcctcaacagcgaatttgctcaccgggaagccaggggacagcttaaggtggccaaagagagcgacagtgtctttgtgctgaagatctaccacctccgccaggaagatagcgggaaatacaactgccgggtgactgagcgagagaaaaccgtgaccggggaattcattgataaggagagcaagcgtcccaagaacatccccatcatagtcctccccctcagtaagtagagagatgtgctgctttcttctcctttggctcagcatcatttaggagaggtagggggagagagaatagcgtggtgaaggtgaggggaggcagatggaaccctcgaggttaatgcagagctgggggaaaaaccattgagcctctcttccctgttgtagcccacctgcatacatgtagcaggctccccatagcagaggatcaggatcaggggtgtccagaatcagggcagtctagggctgggcataggcctatctgattgctagcagccctgtgcatacacaagcagtgccagctcagcttggagggaaaccaggaatcccagaaagctgtttgctcttgtgtgggaatcaagtcccagaagaagtgggtagatgcctgccttgaaatctcacttaaggagagttggtcttttatgggaggattttaaatcataaagtgcattattaaggatttgccatctgggtttttcaggtataaaggctggcatttccctaaatggcttttccctgttgaaattgtgtttctaaaagtcggtggatgggacctctcacatcttcctggagcatagccttttaagcttagctgatttctgaggctgcctcagtgggctcccagccttcatgtagactggccttgtgtgggtgggtagtggccattgctagggattccagaaactactggtgtttgcttgtgttgtgtttaaacattcatagtatcaagatattcttattaatctcattctcccatagttctgtttttagtaaagagaataaaaacctataatgctctgattttaaacaagtggtaaagttttaagactaacctttaaccttgtctcagctgctcaaactattctttctctgagccttgtaataatttcctttactttttatttatatgttttaatatttaaaatatttctcttcaagtgtgatatttctcttcaagtagccacagcggtcctcttgtcagtcttttcttcttttctcatcaactggattattttctttttatgcttattattattttgttaaaaaccatgcacacacatacctaattatcttgaaattcttttgtttcttagctttttccgccctgcaatgcctagcatggtgctttgcatagagtaggtgctcgctgaatactgtacaactgaaattattgaattgaatgcccactgtctttactattttcctgtcagtctgtgcttgccttaaccacggactctacttttaaatctgcaactaattcctcattgttttctaaggatcaagtgaagggcagccacgctgtttacttcctatattttttgtactaagatttcccccaaccccttctgagaacttgtttgatgatctgtggcctgctatattgcttttccagcagataactgggtagttaaagtcccccagcaccaccagctcctgtcccaaggccacttgggtaagtctgccgaagaacaacaacaatcacatcggtaatggtgacaatgccttggattttaatggcgcttttcctcctaagagaccaaagtgcttctgcatatatcatctccttctccgctcccacctctcaaatcctcgtagaggccaatatgatatccatctaatgaatgaagaaatcagagcaccacacaggaagtgacagagctgattgttcagttagtggttgagcttgcattgcattaggaaatatttgcttctaactccacacccaccgccatgcgcttagcctgtgctacaccgtcaacttcctgatttgaaatttcatttgtgaatgtgtactcagatttttattagttctgtcctagttttcacttaatccagagagtttaaaattgtcggctgccttttctcaggcctggaaattcttgtaaatagtgttagtgggcagtgaggcaccaggtctgtagttgcctttgcctcagctgctataataaaatagcatttcttcttgtagccccacattctaactatgtgggtttccaggcttgctcaagcaacagacaccaccaaacagtagccctttcaataaatgagccaggacttggataagcgtccactgggatgacagtaggggatgagagtgaggtcctgcaagtcattcttctgcttaatacaagtgaaaggattttcttccttgatgctgcagttgcccttttaatcccttattttgaattgataacagtggggatgagtctttaatctaaagaggaatattgttgttattaatgatgatgaaaaataagtacctcatctgatcctctcaatgtcatgccctaagaagtaggcactattagtatctccattttgcacatgagaaattggagctttggtaggttaaggaagaaccacaggattacagagttaggaagtctccaaatccatccccttaaccattagtgctatagatggtgactgttcaggagcctgatcatctctatgaatcatcctggtatgagtcctgggggaggttgccctcctaggaaaattgctattccctgccccatccagaccttttatttttcacataaaacaagcaaatccagaatggatagcaggcatcctcactataataagagctacatgtggaggctcagtgctcgtctttgtttctgcttgttggggaaataaaggagagaaaagatttgattcaaatgcattgttatgtgtatgtgtgtgttttctcttggtaattgggtgtgcctcttaaaatctgggatttgatttaattaattggtttaaaattattgcatgtatttaatgtgggtggtacccaaaaattggagccaaattagttactttgtgttctttaatacttacagaccttctgaactcaatatagataattatacaaaatactacatgtataattaaaacatattaggctatctgtgatgtttataaaaacaaagagttatgtggaatagtaaaattaatcatgatcatgatgaccagtttttgaaaacctactatgtgttaggtgaatctatatgcatcatctcatttactttttaatatttaaagaattctacagttaaaggtggctctctacctgtcttacagaagaagaggctgaggcatgtcgagtttaaataatttgattgagtgaattcagatagttaagtgagcagcagaggctagatgagacagggaagggagtggaatccttatcccaaacttttgattggccaaatgtttctagaaagagagcaaaggagccccagggctgactggacaggcgggagagtggtggatgacgagctgctggctttgttttgttcctgtgtgttaatgaaagaatgaaagcccgctcctcacacactctgcaaaactagaccatctgtgctcccttattacccacacttaagcacacgttatcgtcccaatacttactgttggtttttttcccagtatttcctaaattgtcctgaaggactcaaatggcacattatggatattcagcttttatttgactgctgtagtaccgaatggtaggaagagtgaagtgaagtaggattttggagttactcttcttgctgaaaattcaacttgaaaaaccctgaactccagctgaatagattacccaataaattgttttatgccctaaacatcatgccactatgttgtatttcttaggttcttattcaggctcaggtcttagaacctcgttatcacagttctctgcacatggcaaagaacatcctagattatcaaatctaaaaccacagggagcaaagcccagaaccagccagggcttgcagcaactagggtcagagtgtttttgaccctctgaggctcaccgtacctgaatatgattccatttgcaccccttctcctgtttcctctgtggggagggcgctgtggagaccataaagcctccagggtgtttctctctccctcttcctagagagcagcatctccgtggaggtggccagcaatgccagcgtcatccttgagggcgaggacctgcgcttctcctgcagtgtccgcacggcaggcaggccgcagggtcgcttctctgtcatctggcagcttgtggacaggcagaaccgccgcagcaatatcatgtggctagaccgggatggcaccgtgcagccaggctcgtcctactgggagcgcagcagctttgggggcgtccagatggagcaggtgcagcccaactcgttcagcctgggcatcttcaacagcaggaaggaggacgagggccagtatgaatgccatgtgactgaatgggtgcgggcagtggatggcgagtggcagattgttggggagcgccgggccagcactcccatctccatcacagctcttggtgagtgagcggtgggactggcagtgggtctggcatggagacagcttcagtgtcaaacaccttatcctgacttttctcagtcagagttttagcaggaaactatggccagtcttttacctatggagtttgaagtactttcctttatgtctattttatttcttataagggtttaattaattaagatagtgctagcagggactgagggacccacagtggatgatggggctcctgagggatagcaatagctgggagctgtgactactcctagtctggctgggagagagtgatgttatcagaactctatccaggttagtgaagccacccagccatagtggtggccccaggtggaggagcatggccactgccagcctggccttaaagagagcagagtggctgagcactgtgtggcatgtctttcctgccctgctgcccaggggccagccttcctgaaagagagcagagaagggtataaaatcatctgttgtcatttatttagcatttactatgttcctgcctgatccttaacacttaagcttagttgtcccattgaatccccacctagccaagtgacagacactttcattttatggaggaaactgagactgagacacattaaatactttgcctaaggctagaagtttctactacctgacggggcccatacctaacaaagctattccctcattagcgtggaatgaaaagataccttgagatttgctaaaaccaaggaagattagatttgcttctcatggggtaaagaggcttctatcaacatttatctgcctggatataatcagtctattagattttaaacgaccagtctgtgactttgctgggaaagaaacttgttatatcaggtcttcctgtttatcaggagacatcggttgtcctcagcaactttatgtcccactccctgggactgtgtcaccaccttccttgcaggttgggatggtggtgcttttggatacttccagtaaagatggcagccccaagtggtttttgtccttaacagagtcctccattttcttacccctctgagattagaattacatttattttctaaagcttaatcctaaagattgacctgctttttgcagtaattatacagctcagatttctgtcttagaaacttcctccagtgattgcgtttcctgatcagctcagttcctgtatccatactcagcacctgtgtgaacccagtgagatggaacttgggggacaacttttggatgtccagtactggtgtgtttttttttttttttaaccatcctggaaggttaggaatgtccaatgagtgattagagttagtgaggattgtttctctagaagtaatttatgttatcaggttatcccctgagttttttcttactcaccatatgtctggtggttctcacagccaggggcactgaggggctctgccctgggatctggaggccagcactgttcacctgatctccaccactgagatacctctggctagagccataatcaggtggcccaaaggactgaacaaggaagaatgggagggcactctagactaattaaggttgtcttttcagtctaaagttaacaatgacacacatgaattttcatatcagtataattagatgcgggtcccatctaattacagtgggtcattatggctgttcggttagagcagcttgggtgctctgtgaccatggcatgtgcccgtgtcaggactagacaaagtcatttgcttggggaagctctctccccttcaggtgtgaggccaggagcacctggtgtgggtcctgtccctgaggttctgtcctacaccaccctcatgcaacacctactacacacaggtgcacagcgactgtcacaggcgcttcatgtttaaggatgggcctccgtgtcataaacttttttaaagggtatatagagatagcttatgaaatccaaatcaaaggtccagagttttcagcaaattgtacctacctatttgccaacttaacctcaccatagaaagccaaaagattcatcctgtggccagtctttcacattacagagtttaaagtactttttttaaatttctattttatttttaacaaaatatttaacaaaatatagtatatctcatgtgccaggtactatttgtaatatttataaacactgatttatttaatcttcacagagactcattttacagattggaaaacagaggcagagagaagttaagtaactttaatgtcactcagctgggaagtatcaaagtcttggctgctggctccagagtctagacctttaaccactgtgttatgctttccatgggtaaagcaacctaaaaaggcccctggaatcagttacatgtggttggagactaactctgtcattgacttactaaatgcttgatattgggcaatttatctaacctctctctgcatcagtttctacatctgcaggaagagatgacaagcctgcctgttctacaaggttgttttggggattcagtggagcatgatgagagcaaagcagttggcaccatgcttgcacctagatagtgctcaataaatactggctactgttagctttatgattgtgatcaatgtatgaatattaaacagtatttccaggctgaaggagctctgaggtactcatattgaggagtcagtattagggcttagcagtgctgcccattcaataaggaatattgagagacccacagccgctgagcctgcagaaccctgcatttaggataattgtcccaccccactggaggtccccacctgctctgtttttggatttcatgagggacgtgagaaagggactggaggccgactccatctgcttcccttctcggcaccagtgcgctaagggaccaggaaaagtggtgttggggctgtgtggttgtgttttcctcctgtgcaatggaggaaattggctttggggttttcttttcctgttctctcatggaatctcaagatttctaggagcaaccctgcctacatgcaatcagtccctgagaggattgtgatgtctaattccaggggaggagcaaatgcacgaggatctcactgggaagggttaggctagtgctgctcagggggaattgtggtgggcctttctttggagtcttggaaactcttggactgggcctcagcaggatactaaaagcaacactagcctgagagctcaaaaggggctccgagagcctctgtcccacactgcttgctttgccagctgccccattgctgatgtcatactgccctgagaaagccacatgcctcctctggttgaatctctctgctttctctccagaaatgggcttcgcagtcacagccatctcccggacaccgggggtgacctacagcgactcctttgacttgcagtgtatcatcaaaccccactaccctgcctgggtccccgtgtcggtgacatggcggttccagccggtgggcacggtggagttccatgacttggtgaccttcacccgggacggaggggtccagtggggggacaggtcctccagcttccgaacccgaactgccatcgagaaggctgagtccagcaacaacgtccgcctaagcatcagccgagccagtgacacggaagcaggcaagtaccagtgtgtggcagagctgtggcggaagaacta

SEQ ID NO: 8248 - DNA, 19289 bp, Homo sapiens
caatgtgagtggctaccagggacctcctgagcagaatttccagtggtccatttacctgccttcatcgccagagcgagaggtgcagatcatcagcaccatagactcttccttcccctatgccatctacacccagcgtgtccacggagggaagatcttcatagaaagagtccaggggaacccaaccctattgcacatcacagatcttcaggcccgggatgccggagaatatgaatgccacacacccagcaccgataagcaatactttgggagttacagtgcaaagatgaacctagtgggtaaggagaagctgtcttcacgttgccagcgtctggcctgactcagttctttagtagtgtaattttgctttatgccatgcatttgactttaaaaaaaatcccaaaactcccaacatattttaggggtcaacagatagcacaaggaaactaaatttctgtgttcacttctaaataataggtggttgagggtgaaactttaaaaagatctaatgcagatgttaagaatttcataagttaactaaccctgtaactggtgaaaagggatatgaaaatataaggcaaggacgtttgtggttgatgatctgaatgacaaggaagatgagacgtatgacatcaggtggaagagaggaggaacctctcggaaggataggcctctgggcagctctgagacccacggggcactgctgaagcaggaagcacatgtggctgcgggtccttgctcagaccttgtacattgaaggtcctttggctccatgcgtaaggaactatgaactggctgtctcccttgttgctccttaatgctgaaggaaacatgaggaagagggatgcaggagcttccagtgtgggcagcactggtcacagtgttggccagtgtcaaagggttaaccgtatcaaggctgttctgtttttctgcctatcttaatgtccagtttttattatcacaactaagcagtgggtgttgctagttcttttattaatacacatactatcatttgtttatgtttcctttctctaactagtctgtgtcccagcaggagaccttttatttttcgtgtgtgtgtgtgtgtgtgtgtgtgtgtgtgtgtgacggagtttcgctcttgttgcccaggctggagtgcaatggggctcaccgcaacctccacctcccgggttcaagcagttctcctgcctcagcctcccgagtagctgggattagaggcatgcactaccctgcctggctaattttggatttttagtagagacggggtttctccatgttggtcaggctggtctcgaactcccgacctcaggtgatccgcctccctcagcctcccaaagtgttaggattataggtgtgagccaccgcacttggccgttcccagcaggagacctgtaagacccaatccttgggtgagaacagggagaaaacacatactagttgtgactagggtactgtcatcagacagagaggtggtgctatttaatttccagaaaggtgcaagcaaggatcagggtatgattctgaccaagggatcacggagaaaatctcttctcttgcctgaatctctccagactgtggcttccttccagtgaggacccctttgatcgatgaattaggtgaaaattaaacccactaaaaatagggtatgatgattattgtttctaccaaaaatggttttttaaaaaaatcatcttcctagggctgcattgctgaagtaagttacaggatggggatgtgggaaggaaagaaaggatattgtatagaaatgtaaaactaaaagttccaggaggcatttccattagaggatcagtcagaagtgaagttaaagtatctcaaagcagtgccagaatcaacaacaaatgttatttgacctataagacaattgtttaaagacagtattttcagggagttcatttattatgtaatatgaaatacaccccatgttttatccaagtgttattaaaatacgagacaggtaagtgtaagcaccaaaataatgcatttccaaatctgaacagaaaactttctgtttatgtgcatctggggctgtctgtggccttgaatcgatggttcaaggatgactgttagggacgcagtgtggtgacgcctgcgtggaatgggagcttagccccgggagtctcagattctgtggctttgtgactgcagtctcaggacatttctgtgttgcagtgatcccagactccctgcagaccactgccatgccccagactctgcacagagtggagcaggacccactggaactcacttgtgaggtggcctcggagaccgttcagcacagccaggtgctgtggcctggctctggcagaaagttggcgagaagcccgtggaggtcatctccctgagccgagatttcatgcttcactccggcagcgaatatgcctggaggcagagcctgggggaggtgcggctggacaagctggggaggaccaccttccgcctcaccatcttccacctgcagccttctgaccagggcgagttctactgcgaggccgccgagtggatccagaatccggatgggtcgtggtatgctatgacccgaaagcgttccgagggagccgtggtcaacgtccagccaactggtcagtccctctgagcctcttgtcctgtcctttacttggtggtgaaagctgtcggatactaggagaatgtggagactccttctttgggcacctctaccaggacagcaggttttcatgtgaagttaaagccggtcttgtgtgcggccggagggagctgagggatgtgcgggacataggtatcctaagacctgagtcacaggcaggtgccacacagactgaatcctgcttagagacatgctttcttccacctacgtggtgtttacacttttttgaattagaaactcattttaaaaattgggagatttctgagaaaccatttgtatcttaaaactccgggctttcattcccattagccacagttgctgccccgtttaatgatgttgccttcctcaggtacccatctggtttcatttgcagaagccatttgagataatgagacttccatccaaggtctaacattatgaactagagaaattttggcttaaattattattttttatctaataatagtctttggtgatattttgtaatttccaaaatgctttatcacatattacttcaccatcccccagacgttctgtgaggtgagtacgtggtagtattcctattttgcaggtgaggatgctgaatgcagattactttatgttggggctcaagaggagtcatagggcatgttgatgaggccagtctgagagtaccaagttccactgtatatgttttcttaagtgaagacctggaaggggtcctgaggaggttgcatgatgtctttagacaccatcatttgtcttgaggcaaaatgatggtggcacagccagctgaaaccctccctggcttctcttggtatctcctgtggccccagactctactccccagtctcatgagcccaccaggctccaggccagagctgacagctgttgctggctgcctctgctgggctgagggcaggttctcacatgggccttcagttcccccagctttggttggagcgtggttgttgtgccgtcactaagttggtgatgagtggcctgaaagcctttccttgtgtggatgctcacttccagtgaggactgtggtggttctggtgagtgagtgtggctttgtgggaaatgagctggtgagttgcagtacaggtggggtccttcttcaggacctgtctcttgggctccctgtcccatttgctgcagtcagttgtctgggtctttgcatactttctctgccattctagagtaatgcctcagactcagctaacagtacacattttggggctttgtcccagaagtcttcaattggaggctcccgggatgggacctgggaagctggatttctggcacgcttcccaggtgattcttctgctatctacattttttttttcaagcaaagcttctagggcagaagcaattctctggacatcactttaataagtcatctaatggatgtgaaatcttttaccataggggttggtagggatagggggcactttatctgctctgtagggcatttagcagcttctggatttttcagtattaaaaaatctatccaaggggctttattttatatttatcctttcccttcctggaaagttttgagatcaacttcaaaaatttgggccaaattttgagtcttaatgcttttaaattaggttgcatcagttaatcttctttattttaatcttaccaatttggaattagaactttttgaatttaccctgaaaatgtatctagactaagccatcaaaaggaaaactaagtgaaaaaaaagttgatgacttcactctgcattcctgtgctgtttaggttcagtagttgcatctccaactctacccttctcagtttatttcagtaaacatgtagccagtctccacagcattgaaggtgtgatggtgataggcattaagggcttcaaagatgactagcactggtccctgcacttaggcagacctgagaaccaatggacaagtaaaatgtgctaagtgcattgatagcatttgtatagagtcctctgggaataccggaaataggaagtgttcttgcaaccatagttttctctgaatgggatggttgataagacaaatccaggaacaccaataagtttcttgacttgaactgagtctggaagcttgaggagtcaggagaagaagcataaaagtgcaaaagtgtttgatatgtttggcaagcagaaaggagtcaagtatgactagttccagatgttcagttccagatgtgtgtgatgagaggaaagggagcccgaagccccaaatgcagtgatatagagccagggcttgactctgtgggccaagagttttcaagctgttcttggaaccctggaagcccctcaaaggtgcctaggaggttagacatgggtgtgtgttggtgttcatgtgcacattgtgcacacccaggagtgcagggagaaggcatgcaagggcctgggtggtccccccttgcttcaactatgttgggcagcagaagattttatatgaataaaaagtccacttcctttgtcctcttcttaataaagtttgaagacctctgctgcagacagttggagaggaggtagagatttttaagcagggagtaagacaatcagatcagggtttcagaaagaaaaacctatggaggccacctggaggttgattaaatctgttgagtctgaagccaagagaccaggtagaaaagagctaataagagccaaggctaggtcagtgggtgccagaggcgaaagaataaagagcacaatggaaggaggggtccaactgtctagaaccccaggggctggggctggggctctgggggttccttgaactgtgggagggaaggaacaataatgaggacatgcgggacctttgcatttgtggcagcattggctgccttttgtttttgtaaattctaatgaaagagcccatccatcagatagactctgatagagatgctcagtgtgcgaaacacccagtgggtcctcagacataggggtctggggctcagagaccgagcctgagagtgatcagggccctggaagagctcatggggtcaaaatgggaaagggcctgggagaacagcagcagtaaggggtgaccagagaagcaggtgagagagtggaacagagtgggcaggccagcaagaagagcaggagagaagggatcatagagcaggctcagaggcctcaacctgcttgaggaaagcctttggttaggatgggggtaggggtaggggtagggtggatcattcatgacatttgctaagtcagtgaagcctaatttcagtgagatgaagtggaaggggtattggaaaaagcacaggtcagtttctagagatgtaattgactgggcataaccaagggcagaaacgggggtgatgtgggtaaatcttgtgtcttcaacctgggaacatgaaggtgtcaccaaggcatggggggattcccctgagatgagcagatcctttggcctctgaaagaagaaagccagagttacagccaggctaacctggagcaatggaaaggtctgaggtctagggtaccccttgcacagctccagtggtgtttatgtggaaggagtgcttttctgtcattgatgtcgggttataaatgactaattgggttgacatgagagataatatccagcagataacatggggactgtcccatatgggtgtgttcatccaggcagatggtggcagagtgaaatgtgcttccttcaatccatgcctcttaagactggtctcttgggagctggaagctgtgacagcagctacttcattggaggggaggccctggagttgatgacgtggttttccctgtcaggaagtttggctgctagaggaagtagttaggtcactggaaagaagaggtgtttgcagcaggtcactggcctatatcgggggggaggggctggagagcctgaggagtgggaggggtaaagctgagctggggctggaaaagaggaatgtggatgctgctcatgcgtgactcttatgttttctcggggaaacagaaacctcgtctgcttgaagagtgcctaggacgggatgaatgggcaagatcttgcagatagtgggaaagactagacatgccagtctagggaaggcagacaaggtcagagctaatgaatctacatggaattcaaacatctctgccatgagattttttccacctcagtgttctttttagaggaacagagctagaactgggcagtggtcacagctccagtctctaacccttaactccattttcttccccctgacttctgccctgggtgcctatgagatacgatagctgtctaatgagattaatagccactgtacactggtacacaggttgtggtgatgctgttagtggtgatgagcccctctttggtcaccccctcatgcctggttaaacacccaactcaacaaaaattagccagatatggtggctactccggaggctgaggtgggaggatggctggagcctgggaagtcgaggctgcagtgagccatgatcatgccactacactccagcctgggcaacagagcgagaccttgttacaataaataagtaaataaataaaaatttaaaaaacacctagctctttggaggctgcttggttttagtaatcatttcagagtctgtctggctttcagcagaagtaggtactttcctactaaagtacctactaaggtttaaccaggcgtgagtacttaataggtactttcccactgaagtaggtactttcctactaaagtaagtacttagtaggtacttcagtgggaaagtacctacttccattgaaatctgcctaaagatttgatctgacaggtggtaaactagtgaacagacattagtttttattttttctatgtaattctgttagggttttgtcatggctacaacttatttctagtattcacatggcggggggtagagagggaattttaatctttgagcatttgttaggattgggccagcacctaggccactctgtaattttttcccacagacctcagtggggtaagtcttacagtatctgctgaaaatgtttataaggctgttccttaaatagagttctgggtgcatatatcaaggctagatatttgtaatccaccatttgagtgatattagtagcttctcactgacctgggggtttcatgcaagacatctaaagcttcagactgagccccattggtcttaactggggtaacagtttgcttagaccgtctgggctgaagtagtattgaattctgtctgtgatattcaggcgtttctctggacctcagataacctgggtctgagttggattttactctcaagccaagtgttgtggtcctccctgcaattagtattgtaaagaagaggaaggatagtgggaatgtgctaatgtggtttagttggctggggccctcattcacccaggatgtgtctcttttcttaattgttctctcagacaaagaattcactgttcggttggaaacagagaagcggctgcacacggtgggcgagccggtggagttcagatgcatcctggaggctcagaatgttcccgaccgttactttgctgtctcctgggccttcaacagctcgctcatcgccaccatgggtcctaacgctgtgcctgtcctcaacagcgaatttgctcaccgggaagccaggggacagcttaacgtggccaaagagagcgacagtgtctttgtgctgaagatctaccacctccgccaggaagatagcgggaaatacaactgccgggtgactgagcgagagaaaaccgtgacgggggaattcactgataaggagagcaagcgtcccaagaacatccccatcatagtcctccccctcagtaagtagagagatgtgctgctttcttctcctttggctcagcatcatttaggagaggtagggggagagagaatagtgtggtgagggtgaggggaggcagatggaacccccgaggttaatgcagagctgggggaaaaaccattgagcctctcttccctgttgtagcccacctgcctacatttagcagtctccccatagcagaggatcaggatcaggggtgtccaggatcagggcagtctagggctgggcataggcctatctgattgctagcagccctgtgcatacacaagcagtgccagctcagcttggagggaaaccaggaatcccagaaagctgtttgctcttgtgtgggaatcaagtcccagaagaagtgggtagatagatgcctgccttgaaatctcacttaaggagagctggtcttttatgggaggattttaaatcataaagtgcattattaaggatttgccatctgggtttttcaggtataaaggctggcatttccctaaatggcttttccctgttgaaattgtgtttctaaaagtcagtggatgggacctctcacatcttcctggagcatagtcttttaagcttagctgatttctgaggctgcctcagtgggctcccagccttcatgtagactggccttgtgtgggtgggtagtggccattgctagggattccagaaactaccggtgtttgcttgtgttgtgtttaaacattcacagtatcaagatattcttattaatctcattctcccatagttctgtttttagtaaagagaataaaaacctacgatgctctgattttaaacaagtggtaaagttttaagactaatctttaaccttttctcagctgctaaaactattctttctctgagccttgtaataatttcctttactttttatttatatgttttaatatttaaaatatttctcttcaagtgtgaagtaaaaagtagccataggggtcctcttgttagtcttttcttcttttctcatcaactggattattttcttttatgcttattattattttgttaaaaaccatgcacacacatacctaattatcttttttttcctggcaataaatattttaatttgtttcatttttatgatgacaaataattttcaagtttatttcctcgtttaaatacaaagctaaaccacaaacaggtataatcaagacattgtgtctcatatttacactcccatcggatcctcttccaatttgctgaccactgaccaggctagcggggggcgggggtgggagggaagactttcttaggtaacaccgtcgtaaggcccgaggtggggttgggggggaaatcaaagatgaggacaggctctcatacctgtctccattcacatttacctgggaccagggtgggcaggagacaccaggtcatggctcctgagccccggccccctggactgaagggacagtgtgtgagaatcagttctgtgaagggcgggaggaagcagccacctattcctcctgccttcacagttaaggtgaaaaccttagccctatccttgattcctgggggctgccgggccctgtgtgcccccctgcacacctgggtgtctttctgaggctggcagcatcggctggggtcaggggtcctgggctcctaggctcacacctcagctcagttgcgtccttgcaggaggacactgggtatctgacaaacacaaagcctcgacagcaggtctggaactttcaaccccagcaggatgagggggaatgggggtggatgtcaggtaagtaatttctggtcccactacaaaactttatttttgattagagtaccattctcaatctcttctacaaaaagcaaaaaaaaaaaagcaaaaaaaaaaaaaaaaagcagccacttcactcacttcaagacctatatacatgtaagttgttttctgtgttttttttaattatttttaatttttattattatttttaaaataaattcagtgttcacatttctataaagaattaacccagtttcaggaaaccctgccccagcagggcaggtaagcaacactctccctgcccacatctagtttgatttcgcgccctgatgcttcaagctgcccagaaaagcggcagcttgtggaagaggaaatctatgcctggcccgtgcttggggcccagggctcagtaagctttcgagaaaacagaggggaagactagcttactgcaaaaacctttttaaaaaatattcatacacttcagtgagtgcctgtcgagacgttaggagaacaagagcttggaaacatcccgtccaggccactgggaggcagcatcttcctcacaccccgtccctggatttcgggggtgcagggggaaggtcccggctcttccactggagaaaggagactcacctagcttcctagttcatgtttgactatttcctctaaaacctgtgctgagtctttgactgcatgcacgggaagcacaaacgttcggcttgtatgcaaaaaaagtacaaaaacaactagaatataaaagttttggtaatataaggccatctgttcaagtccaccttggaaacctgtaacagatatttaaatactacagtgaaaaggcatcttaatatactttttaaaaacatctgaagtaatccgctaagattaagtgtgtaaaaaaaaattcaattccctttgagggcactttgtcctttgaagaagggaaagtggggcggggagggcgcggggcccaccggttaatgcttcagccatgggtgggcttcaatggaagccttgctgcggtccccatagtcatacaggggctcctccccagccgcgatgtctcgggaggcgatgaggatgaggtgaggtacgccgtcgatgtcgtgcagtttggtttggcagttcccacgtttgctgtgattgatcagtcttcctaggcgatttgtctctctagttgcatccacgcagtaggttttgctcagatactgaaaatagtacatgtagcagcccgtggaagggtcctgtgcgtacagagcctcccgtttcttggcgtcggtgatctcgatgaggtccccgtggtattccaccacaaaggcaccccgggagaactgcttggtggcaatcacacccctgcctttgccatcgatgaggtcgatcttcattccttcttccttcccactttcaatcaattcatctattcttttcctttcttcagactgcagctcggctttgctcttcctggagctccttcggacagggtagaaatccgtgtttgcgattctgttgcgtttttccttgagctttttttcgggggggctgtttgcccttgatgggctttttcagggccggcttggcgatggctgcattggtggaatcacaagatgagggtggagtttttggaggttctgctgcttcagatttttggtttggaaaaggtaccaggggacgtctcctggcgtctttgatcttctgttcctcggacttcatggcgctccgtactgcgttcccagcatttcttttctcttctcgtttcctgtagattccagctaatggtttcccctggcatttgacttcgtgatgtgtaactgagttctcttcctgaagggggaaacgcattccagagcatttgttcgggctcatgtaggaatagatctttgactgcccggtaaatacgttctccccgtcggtgcggggcctccccgggcccctccgctccaccatctccgggcccggggccgtcgctgccaccgccgccgccgccgcctccaccgcgcagggcttggacatcttcccgcctgcagcccggccaggcccatggcagcgcgccctgcgccctagccgccgccgccgctgcccggccaccaccgctgccgctgccgctgctgctgctgctgccgccgccaccagcgccgccgcggcgcccccttcccccatggccggcaaggcagggcccggcacccgcgcaccgcggcagccccgggccgcccggggcgaggcacgcagggaggaaggcgcaggcggcgcgtcctcagcagccagcccgcccgctccacctaattatcttgaaattcttttgtttcttagccttttccaccctgcaatgcctaacatggtgctttgcatagagtaggtgctcgctgaatactgtacaactgaaattattgaattgaatgcccactgtctttactattttcctgtcagtctgtgcttgccttaaccacggactctctacttttaaatctgcaactaattcctcattgttttctaaggatcaagtgaagggcagccacgctgtttacttcctatattttttgtactaagatttcccccaaccccttctgagaacttgtttgatgatctgtggcctgctatattgcttttccagcagataactgggtagttaaagtcccccagcaccgccagatcctgtcccaaggccacttgggtaagtcggctgaagaacaacaacaatcacatcggtaatggtgataatgccttggattttaatggcgctttttctcctaagagaccaaagtgcttctgcatatatcatctccttctccgctcccacctctcaaatcctcgtagaggccaatatgatatccatctaatgaatgaagaaatcagagcaccacacaggaagtgacagagctgattgttcagttagtggttgagcttgcattgtattaggaaatatttgcttctaactccacacccaccgccctgcgcttagcctgtgctacaccatcaacttcctgatttgaaatttcatttgcgaatgtgtactcagatttttattagttctgtcctagttttcacttaatccagagagtttaaaattgtcagctgccttttctcaggcctggaaattcttgtaaatagtgtttagtgggcagtgaggcaccaggtctgtagttgcctttgcctcagctgctgtaataaaatagcatttcttcttgtagccccacattctaactatgtgggtttccaggcttgctcaagcaacagagcaccaccaaacagtagccctttcaataaatgagccaggacttgcataagcgtccactgggatgacagtaggggatgagagtgaggtcctgcaagtcattctcctgcttaagacaagtgaaagaattttcttccttgatgctgcagttgcccttttaatcccttattttgaattgataacagtggggatgagtctttaatctaaagaggaatattgttgttattaatgatgatgaaaaataattacctcatctaatcctgtcaatgtcatgccctaagaagtaggcactattagtatctccatttttcacatgagaaattggagctttggtaggttaaggaagaaccacaggattacagagttaagaagtctccaaatccagccccttaaccattagtgctatagatggtgactgttcaggagcctgattatctctatgaatcatcctggtatgactcctgggggaggttgccctcctgggaaaattgctattccctgccccatccagaccttttatttttcacataaaacaagcacatccagaatggctagcaggcatcctcactataataagagctacattttgaggctcagtgctcatctttgtttctgcttgttgaggaaataaaggagagaaaagatttgattcaaatgcattgttatgtgtatgtgtgtgttttctcttggtaattgggtgtgcctcttaaaatctgggatttgatttaattaattggtttaaattattgcatgtatttaatgtgggtggtacccaaaaattggagccaaattagttactttgtgttctttaatacttacagaccttctgaactcaatatagataattatacaaaatactacgtgcataattaaaacatattaggctatctgtgatgtttataaaaacaaagagttatgtggaatagtaaaattaatcatgatcatgatgaccagtttttgaaaacctactatgtgttaggtgaatctatatgcatcatctcatttactttttaatatttaaagaattctacaattaaaggtggctctctacctgtcttacagaagaagaggctgaggcatgtcgagtttaaataatttgattgagtgattcagatagttaagcgagcagcagaggctagatgagacagggaagggagtggaatccttatcccaaacttttgattggccaaatgtttctagaaagagagcaaaggagccccagggctgactggacaggtgggagagtggtggatgatgagctgctggctttgttttattcctgtgtgttaatgaaagaatgaaagcctgctcctcatgcactgcaaaaccagaccatctgtgctctcttattacccacacttaagcacacgttatcatccaaatacttactgtcagttttttttttttcgtacttcctaaattgtcctgaaggactcaaatggcacattatggatgttcagcttttatttgactgctgtagtatcgaatggtaggaagagtgaagtgaagtaggattttggagttactcttcttgctgaaaattcaacttgaaaaaccctgaactgccgctgaatagattacccaataaattgttttatgccctaatcatcatgccactatgttgtatttcttaggttcttattcaggctcaggtgttagaacctcgttatcacagttctctgcacacagcaaagaacatcctagattatcagatctaaaaccacagggagcaatgcccagaaccagccagggcttacatcagctagggtcagagtgtttttgaccctctgaggctcaccgtacctgaatatgattccatttgcacccctcctcctgtttcctctgtggggagggcgctgtggagaccataaagcctccagggtgtttctctctccctcttcctagagagcagcatctccgtgggggtggccagcaatgccagcgtcatccttgagggcgacgacctgcgcttctcctgcagcgtccgcatggcaggcaggccgcagggtcgcttctctgtcatctggcagcttgtggacaggcagaactgccgcagcaatatcatgtggctagaccgggatggcaccgtgcagccaggctcgtcctactgggagcgcagcagctttgggagcgtccagatggagcaggtgcagcccaactcattcagcctgggcatcttcaacagcaggaaggaggacgagggccagtatgaatgccatgtgactgaatgggtgcgggtggtggatggcgagtggcagattgttggggagcgccgggccagcactcccatctccatcatagctcttggtgagtgagcggtgggactggcagtgggtctggcatggagacagcttcagtgtcaaacaccttatcctgacttttgtctgtcagagttctagcaggaaactatggccagtcttttacctatagagtttgaagtactttcctttatatctattttgtttcttataagggtttaattaattaagatagtgctagcagggactaagggacccacagtggatgatggggctcctgagggatagcaatagctggcagctgtgactactcctagtctggctgggagagagtgatgttatcagaactctatccaggttagtgaagccacccagccatagtggtggccccaggtggaggagcatggccactgccagcctggccttaaagagagcagagtggctgagcactgtgtggcatgtctttcctgccctgctgttcaggggccagccttcctgaaagagagcagagaagggtataaaattatctgttgtcatttatttagcatttactatgttcctggctaatccttaacacttaagcttagttgtcccattgaatccccacctagccaagtgacagacactttcattttatggaggaaactgagactgagacacattaaatactttgcctaaggctagaagtttctactacctgatggggcccatacctaacaaagctattccctcattagcatggaatgaaaagataccttgagatttgctaaaaccaaggaagattagatttgcttctcatggggtaaagaggcttctatcaacatttatctgcttggatataatcagtatattagattttaaacgaccagtctgtgactttgctgggaaagaaacttgttatgtcaggtcttcctgtttatcaggagacatcggttgtcctcagcaactttatgtcccactccctgggactgtgtcaccaccttccttgcaggtcgggatggtggtgcttttggatacttccagtaaagatggcagccccgagtggtttttgtccttaacagagtcctccattttcttacccctctgagattagaattacatttgttttctaaagcttaatcctaaagattgacctgctttttgcagtaattatatggctcagatttctgtcttagaaacttcctccagtgattgcgtttcctgatcagctcagttcctgtgtccatactcagcacctgtgtggacccagtcagatggaacttgggggacaaattttggatgtccagtactggtgttttttttttttaaccatcctggaaggttaggaatgtccaatgagtgattagagttagtgaggattgtttctctagaagtaatttatggtatcaggttatcccctgagttttttcttactcaccatatgtctggtggttctcacagccaggggcactgaggagctctgccctgggatctggaggccagcactgttcacctgatctccaccgctgagatacctctggctacagccataatcaggtggcccaaaggactgaacaaggaagaatgggagggcactctagactaattaaggttgtcttttcagtctaaagttaacaatgacacacatgaattttcatatcagtataatttgatgtgggtcccaaatgtacaatgggccattatggctgttcagttagagcagcttgggtgctctgtgactgtggaatgtgcctgtgtcaggactagacaaagtcatttgcttggggaagctctctccccttcaggtgtgaggccaggagcacctggtgtgggtcctgtccctgaggttctgtcctacaccaccctcatgcaacacctactacacacaggtgcacagtgacagtcagaggtgcttcatgtttaaggatggacctccgtgtcataaacttttttaaagggtatatagagatagctcatgaaatccaaatcaaaggtccagagttttcagcaaattgtacctacctatttgccaacttaacctcaccatagaaagccaaaagattcatcctgtggccagtctttcacattacagaatttaaagtacttttttaaaatttctatttcattttttaacaaaatatttaacaaaatatagtatatctcatgtgccaggtactatttgtaatatttataaacactgatttatttaatcttcacagagactcattttacagattggaaaacagaggcagagagaagttaagtaactttaatgtcactcagctgggacgtatcaaaggcttggctgctggctccagagtctagacctttaaccattgtgttatgctttccatgggtaaagcaacctaaaaaggcccctggaatcagttacatgtggttggagactaactctgtcattgacttaccaaatgcttgatattgggcaatttatctaacctctctctgcatcagtttctacgtctgcaggaagagatgacaagcctgcctgttctacaaggttgttttggggattcagtggagcatgatgagagcaaagcagttggcaccatgcttgcacctagatagtgctcaataaatactggctactgttagctttatgattgtgatcaatgtatgaatattaagcagtatttccaggctgaaggaactctgaggtactcatattgaggagtcagtattagagcttagcagtgctgcccattcaataaggaatattgagagacccacagccgctgagactgcagaaccctgcatttaggacaattgtcccaccccactggaggtccccacctgctctgttcttggatttcatgagggacgtgagaaagggactggaggccgactccatctgcttcccttctcagcaccagtgcactaagggaccaggaaaagaggtgttggggctgtgtggttgtgttttcctcctgcgcaatggaggaaattggctttggggttttcttttcctgttttctcatggaatctcaagatttctaggagcaaccctgcctacatgcaatcagtccctgagaggattgtgatgtctaattccaggggaggagcaaatgcacgaggatctcattgggaagggttaggctagcgctgctcagggggaattgtggtgggcctttctttggagtcttggaaactcttggactgggcctcagcaggatactaaaagcaacactagcctgagagctcaaaaggggccccgagagcctctgctccacactgcttgctttgccagctgccccattgctgatgtcatactgccctgagaaagccacatgcctcctctggttgaatctctctgctctctctccagaaatgggcttcgcagtcacagccatctcccggacaccgggggtgacctacagcgactcctttgacttgcagtgtatcatcaaaccccactaccctgcccaggtccccgtgtcagtgacatggcggttccagccggtgggcacggtggagttccatgacttggtgaccttcacccgggacggaggggtccagtggggggacaggtcctccagcttccgaacccgaactgccaccgagaaggctgagtccagcaacaacgtccgcctaatcatcagccgagccagtgacacggaagcaggcaagtaccagtgtgtggcagagctgtggtggaagaacta

SEQ ID NO: 8249 - DNA, 525 bp, Homo sapiens
gagaaggcaggcagaagtgaccttggagaacagtatctgagccagaaggcaggaggtcagcgggggagtcttgagtgggaaactcaagggtagcctgactgtccttgtcacaggtttagctgggcactgttagttcccccctttgtcagtttgtgggaatctgggcatcagggatctgtttcagcccttcacatttgtgtttgggtgtgctcagcttaaaacgatagcagcctgcaggagcttagctctgcctccatttatggagggaagagaaactaaggaatgccccttggggtggtgttggggagcagctacatgggaaattgaagggtgcagcaccagtaaaaaggtgctcccaggactccctcccaccagcgctcagaccaaggaagaagcatttaatttcagccagatttctagatggttgcttttatttgttttcatctgaatttgtgccaaggattcaacttttcctgctcattttattaaaaacttcatacacagcattaataaatagatataaaa

SEQ ID NO: 8250 - DNA, 524 bp, Homo sapiens
gagaaggcaggcagaagtgaccttggagaacagtatctgagccagaaggcaggaggtcagcgggggagtcttgagtgggaaactcaagggtagcctgactgtccttgtcacaggtttagctgggcactgttagttcccccctttgtcagtttgtgggaatctgggcatcagggatctctttcagcccttcacatttgtatttgggtgtgctcagcttaaaacgatagcagcctgcaggagctcagctctgcctccatttatagagggaagagaaactaaggaatgctccttggggtggtgttggggagcagctacatgggaaaatgaagggtgcagcaccagtaaaaaggtgctcccaggactccctcccaccagcactcggaccaaggaagaagcatttaatttcagccagatttctagatggttgcttttatttgttttcatctgaatttgtgccaaggattcaacttttcctgcttattttattaaaaactttatacacagcattaataaatagatataaa

SEQ ID NO: 8251 - DNA, 221 bp, Homo sapiens
gatcacgaagttaggagttcgagaccagcctggccaacatggtgaaaccctgtctctactaaaaatacaaaaattagctgggcctggtggcatgcatctgtaatcctagctactgaggaggctgaggcaggagagttgcttgaacctgggaggtggaggttgcagtgagccaagatcacgccattgcactccagcctgggagacagagcaagactctgtct

SEQ ID NO: 8252 - DNA, 7282 bp, Homo sapiens
cgctccgggggccggcggaggctccgggagcgcgccggggcccagccgcatcgccgactacctgctgctgcccctagccgagcgcgagcatgtgtcccgggcgctgtgcatccacactggacgcgagctgcgctgcaaggtaggcgctcccgggccaggacccggctggggtcgggggcgcgggacggggtggtaggcaaaggtgcttggggtccggccaacgcttgggctgggcacagggcggatcagtagattgggtcagataagacgccatttgaccaggttcacgtttttgtggatcgaggggtttcccatggagtgatataatgggggcgcctagaggaagtgcagtgttcagtggctttctctatctgttcctttcctcagcgcccagtgtagcgcgtggcgttccatataagttgtggaattgaaatggattccagggccatgccattccccttctctcattctcctcgctctccaccccccctcccccgccaatgtcctggaaggacgccctttagtgggtgcctcctaggagcttggagcagctggcagctctcttgccgggcttgcacggcacccgggctcagttgtaggtggtaagggggctggaagactgtgtccggctcctgccttggggattccgaattgaatccgcgctgagactagaacacgccctcccaagggagcagtcccagagtcatccacccgaggcggaggaatctgctcggagtagaaatgttgaaaagcccacaccggccaggaaccctcgcttcgattcactttattttccagccagcgattttcctttgaacatagggatcccatccaggaggaggagacacagctcctagaaacaggatccgccgggtcctcctcctgcgcgggtagacgcagaacgttcccacagtctactttatgcgagcgtggcacccctgcttgaggcaccccagagcaccctcgggccgctccttttcacccgaaagataggatcaccccccagttaagtcgcttctgggttttccgcaactcacctgacactcccaacaccccgaccccgtcccggggctcgctgctgccacctactgcccaacccgaatgaaatttcagacgcatgatcaagcccagtttaatagggaggaaaaaaaaaccttttcttctccatgactggggctaagagctgttctgggacaagcatgtatgtgtgtgtggtgggatgggatgggatggggtgggaggagggggcagcaggggatttttctagctggtgccagagcagccaggcctcttagaggtggggtgagtctggccattgtgcaaccccttccagttcctctgagcagataatagctgaatccagatggtgacagcccgtgtgtcaccgtttccagttgagtctaggatatgagtaactggactgaacaaaaggcctttaaagagaccagccagcttcctagaagagaggagatgctactcatttctaggggtggggtcgggtgtggggggataaacaaacaagtggaaaacccattcgcaggattccatacccttcctgtgagaattgtaactcaaggctgcttacacttgagtcggactgtaggcaggttgcttaaggctgcattgtcccagcctccccctccaagtcatctgttccttctgattaatgacagctctgcatgttctctggcccctgcttccccttggaggctgcagagtcaccacattctgtgccctttctgtgttgagcactttgggtctgcaggaggcacatgcacgtccagggactgcttttcagctcctggacaggccaggggcttccttctatcagccactcaactagtgtggcctgcaaacaggaaagggccacagagggtggggggtttgcttagctctcaggagctgacagaagatgggaacatgtacaggagacagttctttcaaatcatctgtgtgaaagcgggtaaccctttgggtatttgcaagtctagagctttaggtgttactggttttaaaggtgtcaggggcagctggggctgcgtaaggtaaggtggcagaggaaaggagtaggtgaatggaacttactcacatcctaagcccacaggttgagaacttctgttcagctccctcaggggtttgcgaggctgcctttgcttttctagccccctaaacgggccccccttctctctacaggtgtttcccattaaacactaccaggacaaaatcaggccttacatccagctgccatcgcacagcaacattactggcattgtggaagtgatccttggggaaaccaaggcctatgttttctttgagaaggactttggggacatgcactcctatgtgcgaagccggaagaggctgcgggaagaggaagccgcccggctcttcaagcagattgtttccgccgtcgcccactgccaccagtcagccatcgtgttgggggacctgaagcttaggaagtttgttttctccacggaggagaggtgagcggccgccacagcttctcctgtggccttttggaaccaaagcggaggtgcaggtcatgtagttaggtgctgtgtgttggtgcaaaacaaagtcaagggctcatatgtcccagatttagtatttagagcttctgttcctgaggagtcacagccaaggttggtttattctgcattctcttggacggggcctggggacaccgtggcgcttctatgggatggcaagtgttgacagggtgctcttcctctcctaccccaggatcaggttcattccccattgttgtcagaaaggtcagttgtctggggtacaaatattaaactgccctttacgatattgccttctgaaggaagtgttcaaatctttgcttatgccaagtgctgttttgtacctggaaggtttcacagagctagtgagactgtcatatatgcagaattccaccctcttgtttcacacagcattcctctcccatcccagtccaggttctctgtaacatcacattctctggtgactttttagacagcttgtttggatccgtcttcagaaaatagccacattgaatagtaaatggaagttggttaggatggattgctaaatatagatcatagcttacctcataaagaacaagatgagcttgataagagagtaatgaggcattaagattcaaagctgaggtttcagctagagaattcaggaagccgcatgagatagaccacacttgattttaagagccagccacatcccttgtggaaagattacaagcagtaaggctgtaacattgtagaggtgagagtgagttagtttgttgtaagaagtgggcttatctcacctgtgcatttttacctttgactccagagcatatgaaacagtacagggttgagctgtcataaagcatgactttgtatctgacctcgcaataattattggaacacactgattagcaaagaaaagcaaactgttggcaatgaagaagtttctaattcctggaacatgctcctttgatatggtgatgcattttctgaaacatgccttacacacctccttactagcttttgaaatctgcattgcacaggcgaatatcatgggcatggggtttggcaacccgggggttaagcaatgtcaggctgacgctattcgtgtaaccagcacaggtgcagggttttagtgctgtagcagccaatcaggggcagacagtgtgggttgagtcatattttccgtttacagaaccaatgggtattttacataacgacagggaggtcacgctgaggacatactgaagttagcacatgtatactacactccagggaacaggaaggcagaaaaaaaaaaaaacagacctttgagaggaaaaggaattgacccatcagccagtaccaaatgtttgcatttaacttcacaagtgacttactgaaacgggtatttcagagaagcaggcagagacagggtgtcactggatatcagagcttccccaccacatggctttgagctttgggggatccaggagacttgggtggctggttctgaataaggaggcacctgcagcttcataagagagcctttgactgaaggtgttttagactttcgttgttacctgaacagagaccccccctgtagaatacatatgctcacatgttgatgtgccatcccagggggagtgtgtgtccctgtgtaagaatttcagggtccctgcgtccctgaaatccatcagccacttttgtttgctcgcataacctctctgtccaggcaaagtgttctttgcagttaaacaccccaataaatgtaattaacattccttgcaactttcccatcctaattgttgcagcctgggcccaggtggacaaagtttgctctgtgtgcatgtatcagtgtgggcaccagcgctgatgacctgtgtgtaatagcagtgactttgggctccgtgttctgtaatgcagtgtgggtccaggtagccctggcagtcataagagggaagatgggttcgtaggatgctcaggccctctctgaagaagtaggatatgctgctcttccctgctagcttttgtagagaatgcagcattctgagacaggctcccagttctgcaatgggaacttagtaaattgcgtaactcctattaggatatctcttgtaagctccagcattatgaatactatttggggctttgcctcataccctccaccccaggcgctctgccgatactttgcaaacatttattgcagttcgtgttagtttgtgaaatcacgagccctcggtagttgcagggcactgcttactggacgaaggggtaaatagcattcctggagcctttgctgttagtgcctgtgggcgctgttattgggaaggctttgtttttcatagcagctggtgtggaaataatggcttggttcctctctcttgcagaacccagcttagactagaaagtctagaagacacacacataatgaagggggaagatgatgctttgtcagacaaacatggctgcccagcctacgtgagccctgagatcctcaacaccactgggacctactccggaaaggctgcggacgtttggagcctgggggtgatgctctacacccttctggttggacgataccccttccatgactcagaccccagtgcccttttctccaaaattcggcgtggacagttctgcattcctgagcacatttcccccaaagccaggtgcctcattcgcagcctcttgagacgggagccctccgagagactcactgcccccgagatcctactgcacccctggtttgagtccgtcttggaacccgggtacatcgactcagaaataggaacttcagaccagattgttccagagtaccaggaggacagtgacattagttccttcttctgctaatccccaaaacctcagaaacctcataattcttaacacctggcatttccatttctaaagatggacaggccctttggcgtggtaccaaccagataatgactgcatcaggatgaaagctgctgaactcggcatggcgcctcctcttctctgttgggatgagtgactttattgatttgagcagcatatgctgtgattggctgccctgcaaatttgtttcccttaaggaaccctcaccaactatctctgctggatttgggagttccgcatcttttgtggagggcagagtatggacatcttacacccggtggtcaagtgtgtaataaacttgagcattcgaatgggagaaaaagcaaatcgcacaatgacatattttgagtaataaccgtatttttcacagggtgacaaattgggccaataaatctgccatctttgaactcatctttggtggctagactgctacggcagcttctctgatgggaaagttccttttttggcttaacactcaccctttcttcacactcacatttaccaatgactctgctccgtttttggagcagactgttttaagttgctcaggagcctgatggaaccatgaaccgagactcttctctgtttcctgccaagacctcatctgcactaatgccttctccctgaccttgacacttccccctttagctataaaagcacttaccagccgaacgtggaacagtatcacaaaagattccatctcccaacgatttcagaactctgagctcagagagactccagattttaaaaaataatttgagtgcttggaaactattagctttttaagttccttccaaatatgttagtacctaccctttactttttccccaagaccatctcagggtggagcattctgtctaagagaagaaagataaggaggctcccacccacctctcccaagagcagacattaaacatctttgtgctttgaagagagtgaattttggatagtcttgtgattctcagactaacttccagaattatactttaacccctcccagatatggtccgcctttggcattgtgtgtacatctgcagttttgcatggtgggttgttaatatttcaaatgtgtggtttatgaatacgtctgtataatcggcttctggagtgaaacagcaaaccccaaatcttcaaagttggaaggaactttaaaaatcatccggtccaatctctttcctctttctgccacctcccaaggcagaaatcccctcttcagcttcttttgtaggtgggaatccagcctctgttagatatgtccagagatggaaactcactcccctacaaaagatggagcttaatggagaaattgcaactttcattaaaaaacaaattcagatgaaatatcagtaactgtcttggacagtgctgaaatcaggtggttaaacgggtaaacaaaatatactgtattttgagaaatggcacaaaaacaggcagtcatctttaagggctatgcctaggcaaactactaacatgcattgtgagaatgccgtgtatacctcacgtactgtgtactttgtacatatattttaccttttatacctatgttcgattttgttttgttttgttttgttctggctttgaggcttgttttgttgtctgtgtctgtctgaataacctgcgtgtctaaaaccacgtgaaatgtgaatgattattggcaatattaccttgacagaatcatgggactttgagaagagggaggacagaggcctctgtcgcactaacgctctcgtggttgctcgactgttgtatctgtgatacattatccgactaaggactctgggctggcagggccttctgccgggaaagctagaaacactaggttcttcctgtacatacgtgtatatatgtgaacagtgagatggccgtttctgacttgtagagaaattttaataaacctggtttcgtaaata

SEQ ID NO: 8253 - DNA, 352 bp, Homo sapiens
gcccattgggtgttgatacgtgctttgggttgaatttagactcgggaaacattttttattttttatactctttcatagcagaatcagaatcaagaaacgtttgaaggtgagcattcataaattaaccttgagttgtaaaaatcagcttgtcttttttgggccgtggacccttgagaatttgataaagctatgaccactcctgagaacagtgtcacatgtataaaacaaaattttgttatcattgcagaggttcacacagatctctgaaggcatcatgggacttccgattgtgaaccaatccctcttcattagacttaattaaaatggctaagcaaaccattttctttttttt

SEQ ID NO: 8254 - DNA, 414 bp, Homo sapiens
gcggccgcccccagcgaggctccgggagcccttgcctgcgggggtccggggactcgagccggcctccgccccccggacgcacagccagcgtggtccccgcgtgcaacgcgagcgccggggagtggctcctgctttgcccctcgtgggggccgagccaagaccagtctgcaaactccatcccgccggctggaagaagtcgcggagccggcaccaaacccgcagcgtcttcccgcgcggatcccgggacttaaaaagccggggccaccccggcccaggacgggatgcgggtcggtccggtgcgctctgccatgagcggcgcctcgcagccccgcggcccggccctgctcttcccagccacccgaggcgtcccggccaaacgcctgctggacgccgacgacgcggcggctgtggcgg

SEQ ID NO: 8255 - DNA, 26059 bp, Homo sapiens
tagactttatcactgtataaaaatgtacagtggttttattgacatgtacattccaatatgtttacagctgcaagataatgaggcacactcagtattgcacttcattaaaatttcaggctcaaacttaacctagaagtttaaatgaaattgcatttgtaatttagtaattcttatacaggacaaacattgatatgtttatatacagtgtgatacttattacatttatatgctgtcctaacacaatgttttttttttttttaaataacagtctaggaaataaaccagaatattcctctttttatccccacccgtgatgcaattgtacaggattacaaaaaggcagtatacaataaacaatgattatttttcttttttgcttgaaagccagcatcgttcttagtccatgggcatggcgattcttttatatcaattatctataaatgtccaatgcttcacaggccaatgacggtaatggccacatgcaaacacctcacaagtttgatgtcatttgttcaaaagaagataaaccaaaataatggggaaacttttcatagcaagaattatgtacatggtatttggtatccttcttgcactgtgaatggttcattttcatggatgtaaaaatggtcccgtccttatcctgagcagagtttaaacttcaccgcatcctcttgggggatgaaggcaatttttctctctgtagacaaaggatctgcgtgttctaaaaagtgtgggcatttctgcacactccacatcccagagcaaactcttccccagtgggtggatgaacaacatggagtggacattcagttccttctaactgcttgcctttgggacctgtataaatttgaaggaggcaaaggaaaataatgttttaagaatacacacatataaacctcacagaaatataaatcactgataggttattcaaagaaataacatgactatggttatacaaatataacatttagaaatttttcttctgatcacaaaagtaaaaaatgttcactataaaaaattcaacacagatatgtacaatggaagaagtgatggggtcccttactcactatatcctgcctagagaggatcacttcgagctacagatctttttctattaataaatgcatcagatatatcattttaaaacagagtaatgaacaaaaaaggtcacaaaacccctcaatttagtctggcagaacattatttttctgaatagaaaacagggagatttttgtgtagaatgtttttctataagtaaaaacatttaagtttaaagaagccatgttttcccttttatttttactgatgaaaaagcccacactggtaaaatgggaaggccaatgattcctgtaatttttaaaagtacctgaaggatattagcaggaaaatgaaagttatcaggttaaaaacatgaacaatgttataaaatacaatgtggaaaaaacactttggggaagatatgaatttgttgataataatcaaagtaggcctatcaaatgtaccaaaaacagtattttaaaaaagaaaattattatattaatgtgcttcacgtcatgggtttcatatcatttagaaaagatttttagttcctttagaaaccaggaggcttactttgtcagaaaaacacgctaggcttatacttgaaagcagagtccctatttaatagtagatgaaggaataggaactctgcattagttttctacagctagttttcaaaataataaatctaaattctgattgtgcttgagagaaaaatatcacgagattggatggaatgagcttacactgatcaatgaggaatgacgtctcatttactttaccttttctaggtttaaaaacatttctgacataagagaaggaaaccatgatggataaaaggctagcatttataaagctcttagactgcacagtataatacccaataaatgttggctattactactattactgaacaaccacaaactgaggcctgatctagaggaataaaaagtaagttctgtacaagagtaagaccaagacattagagtgtcaaactgaagacagctaatctcagagaagtcaacttcaggttagagctaacaggcatgagagtggcaatgagtgccacctcagacaaatgcaggcacagacctcaggatgggtcagcatgggaggatgccagaggtttgctagaaagttaattattcctgttagaaagtagttcagtagctcctgctccaaatcacactgcagattggtgcccaccccaccagtgggtgggggagagtgcgcaggatggggacactcaatggcagatctagttcagatacacaacatatcaatggtggtgacacaaactgcagcccttgggttttttcaaggaaaaaatgagtcatttactcaacaaatatttaccgcatgcctaatatatgaagggcattcttaggtacttgggattaaagatgaaaagtgcatggctcccatcttcaaggtgttcacaatccaacatggtggtgagaaataaaaatagtgaaaacacacctgcaaacatctgagtgcttactactgaggcactgttctagtatatcagctacttaaccatttaacagtcataggaggcagaaacgattatcctcattttgtagatatgaaactgaagtaaaattattttttctgattcttagatacctcatctttaaaatagacacagcaatacctaactcatggggtgctgtgaagattaagtatcctggcacgagaaggtagtcaataaatattttagaaagaaatggatagagggattatgctatggtctggatgtttttgtgctcctccaaatttatatactgacgtgttaatgaaaggagttagtttgccttaggtagatagcaagggaagggtccccagagagccccaggtccacaggtcagtgcctcatccccatataacataaaaagcagttggggaaaaaaagtcaagctgcaggcaccgatgagggaactagcacagggcattgtgcctaaagacatgcccacggctgcacagacagaaaaaccttcaatcagataaaggacaagacctgggatagaaatgcctttgtcctttgtatagtcagggggctctctccttttgtgggcataggcacagtgggctccagtgggttcctgggccagggtcccgggccaagctgagtcacgctgcgggccaagacagcccacagactaagcacattccttcccctttccagtccataaaaaccctgggccccagcctcacgggagcatcctgtttgggcccccctctctgctggcagagagctttcttcttttgcttattaaactttcgctctaacctcacctttgtatctgtgctccttaatcttcttggaggtaggacaaagaactcctggcattatctcagacaatgagagactgttatatcttggtgcactgctgagactacaacattaacaccaatgttatggtgttaggaggtggagctgtgggaggtgatgaggtcatggggtggaatccatgaatgggattagtgctcttcctatcaatgagacccaggagaggccccctgcccttccacgacagcaagaaagtgccacctatgaggctgagagtgggtcctcaccagacacctcgactgctaattcctagatcttagacttcctggtctccagaactgtgagaataaatttccactgtttataagctacccagtttacagtattttgttatagcagcttgaatggatgaagactgattatctaaaaatattagaattaacagggttgagagtggttagagaattgcttcttctgtccttctaagtaaactgtatatggccatcttccctactcacatccctgtgggatctcctttattctattccagttctctaaatgaatggatgagttagagggatgtgtgaggctgggagagtatacctcaatctcagtgtatgttcttaggccagttcattaacctccctagccctcaattttccatttgataacatagggataataccatctactcgcagattgtaaaaatggagcaaatatgtgtgaaaatgcccaggaccgaggtcattccttccttctgccaactctggctcctcccccgcctccctcctgtgattcctttgtgttggctgccctgatcctgtgaggaaacctgaccctcctctctcagctactacccaccactgagttctctaaagtgtttcattgttaacttccttatttttagcattcttatttctgttttttaacatagaggaaactttaagtaaaatctagatttcccctgaagatactgcttgccttaaatctttctcaactggaggctggttatctcccaagctcctccaggtcatatggctacaacgtgtgactgatttttctcttggctcctatttctttccagaccacaacctacaactttcattcaataattgcccttcctccaagctcaagtcatctagagtcatctagaatactgccctttccacactcccttcacttgctgacctccagcacatcaccccctccctccaagcatggctcacatctctgttctgtccattatcctccataacctggcttcacatcattctggccttgcttctttcaaagcctgctacttctattaaaaaaaaacagtatttgaggagaaacagtaaaacaatttttatttgacatgagcaaatggtaaaaagtagtcatacttgaaaaaaccctacttatctttattttgaaatggatagtatatgtttcacatggtttaaaatcaaaatgttaaaaatgataacacaattggaagcaactttccctagtctctaccctcatctttttcttgcttttcccaatagttaatcaatagtattagtttcttgagtatctttccaggggtttctttatgtaaatataaacaaatatgactagatagtctcattttccctcttacaaaaggcagcatactgcatactctgttctgcaatttgctttttttttttgaaacagctctgtcgcccaggctggagtgcagtggcgcaatcttggctcactgcaacctccgcctctcaggctcaagtgattctctggcctcagcctcgtgagtagctcggattacaggtacccgccaccatgcctggctaatttttgtacatttagtagagatggggtttcaccatgttggccaggctggtctcgtactcctgacctcaagtgatccacctgcttcggtctcccatagtgctgggattacaggtgtcagtcacaccacttggcctaatttacttttttcatctgatgctatctcctgaagatctttccaaatcagcacacagaaacaccatcctcactcttttttttttttaaactgatgcgtaatattagccactaccctactggacactagcattgtttatacatttttattatcatagcaaagctgtagttaataaccttgtttatttgcccttttttactgtcctcacatttgtagctatatccctgaagagggagtgctgaagggttgatacgctggtaattttgagaggcactattaagctgttttccggagaggtctatcacttgcactctgataggcagcagatggcagtgtgtgttttctagctttgacaacacggtatattgtgttgtatgtacttgtgcatgtattttcactaatttcagatatatcttatgtaaaattctctcctatggttgcacggacctctccttccacttctctcacttccgtgaagcctggtattccacctcaccgttgccactagcctcctgtcctcttccagtattttcagcttctttttggtttcatacttctttcccctcagcctgctttccatagacaataatttctcctgtattctgagtggtttctttaattcccttgactttctgatgctcactacactactgattcccagccattctagattaaatcacttggttcattttatggcaacggttccaggcttcgttaaaaaaaaaaaaaaatcacagaatccttttaaatggttctgtaatattgaacttcatatgactttttagtgctgaacagccatcttttcaccaatccttagtagacttcattctcactccccatgagatctgctccgtcacagctaacttctcactcatgatgatgagcctgcttcctaattcacccagaaagtcataagcttacaaggatcaaggaattcctcctgcttctttaggctagtttgaattgagtttctgtcacttgaaacagagctttcatataatgtttacataaaactatggtatatagatcataatcgtgattttaaaatattaaaagcatacctgcaggacagtgtggtagttcttccttaggaatgctagtcattctttgaaaatcatcatgacaagcattacaaaaatgtgttgttccaaaacagaaaaaaacagccactgaacagcagtagcgacatttatattccaaaaagtctgtgccatgtttgggacacatctatagcaaaagagaagagacagacacaagatcatagtgagactatttcaatcacacttaagataggcatatacatagacagctccttaattcatattttgagggcctacataactctaaaaattgattgaaaaactgatgatacacatgtttgaaaactaacaaataaatatgtggcctgtccaaaaggtctggacaaagatccaagttctaattccatttccatcataatctatctgatttaataagcaaggtacttaatttctttatgaatgttttatggctggtcaaactgaaaattaatgaaattaacctctcttataatctcacagatgtactgtgaacatttcactgaagaggggaaaacctaaaagtttcactgcacgtttaagaaactaagaaaataagaaaatttattacattgtttaactatggtgatcatttcatggaagacaaaattataaaataaaaatatcgcccaaaggaaataatatatatgaaataatgtgaaaaattatacaacactgaacaaatatcagaaaatactgaggagaaaagcctgatttacattcccaccatattattgtttaaaaaataatactatttaacatttctaaactgttgtttctaataaaatgttctgcctacctgagccctggaaacatcagaacaggcaccacaaatgagctctctgggatcataatcatctccccgtccagcctcagcatcgcagcgagcttcaccaccaaaatatgcctgtggagaaaacacatctagattacagcaggaaaaaagaaaactctggcatgggagatacagtatgggcatagtgaaagtaagatctaggggttttagaaaataccattatctactagaccatcccttgaaatgccaagtgcatgcccatattgcttgctgactgtatgtagggtggatcagggtaagaaataaagctatttcttctttttctttcttcccctcctaccttccttccctccttcccttccttcccttctcttctcttctcctcttccacctctctctctgtttctttgagacgggctctcactctgttgcccaggctggagcatagtggcgcaatcatggctcccgacagcctcaacctcttgggctcaggcgatccgcccaactcagcctcctgagtggctaggatcataggtgcacgccaccacacccggctaattgtttaattatttgtagagacagagtctccctatgctgcccaggctggtctcaaactcctgggctcaggtgatcctcttgccttggcctcccaaagtgctgggattattggcatgagccacatgcctggcctaaagctatttcgactctcaaatggattcaagcttaaagtaggcagttacattgtcctgtcaaaacaaaaaagtataatattccaagtaaatatcaacagaatattaagtagtaaaagctatgcttttttcagggtaaagtttgagaaatttttctcattttgaaatattaaaatacatatccccttctactgttttaataaatatgcttagcagttcccaatttataatactgtagaacaaaatatacataaagtaattagtatagaattataattccaaggctaatgggaaagaaaaaagtaattttaagcatcctctgatcacacattttttaagaagaaaaggccggctgggcatggtggctcacacctgtaatcccagcactttgggagggtgaggcagacagattccttgagctcaggagttcaagaccagcctgggcaacatggcaaaacccatctctatcaaaaatacaaacaaacacagaaattagccaggcgtggtggtgaggacctgtggtcccagctactgagaaggctgaggtgggaggcttgtttgagcccaggaggtggaggctgcagtaagctgagatcatgccactgcactccagcctgggtgatatggtgagaccccgtctcaaaaaaaaaaaaaaggcaaatttgataattctgttcagaattctgctcatagttataaagttatgcagtaggcaggaactcaacagtttccaatacagacacttgcataaatagaatttgaataaataaaattatcatgaataaataaaaatatcatgatgggtgatttatctgtatttgccctgggcagagattaagtgaggccaaggaactgggacaatttgcatgcactgattgtctcatagtcaaaaagctatgtccggattgggaataaacaaactgagtcaatataaatctattatctatactagaaaaacaggtccaaagacaggatccattgatgcagaggttataaacggtcgttcaccagctaaacctaaccctggaagtatttcggtttgtcttggggactgcttactccagctgtttcacttttctatatcctctgcttggcttcctaagcatttgactgctaccctgtaatagcacaatattcatttataatgtttagtacatgaaacacacagaaatactattttattatttgtaacaatacaagcttcataaatgtgcactattgggtgtgcatgtatttatctgcctttctggctatcatctctctacttagacatccattcatcctctgtattttctttttgctacattgggagactatgcacctttctcatgtagtcattctttcactcatttattcattctccacttaactttgtatctagtaagtgcaaagtactagagatagaaaaatgaaaaaacatactctttgtcctcatggaacttatcaagtagggcagagagataagtggtccagtagtcataatgcagaatagggagttctatgctagatgcctgcaagataccaaaatcatgtggtggtggtgttgatggaagtgagatgggggtatgttacagaggaggtgaaacctgagctgaagcccgaggtatgacaagacagattaggctctgcatgacagcatgtgtgtatggggttgggggtggcaggtcagagtaaaatatgcagggggaggtagagaagagcatcctttaaacaccaatggcctgtgcaatggcatgggggtgtcagtgggtgagcagacagggctgagtttgggaaatgcaagttatttggtatgtggcagcaaatggagagcaaatggtagcatcttgggagatgagactggagagggagactgggctaccgtattataagtagaagagtgatccagttagattttagatctagaagtattaattagcagcagtgtaagggatgcaacagaggaattaggggttctacacccgagctcaggaagaaggctactgtaattaccaaggaaaatgattaggtttgctggagatgtaatggaaagaaaaaaggactcaagagagatctggagacagaattgataggattttgtcaataaagatcagagattggtaaagtctttttttttttttttgagacagggtctcactatgtcacccaggctggactgcagtggcacaaacacagctcattgcagcctcaaccccctggactcaagcgattcccctgcctcagtcccccaagtagctgggactacaggcagatgccaacctacctgtctaatttttgtatttcttgtagagatggggttttgccatcttgccctgggtggtctcaaactccagagctcaagaaatctgcccaccttggcctcccaaagtgctgggattacaggtgtgagccactgtgcccggccaagattgatgaatataatacctgacatgtgaactctgaagtatgtgtgagagatccaaatgtctggtacgcagttggttatttgtaactaaatctcaaaaattttggggggtcataaacatatacatggtaggtgaaggtatagatgtaaaagaggtcacccaaggtaaggaagtatttattaagtaggcaagaatggagctctaggaaaacaaatatgtaaggggtaggttaaaaaaaaaaaaagaagaagtagttaaagataaatgactagaaaggaaggaggacagaaaaagagtgtgttgtcctggaagccaaggaattaagggttttaaggaaggaatggttagcagagtcaagtgagagaagtttattcgagaaggaattgccctgggccaacaggttattactgatgggaagcagcttgtatacagaaatactgcatgtttcgaaaagtttgttcaggttaaataaagaatccccaaacaagttaagtaaacaagttttactggaaacattgggaaacattgtaccaagctatcttatttttaacttcaggcttaagatggaataattagatatcactgtacaatttgaattcttaatcatataggtaagctctagtttttaaaacttctcagtataatttatagcatacctttctgcatttgtagcacacataatatgcatatctattcattgcatagccagctgggtcattataaaacctcacaccaggagttgtgatagcttcactcttatgcagaccttcatattccaatctcattaaggcttttcttctgacatcctcatagagttcttttattggatcaagtaggtcttttagtactatgtgattaattttgttctgcaataaaaaatgaacactctttagcagaatcatttattaaccaactcaacaaacacttagcatgcacctaagtgccaagcattgtgctagaagataaccagacagcacacatattctaaataaaatgtcatttgaaaaacattctgtaaattctttagaagcccatatttttccaagagcagggaaaatggggcaaatgggacacagagcatgaaaattccattttattagctttatatttcctgcgtctgaaatatatctcctgttgccctagctattgtggaaacaaagttaccttgttgccacaaataagacacgctctgtgtttggtgtgtgtgtgtgtgtgtgtgtgtgtgtgtgtgtgtgtgtgtgtgtgtgtgtgtgtgtgttttgcttccttgaggggaaggcagaacgccaggtgacagaagtgaacaggtagtatttgctgtaaaactttcatgtatctattaatatttgtagcaccatatgataggggagagcaaaatactacaatctttttgattattcctcagtctatctagacaatgattgtgctaagtctttccacattctaccctttatattagtttgcaaatacgaagataagaaaatagggagagcttaatagaacaaaaaggggcgatgaattaatagggaaagtactgccacattcttcaaaaacagctttttgttaatcattattagcttgccaaaacaacttcctacttgctgactacctttgtacaaatgtgtcaaaatgccaagaactttctccttgttttaactaagctctaaaagaatctgttctagtggtactgagggttccaatttcactctttaatggcaggtatcagtttctacaaacaccagaggatcattcttctttttggtagccgttgtcatgttatgtcaactgagctctctagtggtctgagagtagagatgcatgccctttaatgcatcacgatgtttaaatgaactttctcatgtaatatgtttaacagaatgtaatcagttttaaatggacaattactgttttgagatgcattataacagagagattatattctcaggttccacatgaatgagaagggaagaaactgctaggggctggtgggtaaaaccaagagatactgacatatgtttattttgaaaggtgaaaagaaagaacaaaagaaaaagaaagtacatgatttcagattctttccataccttgcaaatgggacaagatataaatccaaatgttatccttgggccaagccatcgattttctaatactcgccgacagcactgtaagtggaatatgtgactacaatccagcttaaataaacaaaagaaaaggacataagcaaatataataatgataaacagttgagtgactgggagattatttaatgcaaggcactacttaaagcaggtaagagaaaaatcaagaaatttactataatgaaaattcattgggacactgaaattgggacattattatttactaaatttcattacagtaaattgggatactattaactaggcctttggcttctcctgctttttaacattcatgccacttatataaagtaagctaggttaggaaaaaaagtaaaattattcaattttgtatctcacagaaagaagaagaaattactgacttatgattttcttttggagactattattatcttggaatcatgagaactgaaaatataagcaatgggcaaaagttaaaaaaacctatttagtgcacagtaacttgtgtatgtatagaagtatgtatcattatgtatagatcaattatataatgttgtaaaaataccattctggattttggaaattaagaagagccttagctactgggggataatctaattatttccccctggcttctgaatattttatacattctgttgattacagaggttcacacaaatcacaaattaaagctgagcatgcaacatagaaagcacagcataaagaggcagaatttgctcctcattagcctggtacatgtatagattaaaagaacacttctgcctagtgatataaaaaaagatttcaatcaactgcttttttttttttttttttttttgagacagagtctcgctctgtcaccaggctgcagtgcagtggtgccatctcagatcactgcaagctccgtctcctggcttcatgccattctcctgactcagcctcctgagtagctgggactacaggcacccaccaccacgcccagctaatttttttgtatttttgtagtagagacggggtctcactgtgttagccaggatggtctcgatctcctgacctcgtgatccacctgcctcggcctcccaaagtgctgggattacaggcatgagccactgcgcccggcctcaatcaatgtttatttgacaaatatattccccatcttaatgtctggatacattcaatactttaaaagctgaggcaacctgaatggctggtgctgccgagagcgcttcggtgaaacatatcatgcacatgtcatcggcgtcttgcttcaggcttgtggcacttttgtcacagccgtgtagacagggcagacagtgctcttcgtttttaacacccccgcatggatggccacaaggatgcgtcttactacaggctatcttagcgtattcctgttaaagatgaattacaatgttacacaagtatgtaaaaaagcacacattctggtaattttccttattatataaatttccaaagattactttcccacaggaagtatctatgcaggccaagtaacaacaaagtaaagttatttctaatctttgtttgaatataaattaggcttcttaacaaagttttttttttttgatgcgatttttaaaaaatgccactctctataaagggaatgctgataagtgaattataatttcatatttgtcatcatgcacagctataaagcaaaaagttcctggctgggagtcgtggcttacacctgtaatcccagcactttgggaggctgaggtgggcagatcacgagatcaggagtttgagaccagcctgaccaatatggtgaaaccccatctctactaaaaatacaaaaattaaccaggcatggtggcgcgcgcctgtaatcccagctacttaggaagctgaggcaggagaatcgcttgaacccgggaggcggaggttgcagtgagccgagatcgtgccactgtactccagcctgggcgacacagccagactccgtctcaaaaaaataaaaaataaaaaaagttccccaatgtataatttcccagtcaccactctccgcatcaccaaaatgcagattttttttttttttaaaaaggtacctttgactctctgagcatatccacattcttattaattgagaaaccaaaaacatttggacaacatagaatatgtttatatatgttcaggattaaagaactcttagatgttgaaaatgtattttaaggaaataagtgaataatgtctgtaagagataaaggaaatacagttcataaatttttaactgtttctagtacaaaagtagatattaaatacatatgatcatggtaactgagaaacatacaaaaagagtgtggtttgggcttgagagccttatttgacccattcttcaactttggtaaggcatttgatgcttcacataggtaatacactcatttaggaagctggagtgacgctgagctaaaactcttttctgtatgaagtaaaggtgtcacaggggaacatggacaatgggatggcctgtgtcactatatactcacctggcaatctgcatcagaacaaacactgccaacagcagataactctgttccactcctggaaccacagaagcgacatgcttctgagctactcgtggtgggtttgcctaggttcaagcagaaaaataaaaatccttcttatggatgttttctagatatgttaacagaactaaattttaaaaagcaaactaggtttgtataagttgctatccttgggaaatcagcctgacagttttagaacggaaggtttctaagttgtcctaattataaagtaaataatgacacacaaaaaaagaaattaaagacctatctgaagccaaatacactctcgactaatattttttttcagtgaaagaaacagactagacttctagtcaagttaccagactgagcagctgttacaagcccctgactccaaatgcacaataccataaaaaatatgataaccaaaaattaaataaaaatacacagaagttagggaaatctttaactatatataacaaaattataaggcatggtataaagcctatcatcagagtatgaaacttgaaaaacagaattcctacctcaggaactctgcaatttgaaaaggaatttaaatatgtttgaaatacttaaagaagaaacagaatcaataaaacaagaacagagcaataagaaaaagaacgtgaagatttgaaaattacagaccaagctgatttttaaacacagatataaaaatctaactataattaatatcaatatattgaattcagcaatatttacagaaaaatctatttaaaaaggatggtttacaaggatggtttgacattagaacatttattaatgcagtatacagcactgacagattataggaggaagaaatcaactatgagaaaagaaggtcatgctcttgcagcatgcaaagtcaccctagaattaaattgattcggatttacacctaactccaacactggaagttcgtgtcagtcaaatggcagactgcagatgtgctgaaaactgagaatttgtaagattcaacataactttgaactaggaatatacaagatttactttagaaaagcagcaaaatgaaaactatgttttagagataaaaatacatttaacatacataggttaccttttgttttatgtctattcatttttgttaattattttattgctatcaatggaaacagtaccattcacaacaccttcagaagcattaggtctacaaaaacctctaaatatcataaaatcatacaaccttataataaatagagatcttagtgatcatctagtgcagcaatttttattgtggggcaacaactagcagaactagaagggaattatcaatagaaatgtattttatctatggagccccattagttgtgatcctctcactttataaatgaagtcaatgagttccagaggttaagtgacttgctcgacaccacacagctagttagtggcaaatcaggtttcttgacttttggtctaatgctctcttcaccatagaacactctatatatttagtaaatatatagatcaatgatgtcataattaaacatcagaatatcactcaaaattattcacagtttaatcagttggcacggtttaatctttttttgtgggttttaaaggcatggctcaatctttaaaccttttacctgtgtgttctcggaattccaccattgccttcattgttttagaatctgccagtgccatcaaccagaacaatttggttctaccacaaccttcatgaaggtcaacctttatagcttcttcttcttctttgaagacctattatttcattaaagaacagggaaaaatatgcttatttatcactctgaaagggagagtataaaatttaattattcaataataataatggctttcatttaagcactctaagaagttttgaatatttccaatcttctctttaatcttcacagcagtcccttttttataaatggagaaattaagtgtttctaaggataaaacaacttgctatttatagatggtaagcgagacagctgtgaactcaaccaaggtctttgattccaaagtccactttttccccctactacacaaagcctctttcacacatttatttcaaaattcactgaacatattttatgctccagagacaaaaatcttcacctgtctttgatgagttttggttcttcgatgaaggtgaaggaatctgtcacagtctgtacataaatttccacagacattgcataaaatgattgctgcagtttcaccatcatcatggttatcacacataggctaaaataagacatttccacgttacttagattaacaagcaagtctcagactctcatacaaattgaatataatttatttacaaaaataaaccgttattcggaagtctattaagaatttagaatctgaatattaaacagaattattgcaaatgtacttaactataaaaatctctcaaaactccaaatccaatcattaatgtgctttgcaggttcaatgattaatacaatgaacaggtatactttgttacttagagacttaagaaatgtctgccccattatatatctaaacattctgtatgccaaaggaagaaactgtttatttttgaaacttgaacattaataagaaaatggtgaaagggcctatataaagttttcctttctagtgaacttaaagatacccatcaaacctacttaagtatatatgtgaacaggtggtgtgtcatgttgcctgtgttattgctttatttccttcctaccataagactgattacattttagtaaaatatctagtcactaaatcagactctggctaaaaataaattttgatatgatgcaaacatgactcagagaagaagaaagctctttaatatacttaaataaaagcccctaaagtttccatatactatgaagtagggactctctgaaatagacttgtgagatgaacttggccgaagggacacaatctttcaagagatccactaactgtttatgttgatgtgttttttgtttgtttgtttgtttttaagctaagctaaagcttactgtaaaggaaagcaagataaattcttacaaaattctgatcttaccatttgtttttgttgtccatcctttcccatccatctccccgaggagagacgatctacgtggtcctgatcaagaacacatagggatgcgagagcaagccagagctgttgaaagggaaggctgttacaccactgaatttttaggaaagacttatgaaatgctgactgtgacacatcacaacagctcaataaatgctggctgattttgaaaatacatagatactcagtggcactcaagtcttcctgatgtggtagcaggcatacacgatcactgtcctatgtgccatgcacacaggaggcactcagatatctactgaacaagtgactgtttctctgatgaaccaccctgtcttctatctgacaaataaaattatcctttattggtctactatgtaaacaacatatgaataaatgaattggcatatttaatatttactactaatgtcttctgaatatttttccatttagtatcattaaatgccaaagaaggtggtacagcaactgctaaattgtgtacagtcccatgagtagtcaggtacacattaaatccttctagataataaaagttcctcagaagtctttgttgccccttgttgccccagaaagcctaatactatacttggtgcactttgtcagaaatacatacatgtctaaaagctttagaaaactgttctccaaaatagggccgggcacagtggcacatgcctgtaatcccagcactttgggaggccaaggtgggtggatcacctgaggtcagggggttatgaccagcctgactaacatggtgaaacccagtctttactaaatacaaaaaaaattagccaggtgtggtggtatatgcctgtaatccgagctacttgggaggctgagacaggagaatcgcttgtacctgcaggcggaggctgcagtgagccaagatcgtaccattgcactccagcctgggcatcaagagtgaaactctgtctcaaaaaaaaaaaaaaaaaaaaaaagacaactgttttcagaaatagttaaaaatttctgaggcttaaagggtaagcttcagttttatatagaatgatatatcccctcattaatgaagaatagaaaatgacttaactagctcaactctaagaagtgcatgtgagtgttattggatacagaaagcaagagatgttaaaatagggacagaaaaatagaaaaagaaataatgcatgcaaggaggaaggggaatgcagactgaaagaaagcaacacatgagtggtaggaaaggattactgtcaaaaatacctatttcaggtgtcacagtcaataatagcaagatagcataaattgactttttccgccctagggatatatagtttatcttcttcagatttctgaggattaacctaagcaatttttaccagcattcacttcttcctaacgttgtcagactgccctccttcaaggaaatctcaaatctcttctggaagtatatgggacatgaaatctagcaggttaaaacttactataaatgtgtcatctgaagaatgcaatctcatttcctcaaagatttccaccctgaccctgccctggacaagcacttcttgctttttagaagtaagacctataaatcctgtaagtaagttacagggctctacattaggaacaaccaggcataggcaggggtcttgtctccaaaggaccttcggtctatcacagcataatgctggcactaaacttactgtggtaaactacagcaaacagatcattagaaagacaacacgcaaacaatgtacaatgtaattagccttttctaaccagtgtacccttggcttcctaaacaataacaaaaacaagtgacacagaacacataacagtgagaagtaacgactagttcataatataaaagccctttatactttttcaataaatacggtatttggttaaaaaataattatgttgacttagtgattaaaatttgtttaaatctattactaaaaaagaacacgcaatgatacacaccaaatttaaaacaaaacaaaacaaagcaaaacctactctagttgttgcaatacatctcactggagacctaaattcttcttccatcttggtcaaggcaatgatggtttctgcaatagcattttttgtcactcgggaccaagcttctgacagatgaccctattgagcagaacagagtattttaataagtgaccagaaatgtattaccatagtaaactcttttttcttaaataacatctcctatcaaaggaaatatttgtttttagtgagaccatggaattttagattatgggcacaaacttttgaactaaaatttcttcgtgatcctatggaaaattcaacttctaatcatcattttgatatttaaaaataaataaataaaaaattaagttctcaatactcttttcctggaaatcaagggcaattactctcacatctgataaaaacataacagaaatactaaggttatctatgtttgagaagtttgtcacttagcataaaatttacacagtgaagctaactgctttagatgagtattacaggaacctaaaatataaacaggttcaaactgcaactacctttatttgctaccttgatttgtaatgaacaaacatttaactatcatataatttaggtgttcctaaatattactcctaaatattttaattcaatgaacaccctgagaaagtctgtttgccacagaggttgagaaaatatccacgctgttgggaaaagtgatagaacttcatctttcccccagaaaatcctcccacttctcatatccacatgatttaaggggcagttcaattcctcctccttctccaagctgccttctattccttctgactctacattccatactatcttgtccttctcaggctgccctcctagaaataatacaatgtgtggaaaatgacaaggagcaactaatcagagccaggcattctgtaaagtaactccctgtcctccacactcccagatctcctttggaagccaccatcttaagacagagggtatatgacattaataaagaagaataaagggtttaaaaaccatgaggactgaggagaatgagaaacttccactttcgagagctctcttcctctttttttcctttaggttttttgaatcaagttctttcttagggtctgaaagagcatattttattttattagattttaaagtcacgtaacaattcccacacaaattaactggaaaatttgaaatgaacatggtttacataaatgacaaattatcactcactgaaaagacaaacagcatgatagttaacatactacaaatagtctttaagtaaagttacactaatctacatctcctatcaattcagcagagtaagctgttttgtgtcagcttcctgccgcacttcactgccaaaacagaagaatgggaacttactgctgccatatccttgataagtttaatgatgatctctgagatctgggtaggggttgagcccttcatccaccaatgactttcacctcgtcggagataactacaagaaaaattagcacttaaaaagccaataaattatcagtagtagtaacaaatgaaaaagatgaaaatgttatttcagaatgcagcattttagatttttaagtgactgaatcaattaaaacatttaaaaagaaaattcatcaaaccattaccccaaatcccaagacagcagttaaggttatttgagttccctttcaagtatttctctgtttgcacattatttctgtgtgcatcttttagaagtacagtccagggaccacacacgacttatttctagggcacatgcggataatgtggagcttaaccggaatataaattcactgtatcactaagcacactactatttagttcagctgacttttttcctagcaagactacaggaaagaagtgatacaatgattaacattctgatgttatctgcatattgtcatggattggctctacaagtagcactgttcagatgtctctaattctctactgttacacacaattacagaacatccttgcatatataccttggtgcaaatgcatgaaagttttagaagtagaattggtaggtcaaaagatatgcatatttaaaatatagttagatattataaacagatatccaaaaaggctgcagcaatttatatgagatgaaaatgcctatttcctcataatgttgccaaagcatcaaagatattttgcaattattttaatctacatttctctgattagtagtgaggtgttttcatttgtttactggcatttataagtttttttctgtgaactgactactggcatttataagtttttttctgtgaactgactgttcttgtcatttattattcttatcagttgtttgcctttttaaaattgatttgtagtcatacttctatattatgctaacaagtcattgtctattatataggtttaagtatttttctaagttatttccctatattttaaaacatttaaatattatcacctatcaagtaattttcatttttatatagtcaaatctataaatatcttcctatatgattttgggttctgtgttttgtttaagaaggtcttatcaaattgaagattacaaaaatattcttctataatttgtcccagtacagttttaaaaagaaatgtacataaagctttagttgacctgaactttactttattcccccatatttatttctttttattgtggcaaaaaaacatattacctaaaactgaagtttaattttgtatatggtgagaggtaggtatctagaattttttttaacatggatatccaaatattctgacatcacatattcagcctactttctattccccactaattataaatgacacttttattatatacatgacctttttagatattagccagttgtttatggattttatttggtgagtaacctaacaaggtaaaatctgaaattatgtcttaaatttctgaacagtagctcactctattctgttttggtactaaaatagaggcaataactaacctggaattgaaaatcatcggaagagtaactgttgtaactcctttgcccacagtggtaccagctgttccagtgatggtggttcctttggcttttagctgtacagtgagtgctttggcaatgcatcctagaaacatgtccaagatacccagcttattccagtctcctttctctgttgagtgaatgatatcactgatatctgctggggggagggatttcactcctatgatgctggccagacgactaggggttacttcaggcaaaactcttcttagtaaagaggttacctggtaagaaaaataaaatgagagaattccatgtaaagactaatgttttaaggtttcttttatttctcttttctttttttaaagacagggtcttgctttgttgcccaggttggagtgcagtggagcaaccacagctcactgcagccttgaactcctaggctcaagggatcctcccagctttgcctcccaaagtgctgggattacaggcataagtcactgtaccccatcccaggcttcattttttaatgtacctaactaccattctgtaacttcaaaatctttaagaaaagaaatatgatttaaacactattttacattttgtgaaggaagaaaatatgatatacatactattcaaatggtaatagtagtggtaattactaacccaaggcagcacgaaaaaaaataccttttctttctggtcagggctaaatgacattatatatttcatggtaatatggtaatcagtagccagaatactctcttatcacaacacattaataaaatggaacatattttactattctatactctcactataaacagtaaaaaagggagtaaaatacaggccccaaacaaaatataacaaaatacgaaataaaaatctatacttagggtccttagataattctctttgcattgcaacttttaacaatgtttcaagtaacaaaagcaatggaaaggctgtagtgtgatcagtcacctgtctctggactctaggagaggctgtgtgaagcagcgagaagagatcctgaagcagggttagctgttgagccagatattgccggccaacgttagagccactcagtgctaaaaccatagagagcagctcaaagcagtaggcatcagaggaggcatcttcatcatttggctgagaattggcattttctttgcttgatatagcatgttcccattcttcacggactctggtagcttccatgcgaatagcttggacaatatgagcacacacctatttaaagttaacacagaacatgtaaaaatatagggttagtttgatttactactcctagcaaaacaagcaaacaaaagaataagacaagaatgtaaattgatactcaatttaatactattctcccagttaattctccatcatatgtcattctcttaactcatctaagaaacaagtaaagctaagggagccacaataaaaatggaaatatttaaatcaactactatgtgcaaactgattatatgcaagttattaatgcctatgcttacagtttagcacgtcaaaaaccaatcaccatattttatcactgaaggcactttttctcatggtttaccattatgttcataaggtgctttatagctgataagattcacaatactgaaattatacatgacattttacaattgaaagcatctaagattcaatgaaacactgctagaaagataaagcaaaaataaattcatgttgtagttcattgaaaagaataatagtgtagaaagttagaatagggctgggtgccgtggctcacgcctgtaatcccagcaatttgggaggccgaggcgggcggatcatgagatcaggagatcgagaccatcctggctaatatggtgaaatcccgtctctactaaaaatacaaaaaaattacacctgtaatcccagcagtttgggaggccgaggcaggtggatcatgaggtcaggagatcgagaccattctggctaacacggtgaaaccccgtctctactaaaaatacaaaaatattatgcctgtaatcccagcactttgggaggccgaggcgggtggatcacgaggtcaggagatcgagaccatcctggctaacacggtgaaaccccgtctgtactaaaaaaaaaaaaaaaaaaaaaaaaaattagccagccgtggtggcaggcatctgtagtcccagctactcaggaggctgaggcaggagaatggtgtgaacccaggaggcggagcttgcagtgggccgagatcgcaccactgcactccagcctgggcaacagagcgagactccctctcgaaaaaaaaaaaagttagaataataggttaatttaaaatcaatattttatttgacttttgaagtgatatttttatgttatgtagcaccccattatatgaacaatatagcgctatttcctcacctggttatatttaaaaatattaacactggtatagttaacactgttaattgctcagccaacacacagaagaatgggggaaaagaaatatgggaaatgcaaatcaaatctgatatagctgggtatttgacaccaaataaaaaatctacccataacaaatagcagcaaggtaagcaagttttcataagtaaaatctttaaaatgatgaaggtatgccaaaatactcattcctctctaaaaaatggcaggcacattctgcaggacctataaaagggcgagcataaaaaagccttcataaatttttcaaaatactttataccaagctcatccaacctgcagccgggggactgcctgtggcccaggatggctttgaatgtggcccaacacaaattcataaactttcttaaagtattaggagatttttttttcttgcaattttttttttagttcatcagctattgttagccttagtgtattttatgtgtagcctaagacaattctttttcttcaaatatggcccagggaagccaaaagattggacatccctgctttataccctaataacaaacaaacagacaaacaaacaaacacacacacacacacacacaaaactaatgaagacaatgaaatagctgttaaccaacctgtttttgtaagttagtcagcttactcctgctgaatatgattccaaccatatgttctttcaggtcagcatctgatgttgccttt

SEQ ID NO: 8256 - DNA, 6103 bp, Homo sapiens
tgatgagttttggttcttcgatgaaggtgaaggaatctgtcacagtctgtacataaatttccacagacattgcataaaatgattgctgcagtttcaccatcatcatggttatcacacataggctaaaataagacatttccacgttacttagattaacaagcaagtctcagactctcatacaaattgaatataatttatttacaaaaataaaccgttattcggaagtctattaagaatttagaatctgaatattaaacagaattattgcaaatgtacttaactataaaaatctctcaaaactccaaatccaatcattaatgtgctttgcaggttcaatgattaatacaatgaacaggtatactttgttacttagagacttaagaaatgtctgccccattatatatctaaacattctgtatgccaaaggaagaaactgtttatttttgaaacttgaacattaataagaaaatggtgaaagggcctatataaagttttcctttctagtgaacttaaagatacccatcaaacctacttaagtatatatgtgaacaggtggtgtgtcatgttgcctgtgttattgctttatttccttcctaccataagactgattacattttagtaaaatatctagtcactaaatcagactctggctaaaaataaattttgatatgatgcaaacatgactcagagaagaagaaagctctttaatatacttaaataaaagcccctaaagtttccatatactatgaagtagggactctctgaaatagacttgtgagatgaacttggccgaagggacacaatctttcaagagatccactaactgtttatgttgatgtgttttttgtttgtttgtttgtttttaagctaagctaaagcttactgtaaaggaaagcaagataaattcttacaaaattctgatcttaccatttgtttttgttgtccatcctttcccatccatctccccgaggagagacgatctacgtggtcctgatcaagaacacatagggatgcgagagcaagccagagctgttgaaagggaaggctgttacaccactgaatttttaggaaagacttatgaaatgctgactgtgacacatcacaacagctcaataaatgctggctgattttgaaaatacatagatactcagtggcactcaagtcttcctgatgtggtagcaggcatacacgatcactgtcctatgtgccatgcacacaggaggcactcagatatctactgaacaagtgactgtttctctgatgaaccaccctgtcttctatctgacaaataaaattatcctttattggtctactatgtaaacaacatatgaataaatgaattggcatatttaatatttactactaatgtcttctgaatatttttccatttagtatcattaaatgccaaagaaggtggtacagcaactgctaaattgtgtacagtcccatgagtagtcaggtacacattaaatccttctagataataaaagttcctcagaagtctttgttgccccttgttgccccagaaagcctaatactatacttggtgcactttgtcagaaatacatacatgtctaaaagctttagaaaactgttctccaaaatagggccgggcacagtggcacatgcctgtaatcccagcactttgggaggccaaggtgggtggatcacctgaggtcagggggttatgaccagcctgactaacatggtgaaacccagtctttactaaatacaaaaaaaattagccaggtgtggtggtatatgcctgtaatccgagctacttgggaggctgagacaggagaatcgcttgtacctgcaggcggaggctgcagtgagccaagatcgtaccattgcactccagcctgggcatcaagagtgaaactctgtctcaaaaaaaaaaaaaaaaaaaaaagacaactgttttcagaaatagttaaaaatttctgaggcttaaagggtaagcttcagttttatatagaatgatatatcccctcattaatgaagaatagaaaatgacttaactagctcaactctaagaagtgcatgtgagtgttattggatacagaaagcaagagatgttaaaatagggacagaaaaatagaaaaagaaataatgcatgcaaggaggaaggggaatgcagactgaaagaaagcaacacatgagtggtaggaaaggattactgtcaaaaatacctatttcaggtgtcacagtcaataatagcaagatagcataaattgactttttccgccctagggatatatagtttatcttcttcagatttctgaggattaacctaagcaatttttaccagcattcacttcttcctaacgttgtcagactgccctccttcaaggaaatctcaaatctcttctggaagtatatgggacatgaaatctagcaggttaaaacttactataaatgtgtcatctgaagaatgcaatctcatttcctcaaagatttccaccctgaccctgccctggacaagcacttcttgctttttagaagtaagacctataaatcctgtaagtaagttacagggctctacattaggaacaaccaggcataggcaggggtcttgtctccaaaggaccttcggtctatcacagcataatgctggcactaaacttactgtggtaaactacagcaaacagatcattagaaagacaacacgcaaacaatgtacaatgtaattagccttttctaaccagtgtacccttggcttcctaaacaataacaaaaacaagtgacacagaacacataacagtgagaagtaacgactagttcataatataaaagccctttatactttttcaataaatacggtatttggttaaaaaataattatgttgacttagtgattaaaatttgtttaaatctattactaaaaaagaacacgcaatgatacacaccaaatttaaaacaaaacaaaacaaagcaaaacctactctagttgttgcaatacatctcactggagacctaaattcttcttccatcttggtcaaggcaatgatggtttctgcaatagcattttttgtcactcgggaccaagcttctgacagatgaccctattgagcagaacagagtattttaataagtgaccagaaatgtattaccatagtaaactcttttttcttaaataacatctcctatcaaaggaaatatttgtttttagtgagaccatggaattttagattatgggcacaaacttttgaactaaaatttcttcgtgatcctatggaaaattcaacttctaatcatcattttgatatttaaaaataaataaataaaaaattaagttctcaatactcttttcctggaaatcaagggcaattactctcacatctgataaaaacataacagaaatactaaggttatctatgtttgagaagtttgtcacttagcataaaatttacacagtgaagctaactgctttagatgagtattacaggaacctaaaatataaacaggttcaaactgcaactacctttatttgctaccttgatttgtaatgaacaaacatttaactatcatataatttaggtgttcctaaatattactcctaaatattttaattcaatgaacaccctgagaaagtctgtttgccacagaggttgagaaaatatccacgctgttgggaaaagtgatagaacttcatctttcccccagaaaatcctcccacttctcatatccacatgatttaaggggcagttcaattcctcctccttctccaagctgccttctattccttctgactctacattccatactatcttgtccttctcaggctgccctcctagaaataatacaatgtgtggaaaatgacaaggagcaactaatcagagccaggcattctgtaaagtaactccctgtcctccacactcccagatctcctttggaagccaccatcttaagacagagggtatatgacattaataaagaagaataaagggtttaaaaaccatgaggactgaggagaatgagaaacttccactttcgagagctctcttcctctttttttcctttaggttttttgaatcaagttctttcttagggtctgaaagagcatattttattttattagattttaaagtcacgtaacaattcccacacaaattaactggaaaatttgaaatgaacatggtttacataaatgacaaattatcactcactgaaaagacaaacagcatgatagttaacatactacaaatagtctttaagtaaagttacactaatctacatctcctatcaattcagcagagtaagctgttttgtgtcagcttcctgccgcacttcactgccaaaacagaagaatgggaacttactgctgccatatccttgataagtttaatgatgatctctgagatctgggtaggggttgagcccttcatccaccaatgactttcacctcgtcggagataactacaagaaaaattagcacttaaaaagccaataaattatcagtagtagtaacaaatgaaaaagatgaaaatgttatttcagaatgcagcattttagatttttaagtgactgaatcaattaaaacatttaaaaagaaaattcatcaaaccattaccccaaatcccaagacagcagttaaggttatttgagttccctttcaagtatttctctgtttgcacattatttctgtgtgcatcttttagaagtacagtccagggaccacacacgacttatttctagggcacatgcggataatgtggagcttaaccggaatataaattcactgtatcactaagcacactactatttagttcagctgacttttttcctagcaagactacaggaaagaagtgatacaatgattaacattctgatgttatctgcatattgtcatggattggctctacaagtagcactgttcagatgtctctaattctctactgttacacacaattacagaacatccttgcatatataccttggtgcaaatgcatgaaagttttagaagtagaattggtaggtcaaaagatatgcatatttaaaatatagttagatattataaacagatatccaaaaaggctgcagcaatttatatgagatgaaaatgcctatttcctcataatgttgccaaagcatcaaagatattttgcaattattttaatctacatttctctgattagtagtgaggtgttttcatttgtttactggcatttataagtttttttctgtgaactgactactggcatttataagtttttttctgtgaactgactgttcttgtcatttattattcttatcagttgtttgcctttttaaaattgatttgtagtcatacttctatattatgctaacaagtcattgtctattatataggtttaagtatttttctaagttatttccctatattttaaaacatttaaatattatcacctatcaagtaattttcatttttatatagtcaaatctataaatatcttcctatatgattttgggttctgtgttttgtttaagaaggtcttatcaaattgaagattacaaaaatattcttctataatttgtcccagtacagttttaaaaagaaatgtacataaagctttagttgacctgaactttactttattcccccatatttatttctttttattgtggcaaaaaaacatattacctaaaactgaagtttaattttgtatatggtgagaggtaggtatctagaattttttttaacatggatatccaaatattctgacatcacatattcagcctactttctattccccactaattataaatgacacttttattatatacatgacctttttagatattagccagttgtttatggattttatttggtgagtaacctaacaaggtaaaatctgaaattatgtcttaaatttctgaacagtagctcactctattctgttttggtactaaaatagaggcaataactaacctggaattgaaaatcatcggaagagtaactgttgtaactcctttgcccacagtggtaccagctgttccagtgatggtggttcctttggcttttagctgtacagtgagtgctttggcaatgcatcctagaaacatgtccaagatacccagcttattccagtctcctttctctgttgagtgaatgatatcactg

SEQ ID NO: 8257 - DNA, 773 bp, Homo sapiens
catgagtggtaggaaaggattactgtcaaaaatacctatttcaggtgtcacagtcaataatagcaagatagcataaattgactttttccgccctagggatatatagtttatcttcttcagatttctgaggattaaccgaagcaatttttaccagcattcacttcttcctaacgttgtcagactgccctccttcaaggaaatctcaaatctcttctggaagtatatgggacatgaaatctagcaggttaaaacttactataaatgtgtcatctgaagaatgcaatctcatttcctcaaagatttccaccctgaccctgccctggacaagcacttcttgctttttagaagtaagacctataaatcctgtaagtaagttacagggctctacattaggaacaaccaggcataggcaggggtcttgtctccaaaggaccttcggtctatcacagcataatgctggcactaaacttactgtggtaaactacagcaaacagatcattagaaagacaacacgcaaacaatgtacaatgtaattagccttttctaaccagtgtacccttggcttcctaaacaataacaaaaacaagtgacacagaacacataacagtgagaagtaacgactagttcataatataaaagccctttatactttttcaataaatacggtatttggttaaaaaataattatgttgacttagtgattaaaatttgtttaaatctattactaaaaaagaacacgcaatgatacacaccaaatttaaaacaaaacaaaa

SEQ ID NO: 8258 - DNA, 86 bp, Homo sapiens
gctccttgggaggctgaggcaggagaatcgcttgaacctgggaggtggaggttgcagtgagccaagatggtgccactgcactccag

SEQ ID NO: 8259 - DNA, 303 bp, Homo sapiens
cagtggctcacgcctgtaatcccagcactttgggaggccgaggtgggtggatcacgaggtcaggagatcgagaccatcctggctaacgtggtgaaaccccatctctactaaaaaaaatacaaaaaattagctgggcatggtggcgggcgcctgtactcccagctacttgggaggctgaggcaggagaatggcgtgaacccaggagtcagagcttgcagtgagccgagattgcaccactgcactccagcctgggcgacagggcaagactccatttcaaaaaaaaagaaaaaaaaaaaaaaaaag

SEQ ID NO: 8260 - DNA, 555 bp, Homo sapiens
gcttctgacagatgaccctatgagcagaacagagtattttaataagtgaccagaaatgtattaccatagtaaactcttttttcttaaataacatctcctatcaaaggaaatatttgtttttagtgagaccatggaattttagattatgggcacaaacttttgaactaaaatttcttcgtgatcctatggaaaattcaacttctaatcatcattttgatatttaaaaataaataaataaaaaattaagttctcaatactcttttcctggaaatcaagggcaattactctcacatctgataaaaacataacagaaatactaaggttatctatgtttgagaagtttgtcacttagcataaaatttacacagtgaagctaactgctttagatgagtattacaggaacctaaaatataaacaggttcaaactgcaactacctttatttgctaccttgatttgtaatgaacaaacatttaactatcatataatttaggtgttcctaaatattactcctaaatattttaattcaatgaacaccctgagaaagtctgtttgcc

SEQ ID NO: 8261 - DNA, 1275 bp, Homo sapiens
tttacattgactggtttatgaatgttaaaccagccatgcatttttgggataaggcacatttgctcagatatattctttttcttatcttccccagtttctctcattccccataatgctccagaatttctaattgccaaaatgccctttaaatacttgttcatgggttttatctctcacattctctccgctccttcttcagaaactcttcacctgtttcacttacctagtaaagagtctgaagcagatgactgattttacatttttctgggaaattcaagcagttcattgaagattatcttttggcattaagaaaatgcaatcaaggtcaggcgtggtggctcacgcctgtaatcccagcactttgggaggccgaggcgggtggatctcctgaggtcgggagttcgagaccagcctggaccaacatggagaagccccatctctactaaaaatacaaaattagtcaggcgtggtggtgcatgcctgtaatcctacctacttgggaggatgaggcaggagaatcacttgaacccgggaggcggaggttgcagtgagccaagatcatgccactgcactgcagcctagataacaagagggaaactccatctcaaaaaaaaaaaaaaaaaaagaaattgcaatcaagtgtcacttaatgatggggatacattctgagaaatgtgtcgttaggtgatttcttctgatgggaacatcgtagaacatacttacacaaatctagatggtataacctactgcacacctatcctatatggtataacctagtgctcctaggctacaaacctgcacagcatgttatgtactgaatactgtaggcaattataacactatggcaagtatttgtgtatctaaacctatttaaatatagcaaaggtactaccgtagtaaacttttatgggaccaccatcataaacagagttcatcattgacctaaatgtcattatgcagcagatgactttattcaatttatatttaaagagaaccacagttctgatatgttagacattagtaatgccattcaaaaacttgagtcaaaaactacataaatatttctgaaaatttaaaaaatgtaaatgtatattacaaaaagccaaaagaagtagtaaaaagccaaaaaagagtaatatcaatttcatttaaaaataaactgaggtggctgggcacggtggctcacacctgtaatcccagcactttgggaggccaaggtgggcggatcgtgaggtcaagagatcgagaccatcttggccaacatagtgaaacccc

SEQ ID NO: 8262 - DNA, 102 bp, Homo sapiens
acctgtagtcccagctacttgggaggctgaggcaggagaatctcttgaacccaggaggcggaggttgcagtaagccgagattgcaccactgcactccagcct

SEQ ID NO: 8263 - DNA, 3557 bp, Homo sapiens
tttttaattttttaatttttttattttattattatactttaagttttagggtacatgtgcacaatgtgcaggttagttacatatgtatacatgtgccatgctggtgtgctgcacccattaactcgtcatttagcattaggtatatctcctaatgctatccctcccccctccccccaccccacaacagtccccagagtgtgatgttccccttcctgtgtccatgtatgttctcattgttcaattcccacctataagtgagaacatgcagtgtttggttttttgtccttgcgatagtttactgagaatgatgatttccaatttcatccatgtccctacaaagaacatgaactcatcattttttatggctgcatagtattccatggtgtatatgtgccacattttcttaatccagtctatcatcgttggacatttgggttggttccaagtctttgctattgtgaatagtgctgcaataaacatacatgtgcatgtgtctttataacagcatgatttatagtcctttgggtatatacccagtaacgggatagctgggtcaaatggtatttctagttctagatccctgaggaatcaccacactgacttctacaatggttgaactagtttacagtcccaccaacagtgttaaagtgttcctatttctccacatcctctccagcacctgttgtttcctgactttttaatgattgccattctaactggtgtgagatggtatctcattgtggttttgatttgcatttctctgatggccagtgatgatgagcattttctcatgtgtcttttggctgcataaatgtcttcttttgagaagtgtctgttcatatccttcacccactttttgatggggttgtttgtttttttcttgtaaatttgtttgagttcattgtagattctggatattagccctttgtcagatgagtaggttgtgaaaattttctcccattttgtaggttgcctgttcactctgatggtattttcttttgctgtgcagaagctctttagtttaattagatcccatttgtcaattttggcttttgttgccattgcttttggtgttttagacatgaagtccttgcccatgcctatgtcctgaatggtaatgcctaggttttcttctagggtttttatggttttaggtctaacgtttaagtctttaatccatcttgaattgatttttgtataaggtgtaaggaagggatccagtttcagctttctacatatggctagccagttttcccagcaccatttattaaatagggaatcctttccccattgcttgtttttctcaggtttgtcaaagatcagatagttgtagatatgtggcgttatttctgagggctctgttctgttccattgatctatatctctgttttgataccagtaccatgctgttttggttactgtagccttgtagtatagtttgaagtcaggtagcgtgatgcctccagctttgttcttttggcttaggattgacttggcgatgtgggctcttttttggttccatatgaactttaaagtagttttttccaattatgtgaagaaagtcattggtagcttgatggggatggcattgaatctataaattaccttgggtagtatggccattttcacgatattgattctttctacccatgagcatggaatgttcttccatttcttggtatcctcttttatttcattgagcagtggtttgtaattctccttgaagaggtccttcacatcccttgtaagttggattcctaggtattttattctctttgaagcaattgtgaatgggagttcactcatgatttggctctctgtttgtctgttatcgttgtataagaatgcttgtgatatttgtacattgattttgtatcctgagactttgctgaagttgcttatcagcttaaggagattttgggctgagacaatggggtttcctagatatacaatcatgtcatctgcaaacagggacaatttgacttcctcttttcctaattgaataccctttatttccttctcctgcctaattgccctggccagaacttccaatactatgttgaataggagtggtgagagagggcatccctgtcttgtgccagttttccaagggaatgcttccagtttttgcccattcagtatgatattggctgtgggtttgtcatagatagctcttattattttgagatacgtcccatcaatacctaatttattgagagtttttagcatgaagggttgttgaattttgtgaaaggccttttctgcatctattgagataatcatgtggtttttgtctttggttctgtttatatgctggattacatttattgatttgtgtatattgaaccagccttgcatcccagggatgaagcccacttgatcatggtggataagctttttgatgtgctgctggattcggtttgccagtattttattgaggattttcgcatcaatgttcatcaaggatattggtctaaaattctcttttttggctgtgtctctgcctggctttggtatgaggatgatgctggcctcataaaatgagttagggaggattccctctttttctattgtttggaatagtttcagaaggaatggtaccagttcctccttgtacctctggtagaattcggctgtgaatccatctggtcctggagtttttttggttggtaagctattgattattgccacagtttcagagcctgttattggtctattcagagattcaacttcttcctggtttagtcttgggagagtgtatgtgtcgaggaatttatccatttcttctagattttctagtttatttgcgtagaggtgtttgtagtattctctgatggtagtttgtatttctgtgggatcggtggtgatatcccctttatcattttttattgcgtctatttgattcttctctctttttttctttattagtcttgctagcagtctatcaattttgttgatcctttcaaaaaaccagctcctggattcattaattttttgaagggttttttgtgtctctatttccttcagttctgctctgattttagttatttcttgccttctgctagcttttgaatgtgcttgctcttgcttttctagttcttttaattgtgatgttagggtgtcaattttggatctttccttctttctcttgtgggcatttagtgctataaatttccctctacacactgctttgaatgtgtcccagagattctggtatgttgtgtctttgttctcgccagtttcaaagaacgtctttatttctgccttcatttcgttatgtacccagtagtcattcaggagtaggttgttcagtttccatgtagttgagcggttttgagtgagtttcttaatcctgagttctagtttgattgcactgtggactgagagacagtttattataatttctgttcttttacatttgctgaggagagctttacttccaactatgtggtcaattttggaataggtgtggtgtggtgctgaaaaaagtgtatattctgttgacttggggtggagagttctgtagatgtctattaggtccgcttggtgcagagctg

SEQ ID NO: 8264 - DNA, 2317 bp, Homo sapiens
cactatcaaataaaaatagggcatttcttatggtagatgggagtaagaaatatcatcttctgtttttaaaaaatgtaactatataaatgttaagaaagaaatctattgaataaaagttggagaaaaaagaggatggttgattttaaactctactgacttggttgacttttacttgatatgtgctatctgaaaaaatggacaatggccactccctcatttctttttttcttccttttattgaattttaacagcagttttgtctggctcttttcatttctgtgtttatttcctgtaaaattgtgatgcataatcagagtaagtttttgtttgtgtatgatttgccatgaaaagtcactgtgtatctgaagccaaaattacacttagtatttcatgcggttttggctgatttcctttctattttcttcattaagcaagtgccatcaaggccagcagtacccatattatatgtccagagaagagccaggccagatgggaactgcgtgaaagcaaccagttatcttgctaattatgccagctagaaccagttgtattgcattaaaaaatgtggaatccaacaacttagctgttcacactcaattagcagtgtgctggagaatggaaaactcaagcaaggagtccatgtgctccaggaagtgacagctgcttccttacccagcatttaatatccatgtaaaattttttcaataaacgttgtgataatttttgcaagaatcatgtatatgttatgtctctaattcatctcataatttaaaaaaaacataaagttcagtggtctatctccactttataacctttctttagcccacatgaagaataaagtgcaaaagtaagccacaaattcttgacatgttttcaaaaagaagaaatcagtagagaaaggagaaaaaatcaggaagacaacaattagcgtatttatcataaatgaaggaaataaaacatcgagactaaaagaagactcaagtgtttcatttgtacatcttctgagataaaaatagctggaaacggcaactcacttcactggcatttttcgttccactgtctgtcacagatgatgccgagtttctctttctgactgatcttcaagctgaaggtaatgtgacagcaggaacattacaattagtatgcgaatacctatcccctgggttacaaattggcattctttaaattctgctattctcagcttttttatttttgttattaacttttcattggtcaaaacacttaaacttctaagtaataaataactctttgaataaatgtgacatttctctgagtctgtggcataattgaaataaattccatctgaaagttttttctgaagttcatattcatctgtttgcaagacaactattgttcacaggaggttaaaccaatatataatgatatacatattataaatatacatatttataattaatattcacctttaagtctttaatctgcctaagagatcattttgttttcctttgttctttgattttcagagaatctgaggagggctctacctttagtatacttatcttaaacaactatatatgtttaactatttaagcaattttattcatgaactaaaatgttctaatataagacattgcagttttctttgaaatttatgcagtttttattgcttaataacatacatttctctcttttaaccatggatctcaagtcattttatgccaatatttctttatgcaatatgatgtttaatgtaataaggctaatatatttatcaaaacaaagaccatatattggcaattttaattatagttaaagttttataacttcatgctttgtcaagcttttatctcaatgtaatacagttctttggtagtaaaattcaactggtatgtgtttatgaccctcaatgtcaattaaaaactcttgaaagattgacaatttttcaggtgggagaaagaaagcagtcaaaagaaggtaaaaaatgttcttctccttgacttaccgtggaaatgccctagttgatctatagaaatggttagtatcagtggccctggactaatgaaactgagagaagtagaagaaatgacctaaaaagtcggtgtatcattaagaagggaaatcatcaatcagcacgatcccttttgttaattcaagcaccattaagtaatgttcttaggataagcaaaaactgaatcattaaacatattttcactttttgttttgctcaggggggataatgaagtattaattttataatatatgcttgaaaatagtacagtttggaaaatacactgtcaaaatttaaagaccctcttggttaaaaaaaaaaaaaaag

SEQ ID NO: 8265 - DNA, 2317 bp, Homo sapiens; identical to SEQ ID NO: 8264

SEQ ID NO: 8266 - DNA, 1893 bp, Homo sapiens
aagtcatattactaaaagtttttgccgttcagggaggagttggtctcacttttttgtgttcagatagtggagaactgtgctcccgttctagggccctccctcctttctctttattaacttctccccacgggagaaagaatggcaaattggaaagctcggggcttgacattaatatgagtgaagtcactgtatttccacatggctttcgttcttttttttttttttttttgcgggggaaacaaggggtggaggcctgcagaaaggtgccagctatcctctactttttgcctgctgtcttcaggcaataaggagattagggaggtgttcccctggcaggcctaatctggtctatacttcttctagtccagcctttgcctggacaggtaaatcagttcaggtttgctctgtgaacctggccaccttcaggtctggaagaagaacataggaagccctgctgacgtcaggcttaagctgtattctccagcacatttaccagaagcctctggggttgtgtgtgaccatgcctcgaataaagcccatgttctgatccccatctgtctgtcagatgttatttgtggatgttatttgtggttatgcccagttggttagaacctagaaagtgataaaagtgagccatgcagccgggcacggtggctcatgcctgtaatcccagcactttgggaggatgaggtggatggatcacctgaggtcaggagttcaagaccagtctggccaacatggtgaaacactgtctctactaaaaaatacaaaaattagctgggcatgatggcatgcgactgtaatcctagctaccgggaaggctgaggcaggagaatcccctgaacccaggaggtggaggttgcagggagccgagactgcgccactgcactcaagcctgggcaacaagagctaaactctgtataaaaacaaaaaataacaaaaaaactagcgagccctacagctgcaggctgaggttctagttttggcaataagctaaagtgtaaataattttacatttaaaactatggaacaaatagaggtgggacatgggctgcccctgcccacctctccagccagttccccgactcttcgtcttctttctgctgcatgtggtctgaccatcttagttctcaagtttgccaaactttttttcagccatgtgtcctttgcctatgctgttttctctgctaactttctcttttttttctctctcttacttgctgcttttatggtcaagttctaactcttcaagcgtacacttaaatagtaccttctctgaccccgtaggctaggttgattgcttcagtgtactaaggcaaaaataccctgagtatctgtgctcattaacctctgtgtttcccttttgtaagatttatcacaattgtaatcaaatatttatgctatgatatatttgttgcctttctagattttctaacagtcttctttgcattgttacataaagtgtttagtgcagagctgggcactcatatttggtgcctgagggagatttgttgagtgaataaaatagcagtgtccagcagcgacatagactgctgagatatggcatgtcagagtctgaaaggcttctgtccagttggcaagtggaattcattggatgttttacaaagaatagttttagtaaggtggtggggacggaagtgagtttgcaaagtatcttataaaaagctagacttaattactcatttacgcaacattggaacccttacaagtgatttctctactgagagcaacttttcttgagttttactaactcagtagacactgtcagaatctgccagattacaacaaaggggtaaaaattcctgatcacttgaggtcaggaattcaagaccagcctgggcaacaagggtgaaacccgatctctactaaaaa

SEQ ID NO: 8267 - DNA, 1628 bp, Homo sapiens
gaactgtcagactctcaagtaaaagcagccagaaaggggaaaaaaaggtaacagattcagcattgtccaaaagttccagaccagtgattaatgtgtaagataatggacttgggaaatgagtaaacactccccatgctccctgctttgtgcttgaacgacttgatgacaagggcagagcaaggtgagaatttaaacaggaccacaggaaaaaaaaaaaaagacaaagactggcaacaacataatgcgagggagggggagtttactggtttgcagtctaaaaggtacataataactttcttcaaagcaggccttaacagtgtactaatttaaacttcaacatgggcatggaattacccgtagaaattatatgccactcagtcatcttttaatataccggatatttatatgtacttgttttcatttatttgttgttaacttccttcggcagacccattaagcatttagatacatatttgtgttcagatgtatcatcctcagggaaaggagatgctgtattttgattaagtggtgcgtttcaaggtatttcaagctattcttaaataattatataggcacattttagagtattcctccataaaaaaatatttgaggatctggatgccttgctagctgtcgcactgcatttcttagcaatctgtcatcacttgaacttacacttttcttgatcacattgaagaccttttatatgtataaaacatttatttactttgaataaaacttgttttgtttccaggttctcactccctgtatttctttagacacctacagaggtgttttccagggatctctttttataggatcagtagcttaaacatgttaattttgtcagtcttttacataaaaatctatttctgctctgtcaatctgttttaaatgcacacatcacaactgacacccactgaggatttatttgtctctaaaaaaatcctgacaatttctctggacaaatgttacccatcaccttaaacggtgcttaatgaactttgagcaatggccatggagagactgtgttcacagccctaaatctctatattgttgtcaggtaatcaagtcttcggtggtcaatttaaaaatatttgaaattatcatattggttctgaatacaatattcatcatttttcttttaatcatagagaggtttgtaattatgtttatgtatattttgtaaattaagtccataatttaaaaaatcttgatattgcatcttcctaaaggcacttcagtgattcaaccctgaaaagcatgataatacagaaatgccattgtgattatcaacaactggattgctactttcaaagtacctttaaggccaggcgtggtggctcacacctgtaatcccagcacgttgggaggccgaggtgggcagatcacctgaggtcaggagatcaagatcagcctggccaacatggtgaagccccatctctacaaaaatacaaaaattagctgggcataatggcgggtgcctgtaatcccagctactcaggaggttgaggctggagcatcgcttgaacctgggaggcagagattacagtgagccaagattgcaccattgtactccagcctgggcgacagagcaagactctgtctcaaaaaaaaaaaaaaaaaaa

SEQ ID NO: 8268 - DNA, 1628 bp, Homo sapiens; identical to SEQ ID NO: 8267

SEQ ID NO: 8269 - DNA, 256 bp, Homo sapiens
ttgggtagacattcagccattttcagatataatgggagaaattaatgcaaatgagtcaatggaatgaaatgcattttaatgcagatttgagggactatcctgaactgcttgataacaagtcgctttaagaaaaggcttacattgtgaggactcattttttccccatttcttctcactagtgcctcataagggccctttgttctctaagtaaactctttctaaactattgacattgctcatttatgtgaatttcaga

SEQ ID NO: 8270 - DNA, 256 bp, Homo sapiens; identical to SEQ ID NO: 8269

SEQ ID NO: 8271 - DNA, 1833 bp, Homo sapiens
gctggtctgatctcagcactccttagtctgcttgcctctcccaggacgcctgcacattacctctccatactgcagccctttatatggaaacttcctacatcactttgctgtgtgtgtttacacatgtgggttttgctgtacttgccctgacagcacacgggagtgcaggccacaccccaacccacaccaactgccactgaagacagagccttggtgggcacagaaccaagaaccccacccctgccagcacctaacccttgagctaatgctgtgcagataaaaagggaccttcttataccctgagtgaccacagttgctttgaggggcacagagaaggcaccatggcctgcactggccagcagcccaccctgaaccaacactacctccagtgcaacacacacacagcaggggacccctggcccacaccccagctgtcttgcctccaccactgggtgaacgccctcagggaggcagggaattttgcatccactagcattctgccacagttgccacactttggtcccctcagtgcagtggactccaaacctccaagagccagagaacaaagttggggcccaagacaagttccccagatttaaagcacacagtccaggaattgggagccgcacattggcccccctaaaatcctccaaaaacaaagccagttagttgaatccaccttatcccacaatgaaactctcaagatcatcaaatacaataaaagaaaaatactctgtccgaaagtcagcaacctcaaagatggaaggtggataagcccataaagatgagaaagaatctgtgtgagaacactgaaaactcaaaaagtcagaatgccttctttcctccaaatgactgtatcaactctccagcaagtgttcagaactgggctgaggctgagatgtctggaatgatacaagcagggttcaggatatgcgtaggaacaaagttcactgagtgaaagaagtatgttgtcatgcaatacaagtgagctaaaaatcattgtaaaacattgcaggagctaacagacaaaatagcaagtataaagaagacataaccgacctaatagagctgaaaagcacactacaagaattttcataatgcagtcacatggtgattatgtgtgactggattatgaaaattattgtagtgtgtgtgggcacccgagattgccctgtaagcaggtgtggccagacaggggtcctgggagaggcaagcagactaaggagcgctgaggtcacaccagttccatctcatgtgcaagaccacccagcagaatagaccaagctgaggaaagaatcccagagcttgaaaactggctttctgaaataaaacaggcagacaagaatgggggaaaaaagaaggaaaatgaataaacaaaacatccaagaaatatgagattatataaacgaccaaatctatgactgattagtgtacgtgaaagagataaggagaatggagccaacttggaaaacatacttcagaatatcattcatgagaatgtccccaacctatccagacagaccaacattccaattcaggaaatccagagaatctcagtaagataagccacgagaagatcatccccaagacatataatcatcagattctccaaggtcaaaatgaaagaaacaatgttaaaggcagctagggagaaaggcagtgtcacctgcaaagggaattccatcagacttagcagacttctcagctgaaaacctacaagccagaaaagatattcaacttcttaaagaaaagaaatttcacgtagtatggcagagacagatataccatataataacatggtgttattataaatgatttaaaaaaaaaaaagaa

SEQ ID NO: 8272 - DNA, 1784 bp, Homo sapiens
gcctgcacattacctctccatactgcagccctttatatggaaacttcctacatcactttgctgtgtgtgtttccacatgtgggttttgctgtacttgccctgacagcacaggggagtgcaggacacaccccaacccacaccaactgccattgaagacagagccttggtgggcacagaaccaagaaccccacccctgccagcacctaacccttgagctaatgctgtgcagagaaaaagggaccttcttataccctgagtgaccacggttgctttgaggggcacagagaaggcaccatggcctgcactggccagcagcccaccctgaaccaacactacctccagtgcaacacacacacagcaggggacccctgacccacaccccagctgtcttgcctccaccactgggtgaacgcccgcagggaggcagggaattttgcatccactagcattctgccacagttgacacactttggtcccctcagtgcagtggactccaaacctccaagagccagagaacaaagttggggcccaagacaagttccccagagttaaagcacacagtccaggaattgggagctgcacattggcccccctaaaatcctccaaaaacaaagccagttggttgaatccaccttatcccacaatgaaaccctcaagatcatcaaatacaataaaagaaaaataccctgtccaaaggtcagcaacctcaaagatggaaagtggataagcccataaagatgagaaagaatctgtgcgagaacactgaaaactcaaaaagtcagcatgccttctttcctccaaatgactgtatcaactctccagcaagtgttcagaactgggctgaggctgagatgtctggaatgatacaagcagggttcaggatatgcgtaggaacaaagttcactgagtgaaagaagtatgttgtcatgcaatacaagtgagctaaaaatcattgtaaaacattgtaggagctaacagacaaaatagcaagtataaagaagacataaccgacctaatagagctgaaaagcacactacaagaattttcataatgtagtcacatagtgattatgtgtgattgcattatgaaaattattgtagtgtgtgtgggcacccgagatttccctgtaagcaggtgtggccaggctggggtcctgggagaggcaagcagactaaggagggctgaggtcacaccagctccatctcatgtgcaagaccacccagcagaatagaccaagcagaggaaagaatcccagagcttgaaaactggctttctgaaataaaacaggcagacaagaatgggggaaaaaagaaggaaaatgaatgaacaaaacatccaagaaatatgagattatataaacgaccaaatctatgactgattagtgtacgtgaaagagatgaggagaatggaaccaacttggaaaacatacttcagaatatcattcatgagaatatccccaacctatccagacaggccaacattccaattcaggaaatccagagaacctcagtaagataagccacgagaagatcatccccaagacatataatcatcagattctccaaggtcaaaatgaaagaaacaatgttaaaggcagccagggagaaaggcaacgtcacctgcaaagggaattccatcagacttagcagacttctcagctgaaaccctacaagccagaaaagatattcaacttcttaaagaaaagaaatttcacgtagtatggcagagacagatataccatataataacatggtgttattataaatggttaaaagaaaaagaaa

SEQ ID NO: 8273 - DNA, 1784 bp, Homo sapiens
gcctgcacattacctctccatactgtagccctttatatggaaactccctacatcactttgctgtgtgtgtgtccacatgtgggttttgctgtacttgccctgacaccacacgggagtgcacgacacaccccaacccacaccaactgccattgaagacacagccttggtgggcacacaaccaagaaccccacccctgtcagcacctaacccttgagctaatgctgtgcacagaaaaaaggaccttcttataccctgagtgaccacggttgctttgaggggcacacagaaagcgccatgggctgcactgtgcagcagcccaccctgaaccaacactacctccagtgcaacacacacacagcaggggacccctgacccacaccccagctgtcttgcctccaccactgggtgaacgcccgcagggaggcagggaattttgcatccactatcattctgccacagatgacacactttggtcccctcagtgcagtggactccaaacctccaagagccacagaacaaagttggggcccaagacaagttccccagagttaaagcacacagtccaggaattgggagctgcacattggcccccctaaaatcctccaaaaacaaagccagttggttgaatccaccttatcccacaatgaaaccctcaagatcatcaaatacaataaaagaaaaataccctgtccaaaggtcagcaacctcaaagatggaaagtggataagcccataaagatgagaaagaatctgtgcgagaacactgaaaactcaaaaagtcagcatgccttctttcctccaaatgactgtatcaactctccagcaagtgttcagaactgggctgaggctgagatgtctggaatgatacaagcagggttcaggatatgcgtaggaacaaagttcactgagtgaaagaagtatgttgtcatgcaatacaagtgagctaaaaatcattgtaaaacattgtaggagctaacagacaaaatagcaagtataaagaagacataaccgacctaatagagctgaaaagcacactacaagaattttcataatgtagtcacatagtgattatgtgtgattgcattatgaaaattattgtagtgtgtgtgggcacccgagatttccctgtaagcaggtgtggccaggctggggtcctgggagaggcaagcagactaaggagggctgaggtcacaccagctccatctcatgtgcaagaccacccagcagaatagaccaagcagaggaaagaatcccagagcttgaaaactggctttctgaaataaaacaggcagacaagaatgggggaaaaaagaaggaaaatgaatgaacaaaacatccaagaaatatgagattatataaacgaccaaatctatgactgattagtgtacgtgaaagagatgaggagaatggaaccaacttggaaaacatacttcagaatatcattcatgagaatatccccaacctatccagacaggccaacattccaattcaggaaatccagagaacctcagtaagataagccacgagaagatcatccccaagacatataatcatcagattctccaaggtcaaaatgaaagaaacaatgttaaaggcagccagggagaaaggcaacgtcacctgcaaagggaattccatcagacttagcagacttctcagctgaaaccctacaagccagaaaagatattcaacttcttaaagaaaagaaatttcacgtagtatggcagagacagatataccatataataacatggtgttattataaatggttaaaagaaaaagaaa

SEQ ID NO: 8274 - DNA, 1153 bp, Homo sapiens
ggagaaacaagatccttttcagacaagcaaatgctgagagaattcattatcaccagatctaccttacaagagctcctgaatgaagcactaaatatggaaagaaaagaccatcaccagccactacaaaaatgcaccgaagtacacagactagtaatgctaaaaaccaaccacatacacaagtctgcaaaataactagctgacagcatgatgacaggatctaatccacacataccattactaaccttaaatggaaatgggttaaatgctccgattgaaagacacaggggggcaagctggataaagaaccaagacccatttgactatgccgtctccaagaaacccatctcacatgcagtgccatacataggctcaaaatgaaggaatggtgaaaaatctttcaagcaaatggaaaacagaagaaatcaggtgttgcactcctattttcgacaaaacgtatataccaataaagataaaaaaagacagagaaggacattacaaaggtggtcctgacctttgataaatctcattattgattgataccaacctgggctatctttattgcccaaaccaacaggataatttgctgaggttgtggagcttctcccctgcaaagagtccctgatctcccaaaatctggttgagatctaagtttgattttgctgtacaactccttttctgaagttttactcatttccaacaaggaagacaagttttcctgcttctttgatgatggagagcaggcacctcctttcctgagtttcagcttgcttctgacagggaaggtgagtgtaagttgtttccagcttctaagatggcaaagaacgatcaccaacctgagccttgtttccaggtaagtagctgaattagagttttgttttaaaatttttccttaatgactaaaatttaagattactcaccagctgcttttaatttctgcttttagtttctctttaccattagaacactcagtaatcatatgaattgtgcatttgttgttttgcttaactctttttgtttgtttatgcttggggctttattgttgttgtttcacttttctcctgtctcttcctgacttggtcaaatccaaaggaattttccaaattgtggggagcaaggcctctgaattggctaaaactcctatggctgcaaacaa

SEQ ID NO: 8275 - DNA, 206 bp, Homo sapiens
gcccagagggcagggacagctatctctctaggctccacgtgcccttgtgagatactttatcccagcactttaggaatgctaagttcagatcagccccatctcatgttcaagattgcccagcagagatcaggtcccagagttcccctcttcaaaaaggggacttgcttaaaacagaagcctggccatgtttgtgtaaagcagctatg

SEQ ID NO: 8276 - DNA, 747 bp, Homo sapiens
tggaaaacagaagaaatcaggtgttacactcccagtttcgacaaaacgtatataccaataaagataaaaaaagacagagaaggacattacaaaggtggtcctgacctttgataaatctcgttattgattgataccaacctgggctatctttattgcccaaaccaacaggataatttgctgaggttgtggagcttctcccctgcaaagagtccctgatctcccaaaatctggttgagatctaagtttgattttgctgtacaactccttttctgaagttttactcatttccaacaaggaaggcaagttttcctgcttctgtggtgatggagagcaggcacctcctttcctgagtttcagcttgcctctgacagggaaggtgagtgtaagttgtttccagcttctaagatggcagagaacgatccccagcctgagccttgtttccaggtaagtaggtgaattagagttttgtcttaaaatttttccttaatgactaaaatttaagattactcaccagctgcttttaatttctgcttttagtttctccttaccattagaacactcagtaatcatatgaattgtgcatttgttgttttgcttaactctttttgtttgtttatgcttggggctttattgttgttgtttcacttttctcccgtctcttcctgacttggtcaaatccaaaggaattttccaaattgtgggcagcaaggcctctgaattggctaaaactcctatggctgcaaacaa

SEQ ID NO: 8277 - DNA, 747 bp, Homo sapiens; identical to SEQ ID NO: 8276

SEQ ID NO: 8278 - DNA, 6844 bp, Homo sapiens
aacagcttggttattgacactccaagaattaggaagcaaacaagaccttttagtgccacaaaagatgaattggctgaattatctgaagctgaaagtgaaggagatgaaaagcccaaactccggagaccctgtgaccgttccaatggctatggaagaactgaatgctttagagttgagaaaaacctgctagtttatgggtaaaacattgtttttaatgtttgctctaagtagtctggtatgtaatgttacagaaaatatatactggttttgagtatattttttatcttcttagaatcattaaaatttacttttaaagtactctatttttagcatatatttaagagcagaatgatgagattatcctcaagtatttaaattttcaaagtatcactaaagtcaaacttcttgtccttaaattcgcatattcagtaatacaaattagatgttatccattactgaataaaatatactagaaattactataccattcctctacattctatgcatgggtagggaagacttaattagcaaaaatgacaattttttaaagtttttcattccttttatctatgagttaatatttttctctagaacttgactcaatatcaatgtaactataccttttttaaccaggtggggccgatggagagagattctatctcatggccgtttcaaaaggcagctaaatgaacacgatgtagagataatttgccgagctctcttagcatattgccttgttcactaccgaggagatgagaagattaaaggtttcatatgggatctcattactccaactgaagatggacagacacgagagctacagaatcatctaggtaagaacattgtttcatttgcttttaaaatttatttttagttatataagtaatacttaacatattctcctataaaatataaaagcattacaaataatattaaggaaccttaaccttcactcccaattcaagttccagcttcagaaaatgccagtgttatcagtttggtggattttacattttgttatcaaatacgtatctgtttggaattgatgacccaactaaatgtcttagaggtctttccgtctatgctcagatagatctatctcattttttaagttctgcttagtattccgtagtatggatattccataatttatttagtatctcctttgatgatgggtgtttaggtagtttcaattttagacaattaaaaaacaagtttcagagaagatccatgtaccctcctccttgtgcatataaataaatctttcactaaagtagatatcaagaatggaattattaaagtatagcttatatacatctttagaacctaaaatgtggtctctgggtcagcagcatcagcatcttctggaagcttcttagaaatgcagaatcttaggcctcagatttactgaataagaatctgcattttaacaagatccataggaattagtgtacatattaaagtttgagaaacattgatatgcaattttaaattttcataatactttttaatttttgtttattatttgagacaggattttgctctgtcccccaggctagagtacagtgatgcaaacatggctcaatgcagcctcaacctcctgggcttaagccatccttctgcctcaacctcctgagtagctgggaccacaagcatgtagcaccacacccggcttttaaaaatttttttatattgcagagtcagggtcctaccatgttgcccaggctggtcttgaactcctgagctcaagcaatccttccccctcagccacccgaagtgctgggatcacagacatgagccaccatgcctggcctaaattttcattatactttaatttgctgtccaaaatggttatgccaatttacaatcctctcagaggtatacgctagtactttttgctccttagccttcctaacagaacattcttttttgcatgaaataattattttatagcataaaataattgaatttccagtaaaaaataaaaagaattactatgcccttaaatttgttacaattttattctacttaatcaaaaaatatctgttgaatggctggtgtgtgtcttgtgcaaggtgttgaaaagataagaagaaacaagatagacaagatccctgagctcatgaaccttacattctaaccaggtagacagacatagtaagaatgtacattagttatagattgtggtaattactgtgaagtaaataaactattgagatggaaaacaacagaaagcacccattttagatagggtggtcagtgtaggcctattttaataggagacagtgagtttaattaatgtgaagacctgacttctaggtagatggaagaatcacacaaatgtaatttcactctttcttgaaactccactagaaaaaagtaaggcactaagcttaacaaattctacagaacaaaagacttggattcctcaacaaataaattatcggattaggagtgaatagagaggtatctattcacagccaaagatgactttctgccccaatcccacccctaccacagactatcacaaccttcagcgtgttactggcatctagtgggtagaggccaggagttcacagatagtctcccgccccccacaatgaagaaatatcctgctcaaaatattgtagtgccaagattgaaaccctgctataacctaaaagagattgaaaagttatcagccagttgcagtgtggggtctggggactttatttttatttttatgttttgtgacagggtctcgttctgttgcccaagctagagtgttgtgacgtgaacacggctcactgcagcctcaaactcctgggctcaagtgatcctcctcccctatagctgggagtacaggcgtgtaccatcacacctggctaatttttttttttttttttttttttagaggtggagtctcactttgttgcccaggcatgtctcaaaattcctgagctcaagtgatcctcctgcctcagcctcccaaagtgctgtgggggctttatttagatcctgattgaaacaaataacccagaggaaatgttttattatctttattaactaattagaatgttgaataccaaatattaagaagctattattgcatcttagggctgataatagtgttgtagctattttaatggaggctttatcactaaatagatacctctgttaaattaaatttagataccactaaatatcttttagatattgctaaaagataccgttgatatttatgaatgaaatgattgatttattacatttacttcaaaataatgtgaaagattgggggtgaacaaaattggccatgagttgataattattgaatgtggataatgggactgttgtatatacttgtattctataattttaaaataagcataaactctcaaaaatgggagaggaaacggcaacaagattttggaagctggaggcaaatatattagtggtaactgatttaaccaacctgagagggctgaatcttaggtcagcagtgggaaaggcaaactgctttgctttacagatttcccaaatgtcttaggaatttgtgacatcaggaacctctggaagtgggtgtataaggatagaagctttcattcaaagcggtttaaaaaaaggccctaaataccctcttcagttccatgtagccaggatgaaaactgactcaaaattttttctctggaaagagtaaaatagaagtctggattgcactggtagttgagttgtagagctactaaatagggattaaataactgtgtgcattctggttgttctattactcaaggaataaaactaaagggcttgccccaaacctaaagataatgacaggagaaaaaaaaaaaacccagccagttacccttcagtgagcccacaatcactatgctccatcccttcagtctccctatcaccttttttatttgtcacacttaaataagagcaaaaacagccaaggattatcaggcatctcaggaaagtctctaacatgaaagagagagacaaaaaaccattggctgggcacggtggctcacccctgtaatcccaacactttgggaagctgaggtggccagatcacttgaggtcaagagttcaagaccagcctggccaacatggtgaaaccccgtctctactaaaaatacaaaaattagccagccatggtgacatgtgcctgtaatcccagctacttgggatgctgaggcatgagaatcacttgaacctgggaggcggaggttgcagtgagccgagatcacgctactgcactccagcctggctgacagagcgagactctgtctcagaagaaaaaaaaaaagaaaaagaaaaagaaaaaaaaacattaaaatgaacttgaaggaaacaaggatttcaaaaaggaggacaccttttctttaactatcattaatatcttcaaagatacttcaaatataccatgacttcgaaagaataaggtgctgtaaaaacagtgaaagcagaagcctataaattataacaatatataatgaaatgaaaaagtaaaaagaagattgaatgatgaatctgggaaaatcttgttaggaagaaaattggaaatacagaatatctgtagatttcattaggaaaatttaagcatgtgtatttttaagtatgtactatttcgaaccaacaagggtggagaagattggaatacagaactatttatcattccagcaaaacaaagaaagaaggaaggtatgataaacaataaaattgtaaaactaaatatataaacatatgtatgcagcctatgtatattttcacctgttaaaagaggaaaattgttagatggggggaaaaataaacattttatactttaaagagatattattaaacaccaaacaagcttaaaagtttatttagtaaaactacaccatgcgactactaaaccgtacaaaatgttgtagtaccattaacatagaacaaagtgaatttaagatggaaggtatcaattggaataaaaaaaaagggacactacctaataattaaaaagaataatccatagaagaaactataacaagtatgaacttacatacatctaaaatagtctcaaaatgtaaaggcaaaagaaaaaaaaaacctctgccaaaattataaggaaaaatggacaaacccatacagtgcttcaatgtaccattgtagtggagtacccacctgttataaaatggcaaggaaaaggtaaatgaggtacaagaattgcaagaggagtcaaaactgcattattaataattgtgaaaaattacaagcaaaacagctcaaattcatggaagattaataaataggaggtggtatagttatgtaataaattattatacagaaacaaaaatagatgaattagagcctcatgagtcaaccaggataaattttttaaaagttcagagtaataaataaggtgcaggcttacatttataatataatatctgaaaacttaaatactaaatacttatccaacataggtaataatagttcaaacatgcatggaatggaaaaacaaattcagggtagtggtaatctctgggaaggaatgagtgaatttgataggagaggactacatagggacttcaactatgtattatttcctttaataaaaaactaagtgtttgtgaccagactggccaacatggtgaaaccctatctctactaaaattactaaagttagccaggcgtggtggcgcatgcctgtaatcccagctactcaggaggctgagggaggagaatcacttgaacccagaaggcagaggttgcagtgagccgacatcacgccactgcactccagcctgagcaacagagtgactctgtctcaaaaaaaacaaaacaaaacaacaaaaaaaaactaagtaaacatggactatgtgaacatgaagagtggcagtacgtttttgtagtttttaaatatttcacaacaaataactcaaagaactaaaatgagtttagctatcttgaagaggatggctaacctaatctatctaaatcaattttgaaaagcaagagtagaggtcaaaacatatcttttagtatctaggaaagcaaaagtaaagcagagggcataagtttgatcttttgggttttatatttgtaaaaaaataatctgttttggaacaaaaaggaaatcagaatgattaatatgagatgtagaattgttagctatttgggggaaatatgttttaatatgtataaaaccatcatcttgatttgtggttgggtcagtattgttactaatattttaaagatctctgaacagacctcagaaagtctccagaaatttcttgcattgaaacaatctttcagattgcaaatttttatacaaattattcctaatttatatgtccttattttaacaggcctatcagctcctgtacccaggggtcgaaaagggaagaaagtaaaaactcaaacaagctcatttgatatacaaaaagcagaatggcttcgaaaatataatcccgagcagctccttcaagatgaaggctacaaaaaacatataaaacaccactgtaataagtaggtatagggtattttaaacacaactctttaaatgtttactgttctgaatttattaatactctttaagcttgctgattttgagtacagagacagcatggtctagggccaatcctaatcctaattttacaaggtatcctacaagcaaatcatgatacctcttgtgtcattgttctcaccaacagataagtaaaactggcctccaaatgagctcattatatcttacttgtatatgaaataatgatgattatgaagattttggagaagttctttatatatatggtagtaataagattcatttaatcagaagtaatatttcattattttaaaatctgtacacaaattccttcct

SEQ ID NO: 8279 - DNA, 3388 bp, Homo sapiens
ttttttttttttttttttttttttttttttttgagacagagtcttgctctgtcgcccaggctggagtacagtgcctcagcctcccaagaagctgggattataggcatgccccaccacacctggctaatttttgtatttttagtaaagatggggttccaccatgttggccagctggttcccattgatcttttaggtcctagtttagacttccatcagtaatgttcctctctggtccccatgcctggatgggttgcttctctgtgctgtgatatcactctgcacctgctctcaccacactgtctgttgaccagctagccctccccactaggctggaagcccaggagaggatggccatgccttgtcttatagatcactggcaaaaaccagtgcctgttagtagcacagcagctaacacatagtagacactatttttttttaataaaatgggggtcatcattgtctactctgcacttcacattccttctagctcgttcagtctcacttatgttcagacttgtctctgtgcctttgctctcattctgttcactgccccaccctacccaggaaggcctttccattttcctctctgcttttatagattctggtccagctcacatcccatcccctctatgaagctacttttatttaaatcaacactgccccctcactcccttccctgaattccagcagcacccatctgtctgttccactcatttgtttaaaaaactgaggaccactgggttctatgctaaccactgaggatgctcaggtgaatactaagagttaacaagacactgagtgcctgtgagtcagctttgatgctaagtcaaaagctttacattttttctgatgcacaaaacaatcctaaaaggcaggtatttgcatccccattttacagatgagaaaattgaggctcagagaggggaaggaagtgaaactgcacaaggtcataaagccagtaactctggaggcaggactgccaggtgtgctattgcctgcacagcccgtgctcttacccttgtcccttggtagggtcatgttgtctaggagaagcagataacctaggtacaaaagtcttgagatgggtcaaacatgagagacaggggcaacgtcaaagggcacaaaggggaggcacacctttccagtggggatcagaggagcttcctggagagggacacttcctggagttaggtctggaaggaagagcaggaagataaaggggcgagatggagcagggaggatgttccaggcagagggttcaccacgtgccaaagtagggaggtacagaacagtttttgtgccatcagggaatagcatgtaattcgtggctaggatgcaggtttgcaggggaagcagggagagagaagtctggagagaaagatgccccataggtagatctggaggttgtgatcagctctgttttctggtttttttgggggaacacttcacacatttgcatgtcatccttggacaggggccatgctcatcatctctgtgttggtccaattatagtacatgtgctgctgaagtaagcacagccctgttttaccatgtggagggtggcttagtacatggtcctcacctctaggtgcacattagaatcacccagcagctccggaccagttgcatcagactcagaggtaaggcccaatcactgggttttggtaccagaactccaggtgattttaatgttcagccagctgggttagatggaggcaagactgaagacaaggagacaagccaagacccatcaaagaagggatggaggtgattagaacttggaaaaacctgggtaccattaactagtccaagcaggtcaatgaagataaagaccttaaattaggcagggacagtaagaaatgaagatgatggatttgagtgatcatttgcaggcagaatcaatcaatatcactttttttttttttttttgagacagagtcttgctctgtcacccaggctggagtgcaatctcagctcgctgcaacctccacctcctgggttcaagcaattctcctgcctcagcctcccaagtagctgggattacaggtgcctgccaccacgcctagctaatttttgtacttttagtagagctggggtttcactgtgttggccaggctggtcccaaattcctgacttcaagtgatccacccgcctcagcctcccaaagtgctgggattacaggcgtgagccactgcacccagcctcacttatcattattaaactctaacatgtgttgatcacttaaaactctcgagttgtactgtgtgacatgtgatagctaccttatttcattacttcatttattcccttgaggcttggagactgatgcgtgagggaggagtctgagggctcctgggccctcgcccatgggagctgggtgcgtggctgtcctgttgttaggacaagctgcagggagagactgtgtttccttggccatgtcccgtggggcccagcatgatgtcctgagtagcagaaagatgggtgagggatgggctgcctggatgatgactggctgatgcattttctgccctcagttttcaccgtggccaggatctcttcagagtcatgattcaatggaatttataccaagtgtgccctgatttgggggtgtttctcagatgatgtgtagtgcccccactcagaggagccagaagccaaagaaactcagatacacttgattctctaattcattctctcacaggaattgtcttctaaactgcaaatattaaacagcgcagagaatggtctcacaagctcagaagggatctgggaggaaatgaactgctaagagggttattttcagctactttcacttactgctttaaactgtgcttctattgtttgaggtttttgcagtgagcacatacgacttatataataaaaaaaattccattttgaaaacaaaacaaaaagtgtgcaggtttatcgtagaaaagattttattcctaacgactgatggtgatgttatgtgctaaaattgtctggggcttatccttcaatttcaaggatccaggctgtggataactgctgggtgaagctctaactgccctgactctccctgtacaccaacttcccccactcctctctaaagaaatcgctcatcttttttttttttttttttttgagacagagtctcgccctgtcgcccaggctggagtgctcactgcaagctccacctcctgggttcacgccattctcctgcctcagcctcccgagtagctgggactacaggtgcctgccaccacgcctggctaatttttttgtatttttagtagagacggggtttcagcgtgttagctaggatggtctcgatctcctgacctcgtgatccgcctgccttggcctcccaaagtgctgggattacaggcgtgagccaccccgcgcggcc

SEQ ID NO: 8280 - DNA, 21209 bp, Homo sapiens
cctacaaattccacagttttcacagtgatactgcttcttatctttgtcaaacaaatggcatatatcgcaataatattctccaaacaatgtgctacattcttcacaagtctgttgggcctaaaaaagaaacataattaaaaactgcaataaactaaacattttgagttaccatttgaatatctagaacttatgttcaactatatgcagtttatttttataagttttgaaacacctaaaccaaagatattgcttattctagaagttaaagaaatcttatttatgatacttttgattaaattttttcaaaccaccttaatacagcttttaaaaagaaaatagaaatgtcataaaatcttacatgttgaattttttcacagtttatgcactgcacttccttcactttaaagcgatctagttgatgatcttcattgttatcatgacacaagcggcaagtataaagcttgtcacagcaaggtgcctaacacccacggagaaaaaagagatatagtaagaagcaaaagaaactaagtgtgcaatacaaaaagaaaatttcttcctcctcctcctggatggaactgaaagattacaaccaatagatcagttgctaaactgatcctaaacataacatttcactagtttcttggcatattttatgttaattcttcccttcaacatcactacgtctgtatgaagttgaacacaactttaaaacaaaagaattatgaaggaaatccctagattgaaacactaatcccacaacacctgatatgctttggctgtgttcccacccaaatctcaacttgaaatgtatctcccagaattcccacgtgttgtgggagggacttagaaggaggtaactgaatcatgggggccagactctcccgtgccattctcgtgataatgaataaaatctcatgagatctgatgggtttatcaggagtttccacttttgcttcttcctcattttctattgccaccaccatgtaagaagtgccttttgtctcccgccatgattctcaggcctccctagccatgtggaactgtaagtccaattaaacctctttttcttcccagtcttgggtatgtctttatcagcagtgtgaaaacagactaatataacaccccaatttcattctgagcctaaacagcaaacaggcaacctcttcttagacatttccagataaattcatttacattaaaaataataaagattatattcttattttactagcttttattaatcatcaacctcatatctaatattgcacaaaatgcaacaaatgtaagagacagcccttgttttcaaacacggcaaagactgccagttgtccaccaaaatctatcctctccttcctgggcacaattgttcagctatatcagacagatggccacatgccctaaaacatgacaaaatgatacaacagaaaaatctcatccctggagtgaccatgtggagcaaagcctcatcaccaacctgcatcactcgccttggaattgttaaatggaaagaaataaaacctttactctttaatctacatcactgttgggttttttcattacagcaactttaccattacaagtatatcaagagatttccaggccagtgactttccaatacactgtgaccttgcagatccactcatttctgaaggcttcctatgccttgacttaccataacgtagttcattccttaaagattttaacacttaactggcttcctttttctgcaactctcagttccttaactttgtcatttccaataaccttgtcctccaacccactattctcatagttataccgcagaacagtagttctcaaatggtttggtctcaggatcccttcacactttttaaaattactgagaatcccaaagagctttggtttatgtggattttatctattgacatataccacatcataaattaaaaagaataggtttttaaaatattacttctttttaaaagtaacaaactcattacttgttaacataaataacatgttttaatgaaaaataactatatttttccccccaaacagctgaattcttctatctgcttatgcattcaaacagttgtggctgaagtacaaaaagaaactctggcctcacacaaatatgtacactggaaaagaaaggagtattttaatagcctttttggagaattatggatatcattctctgatattacactagaacaacaactcttaaagggtagttgcaacatgaaatctgaaatcgtatcaaggaatatgattgatatgatgcctcttttcttccttggttacattaaaatctattgctctatcttgcacttcaaatggatgttttactcatgcattggtcatctggagaataccagttcagtgagttatttacatcttctaaatgttcacacatttaacatgcaatatcaaaaaatcatattcattaaaagtctttaggtattgaagaaaatctcaccaaaaaaagtcttttaaaaagcttccaacctcacaaaagctagtaaaagttttccaaaattctaatttttgtgtgaaagcttgaattttatcactggcaacaaatactgtcattttcatttgtagtgagtctcacttttctcctttttgagaaaatgtctgccaactacccaaatgtgaatgactacaattttttcaagtaaaaaatgctgttccatgaaaaaaagcaactagttcactttacaatccaatttgcacaagagcttttcctcaagacaaccctctaatttcagtttgcagaagtgtttgatcaaaacttcccatgtcattgaacagcatattaaaagatatattcaagggttgagatttggttaaaattaacgattttactgctttatcaacatttttaagtgaagctggctttttaaaaaaactataggtgtagtatagttcagtgccactgtcttgattcaagctaagatactagcaatactaaacagtgcttttccaccatcaatgcgtgtgtcaacagactgaaaaaaaaaaaaaacaaatatcttagtgttcatagaaagtagttttggccttgcagagcccctgaaaggacttcaggaatccccagggttccattcaccacactttgaaaaccaatgctacagaacaacggcaccctctttgcatctcaattccaagcatgaaattctctaaccattacctcctccctaacttactccaagtctccccttgcaacaccctagttcccttctcagttcctctacactcatagataacaatcccaaccctagttaaatcctatttgacttctatcagaagcaggtgaatatggctagagaaaaagcatcaccgtccttgctggttcatatgaggtggacacttactaccacgtttccctggtcaattctctcattcttccagagtctaagacctaagatttagatgatcatttcacttcttctcctctggctttaaaactctaacaactcttcctccttaacactctgctgatgaccttatttcactataaaaacagtaaacatacttcctgctgacaggcctgaaaagaacatcctcctattatctctattaacttacttgcaaatatacctcattctctgccttcccttaggaagaactgacagtctatgtttctaaggccaactccttcacttgtgcactggatttcatcccctttggctactcagggacaatgcccttacagttttctcactctctcctgcattataaaacgttctcactctattgtatcatttcctagaatatacaaacatgctgtaatacttcctctcttaaagaggaaaaaatatggtgccagatctcccagcaaccacatcttttttttgctcccctttacagctaaaccccaagaataccctataagtgctattttcaattccactcctcccattctttcctaaattcactctaatcctgatctctccactaaaactcctcttgtcaagatcaccagtgacctcttccttgccaaatccaaagggcaattctcagttatcttactcaaacagctgcatttgacccagctgaccacatcctccttgaaatacttcacttggcctctggtatttaaggggggggggggggcgggggaaggcaaaaactgtttgacacctagggcgaagtatcttagtgctatgatacacagatctaattgtgtggtttatggggggcaccaaaaagtaaaattccgttttagaccttaaggtttgaaagaataataatacatctcagtagaaattgaatcataaggatagcattcaatttccttacacaacacttggtggatgaccaacatttttaaggagcttcatccagttcagtggagcaatgttcgtcaagccatgacctatagaaaagagtttaggatgcacgtacaggcctgagacttgtacttgcttctaataatgaggcagtgaccagcaaggctgacttgtgaagtgaaagaacaaaaaataataatactcagattgacgatgatagtaacagtcatggtggtatatatttactactcatttacttcagggaatgcgccctgttaaacactatacacgccctttagtatataatcctcatacacttttatgaaacaggcgcgatcatctccattttacatacggggtagagaggagctagctaaaatcagttattaaagaggagagctaagatttggggatagggcggttgaggttccaaagctcaagttttctaagcaaaatttttgtactgtttcttgcaaggaaaatcaggaaacttcaattgaatacgtgccaatttaaaaaaaaatacagattaagaagttttctcagagtaacaatacatgcttattaggcactttcctatgcataatttcctatttaatggcaattacatgattgtcttcttttttgggacacacgttttctcctacgtctgaacatgtgcactgcctttaacatgaagctggcaggctataaaactttaccacaggagctgaaatcgtattcgggttctccacttgcttatttccattatctccacttccattatttcatcacacacctgaacggaaaaccccagtacaggcccggggctgcctcagtctacttcggcagcaaaagacgaataagcccactggcagagaccactgtgcaagcctaatcacttcccaagaagggttttgctttaaaggtacgaagcaggtaggaaaggtggggcttatcgccttgccaaaaacgttctcctcaagaagaacccagttccaggtggaaaaggtatcctgaaaatcaggttaacctcaaacttaaatccaagcctaaccacctgcccagcccgccccagcccaacctgacggaagcttgtcagggaagagtccatagaaggcgtcacctttaggagacatcctctgtcatagtgctcgcagccccgctgacctcgctcttgaccgctggcgccatcttcccgggccgtcgccgccatctcctccacctcccctcacattccaccgatccttcccccaggataaaaaccacgcccagagaagctgcgcctctctagcacacccctcccagccccagcggccactagcgacaatatggctcctaagcacgtgacccggggcagacggatttccggttcccggggctacgaggcggaagcgaaggcagacgcagtctccgtcgttgacgttagtcgcagtcttcgctgctaacggtaataactcttaggttgcctgttttcccccaatcgctacccgcccaaatctcagggcgtagttcggcgcgaggttggcggcagcggcgcggagacgctggttggccccagaggaaaggacgctcactgggcgcatcgttacctgtgacgggtcctccctctctccctccggtggcggggagcctggagaaaggggcggagctcggcccgggccctgggctcagcgggtcccgcgcgctgctcttggacgccagggtgctcgctggcacctcgaagtgcttcttgcttcctccctttcccgtttacttgctgttctttcaaaatatgtactgacattcactattgccagtcaccagctaaaccgtgaggacaaaaagtaaggaaaaatagacacactccaccatgacctcatggaactaacaagactggtggaggaggaagacattaataagagcaatcactgcaataaatgtaagattacaacctggagaagtgctaggaagaagtgtgtgtcctgtgagagctaatattagagcagctctgacaatctgagtgtcagtgagggaaggcttccctggggaagcgatgcaagccgagggctgaaagatgggtaggagttagtgtgcaaaaggctttgtggcacaaagaacatggtacctgttagaaggtggaaggaaaatgtacaagccaacaaaattgaaatcatactcggggtacacagctaaatatgtttctccttattaaagagtcaaggccctggaaaatgatgtaagcaaagctgcaggtgttagaagaagatatttgtctttagctttctatcctgattttgtgtttcctaaaacaccgggaaagggaaaatattccccttcagctttccggttactaactcttaacattctaattttctttcagttttgttatgagttgctaaaatggtgaaatgctgctccgccattggatgtgcttctcgctgcttgccaaattcgaagttaaaaggactgacatttcacgtgtaagattttgctgtagttaagccaaatactttggccatgttataaaaagcaaaagacagttctacttaagtcttcaattttgaactttagttcccgagtcctttttaaataacctttttgttaaatttgaagtgacaatgtgatacctttacatgtttataatttagtttaaaagttttaagatatcagagactttaagatatcagagactggtttacaaaaaataccataaggctaacttttgctaatattattactttgtattttatcacaccgccaaagaaattcaatgttgtttacatgtagtttacaatctgaatgaaggagctttgctcgaatatattgccctctctatttagaagtagatcaagcataggttatagagaaaaaatacaaattacaagttaagaccaagggatctttagctgtgttgcaaataaatcaaaatgattttagtttcatattttagccattctcttgacagccatgaaggagtaagtgaaggagtaataagatttaatagttgttcacttgttaaaggtttattttgctgcttttgtgccaggcactgtcctatgtgttagagaaagatctcctagctattttgttagatataataaatcaaaactgagcatatatatcctaccttattttagaaaaatttgaaccagcttgaaaattgagtaagatatggctattaggccttcatatctctcaaaatagctctgatctccagaactccacactgcagctattctctgcattcattcactaagcatctgtagacctgctatgtattaaatgctgtactaagcaattttctggtgctgacagaagaatggaattacaaggggccctttttatcgaggataaattctggatatcatttcagataggaaaaggcccaagtgataattcttttatcatctatagatgaataaataccttcaattgtggatcttactataagatgctaaatatccattgaaacttttcttccttataatgtgagaaaaaatgaaatgagggccatatatctgcagcatgattggcagaaaatctgaatattaaaacggaaagtaacaaaagcatgaattatggtttcctaaatattataattctcaagactaataaactagttaacgaatcaatttagtcacagttgtataaggcagctttaattcaattatatagcaatagtatttgattttaaaatattttttgtattttttttctagattccccacagatgaaaacatcaaaaggaaatgggtattagcaatgaaaagacttgatgtgaatgcagccggcatttgggagcctaaaaaaggagatgtgttgtgttcgaggcactttaagaagacagattttgacagaagtgctccaaatattaaactgaaacctggagtcataccttctatctttgattctccatatcacctacaggtttgtttatgagatactgtttaccatcattgctcacttttttttttttttttttttgagatagagtctcgctctgtcaccaaggctggagtgcagtggcgcgatctcagctcactgcaatctctgcctccagggtttaagcaattctctgcctcagcctcccgagaagctgggattacaggcacctgccaccacacctggctaatttttgtatttttaggagagatggcgtttcaccatcttggccaggctggtcttgaactcctgacctcgtgatccaccctcctcggcgtcccaaagtgctgggattacaggcatgagccaccgtgcctggccattgctcactttttatgatactattgaagaaccttcaccactcttgctaacatttttattgtttgcttattcatttgaagtctgttcttgaagttttaaatttgtagactgcatcttcaacttttgtaatgtgtagtaggagtattttaccagtaaccactcataaatatttgtatattactaaggtttgatgaagtgggctgactttaggaattagcataactgaagatttttgtctaaaaatggaagttaacgtaagaaggttgaactgatgttccaagttggcagtccttaacactggggcagaagtcaggagtagaaccactaacaggactaaagtacttgtaagagccacatacatgcaagcataaagtctaggtaggatcaaaaggaagaaaaccaaaaaagagatctaagaacaggagaagaaaaggtcaggaaaagaaagaacagtcaaataagtaaacgctaattgaattccatgttttttctgggtaatattcccatgggttggctgcctcaccctcagtatctctcttgactttgtatacctgaaagtgaatttctagaacctatagacattgattgattgattccaatgtggaaaattcagggagagcctccattgaaagggatctccttcctggcaactaaaaacaagagaagtagccaaaagcgtacccgctcccatgcagtcctggtcactttctgcagttggtcatattgtagaacctgagtgatcaggtagagaatgcctcactttcttcggtgctaataaatatacagtatcttgggaaagttggtctagggcttttgttttttttcctaccaccaaggtgtcatctagccgtaatgttaaggggaccttaagaaatatgggcataataaatcaaataaaccataagttaccaactttcaaaaactattgattttcttataacaaataaatttttcattttagaaaataagattataggagcaaaaataaaataatcacataatccatagataatactgtgaacactttgatctgtatctttgtaattatccgtaaatatgcatctatacttatatagataatcttctggaaatagaattatactgtataccttttcctttatttgctttattgggttttttaaaatagtgtgtactatgtgccaggcactattccaagtactttacatgtctattaactcagtccttgaaagaaccatgtcaggtaaatactattattattttcattttatcacttgagaaaactgaggcccagagaactagaatgcccttcccagggtcacacctctattaaatggcagaggctagatttgatcccaggcattttgacttcagagtctactattaactactactctccatgacattaaatattttcctacaccgtagctttcaaactttagtctacgtaaggattatccagtgagtttgtttaaaatacagaatcctacatcttccagagaattagattcagtaaattggagtgtactttctaaaaaagcatcccaatctgtttgtgctgcagatctatggatcacatgtttaagagaaacctatgtagaacatcacttttttttaactaaactttatgttgaagtaaaatatatttgtggaagagtgcttgtaagtgtacaaatcaatgagttttcacaaagtgggtacactcatgtcactcccctcagaccaagatataaaacattgcaagtgacccagaagcctccctcacatgctttcccagtcactactgtcttgactttatcactgtcaattatatacatggagtcctgtctacagtatgtactctggcttctttagctcaacatcttgtatgattcatccacattgtagcatgagatactggtccattaattttctttgctgtatggtattgcattgtacaatttcttcattctactattgataaatgtttgggtagtttttcacactggggttattataaattgtgcagctctgaacattttggggcacatcttttttttttttttaattatgctttaagttttagggtacatgtgcacattgtgcaggttagttacatatgtatacatgtgccatgctggtgcgctgcacccagtaactcatcatctagcattaggtatatctcccaatgctatccttcccccctcccccgaccccaccacagtccccagagtgtgatattccccttcctgtgtccatgtgatctcattgttcatttcccacctgtgagtgagaatacgcggtgtttggttttttgttcttgcgatagtttactgagaatgatgatttccagtttcatccatgtccctacaaaggacatgaactcatcgttttttatggctgcatagtattccatggtgtatatgtgccacattttcttaatccagtctatcattgttggacatttggcttggttccaagtctttgctattgtgaataatgccgcaataaacatacgtgtgcatgtgtctttatagcagcatgatttatagtcctttgggtatatacccagtaatgggatggctgggtcaaatggtatttctagttctagatccctgaggagtcgccacactgacttccacaatggttgaactagtttacagtcccaccaacagtgtcaaagtgttcctatttctccacatcctctccagcacctgttgtttcctgactttttaatgattgccattctaactggtgtgagatggtatctcattgtggttttgatttgcatttctctgatggccagtgatggtgagcattttttcatgtgttttttggctgcgtaaatatcttcttttgagaagtgtctgttcatgtcctttgcccactttttgatggggttgtttgtttttttcttgtaaatttgtgtgagttcattgtagattctggatattagccctttgtcagatgagtaggttgcgaaaattttctcccattttgtaggttgccggggcacatcttttggtccatttatgtacacatttctatagggtatatatacgcttcaattagaagtgggaattactggtgatgtggatgttcagcttggatacatattgccatagctttccaaagtacttttgcaaatttatagtcttaccatcagcatataagaattcctttggttccatatccttgatagtagttggtggtgtcaattatatagacgattttttactgaccatatagtagttgatcctacatatgaacaatagtatgtgtaatcagtcttcaatattgtgtataggctgtcatctttccttattttaaacaggactaaaatgaacattattgtagctggcttatatccttatttccttgaactaaattctgcaaataaaattgttggatcaaagactatatacactttttaaagatttgctttcaataaagatcatccaaagcctcattagaaggcttgcaccaatctatccccctactagctatgtgtaagaatgtctgcctaccctaatcgttggtataagttgtgtttgtaaactttgctaaaattgataggcaaaatgttatctttttgttttaatgtatctatgaacactcgtgcgtgtctatgttttttcatgtgtttattggatatttgtattcttttgtgagttacttattcaggtcctcttctattatctttttctatgctgttttgtaaaaacactggatattgaggataggaatcatttaactgccatctacattgcagttccttttttttctcccctttctcccacattccttcccagttactttttattgtttgtcttcagttctagttacggcatgggtttattttttttttgaaattcaggcttttttcaatgtagtcaattctatattttcttgtgttatatgacgttagcctttctcactttaagattatataaatattctttatattttttctacctcctcatggttttcttttttacataaaatttcagtacatggaatttcattgtggtttattatgtataaaggatacaactgcttctcttaattagttgatttttacatggtttgtcgccttactctacttatttagaatgccacctttatcctaaaggcatctatctacttgatgatctatttctaggtttttctgtctagtcctaacaaaagaacacactgttttaattattgttactgtatattatatttttaatagcttgtagggtgtttcctttttaggaaaatttgtgttttcagataaccttagagttgatttcagaaagttcttttaaaattatctgggtggaatttgctgacttttaaaagcaatttccatgaaaagaaatgtggtattaacttcactatacaaagttaagaaggaataaaaatttaagaaagaacaaaagtatctcacttgatgattattattaactactcttaacaggggaaaagagaaaaacttcattgtagaaaaaacttcaccctcaaaaccgttccagccactaactacaatcaccatcttgttggtgcttcctcatgtattgaagaattccaatcccagttcatttttgtaagtaaattacttgctgagctcatgttaattcttttaagatgaatatgtcctctccattacaatcaaatttttcagaatcctagcaaaatctaggggttaatatgtaatatctacaaataatattgcttcctagagtcattgtaatttatatatatgcaacagcaaaatagaggtagttaatcctttggttacatatgtagttcactgaagaaggcttttgcaaggatatttctaccaaggaaataattcttccctctaactgctataatttccgtatgaaatatgtaataaaaaatagctatttaagttttctcagtcatacacatacagagtattcaagcttgcatttatttattcatctcattgcttattcatgttagaggcaggcatggaatctagatctcttttactatcttgattaatacaggtttataataattttttctatttttgtgggtacatagtaggtatgtatatttataggatacatgagatttatttaggtatacaatgcatgataatcacattagggtaaatagggtatccatcacattaagcatttatcttttatgttacaaaaaatccaattatacttttagttatttttaaatatacaataaattattgttggctatcgtcaccccattgtactatcaaatactagatcttagtctgtctaactatatttctgtacccattaaccatccccacctcccccccatcctactacctttcccaatctctcgtaaccatcattttactgtcctgtccctgtgggttcagttgttttgatttttagatcctgcaaataagtgagaatatgtaatgtttgtctttctttgcctggcttatttcacttaacataaagttctccatttctatctgtgttgttacaaatgtctaaatctcattttttttaatggcttaatagtactccatggtgtttaagcaccacattttctttatccattcatctgttgatggacacttaggttttttccaaatatcggctattgtgaacagtctgcaacaaacatgggagtgcagatatccctttgatgtactggtttcctttctttggaaaggaaagggtgtataccacacccagcagtgggattgctggatcatacagtagctctattttagttttttgaggaacttccaaactgttctccatagtggttgtactaatttcccccgacagtgtacagggttcctttttctccacatccttgccagcatttgttgttgcctgttttaggtataaaagccattttaactggcatgagatattttcttattgtagatttgatttgcatttctctgatgatcagtgataatgcgtaccttttcatatgcctgtttgccattcctatgtcttcttttgaaaaaatgtgtattcagatgttttgcccagtatttaatcgaatttttagatttctttcctgttgagttttttgagccccttatatattctggttatcaatcccttgtcagatggatagtttgcaaacattttgtcccattctgtgggttgtctcttcactttgttgattgtttcctttgctgtgcagaagctttttaacttgatgtgatcccatttgtccgttttgctttggttgcctgtgcttgtgggatattactcaagaaatctttaggccgggtgtgatggctcatgcctgtaatcccagcactttgggaggccaaggtggatagattgcttgagctcaggagttcgagaccagcctgggaaacatggtgaaaccccatctttaccaaaaatacaaaaaaattagctgggggtggtggcatatgcctacccagctgctcaggaggctgagtgggaggatcgcttgagccctggagatcaaggctgcagtgagcttgatcgcattcactgtactccagcctgggcaacaaagtgagaacctgtctcaaaaaaaaaaaaaaaaaaaaagaaaagaaatcttagcccagaccaatgtcctggagagtttccccaatgttttcttgtagtcgtttcatagtttgaggtcttagatttaattctttaatccattttgatttgatttttgtatattgtaagaagtaggggtctagtttagtttttctgcatatggatatccagttttaccagcaccgtttattgaagagactgtcttttccccagtttatgttcttggcacctttgtcaaaagtgagttcgctgtaggtgtgtggatttgtttctgagttctcttttctgttccattggtctgtgtgtttgtgtttaagtttatggcatctttaacttatcacaggctatgttaaagtggtattactcccctttatgtacaaaaatcttatagtcgtatactttcgtttttcctttctcaatctttgtgctattgctgtcatgcatttcacttttacatatgctatagactccacaccattattgttattatttttgtttaaacagtaaattattctttaaagagatttagataataagaaaaaaattgatattatccatataggtgccatttccagggcttttcattcctttgtgtcagtccatatttccacctgttatcattttgcctacaggacttactttaacatttcctatagtgcaactatgctggtgatgaattctttcagtatttctgttgcttaaaaagtttaatcttcacttttgaaagatattttcactaggtaatcaaattctaggttaacagttttgggggcgggggcagttgtttttggtactttttaagacgttgccctgctgtattcttacatgcaccatttctaatgaaaaatttaattaatgtcatactcacctttattctctgtacctaatacttctttttttctttgcttttaagaatttttctttttttaaattttttatttatttatttttggagacagggtttccctctgtcacccatgctagagtgcagtggcacactcacaactcactgcagcgtcaacctcccaggctcaagcaatccctccacctcagcctcctgagtagctgggacttacagacatgtgccaccatgccaagctaatttttgtttgtttttgtagagaccagatttctccatgttgcccaggctggtctcaaactcctaagctcaggcgatccccctgcctcggcctccctaagtgctgggccaggcgtgagccaccgtgctggacaataatttttgtttttttctactgcttttgcctaatctgatgatgatatgccttggtttcattttcttcatatttcttgtaattaagatttgttgagcttttttatttagcagtttatactttttatcaaacttggaaaaattttggccatgatttcttcaaatatttctttctatcccaatttttcccctccttcaggaattctaattatgtgtatattaggctgtctgaaattgtgcaacatgttactgatgctttattttttttctatctccttttctctctgtagtccatactggatagttcctgttgctgtaactttacattcacgaaatcttttcttcttcaaaaaatacactgccattctctccagtgtatttttttacctcacacatcagttatctgtagatattctattagagtcttttttatatattttatgtacttaactttttgaatatatagaatacaattttaataactttcttaattgtctgctaattctaacatttgtgtcagttccggcttggtttccattgattgatttatctcttattatgactaatgttttcctgcttatttgcatgcctggtaaattttgcatgccatgaattttgggttttaatttgccagatgctagatatttttgtatcatgttttcttgagcattgttctggagtacagttagttagaaactgttcgaccctttcagattttactttgtttgacaagactgttttgcatacttagtgtccatgaatcttgacattttcaagtctggctagtgggaatagtggctataccctgtgagcacagggcactcctaatctctggttgttctttcctcagccttgagtagtttcctcatgtgcatgtgctgatcttactccatggaatactcaaaggggagcctctgaagatcttgagttttttctgtgcagctctcacctgtctagtactttgtcctgtgaactgtagctactttggtctccctggatgttttgcactacctcctcagctcagtctgctaagctctgcctgggtttcccttccttgccctgaggccgagaaactctcaggcagttagctggagcagtcttaggtctcacctctttgcttcccatctgtccacaatagctgctgtccttgccaaatatccattatcttaagagctatttttttctgtcttttagccttgtgttggttcttggaggtaggggtcaatccagtctctgttacttcatcttggctggaaataaaagtcttctttactaattttaatattaaataatagcttttcaaaattattttatagtacctttataagctatgtcagtgttattttccctattctcaaatgaaaaaggaataaaagcatacccagcaaatttaagcataaccataataaacaccaagaggagttgtctcttgaaaattccaagaccagagtcctctctaaatccccaacaccgagcctgagaacctgctgcagtactcttttcctgtcacaccttatcaaatgcaatagccatccaataaagtaacccagttaaaaacttaatttaaatttgtttgataggtaaaaattaaacttagcagcaccacattgaatgaacaaaagctgtagagtcattgcaagtgtcatgctattcatagagataagtgcttcccatccataatattctgcagtctttgtgtatgcctggccttagtaaaaggagggatgcccttagcaccctaaatattgcttctacccccatcttcttcctgtgttccttaaacctctatcaccaacttaaaaatgttctccaggcattgtaaatgaagaaacagcttagacctagttataagcttttatccaactacatatctgtctgatttaataacttggtgtttatgtttttaggaacatagctacagtgtaatggacagtccaaagaaacttaagcataaattagatcatgtgatcggcgagctagaggatacaaaggaaagtctacggaatgttttagaccgagaaaaacgttttcagaaatcattgaggaagacaatcagggaattaaaggatgaatgtctgatcagccaagaaacagcaaatagactggacactttctgttgggactgttgtcaggagagcatagaacaggactatatttcatgaaataatttcatgttacgttccacctaaaattgtcattggtacaaatttttataaaatctcatttaccatcactaaataatatccatcatttaaagtgctgctttggattctctggagcattatgcattatagttgttatccaaagacttttttgaaaatatgcagaaatttgtggtaattatgtatttgtgtcttgtgacaattatgttttatagacctacactagtgccaggtcactattgtaagatgttaaaatctcaagaaaatttcacagagctaaagaaatgatgtcaaattagtcacattaagctatagtagaaggaattggacacttctccagatatttggcttcaaaggagtacctttacttacatgtgctttatggtaagtacattgaattttactttaaatgcattttactacaaagcacaattcatttgtaatgcatatccatcttggattcaatccaaggtgctttagctatcagtagtaccaaaggatctttttacaaggcttcctgtggtattgactctgagaataacacatagtgaagatctgtgggcttttaaaattgttcacagccaatttaagaagacccctcatgaagtctcagttttcagtacagtacatcattcctcctcactaggagcactttgatgtaaaccagaatagctttaaaaagacaaaaaggatcgtagatctgatttttaaatggttggttgctctgacagatctgaacactttgcttcatgactatttcgtcataaaggtatatgtttaaaatctgaatggcagtactagctctatacttttaatactgctttgtattttatatgtaaagtagtattgctgacattttaaaaaaatacaaaatacaaaagaaaccattagaaattaataactgtggctcttccagttgaaataggaattggagagaaaggattagaatattttaattaggggagtagattattgtccaaaggcttttatttagagaaacgggtaattaaaacagcagctttagaatagcttcttactgaatatgcaaaagaataattccttgttatttcctaattgatccaagtctcataaatttagcttttgtcataattccttaccgaaaacaactgaaattgagagtcataaatactgtgggttagaataaaaaccatttgccaaagcaacactctacttagaagcacatgtacatacatggacctcattcagaagtccatgttgtagcagttagaatttgagtatcagccatttcattgtagtaacaaaaattgaattgcattttgtgctcagttgtttattgtaattttatttttgttacattaatattagttaagatatggtcacttgaattttttgtatttaagaattttctgttttaatgcatgttatacttttatgtaggattccaaaccttccctctaaatgggatttaacccacatctgcgagatcagcgttatgctaagaggaaatcactgaggccatatctttttacaatctgaaaaaaaagtagtaaaaaggtagttaaaaaaaaaaaaggccgggtggtggctcatacctgtaatcctagcactttgggaggccaaggcaggcagatcacttgaggtcaggggttcaaaaccagcctggccaagatggtgaaaccccatctctgctaaaaatacaaaaaaaaattagccgggcatggtggcacgtgcctgtaatcccagctacttgggagactgaggcaggagaattgcttgaacccgggaggcggagattgcagtgagccaagatcacgccgttgcactccagcctgagcaacagagcaagactccatctcaaaaaaacaaaactactttcattaattacccattatttattttagttacttaattttgagttcataaatggccaccctaatggaaagtttgggtatgatcttaggttttatggagatgttttcaatagagattatttttccctcaccctatttgtgaatatataaattaaagtaagacaatggagtaagtaagagggtagatccaaacacagtatgtctaaattctagcactctactggctgcttagaatacaccaaacctggaagacctttccaagagtaaaatcccagtctgccactatcaaaattgccacagtcacttttactacttgtgttcatagtagactcagcacttctttttcactggacctagtataactgagaaataaataactgtgtgcaaaatattggtatcattaaggacccagagctgcccattttctctttgttctaatagggaagcaattactgatagaaatgtgagattaaaaatagggtcctccctgctgctccaaacaaatgcctaaacacagtatgtatctcagtcctctgttcccagagattccaccctagcccaggaaagaactggcctgtgtaaagcaaaacccaagtcatccccctccagaaatttctctggcagccaagcctgaccctaagggttccactttgctttaaaagctaggagtggcctctagagccaggaacacattaatacaacagttcaacctcagcaccaagtcaggtacgaagcgcttgatacgtggaatttttctctatatcaagtttaaatttctggaaatagactttggttgctaatgacaattacagttataccatagtctgtaatttgagaaaaggtgaaatgtatttaatatatatttagttttaataaaaagataaaattattacagaaataattgagagagagaaaatctattataatttatttgaaaaataaaacattttatccagtaa

SEQ ID NO: 8281 - DNA, 1552 bp, Homo sapiens
gtgagaagctagctgagagaatgctagcagtgttccttcggatcaagttgagactagctggtacagttaagcctaagtttctttttgtttctttccttgcccctctcatttttctagactttgagaaatttacagtttggtagttaaggactatgtttgcaagcctaattcaaagcttttggggaatgagttgttttgttgtgcaaaagacaaataggaagtatatgactgtatgccttataggaatagaaggcagcagatagtatagctattttccatatggggaaactgaggcatgggagggttacttaatgaagtccctgatctctcaagaggcaaacattaaaaaaaaaattagagaaagacgtcattatttgaaaatagaggtgagccctcctaaagctggtcttgagctgtttcacgtgttagtgctggcaggaggtaaccaggacggcctaaatcttgctttctgaaactcgttcatcaggcatttcctgagtggatgtgagtactgagatacatcatcagttctcccatgtgccacgtcactgctgacacgtccttagaaatgtctgatgtggtgttggctgatcttggtattgatcagttgtgaaagtggaagaggcatgagaagagacacctcttggggcacgctaaaatgacatatcgtgggggtccctggacaactttttattaggactggagccagacctaggaatatgtgttttaaataagtcttttaggtgattctgacgtaggtcatccaggaactcactttggaaagcattgtactagacatgaaataggagtggctggatgaaaaacaataaggaaaatttgccccggtgctgtggctcatgcctgtaatcccagcactttgggagacagaggtgggaggatcacttgagcccaggagttcgagaccagcctgggcaacatggtaaaaccccatctctacaaaaaatacaaaaaattaaccaagcgtggtggagggcacttgtagtcccagctgctcgggaggttgaggtgggaggatcacttgagcctgggaggttgaggctgcaatgaattatgatggcaccactgcactccaacctaggtgacagagatcctgactcaaaaaaaaaaaaaaggaaaattttcacagattggtgaaattaaactgagaaccacttttgctttacatatgagctcagcagagcctttaaatcacgatcaggtttaatttactatctaattttcagaaatacatttgtcacctgcagacagttagacctagacagttgtagaaattttcagcattcccaacttacagaaaaccctgacagaaagaatacacagctgacccttgaacaataccatctgaacttcgagggtccacttcgactcaggattttttttcaaccaattgcagacagaaaatattgcaggatgtgaaacccatgtgtgtagaggcccagcttctcctataagcgggctctgcagagtggactttgagacttgggtatgtgtggattttgccattggtgggattcctggaaccagtcccctg

SEQ ID NO: 8282 - DNA, 1552 bp, Homo sapiens
gtgagaagctagctgagagaatgctagcagtgttccttcggatcaagttgagactagctggtacagttaagcctaagtttctttttgtttctttccttgcccctctcatttttctagactttgagaaatttacagtttggtagttaaggactatgtttgcaagcctaattcaaagcttttggggaatgagttgttttgttgtgcaaaagacaaataggaagtatatgactgtatgccttataggaatagaaggcagcagatagtatagctattttccatatggggaaactgaggcatgggagggttacttaatgaagtccctgatctctcaagaggcaaacattaaaaaaaaaattagagaaagacgtcattatttgaaaatagaggtgagccctcctaaagctggtcttgagctgtttcacgtgttagtgctggcaggaggtaaccaggacggcctaaatcttgctttctgaaactcgttcatcaggcatttcctgagtggatgtgagtactgagatacatcatcagttctcccatgtgccacgtcactgctgacacgtccttagaaatgtctgatgtggtgttggctgatcttggtattgatcagttgtgaaagtggaagaggcatgagaagagacacctcttggggcacgctaaaatgacatatcgtgggggtccctggacaactttttattaggactggagccagacctaggaatatgtgttttaaataagtcttttaggtgattctgacgtaggtcatccaggaactcactttggaaagcattgtactagacatgaaataggagtggctggatgaaaaacaataaggaaaatttgccccggtgctgtggctcatgcctgtaatcccagcactttgggagacagaggtgggaggatcacttgagcccaggagttcgagaccagcctgggcaacatggtaaaaccccatctctacaaaaaatacaaagaattaaccaagcgtggtggagggcacttgtagtcccagctgctcaggaggttgaggtggcaggatcacttgagcctgggaggttcaggctgcaatgaattatgatggcaccactgcactccaacctaggtgacagagatcgtgactcaaaaaaaaaaaaaagtaaaattttcacagattggtgaaattaaactgagaaccacttttgctttacatatgagctcagcagagcctttaaatcacgatcaggtttaatttactatctaattttcagaaatacatttgtcacctgcagacagttagacctagacagttgtagaaattttcagcattcccaacttacagaaaaccctgacagaaagaatacacagctgacccttgaacaataccatctgaacttcgagggtccacttcgactcaggattttttttcaaccaattgcagacagaaaatattgcaggatgtgaaacccatgtgtgtagaggcccagcttctcctataagcgggctctgcagagtggactttgagacttgggtatgtgtggattttgccattggtgggattcctggaaccagtcccctg

SEQ ID NO: 8283 - DNA, 1550 bp, Homo sapiens
gtgagaagctagctgagagaatgctagcagtgttccttcggatcaagttgagactagctggtacagttaagcctaagtttctttttgtttctttccttgcccctctcatttttctagactttgagaaatttacagtttggtagttaaggactatgtttgcaagcctaattcaaagcttttggggaatgagttgttttgttgtgcaaaagacaaataggaagtatatgactgtatgccttataggaatagaaggcagcagatagtatagctattttccatatggggaaactgaggcatgggagggttacttaatgaagtccctgatctctcaagaggcaaacattaaaaaaaaaattagagaaagacgtcattatttgaaaatagaggtgagccctcctaaagctggtcttgagctgtttcacgtgttagtgctggcaggaggtaaccaggacggcctaaatcttgctttctgaaactcgttcatcaggcatttcctgagtggatgtgagtactgagatacatcatcagttctcccatgtgccacgtcactgctgacacgtccttagaaatgtctgatgtggtgttggctgatcttggtattgatcagttgtgaaagtggaagaggcatgagaagagacacctcttggggcacgctaaaatgacatatcgtgggggtccctggacaactttttattaggactggagccagacctaggaatatgtgttttaaataagtcttttaggtgattctgacgtaggtcatccaggaactcactttggaaagcattgtactagacatgaaataggagtggctggatgaaaaacaataaggaaaatttgccccggtgctgtggctcatgcctgtaatcccagcactttgggagacagaggtgggaggatcacttgagcccaggagttcgagaccagcctgggcaacatggtaaaaccccatctctacaaaaaatacaaaaaattaaccaagcgtggtggagggcacttgtagtcccagctgctcgggaggttgaggtgggaggatcacttgagcctgggaggttgaggctgcaatgaattatgatggcaccactgcactccaacctaggtgacagagatcctgactcaaaaaaaaaaaaagaaaattttcacagattggtgaaattaaactgagaaccacttttgctttacatatgagctcagcagagcctttaaatcacgatcaggtttaatttactatctaattttcagaaatacatttgtcacctgcagacagttagacctagacagttgtagaaattttcagcattcccaacttacagaaaaccctgacagaaagaatacacagctgacccttgaacaataccatctgaacttcgagggtccacttcgactcaggattttttttcaaccaattgcagacagaaaatattgcaggatgtgaaacccatgtgtgtagaggcccagcttctcctataagcgggctctgcagagtggactttgagacttgggtatgtgtggattttgccattggtgggattcctggaaccaatcccctg

SEQ ID NO: 8284 - DNA, 1075 bp, Homo sapiens
cattgataatattggtcctattaagtggtggtgtagagaagtattcacaaatttcaaaccaaaaaattatgtgaatagtaggggaattctttctgtacccttgagttattttatcactgttgtgtttacaccttataagaaaattccactctgagaatgagcacaaggaacagataggaaatgtgcagctggtgctgatgtgtagccctgcgcccttcaaatccatgtgtgcaggcagtcacttcctcagtcattagcttttcatctgaaacaacaaagctagtggtaggcagcttctgagatggttcccagtgaagcctgcccgctggtgtgcactcttgtttaacctcctgtccttgggtgtgagctgcacttagtaacctgcttctaaggagtagaacatgggggaagggagagagcacacctgaggtttggtggcagaaaggctctggcttctgtctcctcgcccactcttaactttcatgctttcctgctcagaaggtgaggtgttctttggaaaggcccatgtgacaagaagcagaactttccagccgacagctaacatggaactgaggccctcattccaacggcctccaactgaatcctgccaacaagacatgagtttggaaggggatccaccccagtggaactcctgagatgattgcagccttgtgagagacaaaccaagatgtttgtttaagtgctaaacgtggggataatttttatgcagttacagataactaatacaaagctagaaaaagaaaaaggcataatacaaatttcagcatcttaatgagtctgccagcatctgaagaactgaaataaggcgaactggtcttcctcccgcatgagcacctgtcagctatcttagtcttaccttaaataaaaacacttaaccaaatacattatctctctcaaggacagcaaaagatattgaaatttgatgattctgtatttgaaatgtaaatcagattacaattaaactctaactcttgaatactgtcccttttaagtcaccaaatctcctttgagtaagatgaaattatctaaaaatgaataaaggataaaattttta

SEQ ID NO: 8285 - DNA, 308 bp, Homo sapiens
tcacagagtgggctggagagccaagctgttctttcggggtgcacagtgcaccagccataacacagcttagaaacatggatgagtatacctcaagacaggtgaacacggagtggggagcaaaagaaggcagaaactcctctgagtttcacaagcatcaggcacagatcagggcacagaggaagaagaaagaaggtttaccactggtctgtctctgtaaattgttacagagcaattttactttgtgttatttaggatcaagaaacaagtgttatttaaaagttctcttaccctccaacctttgtcatact

SEQ ID NO: 8286 - DNA, 256 bp, Homo sapiens
tctgttgcccaggctggagtgcagtggtgtgatctcggctcactgcaagctccgcctcccgggttcacaccattctcctgcctcagcctcccgagtagctgggactacaggtgcctgccaccacgcccggctatattttttttgtatttttttagtagagacggggtttcaccgtgttagccagtatggtctcaatctcctgacctcgtgatccgcccgcctcggcctcccaaagtgctgggattacaggcatgag

SEQ ID NO: 8287 - DNA, 1619 bp, Homo sapiens
agcacgtcatagccaccatacggagaagagtccagttccttttccctgggaacccccaacccacactcttcatcaggcaggtcccctggctcatgaatgcagaacaatcaccgcacccatggctgagcgtacccactggtagtggcctggagtttccctagggagaggctccaagaggcatatggctgtccctctgccactgccacagcaacagttctatccctacttccctcagcctggggaagaaacaaagagcctgaggcctataccaagtttacagcacaccacagtcaccatgtggagaagagaccaatctctcctcctagtgagccttcaactgcctttttccccagtaagtggaaccccacgctcatgccagcagtgcagccatgccaccccacagactgaacactcccagtaatagctgctctgtgtttcttgggggtggagcccccaggggcaactaaaagcctgtctgccattgcctctgatgtggtactacccctactactctcagactaacaaaggagcaagaaaataaatgccttatccacacttccaacaagctgcagtcaacccaaggagacgaggccagtctgtgtcccatgggtcctgcccatcccccctgctcatcaccaagcagggaacccacaacttgggcacagagcacacactctctatccttggctgattgcactgtgaaattgctgacctgcatctctctggggtggagcccccaggagacaagcaaaaggcccttggccacaaccattactaaggtccctttctctgtcctacttagggaggaaacataaaccatgagatcacctcaaagctgtagtgggcagcctgggagtgctaaactgcaatgtacagccaacattcatgtgggcgaggagcctacactttgagagctttgacagggagcatggttgcaactgtgaggaaatataggggagccacaagaacttaccaactgaccactacacctaagtgtcacctacaggataacattcgaaagcttcaacaccaaaaatatcttactgacatacacccctgcgaaaccaaagatgagaagtcagctacaaataaaggccctgcacgaagccatggccttgtgaaaacatccagaaaataagtctattgaaagtaaacaatttacactgtagttaaaggaacacctaaacacagaggtgagaaagaatgaatgcaagaattccagtaactcaaatgaccggagtgtcttatgtccttcaaacgaccacactagatctccaacaagggttcttaaccaggctgaattggctgaaatgacagaaatggaattcagaatatgactaggaatgaagatcattgagattcaggagaatggcaaaacccaattcaaggaaactaagagtcacaattaaataatacaggatctgacatatggaatagccggtataaaaaagaacctaactgatttgatagagctgaaaaacacattacaagaatttcacaatgcaattgcagggattaacagcaaaatagaccaagctgaggaaagaaactcagaaattgaagactggctctcttaaataagacagtcagacaaaaataaagaaaaaagaatgaaaagg

SEQ ID NO: 8288 - DNA, 346 bp, Homo sapiens
tatttcatagccttcactattgataccttcaggaaccgaaaaatcccaggtgactagggactggagcagatcccagcatactgcagcagccctatggaaaagaggccagattgttatgtgggtgcccacttccatatctcctcactgggtagttcttccaggtctgggtctccagccactgccaactggggctatggagccagtggcagctctgcaactccctggacaagagctcccagtgggaggggcgggttgccatttttgctgtctcacagcccttgcccttgctgtcttcaggctctggagagtcatggggaccaaaggctggtccagacccccacacaga

SEQ ID NO: 8289 - DNA, 6998 bp, Homo sapiens
gaggtttagtcccgcccccctctcctcgctgcttaggctccgcggcctccaagctgtagctatgacggcgcgcgggactccgagccgcttcttggccagcgttctccacaacggactgggtcgctatgtgcagcagctgcagcgtctgagcttcagcgtcagccgcgacggcgcctcgtctcgcggcgccaggtgagccaagggaagtgcgcaggcgcgggtcggggtgggtgtggaggtggcaacgactccccgggtaggtcgcccccagtcaggggtcatactgctcactgtcccgggtcgcttagggagttcgtggagcgggaggtgatcgacttcgcccgacggaatccaggggtcgtaatatatgtaaactcgcgtccgtgctgcgtgcccagagtagtggccgaataccgtgagtggggccgggctcgggctggagggcgggatcaggggctcgacccgctatcctccttctcgcttggtcgcaccggccagcttccacccactctcacccctcttctgccagttaacggggctgtgcgcgaggagagcatccactgcaagtcggtcgaggagatctcgacgctggtgcagaagctggccgaccagtcgggcttggacgtgatccgcatccgcaagcccttccacaccgacaaccctagcatccagggccagtggcaccccttcaccaacaagccgaccacgttccgcgggctacgcccccgagaggttcaggatcctgccccagcccaggtgcaagcacagtgaagagttgccccaccaactgcagccccaggctttggactgttactccggtaaaggtggttcttcccctttgggattccaagcccaggcaaatggaacccatcaatgggcaagttgacagaggttctgcttgggataatgaagagctgcctgtttctttccagtgcctgcttctgggggcagtgaccttgtgaaccactcatttttatgcaagtggcatccctaaaacctgagatgaggaagacttcaagggttttacagggcccttgttttttaaatccaaattgataataatgatctcaaaacacagtgagaggtctgaaggctggcttctgaagaatccctgatgtcttattggaacaaccactgagctacggagagctctgctgtgatgggctaggcactttatatctgtgtgaatacagatttataaaacaggttaataaacttatccaaggtcacatttcaggtctgtcttcaaaatgtgtgcatatgttaagcacaagcctcagttttcattattttaaaactagacgcagaacatataacaactgtcaggtggttagtatcaaaggccaagtgattaatctaggcctgacccctgaaagggagaggggagtgattctcagaccaagtcctggctgacaagctttctctggtcttagctatacatctccttccccccacgtccctctttgtgcagaaataaaatccatgtcccttgagccagctggtggggggtgctgagaaccttggggaagggcaggaaggctgatattaatgagtattttctaatcttagtttaaaaaggggggatggtggggaaatgagaggcaggaaatgaaaatctagaaacccctgtaagaattcttgaactgttgtcattttcttgtcatgccctaacaccatgatcaatgaatagtgtgaaccttactaaagaggcctgtgtgcctgccaaggagtcaggatggaagcggaggatcccaatttcctctgcaaatagttgtattggggagcagagccaatcctggaggcagatatcaccttctgtataggctcaggagcctgtcccctggtgatcaggggtgggcgcatctagatgaagcagactagtcatagctgtggggaaaaagggtgtttattaaccaacggcagggggaggagctgagcccaggctccccactctgtcacatgcctgttccacccacctggttgtaagtgggggcattcctaaagaagtgtagccattctcacaataaatacattcattgtggggtggaggtgggagaggttgggtgaagggcagtaaaaacccgtgggattccacgttctcagctacaaaaataacagtcatcctcacccgaggggaatgggggagctcagtcagaattgattgtcccatataggcctagagacttcagaggcccctggcccctgaaagtgccccggtgaggtaggacaggggtaggagctaagcgtccaaactcccagcctctgccctttgcatagttccaagaatgggcttcatgtgccagttgagacatcagatttctcctccctttccctgctgtagtctagaggaagcaaatgcttgattcccccaaaagagaggctggctcattgagtgcagtgttggtcatccatcctaggcaagggcctgtgaggacagttaaatgggagggggatctccctctgaaatgtccacggactaaacccaacagacaggtccaagacagcaagggaggctcagaggtgcatgtgagtggaaatgtaagcacatgtgtgatacaggtgtgtgttaccacatgtgcatggggatgggacatgcctggagctctgtctctcatactcttgagaatgaccaaggagagtggggaggctgattcacaagggccacacaggaagggagaggaggggagtgatgcagtcttacctccccaggctggcccgttcccaagctcttgacaaagaggtcaccacatggggctggggaagaggaccagataggatgtggcaattgggagggtaccccaagtccagaagcagggatgaaacaagaatgcaccaggagaaggtgagggtgggggcactgcagcccagccgataaacattcttccatgtgtgcatgtgaatgtacgcagggcttaggtggctggcagaggtcttgtctggtttcaggaccatccagcacacagggccatgcagagggtggtgacattgagcccatatggacctgcagagccctgcctgggagaaagagaaagggtttgggcagatgaatggaacaggaggatggagtcctcacctataagtgtttaggttaggggataggaactggctctgggtctgcagggcacctgatcctgagggagcacctacctctgaggagcaccgatgggcctgggctgctcacatgtgggtctgtggagactgaggagggggctttggctgggcctgactggccagccctacagggacatcaaaaagttgggagaagggtatggagtgggggtaatgaagggagggtggctgtgttagggaggcagtggcccagcctgggacagataggctggcttggaagagcatttgttctgggaggctgggctcagacagagctctcatctagctgctccacgagctgcgtgtgcttccttttttccaggatgcggctgagttcctcggcgaaggagcagggccctgctggtactccattgttgctctgcctcagaagcacatagctattgccattcatcctccgcagccggctgggcagtgccaccaagccattggtcagctcagccggtggcggtgggggcggtgggggtggtggggctggggctccctccccagggatgatctggagacagctgccctccaggcccccagccccctcatcatcaccctcatcttcctctccaggacactggcctgagactgtctgcagttgcaccgcagatcctcctgcccggctggcccgacccagtgagtatttccgtcggcgccctcgtctgccttcccgcagacaggccacatagaggagggaggaggccaggatgaggcagaggccaccaagcgcggcaatggctagcacatagagcagtctcacatcaggtgccagctgtgccccaggtgtggcaggggcttttggagctggggcaggagtggctggccggactgtgagactataggaggccagcagggtgcggaggccattttcctcggcatagcagccatagttgccactgtgctcaggctgtgcatctgtaaccagcagcccgtccacgcccacacggtagccaccctgcccatcgctcaggcccatgctcccattgagtagccacaaggcccgggccaggttggatggctggtcacagggcaggaggacatcatcaccccggagcacagagcgggtcttcagtggtggtggtggccctgtggggtttgggggagaggtcagtaccagcccgtcccaggaagggattagagatggcaagccagactgttcactgccaagtccctggcaccaagcacagaacccagaatcacagtgacagctgacccaggctctgtgctcatgcttccacagaaggttcacgttggcccttcccaggaagcaggcagtgccttgggcccttttccattctctctccatgctctcatcctctcctgtggtttcaatttctgccatctgccagtaactcctaatctctacctcagacttctctcctgagtgccagactcggatatctaccatgtgctgggcatctccacatgaggtctcttggacacctcaaaaccaaagcttttctccccaacgacaccaagtcctttccttgaatcgccaccactgtgaatggcaccaccagccacacagttgcttaagtcagaaacctgggagtctcccttctctttcttgctcgcctttttgttttgttttgtttttttgagacggagtctcattctgtcgcctaggctggagtgcagtgacgtgatctcagctcactgcaacctccacctccctggttcacgcgattatcttgcctctggctcctgagtagctgggattacaggcatatgccaccatgcccagctagtttttgtatttttagtagagacagggtttcaccatgttggccaggcttgtctcgaactcctgacctcaagtgatccactcgccttggcctcccaaagtgctggattataggcatgagccaccgtgcccggcccttcttcacgtttgtatctaactgtcactaagattctgtttctggcatctatcttagacctgttgatttctctccttccatgactcctggcccactctggccccatgtaatccattcttcatgagaggtattttaaaaacacaaatctgatcatgccactctccagcctaaaactcttcagaggtttcctattgcttttcggataaagaccaaaatcttcaacatggcctttgcccacttgtccagcctattctcctgtcactcaaatgtgccagcctccctctgcctgctgctccctctgcttgcatgtcaccccattaccccatgtcctctgcttgcctggctaacttgtgggagatagcatagtatagtgaccagaagcacaaagtcaaatcagactgcttggggtcaggtttgaattcttttttctttctttttttttttttttgagatgagatgaggtctcactctgttatccaggctggagtgcaatggtgtgatcttggctcactgcaacctctgcctcccaggctcaagtgatcctcccacctcagctttccaagtagctgggattacagacatgtgccaccacacccggctaatttttgtattttttgtagagatggggttttgccatgttgcccaggctggtctccaattcctgagctcaagcaatccacctacctcagcctcccgaagtgctgggattacaggcgtgagccactgtactcagccaggtttgaattctggtccagtttcttaatagctgaataagtttgagcaatttacttacactccctgggcttcagagaggtccctcatggggataataataatggcacctttctcataagaatgctgtgacagtagatgacatcatgcatagaagtatttagatcagtgtctggcacacagtaaatacttaatacatcttagctgtgatgattaacttttgttctttcttcagatatcagttcagtcatccgatcttccttggggaaatacccattaccgtcctgaacccttgtcatccactacttggctataagctccagaagtgacaagacacttcacatcttaaatatgtttcctagtttataattcatttgggcagtaaatgtttgttgagcacttactctgtgccaggctctgtgtttgagtcatccttaccaaatgtacatagccacagccactcagatacaaacatatacgtacacatggcagtaaatggcaaagaggacagtctgcgtagctagacccacactcatatgagtcacttacctgtatccctgctgctctcacagcctcgatttcctctctctatgtcctgtatcagtgctgtcctgggacagaagatcaggttttatgaacaaggggaactgggtttcagtttcccagtgaaagggtagataggtctgttactaataactagcccctgcactcccccagtagctatcaggccttcctcctccactcagaccacatgtgactgtcaccccccaccacttcccacctgcttccctgggacctgttggctatggtggtggctgctgcgcaggcatgggtgccagggtcccagccacagtaggggtctcgggccaagatgcagtcatagcaggatcggtagcgggagcagctggagagtggtagctggatgactccgctaggagcccccacatagaggctgtgctgggagccagataggacagttggtcggcagcgtccccactcatacagatacacagcctctgcccaacctccccactccctcttcctatttcagcaaggctatattaagggtcacagagaagggctacctgcaatagagagatgactagattttccacagactgggactccctgaacacttgtgtctcttcaataatgtgcatcccagagcccaggactacggccttgtggatccagccatcagctggtatggaaagagcagagagttagaccccaactatgggatctgctctcagcaccctgcaagaggcctaa

SEQ ID NO: 8290 - DNA, 6834 bp, Homo sapiens
ggcaatggaaaaattttttagtaaaactggaaaaggctctataaaatgtcctgactccagcagtcttgaggcagcacacaatggcatcagtgtctaggtggcaggcactccgggctgacagcttccttctatggctctatgaccaagcaacccagcccgaggcagctcccaccagtgaggccctgatattgcagggctaagcacctaggatccaattctagtacatgccacctcatgctaggctctacaaagtggggagcagaggagcttggtacccactgtatcaccctttgactttgaaagcctaggctggagtttcgcatgaagtccccgattcccctccaggttcatgcggcctgacctcactgccttgaatctgacctgctcattcctacctcagggcttggatttccttttctctctgcctgggtccccttcgccggatgttcacgtggctctctccttctagttgtttaggccccagctcacatgccctcggctcagagacaccttttcagaccacttatctacactagcctgccagcactctatcgcatttctattttctttacagcatttttcactaaaactaggttttctgctaatttgttcattgcttgcttgtctcttccgccagaatgcatgcaggcagggactttatctctcttttcagtgctgtatatacaggacctcaaacaaagcctgagcaacacagtagtttctcagtagtctgctacattgaattttctcactatggaaacctgctctaggttaggcccctcagactgagaagggcacacagctcaggaccacaggatagaggagcccttgcagagttttatgctccagcctatcctatcaggctcatttcagtgaccagctctgcacggccttcactttgaacgcttggaggtgtctggctggtcgggagtgggggcctggcctgagcaaatctcagagttctgtgtcgtagccccctttttgccagaagagggctttttggccactggtccagtgtcatccttgatcttcttgagccgggccttgttctttggtggaatggagaaggtgagggagttcttgttgaactcaagcgggaagacacctacatctccatcaaagcggttcttggacacctgcagataccgtttccctggcccggttaccagcttcctgtcctgcaggatcagaacattgtctgcttcctggcttgcctggggaacagggggcagaaggaggaaagcaggagtaagaggacatgagcaaagcagaaaggggggctgacagggcagggaggagtgataagaatggggagaggggctgggtacaatggctcacgcctgtaatcccagaactttgggaggccgagtcgagtggatcacgatgtcaggaaatcaagaccatcctggctaacacggtgaaaccccatctctactaaaaatacaaaaaattagctgggcatggtggcatgcacctatagtcccagcttcttgggaggctgaggcaggagaatcgcttgaatccgggaggcggaggttgcagtgagccaagattgtgccactgcactccagcctgggcaacagagcgagactccgtctcaaaaaagaaaaaaaaaaagagaaagaatgggagagggaaaagtacttccccccatgaccaaagctctttgaactactgaccacgatgctggggccactcaaatctttcagttccctgacaagcttgctactgtttcagacgctgcctgtgctgttccctctccttctccacagcgggccaccccactcaacctcagcttcttctcttttaggtctcagtctaaatgtcacatctcatgaaggagaccattctttttttttttttttttttttttttaaagacagggtctcagctgggcacggtggctcacgcctgtaatcccagcactttgggaggccgaggcggacggatcatgaggtcaggagattgagaccatcctggctaacacggtgaaactccgtatctactaaaaaaatacaaaaaattaggcgggtgtggtggcacatgcctgtagtcccagctacttgggaggctgaggcaggagaatcacttgaacctgggaggtggagcttgcagtgagccgagatcgcgccactgcactccagcctgggtgacaaagcgagactccgtctcaaaaaaaaaaaaaaaaaaaaaaaaaagatagggtctcactctgctgcccaggttggagtggagtgcagtggtgtgagcacggctcactgcagtctcaacctcccaggctcaagcaatcctcccacctcagcctcctgagtagctgggaccaaaggtgcatgctaccatgcccagctaatttttaaatatatatatattatatatatatattttttgagacggagtctcactctgtcacccaggatggagtgcagtggcgcgatctccgctcactgcaagctccgcctcccgggttcacgccattctgcctcagcctcccaagtagctgggactacaggtgcctgccaccacgcccggctaatttttttttttttttgtatttttagtagagacagggtttcaccatgttagcaagatagtctcgatctcctgacctcgtgatccacccgccttggcctcccaaagtgctgggattataagcgtgagccaccacgcctggccaattttcaaatatttttgtagagacagggtctcactacattgctcagattgccaaactcctgggccccagcaatcctcctgcctcagcctcccaaagtgttgagattacaggtgtgatccactgtaccctgccatttttccacttctgcattactctctttcccagctccatgtttgttccatcatggcacatgatttgtgctccttgctctgaattccctaggcccagcccaggcctcgtatgtaataggcattcagtgtaacactagaagctccaggattgggctggtcctgatgcccagaaggccctcacatttatctgattgtctaatacccattgtctaccaaacctcaacccaacctttgttgtcacctcctctggaagtctcccagatgtcccgggctgactcagacatcttttctctttgctctccaaatacttgtgctgcctatcatactcttatcatactgaattgcaatcactgtcttactgtttccccaggagaggatgtgagctcctgggggacaagaagagcataagaaccaactatcagcctttgtatttccagcacatatattcctcatgtcatggccccagaggcattgcctcctgcctgttcggatggacagtcaagacgattaaggctgaatgagggctgtccctggtcacacctacccactctattttccaaagcttgagctccgctaaaggccactcactttggctgagccaaaaatggacgctgtctgcagttccttgtcatcatcctctttccgggggtgaatgaccagtgtcacatggcagttattgtctgttgcaaacttccgaaagaccccgatgatgtagtcttgagctgcgatcctacgccatcccaacaacacaaagagcttatcagacacagaaggacaagaacatacacatactcttgatccattcacatctccccacaaactaccacaacccactctacctccctctacccaaggactcacactcagatccctgtccatacatcctgctgccataccccacacctccatatgatacacatgggggtggtacgtgcctgcacacatctcagaaaataggagagcacagcatgtgtgcctagaggccagctgcctgagaagtgtgtgttgtatgtccaagcgggctcaagctagacaagagaggatgtcaccgtcacctgtctgtggacagctgctcgtgacccatcatgaactgcaggttgtcgatgatcacatgacaaatgtcatagacgtagactgcatgttgcattgtatctattacagtcctgggaagaggaaaggcaaggaatttgacaagttgtctctagaccaccccaggcagaagaactagcatcctgaaaactctcttggctgcctcctctgcccttctattattattactattatttgagacaaggtcttgctctgtagcccaggctggagtgcagtggtgtgatcacagctcactgcagccccaacctactaggctcaagcgatcctcttactttagcttcttgagtagctgggaccacaggcatatgccatcaccatgcccagcctaatttttaaaaatttttttatagagaggggtggtctccctatattgcccaggttggtctcaaatccctgggctcaagtgatcctcccacctcagcctcccaaagtgctgggattacaggcgtgagccagtgtgtccagccctgccctctcattctttgaaaaactccaaacctaaggagatgggggagttcctactggagctggaaaaggaaccaaaggttcctgagtgctgggatatgtctgggaaagcaaggtggctggaatctgggagtctcacctgatgctttgctgtccatggaaagtcatgaaatagaggggcaggtcctcaaagcggtcagcccagtgatcatatttgtccagttgatcttccagccgcccctcggcaaactgtgtcagcatgacccgggctagtctcacattgctgatctcgaagctaccccacagtgtgttcaccccctgggaacacaaatccagggcatactcactgatgaatgtcgtctttccactgcctgttggccctgcagtggggtggaacagacctgggtgaggaggaagtcctacccttgaaaccaagacataggtcagggctttaaaactggggggaaagggccaaccttcttttcaacattgtcatggcccaaacccacttgcttttgtcacctgatcttctgcccctttactctaagtagtgatttctcaaagggttacctgtgaagaccgtcagctcgccctttcgatgtcccttcaagatacgattgaggtctggaaagcggctccagcggaggccagctgcttgctccacatttgacagttctcctagcacctcctcccgaagctgccggaaagatacgatggacttgtgccaggcaggcagggcggtacgaagaatacgagaaagattgaagcctccgttcagggcctccaggggacggggttgctggtctcctggtcgcaccaagaagcatcgtttggggttcagttttcgtgcaaacaacttggcggcttcccaggaccgaaggtcatcccccaaccagaatacaatccgccggaactgttccaggtaagggagtaaggcagggggtaagcaggtcgttcctcggggtagagtaagggtaggcagccccgtggactggttcaaggccaggctgtcaagctcacgactcgtcagtaccacctcagcatctcgacgactaatcagtggtaatccaaacagattgtggtaggcgctgggtcggggaatagtggtttcctcgtagctcactccatccccctggcatttagcctctaggagcttcaggcctcgtaatcctgagcccccaggggagaaccaagggaagacaagactgcgagcaggtcgcagatatcgcacactgaaacgcttgagtgtgtcatctgtaaccttggtaaggccaaacattgtatcagccagctgaacctcctcctgatcaggcagctcccagagaggtattgctcggttccagatcctccggacctcctcgctgtcctcaaattctggtgccttgctaagcagaaacccctccctggccccatcccctcgcccctccacgctggcctggaagtcttcccagctcccttctgctaggctggtcatgcagagaaagtggcctgtggtcttgtcaatgaagaggctgaaggaagtggtaacaccagtctggcctttgagctgtgaagactctgcaaaggggctcagtgcccgcaggcaactgtgaccatcctggaaggggatcccatgcccccgcaaatactggcggatttcagttgcagttacaggcaacactggcatatccaaggcttggagagtctccttcctgtaacgtctgcgaggagggcctggggccaagtttcggggcaggcccctccgacccatccactccccacgcaggggtaacaagatacggagggggtacccacttcggaggaggacccacattcctagccaaatgtgggaagtcactacttgaaatgccttaggtgcctggttagcgtgccttcactagaccaaactctagggatatcccacgcagcactctgcagagctcactctaggtgcattctttctctccatgaatttctcctcttcagcccctctacgttgctgcttcacacatatgcccatctacacgaccctttcgcgtccacgtccttctacaatggctcccccacctctatggtccgttagttagtttctctccgccacctcacctctatgaccctctatacagttcctcactgacacagtttctttgcatcatcttctcacctctactgctcctccacagcatctcctcgtcgtcctcatttctatagtcatctgcatcctttttgtagtccctttgccctaggccccgactagagaccctcttccgcttctccttcccctcactgggacctcaacacggcgagagcacccagcacgactcccgccaatcccccggcccaaaggaatgccagtctctatcctcccccgtgtcttcactccgctctactactccgagctccgccgcgccggcccccagccccaggttaccacttttctctctcccacttcgccggcaacgtgagtctcccgca

SEQ ID NO: 8291 - DNA, 336 bp, Homo sapiens
gcaactttacaaagtccaggaccagggatggcaagtcttgggatgaattgtagccttggctgcgcaatgaatctgtgatacactggcgtgggggacgaaggtggtgaacctcgggactccaccacctgcctgccctctccacaaggccagaccctttgacccttccctgggctctgtctactcagcactggccccaggcctgggcactcaccgagccaggccggggctcaggcaccccaccctcatagcgaccccagcgccgggaaccatcctggtattccatatagggtcctgcaaagacagcctggatctctgccaggtcatagcggcagatgg

SEQ ID NO: 8292 - DNA, 1012 bp, Homo sapiens
  SITE (905): n equals a,t,g, or c
ctttgagtccctggtgaggaagatctgcagacacctgttccacgtgctggcacacatctactgggcccacttcaaggagacgctggccctggagctgcacggacacttgaacacgctctacgtccacttcatcctctttgctcgggagttcaacctgctggaccccaaagagaccgccatcatggacgacctcaccgaggtgctatgcagcggggccggcggggtccacagtgggggcagtggggatggggccggcagcgggggcccgggagcacagaaccacgtgaaggagagatgagccccccgggccggacaggggcacacgtgtgcaaagagacggtggtgtgtgttctctcctgcatctgcgtgtgcacacatgtgctgggcacgcgtgtggtgaggtctgagagggccccgggctgcactggtgtgggctgcacaggcacagacgcagacggccccggccgtgtcctgtggccccctgtcggatggatgcgtgccgtttgtagagaagagcctttgggcccattcactcgttcagcagacacgcatgggactgatgctttgagttttcttctgtggggttttcctttctctggtctccgtgcagcccctgccctccctcgggtgctgctggcctcaaaggaggaactcgtggggggagggtgtgatttgcagacctgggtctctgctctgctctgggggtggggcttgctttcacagagaccctccttccctctcacccctcctctcccggcctcgcaggagtcttggctgttggcagctcagaggtgggggaggcctgtggtgtgaggtgccctgcactgctcctgctcctgtcaccccttcctgctgcctcctccatgcccaaggaacacccatggtgcagtcctcaggcaaggcanggacggggctgaggcctgcgtggagatgctgcaccagcggaaggctgagacccgcttaccttagttcatctgttcactcgtaataaaaagaattctctcaggtcaga

SEQ ID NO: 8293 - DNA, 256 bp, Homo sapiens
aggcaccccggaggctgccccgagagtgggggttggagcagactcgcccctcactgcctgcgagggtccacagccagcctgcaggtgccgtgggggcagcacataccctgtgtcactcgctcttcccagctgcctcagccccctgcctctccccgtgctggtggcggggaccctcaaatgtggctgcagtaagctggagacatcttctccgaagggctctgggccagcctgaaacagtggctctgccgcaggggcc

SEQ ID NO: 8294 - DNA, 3319 bp, Homo sapiens
agacagccgagcctgcggaaggcggcggcggcggcacctgcgatcagcggctggggcaggttatggtagtgcggactgcggtgtgagcagagcggccacggggcccgccatgcgccggcggccctgacatgggcgccagcgggtccaaagctcggggcctgtggcccttcgcctcggcggccggaggcggcggctcagaggcagcaggagctgagcaagctttggtgcggcctcggggccgagctgtgccccccttcgtattcacgcgccgcgggtaagggcatgggttccaccctggcggggggaacaggcgggcggccaggcgtcccgcgccacgggggaacttccaccgctgtaccccactacagccaagccaggacgacccccatattttgagcctcattggagctgggggtggagaaagccgggcagtggtctcctggcggcctggccactctgaaagtctccctagggaagagtgggcctgaggcttgtcactggtcggaccttccgcacggtaaagctaagctagggcctccataagacctccataagatctcttcctttcatcccttccggctcagcctgcatactgaagggtcctagcctccctttcccccccagttattccaaggggataataaccctctgtttaggctgcttttcctgacagtagtggggctgaacctttgagcgtagtggctgggaaagcagggataggcctcagtattgggggtgaggctgaggaaaaaagaccctcacccagttatgttctccagatccagagcgctgacctacccacccaacccccagcccagtctcccagaggcccgcacaagagtaccagattggcttggctctagtgggctcctggagatgggcgctccctgtgctagagatttggctgtagacaccaggaagacccaacagtggcaattcaccagccacctggggtgtggggtcaggggagacgcagccttcattcctttgtgcttcttcctagcttaggcttctgctatttcagtctttgacactgggccagcagcatcttctggagtgagaccaacatgcccaggccaccaccctgcccactctagaagtcctgggtgaaggcaaagtcctgatattagaatggctgcccttgctgaacaaatcaaggatgagaactggccttggtggctgcctggatggtgtgctctggtgtgggctctcttcttgggggtctgacatagtagcactgcccacccatcacctcacttcccactttcttctagtagaccccaaaccccaggcaaaggattctccaggcaggccaggcaccgtggctcacgcctgtaatcctaacactttgggagatgaagacgagtggattgcctgagttcaggagttcgagaccagccagagcaacatggcaaaaccccgtctctactaaaatacaaaaaattagcagggtgtggtggtgcatgtctgtagtcccagctacttgggaggctgaggcaggagaattgcttgaacccaggaggcagaggttgcagcaagctgagatcgcgccactgcacctccagcctgggcaacagagtgagattctgtctcgaaaaattttttttaaaaaaaggattctccaggcatattatcctcttttcttcccacttggggttgggaagaccacagacttccccgtgacctgtgacatttgccatgcccaggtgtggggctccagcccagcctgtttccttctccctctacacagctctatgttctatgatgaggatggggatctggctcacgagttctatgaggagacaatcgtcaccaagaacgggcagaagcgggccaagctgaggcgagtgcataagaatctgattcctcaggtgaggggctgggcagcggtcacagagcctacactaagcgtgtggaggtggacccagatgggatctgttgtcatggtgggggcttttgcggggggatctgggaggaacaaggaagcttcctgaagtagaggccctgagctgacccttactagcctctgtttccatggcagggcatcgtgaagctggatcacccccgcatccacgtggatttccctgtgatcctctatgaggtgtgaccctgggaggtggcagacagaagcaccccctgccccggcaagaaactcccaggctcaatcaaggtgtggcttccattgaggagcccaggctggggccacaaccctgaataaactctgttggcccataaccttcagctgtgagcgggtcggtcccacagtattggttgggtgttggtttgtgtgtggacaagaggtggttggtgggtggtgaaggctaatggcagagttagcaccccactctcccaagccacccctgcaagcagcacagcagggcatataccagtcaggaatgcccgttacctggttccttgcctggtctgctttcttccaagtttgcctggggcctagccctgctagaggctacagcactttacaagcaaggtatgctttcttccagcccctaggctgtgggcactgtatacaagtaggaacttcctttccttcacttcccttttaacccctagtcagagcatttcagccgtttgctacctcgattcctcctgtgttggacagaggctgggggcagtgccagcctgattcttccgacctacctgccatttgttcccgccttcagatggatggacagtttgctggctattgataggagtggggactgggtgggggcttctccctctacccagggctgggctgatccccctactgcaactaactgttgccccccaaccccgaacccccagttgaggagttgagagagtgcaggctggggtcaggacaggctgcggatgcttgtgcctatggggagttactccaacccacctattctgtctaatctccatggctttgcaccaaatcctccacccctccaattgggaggggactgttcaccaccttgtggtaagggacaacaccctaaggctggtgccagtagttatgagtagcctaccaccccctcccttacagtaacccccaccccttcaggatcagtcaagggaaagcactagaacccctgggtagggaaagaaaggagggaaaaaccataaaaggaatacttataatgtgaaggtttgtaaatagtccatgatgatgtcgtggcagagtctgatttctatatagaggtgactttttttttaagtactgtgcaagctctgtgcttctataatgtgggaaatggcttggggaggatggcccctagcttaggaagactgttgtgttatttgttcaatttcaataaaatgatttgtagatcctgca

SEQ ID NO: 8295 - DNA, 2397 bp, Homo sapiens
agctgtcaccactgactaaagaagagaaaactgcggcagagcaattcaaatttcacatgccagatttatgaagaaatggacttggaaaggaaattctaacagagaagagcttaattccggagaaatttaggaagatgtcttgttaacccttgatgtctagagattgggggctggtgaagggggtttggcttcaatgactggataatgatatctttcatgagagagattataagaagaagggcagataatatatgaataaagttcagccaaaaggatcaaatgagaataaaacgatttaaatatatgtacacacgcatgcacacacacacttagtcttgtaatttcaggccagaaattctcaacactattttgcatctgttttctttttctaagtcatgataatatagatgttctggtctatcataaaagaatgtttatgtacatttcagtcattcggtatgtggctttgtaaattaaagtataggcaaaacatttgtgttatacatgatatataatttcattttgtaaatgttgattgcacatgtggtcacattattgttgagactgcttttatgtgacctgtagtctcccacagaacctaaagtaataagctggcttttctgtgatagccacgtttgcgtatttctttccctatttcccttgcctgctaatgttgaacagcatgaacttgctttctgatgctgttttagactgtccctgttgtatctcaataatatctttgttttccttcagcctttattactataattgttcattctacatgaaagctaggaaactgaaattagaagagcacttatctgctacttgccagttttgcgtgagtgtgttatatgtatgtgtcaatttccctttaaaataactatttattttaaaataactattggcaataaggaaactgttcaaagtagaggcagatcttgatagaaagatgttaatcacagggttgtttataatagcaatatacatacacatttggctagtactaggtgaataggaaaataaatcatgctgtatgtatacaataagaggtcaagttgccaataaattattactgttaatgttctgggaaatgctgaaactatgctaagtgggggagagggaaagcaggtattgcagttttgtagtgaagattgggctttggagtcatatctgagatgtaagtagcagcttttaaattctagctatgaccctgtgcagatcacttaacttttgagtgtcaggatgtttggaaggacaagacaggaaagtgttttaatacagggttcagtatttagtaagccttcaataagtgatattacatacatgtaataaaaactaagcattgaaaggactaggaaaaatgcatcaaatgttagttctgcaggttatagaattatacttttatgtaattttaaaatttcagttatgaacatgtttgtccattaacaaacttataatagctgaaaaacagggttgtgagaacagcttcagttaaaattgtcctgtctagtttgaatatttcaagaacagaaagcctttttttttttttttttttttttgagacggagtctcactctgttgcccaggctggaatgcagtggtacgctctcagctcactgcaacctccacctcccaggttcaagcagttctctgccccaccctcccgagtagctgggattacaggcgcccgccaccacgcccggctatttttttgtatttttagtagagatggggcttcaccatcttgaccaggctggtctttaactcctgatggtgatccacccacctcggcctcccaaagtgctgggattacaggcatgagctaccgtgcctggcccccttttttttaattacagagaaataagttacaccttagtatcagatattaattttcttcagtgttcaggcaattagtatttagaaagctcttgtcatgagatggctctgggatgtgatgatgattgttgggattgaaaaaacggtagtatcatggagagatcataataaattcttagtattaaaagtggttttgctttcagttagggagaaaaattagattgtactatttttcctctatgatttccttcagttatcttccaaatgttgttttttccccacagcccccttaacattgttctctatgcacttctcaatacattttcatttgtttctcaagcctctttgtggatgactcctaaatataacttcttccactagctctagatccgtatttccaataaaatcccctacctgaatattcaagttaaacatgtccagaatacttactgattttattgttaatagccactattctgttgtctggaattaaaacctgtataactaatttgcatccctttatcttcttagtcaataaaacctacaatcctctttctaaaa

SEQ ID NO: 8296 - DNA, 268 bp, Homo sapiens
cccagcactttgggaggtcgagtcgggcagatcacaaggtcaaaagatggagaccatcctggccaacatggtgaaaccctgtctctactaaaattacaaaaattagctgggtgtggtggcacgtgcctgtagtcccagctactcgggaggctgaggcaggggaatcgcttgaacccaggaggcggaggttgcagtgagctgagattgcgccactgcactccggcctggcgacagagtgagactctgtctcaaaaaaaaaaaaaacaaa

SEQ ID NO: 8297 - DNA, 2846 bp, Homo sapiens; identical to SEQ ID NO: 7399

SEQ ID NO: 8298 - DNA, 857 bp, Homo sapiens; identical to SEQ ID NO: 7400

SEQ ID NO: 8299 - DNA, 5973 bp, Homo sapiens
gaacaaagagtagaagatgtccgacttattcgagagcagcatccaaccaaaatcccggtaggtagtctcaggcctcggtttcagtcatgaatgtacgcagaggagagcaccgcataagtgcatccacttgacgggtttttacaggaatcaccagacagccaaaccctgggtgtcagtttcacaacctagagagaggtatcctttttttaagagacagggtctcactctctttcccaggctggagtgcagtggtgcgatcgtagctcagtgcagtctcagccaccttgtgctcaagcagtcctccctcctcagcctcctgagtagctctgactagaggcacacaccactacacctggctaattttttaagttttttgtagagacagggtcttgctatgtttaacaacccaggctgatctcaaactcctgggctcaaatgatcctccaccttgacctctcaaagtgttgggattataggcatgagccactggctggcctcaggtgccaagatttctgtactgcctctaatttctgctaccacttaaactcaggcaggtggagcctacacactgatatttccttgtggatatcacacttcagaacgtgtccgctagataaagctctcaaacttaccaaggaaagtgatgacagcttgactcggccttacacagaaccctatgtaggtctcacacaatagaacaatgtacaaataagcatttttctttcccaaagaagcatgtaaagatttcccattcctgccactcaacttctctttgttgtgacagggtggaagaattactgtatatagaaaagatgtccgcagcgttcagtaaacacagacactaatgagactcagaggctcatctgtggtcaggtattataacagcttaaaactaaaaaaaaacaaaatattttgctccatggaaaggaagcatagtgaggagccaatggattatttatttatttatttatttattttgagacggagtcttgctgtgtcgcccaggctggagtgtagtggcgcgatctcggctcactgcaacctccgcctcccaggttcaagtgattctcctgcctcagcctcctgaatagctgggactacaggcacgtgccactacgcccagctaatttttgtatttttagtagagacagggtttcaccatgttggccaggatggtcttgatctcttgacctcatgatccgcccacctcggcctcccaaagtgctgggattacaggcgtgagtcaccacgccggcctgatggctttatttaaattcataatatgaaactatatgtgttccctgtgtagttcaaatacgtgtgtgtgtgtgtgtgtgtgtgtgtgtgtgtgtgtgtgtgtataaaattttttttttttttttgagatgcagtctcgctctgtcacccaggctggagtgcagtggcgtgatctcggctcactgcaagctccacctcccgggttcacgccattctcctgcctcagcctcctgagtagctgggactgcaggcgcccaccaccatgcgcggctaattttttttgtatttttagtagagacggggtttcaccatgttagccaggatggtctcagtctcctgacctcatgatctgcctgccttggcctcccaaaatgctgggattacaggcgtgagccaccgcacctggcctcaaatatttgtatttttaacctcatttaaagaaatatgttatcagaatgaaagtaccaggtcattatgcacaaaactttgtctctagaaccagctaataatggactctacttgccttgtcaaatataattttttcatgtcaactagacagtctctagtgtggaaaaacattgagcatattactataattaggaacttacacatttattaaaacacaggcatttactttttttttttttttaatggatgaaaggtttttatgtttcccaggtgggcctggaacgcatagcctcacctccttatgcaccagaacaaccagcctgagtcaccgtggctcccaaaacacatgcatttactttcattagaacttcagctggccggacgcggtggctcacgcctgtatcccagcactttggaaggccgaggcgggtggatcacgaagtcaggggttcgagaccagcctgaccaacatggtgaaaccccatctctactaaaaatacaaaaattagctgggcgtggtggcgggtgcctgtaatcccagctactcaggaggctgaggcaggagaattgcttgaacccgggagtcggaggttgcagtgagccaagatcgtgccactgcattccagcctgggcgacagagcaagactctgtctcaaaaaaaaaaaaaaaaaaaaaaaacttcagccatgtctcaggatatggtagttttggaattgagagtttcagatgttttgtgcttgaagctggttcccagcctctctgcctcggtaaggcttgaggtctttttctgactaggtatgtatttttcatggttccaaaactgaaacagaatgaaaggatacatagccaagtatcttcccccacttcctacctgacggcagacatattgtctctcttgtactatattttgtaaggggtagatgtctaagctagcaaatgatcactcttcacaggagagctatgaggaaactagtgaatgtgctgtttcaaagcccattttggcatgtgccagttagactgtaggaggcattttgtatatttttaattgttgatgactattttatttatttattggagacagtctagctctatgccctaggctggagtgcagtggcgcaacctcagctcactgcaacctccgcctcctaggttcaagcttgtctcagcctcccgagtagctggaaggcattacaggcacctgccaccacacctggataatttttgtatttttagtagagtcggggttttgccatgttgaccaggctggtctcgaactcctgacctcaggtgatctgctggcctcaccctcccaaagtgctgggattacaggcatgtgccaccatgcccagcctgatgacttttttttttttttgagatggagtctcgctctgtcacccaggctggagtgcggtggcgcgatctcggctcactgcaagctccacctcccgggttcacgccattctcctgcctcagcctcctgagtagctgggactacaggcgcccgccaccatgcccggctaatttttttttgtatttttagtagagatggggtttcaccatgttagccagggtggtctcagtctcctgacctcgtgatgtgcccgcctcggcctcccaaaatgctggggttacaggtgtgagccaccgcgcctggccctgatgactattttaaaatcacttctggcttcttttccaggtgataatagaacgatacaagggtgagaagcagcttcctgttctggataaaacaaagttccttgtacctgaccatgtcaacatgagtgagctcatcaagataattaggtattcagtcacctttgtttcataatatatttcctttgagtaacttcttattctttatgaaacttacagttaaatctttagttctggttaaaatctttaaaaaatatttttcagctgaattcagttctgattcagttatgattaaaacaatttcaacttaaactataaaatgtttctttttttgaggttttatattacttgctagactgcagagcccgtttctttcatcataacatcgtttagatgtttcctgtttaaaatcagtgttacaagttattaaggtattgtacagcaaagctagttaaagagaatgtagactctgtgagtggcagtaaatggcacaggcttagatcttagaatagttcagaaactgtatttgaactgctttcttatattagacagtttaacagctgttcagacagtatactagtttaaaatcagcctaatatgtaatctttcagtgattatagctcatgtcaatataatcaaaggaagtgtcctgtgctttatgagaagtattggattcaagagcatttagaacatttttatattttaccgatcagagtgggtgatattttaacacatgcttcatccttcttgtattgttgtcaatatttcttcacgttgttttctttcaatagaaggcgcttacagctcaatgctaatcaggccttcttcctgttggtgaacggacacagcatggtcagcgtctccacaccaatctcagaggtgtatgagagtgagaaagatgaagatggattcctgtacatggtctatgcctcccaggagacgttcgggatgaaattgtcagtgtaaaaccagaaaaaatgcagctcttctagaattgtttaaacccttaccaaggaaaaaaaagggatgttaccaactgagatcgatcagttcatccaatcacagatcatgaaacagtagtgttcccacctaggagtgttaggaagttgtgtttgtgtttcaagcagaaaaactgagctccaagtgagcacattcagctttggaaactatattatttaatgtaggctagcttgttttcaaattttaaaagtttaaaaataaaatactttgcattctaagttgccaataaaatagaccttcaagttattttaatgctcttttctcactaataggaacttgtaattccagcagtaatttaaaggctttcagagagaccctgagtcttctcttcaggttcacaaaacccgccgcctttttgggtagaagttttctactcagctagagagatctccctaagaggatctttaggcctgagttgtgaagcgcaacccccgcaaaacgcatttgccatcacagttggcacaaacgcagggtaaacgggctgtgtgagaaaacggccctgactgtaaactgctgaaggtccctgactcctaagagaaccacacccaaagtcctcactcttgcaggggtagacatttctggtttggtttgttctctagatagttacacacataaagacaccactcaaaaggaaacttgaataatttataattttgatcgagtttcttaaaagaccctggagaaagagtggcatttcttctgtttcaggttttgtctgagttcaaactagtgcctgtgttgttacggaaagcagcagtgtaccagtgtcactctggagtacagcgggagaaacacaaaatagtataactgaaaacattaacattcagacacactcccttctgccttccggcttaaagctgtggatgatccacgtttttgtttttttaatgttaaatgtgtaactcagtattactgaaaaggtacccacattttgaatagtagttatcactcttaggtcagacagccatcagaattctcccacaccaagtgcatgtcagttgtggagaaaacatagcaaaaagagccgtacgctctttacagatactaatgtcaagagttaaacctcctcaggttcaacctgtgataaaagactagtgcttcccagtacttgcatggggttcactatttatagttttcttgggagtatcacaggaaaatcacaattacaccactttagaccctatgtgtagcaggtcacaacttacccttgtgtgtttagatgtgtatgaaatacctgtatacgttagtgaaagctgtttactgtaacggggaaaaccagattctttgcatctgggccctctactgattgttaaaggagttcctgtcacctgctccccccacccccgcatgcgtctgtccacttggctaacttttaatatgtgtatttttacattatgtatattcttaactggactgtctcgtttagactgtatacatcatatctgacattattgtaactaccgtgtgatcagtaagattcctgtaagaaatactgctttttaagaaaaaaaataacatgctgaggggtgacctatatcccatgtgagtggtcactttatttataggatctttaaaacatttttaatgaactaagttgaataaaggcacaattaaaaactgtcatcaaagcccagt

SEQ ID NO: 8300 - DNA, 5975 bp, Homo sapiens
gaacaaagagtagaagatgtccgacttattcgagagcagcatccaaccaaaatcccggtaggtagtctcaggcctcggtttcagtcatgaatgtacgcagaggagagcaccgcataagtgcatccacttgacgggtttttacaggaatcaccagacagccaaaccctgggtgtcagtttcacaacctagagagaggtatcctttttttaagagacagggtctcactctctttcccaggctggagtgcagtggtgcgatcgtagctcagtgcagtctcagccaccttgtgctcaagcagtcctccctcctcagcctcctgagtagctctgactagaggcacacaccactacacctggctaattttttaagttttttgtagagacagggtcttgctatgtttaacaacccaggctgatctcaaactcctgggctcaaatgatcctccaccttgacctctcaaagtgttgggattataggcatgagccactggctggcctcaggtgccaagatttctgtactgcctctaatttctgctaccacttaaactcaggcaggtggagcctacacactgatatttccttgtggatatcacacttcagaacgtgtccgctagataaagctctcaaacttaccaaggaaagtgatgacagcttgactcggccttacacagaaccctatgtaggtctcacacaatagaacaatgtacaaataagcatttttctttcccaaagaagcatgtaaagatttcccattcctgccactcaacttctctttgttgtgacagggtggaagaattactgtatatagaaaagatgtccgcagcgttcagtaaacacagacactaatgagactcagaggctcatctgtggtcaggtattataacagcttaaaactaaaaaaaaacaaaatattttgctccatggaaaggaagcatagtgaggagccgaatggattatttatttatttatttatttattttgagacggagtcttgctgtgtcgcccaggctggagtgtagtggcgcgatctcggctcactgcaacctccgcctcccaggttcaagtgattctcctgcctcagcctcctgaatagctgggactacaggcacgtgccactacgcccagctaatttttgtatttttagtagagacagggtttcaccatgttggccaggatggtcttgatctcttgacctcatgatccgcccacctcggcctcccaaagtgctgggattacaggcgtgagtcaccacgccggcctgatggctttatttaaattcataatatgaaactatatgtgttccctgtgtagttcaaatacgtgtgtgtgtgtgtgtgtgtgtgtgtgtgtgtgtgtgtgtgtataaaattttttttttttttttgagatgcagtctcgctctgtcacccaggctggagtgcagtggcgtgatctcggctcactgcaagctccacctcccgggttcacgccattctcctgcctcagcctcctgagtagctgggactgcaggcgcccaccaccatgcgcggctaattttttttgtatttttagtagagacggggtttcaccatgttagccaggatggtctcagtctcctgacctcatgatctgcctgccttggcctcccaaaatgctgggattacaggcgtgagccaccgcacctggcctcaaatatttgtatttttaacctcatttaaagaaatatgttatcagaatgaaagtaccaggtcattatgcacaaaactttgtctctagaaccagctaataatggactctacttgccttgtcaaatataattttttcatgtcaactagacagtctctagtgtggaaaaacattgagcatattactataattaggaacttacacatttattaaaacacaggcatttactttttttttttttttaatggatgaaaggtttttatgtttcccaggtgggcctggaacgcatagcctcacctccttatgcaccagaacaaccagcctgagtcaccgtggctcccaaaacacatgcatttactttcattagaacttcagctggccggacgcggtggctcacgcctgtatcccagcactttggaaggccgaggcgggtggatcacgaagtcaggagttcgagaccagcctgaccaacatggtgaaaccccatctctactaaaaataccaaaattagctgggcgtggtggcgggtgcctgtaatcccagctacgtgagaggctgaggaacgagaatcgcttgaacccgggaggtagaggttgcagtgagccaagatcgtgccactgcattccagcctgggcaacagagtgagactctgtctcaaaaaaaaataaataaaaaaaaaacttcagccatgtctcaggatatggtagttttggaattgagagtttcagatgttttgtgcttgaagctggttcccagcctctctgcctcggtaaggcttgaggtctttttctgactaggtatgtatttttcatggttccaaaactgaaacagaatgaaaggatacatagccaagtatcttcccccacttcctacctgacggcagacatattgtctctcttgtactatattttgtaaggggtagatgtctaagctagcaaatgatcactcttcacaggagagctatgaggaaactagtgaatgtgctgtttcaaagcccattttggcatgtgccagttagactgtaggaggcattttgtatatttttaattgttgatgactattttatttatttattggagacagtctagctctatgccctaggctggagtgcagtggcgcaacctcagctcactgcaacctccgcctcctaggttcaagcttgtctcagcctcccgagtagctggaaggcattacaggcacctgccaccacacctggataatttttgtatttttagtagagtcggggttttgccatgttgaccaggctggtctcgaactcctgacctcaggtgatctgctggcctcaccctcccaaagtgctgggattacaggcatgtgccaccatgcccagcctgatgacttttttttttttttgagatggagtctcgctctgtcacccaggctggagtgcggtggcgcgatctcggctcactgcaagctccacctcccgggttcacgccattctcctgcctcagcctcctgagtagctgggactacaggcgcccgccaccatgcccggctaatttttttttgtatttttagtagagatggggtttcaccatgttagccagggtggtctcagtctcctgacctcgtgatgtgcccgcctcggcctcccaaaatgctggggttacaggtgtgagccaccgcgcctggccctgatgactattttaaaatcacttctggcttcttttccaggtgataatagaacgatacaagggtgagaagcagcttcctgttctggataaaacaaagttccttgtacctgaccatgtcaacatgagtgagctcatcaagataattaggtattcagtcacctttgtttcataatatatttcctttgagtaacttcttattctttatgaaacttacagttaaatctttagttctggttaaaatctttaaaaaatatttttcagctgaattcagttctgattcagttatgattaaaacaatttcaacttaaactataaaatgtttctttttttgaggttttatattacttgctagactgcagagcccgtttctttcatcataacatcgtttagatgtttcctgtttaaaatcagtgttacaagttattaaggtattgtacagcaaagctagttaaagagaatgtagactctgtgagtggcagtaaatggcacaggcttagatcttagaatagttcagaaactgtatttgaactgctttcttatattagacagtttaacagctgttcagacagtatactagtttaaaatcagcctaatatgtaatctttcagtgattatagctcatgtcaatataatcaaaggaagtgtcctgtgctttatgagaagtattggattcaagagcatttagaacatttttatattttaccgatcagagtgggtgatattttaacacatgcttcatccttcttgtattgttgtcaatatttcttcacgttgttttctttcaatagaaggcgcttacagctcaatgctaatcaggccttcttcctgttggtgaacggacacagcatggtcagcgtctccacaccaatctcagaggtgtatgagagtgagaaagatgaagatggattcctgtacatggtctatgcctcccaggagacgttcgggatgaaattgtcagtgtaaaaccagaaaaaatgcagctcttctagaattgtttaaacccttaccaaggaaaaaaaagggatgttaccaactgagatcgatcagttcatccaatcacagatcatgaaacagtagtgttcccacctaggagtgttaggaagttgtgtttgtgtttcaagcagaaaaactgagctccaagtgagcacattcagctttggaaactatattatttaatgtaggctagcttgttttcaaattttaaaagtttaaaaataaaatactttgcattctaagttgccaataaaatagaccttcaagttattttaatgctcttttctcactaataggaacttgtaattccagcagtaatttaaaggctttcagagagaccctgagtcttctcttcaggttcacaaaacccgccgcctttttgggtagaagttttctactcagctagagagatctccctaagaggatctttagggcctgagttgtgaagcgcaacccccgcaaaacgcatttgccatcacagttggcacaaacgcagggtaaacgggctgtgtgagaaaacggccctgactgtaaactgctgaaggtccctgactcctaagagaaccacacccaaagtcctcactcttgcaggggtagacatttctggtttggtttgttctctagatagttacacacataaagacaccactcaaaaggaaacttgaataatttataattttgatcgagtttcttaaaagaccctggagaaagagtggcatttcttctgtttcaggttttgtctgagttcaaactagtgcctgtgttgttacggaaagcagcagtgtaccagtgtcactctggagtacagcgggagaaacacaaaatagtataactgaaaacattaacattcagacacactcccttctgccttccggcttaaagctgtggatgatccacgtttttgtttttttaatgttaaatgtgtaactcagtattactgaaaaggtacccacattttgaatagtagttatcactcttaggtcagacagccatcagaattctcccacaccaagtgcatgtcagttgtggagaaaacatagcaaaaagagccgtacgctctttacagatactaatgtcaagagttaaacctcctcaggttcaacctgtgataaaagactagtgcttcccagtacttgcatggggttcactatttatagttttcttgggagtatcacaggaaaatcacaattacaccactttagaccctatgtgtagcaggtcacaacttacccttgtgtgtttagatgtgtatgaaatacctgtatacgttagtgaaagctgtttactgtaacggggaaaaccagattctttgcatctgggccctctactgattgttaaaggagttcctgtcacctgctccccccacccccgcatgcgtctgtccacttggctaacttttaatatgtgtatttttacattatgtatattcttaactggactgtctcgtttagactgtatacatcatatctgacattattgtaactaccgtgtgatcagtaagattcctgtaagaaatactgctttttaagaaaaaaaataacatgctgaggggtgacctatatcccatgtgagtggtcactttatttataggatctttaaaacatttttaatgaactaagttgaataaaggcacaattaaaaactgtcatcaaagcccagt

SEQ ID NO: 8301 - DNA, 535 bp, Homo sapiens
agtggccaacctcatcatctagggaactctgagcccagctcccgtttaagtaggcacctaaaagtctgttgaaaaatacaagggagtgacctgagaaaactgccttcccaggccagctgctcaatagaagcgtctgcgtcccttgtcccgtcttcggagctccccgtgggtgctgtagccccactcacttccctgacatcaccagagcacatgctcagtatgttgccacctcccaaatccagaagggtgtggtcttagatgccatggaagcgattctgtacaatgccgagtcagtcacaggctgatgtggcagctggtggcttgtgtcactgtgtcacccacctccgcagcaggcctgctccctccctgggaaagagctacttcagggtagggccacattgccaaggtatcttgagatccattcatgccaactttcattttcatggaaactcgtgaactcgtgctggaacatctttaaccccaaatcaggaatttacgtctttgttattagcagggacacttaaaaaaaaaaaaa

SEQ ID NO: 8302 - DNA, 535 bp, Homo sapiens; identical to SEQ ID NO: 8301

SEQ ID NO: 8303 - DNA, 803 bp, Homo sapiens
gccccagtccagcctacagcttccccagcattctagccttggagaaatgacaatggccacacacacacacacacacacacacacacacctctgacgccagctccccaggtgggagtgggcccaaacccagcccctcctgtccacctctccaggtctcactctcttcctgccatctacaagaggagaggacctggctgggccccaagccttggacaaatcctgggaaaacctgagactagaacccttgtcttcctcttacccaaattctaggatagctctgaagcctgctggaaacttggtggcatccaacctgcctcattcggcctgaccggtagaggcaggtggcctgtggacagaagtaatcctctttctgctcaccccaggcagacacaactgcctatgttcccccgatgagaggaaacaggctgagagaagaaaaatgactgctccaggattataccacagtggagagcgggtcacaggacatgatgcagggtccaggtttctgttttgatcaagtcttacatgcccattcagcttctaggcccccctcacctccctgccctcattcacaagtggccctgagacacgtgaacacctccctcctatgcatcacaaaccttctccaccgagctttggtgctttggcctctggcacacctaactagcattggcagaggagagtctacactctcttcctcattcagggaagatgctttaagaaatcctgcctctgtgcagcagaggagctggaggcagctccccaggcatccctccccaaataaaggcttatgtactggtgaa

SEQ ID NO: 8304 - DNA, 805 bp, Homo sapiens
gccccagtccagcctacagcttccccagcattctagccttggagaaatgacaatggccacacacacacacacacacacacacacacacacctctgacgccagctccccaggtgggagtgggcccaaacccagcccctcctgtccacctctccaggtctcactctcttcctgccatctacaagaggagaggacctggctgggccccaagccttggacaaatcctgggaaaacctgagactagaacccttgtcttcctcttacccaaattctaggatagctctaaagcctgctggaaacttggtggcatccaacctgcctcattcggcctgaccggtagaggcaggtggcctgtggacagaagtaatcctctttctgctcaccccaggcagacacaactgcctatgttcccccgatgagaggaaacaggctgagagaagaaaaatgactgctccaggattataccacagtggagagcgggtcacaggacatgatgcagggtccaggtttctgttttgatcaagtcttacatgcccattcagcttctaggcccccctcacctccctgccctcattcacaagtggccctgagacacgtgaacacctccctcctatgcatcacaaaccttctccaccgagctttggtgctttggcctctggcacacctaactagcattggcagaggagagtctacactctcttcctcattcagggaagatgctttaagaaatcctgcctctgtgcagcagaggagctggaggcagctccccaggcatccctccccaaataaaggcttatgtactggtgaa

SEQ ID NO: 8305 - DNA, 837 bp, Homo sapiens
ggctggtagaggatgcgccacagtgccatgagcacttttcccggattacccgagacttgcagggcgaggccgaccacccaggcattgggctgggctggggcaatgccatgctgctgatggagtttgtggagggcaccgagcacgacgtggacctggtgttgtttggtgggcggttgctggctgcctttgtctccgacaatggccctacgaggctgcctggcttcactgagacggcggcctgcatgcccaccgggctggcaccagagcaggaggcacagatggttcaggcagccttccgctgttgcctgggctgcgggttgctcgatggagtcttcaacgtggagctcaagctgaccggggctgggcctcggcttatcgagatcaacccccgcatgggtggcttctacctgcgtgattggatcctggagctctatggtgttgacctgctgctggctgctgttatggtggcctgtggcttgcgtcctgccctgcccacccgcccacgtgctcgtggccatctggtgggcgtcatgtgccttgtgtcccagcacctgcaggccctgagttccaccgccagccgtgagaccctgcaggccctgcacgaccgtggactgctacgcctcaatctgctggaggaggccctggtgcctggcgagtatgaggagccctactgcagtgtggcctgtgccggacccagccccaccgaggcccgtctccgcctgctgggcctctgccagggcctgggcatcgatgggcccagctaccctgttgcccacttcctgtctcacttcaaatagcactggggtcagggggcagggaagcagtgctgggtggagg

SEQ ID NO: 8306 - DNA, 835 bp, Homo sapiens
ggctggtagagtgatgcgccacagtgccatgagcacttttcccggattacccgagacttgcagggcgaggccgaccacccaggcattgggctgggctggggcaatgccatgctgctgatggagtttgtggagggcaccgagcacgacgtggacctggtgttgtttggtgggcggctgctggctgcctttgtctccgacaatggccctacgaggctgcctggcttcactgagacggcggcctgcatgcccaccgggctggcaccagagcaggaggcacagatggttcaggcagccttccgctgttgcctgggctgcgggttgctcgatggagtcttcaacgtggagctcaagctgaccggggctgggcctcggcttatcgagatcaacccccgcatgggtggcttctacctgcgtgattggatcctggagctctatggtgttgacctgctgctggctgctgttatggtggcctgtggcttgcgtcctgccctgcccacccgcccacgtgctcgtggccatctggtgggcgtcatgtgccttgtgtcccagcacctgcaggccctgagttccaccgccagccgtgagaccctgcaggccctgcacgaccgtggactgctacgcctcaatctgctggaggaggccctggtgcctggcgagtatgaggagccctactgcagtgtggcctgtgccggacccagccccaccgaggcccgtctccgcctgctgggcctctgccagggcctgggcatcgatgggcccagctaccctgttgcccacttcctgtctcacttcaaatagcactggggtcagggggcaggaagcagtgctgggagga

SEQ ID NO: 8307 - DNA, 1849 bp, Homo sapiens
ggggaatacgggctgtcagcaagacgctgcaggggtcaaggaggagagcaatgaaggacaggaagcagtgggcattcaagactcgctggccttttttccattttctcatgctttctttggcacttgactgctacaggtttttaacttcctgaactgtaccgtccatcatggaaggctctcctcacttactaaggctaaaaacacaggctccatagcctcttcattttatcacactaatggtcgaaaggttcttatcctattttgcatttgtttcttgaggggaacttgagaagcaaaactctggagccatgctccccaggtgcaaatctgagctctaccactccctgctctgtgaccatgggcaagtcacttagcacgctatgcctcagattcatttttaaaattaggatggtaatactagtatcttcacaagattttatgaggattaaattagctgttgggcactgttgtggttaatttcaggtgtcaacttggctaagctaagtgatacccagatagctggtaaggcattacttctgggcgtgtctgtgagagagtttctgcaagacattagcatttgattcagttgactgagtaaagaagatcaccctcactgatgtgggtgggcagcacacaatccattgagggcccagatagaaagacagagtgaagggtgaattccctctctgcttaaactgagacatccatctcctcctgccctcagatatcagtgctcctggttcttgagccatcagatttgaactgggacttacactgttagcccctcaccccagtttctagccttaaggtctaatggaatttgactgtcagtcctgtctttcttttgatttctcccttttggaatgggaatgtctatcctatgcctgtcccccactgtattttaaaagtgcataactcgttttgtttaacgggtttatagctggaggggaatttggcctcagaatgaatcatatcttaggtcccacccagatcagatttagacaatatttagatgagactttggacttagattttaaggttgatgcttgactttaaatgctattaggatggaacaaatgggaggacataaattttgagaaaacggggcgaatgctatagatggaatatttttgttcctccaaaattcgtatgttaaaacctaatccccaatgtgatagtgtttggaggtggagtcattggggggtgattaggttttgaggatgaaaccgtcatgaatggaattcatgcccttataaaagggaccccagagaacttccttgactcttacacagcaagaaggcagccatccatgaaccaggaagaggaccctcaccagacagtgtatgtgccagcactttgatctaggacttcccagcctctagaactatgataaatacatttctattatttataagccacccagtttatgatattctattaaagccacctgaacaatgtaaggcaggaacatgataaatgctcagtaaatgttaagggaaaaaatcctccttgaaaacataacacatttattcagcatatgtctgataaaatccttgtagtatggagttgatatcagggttgtgcagttcatctccgtcctcacaccatgtccagcggcttcctgaagactctgcacagtgacttctatgtgaactgaagcctgtgccacagtcaatacttaggaggtgatggtgaaaaacggtcatggttctgaaaataagccatgcatttgtatgttggaaatcttccctttgcataactggaaaacaaatctatgagtttttcagcaaaagtggagacataaaaaaatcatgcgggcctaaataaattaaaaatcaattaaaggcaa

SEQ ID NO: 8308 - DNA, 1849 bp, Homo sapiens
ggggaatacgggctgtcagcaagacgctgcaggggtcaaggaggagagcaatgaaggacaggaagcagtgggcattcaagactcgctggccttttttccattttctcatgctttctttggcacttgactgctacaggtttttaacttcctgaactgtaccgtccatcatggaaggctctcctcacttactaaggctaaaaacacaggctccatagcctcttcattttatcacactaatggtcaaaaggttcttatcctattttgcatttgtttcttgaggggaacttgagaagcaaaactctggagccatgctccccaggtgcaaatctgagctctaccactccctgctctgtgaccatgggcaagtcacttagcacgctatgcctcagattcatttttaaaattaggatggtaatactagtatcttcacaagattttatgaggattaaattagctgttgggcactgttgtggttaatttcaggtgtcaacttggctaagctaagtgatacccagatagctggtaaggcattacttctgggcgtgtctgtgagagagtttctgcaagacattagcatttgattcagttgactgagtaaagaagatcaccctcactgatgtgggtgggcagcacacaatccattgagggcccagatagaaagacagagtgaagggtgaattccctctctgcttaaactgagacatccatctcctcctgccctcagatatcagtgctcctggttcttgagccatcagatttgaactgggacttacactgttagcccctcaccccagtttctagccttaaggtctaatggaatttgactgtcagtcctgtctttcttttgatttctcccttttggaatgggaatgtctatcctatgcctgtcccccactgtattttaaaagtgcataactcgttttgtttaacgggtttatagctggaggggaatttggcctcagaatgaatcatatcttaggtcccacccagatcagatttagacaatatttagatgagactttggacttagattttaaggttgatgcttgactttaaatgctattaggatggaacaaatgggaggacataaattttgagaaaacggggcgaatgctatagatggaatatttttgttcctccaaaattcgtatgttaaaacctaatccccaatgtgatagtgtttggaggtggagtcattggggggtgattaggttttgaggatgaaaccgtcatgaatggaattcatgcccttataaaagggaccccagagaacttccttgactcttacacagcaagaaggcagccatccatgaaccaggaagaggaccctcaccagacagtgtatgtgccagcactttgatctaggacttcccagcctctagaactatgataaatacatttctattatttataagccacccagtttatgatattctattaaagccacctgaacaatgtaaggcaggaacatgataaatgctcagtaaatgttaagggaaaaaatcctccttgaaaacataacacatttattcagcatatgtctgataaaatccttgtagtatggagttgatatcagggttgtgcagttcatctccgtcctcacaccatgtccagcggcttcctgaagactctgcacagtgacttctatgtgaactgaagcctgtgccacagtcaatacttaggaggtgatggtgaaaaacggtcatggttctgaaaataagccatgcatttgtatgttggaaatcttccctttgcataactggaaaacaaatctatgagtttttcagcaaaagtggagacataaaaaaatcatgcgggcctaaataaattaaaaatcaattaaaggcaa

SEQ ID NO: 8309 - DNA, 299 bp, Homo sapiens
ccaatcctttttttttttatttttatttttttgagacggagtctcgctctgtcgcccaggctgcagtgcgttggctcgatctcggctcactgcaagctccacctcctgggttcacgccattctcctgcctcagcctcccgagtagctgggactacaggcgcccgccacgacgcccggctaattttttgtatttttagtagagatggggtttcaccgtgttagccaggatggtttcagtctcctaacctcgtgatccacctgccctcagcctcccaaagtgctgggattacaggcgtgag

SEQ ID NO: 8310 - DNA, 252 bp, Homo sapiens
tttttttatttttatttttttgagacggagtctcgctctgtcgcccaggctgcagtgcgttggctcgatctcggctcactgcaagctccacctcctgggttcacgccattctcctgcctcagcctcccgagtagctgggactacaggcgcccgccacgacgcccggctaattttttgtatttttagtagagatggggtttcaccgtgttagccaggatggtttcagtctcctaacctcgtgatccacctgcc

SEQ ID NO: 8311 - DNA, 12593 bp, Homo sapiens
tgtacctccagaaaacattatttacataagtccttgcaagcaagtgtctcagataaagtatgcggcaaaagttggagtgaatatcctgacatgtgacaatgaaattgaattgaagaaaattgcacgtaatcacccaaatgccaagtaagtataaaattaagtacttgaaaatattatttagcacttagagggttgggtttgtcttttgtctgggaagaaaggagcatttgtggtagggcaatgatgtgtatcataattataacttatttaaagggcctctgtgggaaacactagtaacattttattggctctctacctctgatccttcatgtggaattggaatttaaaaaaataagagcagtttggggatatgatctaataatcttcaaggaatccttgatagttggtgtgataatcaaattagggccatggctgtattttcattatttctataactttgtttgatgtttgataacgttaggaacaggataaactttggtcagcattttttcctgtttagctgaggatttaatctaccctaggccatagttcttgaatggtcatctttactgacagtgtcttcgaagcctagaccatagatttggggggttttgtttttaaggctaatacttttatttttgaacatgaagtttaattttttacttgcatcttcatgtatccagagaattttttttttttcttgattagaaagtttactttttaaaggctgggcgcagtggctcacacctgtaatcccagcactttaggagactgaggctggtggatcatttaaggtcaaggtggcctgcgcctgtaatcccagctacttgggaagctgaggcaagagaatcccttgaacccaggagccggaggctgcagtgaggcaagatcgagccactgcactccagcctgggcaacagagcaagactccctcataaaaaggtttacttttttaaaagcaaaaagatttaaggcaaattttatgttttcacaaactggtatatcgagagggcttaagaatatactaaaagcatattgaattatgcagttgttggcttactttttaatgagttatgtgtgtttccggaaatgaattctatctgtattttctttgtatgtctataattttcatactgactttaatggtgtacttaagatatcctgacagcattgattactctggtaaatctttgtgtggataaaagccttgttgggaaaattctagggaaccacttgtttttctaaaaaatattgttctgtgatcctctgaagacaagctgtgatttgtgatgtttagtatgttagattgtggactggcatcttcttgatggagctgattctaaccttagaataatttttgctttcatcaatcttgtcctctgattatcaaattagggccatagctgtattttcatggccatattattaaccttcttagtttatgtaattattacatccataggaaaacagttacacaaaaagaatttgtatattttcaacttctagcagtttgtaattactcagctcctgaaattaaagaaatttaatcagttttagtcatcttgtcttggttgccatggtttggaaggaaataccaaatagatttgaatcagtagactagaaggctgctgtttaaacacatgaaataattttttaaaaagctttctgggttgggcgcagtagctcatgcctgtaatcccagcacttggggaggccgaggcgggtggatcacttgaagtcaggagtttgagaccagcctggccaacatggtgaaaccctgtctccactaaaaataaaaaaaattagctgggcgtggtggtgcacccttgtatttccagctactttgggaggctgaggcaggagaattgcttgaactcaggaggcactctcatgaggcggaggttgcagtgagctgaaattgcgccactgcactccagcctgggcgacagagtgaaactccatctcagaaaaaaaagaaaaaaaaatttaaaaaatgcttcctatttttttccagttagagacctgctgggatgtaacaatgttagtaggaagaatgtttgcagtaaccatggaggtttagctagttagcacaatcaaagaaatttgaagacatttaaagccctgatatttttattgaaagacaatgatggcattgctattcaatttagtcttcctaggtggatttatggactgatggacttcatttgaaagtaatgtcgtctttcattacagagcccaaccaactcttgatgctacaacagagtcttaacttgctgcattttccaaaatcccatccttgtaagcttcatgctttaggccctaattgctagttttttctctatacaggattgtttttcattaggttcacttgattcatccgtcgctggatttgggagcactggcaacataatcaacacacttcctacaatcttcaggcttcacatgtgctgatgatgatgtaaaccaactctgccccaatcatctccccttctcttagggtcttactacatattgcaacagaagataatattggaggtgaagagggtaacatgaagtttggcactaccctgaagaactgtaggcatctcttggaatgtgctaaggaacttgatgtccaaataattggggttaagtgagtatttgttttaaacttttaaagctgtgaacattttatggtggtaacctgtctttctggttattgatttaagactttatttgcatgaaatctaagatgcaattttttctagtcttttaacacacatgtatgtgttttcttcttagtttaggcaaaacaacttaaatatgccttgtcccttttcatactgttttgtgactgtacctccttccccacagtaaaaagaatagcaaataatattttgattcagttagtgcagagtaacttaaatcgccgccttttaaattggatgggaggggatttgctagaattcttaatgaaaataaaagtgtcagacttttttgtccttttaacgattactctgggggacttcaataaattagactttgctttagccttttaattttatatgtgaggaaaccgagactccaagaggttcaaatacttgataatagcctcagaactaattacaggcatagtaacactaagccctagatgttatttgccagcccattgctacttttactaaagtaaaaaggtcttgctttttcaaacactcacaaagatgtattgtgtatctttctttaattttattatttattttttgagatagtatctcattctgtctcccatgctggagtgcagtggcacgatcacggctcactgcagcctcaaactcctggctcaagcaatcttcctgccttggcctcccaaagtggtgggattacagatgtgagcctctgtgcctggccttattgtgtatctttctatactactttgtacataaataggtggtagtcttttaaacaaagaatgggatcatgctgtgccttacacaatagataacattccatgtcagtctagttttaagttttaatttaagtcgacataaaaattaatgaagtactatctcgaatagatgaagggaaaagaagaatggactttacgggtacagttctatggattttagtacttgtgtgaccactgccacaatcaggaagtattctattctgaaactttatcactagtaatactagtgaataatagtaatgctgttactcagcttgattaatgttcatttgtatttatttcacaacagacacatttttgtatttggttgggtaaaattgaatgttcagttttatgctcaactgaatgtgatacgatttggtagtgcttgttacttcactatataaacataaaagtgccacatatacataaaagcacaccttattgtataaccgtggaacagtactgataattgacttattgttaagaatttttgtttatagaattacagttttatcttggcattgccttttctataaagctggtactgtaacttttgggtaattagaagctaatgcttctaatactttaaatatttggtaaagttaatggggatacttaatggtatgaatatgatgagtgacagttgaaagaaattacaggaggtgtctctacaactttctgctcctttaaatttagtattctatgtgtttcagatttcatgtttcgagtgcttgcaaagaatctcaagtatatgtacatgctctatctgatgctcgatgtgtgtttgacatggctgtaagttctttcttttaagttattttgatattttattttagccaggatgttaagttaaagactaagtattgttttctgcctgtgtgaattactctgactacattcaacgtgacacacacctcatttttattatataagcattcagagctctgtacagtcacaccttttaagcaggtaaaggagtgaaatagtaatttacttgcataagtctagaagagagtacaaataaaatcaaagagacagcatacctaacattgaataatctgtttctatcagtaaaaaaccaagaatttgctgtactaaagatcagaacagatatttacctccctaggagggggtttttaaaatgttctcatatccattacaatttggaaaaacatttaaattttttttttccatctctagggagaaattggctttacgatgaacatgttagacattggtggaggattcacgggaactgaatttcaattggaagaggtaaacttctcagtagatgacattaacagaataattgctttctttgttacttaagtggtggatgtgtagagcaggatttttacaatggcagaaactaaaccctataacatctctttaaaattatgttcttagaaaaggaataggcagttagtagacctagctaactttgaaaagtttgatagaattctttgaacattatcataaaacattttctatttcagttgtgtttctgtacttaatggcacaaatgatttaatacttagaaaacttcactactacctttttttttttttttttaaagtcttcctgtgttgcccaggctggagtggagtggcgcaattatagctcactatagcttccaactcctgggctcaagcgatcctcctgcttcaacctcccaagtagctgggacttaaaaaaaaaaaaaaaaaaattgagtctttctatattgcccaggctggtctcggaactcctggcctcaaatgatcctcctgtccccaagtgatcctcctgccccagcctcccaaagttttggggttacaggtgtgagccaccactcccagccaactttagcatttaggccagatacacgtcacacctgtttctcaccttcctgctctgccctccttccttctgtgatatctagaaactatgatttgaaaattttacttctgtttttagtgatcaagtatagaaaaatgacttaaaaaaaaaacaaaaacaaataccagtgggtatttgttattagagctatttttaaaattaatgccattctgatagttacaaaataaactgacttgaaagcatgcctaattaattgcttggagataactacaaagttgctaaggttcatgatctgtgattggaactgcttcattttcctagaaaattttgttaatatcaatctctgaatattgcgaattatctaatccaatattgaaaccatactgtggcatttaaaatccataggttaatcatgttatcagccctctgttggatatctactttcctgaaggatctggtgttaagataatttcagaacccggaagctactatgtgtcttctgcatttacactcgcagttaatatcatagcaaagaaagttgttgaaaatgataaatttccctctggaggtaagttataaagtttatagttttatttttgttggtagataattgcagttagtctggaaatgagcagatggtcatgaagttgtaggtggttttcagcttttaaaaatcttaaaactggccgggcgtggtggctcacgcctataatcccagcactttgggaggcagagccaggtggatcacaaggtcaggagttcgagaccagcctggccaatatggtggaaaccccatctctactaaaaatataaaacttagctggtcatggtggcgcacacctgtaatcccggctactcgggagactgaggcacaaaaatcgcttgaatccgggaggcagaggttgcagtgagccaagattgtgccactggactccagcctgggtgacaagagtgagactccgtctcaaaaaaaaaaaaaaaatcttaaagccaaggtcccattccataagacttccaaatccaactttcttggtactgatgtttagatacgtgtgttttagataaatgtctagcagatgattaattctcatccattattcagaactacttttattgtgatcttttctgttctccttacctcacatgggtcacagggaggctctgttttcacactttctcacataagggccacaaagagtccctgtaatctaactcaagtcaaaccaacaaaaaggcactagacagtaccatcttgttggctaatattgtaggaaatactgttttacattaagaagacttttttttttggctgtggactaatccacagcccataggaaagttgtccatttccccaatattgtcttttttttacagctttgtttttccttgcttagaatccagtccaggaccacattgaattcgtcatttctccttgaatctagataaagtttctcagctcattactttgtattttttaactttgacatttttgaagagtagaaatttcatagctgatccttagtttgggtttgttggatgattcctcatgattaattttttaggctatgcatttggggcatgaagtccactaaagtgttactctgttcttctcacttcatcatgttaggaggcacatgatagtggccaattctaatattgatgatgctaggtgttttttcttgttgttttgtcgcccaggctggagtacagtggctccatcagggctcattgcagtctccacctcccggcttaagcagtcctcctaccttcaacctcttgcatagctgggactacaggcatatgccaccatgcctggctaggtttttttctatttttattttgtagagggtttcgtcgtgtttctcaggctggtctcaaactcctgagctcaagtgatccacctgcctcagcctcccaaagtgctgggattacaaacttgagtcaatacacctggccttatgattttttttttttttttttttgagactgttttgctcttgttgcccaagctggaatgcagtggcatgatctcagctcactgcaacctccacctcccaggttcaagcaattctcctgcctcagcctcccaagtagctgggattacaggtgcgtgccaccacacccggctagatttttttttttttttttaatttaaatgctagttttgagcacttgtttaaggttgtgtcaggcaggtttctttccattgtgaagtggcaagtttaaattagagactctgtaaactacctgtttttaaccagattttcaccccattagttttagcatctattgttgaatttctaacttcattattgtttatattagttggcctttacttaaagaatatcttttccttccctcctgtttatgagtttagactcatagatctttattcaataggtttatataatctgttactcttatttttcccttgacatgtctccattattctcagagcaattcgttattttttggtatatcaagatgttccaggctcattttaaccttttaaatgagcctcagtcccgtaatcagttgtttctccagggagccttggtttgttttcgtggagagtgatattttaaaaacctgaaaattagtattggttgtgctaagagtagagtagctgtgagtagaatgggcgttttcaaaggtttcaaagtgaggtgagaggatctattgatccctgaagctcgaggctgcggtgacctgtgatcacgctactgcactgtagcctgagtaacagtgaggccctgtctctacacacacacacagattcccactggcagtgtatacatgtgagctctggttgctcctcccgctctctgatgttttgtagtgtcagtctttaagttgatccagtcagtaggttggtggtaatggtagtccattgtggttttaatttgcatttacctgatgactaacgatgtagagcactgttttctttttctttttctttttcttttcttttttttttttgtttttgagacagggtttttgctctgttatccaggctggaatgagtggcacaatctcaacttttatttttaattctacattcaaacacatatttaactccttgtgcatatattgccttccccttgctgatttgaaaagaaactaaaaagtgtttttccttgctgcttcatttcctctttttttgaaacagcaactatcagaaagtcttctagaatcttaatacttttttcttttttttttttttttttgagacagggtctcattctgtcacccaggctggagtgcagtagcacagccttggctcactgtctcactgtcttactgtaacctccgcctcccggattcaagggattctagtgcctcagcctcccaagtagctgtgattacaggcatgcaccaccacacctggctaatttttgtatttttagtagagatggagttttgccatgttgttcaggctgatcttgaactcctgacctcaagtgatcctcccacctcagcctcacaaagtgctaggattacaggtatgagccaccgcatccagccctagagcactcttttcttgtgctcattggttatcttcctttgtgaaatgcgtgctctatgtgtctttttaagtttaaatagtttgagaaatgtgaaaattacattaatttgtttcatatgagccattttattaaaaattcattttcccctttcctgttttattccagtagaaaaaaccgaaagtgatgaaccagccttcatgtattatatgaatgatggtgtttatggttcttttgcaagtaaactgtctgaggacttaaataccattccagaggttcacaaggcaagttttatcagaaatatcaaaacctatttggcattttataagctgagctgttatttttaagatgcttcccagttttttgaaaaacatcttagaatggggaaaaatgtcctttttgaggatttgcgttcttctggtggagtcccttttttagtttgttgcctttacgtggagttaatggtaccattgaggcttaagtagcaccctgcccttggctctaggccttttttccatgagcacattggatctgagacagtgaaaatacttatttactcacaaattcaatacctgcgtaagtatgagtaaaaattaaattgtaaaacttttcctacagaaatacaaggaagatgagcctctgtttacaagcagcctttggggtccatcctgtgatgagcttgatcaaattgtggaaagctgtcttcttcctgagctgaatgtgggagattggcttatctttgataacatgggagcagattctttccatgaaccatctgcttttaatgattttcagaggccagccatttattacatgatgtcattcagtgattggtaaggtgattttattttaaggcagatgggatatttgaactgtccttttagacttgctaataagttttaattctgtaatgaatgctaaacttagaagtacagtcatgtattgcctatacagtgtagttacttaatgatgggaatttgttctgacaaatacaacattaggcgattgtatgatggcataacctactacataatctaggccatgtggtatattgatcctaggctacaaacctgtacagcatgttactctgtttaatactgttggcagttgtaatgcagtggcgtttgtgtatcttaagttacttaaacatagaaaggataatacattgtgctatgacatgattgctgcgatgtaacgaggtgataggactttttaaacttcactgtaattttacggtataccacagtcatatgtgtagtctttgaccaaaacatcactctgcagtgcatgactatcatagaaaaatgatgatcttttaaaggtttttggaagactagttataatcctgttttattatccatttgttatgtgattacgtggtctttgggcttaaactgagaatttagctgattttttttctacgtaggtatgagatgcaagatgctggaattacttcagactcaatgatgaagaacttcttctttgtgccttcttgcattcagctgagccaagaagacagcttttccgctgaagcttaaacaggcattaacgcttctttagatctgaagttgcaggttaagcttgtctggtcaacattccagtgtggaaaaataatttaaacaatcttattctcttaattcttttggcaacaaaaactattagtaatagctatttgggaccagacaaaatcagctttcatctataattcattggggataatgggagatttagataatgtatccagatttaaacctaccagtttgtcctaccccttaagcgtttaaaataaaatatgcaacaaaatggatgacttagtggagatggaagcccattaattgggttccccattaaatcgtttacatacaagaacacagtttttatactaaggatttgtgtttaaagtcttgtaaagttcatgtctttcacccagatatatcaaatgttagaagaccagtgtgacttcattagataatgtttagtgtatttagaatgtgtaaatttgtgctttgaactgtagtttaataaatgtaaaattgcatcatagtatttgttgacctaatgtaacccttgtatgattgcaataaaattttgtgtagattttactgttttttcaggctaaaactttgggaaaggggctagctagcaaaggtagttttgaaatagatgtgtatatggactgttttgaagggtttttttctttatagcccagttaagttttgtttggctcggtgcatttttcatttatttaattagtaatttaagtaaagtgtttggtaaatcattgtgaagttcagattcattatggagagttgatgtgcagtaagcatgatgtttaacaattttaacaccaaaaatgttaatcctgcataaatcaactgtaataataaataggtgtttctgtatagatagaatgcatagagtaccttagtaaatctttgaatcacaatcttttggctgaaatggaagattctgttaaatactttgaataaacttggggggagggaaataaaattgcagaaaactgcagagcactaaaacttaaagaagggctacatctttatccagaaacctgttgctcttttgcacggaatgtttaaattcagagttgggatgggggttggggtgaagcacacttattatcttcagttgcagtgatttcaaatttaggattttttgttgttggtttgaactgtccccttagtttcttgttatttccaatttgttctgcttagtcattacttttaattcttttcttactaaaattttatggtggttgggggaagggagttagcatcactaacctgacagttgttgccaggaatttgctttgtttactgctagtatattagaaatcctagatctcagaatcacaatagtaataaacaacaggggtcattttttcctaacttactctgtgttcaggtgtggaatttctgtctcccaagaggaaatgtgacttcactttggtgccaatggacagaaaattctacctgtgctacataggagaagtttggaatgcacttaatagctggtttttacaccttgatttcgaggtggaaagaaattgatcatgaatctctaataaatttaaatctcttaaaccagtaggtgcttaatattttttgatttgattaatgcccatttaaatctcatgggttctattaaaaaaatatatatatagggccccaatccattgccatcaaattgcccttggacttttccaaggtatattatggggttttatgcaaaattccaagctaccatgtaactttttttaaccatttaacaaggagggggaactgtttcctaccttctttacatgttgtgcattgttgtggtccagaaatgccaaacctttttaaagatggtgcaactttgagtccttggcttgactatacaggccttgaacttcatggcatatcaactttgccatatctgcaggagagctgttctatatgaaatagctcagagttgcaaatatcacatgtgaatgatacggtaacttttaagaaatgtctgtattgtatttgaagactgtttgccataaatctgaaatttgaacctatgtatttcaatttggtatgctaaaaagttctgaattaatgtaaagttttttgttataatattgtaatctcagttcaaaagttaactgcaaatataaaacccaatgatttctatatagtaaattgaactgtaaaggtaacttgtgtgtgattctgaatacatagataaatgtttttattcctcatgttttactttggcttctatctgaaatagaggtaaaattttacatatcagcttta

SEQ ID NO: 8312 - DNA, 516 bp, Homo sapiens
cacgcctgtaatcccaacaattcaggaggctgaggcaggcagatcacctgaagtcaggagtttgagaccagcctggccaacatggtgaaatgccatctctactaaaaatacaaaaattagccaggcatggtggcgcacacctgtgccagctactcgaggctgaggcaggagaattgcttgaacctgagaggcagaagttgcagtgagtggagattgcaccaccgcactccagcctgggtgacagagcaagactccatctcaaaaaaagaaaagaaacacagtaatagtagaaacttaaattggcaggaatcaaaatgtaaaacaaaaattagtcttctacatttgagttgtgagtaaatcctatgaatcgcatccatcctgagaggaaaaaggtgtgatgcaagtaattacggcagcaggctttcataatgaggataaacctggcctaggaacaagcaacgaactagttctggtctttactggcatttgcattaagttaaagctaacctgaaaagt

SEQ ID NO: 8313 - DNA, 992 bp, Homo sapiens
aggaaaccttcctgagtttcagtttccttatttgtaaaatggagacaggagggaagaaagctaactcctgttgagtgcctgttatgttctcgggacagtgttagggaaatcagaggaattgttttatttaaagctgtccagtcctgcaaggtaggtataattggcctcatttaatagaccagaaaatggaggcaccggagcctaacaattttctcggccccacacagctggtaagtgatgaagccggaattcaaatctgggtcattctgactgcagagccaatgcgatttttatggtgccagcctgttgcctccgtgtggggctcataacttactccacagcggtgtcttattcaagttcgtccagaagcagatcctgagatagactacaagtagtttatttaggaagcctgggaaacatcagtcaggcagtcaggaaatgagacagggaatgggaggcagcccctgaaaaagtgtgttatcaattcaactaccactgtaagctattagagcttgttcacactggggaggctctgggaaccagtggagtgcatgtacctctgaattttcccatctgaggaaaaatccgagggagccaaggtatttatacaccaattcctgagagtagttaactgagggctacttctgggaggtggagtgttctaataatttgtaggtgcatatgttgtatcccgtgcttggcaaagtaggactctagcagcacaagaaagtcctcagcagagaaattcaggtgctggcagttggaagcaagccactgtgctctgaaatggtaaggacaaaggagtgggagggatgccgaaagcacctgctatggtggttttaagaattagaaacaggccgagcatggtggctcacacctgtaatcctagcactttgagaggccaagacaggcagattgattgagcccagaagtttgacactagcctgggcaacatggcaaaaccccatctctacaaaaaaaaaaaatacaaa

SEQ ID NO: 8314 - DNA, 551 bp, Homo sapiens
tcttcttgtataagtaaagagtagactggaagattttatgcaaattgctttcttcacttattgagatcttgcctctatcagtgtctgcatttgtgattcctttaataggagatccccatggattcttaaagtgaggaccattttgtggggcattttgtgagaagctatcagaaccctaaattaccactggtgaattgttttgacctgcctaaggagatttatattttaaaaaagaagacttgagaatcaaatttgtattctaattgggtgaccaaccatttctgtttacccaacactaagtaattttctgggacaagggacttttagtactaaaaccaggacaggttggtcactgtactgtaggtgaggtcacacatgggacctttcaaagttcaacctctgaaagattatgctcctgcaatataaacatatttcaaaatagcattgtattttaaaaatatcccaaatataaaggtggaaataaaaatagcttctttctagatttctaactgcaaaaatctgagtaagttgaacagaatgactttggtttt

SEQ ID NO: 8315 - DNA, 1412 bp, Homo sapiens
cttaacataactgtggttaccatgttggtatatgtgccttttagtcctttttcatacacaattttttttacaaagttataataataatttcttttcaaatttgtgccttatttcagttaacagtgtaaatgtttcccatttctaacaatgttttctcattgagtgaggtactgttaggttggtcagactgatagtttattgtacgtattgctgtaatatctttgtacatttagcttttccatgtttgtaccatatctttgggttttcagaagtctgtctctctctctgtttctctttttgtctgtcttttctatctctcaccttcatttggggagcattttgtgttctctttcacaggactaattaagttttattggatcttgaaaaacgggattagaaattttttcttacttatataattagaaaacaatgcttttggacttacattgccacggcagtttacacagttttattcccaaaaattgtagttttgtgactaggtgataaaaatgatctcctatatgtgccaaacttggtattctagacactcatacttaggatgtaaattgactgtagtccaataatttaatatgttgtgtttaattcttgtaatattttactcacaaattgaacttttccttaccaatttaatgtttgtaggcttaatttggcatctttgtcaggattattagacttctctgcattcttctgacttctccctaaactaatgtttagaactgaattgggtccagcaatttaagtggaaaatcagtatgactagagacttctagaaacttctggtgtcactgagatggtgaatttgatgattctgaccctacttgctcatctgtaaaagctattagaggattgttttaagcatttctattctatacaggtatatgtacaccatgtaataccactcagccataaagaagaatgaaataacatttttgcagcaatttgggtggagctgtaggccattattctaagtgaagtaactcaggaatacaaaactgaataccatatgttctcacaagcgggagctaagtcatgggtacgcaaaggcatacagaatagtaaaatagactttggagactgagacgcggggagaataggaagaagataagggataaaaaacgatatattgggtacaatgtatgctactttggtgatgggtgtagtaaaatctcagacttcaccactatacatttcatccatgtaacccaaaaccacttgtactccaaaagctattgaaataaaaaagatatttaaaaaaaaagaggccaggcaggttggttcacgcctgtaatcccagcactttgggaggctgaggcgggcggatcacttgaggtcaggagttcgggaccagcctgaccaacatggtgaaaacctgtctctactgaaaaaaaaaa

SEQ ID NO: 8316 - DNA, 360 bp, Homo sapiens
caaagaggtgccagcttgtgcacaaaatgagagaggagaaaagggtgggaggaggggccctggctctttttaacaaccagctcttgggggaacaaatagagtgagacctcaagcatgcctgaggaagagcattaatttattcttgagggttctgacccctccccaccatgcccaacaacatctcccattaggccccacccccaacattgagatcaaatttcaacaggagggacaatcatctaagtgatagcatagactcaggctatttactattctgttttcaagtatagattgagggcaacagcagcctttgttttctatgttgatggccaaaggtttatttttatattcttatactgt

SEQ ID NO: 8317 - DNA, 217 bp, Homo sapiens
  SITE (20): n equals a,t,g, or c
accagcctgaccaacatggnagaaaccccgtctctactaaaaatacaaaattagccgggcatggtggtgcatgcctgtaatcccagctactcgggaggctgaggcaggagaactgcttgaacccgggaggtagaggttgcagtgagccgggatcgcgccattgcactccagcctgggcaacaagagcgaagctccacccaaaaaaaaaaaaaaaaaa

SEQ ID NO: 8318 - DNA, 1591 bp, Homo sapiens
aaggaagagaagtagaatcagaagttaggacatctattgcttgatgcttctgggatgggtaagacgtagttctggtgatagaagttgaagctgcagcataatgagagatgaaagagaaactgctcttctggtgattttaaccctagggatgtagctactgggacaggaggaagtgagggacccagtgctgcagggtccctgttgtcacatatgtcaatcctactttaaagtcaaataatggattctggctgataaagcctatcagaattatggtgttgatacgaaagtgtcacatagccaccaaaatgtgttctctactttcttgctttgctctgattagctaagtcttggtcacatggctttatagcactgggaaaaccaggatctggtcttttatagggtaggaagtgagccctatcttttgtgtagatttgtggcggggagtttcccaagcatgggaaatgggctcagatgatgtggttataaaatgtgaatgtccattaaaaggcagtcagtgttggctactctaagccttcaaattgttgcttttccccttcaacagggaccaaggggagatactggaaacctctgagcttcagctgttggtttttgggttttgtttttgttttattgagatacagttcacttaactatacagtttacccatttaaggtatacagtgttttttagtaaatttacagaattgtgcaactattacaattttggaacatttttgacacctccccccaaaaaaacccctatgccccttagcagtcatcctcagtctcctcagccctaggcaaccactcatctactttctgtctttatagatttgcctatttgggacatttcctataaatggaatctgtatgtggtctttgcttggttttgtttttggggtggtgggggctgactacttagtcttgacaagccaaggtcccaacccagcagtagaaatataaggagtcacggctgtgaggatggcctcacaatgggctcagggtagtgaacttctgtcccctaagttatctcagaaatgaggccaactctctgccctctagaatggatggccctgagggagagaaaggttcatgtccttcctggctggtgacagaaggctggactgtgcctgaaatcaaagcttctcacctggatttgggcaaatcaagcagtcccgaatctcagggtggggtgagatgtgtgctgaagagggcaacacaggagctgcactgcagatggcgacatgcagggtttcaaggccaaagctggtgtgttcttcccttaagaattgctgtaggctaggtgaggtggctcacacctgtaatcccagcactttgggaggctgaggtgggcggatcacctgaggtcgggagttcgaaaccagcctgaccaacatggagcaaccctgtctctactaaaaatacaaaattagccgggtgtggtggcgcatgcctgtaatcccagctactcgggaggctgaggcaggagaattgcttgaaccccggaggtagaggttgcagtgagccgagatcacaccattgcaatgcagcctgggcaacaaaagcgaaactccatctaaaaaaaaaaaaaa

SEQ ID NO: 8319 - DNA, 299 bp, Homo sapiens
ccgggcacggtggctcacacctgtaatcccagcactttgggaggccgaggagggcggatcatgaggtcaggagatcaagaccatcctggctaacacggtgaaaccccatctctactaaaaatacaaaaaattagccggacatggtggcacgtgcctgtagtcccagctactcaggaggctgaggcaggagaatcacttgaacctgggaggcggaggttgcagtgagctgagattgcgccactgcactccagcctgggcaacatagtgagactccatctcaaaaaaaaaaaaaaaagaaa

SEQ ID NO: 8320 - DNA, 147 bp, Homo sapiens
tggatcacctgaggtcaggagtttgagaccagcctgaccaatatgatgaaaccctgtctctactaacaatacaaaaattagctgggcgtggtggcgggagcctgtaatcccagctactcgggaggctgaggcagaagaatcgcttga

SEQ ID NO: 8321 - DNA, 14036 bp, Homo sapiens; identical to SEQ ID NO: 6857

SEQ ID NO: 8322 - DNA, 481 bp, Homo sapiens; identical to SEQ ID NO: 6858

SEQ ID NO: 8323 - DNA, 488 bp, Homo sapiens; identical to SEQ ID NO: 6859

SEQ ID NO: 8324 - DNA, 2062 bp, Homo sapiens
cccagaagtaaagaaaagggagggttttaaaataaataaatacataaacagggtttttgttttcattttcagaaatatctctaaaagcaaatagttttacagcgatatcattatatgtgttaaacttccagctctctgagtatgacttctgcatttttatttttatttttagattcagttttgttcacttgggcatgtgtatggcttggagacaggcaggaatgccaaaaagctggtagatgatggcaactgtgatgagcagaagaactcactgcctcagttacctggatgtgggccattttctttccctggagttggagggcgggcaacaatgttgaaactggctggaagttgagagagaaactgaatttgtttcagggcctagtgatattttagtgcataattttataaaataacagctccattccatgaatataggagaggaaaaagattattgagaaaataatttttttacaggcactggtacttttttttcatgttttgtgttgtagttgcattttactagagcagctgacaccattctatgtggtctgattttgtagttcaaagaccaaaaccaaataaaaagatctactctttaaaaactctcttttccaatgagaggattatggaaaaagtgacagtgattgaaagtctgtgttctatttgccagagtgggggagggagtggtaaggcaggttgactgggatagaccagtcacgaaggagctggaacattcacccaggcccattgccatgtgaattgtagaaggtctgtggggaagacaccatctgccactgtttggcaggatttggccaccatggcacagagtgggcaattgtcctcaaccttggaggcagaagctggcagctggccaaaagtctgctttctcccagaagagataggcagtcactgagccgagatactgatgatgtctctctcttatcgtgcaacatggagagcgggagaaaatgagggaggacagaagagaggagaaggaggaggaaaataagaaaaggaatactaattaactcagcctgtctatccagctaagcttgagcttgattttgctctctagttgaatggaacatgcaacctgaatttctgaataacagaattaccaaattactgtttaagtgtttgagaaaaaaaggtgaaaagtgtgtgtactatatgtatagacgtatagattgacatatagtgaattggttaattgaatgtctgcatcagataagaaggtgttaggtcaatttccacaataatgccattaaaatcggttctttgattaaatccaattaacagatgtggaaactgaggtttgtgacaaggttcaatccctgatttctgtgactccaaagtatgtgctgttatttaatgtttatgtattctctattatgaattgttttcaagttttttaaaatatcactagctagcctgtacgtttcttaggaggcaaaaacaattgccttaaattttgttatattttagtgccattttgcacataggttataagcaacagataatttctgtaatctttagaatatcgattaaacttgttaaaatgtagatattttgaaatctcacacaggacacctaaattatgtaaaatgttataaactttatgatttacaggggccctggagatggaagttctgaaaaaatgttgcctttattcagtattagtgcattatcagggattccagatctcagttaaaatgagagaatctgaatctctaggcaatgatgagtgtttctgaaattcagattcaccagaaagaaattgaaagcaaagagaagacagtgttgtcaaattatcatataattcagctaaaaaaaaaatcatggtacttaagtgggagctagagcacatcactgcctttaagaagatatttaggggaataaaagaggtctgggacctcggaggtgaaactgagagaaagacaaagggacttcaaatcaagcatttgaaagagccaatgaggggccagatgtggtgactcactcctgtaatcccagccctttaagacgccaaggcgggatcccatctcaaaaaaaaaaaaaa

SEQ ID NO: 8325 - DNA, 1713 bp, Homo sapiens
cccagaagtaaagaaaagggagggttttaaaataaataaatacataaacagggtttttgttttcattttcagaaatatctctaaaagcaaatagttttacagcgatatcattatatgtgttaaacttccagctctctgagtatgacttctgcatttttatttttatttttagattcagatttgttcacttgggcatgtgtatggcttggagacaggccagaatgccaaaaagctggtagatgatggcaactgtgatgagcacaagaactcactgcctcagttacctggatgtgggccattttctttccctggagttggagggcgggcaacaatgttgaaactggctggaagttgagagagaaactgaatttgtttcagggcctagtgatattttagtgcataattttataaaataacagctccattccatgaatataggagaggaaaaagattattgagaaaataatttttttacaggcactggtacttttttttcatgttttgtgttgtagttgcattttactagagcagctgacaccattctatgtggtctgattatgtagttcaaagaccaaaaccaaataaaaagatctactctttaaaaactctcttttccaatgagaggattatggaaaaagtgacagtgattgaaagtctgtgttctatttgccagagtgggggagggagtggtaaggcaggttgactgggatagaccagtcacgaaggagctggaacattcacccaggccaattgccatgtgacttgtagaaggtctgtggggaagacaccatctgccactgtttggcaggatttggccaccatggcacagagtgggcaattgtcctcaaccttggaggcagaagctggcagctggccaaaagtctgctttctcccagaagagataggcagtcactgagccgagatactgatgatgtctctctcttatcgtgcaacatggagagcgggagaaaatgagggaggacagaagagaggagaaggaggaggaaaataagaaaaggaatactaattaactcagcctgtctatccagctaagcttgagcttgattttgctctctagttgaatggaacatgcaacctgaatttctgaataacagaattaccaaattactgtttaagtgtttgagaaaaaaaggtgaaaagtgtgtgtactatatgtatagacgtatagattgacatatagtgaattggttaattgaatgtctgcatcagataagaaggtgttaggtcaatttccacaataatgccattaaaatcggttctttgattaaatccaattaacagatgtggaaactgaggtttgtgacaaggttcaatccctgatttctgtgactccaaagtatgtgctgttatttaatgtttatgtattctctattatgaattgttttcaagttttttaaaatatcactagctagcctgtacgtttcttaggaggcaaaaacaattgccttaaattttgttatattttagtgccattttgcacataggttataagcaacagataatttctgtaatctttagaatatcgattaaacttgttaaaatgtagatattttgaaatctcacacaggacacctaaattatgtaaaatgttataaactttatgatttacaggggccctggagatggaagttctgaaaaaatgttgcctttattcagtattagtgcattatcagggactccagatctcagtta

SEQ ID NO: 8326 - DNA, 427 bp, Homo sapiens
gagaagagaagcagaactgttgtaccaaagtaacagttctcaaatctttattttttttcttttgtgataagacacacaggccaaataagactgactgcaagttagcacaagagtgcaacgactctatgttatcctggctccctcattcaaggaaacacgccaaatcttaagtaaaaataatcttaaaacaactttaattataaataagcaaatctcttacaaatggcactactttatcattaattagcaactactaagttgtagcatataacacagaagtatggtatcaagactgaaaactaattgattatttaattcctagcttcttttcaagttctcaaatcccaagatttgcctatggttgccaccaagagctatggaattgttgtttggtaggtgattttcatcctccatattaaaaacaaaa

SEQ ID NO: 8327 - DNA, 665 bp, Homo sapiens
tcggctcactgcaacctcccactcctgggttcaggcgattctcctgccttagcctcctgagtagctgggattataggtgcccacctccatgccctgctaatttttgtatttttggtagggacagggtttcaccatgttggccaggctgctctcgaactcctgacctcaagtcatctgcctgcctcggccttatataggggtgagtcaccccacccagccgatattctttattagtcatctttttcatatctattacagagttttctattctgaatttaatagtttgtttagctatcttttacctgttttatttaccgtcatatactgtgtgcttgcttgtggttggcactcaataaaaattgataaatatgaggactattatatttcttatcatcatctctcttctcgtccttctttccttcgtgtgagtggaagatgatgtcattctttgcatatttttgtaacccatggcttattttaccatgaaacaagctcttccttgcaatcatcctcacttcagagaatatttaacaatatactgttgtcttatagatgcagctcagtagtcctacattatcccagaaacacagattccctatgcataaaaaagcagtaatgaaagctaacttttttgagtatttattctgttcactattgtattcttt

SEQ ID NO: 8328 - DNA, 665 bp, Homo sapiens
tcggctcactgcaacctcccactcctgggttcaggcgattctcctgccttagcctcctgagtagctgggattataggtgcccacctccatgccctgctaatttttgtatttttggtagggacagggtttcaccatgttggccaggctgctctcgaactcctgacctcaagtcatctgcctgcctcggccttatataggggtgagtcaccccacccagccgatattctttattagtcatctttttcatatctattacagagttttctattctgaatttaatagtttgtttagctatcttttacctgttttatttactgtcatatactgtgtgcttgcttgtggttggcactcaataaaaattgataaatatgaggactattatatttcttatcatcatctctcttctcgtccttctttccttcgtgtgagtggaagatgatgtcattctttgcatatttttgtaacccatggcttattttaccatgaaacaagctcttccttgcaatcatcctcacttcagagaatatttaacaatatactgttgtcttatagatgcagctcagtagtcctacattatcccagaaacacagattccctatgcataaaaaagcagtaatgaaagctaacttttttgagtatttattctgttcactattgtattcttt

SEQ ID NO: 8329 - DNA, 12679 bp, Homo sapiens
aaagttataaaaatattttatttaaatgatacagaaaaaaatgtatacttaaaagtgattaaaacttcacattaggaaatgctaaaaacccagtaatgtacataatgataaaatctaaagtgatgagaaaacataaaatattttcatttggtcctgtcacctaacaaaactatcataaatatgagattatagtaattactaaagctggttaaaggcacatgacaacataattcctttatacacatctagtcattttatacaaggaactgctatcccttaaatggaagagtgaactacttgtttaaaatattaacagtgcactatgtacctacaatgaaaccactttctccaaagactcaaacagattaacattgcaaaatagtacttctgtatcactgacttctgaaaattttaataatttatgcatatgcaagtgaaatataatttattctggtttcaacaacagttatacaaagtcacaattttccccaggaaaccattcacttcatagctgcaaaaacacactgtagcttttctgttagggtctgccatgctttcagctagctggatgtttaaccattcacttcaaatttacatgtccagccaggcacggtggcgtgggcctgtagtcccaactacttcgaaggctgaggcaggaggatcacttgatcccaggagttcaaagacagcctgggcaacatagaagaccctgtctcttaaaaaaaaaaaaaaaaaaagtgtatgtccttaaatctgaaagaaaaccagcatttatgtaccaagtaaaacattgtatctcaagctattgcatttaacactaaaaagcatagttcactctgtaatctacaacattgtctgagtctccattaccaattataacttcatgtcagagtaagagctcccaaacatctgtaaaaactcaaaattcaagagtcaaagaaggggctgagaacacgagaaggggagatgggtgacagggtcaggtgaggaagtgttctgagatgtgtaggattcctccgggcccaaagccgcttgtggcaccacatgtgtacaggaatgaagggcctcctgtgagggttcccagtggtcccaagacacagcaaggtgcctgaaggaggctggagacattggcgtgggcatggaggtgctagcaactattttcagactgctaacaatgagagtatgtccatttcttctttacacagttaccactgaccttcctttaaaatcccacagggagaacatgctgtttttagcagaaatgtcagttttcattaactccttgaaaatttagcgtattaacttttatttccatgagcttcagtttccacacctgtcaactgctgtataaagcaggtttcctgcaagttctgatgtaagtgacctgacaggaggcactatctttgtccttctcaccatgcccctaagcatctggagtgagtattctcaatatacacttatttaataacagagttatacgacactcagaaaacagcctccactgtgtaaggcagcagatctcaggatggggtgatctgtagggaggcagaaattctataaataacaccaaacgaaagctgattgtgtcatccaacacatttttatgaggaagtcagaataattagaagatggcagaattttttttcccaattaggtaaaattgttcattcttcctgtattcccatttcttaagaatgatccagccaacagtcactgaatataagctgacacaaattaatataatttcaacataaaatggtctaatgtgtgaattcaactatattggaaggtacaaatcctgtctttatgaggtctttgaaaggcagggtaccttctctaaaaagtagtcacttagaaccaacttttacaaaagaaagagtctcagcccccaacccccgccagcctgggcaacataaggagactctgtttctacaaaaaaatttttaaaaattagccaagcatggtagcacatgcttataataccagctacttgggaaactgaggtgggaggattgcttgagcccccaagtggtcaaggctgcagtgagctgtgatcatgccaccgtactccagcctggacaacagagtgagaagctgtctcaaaacaaaaaggagtctatctcagagttcaatgaatggataattctagtgtggacaactctggtgtaaacatgactgaaaataattcacaaatagtctgttacagctccatccactgaaaattgtcataaaagacatttttcaaacgagttcatttttagaaaaaccactccagatatcttaccttcggaaatcatccaaggagtgtgataaacatgacaacccccataaactgggtaaacaacaacaatggagtgaaaaacgaccacacatgccataaagcaatgttgaagctgaaaagaacaagacataaacagttgacaactccaatatgcatcaatatattttattctagaatccagatttaaagtattcaatgtagaaaagttcatccagtcagcaactttctctatgtatcatatttctcaagtatgtgacttagccaatgctggaaaggaaaactctagatatacttaaacaagtatcacaatttcttcaagaaggccctggaactggaaccactaaaggtctcctaataggggttgacatggcttaatagaaactgaagtctcttagtttctgacttcaacaataatttaaatggctacagcccatttttatgacatcacacactaaactatcatggtaaaaaagaccaaaatattgtctcttaaaaacagaatgaaaacagttatcacttataagctgctattatatctttcattgagaaaaacactattcctgtcatcaaagtaaaattaaaacactaagtataaagatttttaatgactgaaatttctaagaacagaatagggaaaactatattcaaataagttcagatggttattggttttaatatataatagtttgataagtatgagtattaaataactataatcacaaatcacactgtctaaaaaattaacatttctggacatgatcttaccctcatgggaaaaagtaaaacaacgtatctgcatgcccccacatacaggttaacaataaccacatcacactgtcaaacaaccttgaacttcaactacagaaaataagtcatagaaagaatatgtataaaggtatatggttcttccaaaataaaaattcaattaggccgggggtggtggcgcacgcctgtaatccagcactttgggaggccaacacaagcagatggcttgaggccaggagtttgagacctgcctgagcagcacagcgaaaccccatctctacaaaaaatacaaaaaatagccagatgtggtggcacatgcctgtggtcccaactactcgggaggctgagtgaggcaggaggatcacttaagcctgggaagtcgaggctgcagtgagctgtgatcatgccactgcactccggcctgggtgacacagtgagaccctatctccaaaaagaaaaaaaaatccaattgatataaagaaagaaaaaactagagagctgcacacaacataggaaaagtagttttctttctggttgaatcataggatatatttcctttgtgtttttatgtaatttacagattttttttcctcagggagcaagttttacttttataaacccaaaaaaccctgtatttttcattgagtatttaattaacttatgaagaaggtatttattgtggcattgtgtggggtttaatattacgcagtgctcccacagaagacaggttaaataaatcatgttatgtccatgctgtgaaaactatgcaactgtttaaaaaaatgagacacatctatatgtaccattatggaagaatcccaaactataaggatccactgaaaaacaaaaggagaaaaggacaaacaaccactttggaaagcagtttggcatgatttactgaagtcaaaggtacgtacatccaacaattttaccccttggggtacatatatatacatatatacatacatctctacacccaacagaaatgtgttcactgtgctacaagagccatgtacaagaatgctctttatagcatccttcatagtaaccccaaactgaaaaaaatctaaacacaatcaacaagggaaaagaaaactgggattcaattaaacaatggaatgctaaagagcaatgaagatgagtcactgttcccggcgacaatatgaaagaactgcacacaatgctgcacacagccagctcaatgtgaaggaatacaccctgtacaaatccatttctataaagttcaaaagcgtagctgaaacaaaaatagaatatctaatggaagcaaagcaagtagttaccatgaaggtcagggcagtatttacctgtggcaggagggaaggtgtagtaactgggagggagaatgaagggggttcccagtgtgctggctcagtttacaccaatgctcacttcatgagaattcattcactaattcattcatctcagtttttttcacttttctatatgtactgtatgtcataataaaatagatttaaaaagcaaaatgcagaatatgtacagaatgtcaccatctgtgctttaaataactagatccataaatagaaggagaaagagatactaatcaaaagggaaccagagagcatgaatgaccaggagactatttttctgttttaactttttttctttcgaagtttggaccaagcatatcactatctgatcaaaaaaaaaatttgttgttcattcctgttagtcatttcaaagttaacttaccaaattcctgctgcaataaaggaggcagtggtaatgggtatcaaggctggatacttgacatcatattctccaattccacaataccattccaggtagactatgcagtaaaatgcaattgataaactgacaagcaacaaggcactgccacagagaaaccagctgtggagataaaaacagtaagaggtctgacagcacttaatgaatcgtcacatatcttaaaagtttttactaatagcttaaaaatctgcttctaagaatatcaagtgttgcagagggagccatacttaaacaatccatgctttcagaaagtctcaatctatgggagatgggggtgagaaaaagagatacacaactcaggaaagaatgaaaagtaagacttgaaatacatgcatttatatatacactctcatcagccaaccaaccaagggaaaattctggtcatgacaatgcattttctttaaaaatacaaggaagaggccgggcgcagtggctcatgcctataatcccaacactttggaaggccgaggcaggtggatcacttgaggtcaggagttcgagaccagcctgaccaacacggagaaatcctgtctctactaaaaatacaaaattagccaggcgtggtggcgcaagcctgtaatccaatcttcttgggaggatgaggcaggagaatcgcctgaacccaggaggcagagattgcaatgagctgagatggcgccattgcactccagcctggagtgcctgggcaacaagagtgaaactctgtctcaaaaaataaaataaataaaaacaaaaatacaaggaagatagtggctttctggttgtttctgaagttttgagtgtgacaggattaaagaagtttatcagtgggaaacttcattcctccaagttaagtggactttcttggaatactgaaagacaattaggaagatcaataattcaaattttctctcataaaagatttctaaatgaaatcctcccattttcaaaatatcttctactcaccacctcaccctcaatgccaatgcctttttactcccttccaattccacctgtgacctgattcagcaagagtgaggcaacctggacaaccccttccctccaccccagctggacttggggactgaaatgcctttcccattctcccaactcaatccaatatcccatcatcatctgcttctctatgggaaaagcctgacaatccatgtggaagagagagggagaacagatggctacaacagataagttacaaaggcacaaagtgaacttccaataatggcaaggttccggattccatgaaggctttttacgatgatgcaattctgagattcggagtcatgagaggctgtagagggaaggggttaagagcacagcctctgaaatctgtctgtatgggtttgaatcttaacttgagcaagactagttttgtgactctaggcaaattacctaacctccgtgtgtttcagaaatattgacagtacttaactcagaatagctgtgagaattaaatcaagtggtcagcaaagtgctcctcacagctgactctcaatcataatcattattattccactcaagttatttttattttcattcatttatttctgagccggagtcttgctctgttgcccaggctggagtgcagtgctgcaatctcagctcactgcaacctccgcctcccaggttcaccaattctcctgcctcagcctcccaagtagctggaattacaggcactggccaccacgcccagctaatttttgtatttttagtagagatggggtttcaccatgtccatattggccaggctggtctcgaattcctgacctcaagtgatccacctgtctcagccttccaaagtgctgggattataggggtcagccaccatgcccagccatcactcaagttatatctatgaggaaaaaatgtccatgttcatctttaggagtcttcaaagacctctcttctgctagagcatgcaatctcactggggggagtatcgcccccaaagtgaagaaaaaaatatggctctaattgtatgtataaagcatagatatgcatgcagtatataaatgatatagtttatctaattccacattccacaggaatgattaggaaaaaaatgtctaaaaaggccttttatcattacccctaaggagtctttttagacatttttttcctttgccaacatgtggatatgagaaaaaaaaaattttttttttttgagacggagtctcgctgttgttgcccaggctggagtgcaatggcgcgatctcggctcactgcaacctccacttcccaggttcaagctatcctcctgcctcagcctcctgagcagctgatattacaggtgcccaacaccacacccagctaatttttgtatttttagtagagatggggtctcaccatgttggccaggatggtcttgaactcctgacctcaggtgatccatccaccttggcctcccaaagtgctcggattacaggcatgagccaccatgcccggcctaagaaaattttttaaactgcctgaacaaaatataatactatcagtcagtggtcctcagccctggctttatatcacagtcaccttgcacctttctaagagaaactacctagtccccagtttccaaaattctgggcctgagcatctaggattttaattttactttctgtctttaactccactgttgattttgatgcacacaagccgagtattttaaactgtgatttctaaagcatcacagtgttgttttgttattatttatttacttatttaatttttttaagacggagtctcgctctgtcgcccaggctggagtgcagtggcgcgatctcggctcactgcaatctccacctgctgggttcacgccattcttctgcctcagcctcccaagtagctgggactacaggcgcccgccaccatgcccagctaattgttttttgtatttttagtagagacggggtttcaccgcgttagccaggatggtctcgatctcctgacctcgtgatccgcccgcctcggcctcccaaagcgctgggattacaggcatgagccaccgcgcctggcctgttttgtttttaatatggacctgctctcccatctttgaacaatataaagaaccttaaggcctcaagcttctaaacttaggctagagccagaggaaaaagaaatcacctcaggcgtcagaagaacgagccattttagccattttccaaaagcagaactcagccggcactgtcttttgtgcagccctctcatttcatggctgttcaataccccccaactccccttaatgagtccttcccaagaaaacaatgcgactcaaaatcctcagcctttgagaatgcatttctgcctttttctctctaagatgacaccttgttgaggacagatctatgacttctactttctttccaacccccacagccctggtcccagtgtctgcgtcccggctttgccacacagcagttatgtggtcctgggcactccacttcactgcagttgcccccaaatatcttacgtgtgatcatttcttactctgccatttctctaaactactaaaaatacccaatataaggacacaaatacagaagttctctcacatctcctaaaacctcaaaaaggtctcagtcctgaggctgacctggactagatatccctcctagatgctcccatgataccctgcgcctacacttacagagcacataccatgcggcctggtaacttgtctgctgcagcctagaatgagctgttggagagctagaaatgcaccttccacgtgtttggcactgacagccaaacacatctcagcctccataaagtatctgatgaaggaaagagcagctgctattggtggtggttaaagtacccatcccctccagccaggtgcagtggctcacacctgtaatcgcagtactttaggaagtcaaggtgggaggatcactggagcccacaagtttgagaccagcctgggcaacatgaagagacctcgtctctacaaaaaataaaccaaattagccaggcatggtggtgtgcgcctatagtcctagctacttgggaggctgaggtgggaggatcacttgagcctgggaagtcaaggcagcaagccatgatcgcaccactacactccagcctgggtgacagagtgcagcgagaccctgtctcaaaataaaaataaaaataaagtatccatccctcttttcccagcccaagttctaagagagatgactgagtcaagctgatgaagattaaatgtctgttatactgatgcagccgtgggaagaatatggctttggtgagtgatgacaaagcacttcctaatactgggtctctgacacccagaaacagccttacccactgggttccaggtcaaaatgaaaacctagagaccttttcctgtggggactgcccctgtggaatgacaccatgggaaggcagaccagactctgcgcttcctatgggcagccgacttgcagcagaagaaggtgctgagctacctttgtccagttcttcatcacacactcaatcagtcacgccacctcccacaaaggagtgagtgacatggaggggcagaagatgggagtgtttagggaaagtttctcccctagaaagtagaggacagtttaaataaactcccctctgcctactttcccctgtgggctttttccttgtggctcgacagtctcctccgccagaagtcactgctcctcctgaaggcccttgaggagaaatcatgtgtcctgccatgatacgaggggaccacagtcctgtctgcatcttcctacccccactggtacttccaaattattactcttgaccctaagcacaccagccctcccaatgccatgatgctcaccaacatacctctcccttccatttcttatccaagggtctccacatcactctccaatgtgcagtaaggaccctaggatatgattccaaccctctcctccatgtcaactctggagactatactgaaaggatctcagtccctgtgaatgaggaactactggacatctggtctggccacaaagctgtcactcctcccactgtggaccttcacctccactctaacacagttacaccctgtagttaccttgtcagctgtaaccaccctctgaaaccaaccctgagacccaattcccactggccacagttctcggctcttcctcccagtactcttgtacttggtctttgaagaccttcagtcagtctttctccctcttttccccaaatggattaggttcttcttaaatttactaccttcctcatcctacaacacatttatttgcacacaaataatttccagttctattccactctactgtatgtgcccagagcacacaccctctcattggttttattttttccagctttattgaagtataattgacaaattaaaattttatatattcaaggtatacagtgtgatgacttgatatatatatacacacacacatgaatatatacatatatacatatatatgaatatatatatacgtgtatacatatacacacacacacattgtgaaattattaccacaatcaagttaattatcacactcatcacctcacatagttaccactggtggggtaacagggggaggacacaagacctactcttagaaaatttcaagtatacaatacagccttattaactatagtcactatactgtatgtacattagatctccagaccttattcatcttataactaaaaatatgtaccctttgacccccatctcatattcatcttcgtatcaccacacctccaacacagggcctggcagagagtagtaggtgcttactgtttgaagaattcaactaacaaaatataacacgaaaaatcagacttgggtttaatttacaaagcaataaaattttcttacctgctagtgtggaagttttctttaagggttttaaagaagtcaacataataggtcacaacaatggatgccaaaatccagaatccagaatggatattaagtcttggaagaggtttctcctttttctcaacagctgtggaggtttctgcaaataagggagatttcaacttattaagttaccacaattttgcgaggaaaaattacacttaagccaaataaaatcatttcctagagctaagaaacagtctctcccatgataacaaatccttctgtaaaacccttgagataggtttatatttacaaaaaataagagcccactataaaatatggtcaatacagtcaatttatttcctctaaatacattgtgaaatcaaatttacactttcatcgtctttcggagataacaatgtcacctggaaatgtaagaattttaatattatgtttcacatttcttctaggaaagtaattagtcttgttaattaggaaaaatgccaaaggcaaacattagcgcatgaactggacttgtggtcttccaagaacacttttataactaaattttttttttttgagtcggagtcttcctctgtcgcccgggttggagtggaatggtttgatctcggctcactgcaaccaccgcctcccgggttcaagcaattctcctgcctcagcctcccgagtacctgggattacaggcgcctgccaccacgccgggctaatttttgtatttttagtagagacggggtttcaccatcttggccaggctgctctatttggccaggttggtctcgaactcctgacctcgtgatcagcccgcctcagcctctcaaagtgctgggattacaggcgtgagctaccctgcccagcctataactaaatattttagttactttaaacacagctcaaaagtggaaacggcacaccagagctctagttccagcacagcactgtctagacaggtgatggacaagacatttttcctgtctggaacgcaatctgaaagaatgggtggatgggggttgggtcagatggatgatttctattaagttttccggggattctgacatgccctctaggttcacgtgagaatcaatggtccacatctgaggttttgggcctttagatgaccatcggaaaccctgggaagcatgttcgtaatattctgggatatcctcaaaatgtatacatcatcatgcctgggcatgaggttattcgtgtttttaattttaaaaggtaataaatggacgtggttttaaaacatatgagataaaaaatatccaaaaatgaagtatctgtctcccatccttaacctcagatctaatccccagaagcaaccaccacttacaatttctactgaattcttccatattctatgtatccacaggtgaacatacatcacaagttacctgttttgtacccaaatggcggcataccatagtgttccacacttccctttgaaaatcatccccattggtacatacgagtcgacctggcgtgtcaggtatacatatacccaaatttacttaaacagctttctgctgacgggcaaggcagatatttctcgtaattcgctattacaagcaatcctgaagtgaaacactgcgcacatcattgtacactgcggtacacgcatgtttctggtaaatccttaagacttaaaactggtgggtatttttaattttaatcgctatttccaaacaggtgtcaaatcagctctccagagaattctgaagcgcagctgaaatgacgatgcacagcactccgcgattctaaggatcttccctgacattaaatattcgacttgcaaagccgaaactcagtccttccagactgggccagggctgccggaggccggccgttttccgacgcctcgcctctgagaacctcggggcggcttggtgcgcgcctcacccggcccggcgtcaccctcgcggtccagctgggcctcggcgtccggcaggaggaggaatcgccgccggagctgctgccgggcccgcgaggagtccatcttggtaccgccccgaaat

SEQ ID NO: 8330 - DNA, 12680 bp, Homo sapiens
aaagttataaaaatattttatttaaatgatacagaaaaaaatgtatacttaaaagtgattaaaacttcacattaggaaatgctaaaaacccagtaatgtacataatgataaaatctaaagtgatgagaaaacataaaatattttcatttggtcctgtcacctaacaaaactatcataaatatgagattatagtaattactaaagctggttaaaggcacatgacaacataattcctttatacacatccagtcattttatacaaggaactgctatcccttaaatggaagagtgaactacttgtttaaaatattaacagtgcactatgtacctacaatgaaaccactttctccaaagactcaaacagattaacattgcaaaatagtacttctgtatcactgacttctgaaaattttaataatttatgcatatgcaagtgaaatataatttattctggtttcaacaacagttatacaaagtcacaattttccccaggaaaccattcacttcatagctgcaaaaacacactgtagcttttctgttagggtctgccatgctttcagctagctggatgtttaaccattcacttcaaatttacatgtccagccaggcacggtggcgtgggcctgtagtcccaactacttcgaaggctgaggcaggaggatcacttgatcccaggagttcaaagacagcctgggcaacatagaagaccctgtctcttaaaaaaaaaaaaaaaaaaaagtgtatgtccttaaatctgaaagaaaaccagcatttatgtaccaagtaaaacattgtatctcaagctattgcatttaacactaaaaagcatagttcactctgtaatctacaacattgtctgagtctccattaccaattataacttcatgtcagagtaagagctcccaaacatctgtaaaaactcaaaattcaagagtcaaagaaggggctgagaacacgagaaggggagatgggtgacagggtcaggtgaggaagtgttctgagatgtgtaggattcctccgggcccaaagccgcttgtggcaccacaggtgtacaggaatgaagggcctcctgtgagggttcccagtggtcccaagacacagcaaggtgcctgaaggaggctggagacattggcgtgggcatggaggtgctagcaactattttcagactgctaacaatgagagtatgtccatttcttctttacacagttaccactgaccttcctttaaaatcccacagggagaacatgctgtttttagcagaaatgtcagttttcattaactccttgaaaatttagcgtattaacttttatttccatgagcttcagtttccacacctgtcaactgctgtataaagcaggtttcctgcaagttctgatgtaagtgacctgacaggaggcactatctttgtccttctcaccatgcccctaagcatctggagtgagtattctcaatatacacttatttaataacagagttatccgacactcagaaaacagcctccactgtgtaaggcagcagatctcaggatggggtgatctgtagggaggcagaaattctataaataacaccaaacgaaagctgattgtgtcatccaacacatttttatgaggaagtcagaataattagaagatggcagaattttttttcccaattaggtaaaattgttcattcttcctgtattcccatttcttaagaatgatccagccaacagtcactgaatataagctgacacaaattaatataatttcaacataaaatggtctaatgtgtgaattcaactatattggaaggtacaaatcctgtctttatgaggtctttgaaaggcagggtaccttctctaaaaagtagtcacttagaaccaacttttacaaaagaaagagtctcagcccccaacccccgccagcctgggcaacataaggagactctgtttctacaaaaaaatttttaaaaattagccaagcatggtagcacatgcttataataccagctacttgggaaactgaggtgggaggattgcttgagcccccaagtggtcaaggctgcagtgagctgtgatcatgccaccgtactccagcctggacaacagagtgagaagctgtctcaaaacaaaaaggagtctatctcagagttcaatgaatggataattctagtgtggacaactctggtgtaaacatgactgaaaataattcacaaatagtctgttacagctccatccactgaaaattgtcataaaagacatttttcaaacgagttcatttttagaaaaaccactccagatatcttaccttcggaaatcatccaaggagtgtgataaacatgacaacccccataaactgggtaaacaacaacaatggagtgaaaaacgaccacacatgccataaagcaatgttgaagctgaaaagaacaagacataaacagttgacaactccaatatgcatcaatatattttattctagaatccagatttaaagtattcaatgtagaaaagttcatccagtcagcaactttctctatgtatcatatttctcaagtatgtgacttagccaatgctggaaaggaaaactctagatatacttaaacaagtatcacaatttcttcaagaaggccctggaactggaaccactaaaggtctcctaataggggttgacatggcttaatagaaactgaagtctcttagtttctgacttcaacaataatttaaatggctacagcccatttttatgacatcacacactaaactatcatggtaaaaaagaccaaaatattgtctcttaaaaacagaatgaaaacagttatcacttataagctgctattatatctttcattgagaaaaacactattcctgtcatcaaagtaaaattaaaacactaagtataaagatttttaatgactgaaatttctaagaacagaatagggaaaactatattcaaataagttcagatggttattggttttaatatataatagtttgataagtatgagtattaaataactataatcacaaatcacactgtctaaaaaattaacatttctggacatgatcttaccctcatgggaaaaagtaaaacaacgtatctgcatgcccccacatacaggttaacaataaccacatcacactgtcaaacaaccttgaacttcaactacagaaaataagtcatagaaagaatatgtataaaggtatatggttcttccaaaataaaaattcaattaggccgggggtggtggcgcacgcctgtaatccagcactttgggaggccaacacaagcagatggcttgaggccaggagtttgagacctgcctgagcagcacagcgaaaccccatctctacaaaaaatacaaaaaatagccagatgtggtgacacatgcctgtggtcccaactactcgggaggctgagtgaggcaggaggatcacttaagcctgggaagtcgaggctgcagtgagctgtgatcatgccactgcactccggcctgggtgacacagtgagaccctatctccaaaaagaaaaaaaaatccaattgatataaagaaagaaaaaactagagagctgcacacaacataggaaaagtagttttctttctggttgaatcataggatatatttcctttgtgttttcatgtaatttacagattttttttcctcagtgagcaagtattacttttataaacccaaaaaaccctgtatttttcattgagtatttaattaacttatgaagaaggttattcattgtggcattgtttgggtataaatataacgaagtccaacaacagaagacaggttaaataaatcatgttatgtccatgctgtgaaaactatgcaactgtttaaaaaaatgagacacatctatatgtaccattatggaagaatcccaaactataaggatccactgaaaaacaaaaggagaaaaggacaaacaaccactttggaaagcagtttggcatgatttactgaagtcaaaggtacgtacatccaacaattttaccccttggggtacatatatatacatatatacatacatctctacacccaacagaaatgtgttcactgtgctacaagagccatgtacaagaatgctctttatagcatccttcatagtaaccccaaactgaaaaaaatctaaacacaatcaacaagggaaaagaaaactgggattcaattaaacaatggaatgctaaagagcaatgaagatgagtcactgttcccggcgacaatatgaaagaactgcacacaatgctgcacacagccagctcaatgtgaaggaatacaccctgtacaaatccatttctataaagttcaaaagcgtagctgaaacaaaaatagaatatctaatggaagcaaagcaagtagttaccatgaaggtcagggcagtatttacctgtggcaggagggaaggtgtagtaactgggagggagaatgaagggggttcccagtgtgctggctcagtttacaccaatgctcacttcatgagaattcattcactaattcattcatctcagtttttttcacttttctatatgtactgtatgtcataataaaatagatttaaaaagcaaaatgcagaatatgtacagaatgtcaccatctgtgctttaaataactagatccataaatagaaggagaaagagatactaatcaaaagggaaccagagagcatgaatgaccaggagactatttttctgttttaactttttttctttcgaagtttggaccaagcatatcactatctgatcaaaaaaaaaatttgttgttcattcctgttagtcatttcaaagttaacttaccaaattcctgctgcaataaaggaggcagtggtaatgggtatcaaggctggatacttgacatcatattctccaattccacaataccattccaggtagactatgcagtaaaatgcaattgataaactgacaagcaacaaggcactgccacagagaaaccagctgtggagataaaaacagtaagaggtctgacagcacttaatgaatcgtcacatatcttaaaagtttttactaatagcttaaaaatctgcttctaagaatatcaagtgttgcagagggagccatacttaaacaatccatgctttcagaaagtctcaatctatgggagatgggggtgagaaaaagagatacacaactcaggaaagaatgaaaagtaagacttgaaatacatgcatttatatatacactctcatcagccaaccaaccaagggaaaattctggtcatgacaatgcattttctttaaaaatacaaggaagaggccgggcgcagtggctcatgcctataatcccaacactttggaaggccgaggcaggtggatcacctgaggtcaggagttcgagaccagcctgaccaacacggagaaatcctgtctctactaaaaatacaaaattagccaggcgtggtggcgcaagcctgtaatccaatcttcttgggaggatgaggcaggagaatcgcctgaacccaggaggcagagattgcaatgagctgagatggcgccattgcactccagcctggagtgcctgggcaacaagagtgaaactctgtctcaaaaaataaaataaataaaaacaaaaatacaaggaagatagtggctttctggttgtttctgaagttttgagtgtgacaggattaaagaagtttatcagtgggaaacttcattcctccaagttaagtggactttcttggaatactgaaagacaattaggaagatcaataattcaaattttctctcataaaagatttctaaatgaaatcctcccattttcaaaatatcttctactcaccacctcaccctcaatgccaatgcctttttactcccttccaattccacctgtgacctgattcagcaagagtgaggcaacctggacaaccccttccctccaccccagctggacttggggactgaaatgcctttcccattctcccaactcaatccaatatcccatcatcatctgcttctctatgggaaaagcctgacaatccatgtggaagagagagggagaacagatggctacaacagataagttacaaaggcacaaagtgaacttccaataatggcaaggttccggattccatgaaggctttttacgatgatgcaattctgagattcggagtcatgagaggctgtagagggaaggggttaagagcacagcctctgaaatctgtctgtatgggtttgaatcttaacttgagcaagactagttttgtgactctaggcaaattacctaacctccgtgtgtttcagaaatattgacagtacttaactcagaatagctgtgagaattaaatcaagtggtcagcaaagtgctcctcacagctgactctcaatcataatcattattattccactcaagttatttttattttcattcatttatttctgagccggagtcttgctctgttgcccaggctggagtgcagtgctgcaatctcagctcactgcaacctccgcctcccaggttcaccaattctcctgcctcagcctcccaagtagctggaattacaggcactggccaccacgcccagctaatttttgtatttttagtagagatggggtttcaccatgtccatattggccaggctggtctcgaattcctgacctcaagtgatccacctgtctcagccttccaaagtgctgggattataggggtcagccaccatgcccagccatcactcaagttatatctatgaggaaaaaatgtccatgttcatctttaggagtcttcaaagacctctcttctgctagagcatgcaatctcactggggggagtatcgcccccaaagtgaagaaaaaaatatggctctaattgtatgtataaagcatagatatgcatgcagtatataaatgatatagtttatctaattccacattccacaggaatgattaggaaaaaaatgtctaaaaaggccttttatcattacccctaaggagtctttttagacatttttttcctttgccaacatgtggatatgagaaaaaaaaaattttttttttttgagacggagtctcgctgttgttgcccaggctggagtgcaatggcacgatctcggctcactgcaacctccacttcccaggttcaagctatcctcctgcctcagcctcctgagcagctgatattacaggtgcccaacaccacacccagctaatttttgtatttttagtagagatggggtctcaccatgttggccaggatggtcttgaactcctgacctcaggtgatccatccaccttggcctcccaaagtgctcggattacaggcatgagccaccatgcccggcctaagaaaattttttaaactgcctgaacaaaatataatactatcagtcagtggtcctcggccctggctttatatcacagtcaccttgcacctttctaagagaaactacctagtccccagtttccaaaattctgggcctgagcatctaggattttaattttactttctgtctttaactccactgttgattttgatgcacacaagccgagtattttaaactgtgatttctaaagcatcacagtgttgttttgttattatttatttacttatttaatttttttaagacggagtctcgctctgtcgcccaggctggagtgcagtggcgcgatctcggctcactgcaatctccacctgctgggttcacgccattcttctgcctcagcctcccaagtagctgggactacaggcgcccgccaccatgcccagctaattgttttttgtatttttagtagagacggggtttcaccgcgttagccaggatggtctcgatctcctgacctcgtgatccgcccgcctcggcctcccaaagcgctgggattacaggcgtgagccaccgcgcctggcctgttttgtttttaatatggacctgctctcccatctttgaacaatataaagaaccttaaggcctcaagcttctaaacttaggctagagccagaggaaaaagaaatcacctcaggcgtcagaagaacgagccattttagccattttccaaaagcagaactcagccggcactgtcttttgtgcagccctctcatttcatggctgttcaataccccccaactccccttaatgagtccttcccaagaaaacaatgcgactcaaaatcctcagcctttgagaatgcatttctgcctttttctctctaagatgacaccttgttgaggacagatctatgacttctactttctttccaacccccacagccctggtcccagtgtctgcgtcccggctttgccacacagcagttatgtggtcctgggcactccacttcactgcagttgcccccaaatatcttatgtgtgatcatttcttactctgccatttctctaaactactaaaaatacccaatataaggacacaaatacagaagttctctcacatctcctaaaacctcaaaaaggtctcagtcctgaggctgacctggactagatatccctcctagatgctcccatgataccctgcgcctacacttacaaagcacataccatgcggcctggtaacttgtctgctgcagcctagaatgagctgttggagagctagaaatgcaccttccacgtgtttggcactgacagccaaacacatctcagcctccataaagtatctgatgaaggaaagagcagctgctattggtggtggttaaagtacccatcccctccagccaggtgcagtggctcacacctgtaatcgcagtactttaggaagtcaaggtgggaggatcactggagcccacaagtttgagaccagcctgggcaacatgaagagacctcgtctctacaaaaaataaaccaaattagccaggcatggtggtgtgcgcctatagtcctagctacttgggaggctgaggtgggaggatcacttgagcctgggaagtcaaggcagcaagccatgatcgcaccactacactccagcctgggtgacagagtgcagcgagaccctgtctcaaaataaaaataaaaataaagtatccatccctcttttcccagcccaagttctaagagagatgactgagtcaagctgatgaagattaaatgtctgttatactgatgcagccgtgggaagaatatggctttggtgagtgatgacaaagcacttcctaatactgggtctctgacacccagaaacagccttacccactgggttccaggtcaaaatgaaaacctagagaccttttcctgtggggactgcccctgtggaatgacaccatgggaaggcagaccagactctgcgcttcctatgggcagccgacttgcagcagaagaaggtgctgagctacctttgtccagttcttcatcacacactcaatcagtcacgccacctcccacaaaggagtgagtgacatggaggggcagaagatgggagtgtttagggaaagtttctcccctagaaagtagaggacagtttaaataaactcccctctgcctactttcccctgtgggctttttccttgtggctcgacagtctcctccgccagaagtcactgctcctcctgaaggcccttgaggagaaatcatgtgtcctgccatgatacgaggggaccacagtcctgtctgcatcttcctacccccactggtacttccaaattattactcttgaccctaagcacaccagccctcccaatgccatgatgctcaccaacatacctctcccttccatttcttatccaagggtctccacatcactctccaatgtgcagtaaggaccctaggatatgattccaaccctctcctccatgtcaactctggagactatactgaaaggatctcagtccctgtgaatgaggaactactggacatctggtctggccacaaagctgtcactcctcccactgtggaccttcacctccactctaacacagttacaccctgtagttaccttgtcagctgtaaccaccctctgaaaccaaccctgagacccaattcccactggccacagttctcggctcttcctcccagtactcttgtacttggtctttgaagaccttcagtcagtctttctccctcttttccccaaatggattaggttcttcttaaatttactaccttcctcatcctacaacacatttatttgcacacaaataatttccagttctattccactctactgtatgtgcccagagcacacaccctctcattggttttattttttccagctttattgaagtacaattgacaaattaaaattttatatattcaaggtatacagtgtgatgacttgatatatatatacacacacacatgaatatatacatatatacatatatatgaatatatatatacgtgtatacatatacacacacacacattgtgaaattattaccacaatcaagttaattatcacactcatcacctcacatagttaccactggtggggtaacagggggaggacacaagacctactcttagaaaatttcaagtatacaatacagccttattaactatagtcactatactgtatgtacattagatctccagaccttattcatcttataactaaaaatatgtaccctttgacccccatctcatattcatcttcgtatcaccacacctccaacacagggcctggcagagagtagtaggtgcttactgtttgaagaattcaactaacaaaatataacacgaaaaatcagacttgggtttaatttacaaagcaataaaattttcttacctgctagtgtggaagttttctttaagggttttaaagaagtcaacataataggtcacaacaatggatgccaaaatccagaatccagaatggatattaagtcttggaagaggtttctcctttttctcaacagctgtggaggtttctgcaaataagggagatttcaacttattaagttaccacaattttgcgaggaaaaattacacttaagccaaataaaatcatttcctagagctaagaaacagtctctcccatgataacaaatccttctgtaaaacccttgagataggtttatatttacaaaaaataagagcccactataaaatatggtcaatacagtcaatttatttcctctaaatacattgtgaaatcaaatttacactttcatcgtctttcggaaataacaatgtcacctggaaatgtaagaattttaatattatgtttcacatttcttctaggaaagtaattagtcttgttaattaggaaaaatgccaaaggcaaacattagcgcatgaactggacttgtggtcttccaagaacacttttataactaaattttttttttttgagtcggagtcttcctctgtcgcccgggttggagtggaatggtttgatctcggctcactgcaaccaccgcctcccgggttcaagcaattctcctgcctcagcctcccgagtacctgggattacaggcgcctgccaccacgccgggctaatttttgtatttttagtagagacggggtttcaccatcttggccaggctgctctatttggccaggttggtctcgaactcctgacctcgtgatcagcccgcctcagcctctcaaagtgctgggattacaggcgtgagctaccctgcccagcctataactaaatattttagttactttaaacacagctcaaaagtggaaacggcacaccagagctctagttccagcacagcactgtctagacaggtgatggacaagacatttttcctgtctggaacgcaatctgaaagaatgggtggatgggggttgggtcagatggatgatttctattaagttttccggggattctgacatgccctctaggttcacgtgagaatcaatggtccacatctgaggttttgggcctttagatgaccatcggaaaccctgggaagcatgttcgtaatattctgggatatcctcaaaatgtatacatcatcatgcctgggcatgaggttattcgtgtttttaattttaaaaggtaataaatggacgtggttttaaaacatatgagataaaaaatatccaaaatgaagtatctgtctcccatccttaacctcagatctaatccccagaagcaaccaccacttacaatttctactgaattcttccatattctatgcattcacaggtgaacatacatcacaagttacctgttttgtacccaaatggcggcataccatagtgttccacacttccctttgaaaatcatccccattggtacatacgagtcgacctgatgtgtcaggtatacatatacccaaatttacttaaacagctttctgctgacgggcaaggcagatatttccagtaattcgctattacaagcaatcctgaagtgaaacactgcgcacatcattgtacactgcggtacacgcatgtttctggtaaatccttaagacttaaaactggtgggtatttttaattttaatcgctatttccaaataggtgtcaaatcagctctccagagaattctgaagcgcagctgaaatgacgatgcacagcactccgcgattctaaggatcttccctgacattaaatattcgacttgcaaagccgaaactcagtccttccagactgggccagggctgccggaggccggccgttttccgacgcctcgcctctgagaacctcggggcggcttggtgcgcgcctcacccggcccggcgtcaccctcgcggtccagctgggcctcggcgtccggcaggaggaggaatcgccgccggagctgctgccgggcccgcgaggaggccatcttggtaccgccccgaaat

SEQ ID NO: 8331 - DNA, 411 bp, Homo sapiens
agggtggagtcggcctcaaaggttccgctctcatgtcggcaagtgtgatttgaattttaaaacactgagctttcccggtggaagagttcccaagtttattccgacctacggaagcccaggaggaccaggattaccgctgccgctggatgcgtccagggccgggatgcgcgaccgtgagacgctgcgcttccgaagccctcgcaggcttccgggtgccagagcaggagacataccctctgtccagccctccactctcagtccccagtttttttcctacttttgcttttcaggagtcgtccagcaagacttgaaaggaggagaaaggcctgctggacaggatgctagagcctggcagtgaccacttgggggccctgggcattaaataaacttcttggggcccgtttcgttatt

SEQ ID NO: 8332 - DNA, 3563 bp, Homo sapiens
tcttttaaaaattacctagaaataaggtttctttaattgctggttaaaatgctcccgtgcagaaaacaggaaagaacctgcctggttccttagcaaatctgagttccagtcccaggtccactactattagctgagtgacgcttccagcccgtttcccccgcctggaaactgaggacggcaacccccaccctcgcagggccggtgggaagacacaaagtgatgtgggcaagtgccaggcccacatggtaagtacccaactaatctcgcccctctcaggacctaccgggggcgggtgctacacttaatcaccgggaaacgcagctttccggggcggctgacggcccaccccctccgaccgggctgttctctcccgggccctgcctctcggtcctctgcagcggggaggacttcagcagctccccgggacgcccgttgcgaggacaccctgggcctgtgccctcctactagcaccgccctcctcgtctgcagtagccaatcaacacgaggcttgtaggctgccgttcctcgattggctacggctctagctccgcccgccgcacttggcgacggtgtccggcggggaggcggcggcttccggtctgggacggagctgtagcggcactgtaactgcgagggcagcgccgcgtgtgtaacggcgggggcgtgtcggcgggaaggacaatcgggccgggactcgcggtgtccgggtgaccgcggcttcccgggagcagacctctgtgggcactgtgaggcggaacggagcggcggggcaggagctgttctgggcaggtgaaggcaggctggtggctgaaggacctccttcttatcttccacaggggctggaagttaaaacccctgttggtgtttagtggtggtggttgttgttgttgtttgtttttgctttcttggtgtgcgggactgatttgcagaaaccgccactgacttaaaagtttccagttattgctcgtggggagggggttgtttgagaagatgtggctccctttatccagggcttctgtgacctccatctttttcctctgcagccttcatcccgcgtggagtctacccccaagcccttctcctcttcccaattcttgtcaccttcgaggaggccatggaaaccccaacacctttgccgcctgtacccgcctccccgacctgcaacccagccccacggacaatccagatcgagttcccacagcatagctcgtcgctgctggaatctctgaaccgccacaggctagagggaaagttctgtgatgtgtccctcctggtgcagggccgggaacttagggctcataaagcagtgttagctgctgcctctccttacttccatgacaagctgcttctgggggatgcgcctcgtctcactctaccgagtgtcattgaagccgatgccttcgaggggctgctccagctcatttattcagggcgtctccgcctgccactggatgctcttcctgctcatctccttgtggccagtggccttcaaatgtggcaggtagtagatcagtgctcagaaattcttagagaattagaaacttcaggtggtggaatttcagcccgtggaggaaactcctaccatgcccttctttccactacatcctctacaggaggctggtgcattcgctcttcgcctttccagaccccagtacagtcctctgcttctactgaaagccctgcttccactgagagccctgtgggaggggagggaagtgaactgggagaagtgctgcaaattcaggtggaagaagaagaggaggaggaggaagatgatgatgatgaggaccaggggtcagccacactctctcagactcctcagccccagagagtatcaggggtttttccccgtcctcatggaccccacccactgcccatgactgctactccccgaaagcttccagagggtgagagtgcaccacttgagcttcctgcccctcctgcactgccccccaaaatcttctacattaagcaggaacccttcgagcctaaggaggagatatcaggaagcggaactcagcctggaggagcaaaggaggaaaccaaagtgttttctggaggggacactgaagggaatggggagctagggttcttgttgccttcagggccagggccaacatctgggggagggggtccatcctggaaaccagtggatcttcatgggaatgaaatcctgtcagggggtggaggacctgggggagcaggccaggccgtgcatgggcctgtgaagctaggggggacaccccctgcagatggaaaacgctttggttgcctgtgtgggaagcggtttgcagtgaagccaaagcgtgaccggcacatcatgctgaccttcagccttcggccttttggctgtggcatctgcaacaagcgcttcaagctgaagcaccatctgacagagcacatgaagacccatgctggagccctgcatgcctgtccccactgtggccgtcggttccgagtccatgcctgttttctccgccaccgggacctatgcaagggccagggctgggccactgcccactggacttacaagtgactgctgaggctatacactagcttctagaacaagataaccactgctgctgatggatacttttccctcactgccatggcacaccagtcatggatcttgtaatcatgccaagagaatagatacattatggacctcttgttcttagatatgggcctctcagcctggcagatgtggaaactcaaatttctcgtcccactccaggttttggctagccaaccctgcaggaaagtggtttataggccattcatacttaagttgatcacttgcccatggtggacatttttgtggtggtgatgtccattaaggaaaccagattttcaattatttagtgagagaagagttagagcaaaagacagtggtaaatgttttattccgtctccatgaggaattgaaggagttggtctccacctagagatacatttgatttacagcttaagtaattcagaggctaagctctaagcttttttctctcattgctggaatgatttaagcagaagtccttttgtgtacttttaaaattgtatctttccaggagcccctcagattgtaccttgctttctcaccaatagacaccttcccgacacttttttaatgttgtagctgagcactttaacaagttgagcattccatgtttcattcttagaaccttctttaatagagggtcttccctcaacagcctgtgcctctggtctacctttgaccaccactgataactaatatattggtcacaatgactggaatgtgactagtgatctcaggagatggcactgtcctaaagtgctgtcagggtggcaccactgctctctgaacaacttaccttggtcagagggactcaggtttgggacagcacaagctgaaggctggagagtaacttgcatagtaggaccatacctcttcctttcccatcccacccacatatgatagacagcccctctgttgagatatggaggggacagatactggaatcgggggtgggacttgcagttacttaaaattttttaataaactgtgccctgaaacctaaactgac

SEQ ID NO: 8333 - DNA, 3560 bp, Homo sapiens
tcttttaaaaattacctagaaataaggtttctttaattgctggttaaaatgctcccgtgcagaaaacaggaaagaacctgcctggttccttagcaaatctgagttccagtcccaggtccactactattagctgagtgacgcttccagcccgtttcccccgcctggaaactgaggacggcaacccccaccctcgcagggccggtgggaagacacaaagtgatgtgggcaagtgccaggcccacatggtaagtacccaactaatctcgcccctctcaggacctaccgggggcgggtgctacacttaatcaccgggaaacgcagctttccggggcggctgacggcccaccccctccgaccgggctgttctctcccgggccctgcctctctgtcctctgcagcggggaggacttcagcagctccccgggacgcccgttgcgaggacaccctgggcctgtgccctcctactagcaccgccctcctcgtctgcagtagccaatcaacacgaggcttgtaggctgccgttcctcgattggctacggctctagctccgcccgccgcacttggcgacggtgtccggcggggaggcggcggcttccggtctgggacggagctgtagcggcactgtaactgcgagggcagcgccgcgtgtgtaacggcgggggcgtgtcggcgggaaggacaatcgggccgggactcgcggtgtccgggtgaccgcggcttcccgggagcagacctctgtgggcactgtgaggcggaacggagcggcggggcaggagctgttctgggcaggtgaaggcaggctggtggctgaaggacctccttcttatcttccacaggggctggaagttaaaacccctgttggtgtttagtggtggtggttgttgttgtttgtttttgctttcttggtgtgcgggactgatttgcagaaaccgccactgacttaaaagtttccagttattgctcgtggggagggggttgtttgagaagatgtggctccctttatccagggcttctgtgacctccatctttttcctctgcagccttcatcccgcgtggagtctacccccaagcccttctcctcttcccaattcttgtcaccttcgaggaggccatggaaaccccaacacctttgccgcctgtacccgcctccccgacctgcaacccagccccacggacaatccagatcgagttcccacagcatagctcgtcgctgctggaatctctgaaccgccacaggctagagggaaagttctgtgatgtgtccctcctggtgcagggccgggaacttagggctcataaagcagtgttagctgctgcctctccttacttccatgacaagctgcttctgggggatgcgcctcgtctcactctaccgagtgtcattgaagccgatgccttcgaggggctgctccagctcatttattcagggcgtctccgcctgccactggatgctcttcctgctcatctccttgtggccagtggccttcaaatgtggcaggtagtagatcagtgctcagaaattcttagagaattagaaacttcaggtggtggaatttcagcccgtggaggaaactcctaccatgcccttctttccactacatcctctacaggaggctggtgcattcgctcttcgcctttccagaccccagtacagtcctctgcttctactgaaagccctgcttccactgagagccctgtgggaggggagggaagtgaactgggagaagtgctgcaaattcaggtggaagaagaagaggaggaggaggaagatgatgatgatgaggaccaggggtcagccacactctctcagactcctcagccccagagagtatcaggggtttttccccgtcctcatggaccccacccactgcccatgactgctactccccgaaagcttccagagggtgagagtgcaccacttgagcttcctgcccctcctgcactgccccccaaaatcttctacattaagcaggaacccttcgagcctaaggaggagatatcaggaagcggaactcagcctggaggagcaaaggaggaaaccaaagtgttttctggaggggacactgaagggaatggggagctagggttcttgttgccttcagggccagggccaacatctgggggagggggtccatcctggaaaccagtggatcttcatgggaatgaaatcctgtcagggggtggaggacctgggggagcaggccaggccgtgcatgggcctgtgaagctaggggggacaccccctgcagatggaaaacgctttggttgcctgtgtgggaagcggtttgcagtgaagccaaagcgtgaccggcacatcatgctgaccttcagccttcggccttttggctgtggcatctgcaacaagcgcttcaagctgaagcaccatctgacagagcacatgaagacccatgctggagccctgcatgcctgtccccactgtggccgtcggttccgagtccatgcctgttttctccgccaccgggacctatgcaagggccagggctgggccactgcccactggacttacaagtgactgctgaggctatacactagcttctagaacaagataaccactgctgctgatggatacttttccctcactgccatggcacaccagtcatggatcttgtaatcatgccaagagaatagatacattatggacctcttgttcttagatatgggcctctcagcctggcagatgtggaaactcaaatttctcgtcccactccaggttttggctagccaaccctgcaggaaagtggtttataggccattcatacttaagttgatcacttgcccatggtggacatttttgtggtggtgatgtccattaaggaaaccagattttcaattatttagtgagagaagagttagagcaaaagacagtggtaaatgttttattccgtctccatgaggaattgaaggagttggtctccacctagagatacatttgatttacagcttaagtaattcagaggctaagctctaagcttttttctctcattgctggaatgatttaagcagaagtccttttgtgtacttttaaaattgtatctttccaggagcccctcagattgtaccttgctttctcaccaatagacaccttcccgacacttttttaatgttgtagctgagcactttaacaagttgagcattccatgtttcattcttagaaccttctttaatagagggtcttccctcaacagcctgtgcctctggtctacctttgaccaccactgataactaatatattggtcacaatgactggaatgtgactagtgatctcaggagatggcactgtcctaaagtgctgtcagggtggcaccactgctctctgaacaacttaccttggtcagagggactcaggtttgggacagcacaagctgaaggctggagagtaacttgcatagtaggaccatacctcttcctttcccatcccacccacatatgatagacagcccctctgttgagatatggaggggacagatactggaatcgggggtgggacttgcagttacttaaaattttttaataaactgtgccctgaaacctaaactgac

SEQ ID NO: 8334 - DNA, 115 bp, Homo sapiens
ttttttgtatttttagtagagacggggtttcaccgtgttagccaggatggtctggatctcctgacctcatgatccgcctgcctcagccttccaaagtgctgggattacaggcatg

SEQ ID NO: 8335 - DNA, 1092 bp, Homo sapiens
ctcggctggtcccagagcggggtgagggggcttatgcccccccctcccccagtgtgttgggtggggtggaattgaggttagggtgaggggtcagggtttaggagggtgtgtatgttgggaggacaggctagttgatctgtcctactctgacacacagtcccctctgccccttccttctctcttcttggtctctactcccagggggaggggggaacttactctaggaaaagccatgtctctctcccccagggtggggggacctgtgttggaggaggggtgttggggggcccccttccatgactctgtcccctgggggaggtaggacagggctgggcttccctctcatcctccccctcccaatctccttccacctccctccctcccgccagctccacgatttttcggtgtttctctgtacatagttttctggcgggataggggaggtaggatggatggggtttggggtgggtaggccatgggaggggagaagcccctccttggcaccccctcttccctgactgctgtcccctacccagccttgcccccttcatccttttgcgtttggtattgagactctcctagactctactcctctttcttttgtatggacagttccccttcagtcccatccccctacacatacacccagccggggccaaatttatacttatataaaagttgtaaatatgtgaaattttatccctgtgccctttccccacctcaggccctacccctggaccctccccaaccttccttctctcttctttggctgttgtaattatctggggtttgtactgtacatatccggggtgtgtgtgtgtgggctgggggcaacccttctgtacagagcttcctggccccctccccccccgcccctctgcttccctccccacccaccacctcaagggtagggagttgctcttcctacctgttttattttgttttctcgttctccctccccaccccactcccagccttatctatcccccctcactgtccccttttctccactcccagccccatttcctttttttctggagtgtgtggtgaaacagaaaaaaacatgtttaataaacggagattgttctttta

SEQ ID NO: 8336 - DNA, 1092 bp, Homo sapiens; identical to SEQ ID NO: 8335

SEQ ID NO: 8337 - DNA, 117 bp, Homo sapiens
tagtagagacggggtttcaccgtgttagccaggatggtctggatctcctgacctcatgatccgcctgcctcagccttccaaagtgctgggattacaggcatgagccactgcacctgg

SEQ ID NO: 8338 - DNA, 981 bp, Homo sapiens
gaattttatgaataagtaatgaagtctaattttccgttatcatagccattggttaaaaatgcatgtctgttaggacattgtaattattttgtattacttaggaaaacttttatgattctactcttttaatttttttaataattactttatgacttcttcattagggattctctcctccagtgcgtacgcagatcttctgaaaaggaatctgacaaatttagttgctgcatttttctaaattgctttcaagactacccagcacttcagatacttttcatggcccttttttcccaaagtgttctccaggatgccttttgatctgcacgggcaatcccattagcagtgatggcttaaggttcccacagaaactctgccacagaggcactgacaccagaccaggcgtgatccctaacagcttgctgtaccgactcatatgagggctgtcttggtccgtctcatttaaggtttggcttctccaaagattagacacccttgttttcgttcaacctttgtttggctttgaagcatcatgcacttgggtcttgaaatcttgggctcaccgctgcttgtaccagtatcttctaccctccggttgtttgtggccattatcaaacaaacaccatgccaactaggtgtaaatgcagactgatattctgaagaatccaggaagggctgggcatggtgcctcattcctgtaattctagcactttgggaggctgaggcaggaggatcgcttgagcccaggagcttaagaccagcttagggaacatagtgagacccctgtctctacaaaaagtaaaaaataaaataaattggctgggtatggtggcacatgcctgtagtcccacccactcgagaggctgtgatgggagaatcacccgaggctggggaggttgaggccgcagtgagccgagatcgagtcactgcactccagcctggacaacagagtgagaccctgtctcaaaaaaaaaaaaaaaaaaa

SEQ ID NO: 8339 - DNA, 979 bp, Homo sapiens
gaattttatgaataagtaatgaagtctaattttccgttatcatagccattggttaaaaatgcatgtctgttaggacattgtaattattttgtattacttaggaaaacttttatgattctactcttttaatttttttaataattactttatgacttcttcattagggtttctctcctccagtgcgtacgcagatcttctgaaaaggaatctgacaaatttagttgctgcatttttctaaattgctttcaagactacccagcacttcagatacttttcatggcccttttttcccaaagtgttctccaggatgccttttgatctgcacgggcaatcccattagcagtgatggcttaaggttcccacagaaactctgccacagaggcactgacaccagaccaggcgtgatccctaacagcttgctgtaccgactcatatgagggctgtcttggtccgtctcatttaaggtttggcttctccaaagattagacacccttgttttcgttcaacctttgtttggctttgaagcatcatgcacttgggtcttgaaatcttgggctcaccgctgcttgtaccagtatcttctaccctccggttgtttgtggccattatcaaacaaacaccatgccaactaggtgtaaatgcagactgatattctgaagaatccaggaagggctgggcatggtgcctcattcctgtaattctagcactttgggaggctgaggcaggaggatcgcttgagcccaggagcttaagaccagcttagggaacatagtgagacccctgtctctacaaaaagtaaaaaataaaataaattggctgggtatggtggcacatgcctgtagtcccacccactcgagaggctgtgatgggagaatcacccgaggctggggaggttgaggccgcagtgagccgagatcgagtcactgcactccagcctggacaacagagtgagaccctgtctcaaaaaaaaaaaaaaaaa

SEQ ID NO: 8340 - DNA, 115 bp, Homo sapiens
agcagagacggggtttcaccgtgttacccaggatggtctcgatctcctgacctcatgatccacctgccttggcctcccaaagtgctgggattacaggcgtgagccaccacgcccg

SEQ ID NO: 8341 - DNA, 6804 bp, Homo sapiens
cggaagacaccctgtgccatgtggaggggccctgccctctggggcaagaggtcagggaggagggcgctggctgggttcccaggcgcctgcccctgagaggcgcaaatggccctaatggggttattaggtggagcagatgcgtccggctcctgctgtggaggaaatgctcaaatgatcttgaagctaccaggctgggagaggcaggcaggggatggggcagacaggctgccaacctctgtgagataagccctggcctctccagaaccttttcagaacagctatgagccccaaccctggggctgagtgacccaagacagatcactcacactctctgggcctcagtttccccttacataaaaagcaatggttaggccaggtgcagatggctcacacctctaatcctagtgctttgggaggccgaggtgggaggattgcttgagaccaagagttcaagtccagcctgggcaacatagcaacaccccatctctacaaaacataaatacaaaaattaaggccgggcatggtggttaaggccaggcgtggtggctcacacttggaatcccagcattttgggaggcagaagcaggaggatcacctgaggtcaggagtttgagaccaacctggccaacatggtgaaaacccgtctctatacaaaatacaaaaattagccagccatggtggtgcatgcctgtaatccctgctactgtggaggctgaggcaggagaatcacttgaacccaggtgaaggaggtttcagtgagcccagatcatgccactgcactccagcctgggtgacagagaacaagactgtctcaaaacaaaacaaaagaaaaattagccagacatggtagtgtgaacctgcagtcccagctactatggaggctgaggtgggaggatcgcttgagcccaggagttggaggctgcagtgagctatgatggcacccctggacaccagcctctgtgacagagcaagagcctgtctctaaagtgaaacatttttaaaagggaaggtgaactgggtgaactctaagaccctgcatttcacaaacccttgcccacaccctgtatgcgtcgggccctggcagggaacagatggtacgctgtctcacagggcaattgagagcgtttacaaaggtgtgggcagcattaggggaatggaccagagagggtgacctgggacttggctgtaatggggccctaagcactcctggatctgattgctgatgggagggagggagtgatgtttcccgatcagcaggcagtggccatgggtgaggggccccgcaggagcaggggctgtaagtgaaaggatgaagccaccagagggaactgggctctgtcttcccgccccctgatctcatgccagtgcctccactggccacacctcacgagaagcaagagagtgtggggtctcagtggtgcagtccctggaggccaatctgctgggtcagagcaggacagagaaagcgaaatggacatacataggcacacgccgctttcatgctgatccagtggaattagatccttcctgttctttcttttgtttctttctttttttttttttccttttttagagatggggtctcactctgttgcccaggctggggtatggtggcgtcttcatagctcactgtagcactgaactcctgggctcagacgatcctcccaccttggcctcccaaagtgctgggattacaggcactacaggcacctagctaactttctttttttttgtagaggcagggtctctgtcacccaggcttgagtgcagtggcacgatcatagctcactgcagccttgaacccctgggttcaagcaatcctcccacctcagcctcccaagtagctgggattataggtatgtgccaccacccagctaatttttttattttttgtagagatggggtctcgccatgttgcccaggctagtttggaactcctgagctcaagagatgctcccaccttggcctcccaaagtgctgaaattacaagcataagccaccatgcctggcctcccttcctggccttctggtctccagactggagagagggccacaaagtcctgcccagacagagggctgctaaggctggggtggggctgggggtgtgcagaagggactctgcaggggctgacctctgagtctcaggggacagggcaaatttttttttttttttttttttgagatggagtcttgctctgtcgcccaggctggggtacaatggcacgatctcggctcactgcaatctccgcctcctgggttcaagtgattctcatctctcagcctcccgagtagctgggattacaggagtgcaccaccatgcccagctgatttttgtatttttagaagagattgggcggggtggggggtggggtgcgggtttcaccgtgtggcccaagctggtcttaaactcctgacctcaagtgatcctcccgcttcagcctccccaggtgctgggattacaggcatgagccaccgcacccagcggggacaggacaattttgccagctggagaaggggtggcccccaaatgtccccttcaccaccctcctgcctcttccttcagaacactttttccctgaagccctcctgggtagccccctacccacatgcctcagcattgggaggtggggagtatgggggtcccccttctcctcagccccatttggagtaatgtcctgtgcagctgagctcacaactcctcctccacctgtcccttcacccggtgtcactggcaattgctcacttcctgggcctgcacccactcagctcccctatccctgggcatcagcctcagccagctcccatgtggactaatgacccttgtccctcccctcagctgcctctcttttttctttttttttttgtttttgagacagagtctggctctgtcacccaggctggagtgcagtggcgcgatcttgactcattgcaacctccacctcctgggttcaagcgattctcgtgcctcaccctcctgaatagctgggattacaggcacccgccaccatgcccggctgatttttgtatttcggtagagacggggtttcaccatgttggccaggctggtctcgaactcccgacctcaggtgatccgcccgcctcagcctcccaaattgctgggattacaggcgtgaggcagctcgcccggcaaccctcagctgcctctcatatgtccttggccccctggccatctctgaccagacatctaggaggcccctcctgccaatatgcttccccgacagccgagcccaaagctgtctccagccctgcaccttgtcttggttccccgggtgctccctttcccaggctgaagcctggacagccccaggcaacctctctccctgaccacagtaccacctggccacatgccacactgctttctacagcagacaccgcctggccacaaagacttaagccacttccttgggtcctgctcagcgctgagcccagagcccaatctcagggactgggagagagcccagtacatggccagtgggattctcccgatgaaaatcccagccatgtgaggctggcttctccaggttctctgaggcctgtgagtccagggctggctggagggaaagcccctggccccttaaagccactgatcatgttcccatagagggatcctgagaatcccctgggagagaaaatgtcggagccccagtcctggcacccccctgaccagcttgggcctcagcctcctcatccatgaaaagaatggacaagaggggtctgggtgcggtggctcacgcctgtaatcccagcactttgggaggccgaggcaggtggatcacgaggtcaggagttcaagaccagcctggtcaacatggcaaaaccctgtctctactaaaaatacaaaaattagccggttgtggtggtgcacgcctgtagttgcagctatttaggaggctgaggcaggaggatcactggaacccgagaggcagaagttgcagtgagctgagattgtgccacggcactccagcttgggcaacagagccagactccatcttaaaaaaaaaaaaaaaaaggagggacaagaggcaccagaagctcctgtccaggtctgggcctccctcgggtcactcagttctcccccattcattcattcattcactcactcactcactcactcattcccacactctgcagccactgacttcagctagccatgctggatgctaagacatagagtcccggccatcaaggccagtccatctcagtggcatctagacatgcacagagatgaccagggagcccctaagggacagagaggcacaccctgcctcctgatcccatctgggggctgcatgaaggaggggcacaggtgtggccttgaaggctgggtaaggggctgggagggctttaggggcattccagggggcaggcacagaactggaggctctgccgggcacacccacaggagagcaatggctggagggtgacatggactgcagggtatggccgcggcagcccagctcttaaggggacagcctgggaaaacagacttagggacaatgatcttgagccatgaaatgatgtccaatgccccttgtgccacctgacatcagcctgattaatgaacaaacagaagaggaagcaggggacctgtgtgtccctctctctgcttttctgtctttctctgtgccccctctcttatgtctctcacgctgtctcttgtccttgtttttaactctgacacgccatgggaacttggctcacttcctagggggaagctgtctggactggcccagagatgggcaccaccatttcccaataaacacaagataaaatcagagagctggcgtcagttccgcggctggactcagtggggaaaagggcaaaaagcagcagaaataagagcagggaaagaacaggggctgggtgcgatgggtcccatctgtaatcccagcgctttgggaggcctaggtgggaggatcgcttgagcccagaagttcaagaccagcctgggcaacatacggagacccccatttctaaaagttttaaaaattagctgggcatggtagtgtgcatctgtggtcccagctactcaggaggccgaggtgtgaggatcgcttgagcccaggaggtcgaggctgcagtgagctatgattgcatcactgcactccagcccgggcacagagcaagaccctgagaccttggcagaaagaaagaaagagagaaagagagaggagagggagagggagaaagaaaggggggggggagagagagagagagagagagagagagagagatgaaagagaaggaaggaaagaaagaaaggaaagaggaaggaaggaaggagaggggaaggaaggaaggaggggaaggaaggagagagagaggaaggaaggaaggagggaagggaaggaaaggggaggggaggggaggagagggagaaaagaaaggaaaaagaacaagtggatatcaggggacagaaaccattcgcagcccatccctcggcagatgcagagggagtcagcctggaacccccacccctgctggctgtgccccaccgctgtctccacaccccagcccttcctccagacacccagccgtccactgcagcaggagcacaggtgccccaaggggaccactgttggaaaccaggcagccctccactcacccacacagtgtgtctctgcaccccctctttgacatgggagccggggcgctcttggaaataagggtttacctgaggggtctgaagacttgggcagtggggggctgtgaagccttggggagggaatcagcttgtccaagagtctggggcagcgagtggtcgggggctacccggtctgaccccatcaaagtaaccttcctgggggatatttccattgcagggtcacaaaaaggcaagggctaaggttcgagagaggggtctctctggggtcccagccaccctgctgtgggggcccttcccaagcaggacactccaggcaaaggggatggctttcccttgctcccaggacccataggtgaggtcctggctgaaatgcagactgtccccagatgcccctggggacttgtagggatttgggggattcagtgttgcaggagctggaacccttgcttgctggacgggtttgagctgtgctgtcaggcccaaagctcctgggtctccaggatggtgcatgagggctcacaccagctgctccctgccacccttcccccacctcccaccccttctcctggagccccagtcctctggtcctccaagctcagcttcaaatgcttccaccacttctgtctcttctacctcgagtggtttgtcaacctccaaatcacacggagttcaagaatatctcaaatatcgaccaggtgcggtgtctcacacctgtaatgccagcactttgggaggccgaggcgggtagatcacctgaggtcaggagttcgagaccaggctggccaacttggtgaaactctgtctctactaaaaatacaaaaattagccgggcgtgatggtgggtgcctgtaatcccatctacttgggaggctgaggcaggagaatctcttgaaccagagaggtggagattgcaatgagccaagattgtgccactgcactccagcctgggcaacagagtgagactctgtctcaacaacaacaacaacaaaaagaatatctcgaatacaaaaattagctggccgtggtagtttacacctgtaatccgagctactcaggaggctgaggcagtagaatctcttgaacctgggaggcagaggttgcactgagctgagatagcgccactgcactccagcctgggtgacagagcaagacgtcatctcgaaaaaaaaaaaaaaaaa

SEQ ID NO: 8342 - DNA, 6807 bp, Homo sapiens
cggaagacaccctgtgccatgtggaggggccccgccctctggggcaagaggtcagggaggagggcgctggctgggttcccaggcgcctgcccctgagaggcgcaaatggccctaatggggttattaggtggagcagatgcatccggctcctgctgtggaggaaatgctcaaatgatcttgaagctaccaggctgggagaggcaggcaggggatggggcagacaggctgccaacctctgtgagataagccctggcctctccagaaccttttcagaacagctttgagccccaaccctggggctgagtgacccaagacagatcactcacactctctgggcctcagtttccccttacataaaaagcaatggttaggccaggtgcagatggctcacacctctaatcctagtgctttgggaggccgaggtgggaggattgcttgagaccaagagttcaagtccagcctgggcaacatagcaacaccccatctctacaaaatataaatacaaaaattaaggctgggcatggtggttaaggccaggcgtggtggctcacacttggaatcccagcattttgggaggcagaagcaggaggatcacctgaggtcaggagtttgagaccaacctggccaacatggtgaaaccccgtctctacacaaaatacaaaaattagccagccatggtggtgcatgcctgtaatccctgctactgtggaggttgaggcaggagaatcacttgaacccaggtgaaggaggtttcagtgagcccagatcatgccactgcactccagcctgggtgacagggaacaagactgtctcaaaacaaaacaaaagaaaaattagccagacatggtagtgtgaacctgcagtcccagctactatggaggctgaggtgggaggatcgcttgagcccaggagttggaggctgcagtgagctatgatggcacccctggacgccagcctctgtgacagagcaagaccctgtctctaaaatgaaacatttttaaaagggaaggtgaactgggtgaactctaagaccctgcatttcacaaacccttgcccacaccctgtatgcgtcgggccctggcaggaaacagagggtacgctgtctcacagggcaattgagagcgtttacaaaggtgtgggcagcattaggggaatggaccagagagggtgacctgggacttggctgtaatggggccctaagcactcctggatctgattgctgatgggagggagggagtgatgtttcctggatcagcaggcagtagccatgggtgaggggccccgcaggagcaggggctgtaggtgaaaggatgaagccaccagagggaactgggctctgtcttcccgccccctgatctcatgccagtgtctccactggccacacctcacgagaagcaagagagtgtggggtctcagtggtgcagtccctggaggccaatctgctgggtcagagcaggacagagaaagcgaaatggacatacagaggcacacgccactttcatgctgatccagtggaattagatccttcctgttctttcttttctttctttctttttttttttttttccttttttagagatggggtctcactctgttgcccagggtggggtatggtggcgtcttcatagctcactgtagcactgaactcctgggctcaggcgatcctcccaccttggcctcccaaagtgctgggatttcaggcactacaggcacctagctaactttctttctttcttttttttttttttgggtagaggcagggtctccgtcacccaggcttgagtgcagtggcacgatcatagctcactgcagccttgaacccctgggttcaagcaatcctcccacctcagcctcccaagtagctgggattataggatgtgccaccacccagctaatttttttattttttgtagagatggggtctcgccatgttgcccaggctagtttggaactcctgagctcaagagatgctcccaccttggcctcccaaagtgctgaaattacaagcataagccaccatgcctggcctcccttcctggccttctggtctccagactggagagagggccacaaagtcctgcccagacagagggctgctaaggctggggtggggctgggggtgtgcagaagggactctgcaggggctgacctctgagtctcaggggacagggcaaatttttttttttttttttttttgagatggagtcttgctctgtcgcccaggctggagtacaatggcacgatctcggctcactgcaatctccgcctcctgggttcaagtgattctcatctctcagcctcccgagtagctgggattacaggagtgcaccaccatgcccagctaatttttgtatttttagtagagattgggcggggtggggggtggggtgcaggtttcaccgtgtggcccaagctggtctcaaactcctgacctcaagtgatccttccgcttcagcctccccaggtgctgggattacaggcatgagccaccgcacccagcggggacaggacaattttgccagctggagaaggggtggcccccaaatgtccccttcaccaccctcctgcctcttccttcagaacactttttccctgaagccctcctgggtagccccctacccacatgcctcagcattgggatgtggggagtgtgggggtcccccttgctcctcagccccatttggagtaatgtcctgtgcagctgagctcacaactcctcctccacctgtccctccacccggtgtcactggcaattgctcacttcctgggcctgcacccactcagctcccctatccctgggcaccagcctcagccagctcccatgtggactaatgacccttgtccctcccctcagctgcctctcttttttctttttttttgtttttgagacagagtctggctctgtcacccaggctggagtgcagtggcgcgatcttgactcattgcaacctccacctcctgggttcaagcgattctcgtgcctcaccctcctgaatagctgggattacaggcacccgccaccatgcccggctgatttttgtattttggtagagacggggtttcaccatgttggccaggctggtctcaaactcccgacctcaggtgatccgcccgcctcagcctcccaaagtgctgggattacaggcatgaggcagctcgcccggcaaccctcagctgcctctcatatgtccttggccccctggccatctctgaccagacatccaggaggcccctcctgccaatatgcttccccgacagctgagcccaaagctgcctccagccctgcaccttgtcttggttccctgggtgctccctttcccaggctgaagcctggacagccccaggcaacctctctccctggccacagtaccacccggccacatgccacactgctttctacagcagacaccgcctggccacaaagacttaagccacttccttgggtcctgctcagtgctgagcccagagcccaatctcggactgggagagagcccagtacatggccagtgggattctcccgatgaaaatcccagccatgcgaggctggcttctccaggttctctggggcctgtgagtccagggctggctggagggaaagcccctggccccttaaagccactgatcatgttcccagagagggatcctgagaatcccctgggagagaaaatgtcggagccccagtcctggcccccccttgaccggcttgggcctcagcctcctcatccatgaaaagaatggacaagaggggtctgggtgcggtggctcacgcctgtaatcccagcactttgggaggccgaggcaggtggatcacgaggtcaggagttcaagaccagcctggtcaacatggcaaaaccctgtctctactaaaaatacaaaaattagccgggtatggtggtgcacgcctgtagttccagctatttaggaggctgaggcagtaggatcactggaacctgagaggcagaagttgcagtgagctgagattgtgccacggcactccagcctgggcaatagagccagactccatcttaaaaaaaaaaaaaaaaggagggacaagaggcaccagaagctcctgtccaggtctgggcctcccttgggtcactcagttctcccccattcattcattcattcattcactcactcactcactcactcactcactcattcccacactctgcagccactgacttcagctagccatgctggatgctaagacatagagtcccggccatcaaggccagtccatctcagtggcatctagacatgcacagagatgaccagggagcccttgagggacagagaggcacaccctgcctcctgatcccatctgggggctgcatgaaggaggggcacaggtgtggccttgaaggctgggtaaggggctgggagggctttaggggcattccagggggcaggcacagagctggaggctctgccaggcacacccacaggagagcaatggctggagggtgacatggactgcagggtgtggccgcggcagcccagctcttaaggggacagcctgggaaaacagacttagggacaatgatcttgagccatgaaatgatgtccaatgccccttgtgccacctgacatcagcctgattaatgaacaaacagaagaggaagcaggggacctgtgtgtccctctctctgcttttctgtctttctccgtgccccctctcttatgtctctcacgctgtctcttgtccttgtttttaactctgacacgccgtgggaactcggctcacttcctagggggaagctgtctggactggcccagagatgggcaccaccatttcccaataaacacaagataaaatcagagagctggcgtcagttccacggctggactcagtggggaaaagggcaaaaagcagcagaaataagagcagggaaagaacgggctgggtgcgatgggtcccatctgtaatcccagcgctttgggaggcctaggtgggaggatcgcttgagcccagaagttcaagaccagcctgggcaacatacggagacccccatctcttaaaaagttttaaaaattagctgggcatggtagtgtgcatctgtggtcccagctactcaggaggccgaggtgtgaggatcgcttgagcccaggaggtcgaggctgcagtgagctatgattgcatcactgcactccagcccgggcacagagcaagaccctgagaccttgtcagaaagaaataaagagagaaagagagaggagagggagagggagaaagaaagggagagagagagagagagaaagatgaaagaaagaaaaagaaagcaaagaaagaaggaaggaaagaaagaggaaagaggaaggaaggaaggagaggggaaggaaggaaggagaggggaaggaaggaaggaggggaaggaaggagagaggaaggaaggagaggggaaggaaggaggggaaggaaggagagagaaaggaaggaaggaaggagggaagggaaggaaaggggaggggaggagaaggagaaaagaaagaaaggaaaaagagcaagtggatatcaggggacagaaaccattcgcagcccatccctcagcagatgcagagggagtcagcctggaacccccacccctgctggctgtgccccacggctgtctccacaccccagcccttcctccagacacccagccgtccactgcagcaggagcacaggtgccccaaggggaccactgttggaaaccaggcagccctccactcacccacacagtgtgtctctgcaccccctctttgacatgggagccggggcgctcttggaaataagggtttacctgaggggtctgaagacttgggcagtggggggctgtgaagcctcggggagggaatcagcttgtccaagagtctggggcagcgagtgggcgggggctacccggtctgaccccatcaaagtaaccttcctgggggatatttccattgcagggtcacaaaaaggcaagggctatggttcgagagaggggtctctctggggtcccagccaccctgctgtgggggcccttcccaagcaggacactccaggcaaaggggatggcttccccttgctcccaggacccataggtgaggtcctggctgaaatgcagactgtccccagatgcccctggggacttgtagggatttgggggattcagtgttgcaggagctggaacccctgcttgctggacgggtttgagctgtgctgtcgggcccaaggctcctgggtctccaggatggtgcatgagggctcacaccagctgctccctgccacccttcccccacctcccaccccttctcctggagccccagtcctctggtcctccaagctcagcttcaaatgcttccatcacttctgtctcttctaccttgagtggtttgtcaacctccaaatcacacggagttcaagaatatctcaaatatcgaccaggtgcggtgtctcacacctgtaatgccagcgctttgggaggccgaggcgggtagatcacctgaggtcaggagttcgagaccagcctggccaacttggtgaaactctgtctctactaaaaatacaaaaattagccgggcgtggtggtgggtgcctgtaatcccatctacttgggaggctgaggcaggagaatctcttgaaccagagaggtggagattgcagtgagccaagattgtgccactgcactccagcctgggcaacagagtgagactctgtctcaacaacaacaacaaaaagaatatctcgaatacaaaaattagctggctgtggtagtttacacctgtaatcccagctactcaggaggctgaggcagtagaatctcttgagcctgggtgacagag

SEQ ID NO: 8343 - DNA, 240 bp, Homo sapiens
gggattacaggcgtgagccactgtgcccagctcatgcaacacttatcatcaggattcccgctcagtgctcggaccccaggggccagagatgcccgcggcaaggttctgccctcaaggtgcccactgctttagggggaagacagtgatactaccacatacgagagaaggagaggacacaactgtcagggagatggactgttggagcttcagaggcagcatcttggggaggggtggctttga

SEQ ID NO: 8344 - DNA, 1443 bp, Homo sapiens
gttcgagaccagcctggccaacatggcgaaaccctcgtctctactaaatatacaaaaattaactgggcgtggtggtgagtgcctgtaatcccagctattcgggagcctgaggcagggcaattgcttgaactcgggaggcggaggttgcagtgagccgagatcgcaccactgtacgacagagcaagactccgtctcaaaaaaacaataaaaagaattgctggaggagggaagtgaggggcggctggcgggggactgctgggctggtgcagagggagtcaaggatccctaagagagaggcaggggtgttcagctctcccacctctgctggatgaacttgcagagcctccttggtgacccagcccgtgcagagactctgctcaggacaacacccttgcctgggacccccacatctctggccccagcagcagcccttgggggggtccctttatcttcctccactcctacccaggcttcctcagcaggagatgaggcaggacatttccactccctttctggaaggttcagaaggttaatgagagctaagcacgtaagtccatttagggggatgaacttctgggaagagaggaacctgggtctgggctgacgtccaagggcgggctgggtgacggtccctctgatcacggaccctgtccacccactgcccagggccctgcctcgacccctctgaccagccaccgagccccagagggatctccatgaatgtcagagacattgactggaggccttatctccagtgggagaccccttctcttcccactgtgggccggttccagcctgggctgtccaggaagtgacctctcagggcctgggaagggtgtggccagtggttcttggttgtactcaactcatctgccttgggtctaaggctggggtgaatggaagggcccacctggaccctggagggacaccaggctcatactaaaatcccaaaaagtgaaaagctttccccaggcccaagcagagaaactggaccttgaagctacatctctggacttagtcctcaaagtaggagacatttgcctctaagctgttctctcccaccccacctttctgtgagccgccggttccctgttgtccacatcaagctgtgtgctgggcactgggtgcaggaatagcttgaccacagtctctatcctgggggtaaaggggtgaccagcccacagagggatggactgcaaacagacagtcccaaagtgccatgagagaagctctcagggcctgggcgtgatggttcatgcctggaatcccagcactttgggaggccgaggtgggtggatcagttgaggtcaggagttcgagaccagcctggccaataaggtgaaactccatctctactaaaaataaataaataaataaataaataaataaataatacaaaaattagccgggcatggtggcatgcacctgtaaacccagctactt

SEQ ID NO: 8345 - DNA, 1443 bp, Homo sapiens
gttcgagaccagcctggccaacatggcgaaaccctcgtctctactaaatatacaaaaattaactgggcgtggtggtgagtgcctgtaatcccagctattcgggagcctgaggcaggggaattgcttgaactcgggaggcggaggttgcagtgagctgagatcgcaccactgtacgacagagcaagactccatctcaaaaaaacaataaaaagaattgctggaggagggaagtgaggggcggctggcgggggactgctgggctggtgcagagggagtcaaggatccctaagagagaggcaggggtgttcagctctcccacctctgctggatgaacttgcagagcctccttggtgactgagctggtgcagagactctgctcaggacaacacccttgcctgggacccccacatctctggccccagcagcagcccttgggggggtccctttatcttcctccactcctacccaggcttcctcagcaggagatgaggcaggatatttccactccctttctggaaggttcagaatgttaatgagagctaagcacgtaagtccatttagggggatgaacttctgggaagagaggaacctgggtctgggctgacggccaagggcgggctgggtgacggtccctctgatcacggagcctgtccacccgctgcccagggccctgcctcgacccctctgaccagccactgagccccagagggatctccatgaatgtcagagacattgactggaggccttatctccagtgggagaccccttctcttcccaccgtgggccggttccagcctgggctgtccaggaagtgacctctcagggcctgggaagggtgtggccaatggttcttggttgtactcaactcatctgccttgggtctaaggctggggtgaatggaagggcccacctggaccctggagggacaccaggctcgtactaagatcccaaaaagtgaaaagctttcctcaggcccaagcagagaaactggaccttgaagctacatctctggacttagtcctcaaagtaggagacatttgcctctaagctgttctctcctaccccacctttctgtgagccgccggttccctgttgttcacatcaagctgtgtgctgggcactgggtgcaggaatagcttgaccacagtctctatcctgggggtaaaggggtggccagcccacagagggatggactgcaaacagacagtcccaaagtgccatgagagaagctctcagggcctgggcgtgatggttcatgcctggaatcccagcactttgggaggccgaggtgggtggatcagttgaggtcaggagttcgagaccagcctggccaataaggtgaaactccatctctactaaaaataaataaataaataaataaataaataaataatacaaaaattagccgggcatggtggcacgcacctgtaaacccagctactt

SEQ ID NO: 8346 - DNA, 290 bp, Homo sapiens
atgttgcccaggctggtctcgaactcctggtctcaagtgatcctcctgctgggattacaggcgtgagccactgtgcccagctcatgcaacacttatcatcaggattcccactcagtgctcggaccccaggggccagagatgcccgtggcaaggttctgccctcaaggtgcccactgctttagggggaggacagtgatactaccacatacgagagaaggagaggacacaactgtcagggagatggactgtttgagcttcagaggcagcatcttggggaggggtggctttga

SEQ ID NO: 8347 - DNA, 3987 bp, Homo sapiens
ctcgctctgccccgcgtcccagccatggcgacatcctcggccgcgctgccccgaatactcggcgcgggtgagcgcgcgcttgcgggaccctggggaggagcatgcgaggaggatgcggaggggcgcggggacccgatggagcggcggggacgtggaggggacccggggcgagcgcggaggggactcggggagggcgcggggacgcggaggggacccgttagggacgcggaggggcccgttggggatgcggtggggagcgggcgtggtgcattcgggactcggcgccaggacctctatctacttccccccaggtgcccgggccccgtcgcgctggttgggctttctcgggaaggcgaccccccggcctgctcggccgagccgcaggacgcttggaagcgcgacggcccttatgatccgcgagtcggaggacagcaccggtaacactgggcgcccagccgagttgggtgggaacgaggagaggccggcagccgcgggggatgcgaaccctagaggggcctgggcgctgcacgcggtcgaaactgcgcgctccgctgggctcctcccactcccgtgctcgccgccgctcggtcctgcctgacgtagcacagcgggctgaggccaccgcctcaccatggatagggtgagagggagcgggcgggccagtggttagcacaggcttcgctccctaggggggtgtcactggaccaccgaggcccggagccccgagctcgcccaggcgggcccaagtgacctgggggcactgggcttggagtctgcccaccttgctggactcctgatggggactttctggctggccacctgagaccacaaggcggggaggtgccagaaagacctgagcaacccgctgggcccctctctttttctcctctgtcttccaagtaagaccaagggacggggttgaccaggttcgaccaggcttacccaggagcaaggtcgggatcagaacctggctccagccctctgtttcctgaaaaggtccctgtgcttccaggtctttcctggggctgctgggctcccggctccccacctcggtgtcacagaaggcacttgggagcaggggtgggcgggaactgcgctctgcctgtctctgctgccaccggtgggagacgcagcgtcgctcctcctccctgccgtagatttcaacgacaagattttgaatgagcccctcaagcactctgacttcttcaatgtcaaggaactgttttccgtgagaagcctcttcgatgcccgagtccatctgggacacaaagctggctgtcggcacaggtaggtgacacccccatctgagcccggggcggttcccaggaggaacctgggacctgctctggttctagggccacttttgaactggcctatgtcagttttaggtgattacagccccatcctcctccacatgggaatacagagccccacagagaagcaggagtttattcctcagcttggcggacgctcttgtgtgccttggtgtggcgctcacagcccttgatagggcaggcctgctgggggttgcaggactccacgggttcagaaatggaaaggctgagggcagaacctgtaaggttggtccccccggatcgggctgggccttctgggctgcggggaggaggaatgactggtcctgtattctcacatggtcattttgactgctgtggggggaggggatgggaggggcaggtgggaggccagggaggaggttggtgtgggcgttcagggtgaaggtggcggggcttaaatcgcagtagcggaagagctggagcagcaggtggacatgaggcagcagggcagagccagtgggccttgggctggggtgggaggtggctggggccgaagggatcaaacacctgctcttcgggtggagcctggtactggttactgagatggtgaaaaccaggggagacctgggggacatcacaagcttggttcctaccaggtatgaaccctttgctgccccagtggagaggtcacacggttaccaggagggatgggcctgggcccagggagccatcagcatcgggggctggcaggtgtttccagagcatcggaaaaggaggtccaaggtggagccctgggtgctccagtgtttggagtcagtgaagagggacagccgggggtaggggagatgtggttctctgttgatgctgctgagaagtgaattcaaggctgtgaccttggcaagatggaggtcgccagtgccttgatgggcagggttgcttgagaggaagggacagaacccagtgggagtagactggaggtgaggacctgggaaccgcaaatgtggatgactcgcctgtcacgcaccgagaggcgggggtgtctcccatgccccgcttttctcagcccaggccagcagtggtccagtgctttggatcagggttccccgcccaggcttggccactcctgccctgatcccttaatgcttttggcccagagcaccccgctaagtccaaccccagaggggcctcatccgcaaagcctcgggaagaggacagtgacggaggcggctgccctgtgagctgcacggggcagaatgtccttttggcgtcatgttggatgtccacacatccatatggggtcagttctattaggattccttcgggaagaggtagagggtaggaggggttaagccacgagacgaggcatgcagaggggtggcctggatgggtctgcactgctgtccatgcacacggggagcgttgcaaattgtgcttcccagcccatagtgcccccacagaggagcccgggagtccctggtgggcgtctgtgttcctgcaaggagccagtggagatggccccgtgaactctcatcccccttgccttggtggggtctctggcaggtttatggagccgtacatctttgggagccgcctggaccacgacatcatcgacctggaacagacagccacgcacctccagctggccttgaacttcaccgcccacatggcctaccgcaagggcatcatcttgtttataagccgcaaccggcagttctcgtacctgattgagaacatggcccgtgactgtggcgagtacgcccacactcgctacttcaggggcggcatgctgaccaacgcgcgcctcctctttggccccacggtccgcctgccggacctcatcatcttcctgcacacgctcaacaacatctttgagccacacgtggccgtgagagacgcagccaagatgaacatccccacagtgggcatcgtggacaccaactgcaacccctgcctcatcacctaccctgtacccggcaatgacgactctccgctggctgtgcacctctactgcaggctcttccagacggccatcacccgggccaaggagaagcggcagcaggttgaggctctctatcgcctgcagggccagaaggagcccggggaccaggggccagcccaccctcctggggctgacatgagccattccctgtgatgttcactctcctcccaaagcaaaccacagccaagcctgtctgagctgggagtccccttccccagccctgggtcagcggcatcctcagtcgttgttacttactcagctgatgtcacagtgcagacatccaccgttccaccacagaaccagtggctgagcggaccaacgttgccatgtgcgtttgctctgtggggaacagagcacagagggtgagcgacatgtgcagaacggccccttggctgcagttaggacctcagtggctggtatggccaagctgctagaagatgctgctgtccctgtgatcccagcagccctcccttcaccgtgacccctgacctttgtcaggaaggtgcagtttttcttctcaatctaaatgcctttcaggtgggccgcttccttggctacctggttccagggggctgttttgtaatgagatgctgctggcaggccactcagaggctcccagctgggttggtgggacagccaggccagatgacctgattccagcaaaaataaaactcagatttgggcaaaatgaga

SEQ ID NO: 8348 - DNA, 3988 bp, Homo sapiens
ctcgctctgccccgcgtcccagccatggcgacatcctcggccgcgctgccccgaatactcggcgcgggtgagcgcgcgcttgcgggaccctggggaggagcatgcgaggaggatgcggaggggcgcggggacccgatggagcggcggggacgtggaggggacccggggcgagcgcggaggggactcggggagggcgcggggacgcggaggggacccgttagggacgcggaggggcccgttggggatgcggtggggagcgggcgtggtgcattcgggactcggcgccaggacctctatctacttccccccaggtgcccgggccccgtcgcgctggttgggctttctcgggaaggcgacccccccggcctgctcggccgagccgcaggacgcttggaagcgcgacggcccttatgatccgcgagtcggaggacagcaccggtaacactgggcgcccagccgagttgggtgggaacgaggagaggccggcagccgcgggggatgcgaaccctagaggggcctgggcgctgcacgcggtcgaaactgcgcgctccgctgggctcctcccactcccgtgctcgccgccgctcggtcctgcctgacgtagcacagcgggctgaggccaccgcctcaccatggatagggtgagagggagcgggcgggccagtggttagcacaggcttcgctccctaggggggtgtcactggaccaccgaggcccggagccccgagctcgcccaggcgggcccaagtgacctgggggcactgggcttggagtctgcccaccttgctggactcctgatggggactttctggctggccacctgagaccacaaggcggggaggtgccagaaagacctgagcaacccgctgggcccctctctttttctcctctgtcttccaagtaagaccaagggacggggttgaccaggttcgaccaggcttacccaggagcaaggtcgggatcagaacctggctccagccctctgtttcctgaaaaggtccctgtgcttccaggtctttcctggggctgctgggctcccggctccccacctcggtgtcacagaaggcacttgggagcaggggtgggcgggaactgcgctctgcctgtctctgctgccaccggtgggagacgcagcgtcgctcctcctccctgccgtagatttcaacgacaagattttgaatgagcccctcaagcactctgacttcttcaatgtcaaggaactgttttccgtgagaagcctcttcgatgcccgagtccatctgggacacaaagctggctgtcggcacaggtaggtgacacccccatctgagcccggggcggttcccaggaggaacctgggacctgctctggttctagggccacttttgaactggcctatgtcagttttaggtgattacagccccatcctcctccacatgggaatacagagccccacagagaagcaggagtttattcctcagcttggcggacgctcttgtgtgccttggtgtggcgctcacagcccttgatagggcaggcctgctgggggttgcaggactccacgggttcagaaatggaaaggctgagggcagaacctgtaaggttggtccccccggatcgggctgggccttctgggctgcggggaggaggaatgactggtcctgtattctcacatggtcattttgactgctgtggggggaggggatgggaggggcaggtgggaggccagggaggaggttggtgtgggcgttcagggtgaaggtggcggggcttaaatcgcagtagcggaagagctggagcagcaggtggacatgaggcagcagggcagagccagtgggccttgggctggggtgggaggtggctggggccgaagggatcaaacacctgctcttcgggtggagcctggtactggttactgagatggtgaaaaccaggggagacctgggggacatcacaagcttggttcctaccaggtatgaaccctttgctgccccagtggagaggtcacacggttaccaggagggatgggcctgggcccagggagccatcagcatcgggggctggcaggtgtttccagagcatcggaaaaggaggtccaaggtggagccctgggtgctccagtgtttggagtcagtgaagagggacagccgggggtaggggagatgtggttctctgttgatgctgctgagaagtgaattcaaggctgtgaccttggcaagatggaggtcgccagtgccttgatgggcagggttgcttgagaggaagggacagaacccagtgggagtagactggaggtgaggacctgggaaccgcaaatgtggatgactcgcctgtcacgcaccgagaggcgggggtgtctcccatgccccgcttttctcagcccaggccagcagtggtccagtgctttggatcagggttccccgcccaggcttggccactcctgccctgatcccttaatgcttttggcccagagcaccccgctaagtccaaccccagaggggcctcatccgcaaagcctcgggaagaggacagtgacggaggcggctgccctgtgagctgcacggggcagaatgtccttttggcgtcatgttggatgtccacacatccatatggggtcagttctattaggattccttcgggaagaggtagagggtaggaggggttaagccacgagacgaggcatgcagaggggtggcctggatgggtctgcactgctgtccatgcacacggggagcgttgcaaattgtgcttcccagcccatagtgcccccacagaggagcccgggagtccctggtgggcgtctgtgttcctgcaaggagccagtggagatggccccgtgaactctcatcccccttgccttggtggggtctctggcaggtttatggagccgtacatctttgggagccgcctggaccacgacatcatcgacctggaacagacagccacgcacctccagctggccttgaacttcaccgcccacatggcctaccgcaagggcatcatcttgtttataagccgcaaccggcagttctcgtacctgattgagaacatggcccgtgactgtggcgagtacgcccacactcgctacttcaggggcggcatgctgaccaacgcgcgcctcctctttggccccacggtccgcctgccggacctcatcatcttcctgcacacgctcaacaacatctttgagccacacgtggccgtgagagacgcagccaagatgaacatccccacagtgggcatcgtggacaccaactgcaacccctgcctcatcacctaccctgtacccggcaatgacgactctccgctggctgtgcacctctactgcaggctcttccagacggccatcacccgggccaaggagaagcggcagcaggttgaggctctctatcgcctgcagggccagaaggagcccggggaccaggggccagcccaccctcctggggctgacatgagccattccctgtgatgttcactctcctcccaaagcaaaccacagccaagcctgtctgagctgggagtccccttccccagccctgggtcagcggcatcctcagtcgttgttacttactcagctgatgtcacagtgcagacatccaccgttccaccacagaaccagtggctgagcggaccaacgttgccatgtgcgtttgctctgtggggaacagagcacagagggtgagcgacatgtgcagaacggccccttggctgcagttaggacctcagtggctggtatggccaagctgctagaagatgctgctgtccctgtgatcccagcagccctcccttcaccgtgacccctgacctttgtcaggaaggtgcagtttttcttctcaatctaaatgcctttcaggtgggccgcttccttggctacctggttccagggggctgttttgtaatgagatgctgctggcaggccactcagaggctcccagctgggttggtgggacagccaggccagatgacctgattccagcaaaaataaaactcagatttgggcaaaatgaga

SEQ ID NO: 8349 - DNA, 649 bp, Homo sapiens
gggactcggcggcgtcctgttgccaagcgacggccaggtcacgtgactggggagcgagcggaggggccttaaaggcgccgcgcgtgggccgggttcctctgcgggtgggtccggaacctgccgggcgactccccaagggccgggaaggtcgggacggcgagagattccctgctgggaccgtcgtgtgaggcagccccaggcccccagccacccgcggggggaccgggccaccccagcatcagggcgtggactcccgggcgaaagaaaccccagggcctgggaccccgccagccgggtgacggggtttaagcactgcaggtccactcggcaggcaacgattggacttttgctgtccaatgtactccagggatgctatgccccccagcaccccgagtctaaattgagacccgagatctggctaactttatgaaattctcctaagccaaatatcgtttaaatattacaaacagttttggagagcgagaggttgcgcaggacgtggttcacagctcacttggcgggaggcgagggtccccatcgcccagcgggcttccccaagggtcaggggcctcccgggctggccggtcccattagcagggcggggcgagctgcagggcgaggaccgtggctccactccccgcccgagact

SEQ ID NO: 8350 - DNA, 649 bp, Homo sapiens; identical to SEQ ID NO: 8349

SEQ ID NO: 8351 - DNA, 30904 bp, Homo sapiens
ttcttaaacccaagctgactttaatgagaattttaaaatttttaaataggtctctggcaaagaacaatgcaggagtaaggatccaggcacagtccaacatctccctgaggcctccacacaggcccctcaaactgcacccattctgaccatgcaccactttccacagacctggtcccacagccgtcccttcatttggggaagtagggaagggatggctttgggggatgcagagcccatcctcagccctgccatctgccccacttcttaggacttcctgggattgtccttcccttgactctcccatccctctggtcccctggtctcacacagcatggcccctcccaccctctggcttctgctggttctaaccatcttctttgatccctagtgccacctccccatggtcccccttagccacctcagccttgccgtccttctcaggtagagccctctgacttgaccccagtcttgtcagtccctactctagagagcccacagtcccagctccctgaggccccgctcttctggacctggctgtacagggctgagttgtggcttttgatgccactgccagttgcagtaccaggttcagggaaggctgggccctggggcttgggagcaaggaggggctttgtgctccgagggggtggcacagcgtagtcatcagtggcagggttgtaggggagctcatagccctcctccttcacccgagcttggcaccaccatgcatccttgggctcccgaggcagatcataaaggccctggggagggactggggccaggccctcaggttcatcatagatgggatcctctttggggtctgtcagcttggccttcagcaactgctgctgcgcatgctcatacaagtcccaatagagaggtttcttccgttgtactccctctcctgcctgagcagacgtgctgtccaaggggtctgagtatagggagtcctgggaagggcatggagcaatgcgcagggagtctaagggctcagcatacagggctgggggactgtcgaggagctcttgggggccaggtggggaaggcaacttcccctctgccacctccccttcatgggagtcagctctgagaacatcgtgcccctgtccggcctttccctgggccttctgccggtggatggcagtctcaactgcctggaagatgtcatttccctgtgccgtctggaaggtgaaggttccagggcctgaggggcagcggcggccggcctcgaaagagaacatgacctaaggagggtagagggggaaacacattaccaggagccatcagaggaagtgagtcacacgcctgcactagttagggtatctacaaagaagagaccacctgcgaacagacgcggggtcaccgggtaggcaagaaagggggatccaaaggtcagagcttcccactttctgtcctgccccacccctcccacagctgcccaacccaggaagccctcccggacagcccctgcaccttgtcccggccatagcgacgcaacagagtgtagggccaggacaggagtggctccagtatctgactctgggcccccacggtcaggagagtcagcctttcagcctccaccctcagcacgtaggagccatgcaggccacagcgctcggcggcctcagtcctctgcaccgttacccagaattgggatcctggaaggcatacacgattagacagctgcgggggagggacgggggcagcagtggggacccagaggactcatgagcatagtgtccaagcactcactcggaagccagatctcagggccttcctacttcttacttccccatgggcccctgggtatccacccacttcccaaaggccctcggccctcctcctcttcactccatccctgcccgggcttctgaggcgtctaccttcccaggtagggctgtacaaggagttctccagcatctccagggcagaaagcttaggtgggttatcggtaggcgccagagtccagctgcctttctgtagtagagagcatcgagaaacccgtaatttcctcagcggggagcgggggtcggtctgaggcagccccatttctctgcctctgtaactgcccccaccccgcatcgccgcagctcctcaccggaaaggcgtttcggcacagcgtctgcacccaggctgcactggacggcgcgtcggccgccagcaggtgcgagcgctgagcagtgtccaggcggaaggcagtggcgccgggctcagggggggtctccacggtgacgggggccacactcacacactcagccagacggatcactttgcagtccaggcggcgcgagctccctcggccacccccagagctcgaccccttatggtcaaagaactcgagccgcgctacgccgtggggactggccgggtagagcacggcccaggtcttcctccacctctagggagagagagagagtgctcgagagggagtggcgtgcgcaggcggcccgggtcccgacggggaaggaggttgcggcgcaagtcgatttgggatctggggcttccaaacggggttgggggcgaagtttcccaaggacgatgccactccgtctccccaggaccagaacccctagactacagacgcttcccgggagtgtgcaaagcaacttcacgggaaagtcacaggctctccaactcccggcgccgctctccagcccgctgcccacctctccctgtttctgggctctctcacccactactagcccggataaggttcggcatccatgcgccagactaccttggtcccaaagcgctgactctgcaaaaaaagcggcccttccatcactgctccgtccatggcccccggcggttccttccgcgcttcctggccctgcggcgggaggcggggcgggaggcggggccgggttccctggaggagtttccgcccctccccggcccccgccggcagccgctgggggggtcgcggtggggtgagggagaggagcgagaaggaatggtggagacccccggattagccgggagctgcagcaccccaggcccctacccgccgtcgtgggggcgcgccagtggctccaccgaaagtcctcggttttggcgcgagggccctggcctctgggcgtggtggctgcgcgtgacgtcatatgcccaaggtgacgtcagagtgaaagccatgacatcaccccgaaagcgccccgggcaccggagagacccacacgggcctccggggctttatttaccctggccgggcccgcccccagccccgcccgagccgggctgtttagactccgctggcccgggactcggagggagggctggggttgaaccgcttcccgccaccaccggggccgccccgccgcccggccgccgcttgcatgtcagctccctgaccgcagaggcctggcctccatgccgcgggaagagaaagcttcattgaacgagccgggagggccagggagggggagggggcgcggcagtggccagctccacggggagggaggacccagaggaggagaggagggaactggccgggaggaatggaaggagaaggcggaatgtgggagggctcagggggatgtgggagggacgaacggagaagggggagagaggggggtccagtctcccctggccgagcatttttttttttttttggaagtcctaggactgatctccaggaccagcactcttctcccagcccttagggtcctgctcggccaaggtagggggagtcacgctaaccgcagagggaatgagtaggggatggagaggatgtggagggaccagggaaaacgggtggtgtgggatggagtcgaggggaagccacccaactgagagtttgattcttgtcaaagggcaagtgagacagagtacacggaggaggcacataccggaggcgggggctacgggtgttcgaacagggccgccaggagcgccctaagggagggggctcctccgggaggcgctgcccctgggtccccaacccagaacaaagctgccttgttggattgattgtttgggttgggggaagcatgttgacgggggcttgctgtagaggggctgttctcagccctaggcagagaaggccttggctgaggagccatagcgcctggcctcccgttgcccggtgacagggatggtggtgttggcaggaggctgggacaaccctaccccatcccccgcccagccttgaggcctggccctcctgggcctcttgaccctgcagggcatctgagagcctgcgtgttggggagggcgtgcagcaggttctccaggcgagctttggtgccagccttccctgcctgggaatctgctgggttaggactctgggctcccattcaggggatctgtgatcccagggccgcctagggccccttacgtgcctctctgcacaatcagtacagctgtctgtcctccctctgagtaaatggggtcatctggatccctcccacgtccgccccttggctcttgtcaatccctctccttctcacccgcggtgtgcttggttcccctatactgagtgcttagttctttgcctatcactttctatccgttgtctctctcctctgtgtctttctggttttctctctctcattcccacagtctcccttcctctcacatcctgtctgtctgggtcttcctctctctctacgtgtctcttgctcagtctctatctctttttattgacccttctctgactctcgatctctcatagttgtctcttatctctgggtctctcaggctgtgcctctatgacctgtgcctcagcccttatttaatgtgtttctctccctgtctcttggtccctggggctctttctctcctgttgtctctcgctgtctctgtcttactcagtgtctgtttttctttcgtgacttctccctctctttctgactctgggccccactcaatctgtttctctcacgcacactttgtctctggggcacccaggccttccctgccatgcgacctgtcagtgtctggcagtggagcccctgggggctgctgctgtgcctgctgtgcagttcgtgcttggggtctccgtccccttccacgggccctgagaagaaggccgggagccaggggcttcggttccggctggctggcttccccaggaagccctacgagggccgcgtggagatacagcgagctggtgaatggggcaccatctgcgatgatgacttcacgctgcaggctgcccacatcctctgccgggagctgggcttcacagaggccacaggctggacccacagtgccaaatatggccctggaacaggtgagcaatgatccaggcatatcctagatatttcctatgtgtggccaaagtgcagggaaagggaacacgaggatggcacagccatagggacacacgacaccaagaacagccagcattgagtaaatccatggatgacaaaccaagcaacatagttacttcccagagctgtgtgaccttaggctagtcagtgctttctctgagcctcagatgccctgtatgcaaaatgactagatgatgtctaagttcttttctgctgcaaaagtatgatcctacaaagccatccacaaaacagcccagatacaggtgagccctgtacaaataaagtacagttagtctcatgggacgctaagagcaggtaaatgatatctggatgtcccaaagtcacaaggggtcacagacactgcagctaacaaaatcaggttatgggccagagctaaaactaacaaggtggtactgtctaaggacaagtataaaatctaggacaagtatgagtgtgggtggtggaggcttaagagcagttccctaggtgaggcctaggactgtgcccatggtatgaacccacagtgggaatgatggacagaagcaggtgcaacctgcagctgattccccagttcccactggctagaccacctgtggaattaagtgtcatttgtagatgctgtgttttaagagggacagtagaaaatggaaatactttcagaggagagctgcctagatgtgaaagattcagaagccaagtttcaaggaggaattgctgaagaatcaggggattgatatggaaagtaaaaaccttgcatagcaatggcgtaatggttgtttttaaatatgggaaggacagtcgtgtggctgaaggatttttctggttggcaccaaaggaatgaatcagatgtggtaggggaaagtcatgaagagtcacaaggactttgatggttacacagtctggtggggcaggagctaggtgtctccgcaacaactgggtaagtcctgttgggatgtgaatgagatgtccttgaacattggctaggacagatgacctttgaggctgcgcccaattctgagaggaagccagtgatactccacagggttcaggccgggctcagtggctcacgcctataatcccagcactttgggaggctgaggtgggtggatcacctgaggtcaggagttcgagaccagcctggccaacatggttgaaaccctgtctctactacaaatacaaaaattagccaggtatggtggcacatgcttgtagccccagctacttgggaggctaaggcaggagaattgcttgaacctgggagacagaggttgcagtgagctgagatcatgccactgcatttcagcctaggcaacagggcaagacttcgtttcaaaaaaaaaaaaaaaacaggtttcagacagagagaagaacaaggggctatatggcagcacagacagggcgggcacaagagagaatgcaaggatgtgaagaaaggatcttagacatccaagcctcacagatagatcaaactcctaagcccccacgtattggctttatggtcttaagcaagttgctcagcttctctaaaccccagtttctttatataaaacagtgttctggcagctctgttctaagaatgatcacatatgtgcacaccatggcagagcacctggcacacagtaggtacctgattaattgtagctatcaatgaatgggtagagactgatcagaacttcagggttgattcttggttttttattcaccgtatcaggttcttgagtatccccagatcacaccaattttccctcaatcttatgcccccttcctattccctgccagggtcccctgtcccgtctccaccccttatcataccagaaagatgggatcatcatggccaagtgggaggcctcagcactcactcttccctacatccccattactcccccatcctccctccccaagcttctctgtcccttcatctccccttccacaggccgcatctggctggacaacttgagctgcagtgggaccgagcagagtgtgactgaatgtgcctcccggggctgggggaacagtgactgtacgcacgatgaggatgctggggtcatctgcaaagaccagcgcctccctggcttctcggactccaatgtcattgaggtctgcatttcctagacatacacacacacactacccaggatagccgagagtactgtggggtggttagcggagacattagaaggtagttacccctgggggatcatttggattggtgggagacttggaaaagcaaatgatagagctcccagatgctgtaaaatccaacaggtttttagcattcacattcaaggggctaaacctggcatgagcctctccagcttcatccctagtcacccctggggcacctggtgctctccttctcctcaaatgttcctgctttcctgagacatcttccttctgactttctcctccttcaaagccatttcctttttgaagtgctccctcctgctccaggcacagggagggcctccttcctagtgccctgaatcctctctgggagcacagcacatcccacgcgctgctggctgcaagagagtccacaccgcggactgcggccatcgtggccgctctctcagcgccgcctcgggcccatcccgccactgggtttacagcaggcacaccaagcagggttccttaagggcggcgggacacatgaaaggtgccactgggattctttccctgcttgtggccccgcccccaggtagagcatcacctgcaagtggaggaggtgcgaattcgacccgccgttgggtggggcagacgacccctgcccgtgacggaggggctggtggaagtcaggcttcctgacggctggtcgcaagtgtgcgacaaaggctggagcgcccacaacagccacgtggtctgcgggatgctgggcttccccagcgaaaagagggtcaacgcggccttctacaggtgaggggccgcgggcgccgggcggagcaggccgggattggggtgctccctgatgaatagccttgggagacatctgagcaggtccggggcacgggaggacccgggggtcgggacgcgcgggaaaatatggaggccgttgcaaagctggagagttgggaaatcttgtgggaccacgaaaggtgccccaagggagtacctgaaatggggaccagcgaggctcccgctctctcgtggccgacgcctgggcgggcaggcggattcctcggccccggggcgcgcgccggcctcgcgaggccactcccaggcgcgggggcgattccagcgctggcgctgccggccagcgatttccgagttcagtaaggacgcggccgcccctgggaggcggcgcctgggtgtgtcccgcgcaggctgggcgcccagggtccgggggcccggggacggcggcgcgcgatggccgaagggcgccaggagagaccgcgccagtctctctgcccgggccgccccggggcggggcgcgtatgtgaacgctcgagccctcggggctcctggaagtcctggaagtttcccaggatctcttttggcgaggcccaacctctccacctgcgctggagccctggggtccagtccggcttccagggaaacgcatcaccctggaaactgcctgtgcttaacgtctcccttccctggaacatctactttgatctttttgagaaactgccattgacagccaggcatttatttggaaatctttacaccctctcactgtaatctattttgcgagccaaaaatcctccctttcttcagtggttccctagatcagtattgctgaaaggcctcttgatgtccggataggtttccgcgggcacactacttcagatggggtctgatgccgccagctactgtagaaatcctcaaccccgactgaagcgtgctcggattacactgtcttcctactgcggcagcttcccactgcttatactgaacttgtcatcacttaaaaccagttcaggtcttccctatgcttcctactgatagagcagccttttccaacccaggtataggtgacgtttacctattacatttgttttgatacataatttagaagccataaaaaagccatgatgatcccatgagattatcttgagtcctgatgtgactttccatctgtcatttcccctcagcctcctctgctgaacagacatggcagctttgccttctggcttcatccaaatggctaaaagttgttgtggaaatgtttaaaaccaaagtctaactcttcttgcaaaatgttcctgtagattttcatcaagcttctaatcatcagctgtaaaatatgttccttccaccaactgggaagaaacagaacacttcaatgatgtaaccaacatttcaccttatctatctatatatttcttatctgtaatgaaatcatgggagattctgttagtttttgataaaatccagatatgctatgttcacagccattctccagccttccaatttagtaatcctgtcaaaaaagaaaatcatagtagtttgagtctatttttactgaaatccttttaggtctctaagaatcaccttattttttcctaaatgcttacaaacttctatttaataatttattctagaatattacttatgtgtagattgaggaattgaggaatcctttttctccttttttttttttcttttgaaagtcaggatattatccagtctccagtcttttctatacctgctcacactttctttgccttggctctgaggctcatctgaaatgtctttcagtactgaggactttcggtactttatctggcctggacactcaaaccactttaaaacaaacgtgctgtgcctctttactttcatccatcttggggctgcatttccttctctgtgctgcttaccttccctaatttaaaccccatgttctgaaagatgcgtagaatttagacatttccagtgaagaagatagcgtgaacaaaggtgtagagatccactcacccaatatttatttactgagatcttactatgtgccaggtactgttgtagacactacccgtggctcatgcctataatcccaggactttgggaggccacggtggaagcattatttgagcccaagaattcgagaccagcctgggcaacataatgagaccctgtctctacagataattttttaaaaataaaattagctgaacatggtggtgcgtgcctgtagtcccagctacttgggaggctgaggtgggaagattgcttgagcccaggaagtcaaggctgcagtgagctgtgatcatgccactacactgcctgggtggcagagcaagaccctgtctcaaaaaataaattaactaaggccgggcacggtggctcacacctgtaatcccagcactttgggaggtcgaggcgcggatcacctgaggtcaggagttcgagaccagcctgaccaacatggagaaaccccatctctactaaaaatacaaaactagccgggtgtggtggcgcatgactgtaatcccagctactcgggaggctgaggcgggagaatggcttgaacccgggaggcggaggttgcggtgagctgagatcgcgccattgcactccagcctgggcaacaagagcgaaactccgtctcaaataaaaataaaataaaaataaattaagtaagtaagtaaataaataagtggtgaaggaaggcctcttggagaaggcatcatttgagaaaagatttaaaggaggtgagggcacaagctatgcagacctctagataaacatttctaggaagagggatcaaaaatgaaaatattctggggtgtgtgtgtgcctgtgtgtgtatgtagtgggtgatgggataaggcctctccttctcctggaggccactgtggctggagctgagtgaaaaagaagaaaatggtaggagatgcagtgtaggtggtcttcggaaaagaatgggaagccagatcctgcgggccatctgggagaggatggcttttgttctgtgggagataaggaaccactggagggcttggagcagaggtgtgacatcgggcttccatttttttttcagtactactttcactgctttattaggaatagattgtaagggatgcagtagaagcaagaagtcaggtggctggttatggggttattgtcttctgaaagccacgtaaagaaagtgaaaggtgatggtgaccagtgaaagtggtgaaaaatgatcaagatttacagacagttgaaggcagagctataggacttgctgatggattcagtgtgatgtgagagagaggagttaaggctctctccaggtttttggcctcagctaagtaagaaattggcctcacctgacaaggaaaacagtgaatggagcatgttttgttgggagatgggcttgggggtggagggtaggaacttggttttagacctgttaaatttaagattctttaagacattgaagtggcgaggctaagttaggtaatttaatataggactctggagttcagttgagtaaaacatataaagtcctgaaactggacaacataccaaggaagtgaatgtaaatttaaaagacagagagaggcccagagactgaaccttggggagactaaatatttaaaagtcagaagataagatgaatgcaaacagtgaggtgaggtaggaagaaaaccaggggagtgtggtggcctgggagccaagtaaagtgcttcgaagaggagagagtgaccagctaagtcagtgctgcccagacctaaaaacatgaggactgagaaacaaatgctggatttagcaacagtaaagtcactgttggccccaacagagatgataatgaatggtttatatttggaagacagtaagttagcaagagtaggtttatactgagaaatagtggaagatctggataaagggaggccagaaaatggaatgctttaggtgccaaattggagagtttggcctttgccttatagaaaaattacaaataaaggtatttatatgggacaagaataaagccagtgtttttgaaagtttgcctgatagtagtggatgaggagaggagggtcttgatgcagtaagaccagtcaggagtttgttctaaaattgaagcttatcaggagggtaaaaacaaagatggaggaaaatgaatagatgtaggatgactgatagaacatagagaatgagagaacagacacctaaaatgattccgatgctgcctgagagaaggatggtaccagcagccatctctgggcttcaggttaatatgaactagctttagagatgggctgtccttggaaagtttgagacacaggaattgtccccaggtatgcaaagctgaaataagttttagggatcaggaatatttgttggacatatcggaatctcatactaagtctgggatataaaggctggagaaagagatacactaaagcacagaggccattcttcgtggggaaagagattgcgggagccctgggagattctgtgatggggctatgatctagatccttcacaggtcaggcccagcagagggagcattctcacaggtgatacaattattacaattatgaaagataggcaagacagttgtaaacaactctcccctccttagggaaaaaaaatggatctgctggcttttagaggaagtcagtaagatttagggaatgagaaaatcaaaacctgatgtattaatcatttttcaatttgttttggtagttctaccctagaacatgtaaaagttgtagaactttagaataagaaaagaatgtacagataattgaactatttactactcttttacaggtaatgaaattgaggctctaagagcttcagtgctatttaagaagtcactcttctagttcatttcagcttgacagatgtttattgaactcctatttgccaagtactgtgcaaggtgctgagaatacaaaggtgaataaatgacaagagaggttattaggctgcagatcatagaagaccttataggccatcataaggattcaggtccttatgataaaaggattgggaagcctttgatgtttggattgtttgtttgtttgttttgtttgtttgtttttttgagagggagtctggcttgttgcccaggctggagtgcagtggcacaatctctgctcactgcaacctccacctccctgggttcaagtgattcttctgcttcagcctcctgagtggctaggtctacaggtgcccaccacgcccagctaatttttgtatttttagtagagacgaggtttcaccatgctcgccaggctggtcttgaactcctgacctcaggtgatccgcctacctcggcctcccaaagtgctgggcttacaggcttgagccaccgtgcccggccattgaagtgttttaatggggagggctatgagatggcatgatcaggtttgtgactccaaaagatcatttgaatctatttcttttttttcttttcttttctttttttttttttttttttttttgagacagagccttgctttgtcacccaggctggagtgtactggtgcaatcttggttcactgcaacctccgcctcctgggttcaagcaattctcctacctcagcctctcgagtagctgggattacgggcacgcgccaccatgcccagctaatttgctgatttttgggtatttttagtaaagatggggtttctccatgttgcccaggctggtcttgatctcctgacctcaggatcagatcaagtgatctgcctgtcctggcctcccaaagtgctgggattacagctatgagccaccacgccccgcctttgactctatttctgagaataatcaggagaggagcaaaagatatggattggagagatatttagaagtaaaattgacaggacttggttattgattgactttgggatccaagaaagggagaagtcaggattgacccctaggtttctggagtggattttactgagataattatcttttttttttggacctacattacatttcagattactttcagatctctacctagaaacatcaagaaggcaatgaaatagacaagattatgaatacactaggtgtgaattagaccatatagagggccctatatgaagtgagaacaaaatgcctaagaaagagctccacaaattttaatgaccagataggggaggagcctgcagagaagaccaagaaagagcaaccagaattaggagtaggcggctctaggcacactgcctaggagtcagccctgctccctggggagccactctggaaattaataataataataagcagaattaggaataaaaccaggatattgtagtgttatagcagccaaggaaagagaggacagtcagatgttgcagagaggtcattaagatgaagactgaaaaatgtctgctggatttaacaaaatagaagtttgcagagtgataggtagggaaaaccagaggaagtgggttgaaaaatgagtaagaggaggctgggcatggtggctcacacctgtaatcccagcactttgggaggccaaggcaggtgaatcacctgagatcaggagtttgagaccagcctggccaacatgatgaaactccgtctctactaaaaatacaaaaattagctggctgtggtggtgcgtgcctgtaatcccagctacctgggaggctgaggcaggagaattgctgagcccaggaggcggaggttgcagtgagccaagattgcaccactgcactccagcctgagtgacagatcgagactctgtctcaaaaaaaaaaaaaaaaagtaggaagagaggatataaagatgataagtatggacagctcttgagaaatgttactgtgaaggggaggagagataagtagagggtgtgtgtgtgtgtgtgtgtgtgcatgtgtaggagtgatttgaatgtttaaaaggattcagttgagaaaaagaaatggtatgcaggactgagaaaaattgtaagagatggaatttagaaacatttaggtacagtagacttagagaagaaaaatagttgaaaggtatgagaagaggatatgcaaatgtagacaggtttttgttttgggttttttctttgtttgtttgtttgtttgtttgattccttgtttttgagacagggtctctctatgttgaccaggccagagtgcagtggcgccatcatggctcactgcaacctcgacctcttgggctcaagcgatcatcccatctcagcctcctgagtagctggaactacaggctcgagccaccacacccggctaatttttaaattttttgtagagacgaggtctcactgtgttgcccaggctggtctcaaacttctgggctcaagcagtcctcctgcctcagcctcccaaagtgctgggattacaggcgtaagccgctgcccctggcctacataggtttttatgtttgatggctgaaggaaggaacaaatggtaggtggaaacaaacacatctgtgaatgaagaaatttaaatcaagacaaataacagcactggtcctcaatgaggacaaagtccttaacataacttatatataattttatatataaaatatttataagataaaagggtctaaactcttttatataaatatgaaataagattacatatgtttgtgtatatatatatataaataatacaaagacctgttgatataaggtccttaaataatttagagaagaggtacttctaaatttctagataataccaaaatgttttagtactactctggagatcaaggtgaactctccaggttgattggtgaagaggccaagtgtatttcattttagacattttagacatgtttgagaaaaagacatttggagaaaaaatttcacaccatatttataagatgaaagagtctaactattagcaatgtctcagtaaagggacctgagagttgtatattctttgccaggaatgtccaacactttggacactttggcaaagagaccaactaagtacatcctcaggaagaagctgaggcagaaaatatcaaacagcttctgactggtttaaaatatatacgtatatttaaatcccaaggtgtcttcacacattaaacagtcatccctcagtaaccatgggggattggttctaggatctcccaaggataccacaattcaaagatgctcaagtccctgatataaaatgctatagtatttgcatataacctatgcacatcctctgtatgctttaaatcatctctagattacttataatacctaacataatgtaaatgctacataagtagttgttatattttattgcttagggaataatgacaagaaaaaaagttggtacgtgttcagtacagatggaggttgaatctacagatgcagagcccatggatatggaaggccagctgtactatgttgaaatatgactcctcaagagaaacagcggagcaggaacatgttcaaagaaaggacaactaaggctgggctcagtggctcatgcctgttatcccagcactttgggaggccaaggcaggaggatagcttgggctcagaagtttgagatgagaccagcctggacaacatagtgagaccctgcttctaacaaatattagccagtcatgatggtgcacacctgtggtcccagcgattcagaaggctgaggtgggagaatcacttgagcccaggagataaggctgcagtgagccatggttgcaccatggctcactgcagcctgggtgacagagtaaccctgtctcaaagaccaaaaaaaaaaaaaaggaaaaattatttatttccctggaagtaagtttgggagatgaactcagtttgtgaatgaccacagcatatgggattggaacttcagcaggaagggtggtgtcattgtaaggagcctggcctgtgttccccagtcaaaccaagttaacgcccttggatattcggccttggttcttggtcctggtccagcggcctcaggcctgaacaatgccagagtctttctcaaagagagcatccaggaaaaaaagacacagtagcctccctaggcctgactcaggctagttctgccgcctagcctggtcagtctggcaatcttaacaatcctaacgatgctccccttagccctccactgaggtttagcactaacatctggactcaggagtccttacttgccatctgccctagctaatttctgagggtgctggcatgggggcaccgtcctgagtccacggccttcacttctgctcacccacctggtcatgtgctgaagaggccaagcagctatgaaagcttgggtctcagccaggtgcggtggctcacgcctgtaatcccaacactttgggaggccaagacgggtggatcacaaggtcaggagttcgagaccagcctagccaacatagtgaaaccccatctctactaaaaatacaaaaaaaagaaaaaagaaagctcgggtctcaggagtgtctgctgttataatatcctgccaccaggaagccttcggactgctagaagagaaatcttgcccctggtcctagttgcaccagcttttccacttggttctacactaaccctgactactgttgtcttatcctcacagaaagttgaggaagcgagcggccaaggtctcagcccgacaccccaagccccttggaaggtatggggcaagagccccgggacctcctgctcgccctgcggccccaggaggtggatggatggatggcagccatccatgtccatcccagaacccaagctgatggattagggatgtgaggaaaatggcttttcctgcagggaggtgaagggagcaggcatggggatgggcaagctttgatcttagggaacacaaggaggaagtaatgtaggagtggctgagaagcctcccatctttacacctaccccaaatagcttggattccagcctcagccaccttcattcttcctccttcctgccccctccatcacctcccttagttcacccacattcccattctctcccctctccacctttcctcttcccttctccccttcccaactcccccacctggattgacatcgctagatttcccattactgttgctgaatccagagagcagcatgagttcctgaaatgcagttcaatggtgttcagcagacggtggatgcggaaaatcttcatttttcccatccccatgctgcccacaaagggtctttcccagaaacagaaaaataaccctgtacctttcctgcgccacatatgtaaccactacctctaccaacttccttctcctttttgcggaccaatcaccaagcttaaagtcaaacccaaaccccgagtggtcagggggccacacaagaggtaaataaaattcaggttgggtggaaaggagagggagcatggagttactcggctgtggccagggagggagggggtccaggaggcctttgtggctgaaagagctgaccaagaggaggagcagcagcagctcttagaaatcaccttccagggcatttactgaagtgttacgcaagactggtccttaccttggtctcaggaatgatgcttgtcctaggatttgttttttcactcactgactacctcgttccacatgtttacttatcttcccctgctgagttccaggagacaacatggtgcttttctctttcagacgccatacttgcgtctcctgtaagaggttacatttgcctaaaggatcagtgttcccaaatcaaatgctttatttgattagttgttaaaaataagtgctaccagcttactcgagatggagggaaactcagcgtcccctttggaacctttaccaggaatgcagtcagattgacagcccctgcctctctggctcattttccacaattaggctcccagttccctaattttcctcctgggctcctttagaactcgaagtgggaagcttccaacccctgtaattacatctaacttgtcttcaaaaggcagtttgcacattaaaagtctccctgataacttcaagagggactgaagtatcgataattcatccctttctcccctcctgttctcaacaagttctagtctcacccagtggtcccctcatagccctcattccccagcttctctggtggtttcaaaggatctcagaaatttggggatgttcttgtagtgcccttctagcttagggtcatctttgcccaacatggccacactctagccttccctgacctgcacattaaagtacacactgccatttttattttgttcattgtagacaacgggaatgaggatgtttagaagatagatgtatttttcctgtgatgggctccttgacttttactttcagccaaacaggactgtgggagagtgcctgatctcttagatcttcaggatccatttatcctgagcttccaaaggtattctgtaaagtctccaggcttcctttgtctgttttgtgtataaacttttcctcctcctgtgtcttcctagccaatggcttcaagtcatcatattccatccttcctctgacatcaagtgatagggcacattattgcaataatgcatgactacatcagcctcacaggcccgttccaccagcaccagacctcattttcttccctttctctgcgggcagagtgtacttcactctggcacgtgcctcactgcagcctctcattctactggtatcgataaagaagtccccccattctctcaaacatctcggcagcatttccaagccttagcatctatagttcagtcccattatcctattcagatggctttgggacactgttacgttgaaattgcagaagcatggactgcctttttaaagacttacacagcacaggtcctgggatgtctttgccattttgttgttcacatccatctcctttctctggtcatttattccctcaaactttgacctgtcctgcatttatacatcttcattcttgcatatgccagtcccagtttttcttgcgtctacctgctggtctgttcttgctgcatctgcccctcctaatctgtcctgcagagtctctggcctctgcggagctatggagatgggagacttccttagtcctttgcatcctgactcattcagttattccagtctcagcatcacagaaggacttgctcgccctggcttttcaggcttcctgtgtcagccactccctcctggccatttcttccaactggaaagtcctggtttccccttccctgaggccttagcctcagcctcctttagggccagcagcctgaaaccacttggaacagtttcttccaggcaagtcgagactagccatccttctcttaaggttgttctactgcaggaggtccccaaggcccctcctatctgggtagttgaggctccctcagcctggaaactcagcaatccccatgtatctcccgagggaaacatggaagggggaagaagaggagataaatggtcacaaaagggtggggggcatggtggaggcatgaagtgggaggatgtttgtggggccaagaggcaggagcattgttttaccctactgcacctcactcctgtccccctaggctgctagcccaacggcagcaacactcctttggtctgcatggggtggcgtgcgtgggcacggaggcccacctctccctctgttccctggagttctatcgtgccaatgacaccgccaggtgccctggggggggccctgcagtggtgagctgtgtgccaggccctgtctacgcggcatccagtggccagaagaagcaacaacagtcgaagcctcagggggaggtgtgtgagacagtgattatgacctttcccaccccaggtggagaacccctagcctggcaaccccagactaagcacagccctgacctttgaggacagagaggagccttccagggggtgggccacagacctgataccacccactcccttccaccaaagtctcactcatctcccaggtctgcttagccctccgtgcagatgttgccatttgcctctgttgggcacttctctcttctataggcccgtgtccgtctaaagggcggcgcccaccctggagagggccgggtagaagtcctgaaggccagcacatggggcacagtctgtgaccgcaagtgggacctgcatgcagccagcgtggtgtgtcgggagctgggcttcgggagtgctcgagaagctctgagtggcgctcgcatggggcagggtgaggtggcatggaggtgggagggagagggaaggaggtacatgctcctggggggcatattccttcggaaggttaggtgtcccctgggcagacaatatatgcttaattacaacttcctgatctttgccatctggccctaggcatgggtgctatccacctgagtgaagttcgctgctctggacaggagctctccctctggaagtgcccccacaagaacatcacagctgaggattgttcacatagccaggatgccggggtccggtgcaacctaccttacactggggcagagaccagggtcagtcatcctctctaccttggttgaggtctctttcatcctatccaggtctggtctccaatctacagtccaatggcccccagcccattgccccaggcccctgccctcctgcagctcccacctgacccatcacttgctagcccattatgtgcctgagtcacgcttcagccacatctgttagagactcccactacctcaccccaaagctttctccagcgcttccattctgtgtcactacagatccgactcagtgggggccgcagccaacatgaggggcgagtcgaggtgcaaatagggggacctgggccccttcgctggggcctcatctgtggggatgactgggggaccctggaggccatggtggcctgtaggcaactgggtctgggctacgccaaccacggcctgcaggtgagtgggaaggaaaggggagccgaggctgttgtctcaaagcctgtgttttgggcagagggctgaggaatgagtcccttggcccaagatgctggatcctgggccttacagaaacatctgcatatgtccccaggagacctggtactgggactctgggaatataacagaggtggtgatgagtggagtgcgctgcacagggactgagctgtccctggatcagtgtgcccatcatggcacccacatcacctgcaagaggacagggacccgcttcactgctggagtcatctgttctgagagtgagtgaaggagggggtgatgcatgccagggaagggagtgtctgggccacccgtttgcagggaaagggggctgtaatctggaggggcacttcttccccataaaagagccagtttcgccgggtgcagtggctcacgcctgtaatcccagcactttaggaggccaaggcggatggatcacgaggtcaggaattcaagaccagcctgaccaagatggtgaaaccctgtctctactaaaactacaaaaattagccaggcgcagtggcaggcgcctataatcccagctactcgggaggctgaggcaggagaatcacttgaacccaggtggcagaggttgcagtgagccaagatcacgccgctgcattccagcctcggcaacagagtgagactccatctcaaacaaacaaacaaacaaaaacaaaaacaaaaaactagtcttacacactagggagggatggaagcacccctctctgtgaagtcagcagtgacttctaacacccccttcctttcttggtgcagctgcatcagatctgttgctgcactcagcactggtgcaggagaccgcctacatcgaagaccggcccctgcatatgttgtactgtgctgcggaagagaactgcctggccagctcagcccgctcagccaactggccctatggtcaccggcgtctgctccgattctcctcccagatccacaacctgggacgagctgacttcaggcccaaggctgggcgccactcctgggtgtggcacgagtgccatgggtgagagggtagggagtcaagtagaagggcaagaccacgggggatggggcaaaccttctgggggcagagaaggaaacagaagttcccttctccccacaggcattaccacagcatggacatcttcactcactatgatatcctcaccccaaatggcaccaaggtggctgagggccacaaagctagtttctgtctcgaagacactgagtgtcaggagggtgagttggggactgaagtgaaccacatggtatccattgcacagcctttccttacactgacatatgccaatccctccagatgtctccaagcggtatgagtgtgccaactttggagagcaaggcatcactgtgggttgctgggatctctaccggcatgacattgactgtcagtggattgacatcacggatgtgaagccaggaaactacattctccaggtacctggagtctggggcttccagatgggtgagtggggggagcgttaaagacacctttgaattcgaggattgtcgctgggttaagtggcctttttctcactcacaggttgtcatcaacccaaactttgaagtagcagagagtgactttaccaacaatgcaatgaaatgtaactgcaaatatgatggacatagaatctgggtgcacaactgccacattggtatttgatgggaagagcaacccaggaagattaggggatgggagggaaagacgttcattctcttttccatagcttgtttctccatcttcccaccttcctgtagagctctcagtccctccacttctacccacccttctccacagtgcatctatctccctccctctgtgcagggcgcctcccaaattgcctgtccactctgcaggtgatgccttcagtgaagaggccaacaggaggtttgaacgctaccctggccagaccagcaaccagattatctaagtgccactgccctctgcaaaccaccactggcccctaatggcaggggtctgaggctgccattacctcaggagcttaccaagaaacccatgtcagcaaccgcactcatcagaccatgcactatggatgtggaactgtcaagcagaagttttcaccctccttcagaggccagctgtcagtatctgtagccaagcatgggaatctttgctcccaggcccagcaccgagcagaacagaccagagcccaccacaccacaaagagcagcacctgactaactgcccacaaaagatggcagcagctcattttctttaataggaggtcaggatggtcagctccagtatctcccctaagtttagggggatacagctttacctctagccttttggtgggggaaaagatccagccctcccacctcattttttactataatatgttgctaggtataattttattttatataaaaagtgtttctgtgattcttcagagcccaggagtcagtgctggtggttggagggacctgcccccactggttcatttaaccctctgtctcggtgccctcagaacctcagccagaaaggcaaggaggaaatcagagcaggagcctcatactcttggtgatctattcattctgtgacctcaggggtcacatataaggtcagtgtttctcgtccccgccggatctgcactgccaactgggattgggttcgaacagcttcataaacatcttcagcattttgtaccatctgctccccaatggccaaaatcacatcaccaggccgcagaccagccctatagagaaaaatggacagagagaaaggaaggagtacaaagcctagttcaaggacacatgcacaccttgcccatccccatatcacactgcagcctctccctcaccggtgtgcaggggagcccaggatgactttatggatgagtacaccatgctgaacatcgggaaagcttggttctcgaagctgtagttcagcaaggatgctgaaagtacacagatcaccctattagccaaacccaggcattctccccatcctgagttccacctcaagtctctcatcaacacattgataaatatatggacaggacatgggctaggtactacaaaatacaatggcaactcactttctgtcttctagcaataaagtgcaacatgtacataaaagatgtacaccacatgagggcaccaaatgacaaacagtgttaaatcaatagcactaatgtcattctagaatactaagagaagctttaaggggaaagaacttaagttgagcctaaaaggatggatctgatattaaccatataaaacaagaacagcataaataaaaaacatgggagtaggaaatcaggttggctgagtattcatataggaaggtattacagccaggtctagaaagttgatttacagacagatggaaaatggcccttaaatgccaagttaatggattgaaggcttgaaatcaaagcagtaacaggatgaaatcaatctggtgacaggtgtacaaagtggagtgggataagaaagtcaagatgatgaagggagacagctcttgtgattatttcaagtgtgacacagttcatcttagataaagacagaaatgagaacaaagctcaatagaggtgcccccctctgattacactggtcacattacatgtcactgtccctaaagctcatacctgggactcagggtcagcatcatcaccccaatgtagcgccgctgggacccactgattccggaggaggaatctgtgacagagggacaaatgagccccacccagctacatccttccttccctgccctcttctcccagtagaccaccctccaggaagtcccactgaatgcccttcccctatttccaccacattaaaggaacccgtttccccataaggcaggctcactcttcttttccccacgatgcagaaactctcgaagacgatcagaagggatggcaaaggagattccagctgtgaccttcatggtgttcactccaatcacctccccatcctgcagggatacagcccccagttccctagcctaaacaaatagtaggggatgggggcacccgaacaaaagtaccagcaagtgttggggagatctggttggatattgagagatagccaacaaagaactgctcagaaacttgaccaaacatccttgaattaggggaaacctacccttcccacactgacctggggcagggattcttggaaggaaggatgtctcactcaccaggttaaccaggggacctccagagtttccaaactgtaggacaaggagaaaacatgaaagagatctggggattctaagtctgggggcataccaggatgtaggtactttctccaaattctcttctttctcagcccatgaataagtggccacatttttgcagcctaagctctatataggctcatccaccatatatcagttggtgcttgtaccacacagcctctcccccctcccccatcatttgtcatttctctcctatcaggacgcacatcaatagctgcatcagtttgaatgtattccacattggtttgggggagtcccaggtctctggctggacgctgagcagagctaacaatgccggatgtgatcgtgttctgcagtgcaaagggacttcccatggcaacaacaaactccccttgccggacatcagctgagcgtcccagaggcagcgtggggagaggctcctaagggagaatgggtaaaagagacctgtcatctgaagatgcgagcaaataagcagctccaaccagacctggcctaccccagcccccaccttagtctgaatcctcagcgttgcgatgtctgccacgggatccacagctgtgaccacggcctcatacgtgtcgccgcttagcagtctcacacggactctgcgccgatcagccaccacatgggcgttggtgacaatgagcccatcggcagccaccacgaatcctgagccgttcgagatagggacctcgcggcccaagaaagggtgcctgaaatggagggaaagcacagataagaggaggctctgacccctcctacccgcccgccctccagcctgtggcttcagtgcctcccggtctacccccaccattaccggtccaggatctcgatatagaccacggcaggtgctgtcttctccaccacatctgcgatgaagttgtactgactccggggagaagcgggcggcgggctagggacggcggcgaggacggccggaggaccccgacccccgccccacaacaacaacagcactgcccccccagcgcccagcgccaccgccagccacgcgcgcgaacgggttccagagttctctgaggcctcccgggtcctggtatctggggtcaccgcagtcagttgtgcccggggacccggggtcccagacgtcaggcatgctcggggttcagtgaccccaacagacaaccgggcccagagactgggggtcccataagtcactcgggcccgggggtcagaagttcctgacgtcagcagggcccggaggtcaggggtcaaacggggtctcctcccccagcgaatgccccccaaagcccgccatgcccgaaggctccagcctgcaccccgccccgccctcggcgcagccatcagctccgccttggctgcctcctcgcccgccctactcagaggcggcacccaggacgcgagcaggcggacagtaggacgcggggcacgccggtacctgaagtccttcagaagtgcacgccgggaccaggattccgggaggccgactcctccctgccccacgaatgccgggaattgtggtctccgccggacgcgagttgtgagacggcccaaggggccgcggggtatgctgggaccgctagcccttccggcgcgcctcaggacttcgggtcccctcaccccgggcggatgcccaaagactccgccttcccaagagcccctgcggccgggcgcgaaaatggcggcggcggcgacggccgggcgctcctgaagcagcagttatggagcttccctcagggccggggccggagcggctctttgactcgcaccggtaagagacccggcgggaagagaccgatccccgcgtgctctcggccttcggcgcctgaccacttcgcctctcgcccccaggcttccgggtgactgcttcctactgctcgtgctgctgctctacgcgccagtcgggttctgcctcctcgtcctgcgcctgtttctcgggatccacgtcttcctggtcagctgcgcgctgccagacagcgtccttcgcaggttccgacgcgggcgttcggggagtgtcagagctgggtctggcccgaggccacacagtcaccacctcctgtgtccccagattcgtagtgcggaccatgtgtgcggtgctagggctcgtggcccggcaggaggactccggactccgggatcacagtgtcagggtcctcatttccaaccatgtgacacctttcgaccacaacatagtcaatttgcttaccacctgtagcaccgtgagtgagagcgaggccgagagcgccacggggcggttccctggggcccagctgaaggcccccctgtccccactcgcgttccccatggaggatactgagccttacccctaaccccgatcctctacccaacatgtcagttttttttttcattttcctcaatatttttcttcttgctttctcttctcctggttcccagcctctactcaatagtccccccagctttgtgtgctggtctcggggcttcatggagatgaatgggcggggggagttggtggagtcactcaagagattctgtgcttccacgaggcttccccccactcctctgctgctattccctgaggaagaggccaccaatggccgggaggggctcctgcgcttcaggtgggtttagcacaggtatggggcgccagctgggtaggtggtcaagcttgtgggcccttgagtttttacaactttcttcggcccttagaccccatcatctccagttcatttcctttctgtccactttaagttctttctcctgaatcccttcattcttcaattatgtgcttgtagagtttgacagttgcctgttataaggcaggtgtgagctgctgactaggctggctggattcccatcctactttctccttcctcttctagttcctggccattttctatccaagatgtggtacaacctcttaccctgcaagttcagagacccctggtctctgtggtgagtgtgtgttgaacagggaatctctggggcttgaaggggaaatttcccatccctggccctggcttaggcctcatctcatgccctcccctcagacggtgtcagatgcctcctgggtctcagaactgctgtggtcacttttcgtccctttcacggtgtatcaagtaaggtattaactgtcctcacattttggtcgctggggagaggctcacctcaaggtcaaggaattagtggcctctgccctgtccatttgtagatctttatatcaaggttctaccacagaggcaacacaaagtatttacagtatttactattttcccacccaccatgcaaagaggtaccaaagtggggaatggtgacagcctctaccctgggtgcccacaacatagccctggattgtttctttgcaggtggcttcgtcctgttcatcgccaactaggggaagcgaatgaggagtttgcactccgtgtacaacaggtggtcgggtgcacagacagggtggaggcggggtccctgcttaggaggagagggaggaaagcttgagatcttgacacttccagtcttccaattctccctagctggtggccaaggaattgggccagacagggacacggctcactccagctgacaaagcagagcacatgaagcgacaaagacaccccagattgcgcccccagtcaggtatgtggtctctatacattacagcttttggggtttttttttttcggcctactgtgattcctcccctatttctgtgctagttagcctctccttctagttctctacttaccagaatttcttttttctttttttcctttttccacagcccagtcttctttccctccctcccctggtccttctcctgatgtgcaactggcaactctggctcagagagtcaaggaagttttgccccatgtgccattgggtgtcatccagagagacctgggtatgggaaagggtggccccacactgggagatgggcacagggaggaaaagtgggttgtgaaggaagaaagtaagtagggagtggactcccttctcttttctccccagccaagactggctgtgtagacttgactatcactaatctgcttgagggggccgtagctttcatgcctgaagacatcaccaagggaactcagtccctacccacagcctctgcctccaaggtgagacccaggaaatggtcagatccaagtgttggggtgagttgggggcaggctatgtactcccttatccctgacctttcttttttgatcctgagaccctagcatagtgcctctcttgcaaagtaggcattcgatgcgtgtttaatgatgatgactccgcaagccctctgacattgtgatcacctcagtttcccagctctggcccggtgacccctcagccaacagccctaacatttgccaagtcttcctgggcccggcaggagagcctgcaggagcgcaagcaagcactatatgaatacgcaagaaggtgagggggttagaggacaattaataggatgtggcaaattggagaatggaattatggagctactacggcaaagcctgaataatatctctccctatgtcccacaggagattcacagagagacgagcccaggaggctgactgagctcaaaggaacaggatggcacccagagccgcaggacggagactgggggcagccctcacccaactcacaacaggctggatgggtgggtggtaaaaagggaaggatgaggctcccccaatgtcacattaaattcatggttttcattcaaggca

SEQ ID NO: 8352 - DNA, 7764 bp, Homo sapiens
tcttcactcactatgatatcctcaccccaaatggcaccaaggtggctgagggccacaaagctagtttctgtctcgaagacactgagtgtcaggagggtgagttggggactgaagtgaaccacatggtatccattgcacagcctttccttacactgacatatgccaatccctccagatgtctccaagcggtatgagtgtgccaactttggagagcaaggcatcactgtgggttgctgggatctctaccggcatgacattgactgtcagtggattgacatcacggatgtgaagccaggaaactacattctccaggtacctggagtctggggcttccagatgggtgagtggggggagcgttaaagacacctttgaattcgaggattgtcgctgggttaagtggcctttttctcactcacaggttgtcatcaacccaaactttgaagtagcagagagtgactttaccaacaatgcaatgaaatgtaactgcaaatatgatggacatagaatctgggtgcacaactgccacattggtatttgatgggaagagcaacccaggaagattaggggatgggagggaaagacgttcattctcttttccatagcttgtttctccatcttcccaccttcctgtagagctctcagtccctccacttctacccacccttctccacagtgcatctatctccctccctctgtgcagggcgcctcccaaattgcctgtccactctgcaggtgatgccttcagtgaagaggccaacaggaggtttgaacgctaccctggccagaccagcaaccagattatctaagtgccactgccctctgcaaaccaccactggcccctaatggcaggggtctgaggctgccattacctcaggagcttaccaagaaacccatgtcagcaaccgcactcatcagaccatgcactatggatgtggaactgtcaagcagaagttttcaccctccttcagaggccagctgtcagtatctgtagccaagcatgggaatctttgctcccaggcccagcaccgagcagaacagaccagagcccaccacaccacaaagagcagcacctgactaactgcccacaaaagatggcagcagctcattttctttaataggaggtcaggatggtcagctccagtatctcccctaagtttagggggatacagctttacctctagccttttggtgggggaaaagatccagccctcccacctcattttttactataatatgttgctaggtataattttattttatataaaaagtgtttctgtgattcttcagagcccaggagtcagtgctggtggttggagggacctgcccccactggttcatttaaccctctgtctcggtgccctcagaacctcagccagaaaggcaaggaggaaatcagagcaggagcctcatactcttggtgatctattcattctgtgacctcaggggtcacatataaggtcagtgtttctcgtccccgccggatctgcactgccaactgggattgggttcgaacagcttcataaacatcttcagcattttgtaccatctgctccccaatggccaaaatcacatcaccaggccgcagaccagccctatagagaaaaatggacagagagaaaggaaggagtacaaagcctagttcaaggacacatgcacaccttgcccatccccatatcacactgcagcctctccctcaccggtgtgcaggggagcccaggatgactttatggatgagtacaccatgctgaacatcgggaaagcttggttctcgaagctgtagttcagcaaggatgctgaaagtacacagatcaccctattagccaaacccaggcattctccccatcctgagttccacctcaagtctctcatcaacacattgataaatatatggacaggacatgggctaggtactacaaaatacaatggcaactcactttctgtcttctagcaataaagtgcaacatgtacataaaagatgtacaccacatgagggcaccaaatgacaaacagtgttaaatcaatagcactaatgtcattctagaatactaagagaagctttaaggggaaagaacttaagttgagcctaaaaggatggatctgatattaaccatataaaacaagaacagcataaataaaaaacatgggagtaggaaatcaggttggctgagtattcatataggaaggtattacagccaggtctagaaagttgatttacagacagatggaaaatggcccttaaatgccaagttaatggattgaaggcttgaaatcaaagcagtaacaggatgaaatcaatctggtgacaggtgtacaaagtggagtgggataagaaagtcaagatgatgaagggagacagctcttgtgattatttcaagtgtgacacagttcatcttagataaagacagaaatgagaacaaagctcaatagaggtgcccccctctgattacactggtcacattacatgtcactgtccctaaagctcatacctgggactcagggtcagcatcatcaccccaatgtagcgccgctgggacccactgattccggaggaggaatctgtgacagagggacaaatgagccccacccagctacatccttccttccctgccctcttctcccagtagaccaccctccaggaagtcccactgaatgcccttcccctatttccaccacattaaaggaacccgtttccccataaggcaggctcactcttcttttccccacgatgcagaaactctcgaagacgatcagaagggatggcaaaggagattccagctgtgaccttcatggtgttcactccaatcacctccccatcctgcagggatacagcccccagttccctagcctaaacaaatagtaggggatgggggcacccgaacaaaagtaccagcaagtgttggggagatctggttggatattgagagatagccaacaaagaactgctcagaaacttgaccaaacatccttgaattaggggaaacctacccttcccacactgacctggggcagggattcttggaaggaaggatgtctcactcaccaggttaaccaggggacctccagagtttccaaactgtaggacaaggagaaaacatgaaagagatctggggattctaagtctgggggcataccaggatgtaggtactttctccaaattctcttctttctcagcccatgaataagtggccacatttttgcagcctaagctctatataggctcatccaccatatatcagttggtgcttgtaccacacagcctctcccccctcccccatcatttgtcatttctctcctatcaggacgcacatcaatagctgcatcagtttgaatgtattccacattggtttgggggagtcccaggtctctggctggacgctgagcagagctaacaatgccggatgtgatcgtgttctgcagtgcaaagggacttcccatggcaacaacaaactccccttgccggacatcagctgagcgtcccagaggcagcgtggggagaggctcctaagggagaatgggtaaaagagacctgtcatctgaagatgcgagcaaataagcagctccaaccagacctggcctaccccagcccccaccttagtctgaatcctcagcgttgcgatgtctgccacgggatccacagctgtgaccacggcctcatacgtgtcgccgcttagcagtctcacacggactctgcgccgatcagccaccacatgggcgttggtgacaatgagcccatcggcagccaccacgaatcctgagccgttcgagatagggacctcgcggcccaagaaagggtgcctgaaatggagggaaagcacagataagaggaggctctgacccctcctacccgcccgccctccagcctgtggcttcagtgcctcccggtctacccccaccattaccggtccaggatctcgatatagaccacggcaggtgctgtcttctccaccacatctgcgatgaagttgtactgactccggggagaagcgggcggcgggctagggacggcggcgaggacggccggaggaccccgacccccgccccacaacaacaacagcactgcccccccagcgcccagcgccaccgccagccacgcgcgcgaacgggttccagagttctctgaggcctcccgggtcctggtatctggggtcaccgcagtcagttgtgcccggggacccggggtcccagacgtcaggcatgctcggggttcagtgaccccaacagacaaccgggcccagagactgggggtcccataagtcactcgggcccgggggtcagaagttcctgacgtcagcagggcccggaggtcaggggtcaaacggggtctcctcccccagcgaatgccccccaaagcccgccatgcccgaaggctccagcctgcaccccgccccgccctcggcgcagccatcagctccgccttggctgcctcctcgcccgccctactcagaggcggcacccaggacgcgagcaggcggacagtaggacgcggggcacgccggtacctgaagtccttcagaagtgcacgccgggaccaggattccgggaggccgactcctccctgccccacgaatgccgggaattgtggtctccgccggacgcgagttgtgagacggcccaaggggccgcggggtatgctgggaccgctagcccttccggcgcgcctcaggacttcgggtcccctcaccccgggcggatgcccaaagactccgccttcccaagagcccctgcggccgggcgcgaaaatggcggcggcggcgacggccgggcgctcctgaagcagcagttatggagcttccctcagggccggggccggagcggctctttgactcgcaccggtaagagacccggcgggaagagaccgatccccgcgtgctctcggccttcggcgcctgaccacttcgcctctcgcccccaggcttccgggtgactgcttcctactgctcgtgctgctgctctacgcgccagtcgggttctgcctcctcgtcctgcgcctctttctcgggatccacgtcttcctggtcagctgcgcgctgccagacagcgtccttcgcaggttccgacgcgggcgttcggggagtgtcagagctgggtctggcccgaggccacacagtcaccacctcctgtgtccccagattcgtagtgcggaccatgtgtgcggtgctagggctcgtggcccggcaggaggactccggactccgggatcacagtgtcagggtcctcatttccaaccatgtgacacctttcgaccacaacatagtcaatttgcttaccacctgtagcaccgtgagtgagagcgaggccgagagcgccacggggcggttccctggggcccagctgaaggcccccctgtccccactcgcgttccccatggaggatactgagccttacccctaaccccgatcctctacccaacatgtcagttttttttttcattttcctcaatatttttcttcttgctttctcttctcctggttcccagcctctactcaatagtccccccagctttgtgtgctggtctcggggcttcatggagatgaatgggcggggggagttggtggagtcactcaagagattctgtgcttccacgaggcttccccccactcctctgctgctattccctgaggaagaggccaccaatggccgggaggggctcctgcgcttcaggtgggtttagcacaggtatggggcgccagctgggtaggtggtcaagcttgtgggcccttgagtttttacaactttcttcggcccttagaccccatcatctccagttcatttcctttctgtccactttaagttctttctcctgaatcccttcattcttcaattatgtgcttgtagagtttgacagttgcctgttataaggcaggtgtgagctgctgactaggctggctggattcccatcctactttctccttcctcttctagttcctggccattttctatccaagatgtggtacaacctcttaccctgcaagttcagagacccctggtctctgtggtgagtgtgtgttgaacagggaatctctggggcttgaaggggaaatttcccatccctggccctggcttaggcctcatctcatgccctcccctcagacggtgtcagatgcctcctgggtctcagaactgctgtggtcacttttcgtccctttcacggtgtatcaagtaaggtattaactgtcctcacattttggtcgctggggagaggctcacctcaaggtcaaggaattagtggcctctgccctgtccatttgtagatctttatatcaaggttctaccacagaggcaacacaaagtatttacagtatttactattttcccacccaccatgcaaagaggtaccaaagtggggaatggtgacagcctctaccctgggtgcccacaacatagccctggattgtttctttgcaggtggcttcgtcctgttcatcgccaactaggggaagcgaatgaggagtttgcactccgtgtacaacaggtggtcgggtgcacagacagggtggaggcggggtccctgcttaggaggagagggaggaaagcttgagatcttgacacttccagtcttccaattctccctagctggtggccaaggaattgggccagacagggacacggctcactccagctgacaaagcagagcacatgaagcgacaaagacaccccagattgcgcccccagtcaggtatgtggtctctatacattacagcttttggggtttttttttttcggcctactgtgattcctcccctatttctgtgctagttagcctctccttctagttctctacttaccagaatttcttttttctttttttcctttttccacagcccagtcttctttccctccctcccctggtccttctcctgatgtgcaactggcaactctggctcagagagtcaaggaagttttgccccatgtgccattgggtgtcatccagagagacctgggtatgggaaagggtggccccacactgggagatgggcacagggaggaaaagtgggttgtgaaggaagaaagtaagtagggagtggactcccttctcttttctccccagccaagactggctgtgtagacttgactatcactaatctgcttgagggggccgtagctttcatgcctgaagacatcaccaagggaactcagtccctacccacagcctctgcctccaaggtgagacccaggaaatggtcagatccaagtgttggggtgagttgggggcaggctatgtactcccttatccctgacctttcttttttgatcctgagaccctagcatagtgcctctcttgcaaagtaggcattcgatgcgtgtttaatgatgatgactccgcaagccctctgacattgtgatcacctcagtttcccagctctggcccggtgacccctcagccaacagccctaacatttgccaagtcttcctgggcccggcaggagagcctgcaggagcgcaagcaagcactatatgaatacgcaagaaggtgagggggttagaggacaattaataggatgtggcaaattggagaatggaattatggagctactacggcaaagcctgaataatatctctccctatgtcccacaggagattcacagagagacgagcccaggaggctgactgagctcaaaggaacaggatggcacccagagccgcaggacggagactgggggcagccctcacccaactcacaacaggctggatgggtgggtggtaaaaagggaaggatgaggctcccccaatgtcacattaaattcatggttttcattcaaggca

SEQ ID NO: 8353 - DNA, 1118 bp, Homo sapiens
cagggttggtggtgactacgtgggtctggagctgactgccgtcctgacacgtcctagagctgcaagcaggtttgaatccaggatccctgtgactctgctgttcctctccccaccccctatattctttatccttttcccttcaggactttcccacaggttactaggtctcacataatttctactgcccttgaggacccctgcctaagtaagatttctactacctgccaacggggtaatagtctcaggtagatttctactacctgactatagggactgtcgactaactctcagtagccctttatcaaaatacctagcactgtttcctggcaggaaatgctgggaagggtgggccccagagcatgatcaactgaaggtagaggttaaggatcagggctgaggtgggaagatggtgtcggtcaccaaatatgaccttactggctgctctgccttctgcaggtcctgccagagagccaccatgacctctcagcctctcaggctagcagaagagtatggcccaagtcctggggagtctgaactggctgtgaacccctttgatgggcttcccttctcttcccgctactatgagctgctgaagcagcgccaagccttgcccatctgggctgctcgctttaccttcttggagcagttggagagtaaccccactggagtggtgctggtgtctggggagcctggttctggcaagagcacccaggtgtggtgggggttgtgggggcaggcagattctgggagtggacaaagggaggacaaagggaggacaaagggaaagtggcctttccctgggcaaggggggactgggctgcgtggggtcatgaggaaggtgaacgaagagagatgggatgggttaggttggccctggaggctggtgaaagaccaggggactccccaaataaggaaagattaaagtggccatagttccctgagcacttctgactgaagtcctacatcttcctcactggctctccttccctacttctatcccagatccctcagtggtgtgcagagtttgcgctggccagagggttccagaaaggacaggttactgttactcagccctaccctcttgcagcccggagcctggctctgcgggttgctgatga

SEQ ID NO: 8354 - DNA, 380 bp, Homo sapiens
cccttcccactacaccaccaggcttcagcctccaaagagacaagtgcttggtacctacatgcaaagtgtgtgtgctggggggtgggagggctgcccagaacaggggagaggatggtgtaaaaaaagacctactcctttcctgttaccctctccccacatgtaccaaccttcctgttgctccctccatccacagaataatagctaccatttataaaatgtttactctgggctgggagcagtggctcacacctgtaatcccaacactttgagaggctgaggtgggatgatcacttgaggccaggagttcgagaccagcctgagcaacactgtgagacccccccgccatctctacataaataataaaaacttttaaaaaaaca

SEQ ID NO: 8355 - DNA, 176 bp, Homo sapiens
aggagaccgcctacatcgaagaccggcccctgcatatgttgtactgtgctgcggaagagaactgcctggccagctcagcccgctcagccaactggccctatggtcaccggcgtctgctccgattctcctcccagatccacaacctgggacgagctgacttcaggcccaaggctggg

SEQ ID NO: 8356 - DNA, 1118 bp, Homo sapiens; identical to SEQ ID NO: 8353

SEQ ID NO: 8357 - DNA, 6010 bp, Homo sapiens
aaaaaaagaaaagaaaagaaaagaaagaaaactcagctaggaattagaaacatcatttgtcctcttggcctgttcagctggtgactgtaggtaagttacttaacctctctgtatttcagttcacattccttggtgaaatagaaattaaagttaataatcacttctacttgtgaagaattttcagatctgaaattgctttgtttgggctttggcaagaaaaaggtgctaagaattccagagaattattggtaggagttgggagtagatcgttaccccagccaggctggacagttgggcccattggctaggaagtatttgaaagccctaagctttgaggtatatccccaagaacctcttcctggcagggagggttcctcctagttgcctcagtcagttagcatctccacagcacttctgttaagtttgcacagtacttccacgtcagctagcaaagacagtggcactgtgtggtggcagtttaggtggtgttcagattctacctttacacctgaggaaacagaaatcccagagatagaatttgagaatctcctttggtttatttcttaccaccccaagtttctcacaagcctttccaggatcaggcaagacaggttatcttggaaggcagaggctggtggtgggggcctggggctgggggagctcagaggcagcttttaactggagaccaagaagggaaatggccagtcaggaggctgctgctttttttgttttgtttttctctccagttcctgccctgttgtagctactaactagaggaatgttctggttgttttgtttttcctttttaaaattgacatgtgatagttgtacatattttggggctgcatatggtattttgatacatgcgtacaaagtgtaatgaccagtcaggatatttaaggacatttatcacctcaagcatttatcttttccttgtgctgggaacattccaattcttctagctattttgaaatatacaataaattgttaactatagtctccctactgtactatcaaatactagaacttagtcctcaccatatttttgtaccatccacctgctcttcattctcctcccctgcttttcccagcttctggtaaccccattccgccctctattggagggttgtgttttgattggctgcgaaatgcacagtgtggcttctcttctcccaggagtgggaggggccacctctagggtccaccagggggagctgccctgcagccctgggctcccatcactctggtccatcccctctcctctccctcctgagcaaatgtgctagacaagactgttccaggtatgggccagccagatggcagcatggtggtgagggtgcagatctgctggaagcaagagaatgtggacttcatgggttgtggagggaactctgcacttctgtcccatccccagtcagctcctatgaccctaaggcctgaagcctcagctcgctgtggagagaacagagcctacacttaaaattcttggaggttttgtgcttccaacaaccaagtcctttcaggctcagggttggaaaaagtttgtatatctgtgtgcacattgtcatttggacggggctcagagaggtgacctgccagctgacctgacgtggcctctcctcatcttctgccaggcctcaacagctggtcccctcaccttgctggcagacactaagggttacaggcagcctgcttctgggccattctgcttggttcttggtatgactgcttcctgtcactacctccacggtagtggtccaaatgccagctcctggtaaatggggcagcagagcttcaaccccttcatcgtcaggcctctgagaagggccacctgcacccaaaggtctaacccagttagtcaggtgcctaaattaggcaggtgcgtgctgtgagcctgaggaatgggacagcaggaaatgaggtaaccccttccacccccaagcaggtcgggttctgatcctccaggagtctgcaatgacatttccttctgctttctaagaaaatggccagtgtccacaaagagcctacctgactcattacgtagattctcaccccagcacttacttacccagcccctcatttgtacaagagcaggccaggggccccactgtgtatgaacctgtcttgttgaagcctgaggccctttacttggtatcatatcagctggacttaaatatgaaaattacaacactgcgtctatgaaagggtgtgcaatgcaaggtattcataaattctggttactttgaagtgctttttttgggtaatgctttagctggatttaaaggagcctgtaacaaaactgcctccgtttactggtgtacagtcccagatgtctatggattcctgcgggtcacctctccttttcctgctgccatgcctcctcctcccctggtcactaccacaccactgaaaatgagggggtcttggcggtgcgaagctacacttctagccacgatcttgtggggactggctgggatgaaaagtaagaaatacactgtttcctctctcacaggtctgggttttacccttaagctgaatgaaaggagagctgagacaagggcaggaagggttatgggtgaaatatgctgtgaaatccaaaagatattttctgtgcaagtctggtttcaactgtttgggcttgtctgaaagtgtgggaagaggtccagagctggagggacaacagagaggaagagtggggggtgacggatgggacccgaagtgttttccaccccatgggttctggatgtcaagtgatgagaaggttgctacggtttcctgagctacactcatctcccaggagaacatgccccatttctcctttgctcctgatggactgctgtggactgagactggaagagcagggtcctggaatacatcctgggtgctaacttgagcctctggaggccaggcccactgtgtgaagagggggaaagcactgctcacagatcagggttaacaaggcctgaggggcttcagcaggctgaggaagtctggaaccccagaagtttcatcatgactgcaggcgctgggaggtttcctgttccctggcttcaggctcacctcaggtcaggctcttcccagagccaatggggctaatgccgctgggctgggggagggctcgggccccagctccaaaggaaaggagacaaggcttacgtgttgtggtttctgcccagcctacacagcaggagctggggagactttattcgtttcggggaaagtgacaacaggaatgagatgaagtgtgaaagtgaaaggaaggggcaatactgagatgagaacagcctgaacaaagtctagtacaacactgcagccatccagagcttgagggagcggggaggtccatcaccaccaggccctgtgggccaagcacacccatgtttcttctctcttgtcagatttgatgaaaaggaaacttgggactccggaggaccaagatggagcgagacggtcaatactgatggacttgcagctagcaccatggcagccctgcctggtctaaggaagctggcaggaggcgatggtacctggcgggggcagactgcccacctccccactccttcagaggactgtttcctgcccttcacaccatcatcatgttgggccctgcatgtatgttcctgcacttggagcgagcccagggacacagggcagacactgggctcacagatgttgctgcagctgagccagaaaacattccaggcaggaaaagcaggtgcacacattcacacaggcctctggtcactcgaccagccagaatgagacggactccttgacctgggaagtcaagtcccagtgggaagggctggaaatcacacgtggtcaacttcttggctctctctgctccccaaaccctggccctaggcttgctttatcatcacatcccaaggccagagggctgctgctgtccccatcttggccctgctagaagagggataggggtggctggcatgatgggtgaggggaacatgagaatatgcagaggccttggaggaagaggactggcagttatgacaggaaggctctctatacctggctccccagtgttctgcccctggcactgagcatgaggagccaggctttggggagactttgcaatcacccccccaacctggtccattttccacaggtagctttcttgaactcaccttgacccctcctcagccagcagcccccacctccaggggcaaaggagctgaaagacagtcctgaactggggggagctgggatcacatcagccaggccctgtccctcacaggaagtgagatgaggtgataccatggatggtgactaaggccccaaagtccctgcctctctgcctccccagaaacctcacagccaggccagcccccagagcagagcctgtgtaaacatgcccaggaggggaggaggggttgctacatatgagaaacagttaaaaataaatttaaaaagcaccactatgtcctgtgctggtctccacagccccgaagtctcagctcaggaagggtgagtgctgggggattatcagctggggctcggctccctcccttgcagacagcaagcaggtaagggcttcattttgctgttttctccatggagggctctgggaaaggatcctgcaagttggaacctcctaagactccagaaccaggagcggctccctctcatatctactcccctcaaaccctgtcattcccgggaagctcccagaggcagctgaggccacgcccctgctcctgagcggcagcatccagacccggaaaggacctagtttcagcctggcacctcccaaggtgagccatctcttcttaggcatagtaggaacatggagaccacactacccccactccctgaaagctgggatgggatggtgagtcaagggtcaccatgcccctattagtctggctggagttaggttaggcatcctcccagggctcattgaccccagggggaacttggggaggcaagggactgaccagctggcctcccagggtgcctctggccaggccatgctggatctggctctgggtcaagcgctgctggtttgaagagctgccagcctgtggcgccttccctgacaggcactctcatcagcaaaggcatccctggttctgccttcccttcctctttgcttcaaaggcaccatccgtctccctggcaggccaagagctacactgtctgtactccatgcgccacccccgctggtgacccagcaactgcaaagggcctctggtttgtcccgctctgggaggagactcagtggcttttcctcctcctcagctgcaaggatcctaccccagcccagcccagctctgagaaacaggactttgctacagcccgcctcaaagcatcttggtggacttctccccagcacgagctctctctacttcagggattgcaaactggcatcctcttttgccagtattgggtttttaagttttttttaagtgatcaccagcatttaaaaatcctatttcacataaaaagtcagaattctggcctctgacaaagcagacaatctggcaacacagggccggcactgtaagaacagctgagcagctgtggcccctttaacagggtgtgccctcttcaggtagccatagtccccacacagcccttcaggcctccttctcaccgtttgctcgtcatttgagcttacaaccctagttctgctcttccttgtgtagccccccagcccttctgcagccttactgacagctgtccctggcagacttacagcctctcagtaaaacaaaaccttaatggtcatctcatccgtttacccttccacaatctgaatcctttctacctttctaccgcctcctgacaaacagccatctcgtctctgctgtaggtaacccattactcctcaagcagcctgatcctgaactctcccccacatccctttctcacttgcatcccccagttcccagctgtccctcagtggctgcactgcaccctttacctgcacctccttgttgcttgagcctccagaacctacccctggctctgccaacctctccgcatc

SEQ ID NO: 8358 - DNA, 2858 bp, Homo sapiens
ttacgtgttgtggtttctgcccagcctacacagcaggagctggggagactttattcgtttcggggaaagtgacaacaggaatgagatgaagtgtgaaagtgaaaggaaggggcaatactgagatgagaacagcctgaacaaagtctagtacaacactgcagccatccagagcttgagggagcggggaggtccatcaccaccaggccctgtgggccaagcacacccatgtttcttctctcttgtcagatttgatgaaaaggaaacttgggactccggaggaccaagatggagcgagacggtcaatactgatggacttgcagctagcaccatggcagccctgcctggtctaaggaagctggcaggaggcgatggtacctggcgggggcagactgcccacctccccactccttcagaggactgtttcctgcccttcacaccatcatcatgttgggccctgcatgtatgttcctgcacttggagcgagcccagggacacagggcagacactgggctcacagatgttgctgcagctgagccagaaaacattccaggcaggaaaagcaggtgcacacattcacacaggcctctggtcactcgaccagccagaatgagacggactccttgacctgggaagtcaagtcccagtgggaagggctggaaatcacacgtggtcaacttcttggctctctctgctccccaaaccctggccctaggcttgctttatcatcacatcccaaggccagagggctgctgctgtccccatcttggccctgctagaagagggataggggtggctggcatgatgggtgaggggaacatgagaatatgcagaggccttggaggaagaggactggcagttatgacaggaaggctctctatacctggctccccagtgttctgcccctggcactgagcatgaggagccaggctttggggagactttgcaatcacccccccaacctggtccattttccacaggtagctttcttgaactcaccttgacccctcctcagccagcagcccccacctccaggggcaaaggagctgaaagacagtcctgaactggggggagctgggatcacatcagccaggccctgtccctcacaggaagtgagatgaggtgataccatggatggtgactaaggccccaaagtccctgcctctctgcctccccagaaacctcacagccaggccagcccccagagcagagcctgtgtaaacatgcccaggaggggaggaggggttgctacatatgagaaacagttaaaaataaatttaaaaagcaccactatgtcctgtgctggtctccacagccccgaagtctcagctcaggaagggtgagtgctgggggattatcagctggggctcggctccctcccttgcagacagcaagcaggtaagggcttcattttgctgttttctccatggagggctctgggaaaggatcctgcaagttggaacctcctaagactccagaaccaggagcggctccctctcatatctactcccctcaaaccctgtcattcccgggaagctcccagaggcagctgaggccacgcccctgctcctgagcggcagcatccagacccggaaaggacctagtttcagcctggcacctcccaaggtgagccatctcttcttaggcatagtaggaacatggagaccacactacccccactccctgaaagctgggatgggatggtgagtcaagggtcaccatgcccctattagtctggctggagttaggttaggcatcctcccagggctcattgaccccagggggaacttggggaggcaagggactgaccagctggcctcccagggtgcctctggccaggccatgctggatctggctctgggtcaagcgctgctggtttgaagagctgccagcctgtggcgccttccctgacaggcactctcatcagcaaaggcatccctggttctgccttcccttcctctttgcttcaaaggcaccatccgtctccctggcaggccaagagctacactgtctgtactccatgcgccacccccgctggtgacccagcaactgcaaagggcctctggtttgtcccgctctgggaggagactcagtggcttttcctcctcctcagctgcaaggatcctaccccagcccagcccagctctgagaaacaggactttgctacagcccgcctcaaagcatcttggtggacttctccccagcacgagctctctctacttcagggattgcaaactggcatcctcttttgccagtattgggtttttaagttttttttaagtgatcaccagcatttaaaaatcctatttcacataaaaagtcagaattctggcctctgacaaagcagacaatctggcaacacagggccggcactgtaagaacagctgagcagctgtggcccctttaacagggtgtgccctcttcaggtagccatagtccccacacagcccttcaggcctccttctcaccgtttgctcgtcatttgagcttacaaccctagttctgctcttccttgtgtagccccccagcccttctgcagccttactgacagctgtccctggcagacttacagcctctcagtaaaacaaaaccttaatggtcatctcatccgtttacccttccacaatctgaatcctttctacctttctaccgcctcctgacaaacagccatctcgtctctgctgtaggtaacccattactcctcaagcagcctgatcctgaactctcccccacatccctttctcacttgcatcccccagttcccagctgtccctcagtggctgcactgcaccctttacctgcacctccttgttgcttgagcctccagaacctacccctggctctgccaacctctccgcatc

SEQ ID NO: 8359 - DNA, 973 bp, Homo sapiens
gccatcattgcaaccccaagccaagatgggctgttaaagaatggaaggcaggcctggggcagaagcatcctagtctggtcttgatttccccagcaagggctcctggcactgctggcggagagacccaggcccaagcatcccgccccatcaccccatgtccagccacagctcctggactggcacccagggtttgctcaactcccacagccatgctggcctcagtgccattctgggtcctccgccaagcccagaccctccgcagggagcctgtgggctagagcaacaggcagagctgggactgagcaagtagacgcagttagggcctgggaactttttgcccagaggtccttccctgggctcgctctcatatcacccctcctctgcccacacagcactgcccatgggggcctcaagggcctgaaggctctcctgagccacgagctcatgctcttggggcagatgtggcctgtgccaagctcctggttaatgggctacacagacctttctcagaaggactcctaccctgcttccctttccctgggtcaagattctgccagggcaggcagaactggagaaacatctccaccccacccccaccccccatcacaggcctggtaaggctgggagatttcccactgataagatgcacccaactcccagagagaagccaggggcagaggcaccagcagaaccagcagtttccctcacctggccccatgacacatggatttgttaagcactggccttcccaccatcagcagatccatttggactaagttttccccaaataccttaaacttcagttgtagagttaaaaactccaaataaaatactaacggcctctaggcccaaagttagggggcttggctcagtgggagcgagagcagcttggggggctgagctggaacacactcttcctgcagcctcttgccctgccttgtcaccagccccgccttccccatgcataaggctg

SEQ ID NO: 8360 - DNA, 973 bp, Homo sapiens
tgatcttggggtggggtctcaagacatgaatctagattgagaaatgtgttgtaagatctccctctattagctgaggtaaattcccactgctgtgaggcctgggaggaacagggcttgagtgaagcctcctgccttgacactgctggggtacagctttcttctgtccttcccaagtgagagaatgattctttggactgcttttcattcttcctccatctgctccccccatgcctcctcctagtatcttctgcacttcaggagggtctgtgcaaagtgggataagatgtgtgttttcctgattaaagctatggcagctgcatgagacatgatgcgggtggcacatgcctcttgctgagcatctatttctgatctcttttgcattctggagccagggctgagcagtgggccatctgtcgctggaaaaatgtctcttccttcctaggcctacctctgttggtgcttttgtcttccaacctccctatgtagtaagaccagccaagcccacatgcccactgggagccctgaaaccagatctggttttctgtcttacctgaacaggttcccagaacccacaccaggcctctgaatcagtctctgagaatctgattgatttaaagccacttggttgcttccattgcactacctgggttgcgatcccctcaattgatttagtaaaaagaaaacttagcggccgggtgcggtggctcacacctgtaatcccagcactttgggaggctgaggcgggtggatcacctgaggtcgagagttccagaccagcctgaccaacatgaagaaatcccgtctctactaaaaatacaaaattagccgggcgtgatggcgcatgcctgtaatcccagctacttggaggctgaggcaggagaattgcttgaacctgggaagcggaggttgtggtgagccgagatcatgccattgcactccagcctggacaacaagagtgaaactccatctcaaa

SEQ ID NO: 8361 - DNA, 973 bp, Homo sapiens; identical to SEQ ID NO: 8359

SEQ ID NO: 8362 - DNA, 1290 bp, Homo sapiens
ggtaattgtttgaaatctaaaatgtcaactttctatattttcatttttatgcacaacactgttcgtaaaggcagtaatgcttcgtgtaattactggtacataaaagtctgattttgaaagtcactgtaaactaagcctgttttctgcctttctttctagtaacaacccttcagcagcgtctgttacagcctgacttccagccagtctgtgcttcacagctctatcctcgccacaaacatcttctgatcaaacggtccctgcgctgccgtgtaagtattccattctgtagactgaccatttgtacaagaggaaagcaaaaataaatgtggctggtgtctgactaatgtcaaaacctttggaatgtattaaatacagaaaatacttgtagagaacatactaattgccaggcactattttaaatgctttcaatataaacagctcttacaactctgtgaggtaggtactactgttaaacctgttttacaaatgtagaaaatgaagtatctgaaggttaagtacatagggttaacccctaaaagaatagtgaaagagtgtgaacttttaggctagtgttcaggctcagggaggaccaataaaaaataatcaatttaaaagaaagcaagaaaaatcagcaaaatccaggctctggtaatctacagaacaaatgacagagtttcttcaataaataaattgtaaaaacaaaatggaaaagaaaccttttagaggagtactatccaacagaactttctatggtgatggaagtattctgtgtctgtacagtcccgcatgatagccactaggcacatgtggctcttgagcacatgaaatgtgatagtgcagctgaggtactgagtcagtctttaatttcatttaaataaccacatgtcgctagtggctaatgttacttaatcattctctagattagaagagacttaaaagtttaccaaacacaatgtatagagtttacgtagattcggattcaaacaaaacagaaagaaagggcccaggggaggagggaagaagggaaagaggaaagaaggaaagaaaaatttgtgaaatctttgagaaaatttaaacactggtagcattttcgatgctattaaaaaactattgggcagggcacagtgacatgcacttgtagtcccagctactctggaagctgaggcaggagaatcccttgagcctgaggagtttgagactgtagtgtgtgatgatggtgcctgtgaatagccactgcactccagcctaggcaacacagaaagaccctgtctcttaaaaaaaaaaaaaaag

SEQ ID NO: 8363 - DNA, 7668 bp, Homo sapiens
ctattctattcattgtgctagttgttgcctgaatacttagattttttttttcattgtgttattgttttataggccctgtgagacttatgctttaaggaggttatattttggtgtgtttcaaggttttgtttcaggatttagaactcctttgagcacctcttgtagtgctggcttggtactgacaaattctctcagcatttgtgtgtctgaaaaagactttatccttcattcatttacaaagcttagtttcgctggatacagaattcttggttgataattgttttgtttaaggaggctaaagataggaccccagtcccttctagcttgtagggtttcgccaagaaatctgctgttaacctgataggttttcctttataggttatctgatgtttttgcctcataactcttaagattctttcctttgtcttgactttagataacctgatgactgtgtgcctaggtggtgatctttttgcgatgaatttctcaggtgttctttgagcttcttgtatttggatgtctagatctctagcaaggccagggaagttttcttctattctttcctcaagtaagttttccaaacctttagatttctcttcttccttgggaacaccaattcttagttttggtagcttaatataatcccagacttcttagaggctttattttttattattattgttattattcttttttctttgtatttgtcagattgggttaattcaaaagccttgtctaagtgtgtctgtcatttcaaaaattgtgattgtttattatttatgctgtctttctctggagattttttttgtccataacctgtatttttttttttttttttaattcccttaagttggttttcacctttctctggtgcccctttgagtagctttttgagtagcttaatagttggccttctaaattttttttctgacaattcagagttttcttcttggtttggatccattgctggtgaactagtgtaatctttttggggtgttaaagaaccttgctttgtcatattaccagaattgtttttctggttccttctcatttgggtagactatgtcagaggaaagatctggggcttgagggctactgttcagattattttgtcctacgacattgttccttgatgtggtgctctccccctgtggcttcctgagagctggactgcaattattgttattgctgctctgggtctagccacccggccagagctatcagtctccgagctggtactggggagtgtctgcaaagagtccagtgatgcagtccgtcttcaggtctctcagttgtggataccagcacctgctctggtggagatagcaggagagtgaagtggactctgtgagggtccttggttgtagtttggtttcgtatgctagttttctttaatgctggttgtgctagcagtgaattgtcacgtggacagactcaggacctctggttagccaggatgtcacaggtggtggaattagctgttgttttctccttttgagggcagggttgttcttttatgagttgctataatgagttggttggcctccagccaggaggtggcgctttcaagaaagcatcagctgcagtagtgtggtggggatacaagcttgccctaaggttgcctggataagtatttgggtttcccaggtgatcagtggggccataaagctcccaagagtttacagtcttttgtcttgggctaccagggcaggtagagaaagaccatcaggtgggggcatatctgagctcagaatctccttgggcagggtttgctgcagctgctgtgaaggacagttgtgtggttctcaggccaatggagttatgttcccagggggattatggctgcctctgctgtgtcatactggtggccagggaagtaggggaaagccagcagtgacaggcttcacccagctcccatgcagccagcaaggccagtctcactcccaccatgccccaccaacagcatggggtttgcagggccaagattttggcccaggctacaagcctacttgctgaaaaagcaagctagccttttggactccgccccttcccgactgctgtggcttatgtgctcatatctgtacttcccctttacgccttccccatcttgattgtgcccaggaaaatttgctctccgtcaaagttattacaaagttcacctggaagtttctgtctccaagtggtccttcctcagttccactggcagcactccccaaggacccctgtgagattaaagtcagaaatgacttccctgggcttcactgggaaccgggagtgcctacagggctcttcccgctgttgcttcttctatttttatatttcactcggctctctaaattttgtttcagcactaggtaaggttaaatttttctcccatgatctggatttttaggttctccagtgaggatgtgtgtttgaaggtggattttccccctcttacacatgggcactcacagattttctgctgtctcatggattttgcagcagcaagccacttcttttaaagggtctgtgaattctttcagttttcctagtatgttcctgcagtagttcttggaataaaaattcacagtgtgagtctccacatgttgttctgtctgtctgaggggaagctgcaagttagtcctgcctcctatctgccattttttttttgccacctcatcctcttgagtagctgggactataggcatacaccaccatgcccagctaatttttgcatttttttatagagacaaggtctcactctgttgtccaggctggttttgaactcctggccccaagtgatctacccacttcagcctcccaaagtgctggaattgtaggcgtgagccactgtgcccatcctggtttgaactttttatgattaatatgtattgcttttataattaaaatgtattttaaaaattaaaaagtgtgatggagttggggaataaaatacagtataaaatgctatgttcttagaaataagtggtcctgtggccatgcagaaaaaaaataagagcagttgtgaggggaaataagtaatgaagttagagagcaaaaaatttccaagcctcttcattgcccatttcttcccatccttgaacttcagttttccatttcacttcggaaaacagatcacataacgaagaaaaattatcttagaagaaaaagggcaaacttgcccatcttaataatttgtcttctctattcattatgtgtctagtcagtgtagttgattaatttgatatgttttctgttagcttttttgtgtactgagtctgtgattttcttacagatgaacaaattgattgaatattaccagcagcttgctcagaaagagaaggttgagcgagatcgcaagaaactggcacgacgtagaaactatatgcctctggctttttcggtgagaatttggtactaaaatgatttgcaagacctctaaggcctaagaacagtgatcatttcagaaaatggccattgtcctagattcctgaatggtggatatcagagagagggattcttcaaattatagacgtttaagtccaatagttaggcttttgctatatcattagttctgtttgagttatttgtgttttgaggacatttgtgtttctttctccatcactcccctttatcttctgattatttccccagaaaggctgttaattttgtaggcactgcagagttccacgtacagcttttgtgtattacagaaagtctgagaagaaggaggtgggcaaatggtagatttcagtcatattacccctgtagcccacctttgacatcctggcagtagtggtttctcagctttagttataatttttttaacatcctcccctgtttctccaagatgaaaaacactgactttttacatagtgcacttgtgtggttaaatagtaatatatgcaagtagaatttttgataagaattatttatgagagtcattctctaccagtttacgtactgctagtaagaagaaagaaattaggatttggaatttttgttattttaccccgagttttatttgctctcatagtacagtttgttttctgtgtgcttgcttggggcccagcaaattgacattcaataaataacatttattgaatggcaatgatgtgtcaagctctgtgctaaataaacactttacatgtattactttacttaatcctcacaaaaatcctgtggagtatcatatccccattttacgcttgaggaaatgggacctagttaagcaacttgtcatactgcatccacatgaaaattagttaagtcattgaaaccctaagggttggtaaagtccatataaaaatacctagattaagctgggtgcagtggctcacgcctgtaatcccagcactttgggaggctgaggcggggggatcacttgaggtcaggatttcaagaccagtctggccaacatggcgaaaccctgtctctactaaaaatacaaaaaattagctgggcatggtggcgcacgcctataatctcagctacttgggaggctgaggcatgagaatcgcttgaacccaggaggcggaggttgcagtgagccaagatagcgccactgcactccagcctgggtgacggagtgagactctgtctcaaaaaaaatctagattagaatttaaaaacattaacacttgcaaagcacctacatttgcaaaaagaagtgaatttttctgaatagtccagtggtatagtcagcatatgcaccaatgtgtgttatatttagaggtagaatttgaattaaatgaattattcttccaattttcccatataacctgcctgctatatgcgtttgcttctatcttatgctgcattttttgtctctgttgcaacctgctgctattttggggctctacagcaacatactattcatgtagtggtaagttctcctttatgattcttgctgaccctgaagaagttagcagatgaccactggtgttccaggaagacgtctgttgtgtatcttagacactccacatagttcttgcctgagccgtagcttagatacttttagattactagcagaagctcacatttggttcatttttactgtattaatatagtttcaatctccatgtttagtgctgttattattttaagaatagaataatgatgtggggctacaaattgctttctttaaaagaagcctttagattagctttttttttgcttatttccctgagcttctcatgctatcctacccaaaattctttcttttgataaatagggtgtgtaaaagtggactttctaataggaatttctgaactttgtttaggacaaatatggtcttggaaccaggcttcagcgaccacgagctggtgcatccatcagtacccttgccggactttcgtaagtttagacatgaaatgactttgaggagaacagcaggtatcaaaatgaatatcaaataaatgagattaaaacacacacacacacacagttgtcaatggaaaagaagattctcatacttagaaaagacctacgctatacagatattctatgacagaggaatacttcaattattgatatcatagactgaggataatcaggtggatccgtgagaaattactcttttgttttgttttgttttgtttttttaatttttcagccttaaagaaggagaggatcagaaagagataaagattgagccagctcaggctgtggatgaagtggaacctctacctgaagactattatacaagaccagtaaatttaacagagggtaattttctgtgtttttctactttgtttctagtctacatctaattctgtttttgttatttatgtacctagtgatttgagatttttaatggaatagctgttagtagtaaaaacaatatgtagaaaataaaacagctgtaatagaggtaattgtttgaaatctaaaatgtcaactttctatattttcatttttatgaacaacactgttcgtaaaggcagtaatgcttcgtgtaattactggtacataaaagtctgattttgaaagtcactgtaaactaagcctgttttctgcctttctttctagtaacaacccttcagcagcgtctgttacagcctgacttccagccagtctgtgcttcacagctctatcctcgccacaaacatcttctgatcaaacggtccctgcgctgccgtgtaagtattccattctgtagactgaccatttgtacaagaggaaagcaaaaataaatgtggctggtgtctgactaatgtcaaaacctttggaatgtattaaatacagaaaatacttgtagagaacatactaattgccaggcactattttaaatgctttcaatataaacagctcttacaactctgtgaggtaggtactactgttaaacctgttttacaaatgtagaaaatgaagtatctgaaggttaagtacatagggttaacccctaaaagaatagtgaaagagtgtgaacttttaggctagtgttcaggctcagggaggaccaataaaaaataatcaatttaaaagaaagcaagaaaaatcagcaaaatccaggctctggtaatctacagaacaaatgacagagtttcttcaataaataaattgtaaaaacaaaatggaaaagaaaccttttagaggagtactatccaacagaactttctatggtgatggaagtattctgtgtctgtacagtcccgcatgatagccactaggcacatgtggctcttgagcacatgaaatgtgatagtgcagctgaggtactgagtcagtctttaatttcatttaaataaccacatgtcgctagtggctaatgttacttaatcattctctagattagaagagacttaaaagtttaccaaacacaatgtatagagtttacgtagattcggattcaaacaaaacagaaagaaagggcccaggggaggagggaagaagggaaagaggaaagaaggaaagaaaaatttgtgaaatctttgagaaaatttaaacactggtagcattttcgatgctattaaaaaactattgggcagggcacagtgacatgcacttgtagtcccagctactctggaagctgaggcaggagaatcccttgagcctgaggagtttgagactgtagtgtgtgatgatggtgcctgtgaatagccactgcactccagcctaggcaacacagaaagaccctgtctcttaaaaaaaaaaaaaaagtattttttcttttttaggaataatgatagtactttgtttgtttgttttttaatgtctttatcttttggagatacatacagaaatatttatggaggaaatgacttggtctctgatatttgttgcaaaataatgagggatgaggaatgggtaagagtataaatgaaacaagattggccattgttgctaatttttgataacaagatgctgattctttttgtttgtttaacctgagagcatagattcaagtcctgcatatatattccgaagttgataatcgttgaagttgggtgatgggtacctagagatttgtaataccattctatatttttgtacacgttagaaaatttctataatgaaaaacctttataaaaagaaagaaaaagaaggggcaaaggaacattgaattggtagttcaaatagaaagcctgggctcatgcctgtaatcacaacactttgagaggccaaggcaggaagatcacttgagcccaggagtttgagatcagcctaggcaacatagtgagaccc

SEQ ID NO: 8364 - DNA, 414 bp, Homo sapiens
catgaaatgactttgaggagaacagcaggtatcaaaatgaatatcaaataaatgagattaaaacacacacacacacacagttgtcaatggaaaagaagattctcatacttagaaaagacctacgctatacagatattctatgacagaggaatacttcaattattgatatcatagactgaggataatcaggtggatccgtgagaaattactcttttgttttgttttgttttgtttttttaatttttcagccttaaagaaggagaggatcagaaagagataaagattgagccagctcaggctgtggatgaagtggaacctctacctgaagactattatacaagaccagtaaatttaacagagggtaattttctgtgtttttctactttgtttctagtctacatctaattctgtttt

SEQ ID NO: 8365 - DNA, 2929 bp, Homo sapiens
ttgggttttttgttttttttttttttttttttttgagacggagtctcgctctgtcgcccaggctggagtgcagtggcgcgatctcggctcactgcaagctccgcctcccgggttcacgccattctcctgtcctcagcctcccgagtagctgggactacaggcgcccgccaccacgcccggctaattttttgtatttttagtagagacggggtttcaccgtttagccgggatggtctcgatcttctgacctcgtgatccgcccgcctcggcctcccaaaatgctgggattacaggcgtgagccaccgcgcccggcctgcttattgggtttaatctgctttagaaatgtcctaagaagcctaaaattaaatattttaagtagaaaaaaataattttaaaatagtatgttatactattactgtggtttatatacatatattaaatggtctcttttataggaaacatgtctggaagtttatcacattaagcactgtaaaattaaaggcaagagctaatcaccttttagcaaaagtactctgtatgcaacagttgcaaatatgaaagctattatttagcagttgataattgcctgatacaaaatataaacaaagtacatttactggattgtttttagtttgcagctgccctcaaatatcccagataaggatgtctcataaatcaaagctgcagtacaattcacttagtggttagttaggccaatcctccccgccattatccttgttcttccccaccgcccctaacccctgcagtggcaccatattattaaaaacattaagtacctggggtttgtgcttcaggtcaagacatcatttgcataatttcaaatgacagacaacttttcatgtaaaaatgatgctttgtggtcacaattacttcaaaaagtaattgttttcaaataacctgacataccgtaccttagcaattacaaaaccatgattttgacacatggcatttgtaagatgtgaacagctgttcttctgcttaagtttagagtgctgcaaaacttgggtaatgactattttttcagttaacataaccagcccacggtacagcacactgtatcacaaagtacaaatccaaggaaggtaatacctttgctaagttgcggaattttggcaaatcagtacaggtctctttaatatgataaaactgtatttttgtgggagtcatgtataactttaggaataattttcactccaaaaatatttaagtgccagctgatactattaaaaacattataatggtttttaatggtgatttataacaaagcaaggataatggcggggaggattggcctaaccactaagtgaattgtactgcagctttaatttatgagaaatttatgagaagttattttatacaaactaatatgttttaaactacacaatatctcttcttaagtgagctcccctgttcaagctgttagagtatccagcagcagagcaatgcatgtctcgaggaggtggctccgctcagttgtggggttggtccaaagctggggagagttccagtgtgttgaaagctttaaaattctattttaaggagatttactgtcaataccaatttccaaggacttctttaaaaattgttaaattttcacataaatactggaactctcaaaattagacagttatttcaaacaacattcatttcagatgatcccttatatttagaagccctgcatctcgttggtttgatcaaaagtcatatagccttataccagcttattttttttttaattctgcttaaaatataggtttgttgggaggctgaggcaggagaattggttgtacccaggaggcggaggttgcagtgagccaagattgcgccattgtactccggcctgggcaacaagagcaaaacttgtctcaaaaaataaataaatacaggtttgttttaaataacaaaatataataaatagccagcttggagagacctggggcacccatccaatattgtctaccaactttcatgattgtttctttgcacatgctgctgctgccattggagtccctatgctttctcttgctgaggctgtcagctggaagatgaaattattaaagtatattatttgatcacaacgtagttaagttaggaatcagtaatttctttatagcaaaacttgcaggatacaactaaggctgtgcttagctatacagtatatattagaaaagaagaaatattaaaagattagcgatgtcagcatccatttcaagaagttagaaaaaaaacagcaaagtccaaagagaacaggtgttaataaattaagaaaccaaaataaaatacaataaattaatataaaatacagtaaattaagaaaccaaaatacaaaagggcaacagaatcagaagttgatttcttaaaaaagattagtaatggaaatagttatatataaattaaattgatataaatttatataaatatggttatataatgcaccattaatatagtaatacctaccaaaagtaaagttaccttttgtctcatcaacttcacttttaggaatctaccttgcacctccacaaatacaaaccaaaatatgcagagattatagtatatccgcagaatgagtactataaatttataaaagaatgtgttaatatgggatacttttttttttttttttttttttgagacggagtctcactctgttgctcatgctggagtgcagcggcgtgatctcggctcactgcaagctccacctcccaggttcacgccattctcctgcctcagcctcccgtgtagctgggactacaggcgcccgccactacgcctggctaatttttttgtacttttagtagagatggggtttcaccgtgttagccaggatggtctcaatctcctgacctcgtggtccgcccgcctcagcctcccaaagtgctgggattacaggcgtgagccactgcgccc

SEQ ID NO: 8366 - DNA, 387 bp, Homo sapiens
aattaccatttcaatctcactgcttgttactggtctgttcagagttcctatttcttcctggtttaatctaggagggttgtatatttccaggaatttatccatctcctctaggttttccagtttgtgtgcataaaggtgttcatggtagccctgaatgatcttttctgtttctgtggtatcagttgtaatatctcccatttcatttctaattgagcttatttggatcttctctcatcttttcttggttaatctcacattctatcaatttggtttatcttttcaaagagccagcttttcgtttcatttatcttttttattgtctcttttgtttcagtttcatttagttctgctctcatctttgttatttcttttcttctgctaggtttg

SEQ ID NO: 8367 - DNA, 14036 bp, Homo sapiens
tagacttacactttacactgaattgaagaaaatcataaaaaggggttttgccacctggatgtacagcagaacataattaaatttaatcttcttgggacagtgttttaatgggataaatcagctcccatttaacctcatacatagcgacacaaagaaaggcctttcatggcgcacgaggtgtataaacaaagggaaaccatatctttctgggcaaaactgcttttctggattgtttattatgtttaatcagcattgtggaaaatgcaacaatatctgttcatggacttgagaaccccagagtgggaacagcaggtgcggatgtggggagaagaaaggaggagggtctggagagcggccataggggaggcaagtgtgaggagccaggagtgggggccctgggctgccctagacagggacatgcgggcaccccgtggggtctttggcagctcacaggacaatggcagtggaggtctgctccctagagggcgaagggggcactgaattctcccccagtagcctcttctctgatccttcctcattctggaaaaaaaagaaaaaagaaatccttaggggaaaaggatgcaggcagagttagtatcatagaactcagaaagcagaaagaggaaaggaggagggaaaggaaaaggtgacaggaaaagcagatcaggcaaaaaaaaaacaaggtggcagaggaaggggagtcagacgaacacctgggacagggcagaggggagagtggggagatcagagcagaggagggcgcagagaggcacagggcggcgacagttggcccaggaccatggtgatggccacattccccagacagcaaaggggagagctgcatatggaaagaagctgaggggcaccaggcccagcctcaggttcgggtgcccctggccccgcactcctacctgtcccacacactcaccacccagactcacgctgcccagaggcccctccccgacaactcaccaggggctgggagctctggccacacaagtttcgaagacctactcccaaggaaaccaaggacacaatgaccttcaagacacagacagccaggaacagggcacggattgctgtgaacaacttctggagataagggaagaacaaagatagtcaggtgtcagctactccaatgctgcccacatcaccaccctctccacccacccaggcactgactctatccagcttgctgctcccaccacagctgactgtgtttccagccacagcttccatcccgttggcttgtctgcagagtgaacttatcactccctgtcaagaagtggagactattccttcaacccgtagaatctggaagggcctagaactgctttggccacagtgaaagtgacactatacagtgacagggaagcccttagctggtctggcagcttctactttctgtctcctgaaatgcttgcaactagggtactccccattggaatccagtttctgtgctatgagaagcccaagccaagtggagaagccattgccggctcttgctgacagcccccgctgagctccggaccatgcaactacatcatctcagacctccagcctcggcgagcacttggataacttcacccccatctgactgtaactgcatgagaaaacccgtgagtgagaatggctcatctgaatccagccaactcacagcaccgtgagaaataataagttgtcattttaagccactacattttggtgtggtttttaattcagtaatggaaaactgtgataccaacacaccagaaaagccagaagggtgacccactatctcctctctgaaatgtctcctctttgttcctcaccctccttgattcagagaatcttcgtgtcatgaggtctgaaaaatgtctgtagcttacattaaaacctcctgaatgaaagacccagcatgaagtccaagctcaaagagcctacatctctgtcctccagggcccccagctccctgggaaaaaagagctgtgatgggtccccgaagactggactcttcctgctcaccctcagcatctgcatgtaagctctacactcctccttctgccattggttctcttgacttcgccgcatccatctgtacccagtggtagggaagacagggtctgagcgatcacacacagtgtcgatgtataaaaagggttcagtttgccagatgaagctattcacgcagaggacaacagcagccatagctgtagcaaagcctgccagggtgagcaggctggatatatagccctggaagagaaagagggtcatgacacacgctccttcaatcggtggaagagtcatgaggtccccgcctcaaatccctctcctcttccccagcccttgtccaggaaaccctctcctcccctccaagaaagaccccaagatattgacaaccaaagggcagaagacagataatggagcagaattcaggagggggtcagtgaacaaggtggagagagggtgtccaagactcacagcaagtttgcccgggtgcttctcatggacaatggccccagctcctgctgcgatcacctgaaaagagacaccagaaaaaggcctccagtttactcttctgaattggtctatcatcaccctcccaccagcagttcccagaatagccaatgtgaagcaggatcccagggacagacaaagaactctgacacacagaccaggattccacctatacctgccccacccctcccatctgtcttcaagagaaaaatggaagtgacagggttttagctacaccccagagcagcctcctcatggccaaaggccatttggctccagagactttggtcgcttccccaaagccccaaccaagatccataagcgccttcttgcccatcaccacttgcctccctccaggctcacagcctgttccttactcaccacagaccccgcccagaaggcacagcctgaggcactcagcacagtccagggccccaagctgagacacactccaagaacacaactcacaacccccagcaatatctgagtcacctgcaagacaggatgagaaaccagaccccttcccgtgagtccacatgccccggctgccctgggaccagctgcctggctcctacctaggtggctctcctctccttttcctctgccttgacctctctgcagctctgattctggaagattctgtccccttaaaatccatgaagcagcactggcctgggtctcccctcacccttctcataggcttggctatttatccttcatcaatttttcccaacttcaacactttctcatcccacctgaagattcccacttttccccccccattctccttcagaggtcccattgtcccatccaaacccccagcctgacctgagcttctggcctatcctttctcttcagatccaaacacacactcttgagggctctgtggcagacacaaagaagtgccgctgagacctccttcaagaaagggcttgtttgattgctgacagcctgcagttgtcagctccttcagggtcaccctaatttttcaagctgaagacacacactgaggagggccccccagccaatgattaagcaagacagtggctcaagggccatctccacccagtgtggaactcctgcagtgggcaacctttgcctgggagctcccccactggcctggcagagtctgcattgcagcctgatggttcctcctgctcaatcctgctccccctcttttcatttcataggtgtcataccccaataagccgttcacacacccaactccgactcagaagagaactcctcttcttcctggaaaacccaactgtcaccacctccacatcctaccagcatctcggatttgtcacatccaaatcccctactaccacacacacacacacacacacacacacacacacacacacacctctcgaatggctgctcctcctgactttcagggctccgatctcctggtcacccacacttcaaccctctctgcatgctgtgaatgcctctctttccttatgccccaaaccccttcactcccatgccatggaggtctgtgaaggacagggactcctttgtctcctcaccatttctgctatgattatgtgagtgcagatcctcgatccttctcacctggatgcctcctgactctgaggcaggttcctgctcagaatccattgacagcgttctcactgtcaaagctgattcaggacagactcctcacctggtcgttcaaggctctcagcaatatgggcccaaatcacccattcatgaagcccattccctttactcttaaccattatagaacttgccctatgccttctggcctctttgcctttgctcctgccattctttaacctggaattcttttttgtccatcttccacctctgtctatacctattccttctccattcagggttctcctgccctcaaggatgtcagatgtgcttctccctcacctgatctacctttagttccagtcattagtgtagctgctgttccttctgatggtcactgagtacttttagatatagcccagggattctctctgtagcttggcctgaagtgctgaacacattgccttgcacctgtaggctttcagtccatgtggggtcaataaaaccgaattaacagcctctagactgttcttcctgttgccctacctctggctgggaccgactcctctgtgccaaagaggaggtcgattcttcctttccatccaaatttctgtggggacacttacaactttttcctacacagaatgagatataaatagtgatttctcatgtccctctcatgggaattcaacccactttcctcttttgcatcctattgaagaaggagagtttccactgtgaaagctgagcctacaaatggggtcattcttgtcacactcaactaaaacagagtcgagaggccaggggcaaaaagcactcggggcacaaaatgttgctcccaaaatgtaattctctacaaatcaggctgctgaagctgcctgctgcaacctgaaaccagctttatctacagcttctgaccttgctacaactctaggattagttttactcatgccatcgctcacccatcagagctcaccagctccccaaaacctatgatctttcatgaagggcaatatgtaacatttctcctttttataagcctctaaccttctctttgttctaaagacatactggagaccacctggtctgtgtgtatgccccaaattgcaattctctcctcccaaataaaacgttttaattttgaagatttggctctatattttaattgacctcatcacctcgttaacgtgccccccaaccccgcaccaccccagtcttacccctagagccagctgctcataaccaatcctggctgtggaaggcacagtgtccccagggtgaaaaagaaacttcttcagagaacctccagctttcagcagttgtgtcaaagctgactcctggtggatgtggacgttgacgtgggtgggctgggatggcctagaggccatagcaactccattcacaatcaccgtgttttgcgtcatcctgcctgccagggagaagacatatagcagtgaggtctgggaactaggcgagggaaaaatacacagcacaggtgaaaggagagaaatagtgtctttgtcaagatcccagctgggcacaatagctcacgcctgtaatcccagtgctttgggaggctgaggtgggtggattacctgaggtcaggagttcaagaccagcctggccaatgtggcaaaactccctctctactaaaaatacaaaaatccgcacggtggtgtgcacctgtagtcccagctactcaggaggctgaggcaggagaatcacttcaacctgggaggctgaggttgcagtgagctcagatcttgccactgcactccagcctgggcaacagagtgagactccatctcaaaaaaaacaaaaacaaacaaacaaacaaacaaaaaacagtgtctttgtcaaaattcaaaggggcttcccagtgcagatatcaatggcactggaaatcaatagtgattttacacataaaaaagttaagagatacaaaagggtatatatacctttaaaaccttatcgctcatctttttccctcaaccacctatttgccttgcagatgcaaagtaatattatcagtctcttataaatcctaccatgacatttttgcatacaaaagtgtgaaaaagtatttctgcccccttttcccacaaatagcagcatactatacacactgatttgcatgatgctgtgatcacacgatcatatgtttttagaataatcctacatgagtccataaaaagtgtcaacctaaataacagagagaggctctccaaaagaaaatgagattgattctggaatagggcattgcaatgagaatatgcttaccatagtaaatcatgtgcacgttcagggaggtaaaggaagacaaaggtttttaaaggaaaaatggggagacttacataatctctttgaggtgatcatccttggctacaaggatcaataacaagggtgacacaagtccagggttagacaggcagttgctggtggatgtcctcacagaagtatttttttgtgtaaggttgtcattttacagagtcctttgtgatgacttttgttcccaggttatttacgcatgagaaccctgccttgtgggccttccattttcagattttttttttaactcaagtgactcgattatgattctgacaactttcacaaaagcttcttcactcatttgtgtaactgcatatattttgagagtatgaattcctcataatttatttaagtggttccctattggcagacatttaggttatttctaatccttttccattacagacaatgtggaattggcagggcaccaggaatgcgcatttgcaattttagtagatattgtcagttatcctccacggaggtggtagcaattcacatgcaggaggcaaactcttttatctttttccttttatatggggaaaaatgcattgattttaatcaattttatgtaataaaaatgtcccattttaaatgtatatctcaacgagttttgacaaatttacacatttgtgcaattacagctacaatcaagataaaggacattcctacacagcaatacattccctaaagcccctccccagaaaatacccccaaccactggccatgagcaaccactgacctgctttctgtaatgatttccatatatttttaatccatggttttcttttatttcatttttttattatgtatttatttatttattcattttttgagatggagtctcgctctgtcgcccaggctagggtggcgcgatctcggctcactgccagctccacctcccgggttcacgccattctcctgcctcagcctcccgagtaactacaggcgcccgccatcaagcccagctaattttttgtatttttagtagagacggggtttcaccgtgttagccaggatggtctcgatctcctgacctcatgatccgcccgcctcggcctcccaaagtgctgagattacaggcgtgagccaccgcgcccggccagttctctttttttagagagagagatggggtgttgctttgttgcccagggtggtctcaaactcctggactcaagcaatcctcccacctcagcctcccaaagtgctgcaattacaggtgtgagccaccacgcctggcccatagttctcttattatgagtgaggttggttgtcttttcatatgttcagggccatttttatttcttcttttgtgagctctccgttcacatcctatgtccttgtttcgttttgttttgttttgcttttttctatggaagttctttatctattcacaaaattaccgtttgtgatatgagtttcaaatgtttctttacaatttgaagtttattttttgaccttgcttgtatattcatacaatccatgttctatttcattctatttatggtgtctagctcttacacttttaaaggacttccccgtttcgagattataaaataatcttccacattttcttctaagtgcctttatgctttcagttttcacttttaaatgccgaccatctggaatttgggagctgggtgaccaaccttcgccgttgggagacacggatccaagttctgttgctgtcattcagatgtttaacttctgaaagatacgttccatttgcggaaaatacatcctctttttctcagtgatttaaaattctctcctgagcagaaatgaagttcccctaggaatgtaggcctattctagtccttatattctgcccattggcatgtctcatgggctaggcatcattaccacaattttaacatggagcttaatgctaattgggctgtttcatgatcccctcgtgtggtttttctttcagaattgtcatggccatttttgctagactacttcttcacatgcactttagaatcagcttgcctggctctaaaataaatcctgcataggcaattctaatggacatcctggctaagtatcacagtttaaatcaaatattattaacaattctaataacacctcccattcgtactctacctacttttcaaagcagtttcactctttcacccacctggcctccttggggttagaaaggacaggagttagacaattccgcacacgtacaaaggagcttcagactgcttccagcccagccccagattccagccagaccttcccttgacggcccaggcctcgccctgagggcacctcgggttccagctacctccgggcccccaggaccaccgcttcccccgccccacgccaacccctagatctgcctcgcccccgcctgaagagtcggatctgaaccaggccggcaccacggagattcccctgcgggccgcccgacgcctggtaggtggtgggctcttcccggctgccccgaacactttcctctgtccagctcttcccgtgccccggggctggggaaagcgtccggcagccccgccgctccctggccccgtcccaggagccaccccaccgtagggctccagccagggtccaggcgtgcaggcggcagaaggtggacgggacgcgccagccccaggcctctcctcccgctctccagccgtttttctggggagaaacacctgcacccagctgtccctccctcctacgtgagtcctcctggaaaccaggttggaggaagaaagacgtcctgtggacaggacggggtgggggcatggccctggggactcctcgtgacagagggtcctgcggcaagagggtctcccgggccgcggaggccctgcctcacctgcagtcctccgggagcccgcggccgagcagagcggacactagctgaccccgagcaggggagcgacgggagggcggagacggcagatgcacgggtgggggctgcggccccgcccaggctgcgcggtttcccgaaaccagctgcggcccgggggcccggcaaagggggttccgcccggaggagcggaccgggcgggagaagaccgagcccccgcgcgccccctgcgctcccactcgcgcacacttgcacgccggccctggccgggcggggctggaggcgagaacgaccccacgggctttcccagggccgtccgcccgcggaccctcccagctccccagagcccagtgaccctcgcgcagcaggagaaccccagacggaccccaggccctgcagcctgtcatgaacccgaggggctgaagttcagccccacccccgcctcccctccccgcctccccctccaactctcaacccacttctccagccagcgccccagccctcccgccgcccgctcgcaggtcccgaggagcgcaggtgaggcggcaccccactcccggcggcccccgggcctccttccgcacgcaccccgagctgcctccgcacagttggaggagcgtaggagggacccccacccagggatgacactccaggaaggggactgcagaggaagccaggtgcggccccggcttttgacctacctccgcaccgcagcgcggtccttcacggggcaggggcggcgtgaacccgtcgggcgtgagcagcagtcggtggagcgggaggtcggcggtggcggggatgggggtatccggagcgcagccggggcgcagctgctggcacaggagctccacaggcagccaaggactcggtcctgtcccagagcctgcggactgtggaggggaggccgcaggaagagcccgggaggagggggtgaggggtcgaggtgtggggcgctgcttgacccagacgccagggccctgggaggaggatgagggggacagagcagatcttgggcgaaaggggaggttcccgcaggctctgtagtcgccgcagttccagcatggtcagcaccccctctgctacacacattcccctcgtgaggggccaggggtgcggccctgtgaccaggacagccattcattgggtgactttgagccaccactggcccctgacctccccaactccaatgaaatctgcgaaaatcttctgacagccgttcctctctggtgctcccttcctcatagactgtgtccctgacaatgggaacagccgacagtgatgagatggccccggaggccccacagcacacccacatcgatgtgcacatccaccaggagtctgccctggccaagctcctgctcacctgctgctctgcgctgcggccccgggccacccaggccaggggcagcagccggctgctggtggcctcgtgggtgagtgtgacggcctgcctcgtcgggcggcgggaggaactccccacctccagccgcagcagcactctctgccagcctccctctgaacaggacaccgagccagttatgtcttcttacttagcgatgtgattctctggccttctcagtaagagcctggggaggggaggctctgggctgaaggggtgtggaggagccactgaccatgcagagtcccaatcagtggagccctgagtccatcctttcctctgggccaaactcaggatgggccggctctcctctccttcctttcccttctcttttctcctcctcctgcctcttcttctttctccttctcctcctctttcttctccttttctcttctcttctcttctcttctcttctttctttctctctctctctacctctccctctctttttggggttttagcggttaatccctgcagtggcaggtccacctaggagccgggatcttgggtcctttgtctttcaggtgatgcagatcgtgctggggatcttgagtgcagtcctaggaggatttttctacatccgcgactacaccctcctcgtcacctcgggagctgccatctggacaggggctgtggtgagtagagcaggacagtgcttgactgcctgtgagaggggtggggcattgctctcctgattgccttcctccaacatggcgccacagaatgctggcagtcggagagatctgattatctaggaccattccctgcctgttcagatgagcaaacagctgagggcggtggtggcatgtcctattcacactgtctgctctcccatacccttcccagtgctgttcccaccaggctggctgcctctccctgccttcaacagttaatgtcaactaaggatctaaggacctgctcatctccagatacttgcattgagatggggaaggcagagcgttccagatagtatgtggtcccccaggaagcatcaccccctggttattctcattgtcctccacaggccctgtacacaatggaaacccaggaattgttgtcaacagatgggtgtgtgcagtttgcacaggagctgggtaggctggtcatggtacctacactctcagaatagcactaaaacactcatatttactgacagaagccgagagtaattaccttcacccagcctgtggcaaaatacccagcttaattacagaattagccaaacaggattcaggtccacctgtccactgggacatactagatttcctgttcttcaagcccagctgagtggattattgggcactgttaggacaggcttctagacctaacagtgcccactctgtatagactcacccttcattgagatcttctccagcaccccatgacttttatccacaggatcccaccatccctagaactttcataaagcacttggtgttgtttaaaaaggaaggtttagaagggaagaggggctcacacctggcttgaccacaagctcttaggtgtcactaaagcagggccttttgcagcctcaggagttggatccaggctccaccctctcagcaattatcttaccatggataataaagcttagcatgaaacctcccgcccaagctgtgtgctggggaagggcctgcatggaggctctctcgtgggagaggagttgcatttcctgtactaagcctgctcctggctcaatctctccccaggctgtgctggctggagctgctgccttcatttacgagaaacggggtggtacatactgggtaagttcagggaagggcatgggaggggaccaggttcaggctggaggtcaccccaatctcctgccctgttgcaggcttctctgggccttgcccttttttcccccgactggactctgagagagactgaaacacaaagatttctctctgcctcctccctccccaggccctgctgaggactctgctaacgctggcagctttctccacagccatcgctgccctcaaactttggaatgaagatttccgatatggctactcttattacaacagtgcctgccgcatctccagctcgagtgactggaacactccagcccccactcagagtccagaagaagtcagaaggctacacctatgtacctccttcatggacatgctgaaggtaggtggccaaggggaaggggcagcagcaggtggggcagggatggccaggccaggccaggggcaagagtcaggttctccaccagaaataggtgttacctattctgcaccaagcttgcgtattgtcaccaaagacaaagcatcagacaaaatagaaatggctcctgtagggtgttacagacaagtgggaaatacaagcattaaaataataataaatgaaccactatagcaagtgtgccaagtgctgcaaaggtgttaaatgcatgttttcccttgatcctctgaagtcttggaggttatcagggaatcaaatcatagcccaaacctgtcactgtacaaatgaggacacaggcccaatgtgagcagtttccagctgtattctgtacattgaatgcattgacttcccctccagaagccacgaacttggagataaaggggtagagattttcccaggtcaataaggagcatggggacagagcaggaaggcagctgtcatcctggtgcttatggccttggccctctgtccccaggccttgttcagaacccttcaggccatgctcttgggtgtctggattctgctgcttctggcatctctgacccctctgtggctgtactgctggagaatgttcccaaccaaaggggtgagtccctaaggtgtgtgcctgtgtatttggggcagtggaactgctcaaaggagacaggaatggacagtggacagtttggggaggagaaaggggcccatgacccaagtcccacctattatcatgcctgtctttctacccagtggtggcccagcccagaaagcccctatccccaaccaagtggcccccaagtcaaagagcccaggaatccagggaagtccatatccatgctatgcctttggatcaggtaccatgctgctgattctggtagctccagagctaagctgcccctggaggagagactccgccctttctctcccactcacgattgtcttgcctttcctcttccattagaaaagagaccagaaggaaatgttggaagtgagtggaatctagccatgcctctcctgattattagtgcctggtgcttctgcaccgggcgtccctgcatctgactgctggaagaagaaccagactgaggaaaagaggctcttcaacagccccagttatcctggccccatgaccgtggccacagccctgctccagcagcacttgcccattccttacaccccttccccatcctgctccgcttcatgtcccctcctgagtagtcatgtgataataaactctcatgttattgttcccag

SEQ ID NO: 8368 - DNA, 481 bp, Homo sapiens
actgcacttaataactatgtgaaagacagtaaatgaagcctagagccacttaagctggagagttacagtgaaggacccagtataaatcttcactttcagaggacatttgggaaaaaatccactcctttgagggagatgacaagtaaactcttggtgaaaggagtcagatgaagattcgtgaatacaagccggccctaacatggacttatggatggaattcccactccttggataaacccccaaaccctgagaaaataatttaaaggttctcaagatggtagtgacccctgacacctgtcagaaacaaatgcaaattctgctggagaaatttaccttcaactaaacccttaaatgatcagcatgactatattttttaaagtgagacaaataaatagaaagcaaaaaaaagatgatgattataaattaagtttatgagtaactgcaataaatataaatggataaaatagtccatttgaaccag

SEQ ID NO: 8369 - DNA, 488 bp, Homo sapiens
ggttgtgtttagatacatttttatttacaaaattcaatggcaggctggatttacccctcaggctgtaatcggctgaccctgtccatattctgaacacactcctgtctcgcaggcttctttacaagcctctatgtaaagcacaggctggtgagggccccaggaagagcagcaccgccctcggcacaggcccctactccaagtcctgtgcaggagcaggtcttgcccagcgcagcagctctgcacctctgtggcaccgctctgccaagagggaaggtgcaggccctgcagcccatcgccttggatctgaagaccagccctgtggggctgctaagtcatgaaactggcctcatggagatttcataaagcccctaccagctttcctgcccttcagaaatgcttacatctatatatttatgttatatcttcatatataaagaaaatggaaaaagtcaaaatcagtttgctatcatttacaatgaaaggaagga

SEQ ID NO: 8370 - DNA, 148 bp, Homo sapiens; identical to SEQ ID NO: 6787
  SITE (136): n equals a,t,g, or c

SEQ ID NO: 8371 - DNA, 86 bp, Homo sapiens; identical to SEQ ID NO: 5836
  SITE (21): n equals a,t,g, or c
  SITE (65): n equals a,t,g, or c
  SITE (74): n equals a,t,g, or c
  SITE (76): n equals a,t,g, or c
  SITE (85): n equals a,t,g, or c

SEQ ID NO: 8372 - DNA, 130 bp, Homo sapiens; identical to SEQ ID NO: 5837

SEQ ID NO: 8373 - DNA, 116 bp, Homo sapiens; identical to SEQ ID NO: 5840

SEQ ID NO: 8374 - DNA, 126 bp, Homo sapiens; identical to SEQ ID NO: 6134
  SITE (9): n equals a,t,g, or c
  SITE (10): n equals a,t,g, or c
  SITE (14): n equals a,t,g, or c
  SITE (20): n equals a,t,g, or c
  SITE (95): n equals a,t,g, or c
  SITE (107): n equals a,t,g, or c
  SITE (108): n equals a,t,g, or c
  SITE (110): n equals a,t,g, or c
  SITE (118): n equals a,t,g, or c

SEQ ID NO: 8375 - DNA, 118 bp, Homo sapiens; identical to SEQ ID NO: 5844

SEQ ID NO: 8376 - DNA, 16463 bp, Homo sapiens
gtgcaccgggtataatttcttcaccatatgcaggggctgctggatttgccccagccattggatttcctcaagctacaggtgattcttttaagttggatttgaaatgacttttaatgaagttgtatattttctaggaacttaccaagatgaagaatgttatcatatttgaagaatttaccataaagcattatgcatatcagctgtagaagtgtagtgatttgtatgatatatagcttccttgttatttacaaattattctctctggtcctatttttaattccagtaatcagtatgtgttctgcatcatttatgtttgcttttggcacaaataactataggctaactacattaaataaccttagatttgcctttccagttgttatataaaatgtataagctgctctgtctttactgataaacttatcaattatgtgttgaacagacctgtcttatctttgggccttcaatgcctttgacagtactcaacaaataatatgcagtcatactatacattcactattcatctttggaaaaccttttgtcattaatgggttttgaagattacgatagaggggtatgcatgctgtttatttcaggggatatatattttgtctctttagctaatggaggtaattaagagataggagttgattaatacgttgataatgattcccattattttcaaaacagtaaacaaaatgaatttgattataatttaaggaaaagagaaaatgttactttatggttttatctctggtgtctaaagaaaacactgaggttggtgattaggggaatgacagagtttggtaagcctactccacatatttccaacttaaactgattcatgactttaactacattttaaattgcaacatagctgctttctggcagtaatctttatattctaacctttgaattctgggaattttaactactctctctctctcttttttttgttgttgttgtgagacagatagctcactctgttgcccaggctggaatgcagtggtgcaatcttgtcttactgcaacctccacttcctgggttcaaatgattctcatgcctcagccttctgagtagctgggactagaagtgcatgtcaccacgcccagctaatttttgtatttttagtagaggtggggtttcgccatgttggctaggctggtctcaaactcctggcctcaagcgattagcctgcctcagcctcccaaagtgctgggattaaagggtgagccactgcacctggccaataactactctctttttgatggagaggatggagttaacagaaagagtgatatgaaggttgaggttttaaattttaccatcttggtggtttttagtatatcttaacatatgtttaattaagtgaatattctacctattgtgttaaaaacatagtttatttatttgaagctcctcaaggtttaacaattggtggacattttgatatgttttccctcattttggatatttcttttagatatactctatatataaatattaattaatattaagaaagatgaaaagtgaataaaagagggcttctgacttgataagacttttaagctgatagaagatacacacacacacacacacacacacacacacacacacacacacaccctacagtgtagctcaactgtgctcttagctcatgaataacagacatacaaacagcaaaagttatgcaaaagtcagggttggactggaggggcatgggaatatgtcatgtgaaggctattgatttcgtgcagtagtattcagcctgagaatgtggtctgcacagttttaaaattcagcagtatggatgatggtagttatgaccttcttagattatcaagcagaataggctgaatgtaaaatatattataatttaattacatgatttgtggtgaagtggtcagactgtttattttaaagagtcattaaattaaggaattggttcattttgcataaactagaggttttaccttagacaggttttaagctgagaacacaaaatagtgggaaagtgtgctgttttaagtatagtgtcagtattctgctgttactgagctttcaggatttccatagtacctagagaagtagagagctcagaacatttctgctacaaaagaatattgaattctgtaaatatctattttggtcagaataatatttaatatagcattttatacagtcacaaaatgtttttcccatataaaatgtcatatagcactacctagcatgcatgtttttgactttctgctgaaggactttaaaaaaatacatatctgattttatggtagaagtcagtatgaaaagcatatacacttgatagaagggtgttaggatatatctattgtaagaaacagagggagtgtttgtagttgatagaccctctgaaaagcctaatagcgttaggcccagtgagttcagttactctgcagagtactgtgtggataatagagcactaagtatagtaatgtcaatagatgaggagctcagcttgcagacagactctgtagggcagaaaactggccttcagtatctttatggtagccttgacacattttctttctgtagttttcctttcctctttatttacttaaattgtatcaagtgttacagttcttcaaataattagaatatgaaatgcttttggtatttttaaaaggtctatcagttccagctgttcctggagctcttggtcctctcacaatcacctcttctgctgtcactggaaggatggccattcctggggctagtggtataccaggaaattctgttctactcgtcacaaatctcaatcctgatgtgagttgaaaagtattatatgtaaatagtctttcaggagaaggtatagtagcacttttttctttctttcttttcttttcttctcttctcttctcttctcttctcttctcttctcttctcttctcttctctcttctcttctcttctcttctcttctcttctcttctcttctcttctcttctcttcttttcttttcagaaaggattttactctgttactcaggcttcagtgtggtgctgcattcactcactgtgacctctgcttcctgggctcaagtgatcctcccacctcaggctctcaggtagctaggattacaggtgcccactaccacgcctggctaatttttttttttaattcttttgtaaaaacaggatcttgctatgttgcccaggctggtctcaagctcctgggctcaagcgacacacacctcagcctcccaaagtgctgggattacaggtgtgagccaccatgcctagccatggtagcttctgatccagggttgtattcaaattaaaatgcttaagtttgttttaagaacttctattaaaattcatcactagtatatacggaagaagcatataaaaccatgctttaaaataaaatcaactgccattacagtataaataaacttattttcaatttttacttaaattgtcagacacttaactttgtgttaccctttacagcttatcacaccacatgggctttttatcctatttggtaagttcatttttgctattttattattgtctacaggtgtgaattgagcacatttcacttttttagtaatatgtattgattacttctgtgtgccaagtattgtgctgacactgaggataaaacagtgaataagacttagtaagtaattacagtgatgatttatagtatgggaaatataggttttgtaaagggagtgtaacgcagggagacctaacctagcagagggactcaatagaaatgatagttaagctgacttgttcaacatgagtaagaatcagccaggcagaaagggagggcaatgtcttcacaggggaggggagaggggagagatgggtcctggtgcatggaagtgaaggaagcccagtggtgagcataggcaagcataatggagacctggtgaaggtggacagctgcgtagggtcaaaatcgtgaagagctgttaaaagctttgttaaggaatttggtttttacctaagaacaatcggaagccattgaataattttaaggcaagagagtggtataatgcgattcaggttttaaaaatagtctccaaactttcgaacagcatagaaatatgagaacaatgaaataagcaatatttactattttaaagatttttattaaggacagtttatttttccataaaacatgattaacatctaatgagcagtatgattaatatgctttgatattactaaaaatccttgttttcattttgattcagtaatccaagggtagattatttcactacttgattttaatggttgtcatagctgaagaagataaatcataaatatatataatctaaatgcaggggtttcattgttgctgtacttcaataattatttcattatttttttcatgtaatccaccaatttttgtcatgttttatctagaaaagttagattttttccccgtaaatcagtggatcttgaaaactgttgtgtttgaatatgtctgacaaatagagttaaaactcactgatatgcttcatttgtaagatttttaaaataagatagaaaactgcttccaaattttttgaatgtgatagttttagagacagggtctcactgtttcccaggctggagtgcagtggtgtgatcatagctcactgtagtctcaaactcttgggctcaagcagtcgtcctccctcagccttccaagtagctgggattataagtgcaagccacaacaccaggctgataggttttttttaatggaattttttcagatgtaatttacaaccatacagtttacctgctttgggtttacaactcaagatttttgtaaattcacagttgtgtggccatcaccacagtccaattttagaaaattttcaacgcccgagagaaattcctcatgctcatatgcagtcactataaaagtttttattaatgattgatgcatgtaattttcagtaataaaatcaagtattaataatacattttaatatgactcttttctagccaaagcatgtttcataccaaaagtagttaatttctcactcatttaaaaaatggctgggtgcagcagctcatgcctgtaatcccaacactttgggaggccaaggcaggaggatcagattgtttgagaccaacctgggccagatagtgagaccccatctctacaaaaaataaacacccacattttgcaaaacaaatggtatatgtttagtttttaaagaatagttacatcaccatcgtgttatttctgagaaaggtagcaaattcggaatacttgtctccattttaaatttttaaagtgccattagtatgataatgatgtaactattgaaagatttttttttttttttttgagacagggtcttattctgttgcccaggctggagtgcggtggcacaatcttggctcactgcaacctctacctcccaggttcaagcaattttcccacctcagcctcccgagtagctgggactacaggtgtgcgccaccaggcctgactaatttttgtattttttggtagagacggggtttccccatgttggccaggctggtctcgaattcctgacctcaagtgatccacccacctcggcctcccaaagtgctgggattataggtgtgagccactgtgccctgctgaaagatcttatttttataatattgatgatactctgtagcacataaactgaaatatattgtaatacactggatgaaaaaatcgagtgagactggaattgacttcgtagaacctgttggctttaattttatctatatattaaaaattcaaaaactgtagttttttaatattggtttatataaatagattagtatagataagagtttgattattatctttccataccccagtgaatcactttacccatcctttaggatatgggacccactttggggaacactagggtagaaaaatcgagggtaataagatgagttaggatcaattaggttgtcctgattgtccgagtgtgaaatggtgttgatagctttgatggtagcgaggattgggagaggtggacaaatatgagagatatttagaccatagaatcaatgggtgctggtgattgattgggtgggtgtcagggtttgaggaaaggaagaagtcaaaagatgactcccaggtttctggctggagcaactgtgtgaatgatggtatttatctacagctttagtgagcactgggagtggggagaggaaaggggggatgaatcattttgggacataataagtttagagtgttgatgggacatccaagtgaaaaagagtaagtacatgaatagatctggaactttggaagagataaaaatttgcaggtgtatgtatggaattgccaagggagagtaagaaatgccttctttaagtatattagtaaaattaattaaacacaacacaatcagacgttaaacacagtgttttgttttgttttaattaggagtctatggtgatgtacatcgagtgaagattatgtttaataagaaagaaaatgccttggttcagatggcggatgcaaatcaagctcagctaggtactaatgattaataattattaataataatgtgaacttgccccttttgtgtgtgaattttccttcaaaatacagctagtaggaatatgattttacaaaagaacacctccttgtgataatgccttcattattatttgcatctgtctatatgttaaggttaaaaaatattcatcactcttctaagtctgaagttcatttgtctacgtgaacatattgttaatttctagagctttgaccctagggtttttccgttaagtttaataagcatgatttgttttatttcatttttttaatttattttccttccaaattaagttttctgtaaccactgagtggcttaaaagtttgggcaaactttgtaatgatgatacaagaaagggttcatggcttcactgttataaaagctgtaaagtattactcaaaatttcttataaaaatgccttgcttgagataaaactaatatattcagtaaccatttcatgaatacttactatgttccaggcactctgaaacttcatagcactctgctcagaaaatattttttgtttgttttaaattgcttttcttatagtgaaatgaagtcatttaatatatttccttgagggtttttggattttgaaacccttttcaccctcaaactgataatacagttttaaataactacataaaaataatttatggtaatgttgtcagatactactgagaaatctatcctaatactcaaactttaaaattttcttcccatgcactagcaatgaaccatctaagtggtcagagactttatgggaaagtgcttcgtgctacactgtccaaacatcaagcagtacagcttcctcgagagggacaagaagaccaaggtctgactaaggatttcagcaatagtcctttgcatcgctttaaaaagccgggctctaaaaacttccagaatatctttccaccatcagccactctgcatctttccaacattccgtatgtacctaataagttattaatcacttagatgatgaataatctacaatatgtgatgtaggagaggttaaaacttctgaaattgttctaacctagcagttgtcctggtcaacagtttctgataagacaatttatttgccatcatgccttcagaaggttatctccaatcctacactctaaaatagaaagatacctgttttaaaattttctttccaaatagagaattcacaactagttatttttcagtgatcaaaggtcataaaaaaaattctaggcagaagtattccattggcacgtatttgtccatctgtttgtagaagtaatgactcttacgttaaccaatatgacaaaatcaaattgtgtatctaagaatttggtaaaaatggatttcatactttttatctacaagctgtaaagccatagatatggtaattacttaaaagctaaacgttattttcctgtagccactgtacaggtctctttattaaccagtgttgtatgtgtgctttagttatcttcaaactcagggattgacaacctgtagcctatggctgtttttgtatggcctatgagctaagaatgatttttacattttaaaatggaagcaaaatattttgtgatgtgagaaaattatataaaattcaaaattcgccttttataaagtttcgtgtaatatagctgtacccattcacttacgtgttacttatggctgctcttgagttacaacagcaaagctgattagttgcagcagagacaatatggcccatacagcctaagatatttactgtctggccctttaaagaaaatatctggctatctctgtcctaattgttgaagtccttagtctacaaaaatggcagttttgttcatggactttggaaattgttaaaacaaaaaaatggcagttttgtataatttgaactaatacataaaagggactataagctttggaaaagagataaaagctgtgggggatgtgtgtgtatgtgtgtaaaaatttaaaaacttgagggtatagagaggggtgaagtctggaacattattgagaatgagaatgggaagtgaatagtaatagagaataattactcagaagaatgctgaatatccggcctccctgctggtctccagttaggctgcatggagaaaccttgaatccaagtggggcagtggatcaaacctcataccagccgggaaactggtagagtcaaggaaaaaaaaaaaaagtagattaaaagtagatgacatggaccgagaaatttagcagctcattactgtggagtgtagggtaaatggacaacaattagatactgaggcaggcacctgtcatcattagcttttaatttttttaaattaatatatttttttttgagacagggtctccctctgttgcccaggctgtagtgcagtggtgtgatctcagctcactgcatcctctgcctcccaatctcaagtgatcttcccacctcagctttccaagtagctgggactacaggtgtcggcatgcccagctaattttttgtatttttttgtagagacagggttttaccatttgcccaggcagatctctaacttctgagctcaagcaatctgcctcccaaagtgttgggattagagacgtgaacgactgtgcccagctctgttgttagctttttaaatataccacatcacgcaggagctgggctccagttgcaacctacataggacatgtaggaagaagaagaaaggatattaatattcttccaagttctgggtactgtactggtgctttacacatgttgcctcatttaatctccacaacaaccttttttaaaaaaactgtgataaaatacacataatttaaaaattacagttttaactatttttaagtgtacagtccagtatacattcacattaattgctttacacattattgtgcgaccgtcacctctgtccatctgtagaacgttttcatcatcccaaactgaaactctgtacccattaagcagtaaccacctttttcctcctaactcccagctcctggtatccactattctatgttgttgttggcattattatccataataacctttgaagtaaggtattttcattgtattaatgaaactgagacttaggttaaaaaatttactcaaagtgatatacaagtgagtgaggaatagaaagtgaacccaggtctgtcttcctacagagctaatgattgttctgctatactgtccttgttggcagttgtgagatgaatctacttttagtcagttgactgtcacgtgatagaccactatattagttatgtatggctgtataacagaccaccccagacttcacagcttaacacagtagtaaatgtttattatctcatattgttactgtgagtcaggaatctagaagtggcttagctgggtggctttggctgagtctgtcataaggttgtaatcacgatgcaaggcaaggatgtggtcatctgaaggttttaactggagatagaggatccatttccaaaatggcttagtcatgtgcctgtttgttgaccgaaggccccagttccttgtcatgaggacttctccatagtgtcttcacggtgtccttccaaagctaatgattcaggagaggacatagtagaaaccacaatgtctctcagcttcaaaagtcacacattgtcatttctacagtatccaaagtgtttacagaggatacctgtgctttctatgggaggggaataaacaagggcatgaatatgagcaggcaagagtaattgggggccaccttagaggctgacagccacatacacacattcagaattaccctgcaaacagttgaaaatatggaactccagactgtagcagacaagtcagagctaggaaactttggaagtactacagttgattactaaagccagtggtatgactaataagaataaatatagattccaggcacagctgcattaaaagaaaaaagaatatagaaagatttttcttgccctttatatacctgcacatgtcttctgcaaggattgagacaaaattccattgcttgacgatacatgtcagtttttgaacatctttcagggaacttccaaatcaagtctttgtcatatggcttaataattctgtttgaaatgtactctagagatttgatgattgcaagagttaatctgcttcacttgagaatgcggcccaggtagttgactccctctgatgttttcacagcccttctgttacagtggatgatctgaagaaccttttcatagaagctggatgttcagtgaaggcttttaaattctttcagtaagtctttgctttcaagaaatacattaaaattatttaatatggtatgcaaattttaaaggtagttcagtgaagtcttctggtggaggaaggagtttggaagcaaaattcattctaaatactttctgtatttcttataccattttcaggaaagatcgcaaaatggcgctcattcaattgggatctgtggaagaagcaattcaggccctcattgagcttcataaccatgaccttggagaaaatcaccacctcagagtttccttctcaaaatctacaatctgacttttctgtgaatttttctcctaaaactggaccataatttcagtaaaaccttcagacatagactgaagcagctcaagaccaattttgcctctttcacaaaaataactctgagtttgatattcaagtatattttaaaaatcaagggattttttttttttgtattccccctgcccccgccagtcaaaggtttcttttccctttttaccatggtttctacaaaaataaccttcaggaaaaagaaaatcaggaaaaaaattttttttcaataatcttattccctatattaaattagatttgaagaggattaacgttgttttagtttgggtccagatcagccttatacaacatttctaaactcatttgtacttttaaaaaatttaaacacagacttctaaaattacttgatgtaagtaatttaaatcacttatgaccaagttattaaccttatgaatcagaagtctgacccttgtaggaaattatattcacatataaagtacatcagatctttgccatatattgatggttattatgcataaacacattgagttgtgttggaagcagatttataaacctgcatgttttctttgaatgatttctttttttcactgtaagacactcctttaaataatgcctatctttaactttttaagactatttggaaaaatgcagtgtctcagctgtccccagggaaattaagtggaattcaactaagatctgttaataagatgtcagaataactaataattttattaggaaaaaatcatgttttaaatttcaaaatgacacttatttgtcaagtaatatgatcttggaaaattttaaagaaaaataatcctacttataaactacttttttataattgttttcagaaaaaaagtttacagtcttaaggaaaatattcaggtctatcatatggtttgacagattttttaaaagttatttttggtaaggtcttcttttagaaaaaaattaatctcaagggttttttgtaccactataatctctaatacttactcagaattactgtgtatttacttaatttcttattatgtgccttattatgtgcttaagatacaataggttagagtttaatctaaatatcttgaaagctatattgtgggcttggtaagcattttgttttttctttctctgttttggtaaggatttaaaatttttttcattgcaattttaagtggttttcaataagtaatagtttttatcaaatttttggtgcttggtgcagagacggtgtggggaagggtgaatggttttgggaataattcagtgcacacctgtaggcctctttacattgtgactgataggggttattgcatatcaatttggggctgtagagtgcaatctcagtttcatctttttcacccatcagaatttgtctcaggattacttggtttttctcagtcctcaagcgagaacttgcttttctttgttaatgtgactttcattactgagtacccacgtatttggagtatgagaaggtgggttatttctcatactctgtccctctctttttcattgaatgtaagagtacattttaatgttgcttcagtgattgtataatgtaaaattgtttctttttaataagaaactttgctattatttcttcaattgttgatcagaattttttaaagcagaatttgtcaaaagggtcatttttttgtctaccccttttacacttttcagattctcaaagtgtctcatctcaacttttaaaagaataaagaatatcttgctgggcatggtggtgtgcgcctgtgcgcctgtagtcccagctacaggctgagcctgtaggcaggaggctacaggcaggaggatcacttgagcccaggagttcaaggctgcagtgcgctatgatcacatttgtgaatagccacttcactccagccctggaacatagtgtgaccccttctcttaaaagtaaaaattaagaaaatctcaatctctttgctgtattccagtgattaatttgaacatagggaggtttttacagaagaaattttaccaaaaaatagagactgcaagagatgatacagattgtttaaaaagcagaattcactcaccactgagcaacacttagttggtagaatagaaaggagggatactaagttaagacttttcaaatggatcagtttggctgaatagatagatatactcatgtatgtagttgtgggagtttttagttttttgtttttttacttatgaaataagttttgacctagacacaaggggtatatgaaggaggaaaaaaatttctttgcaaaatctcccaaaacttgcttttttttcccttccacacaggcactattataattttcagtgccatgttaaattggattatttcatttactttaagttaggaattactgtgtaatttattaattcatgattctcataacattcagcataagtgtagcaaagttgctaataacggaaggggatcatagtggtgttgaatgtaactttgaagtagggaatggccttttaagtctgagagagaacatttgaatccttttcagggatttgtgtaggggtgtgtttgtgtgtgtgtgtgaatgtgtgtgtgtgtagataagtgtatatacataaatacactcttctaaagttgtatatacatatgcacattacatacattttaatttattgacaaaattaaccaaattaagatttggagatgtgggatgttcttgttttaaaatagcatgtttgaaaccatcagtttgtgtctaaaattagctgtagcacatggatgttgtccatattaagctatttgctgtttgaattatagaggtctacagtatttgtgttggcatagtttttgtaaaaaaaagattaaaaaatatcaggatggtggaaaaactagatctgtgtatctctgttttggcatgcatttattcagtatcttctagcaatggtttttctctgttgatctaccgtagtatcctatttttaagtttattttatttttaaggagtattgtcatcacttttcaaggtgtcttgacttctacacaaagtatatatattcaggactttaaaaaatagcagtacacatttaacagtagcgaattacaccaaaatgatttactttgagatttgaataatttgcatagcagtaaaatgtgttttgtgtaacatacaaatagaaaaatgacccagtatcttaattgatacttactggagagtatcagaattacccagcagctcttacagaatgccataaattctttaagactaaatattgaaatcaattatttgaagtaatgtttctgatttactgttaaaagttgctgagctcagtttttggagatatcatttatgcctgcctgttcccttatgacagtgaggccttctttggctccacctagtatgataatcatgggttctgttttagttgatgagaagtggctcctatgaatgcctctgctcaatttctttttattttactttattttatttttaggggtctcgccaactcctgggctcaagtgattctcctgcttccacctccccacagtgctgggattacaggcatgagccaccacgcctggctctctgttcttttcagtgtctccgtgccatcagtcagcagtgcttacatgtttagcatattgtcatgcagtttctcttctgttcccacgagatatttttggacaaaaaattgacaaaagtacatgtgtttttccccacctatcccttagaaaacctaatgtgtactgctatttttaaaaccaaaaagagacagcgtgacgatgcgtaaagcatttttcttagcctttcctttgtcttgatctgttaatgagaacaaaactgccagactcaaaatactctactattgtgctgaaagaaatacaatttagattgcacaaaatttgaaaatataactcagctgtcttttaaaagagttgtgttgttatctacaagactattagcagtcttttttcagagcaaattttaacagctagttgtgagtggtttaaaatatagaaaattattaaaatcttagtttgaggggttttatagtgggagaaaaaacaggaccaaagtttatgtgccttcttcagtagtcttaattgaccttttcttcctatttgagactaaagtagtatcagtattctggttttcaggaaatatgtactatatagttttaaaagaatgttgtcccaccaactattcatccaagcaaagaattgtaactataaataaagtctcagttacacttttgcctttatcacataatattcattgtagagcattgtgcaggtccaagaatagagctgctcaaaatctttgtggtagtttccttagtttttgtaacctgaggcatatgttccagagaacagggatatttgtctggtccagtgaccttggtgatcatagtcataattgaaagatgcctatggcatgcttaaatcagcattgtcaactgatttgttgttgtattattttcacttcttggatctatgtagtagttgtaataacaaatatttaaatagctatttttttgatgccattaaaaaaatcatactctggccttttttcccccttactgttgtttcccagatcttttaaaaattcatcccatatccagaaagtaccagttataaagattgctgaccaagcaaagttttgcatcaaagtgtcacctcattgctctgaccaaagactgactgttgtggttttaactcctctctgtaaagcattttgcattttccccaagctcctttctgaaagaagaaccagtgcagagcggcctttactttcaatttctactgctgaatagactacttagagaaaatgtgagtttcagtgtgaacagaatggattaggatgacgagtttgatgggcattttcagtactgtatctaagaaaaaaaaaatagcacagctaggagcctctgacattgtctggtgttttacgtggtctgttcatcaaaattccccttttcagtttttaagaatgttcgtctaacagaagaaaatgctgtaaatatttgtaacaacattttttttaacaaggccaaaaaagaaaaaaaggtttttgggaacaaatgaacttataaagtggttttatataaaacatcaattgtcttgtatattttggataagcagcagtaccagctttcatttgtaacagtctgtggcattggaaaaaaaggagtctgtgattgttgaagtgaattatgttataaatgcaaagagaagataaaatattaaaaaacatattttctaaatgcgtagtgcatggttaattcaagcttctgtacactacagtatattccattttcgttcagtttgtatatttgctgactattacttgatatctctaatctcttttcctaacaaatatagcattgtagcatgccttttaataaatgtcatgacatctgtactctcttaaaa

SEQ ID NO: 8377 - DNA, 2711 bp, Homo sapiens
ttttaaaatagcatgtttgaaaccatcagtttgtgtctaaaattagctgtagcacatggatgttgtccatattaagctatttgctgtttgaattatagaggtctacagtatttgtgttggcatagtttttgtaaaaaaaagattaaaaaatatcaggatggtggaaaaactagatctgtgtatctctgttttggcatgcatttattcagtatcttctagcaatggtttttctctgttgatctaccgtagtatcctatttttaagtttattttatttttaaggagtattgtcatcacttttcaaggtgtcttgacttctacacaaagtatatatattcaggactttaaaaaatagcagtacacatttaacagtagcgaattacaccaaaatgatttactttgagatttgaataatttgcatagcagtaaaatgtgttttgtgtaacatacaaatagaaaaatgacccagtatcttaattgatacttactggagagtatcagaattacccagcagctcttacagaatgccataaattctttaagactaaatattgaaatcaattatttgaagtaatgtttctgatttactgttaaaagttgctgagctcagtttttggagatatcatttatgcctgcctgttcccttatgacagtgaggccttctttggctccacctagtatgataatcatgggttctgttttagttgatgagaagtggctcctatgaatgcctctgctcaatttctttttattttactttattttatttttaggggtctcgccaactcctgggctcaagtgattctcctgcttccacctccccacagtgctgggattacaggcatgagccaccacgcctggctctctgttcttttcagtgtctccgtgccatcagtcagcagtgcttacatgtttagcatattgtcatgcagtttctcttctgttcccacgagatatttttggacaaaaaattgacaaaagtacatgtgtttttccccacctatcccttagaaaacctaatgtgtactgctatttttaaaaccaaaaagagacagcgtgacgatgcgtaaagcatttttcttagcctttcctttgtcttgatctgttaatgagaacaaaactgccagactcaaaatactctactattgtgctgaaagaaatacaatttagattgcacaaaatttgaaaatataactcagctgtcttttaaaagagttgtgttgttatctacaagactattagcagtcttttttcagagcaaattttaacagctagttgtgagtggtttaaaatatagaaaattattaaaatcttagtttgaggggttttatagtgggagaaaaaacaggaccaaagtttatgtgccttcttcagtagtcttaattgaccttttcttcctatttgagactaaagtagtatcagtattctggttttcaggaaatatgtactatatagttttaaaagaatgttgtcccaccaactattcatccaagcaaagaattgtaactataaataaagtctcagttacacttttgcctttatcacataatattcattgtagagcattgtgcaggtccaagaatagagctgctcaaaatctttgtggtagtttccttagtttttgtaacctgaggcatatgttccagagaacagggatatttgtctggtccagtgaccttggtgatcatagtcataattgaaagatgcctatggcatgcttaaatcagcattgtcaactgatttgttgttgtattattttcacttcttggatctatgtagtagttgtaataacaaatatttaaatagctatttttttgatgccattaaaaaaatcatactctggccttttttcccccttactgttgtttcccagatcttttaaaaattcatcccatatccagaaagtaccagttataaagattgctgaccaagcaaagttttgcatcaaagtgtcacctcattgctctgaccaaagactgactgttgtggttttaactcctctctgtaaagcattttgcattttccccaagctcctttctgaaagaagaaccagtgcagagcggcctttactttcaatttctactgctgaatagactacttagagaaaatgtgagtttcagtgtgaacagaatggattaggatgacgagtttgatgggcattttcagtactgtatctaagaaaaaaaaaatagcacagctaggagcctctgacattgtctggtgttttacgtggtctgttcatcaaaattccccttttcagtttttaagaatgttcgtctaacagaagaaaatgctgtaaatatttgtaacaacattttttttaacaaggccaaaaaagaaaaaaaggtttttgggaacaaatgaacttataaagtggttttatataaaacatcaattgtcttgtatattttggataagcagcagtaccagctttcatttgtaacagtctgtggcattggaaaaaaaggagtctgtgattgttgaagtgaattatgttataaatgcaaagagaagataaaatattaaaaaacatattttctaaatgcgtagtgcatggttaattcaagcttctgtacactacagtatattccattttcgttcagtttgtatatttgctgactattacttgatatctctaatctcttttcctaacaaatatagcattgtagcatgccttttaataaatgtcatgacatctgtactctcttaaaa

SEQ ID NO: 8378 - DNA, 692 bp, Homo sapiens
gtttccctttgtcttacctgtaattctaatgatgtcctattttcttttcttttccatagccatccatctaaacgtgtcatggttagtgaatagtgagcacatattcaaacaatgttcaaaatgggaaaaacacaaaatctattaactgtctctgtcttcatttaggaataattctcgttttgaggagcaaagtgctttcctaatcttcctatgatgcaccttctctggcactgccccgtaatgcaggggcatggcggcatgctttcttgcttgcacactcactctcctttttctttctctctttctccccatatgtgcagtgccaaactacagttggaacactatttccagttttgttcagtatttggcttccctacggcattagtatacatacactttgagacacaaggtgtgatctcaaaccaaatttgtgtcctctttaaaaaggtagcacagatactagctgatgctacattccttttccttagacaaacgttttacttctcagatctttaaagaattgttggattgcagaagtctagacttagcgttcattgtatattttagtctcctggaagtgggaatttattttgaatggaatagaaaattaggtaatcactactaatctttgctggcttacctgtaaaatctgtggtctccataaatactgggaaaataaataggtattttta

SEQ ID NO: 8379 - DNA, 691 bp, Homo sapiens
gtttccctttgtcttacctgtaattctaatgatgtcctattttcttttcttttccatagccatccatctaaacgtgtcatggttagtgaatagtgagcacatattcaaacaatgttcaaaatgggagaaacacaaaatctattaactgtctctgtcttcatttaggaataattctcgttttgaggagcaaagtgctttcctaatcttcctatgatgcaccttctctggcactgccccgtaatgcaggggcatggcggcatgctttcttgcttgcacactcactctccttgttgtttctctctttctccccatatgtgcagtgccaaactacagttggaacactatttccagttttgttcagtatttggcttcctacggcattagtatacatacactttgagacacaaggtgtgatctcaaaccaaatttgtgtcctctttaaaaaggtagcacagatactagctgatgctacattccttttccttagacaaacgttttacttctcagatctttaaagaattgttggattgcagaagtctagacttagcgttcattgtatattttagtctcctggaagtgggaatttattttgaatggaatagaaaattaggtaatcactactaatctttgctggcttacctgtaaaatctgtggtctccataaatactgggaaaataaataggtattttta

SEQ ID NO: 8380 - DNA, 13754 bp, Homo sapiens
gacgcgagggttgcttgggcagcgactgtcatggcggcggccgccccaatgccggaggctcggcccctgagacagcgggttccgccgaagctccgctgcagtacagcctgctcctgcagtacctggtgggtgacaagcgtcagccccggctcctggagcctgggagcctgggcgggatcccaagtccagccaagagtgaggagcagaagatgatcgagaaggcgatggaaagctgcgctttcaaggctgcgctggcctgcgtgggaggtgaggccgggcgatgggacccttgggaggctgagggcctggacggcagtggggatctctgccgagaagaccacgcgcctgggaggcgagggactgcgggccttgaccttgaccacaccctcgcctcgttcgtgaatcgggcgtcacctctcctgccccctcaggccggctttcctgatgaaaattgggttagagaatcggtgctgtggttggggcctgaaagttattacatgacatcctggctaacacggtgaaaccccgtctctactaaaaatacaaaaaattagctggacgtggtggtgggcgcctgtagtcccagctattcgggaggttgaggcaggagaatcgcttgaacccaggaggcggagcttgcagtgagccgagatgtgccactgctctccagcctgggcgacagagcgagactccgtctcaaaaacaacaacaaaaagttattacgtgggtgacttcattcatccgttcattcccttaaattcattctcttaaataattctttcaacaaattgttcctaagcaatatcacgtgccaggtgaaagagacaagagcctggtcttcatggggcctgtattatactatgtggagaagaatgttgagcaggaacactgcagaggaaggatgcagacatatggaaatgcacatgcagacgactctagggcagcagttgtttgaggtttgaaaaactgaaagaccattgtgactagacagccccgagcaaggagagacgaagtctgcacttgtccttctgtttttcccttaagttgaaggggaggtgcccatgattttattaaactcatattgaccatgaggtcatgagagggcatccatctggacatgtccagccggctcaggaaggacagatgtggcagcagtgtgggatttgccattaggtagctgtgtggccttgggagaagttgcttaacctctctgagcctcagtttatagaaaggagaggctaatagcatctgtctcactggattattgtgaagaatgaatgaggctgtggcatactggcatgtgctcagtaaagcattactgtgaatgtcacagtggccaagagagtgatttgcaaagttgatagctgaagttgagggtggctggtttacatatgagagaatgtagagagaatagagggttaaagatggaatcttgagaaatgttagggaatgacaggaggaagaaatcttagagacggagaagatgatgtcagtaacatagaccctggattgcaagtctccaggcaagtggagagtttgagtggcaagaggggggtgtcctctgcaccggtggtcatccaaaagcatggtcccttccaggatgatcccaatagagtaatgcagaaaacatgccaaagacaccttcatctctgtgtttgcttctaggatttgtcttaggaggtgcatttggggtgtttaccgctggcatcgataccaacgtgggctttgaccctaaggatccttaccgtacaccgactgcaaaagaagtgctgaaagacatggggcagagaggaatgtcctatgccaaaaatttcgccattgtgggagccatgttttcttgtactgagtgtttgatagaatctgtaagtgtctctgccttctaagaaatccttgctggggccaccatttcattacttttaaagagaaattgctctttaaaagtcatttgaaagttgttactagaaagcaaatcagaagcatcagatacattctaggttgaacttccataaaatagtccctgtggcagactttgtgtgtgtttacagtatgggcttgcattattttttactttttgtaggctagaagttagctaatgattttaaacgagacttattggagagccccttgaagaaattttgattacattccaaatgctgggcttggtttcagcactctggtgccacctgcaggaagcatctatgaacgcatactatatatatatatatatatatatatatatatatatacacgctgtatacttaggaactatattttcaagaaagattaggtttcctttgggtagggactgaatgagctaacgagcaaccctgtgtattcctccttaatggtctgccttggcttgtttctttggctctaacgtgtacttccctgcccacagtaccggggaacatcagactggaagaacagtgtcatcagtggctgcatcacgggaggagctattggtttcagaggttagtaaacggctctcgaatgctttttctttgtggccttggacaacgtgctgaggttgtcatttccaaacacacgagtgttccagggacacttgatcttcttccctctgacaaataaatcatgtttgtttctgtggtaactcggttttggaaacttgtaggatctagatgagggtttcccatcgttggcactactgacatttcgaccagacgaatctttgtcgggattgggtctgttttgtgcattctaagacgttgagcagtatccctggcctctacccacgagatgcaagtagcacccccgtccgttgtaacaacttttttttttttaaagagaccgaatctcactctgtcgcccaggctggagtgcagtggcacgatgtcagctcactgcaacctccacctcctgggttcaagcgattcccctgcctcagcttcccaggtagctgggattacaggcacccgccaccatgctcagctaatttttatttttttagtagagatcaatttcacctggtctcgaactcctgacctcgtgatctgcctgcctcagcctcccaaagtgctgggattacaggcatgagccaccacgtgtggccaacatttttctcagtaattctagacaattgtcttttaattttagatataaattataatggtaatatctttctgcccttggggattctgatttctacccattgaatgctaagtacagatattctagaaatattagattatcagctgcaaaaaaaaaaaaaaaaagaaaaccaatttgctgcctcttctccccgttggcatgtccattcagagcgtggtggagggccttggtgacttgactttcctagaagcagcagtgttttatcactgggccactttccatctgtcatgccctaacttacccagagcaaaaagccagttttctcatcttctgagagacaggatgatttgctgtcatgaaacctggttttgctcctcaagcaccatttatgatgacggactgacttctccgccggtcgtcccattgttcagcttcaccagggcctctttgagaagctctgctgtctccagtactgctttgatcaccttcccaggaatgtattccataaacaaatcagggtcaaggccatatgctttcatttgattccgagggctgcttctctcaaccagtttcctgcctgcgaggggctatttccctaagactagaaataccctttgaaggagaaaagctaaacaaatgtagttagataaagcgcactggattagatcatatacactgcttcattgatgtcttccagagctatgatcgtttgaatgacttacagtgcttaagctcatttcatgacactgagggtgtgccaactttccgtgagtgcctcgtgacccagcagctgtcaccacaggtcatgttctttctgtttgtttgacagctggcttaaaggctggggccattggttgtggaggttttgctgctttctctgctgcgattgattattacctccggtgagagtaattgcctgcagggaaggatgatgccagccccggatccgggctgctctctggaggacagtttctgtaccacaccagggccttgcttcagggcctgaagacattcattttccctcatgtcgttggtattctgagggagctgcctggcttctctgcctccagcctttggggtagccacactttgctgctcctggactccagccagccttcacagaggacgtcccgtgccagattctctcacagcagatcgggagacaggatgttgacatataggaattcagctccacaaagcttcaggcctgaccacagctggccctctaggttgtttggtgttgtgggcacagaggtgacagtgtctctgcaggcactcaggaagctgttctaccttggaactccatgcaactatccgtctcgaataccagggcagggcaaggcggactgatgccgtccaaccaattatctcacttgttttgtgttctgtcatccttgttttttttttaaaaatacactcccctcccccaccgccacacaccttacagttcaaaaggttggtttatttgtattttattttcaaattccctattccaaaaatagtgccgggtggcccaaagataacatctgaagggaaagaatgagaaagctcccagggaagcgggggatggggcgctgaggcagggttgttagaggactgtgtcatcctcaccaagctcattacatctgccagggcctgcctcaagaagcccagcccagccttttcctgggatgcagtgaaatcccatccatgaactcgatgggcccctcctgtgccggccgagaggcacacactgccttcacgacgtgactgctggacctggccgagcttgaggccacatgtgaagggtcctgctgtggtcatcttggtgactcggtcacagcagctactggccaagatcagacgtcgctgaggggctgttcaccaccatcctcgttctccagggtcaaggaagtgttttaacatgtcgtgttttcgacttgaccttgtggtatttttcttggcctagttgtgtgccatggatattaaaaaaaaaaaaaaaaaaatccgtctacagttgggcttcagcactggtgctgctttaccctggtgctctgtggggggatgacactgctggagtcaggcctttgctcttgggtggggcacaggcaggtcgcttggtgggggccacacagtgctgggcaccttcagccagtggtgatgagtctcctttttcctataatacggtaattcctctatcctttccttttttgccttcttcctcatctgccctgtcttctggcccacacactcttaaccagcgttcacactcagtgtacatggcctggaggcccgagtgtttgtacatgagtgatgatgtcaaacccagctggtaacaccttccttgggtcatgtttgccattttcttggaatgaatgtgagttcctgctcagggctcatgtccttttacagtgaattctatataacgcccctcccagtctcacagctaggaggcttcatcactgctaggccagttggagcgttccctagagctcagaacaaattgtttcctctgctgtccctaaatataggacacctacaagcactctgaagcaagggcagacattcccacctggtacctgtcaaagtcctaggatgcctgggatcttccatctttcagtctagcacgtgggaccaaatacaagagatgctgccctcacaacagccttggaaaagatgagcgccagggctgtcagtacccatcggttcagtaagcgaggcattgtccacgctgcctattcactcgagagatgaatagtttcctgttttcgatggctggggagccagtatgagctcataaaccaaacagcaattttcagagacatctgttcctgatcttcagaataaactcagtgtccagttgcttcggctggtgggagccaatattcacgccactgactctctcaaagggagggtgggccctcggagacccagcttctctgacaagcagattagaccaaaaggctgcctcaaagatatgccactttgaaggaaagcgtagagaagcgtttacataaaagaagacgcttcctgttcagtggacaacttcatgccactttcaaggcacaccgatggccaggtgggacatttgtactgtagcagcacatggcaaaggtgagccagaagcagcctggatgctggctgatccggaggcctttgtgaagagcaaggagagggctccagcccacctccccgcagctctgccccagcccccgtgggccacagggaggctcaaggggagtgaactaggtaaacagattcctggaaactcacatctggatgcagctggaagagttaaatatttacattggtggcttccctggaccaccgcgaacacaaacatccacaccacagggctgagttttgtgcaaatgatggggctttgcattttttattaacattttcctctcacgtggtttacatcaatttataataatctacataagttgaaacagaacatagacaaaaaaatatatccttaccaacttattaaagtcagatattcatgaagggtcccatcctacctgtgtatcagcagaaactggcagccatcagccattgcccagcaagaacaggcagacctggcgtttcttagcctgactcctgctgggcacagcccaccctgctgggcacagtgactggaggttccaggctgcacagtccctggctcctgactcctgccgggcgcagtgactggaggtttcgggctgcatggtccccggctcacaggagaccctgctgggtgtttccttggtgcagtttagtccaggtctggcacctgaccctccccactctgggggtgggatttataaatatgagcctttgcatttctcagcctttgcagccttcccatagcctgttctcacgttgcctcagcgagcttggggctgtggggctccctgaggctgagacgcgaaggtgcccagtctgggccgtgactcactctgccccttcctgtccatcactttggaagcaagcaggagccttctgtgccacacaccgacactcggatgccaggcagggaccttaggaagggccaggcactgcatctttagactcaagttcaccgcctttcccagggagcaagggctccttgctaagctgctcacaggcagccgatggtcagtacttccttcctcttgggcatgtctttcctccgtgcacagagtatttactgttctgcccaaggccacaggagtaaacaggctcaaaaagggcctctcaccgcgcacgcgctgcagcgttagggccggcaaacccttctttaagactcagccctgagcacaagcaatgggaactgagctccccagccctgagggcccggaaacgacgctctgccacacagaagagccggggagctgtaactggctataagtcgagcccctggagctgcatctgctctcctaggctgatggcccgaggctggcagccgcagctcgtgtgggaagtgtacggtgggaacacacctcactccttcctagtaccgggcaatgcgtctgcaagtcgggtccctgctccctggcgggtgcctacagcaccaacaaggaggccccagcagaacccagcccctagaggcggctgtctgattccccactctccccacaacttctggagttcccagtgtttacccaaaaggctgtatccagaagctggggcggcaccacaatggctggccaccgtgggcctgtgcctttgcttcccaggtcctggaggaccgtggcagtgcttggctgtggagtgtgtgtaaaatctaaggcaagagtaccacgaggtcctgcggtgccagggagctcctggctgcagcctacctgcctggacacctgcttcggccacatcagtcaccctccaggaagcctggcccctcttgaaaagcccccacaacttgctcctaagagctgagctgcctccccgcgacccgggacacccagcgtggcatgtgcattcctcccccgttcagcctgtggtgtttcctcagcagcctgaccgcctcctcccccattctctcctgaccctctggctatctcgatagcaggtcacctgtgagtctttacactcaaaggaaatagaacagcagggaagggaactgaaaagcagtagaagaaacagtcagagatgcctcactgatagacaggaggccgaacaggtaaaccccagaagtggagattcccaaacggaaaattccagaaatgggcgctccagctctgtgctaagctggggacgagtgtgagtgtgtctgcttgtccaacatttgcacaggcagcaaggcaaagcaggtgtgctcccaaaggcggagtctgaggaggggccggcagcggcaaacggcagcatcaaacagaccactgctgccgcggcaacccagggcctcttcagagctttcaaggcgatggagcgaagaccaagggtgcacatgcatgcaggcaggctgggaaggaagagcgggtggaggaagactgaggggaggctgccaggagaccgccatctgggagcagggccaagagagaagctggcagcagttacacagcgcaaaataaaaggccttgggctggactcaggcggaaagaaagtgctggaggaaatgaaagaacaaagcgggctgtctgtgtgcccacgccgggccggtcactaccttttctgcctgacaagtgtacataaaacaattcccgaacagcacggagcatcagacacaactagaggtatggagggcaggaggtgggatgcggtggtgaggctggggctgggcagccggctttgtacaaggtggcacaaaagacgtacgcattccagttcttggaagctggcttccctcgagtctggagtgctgggtttgggagttttctattgcagtctttcaagtctgagttggaccccaggctggaggggctggttccaccacccgcccgcagccaccctgcctcgggctacacgtcggtggagaagtacagtgtgttccgcttgagttctgcgaaggaaatgggggggtgctgcaggtagtagaggaggacctggacctgtggggagacaggaaggcggaggctgggctccctgtcctaggcctcgtccttgctgactccagcctgtgttgcccctcccactccctagactggctccggccaccgccccttcctggggagcccaggtgtgtttgcctttctgcagccgtggaaggtgctacggggcagagggtcgggggcctagggccacttccccaacctggccataagcttctgctctgtcctgaggcggccacagtccggcccctgctctgggtcttgcaggaatcccagggaagcctcccgcccttggaagcaacctcagagcttccacccatgaggacaagggcccagcatctccccacccctgggcttgctttctgagactgaggccctcctgagaatgcagccagcatctctgggccctggtctaggctcacatgtttgttttggcctgggaggggcagaagtgtctacagtcctgcctccctggtgacaccccatagcccatcaacccagcttcccacgagggaagaggtgtggggactctgagctgttctctctcctcctaaggggctggtctcaccctccgccagccacgggcccgggcggtgccagggtacctgcgccatgacgtcatgggaccgtcaccctccgccagccacgggcccgggcggtgccagggtacctgcgccatgacgtcatgggaccgtcaccctccgccagccacgggcccgggcggtgccagggtacctgcgccatgacgtcatgggaccgtcaccctccgccagccacgggcccgggcggtgccagggtacctacgccatgacgtcatgggaccgtcaccctccgccagccacgggcccgggcggtgccagggtacctgcgccatgacgtcatgggaccgtcaccctccgccagccacgggcccgggcggtgccagggtacctgcgccatgacgtcatgggaccgtcaccctccgccagccacgggcccgggcggtgccagggtacctgcgccatgacgtcatgggaccagatgtccgcagccgaggtgaggtgtgctttgctctccacttctgagggtctcagtaacgtgggtccaaacacggtagccaggttgtgaagtgacattttgttgatgggctccttctcggcaaccctaagaaggagaagatggggaggaaagaagcccttcctcagcagccactcggagctccaggacccttggccttcgctgtgggaactcctgaaggactcctggaaggggtcacctcgtctctgtctcctaggagtggggacctcccccgggggaaggggactcatccaggagagcagggccccagccatgtgccagtgttctgtgctaacatctccagctgctgggtccccctgaactgatggtgaactgccagagccagggagcccacagatgccaactccagctcccttgcctgagagcagatactgttctgaaaactccctggaacaactcacactcgccgcagtcctttgaggtaaatatgattatcgtcacccccatcgtgtagatgaagaaaccgaagtacagaggggttaagtgacttgcccaaggtcacacagccagcaactggtagagctgggatttgaaccccggtagctgcctccaggacctaccgctctgttgctttctcatgtgctaagtggcccaaaagaagagttaaggtgggtggggcaggggagaaaggcaggcagggcctggagcccagcaggagtcactagctagacccggggctctgccagctgtgctggggcaggagcagccctacttccagatgagcccggggactgtccccccgtgcctgtccggaaaggtcggcctcgtgggacccagggcttcctcttgtgcctctccggaagggtctgcctcatgggacccagggctgcctcctatgcctctccgtctgcctcgtgggacccaggattgtcctccctctggatcctctcctgcttctcttactcaacaggccagatgctctgcgatgcttccctggggtaacagcaggagctgccatcagggctggtgtccaggcaggcccagggtcagcaaacatatcagagggcctctggttctccttcagtctcaaaaaatgtttctgggctgagacccacccaccctaagcagcgcctctcaccctcaataccatcattcccaccctccaggcaggagctgtggctgcgcctgctttggaaacaggcaaacaaacactgtgatgccaacaggcagctgtgcagcggggccagcccctcaccacacgcgcgcacacggtccagccaggggcccagatgtgggaacagactgtgcccagttcccagggtggaagccgaatgaattttcccttcccactcctccccacaaggcttgccaaatgctttcggaattggttggggctctagtcctggccaaaccagaggaaaaatgtttcatgatgggaaaaacaagacaccagccccgggcgcgtccaggtctccactggctctcccgagcctggcgtggctgagctgcagcggggggcctggccctgagctggggctgagctcagggaagaattgttccgcagagcagtctgagggggctccccggtcctggcgtgcaggtgggtttaagggacgcccagggaccacctccccacgcaagcctgaggacctctgaactttgctacaagtacaaccaactttagccactcttggttggacctgactagaaagggtggtgggaaggcaagaagggtctgaatttaggatctggaagttgagggctctaaggacaggtctgctactaacccaagcaagtctccgcctggtgtggggactcagtttccctatgtctagtgaggtgtgggccaagaccagtgggtttcaccttttttgactgtggcccacaatacaacccatgctgtaacacagtccacacgtctctatgtaactgaaaagcagcacctgcatcaaggcttacaatgtatcctcctgctgtctgtcccccactgctgtccatccccactgctgtccattcccccactgctgtccatccccactactgtccattccccactgctgtccaccccccactgctgtccaccccccactgctgtccaccccccactgcatctagaaatggctacattcgttgaatgaaccaccagtaggttgggacccactgattataaaacctgcctgtagtcctgggctctcaccctgccattctgagcattctatggtcaatatttgaggttactactggttacgggacccaaatatttctcaaaacagaaaaacatgagtgcaagaacttggaaagcaaactctcactccccacagacagcccgatggaggccagcgcccacgaggagggactgaggaggtggggttggggccactccccgttaccttttcacgaggagggactgaggaggtggggttggggcccctccccgttaccttttcatgaggagggactgaggaggtggggttggggccgctccccgttaccttttcaagtgttccagcaggaagaggaaggtgatgaggttggggtcgggcagggagcggagcaggtgcatcatgcagttttccttggcagcagggtctgacagggctgtgggagagaagggccagtgtggcgtttggctcctggggctccccgccagggcccctgtggtcgtgaggctgtgggcccctgcgggagagagcccaggcttccaggcctttggggagcagaccccacaggggagggcctggtgtctgggtgggctgtcagcagctgcttcctccaggaggccccaccacgactggtaactcagccaggaggccggctggtgggagcagacccccttcctgcagctgactgcataggccttgggtgctggggcatcccctgtctcgtaacaggacaccccctggtctgtgtggctaaggttaagccagtagggacatatcctgccagcggtggattctctttctccaccccttctgctgctggagcgtgggtgcaagcagccttccgtgggggctgaagctccagtctgccccaggagcagagaaggctgaagggattccttggggctgggtttggcccaggtgggtggaggcggaaggcctgctggccggggccctccgcagaggtgacgggacggtgtgtggtcccgctggaaggctcagcacaacccatctcgagtgccctatggcttaagccagcctcctccttggttctgggatgctggcttctggccactcacctcagggcagtcttccctggatgctcgagcttccaagcaagaggccaacgtccaaataggaagcagaaggggctgcccatggggacatcaggggcaagaggcaggcgagaaagggcccagtgtctgcaccaggtcccagcaggccacacctcaccctcggacccctcagccacaggccccagtgcactgggaaggtcagccagcaaaggaagccacagatatttctcctgctggttacttctccgggcagggagtcctggctcagtctggcccagcccagtcctaggagccctcagggcctcaccgatgccctccatgaaggctgggtagagtcggtccgtgaggagcggctcgggcagttcccggaagtacagcttgagcgtcccggcgatggcgttgatgtccatgtcactcagcatcagcaggatgtccttgttatctgc

SEQ ID NO: 8381 - DNA, 565 bp, Homo sapiens
caccatgtttgtcagactggtctcgaactcctgacctcgtgatccaccggcctcggcctcccacagtgctggatgacaggcgtgagcccccgcgcccggtccgtgcatttacagcacaagttcacgcttatctacaaagcatccacctctcaccgcaccttccgggaccacgggatttaacgcctcaccgcccgatgacagcacgaggtggaaagggcagcgacaatgctcgcgcgtcccctcccggcgatccggagcacggcagccccggagcgcgcggccactcctcgctcccctcaggagctcgtaagagccccgcgcggggccgaggcgcgagagcacgcgcaacgcttcctgggaaatgtagttgggtgtcggattagaactacaaatcccggtactcaccgcgctgcagccccgaccgtgagggcgctttctggtgaatctgaatctcgtttgtctgtgacatggggaaagctgtccaagcccaattccattttcacaagaggctttctttttggaaacatgatagcggtctcgctggtgtgcgcaccaggagcgttgc

SEQ ID NO: 8382 - DNA, 1812 bp, Homo sapiens
gtaatgacctgtttgaggccccttctgtcctacccggtttgatctcccatcacctccagatatttcaattcccaggtaaactcaaggcagttgaaattatattctggaacacagtcttctaaagttgattagaaatgttatcagagtacctaggattcagtaggaaaaggcaaggtagtggatgtaaacagaaggtggtttcttatacagaggttaatgtgagcagaacacaccaaagtaagagaaatcaacccaactactgtgagacacaaaaatctattgtttctctagaatagtgggtcaagattgcagatatggagggaaatggggacacagttgagcttatgggggcctgaatctgtcctgaatgtctaaaccacctaagttctgtataattttgtggtttggtcaagtaatgtaccatatttgctgttggttatggtcagcacctggagctgctgagaacggtttgggtgctagaaatgaacagaagcacaagtcaccatactccagtgacataactcaaggaagatttgggtaaagggaaaattcatacttccttggtctccagggacagacagtccacagactttgaggatgacatgttcgtcttttcaaatatgttttacctagatcatttccttgtgttgttggcaattctcctgttacgtatttctagatagttatttaatggcatttcttagacaatgggaagaattgtgcagagcatggcatttgcagtcagagcttggtttcaagccttgtcctgtgatgtaagagctttgagaccttggagaggtcatgtaacttctctgaatctgttttctcctctgtaaaataggaacaatatttacattgtggagctctgagaatcaaataatgtcatgcataatacattcttcaacactatactaattactaagcacctaatatattgttattttgtttgttttttaaactgcatattttgtcagtgtggcatctcttgtctgtgaaatattcctttaacacatgtggtgtattttctcacctacgtatgtttcctcttcctaagtagtttaaaacacacacacgcgcgcgcgcgcgtgtgcacatgcttattcattgactaagttatccatgaacctgtcatttctgtcttctggagcaacatggaatctcatatttctatcttaatcacatatgtttaattttgcctttgttttgtggtctgtgggtacatttgttatttttagtatcaagtcatttggctaaatcatattaaattgcaatcacctaaaatcccctggttattttgacttaaatgactgtcatctttggtttcccttacttagaacgtcacacagttaattttttttttcaacctaatggcaagtgtgtgtgtgtgttcttggagtagttctgctggctatgaagagtatgtagtaatatgctaaagcttggtaaactcttcttttgttgttttggaagatggagtgttgctctgttgcccaggctggagtgcagtgatgtgattttggctcactagagtctccaccttctgggctcaagcagtcctctcacctcagcctccctggtttgtggaaatacaggggcatgccagcatgcccggataatttttgtattttttttcttttgtagatacagagtctcactatgttgcccaggctagtctcaaactcctgagctcaagcagtcctcctgcctcagcttcctgaagtgttgggattacaggcatgagccattgcacctggccctaaattttaacagatacaaaactataagtttatacttaaaaaaaaaaaaaaaagg

SEQ ID NO: 8383 - DNA, 1809 bp, Homo sapiens
gtaatgacctgtttgaggccccttctgtcctacccggtttgatctcccatcacctccagatatttcaattcccaggtaaactcaaggcagttgaaattatattctggaacacagtcttctaaagttgattagaaatgttatcagagtacctaggattcagtaggaaaaggcaaggtagtggatgtaaacagaaggtggtttcttatacagaggttaatgtgagcagaacacaccaaagtaagagaaatcaacccaactactgtgagacacaaaaatctgttgtttctctagaatagtgggtcaagattgcagatatggagggaaatggggacacagttgagcttatgggggcctgaatctgtcctgaatgtctaaaccacctaagttctgtataattttgtggtttggtcaagtaatgtaccatatttgctgttggttatggtcagcacctggagctgctgagaacggtttgggtgctagaaatgaacagaagcacaagtcaccatactccagtgacataactcaaggaagatttgggtaaagggaaaattcatacttccttggtctccagggacagacagtccacagactttgaggatgacatgttcgtcttttcaaatatgttttacctagatcatttccttgtgttgttggcaattctcctgttacgtatttctagatagttatttaatggcatttcttagacaatgggaagaattgtgcagagcatggcatttgcagtcagagcttggtttcaagccttgtcctgtgatgtaagagctttgagaccttggagaggtcatgtaacttctctgaatctgttttctcctctgtaaaataggaacaatatttacattgtggagctctgagaatcaaataatgtcatgcataatacattcttcaacactatactaattactaagcacctaatatattgttattttgtttgttttttaaactgcatattttgtcagtgtggcatctcttgtctgtgaaatattcctttaacacatgtggtgtattttctcacctacgtatgtttcctcttcctaagtagtttaaaacacacacacgcgcgcgcgcgcgtgtgcacatgcttattcattgactaagttatccatgaacctgtcatttctgtcttctggagcaacatggaatctcatatttctatcttaatcacatatgtttaattttgcctttgttttgtggtctgtgggtacatttgttatttttagtatcaagtcatttggctaaatcatattaaattgcaatcacctaaaatcccctggttattttgacttaaatgactgtcatctttggtttcccttacttagaacgtcacacagttaattttttttttcaacctaatggcaagtgtgtgtgtgtgttcttggagtagttctgctggctatgaagagtatgtagtaatatgctaaagctttgtaaactcttcttttgttgttttggaagatggagtgttgctctgttgcccaggctggagtgcagtgatgtgattttggctcactagagtctccaccttctgggctcaagcagtcctctcacctcagcctccctggtttgtggaactacaggggcatgccagcatgcccggataatttttgtattttttttcttttgtagatacagagtctcactatgttgcccaggctagtctcaaactcctgagctcaagcagtcctcctgcctcagcttcctgaagtgttgggattacaggcatgagccattgcacctggccctaaattttaacagatacaaaactataagtttatacttaaaaaaaaaaaaaaa

SEQ ID NO: 8384 - DNA, 2235 bp, Homo sapiens
tatatatatatatatatgtacacacacaaacacgtacacaaaaaatagccgggcatggggctgcaggcctgtagtaccagttactggggaggttgagatgggaggattgattgagcctaagaagtggaggctacagtgagccaagattgcatcactgcatgccagcctgggcaacagagcaagaccctgtctcaagggaggaaaaaataaaaaaataaataaaaatttaaaaaaagaacacttgaagttactcagatcaggactcatgcagagaaaagccaacaggagcaacaccccacattaggggaggaagacacctggggattcactgacttcagttgtgtgaattttaccctatgaccttgcttgctttatgagacagcagaggtggccaaggtcaatcctactgctctgtggtgaactctgcttttctctcgttaccataggtaaagggtcatgctcctatgtaagccttcctgttccccagtcatttgtgcacggggtaggccatcatctcctgcctattcaagggaatgactagtcctgtcttctgtatcctcagtcaccaacttctcagttagtgttggaccaagcctatgttcaaaacatgactgagacagacctcaatccatagagatttatttagccaaggtccaaggacacatctaggaaaaaatacgggatcacaggagcatctgcgccttctactttttccaaagagggttttgggaacttcagtatttaaaggggaaacagcaagcaggtgaggaaaaaaagcgaggaagtgtaggcagtgacagatgctcacattcttgtgaaactctgtttaccctagtaaatctgcattttacatgtgaaaagagggagtaaaggaaatagtcaataatgcattcctctcaggataggcccacgtggatttttaatcttgtccttgccctgtgaagataagctggtaactgacattgtcagggtgagattcagcagaactcagttttaggactaacttacagaggagctgtgtatcctgaagattcagcgactggcaaggaatttccttgggagcaatgtgtgagggaggccatctgaggagatctgtggctttcttttgttgtgggaatctggcttatggatgaatctacgacacaggattgtgaaattacagctctttgggaacaaaaggaaggcagtattgcatgacttagtttcccagcttcactttccctttggcatggtgagtttggggtcttgagagtctattttctttcacacccatcagcactgttaagtaagcaggaagacaacctgaggttgtctctttactttgagttcctacataataaattgcagcctaatttagtacataaacccaaacctaatttaggagtaaattttttgtagcagatagccagatttcagccaatcacaggcttccagctaacaagactatgcccaaataaggcaaatgcctcatcacatgatgctcaaataaggcagccacctaggcgaggccaatcaggtaacttttctactttgcttaattgttcagcctgtacaaatttgctgcttatgactgctgagcagagctgtctaaacctcttctggtttggagtgctgccttatatatgaattgttctttggtcacataaaattggttaaatttaacttctctaaagttttgtattaaattgtatgtaaaacattggtagcacaatttggattcagatacccaaatattgactatgataatgtaaataatccttaagcagactgatttacaaaggcctgaacaagtttgatattctgaatattcacttcttctgatgaaaaaattgccaagaccttacaattggcaggaaaaaaaatgtgtgttggttaaataagttatgttaacaacaagaacattaccacaattagaaaactcttactatgccaggcactattataaacacacctttgtaccttttttaatcctgaaaaatttctaataaatatgcatttaatattatttgtatttaatattaagtgtatttaatattgcccctgttttgtgaattaatgcagcaataaactggcttgcaatggtgatgtattctataaggcagccattgttgtcataatgctacataacactacccgaatctcagttgcttataattcaagtacttatttttcttgtccataatctgtgaatcctgctgaaatcagctagactttgctccaggatgagggattggt

SEQ ID NO: 8385 - DNA, 1416 bp, Homo sapiens
agacggtgtgtcagaggtcaggtgaatatcgcagatgaggcaaaactttgtagcccaattcgttcaacttttgaagtgttggttgtgcgatgtgtggtcaggtgttgtcgtggagaagaattgggccccttctgttgaccaatgccagctgcaggtattgcagttttagatgcatctcatcgatctgctgaacatacatctcagatgtaatggtttcgccaggattcagaaagctgtagtggagcagaccggcagcaaaccaccaaacactgaccataactctttttgggtgcgaatttggctttcggaagtgctttggagcttctcgatccaaccactgagctggtggtcgcccgttgtcacggttgtcatataaaatccacttttcattgcacgtcaaaatccgattgagaaatgcttcatcattgttcgatagaataaaagaaaacatttcaaaatgacttttttgatttttggtcagctcatgaggcacccacttatcgagctttttcacctttccaatttgcttgaaatgccaaacaaccatagaatggtcgatgttgagttcttgggcaacttctcgcatagttgtaagaggatcagcttcaatgattgctcacaattggttattgtcaacttctgatggccgacaactgtgcttctcatcttcaaagttcccatcccctttgtaaagcttcttgaaccaccactgccctgtacattcattagcagttcctgggaaaatgcgttgttgttgttgcgaattgtctctgctgctttacgacccattttgaactcaaataagaaaatcgctcaaatttcctttttgtctggcatcatttcaaaagtgtaaaataaatgtaaaataaacagcaagtaagaagtcattagcaaaaaagaataaagtgagaaacacacattgaaatgatgtataacataaccacatttatttaagaatgtattccaatatcaaatgacaaatttcaacaatgcaaaaacctcaattgcttttgcaccaacctaatatatgtatccctcaaacaactaactatacttagcatctctcaatgtgctcactgcccatttttatatcttctttgaagaagtctctctttaaatgtgttttttaaaggaattttcttgttaatattgaattacagttataggaatttttatatcttcaagatataagtgctttattagaaatatgacttgcaagtaatttctcccagtctatagtttatgttttcatgttcttaccagtaaaatattaattctttgtcatacaaacataaacaaattttattaatctagcaagtagaagtaacttggaagtcatacttgcaatattaaggagaacttactgtttcaacctagtccttcaagaactaaaatgtaaaaaagttaaatagtaat

SEQ ID NO: 8386 - DNA, 371 bp, Homo sapiens
tgaggactgtggttctcaatgcagaaaatttgaccttggtttgtactttttattaaaatggagctttccatgttgcatgctaggcagaagttagaactataaggtcatacttcaagtagcttaatccatctaacagacctggataactcaaacagctagctaatgtttgtgtttcccagtacaacatttaacatgatactatttttcttacctatgttatttatgatatgtagtgtggtttatacttggtaagcaagtgaataaataaatgtcccagaggccaagtggagagaattattggattatattaggtcagatggggtggggaaggaaggaaggttactttgtgaacaacaagttgtcgtttctgt

SEQ ID NO: 8387 - DNA, 2056 bp, Homo sapiens
ggtgaggggaaaggtatgtgtttgcatcttctgttagcgatttctgggattctgaatcttcactgtcacttagttctgtgcagttgtgggagatatacccagaagacacaggcaaatacaacctgggtaactagctaggggtttgttcccaagtccctatcttatatgtcctggcgagctgccctaaactacgtgtgaggaataaagactgtgttctttcagctcagacctgtgattcttgagtgttttaagagtcttttaaaatctatgaaccctctttccagcaagtcgtaaatgtacagaatagttttgtgtaggttttcagggaattcatgaataccactaaagctgttccagtagactgtattgggagtcttataggataattactggcaggcttgggcaacctcttggccccattcccttagctgtgtgtcttgatgctagccctgtgaaagagtccttcactcttaagatttagagcccagatgacctttgccagccgtttaccttttttcctggggtgtcttgttgatcctgctgggtttctatgggtacaagaccctcttaaacatgaagcagctctatatttgtcgttttaaaatttattttattatttttaacaaattggccagagaccgcctttttaaaaattttctttcctttccttttcttcctttcccttctgtttccttcccttccccttttctttttcttcctttttttccttttctttcctttttcctttccttccttcctttcttgcctttcttcctttattgctttcctttcttttctttctttcacccaggctggagtgcagcacactgtaacctcaagttcctgggcttccaagtagctgggactataggcacacaccaccatggcccactaatcttttttctttttttacttttttttttttttagagacgggggtctcattatgttgcccaaggatgatctcagactcctgggctcaagcagtcttcccaccttgatctcccaaagtgctgggattatagatgtgagccaccatgcccaatctttgtttttttaattggcaagtaaaaattgtgaagacttatggtgtacaacatgctgtgttgataatgtgtatacattttgtaatggttaaatcaagctctttaacatgtgtatcacctcacatacttatttttttgtggtgagaacacttgaaatctactctcagcaattttaaagtatataatatgttgttactaactgtagtcacatcactatgatgtgcaatcgatctcttgaacttactcctatctacctgacattttgcatgctttacatctccccagtctcccaacccccagcttctgagaaccaccattctactttctgcttctatgagtccaattttgtttgctttagaggtggtacctcactctgtcacccaggctagagtgcagtggcacaatcatggctccctgcaatctctaactcctgggctcaagtgatcctcccgcctcagtctcccaagtagctgagaccataggcgtccgccaccacgcccccagctaagttttaaattttttgtagagataaggtcttatcatgttgcccaggctggcctcaacctccaaagtgctgggattgcagttgtgagccactgcactaagcctgagtcgacttttttggattccacacttaagtgagatcatgcagtatttgtctttgtatgcctggcttatttcatttaagataatattttccaggtttatctgtgttgtcttaaatgacaagatttattttgttgttgttaaggctgaatagattctgttgtatatatatgctacattatctttatctcctcatctgttgatggatacttaggttgattccctatcttggctattgtgaatagtcttgcaataatcatgagagttcagatatctcttcaacatattgacttcattttttggggatatatacctagtagttggttttatatccatctcattaataactacatgaaagacaaaaagagaaaagaagaataatccagctatctaaagtcacgaaaa

SEQ ID NO: 8388 - DNA, 2698 bp, Homo sapiens
caaatgtaaaactttttttgcagaaattatagtatatgtgtcacaaatactctagttaaaaattatttagtcttatttgtgatatgtagatttgtttattgtattagctaatatttaactggctgaattcttttgggaaagctttctaatcagttgaactttaacaatgatctcttttgtatttgatgacttcttttgttgtgtatagtctgtgttagaattgttttctatttttctgaattttctctattccattagctaaaaaagattagatctttacttttggctggtgctgctgagtatgataacttctttcaacatttgcgtcttttggatggagcctttaaactctctgctaaggacctgcggtctcaggtagtgcgggaggcttgtatcacgttggggtaaggactgcgatgctccatattctcaccataaaatagtgtcaccacagagcttcagagatgtctccttgaacatgtgagctgggtctctttaatgtaacttctgactagtctccaagacccattccagttaacacttctttcagtagttttacaatactttttgctcaattatgtgaagtgtgacagattttaaattttattcagtgacatagctctgaagtctttatttcaaactttgaagcagttattaatatggaaaagtgaaattctataaaatcctgtttctctgatttttcattgatttttgctggcaggcaatagcgtgtttatcagaatgtttgttcctagaagagtactgtagttataaagttaaaggcatttactgcagtaagattttattctagctgtacgtgtactagtgatcaaagctattaaaactttgtgttagaatgtatgtcggaatatcaaagcagcagcagcagcaggaggaggcattgcagctgttttaagttttggctgaagtcagattttgaagcctgaatattttatgttaagataaaagaaaaaagaaaaaggagccaagggtgctttttcatatttgtgttttattaatatataatcagtttgtttgctattttaagactagctggggcaggtgggctggtatgtgcctggagtcccagctacttggaaagccaaagtgggaggattgattgagcccaggagttcaagttcaacgtgggcaaggtagtgagatcctgcctctagaaaacaaacaaaaagctccacagactagttggaaatgtttttttttaaaaaaaaaaacaacaaaacttttgggctaagaactatttgccaagttcttaacatgcacatcggaaatctcagacccttgtcctttctagataactttaaatgaaggctctagatgttaagtggtttatatgcttcactgtctctaagaaaaataactatagtccagtatccttttcttgttttaggcatctgtcatcagttctggggaataagtttgaccatggagctgaagccattatgccaactatctttaatttaattccaaacagtgccaaaattatggccacatctggtgttgtagctgttaggttaattattcgggtaagtatgttataggccatgcttgaaataagcaagtggtaaatactgatggttgataaatattagaggcatttttgttaacataattatattgagtcattaaatttattagcataattatattggaattttgtatatatatcatcttttccccctacttaattgtggcatgtgagctttttataatccataatgtgaattatggttgtgttataaagttaatgaggtattgattgttaactcactattggtttaaaatgttcgaacatccggtgtctgcttctgagtttatattgtattcttgttactcggatattactcttagtcttacctccttagtcccagtccttccgttttaggtattggtgcttgtggttttactgttcacccaaaagtttaattaattgcacataagcacgaaacaaaatgttctctttggttaggttttctaggcacttgtttgtttaaatttaaataattatccaagtaatttatacacaggtttttaacaaaatctaatagttcacaaaggtttaaaatggttttccacattacctccccaccactttcaagtcatttttgcccagaggcagctcttgaaactttgaggcttgatgatgttgtctaaaatctatccagaatattcttgattattggttatttactttgtattataagttcttactgttcttacttgcactgcctgctttaactgttaaacccaaggtcattattggacatttctattgaaatagtatcaaaatatattggtctgatgactcctttcaaacccactccttttaaacccactcagatgtctacagctgagataatttagacctcatactaatgattgttttaggcttatcttcatgtcatcatgttgcctgttcttaactctgtaaattttctaatggcttttgacaatatcctgtgaattctttttttcttttaaaactcactgacattctaatctgaatatatatgtgctataagtaggttagtaaggaagtgattctcttaattttgttttgtttttgtatttgcaagtgttgacctctgttttttgttgttcttcacagcacacacacatccctaggttaatacctgtcataacaagcaactgtacctctaagtctgtcgcagttagaagg

SEQ ID NO: 8389 - DNA, 2056 bp, Homo sapiens; identical to SEQ ID NO: 8387

SEQ ID NO: 8390 - DNA, 2698 bp, Homo sapiens; identical to SEQ ID NO: 8388

SEQ ID NO: 8391 - DNA, 18733 bp, Homo sapiens
caggaactggcgctgaagaccctggggacagatggcctttttctcttttcctccttggacactgacggggatatgtacatcagccctgaggagttcaaacccattgctgagaagctaacaggtaccaggagagactggcggctggggaggagggcgccttggccaacggtgtcttcactgagcaggagcggccgtctggagtggagggaagctcgtgggatctcagaggccctggactcctcccagctctgacactttgtagctggtggcttgggcgagctgctccagcaacccctgagcctgtttttctcagacttgtgagcaataataccagctaacattctttggtctgcgaggtagctcacgcctgtaatcccaacactttgggagatggaaggatcgcttgagcccaggagttcaagaccagcctggtcaacatggcaaaaccccatccctacaaaaatacaaaaattagccgggtgtggtggtgcacacctgtagtcccagctacttgggaggctgaggtgggaggatcactagaggccatgaggcagaggttgcagtgagttgacatcacaccactgcactccagcctgggcgacagagtgagaccctgtctcaaaacaaacaaacaaagcaaaaccaaaaaaacaaaaaaaccattccttggccacctcctccgtgccaggtatttaagtatttcatgtgggttctctctttaaacctcacagtagccctgggagatggacactgtcatgatccccatgtttaatagtctgagagactaaggcacaggcaggctccccagtttcccaagctagaaaggtgcggagccagggctagaactggggccatctggcttcagggtcctgcaccagctcacaggtttcagtagagaaaagaaatgcacagtgacgaatatgcagtagatttccaatagacagcagctataactttttttttttttttgagacagggtcttgttctgtcacccagactggagtgcagtggtgcagtcacagctcactgcagcctcaacttccctggctcaattgatcctcctgcctcagcctcctgagtaagtgggaccacaggcatgtgctaccacgcccagctgatttttctatttttgtagagatgcagtctcactacgttgcctaggctggtctcaaattcctgggctcaaacgatcctcttaccttggcctcccaaagtgctggaattacaggtgtgaaccaccgcacccagccaggagctataactatcattactaaatctgaaactttgcttaggtgctttcagatttctattccattctttgttgttgttgttgttgagatggagtcttcctctgtcacctagactggagtgcagtgacataatctcagctcactgcagcttctgcctccctggttcaagcaattcccctgcctcagccttcccaggagctgggattacaggcacctaccaccatgccgggctgattttgtatttttagtagagacggggttttgccttgttagctaggctggtctcgaactcctgacctcaagagatctgcccgcctcagcctcccaaagtgctgggattacaggcgtgagccactgtgcccggcctcctattccattcttgctatcatttttgcctagtgcagtcagtgattatttatttatttatttggttaaagatgaggggctgaaacattctaatgaattataaaacgcttctctcgctgccccaccaccaccctaacctctgtgcccattttcttccaacttcttgtgacgtttcttgaacttaggatcttggacacctacttattacccagattgcctggtgtaagtcagtcattgatgggaaaggcaagagagacatgctggctgtttcgggtgcataagcttcaaagcgctgtcactagcctgctgtttttcaggggtgtattgtgtaggttggttccgtgctggcccggtgacctgtgatcactgctagaggaggaaggttggatgaaaaatgctaatgagctggagtggatgtgtatcaatgtctctcagtggcaggcagttctgtcatgaaagcagatgggcagataaacaggtcgtccccttgtggccttgcctgtacttcttgttttgcatacacttctgcgcatttgcacagctacctctttgtccttttttgtggccagagtgagagttctctcataatgacatgttagcaaagcttgaggtgcacttttaattttttgcacagaaatctttttctccatcagggtaaaagaattcccccattacctctaggctgtgaatgcaaaaatggaccaagtattgagaaatcaaagggcagggggaatcaaatccaagcaggaaatagagccaactagttctatttggtagagttatgagagtgtttaattttctgccttatcccttaaaatttttacaaattacctataatgggcaaatgttactcataagtcaggaaataaaactttttattaaaaagccaaagggctgtaaaatgctgagtagtagtattataattaataacattattaccaactccatttgacaaatgagaaagcaaaggctcagagaggtgaagtcccttccccagatcatacagctaggtggtgggggcatcatcattattattggtttttgttttttttgtttttttgtttttttttttgagatggagtcttgctctgtcacccaggctggagtgctcggctcactgcaacctctgcctcccaggttcaagcaattctcctgtctcagcctccagagtagctgggctgggattacaggggtgcaccaccatgcccagctaattttggcatttttagtagagacggggtttcatcatgttggccaagctggtctcaaactcctaacctcaggtgatccgcctgcttcggcttcccaaagtgctgggattacaggcatgagctgccttgggaatcattattattaatatttatctgtgatatcagtaaaataattgaataagcaaggcttactaataaccctgcatattcctgttgctcccttcttcttgggtttctagattgcgttttggaaagttttacctcattgacttacaaatacagaaataagtgattcttcagaatagggatttggatcaggagcagcagggagtgctcattaaaagggcagattccagactctcacccctgcagattctcattcagtaggtctgaggtgggttgtgagcatctgtagtttaaaggcatcctgggtgattttgaggacttctggttgagaactgctttaatgcatcattcagcctgctagccagtcagtcagcaaatgccaggcatcatctctgtaccactaccctgccctgagagggcagacagggcaagacccacccccgccctccgctggctacactttgttactggtgactattactcaccccttttgaaataggcgtcatttgtcccttagcctttcaaaatgaatccttctatactgggaaggttatagacttgccagatctctgagcaggaaaagatccaagaaatcaaatccagccacactgccagtccagcccctcctacagctggggcaatgccccccccgcccccccccccccgccgcaaaaaaaaaaaaagcaggggaaagtgggtctcctcactctcaaaccagtgctctccctatgacaccaaagagcctgtttctgtttcttgcttcattcattactccggttcccttgactgagttcctctcagtcccagaagacctagaaaagggtcgtggttggtcatgggtttcgagtaaacaggcctgggtttcaatcccgattcccccaccatctagctatgtgacctggggaagtgactttacctctctgaacactttctcatttgtcaaatggagttggtaatgttattatctgcctccctgggctatcctgaaactaaaatgcgatacactggttgttactttggtgactgttaacaccccagctacccccaccccctgcctggctccgttaatcaccagctagtgtggatgatgagggagaggtgagccctgtagcataagggcagtgcctctccgatgtctgtgtctcatagggtcaactcccgcggccagctgcgaggaggaggagttgccccctgaccctagcgaggagacgctcaccatagaagcccgattccagcctctgctcccggagaccatgaccaagagcaaagatggcttcctaggggtgagttggggaccacaggcagtggggtcatctgtgtgtatcccgaagatgagtttctgctccattcatccatctttcctctgccctctgtgtgcccactagagccaggccctggaggtccatgtgcggtgatgttgtccctgctgtccaggcatacagcctgctgggggagcaggagagagaagcattagcttctgccccagactggggaatctgggatagcttcctagaggaagtgacatctggtagactgcaggatgaggagggctcagcagggtgactgagcacaggttgggggggtctcggaggaagcagcagtgcagtagagaccctgttagtgcagccgccccacatactatgatgattatttcccacacactatgatgattacttcccacacatccatctcttccccacggggcatagcatgatgcctggctcctgataggtactctgttgaactctgatgatctagacctgaggtttggtccccagcagagggctgtggggtggggagggcacctgagaaggtggaggtaggaggtggacagatgctctccttgccagcccctccccaacccaaggccctttggacagggtcctgagcgcattgcaggatgaagctgcctcagcccctgcctgcccttttgcactctctcccactctctcctcccctctgtgggcttcctctgttccaaccacaccagacttccttccttccaaatccccaggctttcttccaactgggagccttctcacatgtggttccctctgccaggaacactgcctctctgtgcccagcccacacagcccgacccagccttttcatctcagccaatgccacttcagcacgaacagaggcctgaaggcaggagtgccaggctggtcactgaggccaggcagtgggtgtgtctgggcccagggggcatgcaggacccacacaggggcatcccaatcagtggggccaggagagaaggtgccagaccccaccaagggctttgttgcctgcctttggccttcattctatggtggctgaatatcgtgcagattttaaataagacagctttctcatcagacctgggctctccaggccagggacggggcatgtgtagaatggggagaagtgggaggcaagaagaccagttctggaggggagacggaggagatggagagtaagggcagcctggaggatgctggggaaggaagggcagggagcggctcctcatggacagtgggtgggcaggagttggatgactcaggcttctggctgtgaccaggggcatggtgggctgcttgcccagatggggactgtaggcggggagggagtaggggatagagaatgaggtcagtctgcacatgttgaagttgaggtccccaggggatgttggatgtctgctgcccagcagcagccccttggcagtgcccaactctagagcctggcagccacatggcaaaagaaacttgggaatgaccttgaggctggcacctgtggcggaattgccacctggcccagcccagggaagcagtgctggggagcccctttcttttttttttttttttttttgggacggagtctcgctctgtcgcccaggctggagtgcagtggcgcgatctctgctcactgcaagctccgcctcccgggttcaagctattctcctgcttcagcctcccgagtagctgggactacaggtgcccaccaccacacccggctaatttctttgtatttttagtagagacggggtttcaccatgttgaccaggatggtttcaatctcctgacctcgtgatccacctgcctcggcctcccgaattataggcgtacagggattatagggattacaggtgtgagccaccatgcccggccgggagcccctttcttaacctcatcgctgcaggttcagggagggacagaaattccaaggaggagctcacagggaagggcattgcccgttttgggtcctgtttacttgccgtctcccactataagctccaagaagacagggtgcacagtgtaccctgatagaaacttcctatacagtaggtgcataaaacattttgtggaatgaacaaatgaataaacgtgttcttctcagccaaggagacagtgcagcagataggcaggagtccaggaagtggtcaaaaccggtctgaccttccacaaaaggagatggggaacccatctccatggatttggcagtgatgggctggtctgagcagataagtccgcacagacaacaagaactggggtgaggcaggagcagcacccctagccctggcccccgagcagagccccagcaagcccagcacccatcgctggcaggtcccctgcagggggtggcaagcctacaagcaggacccaggaaggcgggctcggcctggcccggcacagccagctctgccttgagaaccgcctgttaaatctgtctctgtgggagctccctgcctgctttcctcctacctcccaccaagcctgagctcctgctgccagggaggtggcgacagaagagggaatctgctgttccccaaatgctggccgacgtgtagacagctctgtggtctctgagcgtcctctccgagccatcagcttgtcagacagaggcgaggcaggtcaccgatgaggactcgggcttagggaaggccttttgcccagggtggggcaggctgtacttaaggcagggcccttctgggggtggccttccttccccttccctgtggtctcatcctgctcttgaccctagagatttcacctcaaacatgattggccaccaccctcatcggacttagctccaaaccgaaaccctgagctggccagtgggacattagtccctgggaggagacttggagaggagactggggagggagagtagggctgctggagggccagggaagccaggcagggtggtggcacccaaggctggcccatgggcttatgcataggatggaggtgggactatgtgaggcacagagccccaccatccccattccaaccttgccctcgagcgagctgctctggcctgggctgcgcctgggtgggctgtgcctgggtgggctgtgcctgggtgggctgtgcctgggtgggctgtgcctgggtgggctgcagaggcactgcagcagggagaggagcctctctctggcgggatattgctaagcttgtggccatcataagggcaggaacctccctggggtccatctgctcccttggtgtgggctggctcggggcttgagggagacctccacccacatggtacaggagaccccggagtcaggttctcagattcctggagctttgctttcccccgccccaggtctcccgcctcgccctgtccggcctccgaaactggacagccgccgcctcaccaagtgcagtgtttgccacccgccacttccagcccttccttcccccgccaggccaggagctgggtgagccctggtggatcatccccagtgagctgagcatgttcactggctacctgtccaacaaccgcttctatccaccgccgcccaagggcaaggaggtgaggacagctggggtgcgacgtggggcccctccgcccgagcccaggagtggccacccctctgtctgcgcctggaccccagtgccaggcctgctccacctgctctcctgccttcctctggacctgccccctccccatggggcccctgggccgtcgggtctgggctgacccccaccccagcggatccaggcccagcgggacccagcaagccagtacgtgcctcccgccgcccccaggtcatcatccaccggctcctgagcatgttccaccctcggccctttgtgaagacccgctttgcccctcagggagctgtggcctgcctgactgccatcagcgacttctactacactgtgatgttccggtgagtgggccacactggctggcctggagcaccggggaggcatgacggtacagcgcccagaggggagggcccagcttgagccccccagctccacctctcctcccactgccgtcttgggcaagcagctttggctctctgagcctcagttttctcacctgtggatccgggtgctgatgacttcctcgtaaggcacgtgagggttcagaaagaaaagttgtggaacttgcttggcacggggctggtagccatggttgtgccatccacacagaagtgggaaggacacccagtcacacatgccctccagaagctgtgaaggctgggggagggggtccaggcagggcttccagaggaggggcatgtgacccgggcctcgaaggatgagcagcatttggagagcctcgctgctgcccactggcccatccacctccacccccacactcagcctcctctccctgatgattctggccaaggcttcccgggctcctggggagaaggtgggcagctctggtgcagcagatccccttccccacaggatccatgccgagttccagctcagtgagccgcccgacttccccttttggttctcccctgctcagttcaccggccacatcatcctctccaaagacgccacccacgtccgcgacttccggctcttcgtgcccaaccacaggtgggagcttgaccctggcccagccttggctccctcctacagcttgtcctgctccccagctccaggagcctaggggcctcttctgtctctgccccttcctttgctccccagagcccatctcatggggctgacgtggcaggaggcggcatgaggcaggcaagagaatgagctgatcacccaccagctcttcccaggcacccgtggcctggccctccacctctgtgcctgggacccagtgcagcagtccgcagacccttcctgaagctgggcctccccgccctcatactgctgacaggccccaggcagagctgtaaccgcagcctgtgcacgccaccaagaggaaggccagcagctaggcagggacccagctgtggggtccaggaaggcttcccagaagaaaaaggtcatctcagcagagatcagggctctgagggttttgctgggcagaggaacagcacatccaaaggccaagggcaggccctccactgctgcagagccccagaggggcttccgggacggtgctacaccagccacctgcttgcctcacctcctcagggctggccacctgtcagcagagtagaggaccccggaggccctggcttcaagtttgtccagattcctaactgatagcaagtggccaccgagtgggcctgagtgaccgctctacagggatgagacctggctgggagccaggaggtctgcagttaagtctctgctgtggaacccattggctgtgtggctgtgggcaaggccctggccctctgtaggcctgtttcctcatctgccggatgggagactgactcctggcctacttcacccacagggcaggcgtgagaggatggtcgggataacatgggaagagaaaattgcccctaggagtgggggtggcttccctccctccccagagtgggaagggcaggggcttcccggtcaaagggaaaaggaagaggagggcacaagccctccatctgctcacctagggctgggcacacctgcctccatcgcagggttgttgaggagggggcctggactgtatgggacaggaggagagaggcagtggccagctccaggaccagctgttcctgggctcatgtctgaggaccaggcaccagggactgctgacccccgggggttacctagctctgccctctgtgccccctgctgcggaggtggtggtttgccagtgctggggctccctcgtgcggcggatctgcagattgcactgctcggctcagatttcctgctgcccgccagaggcctgtgcagggaccacggtgctcgttttcattcctgccccaccctgtgacccgccttgaggcactggccatctctctgcttcaaagggtcctggagagtacacgggccatggctgtgcaggccctttgtgaattgcgaggggcagggctggcggatggtgaagtggctccagtgccttaggaaggggcagcctggtggggaagagggccagggctctgcagccagaatcccagtggctctgagagcaggtgttcaccttgagaaacctcagtgtcctcatctggaaagtggagacagttgcaggtattatgtgagataaagtgtgacacagataatgggctttgatgatggtgtcactctgccctggccatcccaggtctctgaatgtggacatggagtggctttacggggccagtgaaagcagcaacatggaggtggacatcggctacataccccaggtgagcgcacaggaggctcccatccaggtgggctcggctgcagggccccgccctccctctgcaatgagtggagcattttggagggtctctaggggagcccctgaggattcttgcccatctctgagccttccccctaccactgacctctggcccagatggagctggaggccacgggcccctctgtgccctccgtgatcctggatgaggatggcagcatgatcgacagccacctgccttcaggggagcccctgcagtttgtgtttgaggagatcaagtggcagcaggagctgagctgggaggaggctgcccggcgcctggaggtggccatgtaccccttcaagaaggtgaggctgggcaggggtgaaggccagggtcaggctgcatgggcagaggctgggagctgtggagcagcagctgggcacagacgctggtatgtgtgcagggcttgctactgaggctgtctcactgttgggcccagctgtgccagcggggcctccccgctgccattcagaacttggaggaagaggccaggtgcaatggctcatgcctataatccaaaactttgggaggctgaggcagagaatcacttgtggccaggagttcaagagcaatctgggcaacatagcgagaccccatatctacaaaagaatttttttaattacctgggggtggtggtagcacgcacctgtagtaccaaagctttggggaggctgaggcaggaggactgtttgagcccaggagttcaaggctgcaatgagctatgattgcgccactgcactccagcctgggcaacagagtgagactccatctcaaaataaaaaataaatgaaaataataataataaatagaacttggaggagacatccatcccctggcttagtagcacccacttcacacacatacaaacacacacactaacatatatatacacacacacatacacacatatacaaacatacacaaacatatatacacatacaaatgtacatatacacagacatacacacaaatatatatgcctacacacaaacacacacacacacacacacacacacacacacacacacacacttgcacacactacagactcagcccgagtgggaccctggccgctttgatgatggcttcgctctgtctcggtgtggccccaggtctcctacttgccgttcactgaggccttcgaccgagccaaggctgagaacaagctggtgcactcaatcctgctgtggggggccctggatgaccagtcctgctgaggtgaggggcccggctggatctaaggggagcagtgggaaagtccacaccttgtggggtaccagaggctctgagaccaatgggactcttctgttgagttgtgagggcctcagggactgcccatggtaggggcgtggggtgagggcttgggggtttctgtgctgagcccagagggagctaccagatgctgaagaaagggccctggcagactgggttcaaactcagccattgtcagcttggtaaccttgaccaagtgtcttcccctctgtgagcctcagttttctcaatagtaagaggggataacacacttacctctcatagctgtggacatggaggtgaaagtgccgcatacactgtaaagtgttatatacgtgtaagagaaaaaatcgggccagaggctgggcttgtgttaattgattcaggaaattcaccagaggccccctagatgcaacgtcctttgggtgtctggcagtgggcacaaagatgaacaaaacagtgccccaccctcaccccgtcaaccgtcagtgcagcagtgggctgggtgcttgcgtcccacagtgaggaaggcagaaggggtccctgccctcaaagggggagacacagtgcaaaggcagacaccaaatgagtcagtacaagcacggtgagtgttctacaggggacagtccagagtggcaccagagtgtataactgggggtcagggaaggctttgtgaagacagtgatatttacgctgagactttgaaggatgagtaggagtttctcaagtgaccggatggagtgttccaggtagaggaacagcctgtgtgaaggccctgggacacagagcgttcattggatttaagaagctgtcactgtctgcaagtccccagggccaggtagaacccctaaccctaatctcagcccaggatgctggtatattattgatgttaattccaactatcatttattcagcacctactctacctcaggctctttgaatctgttatttcacttgggtgcagagactgtcctgcagcccgtgaggtctccccaaagcaagattgcaccccagcaagatgtgggggcgcctcacccttctgtcttcctgaacaggttcagggcggactctccgggagactgtcctggaaagttcgcccatcctcaccctgctcaacgagagcttcatcagcacctggtccctggtgaaggagctggaggaactgcaggtgagcgggcaggtggcaggaacaggagcgtccggaacagtggtgggggccgcggcatcaggagtgtgcaactgtccccacagaacaaccaggagaactcgtcccaccagaagctggctggcctgcacctggagaagtacagcttccccgtggagatgatgatctgcctgcccaatggcaccgtggtaggcacccccactcagaccccacagggcccaggcacctcggggccccgggagcaaccagcaggaggcgtggatgtgcagacttcatcaggcttcgggactgtccctgccacttcctggctgcaaagcctcaagctggtctcttacccagtctaagcctccgttgtccccgtgtagaaacaggaatcgtgatgcaggtgttggtcatcgggggctgcgcagcagtgagcatagtcctgaggcagagtcagcgcctccctagaaacacagcctggaagggaaggctcaccttggaccatggcggccagtcctgggatggaaggggagggaggagccaggccttgtgacagagaccaggagagggccctgagccaagattcaagaccccacctctccctaagggccccttacctagcactcagcaagtcttctcactggggcctcacagcagctttgggagatggatggtcatgaatacccattttataaacaaggaggcccagaaagttgagagactggacaaatgttgcagtcaattaagtgcagctggctttgaaccgaggcctgcccttgagcctcagatctccagctcttctgatcaaagcgacccctcatcctttaagtcccaaggcatggttagtgtgggacccagggctgtaggagggggccggcttcctcaggatcttaggatgggagcagttcaggagcaggggctgtcacgggagaggtgtccagtgagggtttggtgtaaaggaaagggcaccaggcggaaggcatctgctgtcccaggcgcaagggtgatgagatggtgtcggggaactggatgaggctgggcctggttgggagaaccaggcctcccattcatatgaatgttgattgaatgctgattcattcatttgttcatctactgggcacctactgtgtgccaggcacaaagataaagacacagccccgtgctgaaggagctcagtctctggagcgagaggccaaaggagaggcccattgaatgtgaggctgcagtgagagaagggagcacggagttcaggatgggagtccggggtcacaggaacagaggagaggggtcatttcggggggcgggggcagagggctagtagaagaggtgatgttggaaggtgttgggttttcacttggtaggcaaggcagggaggagccccctcgtcagacacagggtgatgagatggtgtcgggtgctggcgagggcttacggcagcactgcctgcccaccatccacctcagacaaggacagtcaaggcctgatagcatccctgcttctccccatagaagagagggcacagggagcctgggggcccccctccgccccacttgcctcacccggcccttctcccaggtccatcacatcaatgccaactacttcttggacatcacctccgtgaagcccgaggaaatcgagagcaatctcttcagcttctcatccacctttgaagacccgtccacggccacctacatgcagttcctgaaggagggactccggcgtggcctgcccctcctccagccctagagtgcctggacgggatctgatgcacaggcccccacgcctcagagccagagtggtcctcagcccatttcagactgcagatgccgcccactcccaccccactcctaggctgccttggagggtacaagatccactgagggtggccaccacagccttggctccatggtggcgggtagacaagggatgcctgggctgactgggcagaggaacctctagctctgactgtcactcggctctccctacccatttggctctggaagctgcttggcccccccagatcagggcctgggtgaactccctggacctttcctagccagccgcacagtctaggcccttgtggggtgaagaatggagggaggagcaggctaggaagacggggccaccaccctctccttgctttcagcccttcccacaggaaacatcaagaagccccagccaggaggggccaggctgccaaggcggctcccctgtttatctagagccttcgttcctggccataccccggactgccctcctgtgcctgatgtccccagctggggtcagtctcaacaggagccagtcttctggagcctctgggcagaaccctccatcagagtggaaatcagacgggaccccctgcagcttccctgaccacgccactgaccagctatctggggaagtttactgtgaaggggtttctgcctttagcaatggggttcactaagggggttcccgaggcccagggccaaggcactcccaccgcctaccttagcacagggtctctgcaggactgcgggagccagcgctcctgccgcccctcttgcccctcagaccttgcatccacagaagcacaacccagccaaacaccacagccttctccagagccggcactgtcccggcaaccaggggtgccccaggctagctcttctacctctggggcaccacggactccccttggccactcttgggactttggtccacgtcctgagccactgaccacggccagtctctctttttatatgtgcagaaaagtgtttttacacaaactttctcatggtttgtaggtatttttttataaccccagtgctgaggagaaaggaggggcagtggcttccccggcagcagccccatgatggctgaatccgaaatcctcgatgggtccagcttgatgtctttgcagctgcacctatgggaagaagtagtcctctcttccttctcctcttcagctttttaaaaacagtcctcagaggatccatgatccccagcactgtcccatcctccacaaaggcccacaggcatgcctgtactctctttcattaaggtcttgaagtcaggctgccccctccccagcccccagttctctccccaccccctcaccccacccggggctcactcagcctggcagaggaagaaggaaggcagacatctccgcagccactcctgggccttttatgtgccgagttaccccacttgccttgggcgtgtccactgagccttccccagccagtcttgttctcaattttgttttgttttgttttgagacggagtcttgctctgtcacccaggctggagtgctatggctcgatcttggctcactgcaacctccacctcccaggttcaagcaattctcttgcctcagcctcccgagtagctgggattacaggtgcatgccaccatggctggctaatttttgtatttttagtagagatggggtttcaccatattggtcaggctgatctggaacttctgacctcaggtgatccacctgcctcagcctcccaaagtgctgggattacaggcgtgagcaatcgtgcccagccttgttcttaattttgtatcatccagtcatcgctaatattacacgcaccttctcacttaatcctcacgacaagcctgtgaggcagatgctcattgttcccatcttgatgaaacttgagtctcagggaagtgaagtgacttgcccagggtcactcaggtagagttgagattcaaacccacatgtggctccaaagtctgcatctggatttgggggtgttttttggcatggcaccctcacctctctccctgcctgttttccccaaagtggaaaggaaggcctttcaaaccagagtgtctcactcccctctgacctccagaccagatggggcatgagccagccagctcagccaggctccctgtgtcctgggaggaagtgtccccatcccccatgccccttatggggagggagggcgtctgatgctctctctctgcctccccccccatcctgtcaggcacaggtgacgggggcagcccatgcgagcccttctcctgctgctctgggagggccagttccacattgagccagcctggtcccatggaaaatgatggcctgggctttctgaggccttatctgatgcctctgcagttcatgtcccccaccaggcctcgaggctcagggtgggagagggccccgggctgccctgtcactcctctaacacttccctcccctgtccccaacatgccctgtaataaaattagagaagactaactagagtggttctaagtgcttttcctttgagtggcatgttgctcagctccgtccttccatggggtggctccctcttggggcagagttgagctggaatgctttcaggtactatcttacctatcgaaggcttgagtgacttgcccaaaataagttttacgatagaacaagtggtaggacttactgttttgagaatctggtgctctctgttgagagagatctgggagttaaaatcattgtcttaaaagcagagcctgagacaggcatgaagtgtttttttgtttgtttgttttgtttgtttggtggggctgggggggagtgtacttccagaaaaaccagtaaaagaaggaaggaagcagaagagggaaaggaaaaatgctgagcaggaacagtctcagcccagccttggcctgacccacagtggaagagctgtggggcataaaccacactgcagagctgaactggccttttggaccttttatcagtcattggcttgggaggtgaaggaaattcccaggtagggagctccgttcttcctgcaaggggatctgagtgggacaccaaatcagcatctacacccaggacagacagccagcgtggacttgcatgatccgccatcgcacaggagggaaaggtaatgattaaaacacaatgtgccatcctgggaagagggccagacctggaagtcaatcttcagcgtttgagatatggtggagatcagggtggacgacctctgaggtctctagccaggaccagtcacataatttgcacagccccgtgcaaaatgaaaacacaagaacccctattagaaaatcatttcaagacggcaacagcaaagtactaaaccaagtacaggattctgagcatgcggcccgttgtgactgcatgggctgttcacccatgaaaccagctctgtctctggcagaggggactgcaggctttggaaccaaggaactccagcctgggagccaggcacagcccgaggctgtgctgaaggcagagaaggaaatgtgacccaggaactgcatgccacagaccaagacagtgagggctggagcacaaagagggagtgggttagtgagcctggaaggaatgtggctcttcccacagagcctctggagtcttgtacatcaagtacccatctaataagcaaactcattgaatataccgtgtgtgtgtgtgtgtgtgtgtgtgtgtgtgtgtgtgtgtgtgagagagagagagagaggctaaaatagaagaaagctgcaaagtgctggagggcaggagtcaagaggagaaagaggcccattctgcgcattcttgctggagagaggctttgcaaagggacctgcctgggaaccaagaactgggaagggggccagggtgaggattctgaagtttgccctaggggtaggagcatattttaggggtcgagcgacacacccctgggcttccagaagtcggatggggctaaacgtggagagcaacaagcagggagacgcgacgaataccaggccgagggatctccaaacgcagccaactcctcccggggacacagaccccgcgggggca

SEQ ID NO: 8392 - DNA, 12988 bp, Homo sapiens
gggcggttgaggctgggcggcccaaggtggaaggaggggccgtgaggtgagagagtccgggagcccgagcttgaggtgagaaaggttctagggaggcgcggaggcgggagcgcgaccttccagcccgttagtagactgggtctacgtgccgggcgctgtgcggagcccgcagctcctgttcccgcgcgagttctcgcgggagccgcagctgtccgtctcacttggcccgggggaaactgagtccccgaagggtagttgctcgtcggagttccccagcaaacagtgaccaagccagacctcaggcttctagtttcggcttcgctgcttgacgggccgggctgccccgccgcgcattctgagacctggccgcggctcggaggcttccgcgcactcgggtccgggtcctgtgggtccaagggccgctgggcaggcggcgagcacttggccgaccttggcccaggtcgggtcgtctgccgcgggggaggggcgactcgccctggcgggtccccgcggggagagggtccgcgcgggtctccggccactgctgcgcgcggcaaagtttcactgagcgcggcggcctccgtgggggcccccgggaccaggggtgctgagcagggccctgcgctggaggagctcccgttctcctgaggggacgcctgtcagcagacagcaactgcagcctccggagggctgcggggcgcagaggtgacaagacccaccggtgctgccggcgaaccgggggaagatcttctagccagtgacacttgggggcgggggtgacagctgagttggtgttccccttcattcgtttagttcagcgcgttgaagcgctcactgtgtcctaggcagacaccgtgctgtgcgcggggatcacagttatctagttcctctcgcgaggactccgagggacaggcagggtgctgcggagcgcacaggaaaggacctgaccctgtcgcagggaaggaaggtgatgcttaagctgagctctgaggaatgatgaagaatgagctcggcgaagggggtgctggtgtttgatgcagggctcagaggtgggcccagtgttgggggttgagggccagtgtggctggagggcaagggggagagcaggagggctggctgcgaagcgtgcaggccttggtgctcagtgaatgtggtctagagacggcagagaaagatgggtttgggactgattgtggattttatcctgtgttggctctagtaagccagttttaaacggatgagcgatgtgattaactgtgtttgggaaggattcctctggctgtgtgtgagggttaggcccggctgggtctttggaggtaaggtcggagaggaagtggcagtaagcaccgttagtgcaatttgtggccgacacggacattcagcacagagcctggcacacagagggactctgataataaaggcttgaactgagccgagaagatggagcccacgcaggaggtggcaggacctggaccaggctttgggtgctttgcactggcatgaccactgagtgaccttagacaagtgccttcccctgtccaacttcctttccccatgtgtatcgtgaagtgaatgacacctcgtctcccaagggtagaagaggggaccctccacaggaggtctccagaaagagctgctttgtcagtctagtctatctcccattcagagcctgtccagggctccccagtgacccggacctcatgacttgccccctacttttgtagctttatcatgctctgctcctctttccatgtccttcaccttcttgtgctggacctgtgctcttgctgttttgtcttcatttcctactccctcgcaacttactacagggcactagggccagagctctgacctcatctggccacctgcctaatgctactcagcctttgctagaagtatgtattcatgtcctatcactctgctggacagcgagttccttgagagcatgactgtgtcttactccttccatagcccctacggtgcccagcacaaggcctggcacaagtgggtactgttggtgtttgatgaacaagtgaatgaacgagcacactgattgcatctgctcaccatgcaaggactgctgtgaagagcagtcagatgtcacctcacccatctgtgtcatgttttaacagttcattaagcactcaaccccatttcactcattgacccttaaggtagcctccagtggcagcttttcctgtctcctttttccagatggaaaaaccaacattcagaaaagttaaataacttgcctgtagctacaaagccagaaggtggctgagccaggataaacttttttggctctttttctctgtagctcatgagactgagattggcatgagctggtgttcgttctcctattttctctgatctctccctttgcaagggcccagcagtgcttttacatctcatcttcaagaatgaatcctgggcttggatagtacttataatttggctagatgagctttgtagctaccaaggattctatttgcatctttagaagttttgcctcaagaaacctgagagcccaggaaggctcttgggttggccaagctcactaggcaaatcttttttttttttttttttttttgagacggagtctcgctctgtcacccaggttggagtgcagtggcgtgatctcggctcactgcaagctctgcctcctgggttcacgccattctcctgcctcagcctcccaagtagctggtactacaggtgcccgccaccacacctggctaattttttgtatttttagtagagacagggcttcactgtgttagccaggatggtctcgctctcctgacctcgtgatccgcccacctcggcctcccaaagtgctgggattacagatgtgagccactgcgcctggccgcagatctttaacagaacctttaagagtctggacttagagctaagtgttgggtgagggcagcctcttgggctggttttctcccctgtgaagtcatggctctgcagggcctggttttttggggcttgtgtggtgaccattaaatccccactgtggggggttgtttcacaagagggaaatctggtgctcctccagatggcctgatatgaaggagtcacgcctcccgcctcccggagctgcccagtggctgccttgtccttcaagtgcaggagctggttcaaatgtcaggaatggaagccactgtggtaaggggcattcccagggcaggggtatggtggggaaggttgggtgctgggcctgctgaagtactgtaaaaggttctgagactctccagttgagcactcctttctccagaggcctggaattggagcaaggccaccgtttcactccctccccctaagaagaaccaactatgatcctggggcacttcaggagtcagtgtatgtctgcctttctgtacagaggacgggaaggaaagcctggataatctctacactcagctacttcctctccccttccctgaccctcccaacattgactgccttagcagcagcaggtattcccttgggtggctggccagggtgtaggctggcaactggggaacctgccctcactataattgagagttgacttgcccctagagagtgccctgtccctaggtttgtggaattcagtctccacaaacctagagaggagaggacaaggacagtagttggattcattctctggggttgtagctgtctccgtctctttgctccagaccatcccaatctggcaaaacaagccacatggggctgctcgaagtgtagtaagaagaattgggaccaacctacccttgaagccgtgtgcccgggcgtcctttgaggtgagtatgttggaagggcaggagagtagaggctcagacagtgctgcttctgtgccccaaaccccttggtactgcccaagtaggttgtttcctggtcacttttcattctgttatgaaatatttgttaaatgcttataagatatcctggtcactgtgtcctcctgagtgcatacaaacctgtgaccacaaggaacctgacaggtcccccacatgggacactgactattgtgatttttgagttgaactctgcttttcttcaccagccctaagaattgaccatgtagccagtatttttattttattattttttgagatgaggtctccctatgttgcccaggctaggtcttaaactcctgggctcaagcagtcctcctgcctcagcctcctatgtagctgggattacaggcacaagccaccatgcccagctccactatttttagtgtttctctgaggccataattcctcagccttctctttttggccaatctgggcatcctttactggggtgctttggtcttacctctgtgtctagggatcctttagcacccactcagcagcagagattcctacctggcccaggtctcttgagaccccttctgtggtagaaagctaagtagcatttattagtcccagctgcctccctctaggaactaaatggttaagcaccagccccaaactatatggttcagatgtgtgcatttggagagctgggatacaaaagaaatacttgtgctttctacccacacagaggagatagaaatatgtgcatgaaaggatgtgggcccaggtagaaacagaaatgaaggagccaaatctgtataaaagatgctaagaagcagagtctgtaggaactggatctggaattagaagaggtgtcagggttggtattagggtcaggaatggagttggaagtgtcgcaggggtagggggcaggaaaagctgtcccagtattcagattgccagctatccagaattgtctaaagatcctgggcaggaactggtcctaacttgcctcagaagcatcagaaaaaaaaaagggagacagctagggagtgtggctcactgcatagaggccgtccccacacttggctataccctcttcagttctttggccagatgctgggcagagacaatcaagggcacaggctctcacagagcaggaatgtatgtgagcagtattggtaatactagataacatttactgagcacatactatgtgtcaggcactgtgctgtactttatatttgtttactcatttaattgccaagagcaaaggagcattcagggctaatcaggaaaacaaatggaggcttcccccaaatgccctattttagcactagttcctgggtcactggaagttcttctctgtgtgaccttggagtatcacttaactcctgtgagtcccaggtttcctatctaaatgcaggagcgatcaatcctggatccatctaccataccaaataatttgtagcagaaacagttgaatcttacttgtgtgtaaatatgcatttattattattattaaattaccttaaatattatttaagggactcttaccaatttattttgaaaatttaagcatatgaaaatattaaaattatgaaaagtaaaaggaaaataaattacctataattacatagtaataatacaataactattaatgtcttagtgtagtcctctttttctagatggatgttttttactttgttgtaatcacagtcaacatgactgaatcctaatttttcactttactcaacatctctaggttgaggagctattttaagaaatcctattatggttccttttgtataatcatttatttttatttaaatctaaatatattcaaattttcaggtttgtttaaaacagcattgctgtaacaatgtagatctcaattagctatacaggattataaaaagctagtcaggaaaaatttcctattgctgtaacaggttgtggatgaccttgtacttgtattttcaccagagggcacagtggttttagacagttgccatctctactaaaaggtgactcaggccttttccactgaagacacagaactgtttgtaatcccatagactctcatgtgtcttgcctgtttttgtttttgaatgtggctctgttgtccacgctagagtacagtggtgcaatctcagctcactgcaacctctgcctcccaggttcaagccatcttcccacctcagtctcctgaatagctgggactacaggcgtataccaccatacccagataatttttgtattttttggtagaggcagggttttgccatgttgcccaggctgatctcaaactcttggtctcaagcattctgcctgcctcggcctcccaaatgctgggattacaggtgtgagccaccatgcctgactgtcatctggcctctgttcaatgttttcgaccaggaaccttcttctgccccctctaggaagccttcctgacacccagtgccggattaggtacccctcctgtgtattctgcagtttctgattggctcatcatggcatctgtaaatgttgatgacttttgcttctccatagaccctgcccaacatctctgacctgtgtttgagagatgtgcccccagtccctaccctggctgacatcgcctggattgctgcggatgaagaggagacatatgcccgggtcaggtagttgaggcagtagctggtctgctaaggaatggagaacttcccagaagaggtggcaggcagcaaggagagaggaatgagaactgtgggctcagagaggagcagaaccttactatactactctcacagaagtgggggaaggaaccttaggagcacagtggcctgctgtctctaactgatctacttggttttccctggtccaggagtgatacgcgccccctgaggcacacctggaaacccagccctctgattgtcatgcagcgcaatgcctctgttcccaacctgcgtgggtccgaggagaggcttctggccctgaagaagccagctctgccagccctaagccgcactactgagctgcaggacgagctgagccacttgcgcagccagattgcaaagatagtggcagctgatgcaggtaggagcccctgtgccagggccagaacgtaacaggctgttcctttcccctggctcttgggcaggataggggtaaagaaagtggtaatccttggtttgcaggtacttaggttccgggccctggggttgtcctgaagcctggctagccagtagtgcctcttagatggtttctaccagccattttgggctgaatggtttggttaagaacaaaatattaacctgtgaccccaggcagagtccctcccttagcccccaaactgataccctcttctaagtgtctttaagatcacatcttacataagcccacagtagctttttttttttctcctctgagtgagtcttgctctgtcgcccaggctggaagtgcagtggcacgatcttagttcactgcactctgcctcccaggtgcaagcgattctcctgcctcagcctcctgagtagctgggactacaggggtgtgccaccaggcctggctaatttttatatttttagtagagacagagttccaccatgttggccaggctggtcttgtattcctgacctcagatgacccacccacctcagcctctcaaagtgctgggattataggtgtgagccaccgagcccagccagttttcctttttttggagacagggtcctggttcttgctctgttgcccaggctggagtgcagtggcgcaatcttggctcactgcaacctctgcctcccaggctcaagcgattctcgtgcctcagcctcctgagtagctggaattacgggtgtgcaccaccacacctggctaatttttttatttttagtagagacggggttttgccacattaatcaggctggtctcaaactcctggcctcaagcaatccacccagctcggccttccaaagtgctaagattataggcatgagccactgtgcccgcggttgaaacaagagtctcattctgtcacccaggttggagtgcggtggcacgatcttggctcactgcaacctccacctcctgggttcaagcagttctcgtgcctctgcctcccgagtagctgggattataggcgcatgccaccatgcccagctaattttttgtatttttagtagagatagggtttcgccattgcccaggctggtctcaaactcctgagctcaagcaatccacttgcctcagcctcccaaaatgctaggattacaaccatgagccaccgcgccctgctttccttttcaatacaagaagtaaacattccccccaccaccactgagacttaccctttttaagcacctatcttcccttgccttgttgtttctaccaggaatcacaagtggctttaccacttcagttcttatactgctagtgacattgtccccatgccccacccttcaaagtggggagtttcatgacattatgttatgttttcttatctcaaattggtggacttttttggtggaaggagaatttcataaagttggagatcttggccttaaaatacagtggtcgggcactgtggcttacgcctgtaatcccaacactttggaaggctgaggtgggtggatcacctgaggtcaggagttcgagaccagcctggccaacatggtgaaaccctgtctctataaaaaatacaaaaattagctgggcatcgcagcatgtgccttgaacctggaaggtggaggtggaggcagaggtggaggttgcaatgagctgaagttgcaccactgcactccagcatgggcgacagagtgagactccgtctcaaaaaaagaaaaaaaaaaaacagtggtctattatgcaaacaagccctgtaacccacccctccagctttctgtctacagttaaggcagaaccactggaaatggatgggaagcctgccttaaccagaggcatggacagccaacaggtggatcgctcccaagatgctcagggcttatcttcatattcctcccatcctcattttttcactctgcattgactcagagtcatagctctgaaatttatcatttggtaggacacatgaaaatcatggtgttctttgaaatcttcatgtatttaatttcttcacatggaagttttatgaagaattgtactgaaactttgttatttcttggctacttttttgtcatccaagagacaagcagaagtaacatcttttttagaaacatagtttttagtgtatttagtgtttttaaagtatttttagaaatgtaaaaactgaggaaattctctccactgaaatttggggaggttgggaggtctgttaccattctggttttgctcagaacatgtcttctagttcacagatagcaagatttcaaaggagcatagtcaaaagcactagtctagttagagaaaaggacaaattcaggccttagctcttatctctgctgctttggcctatgacagggctgtcactccacagcctattgtggaatgggagcttttaaatgccaaggccattatggggctgggttttcctgccttcctggaacactggaaaagcccagtgcttctacagctttctgagcccccgagtgagaagcatagtggaatgaccctccactggctacagataccatcctggctctcccagattgtcatggtgtcagcccaggaaatgaatgttcagtaggcagggctgtggggagaagatattgctactgtgttctagccccaatgtccacccatgcctattgttttctctttcagcttcggcttcattaacgccagatttcttatctccaggaagttcaaatgtctcttctcccttaccttgttttggatcctcattccactctacaacttcctttgtcattagtgacatcaccgaggagacagaggtggaggtccctgagcttccatcagtccccctgctttgttctgccagccctgaatgttgcaaaccagaacacaaagctgcctgcagttcgtctgaagaggatgactgcgtctctttgtccaaggccagcagctttgcagacatgatgggtatcctgaaggactttcaccgaatgaaacagagtcaagatctgtaagtatctgatgaggagctctggtatctatttactcagagttgcccatggccaattatgtaatgcaacatacttacatagtaagttcttagtagtaccatatgttatgtcattcataaagcttgctgactacctgcttgccagtgcctggggccccagtttgaggaaagagcaacactacatttattgggtttggtcaccccaaccaaatatgaggctagtagggattttacaagaaggctcatctaatccaacttctgtcctcaggtggctttaccacttcagtcctcatactgctagtgacagtgtcttcatggcccacccttcaaagtgaggggttgcatgacattatgttttgttatgttttcttatctcaaattggtagacttttttggtgggaggagaatttcataaagttggagatttctgctttaaaatacagtggtccattgtgcaaacaaaccctgcacattcagtgatttgagaataaggcttttgagactcaccagtagttccgaaacctagctgcccatcagaattgctcagatttgttaaaaatacacctttaacttactaaagtagaaccccaaggagtggagctctaggtttttccgatggagtatgagggtctttggggaatacctaccttgaaaaacttcatctggcaaagaagcctcagggagtcaccccattgcatagtgtttctccagttgtgggttgcggtttcaacagctgcacaggactcaccagaggagcttggtttgaatgcaggttcctgggcatttgagagccagaccttgatggccagcacccagcttgtgcagctctgtttgttaatgcagatgaaaaactgttttggggacagggaagcgaggtcctctcctgagttgataaagttcttgttaaagggaaagttacttgccctggatccctttttgtctcctgggatccatttccctctgaaaagtagaccaggctaagtgactccctcattgcttcctggcagttgacccatttagggaagtcactcttaaccttccttcactggccctagtcaggttggtcatactcacccatatctctttggtcttccacattcccaaattcagttgctgctgtttttggtcttctctgagctgtcttcttctgaacaaaatgttttataggttgactctcaaactttctcttacttgccttttggaccaaattagattcaagacccttattgctagccccctcctcccacttgtgtcctcagatcagaaggagctgggtcagtgaataagaatgggaaagtaccccagtcagcaaaggttcagatatgtcaccaaccaaacgcagtccctcttgtttttgctttgaaggttgaatagtcagtcttggctcttatatttagcttaatcaccagtaaaacaccttcatgatgaatgtatataagttcactaggatttcaagcaactattttccaggtatctaggaccctcttatatgatgtatcagataacttgggcctacttcagtctggagttggttttgttcccatgagtttcttatgtgaatgttttgctctaattctggctctcataaaaaatcatctcccctgaaggggagacccggtggtaggaaatcccaagcacaccttttctccagaactatcaagggtcagaatagccaagagtcatcagtcacttcccctgctgaccctctggggaaatgctactaagaaaacagggccagaaggcagaagcttagccaccagaggccaactctaacagactgatggtcctttactttgcccatactttatagctatttcaggaaatagtaaagcattctagttaatagatgagatctggaaccagctagtttggttctgaactctggattcaccgcttacttgctgagtgactagtgaccttgggcaacttgtataacctttctgtgcttcaatttccttatctgtgaaagggaattgtaatggcacctacctcgtaagattgttgtgaggattcaacgagataatgtattcaaaagatatacagcactacacaggaaagagtaagtactcaagctattattgtgtctctaggaaccggagtttattgaaggaggaagaccctgctgtgcttatctctgaggtcctaaggaggaagtttgctctaaaggaagaagatatcagtagaaaaggaaattgacaaccctcagctctgcaaactcagtctcatgctcctggaataccttcaatagctgccttcctcaccgcagatgtttctgcctcttaaggatagatcttctgcaacagtcttgctgacaagctagagcttggactgaaagagaagagctggattatatatttcccagacttcaaaccctagcagaagctaaggcttgtgatttgacctgagacatttgtttcaggtaatcgtgtagaatgaagtatcttagtttaaagggtaagagagaagttgtttctggtttttccttgcccctgtgtgaaaataggtcctaaatgactgacttcactgcattagaccctatagctggtctcacaagacactttgtgcccagctgtcactcactcagcagcttccttgcagcagagcagggctgaggggaaggggctatgaatgtttgtatacatgttcacagggcacggaaaatcttatgctgctccgtcataaacctacaccaatgcccagcaatcaccctcctcacttccttgtctagatgtagaggtcaggctgctgaaccagccaacacatgggctactgctgggaagcctgggctgttttttttcttaaacacattttatattactgaacaaccaaatctaccctccacggccctgaggccttatcagttccactgattaaaaactttctcttccacggactttaagcccggtaggaaagagagaggaggagggggaaagagcaaaccatctttcttccaggcccttgactgctcctttgggctgggccaaggtttgtatgtaccacaccatgcatgactcagatgccctcaggtccctttctctatggtatgtatactgcttgtgtttgggttgaagcactacctgacattaaaggaaggacttggagagagaatgca

SEQ ID NO: 8393 - DNA, 1849 bp, Homo sapiens
gagtatgacctttggtgaatatgtggcactaattttttttaccttaatcatattcttgtcaagtaggcaacccattgccccttggagaccacaccagccctgtaagttctcaccagcagcatggagattaggaagaggggctgctgtgaccaggagatacacacggctttaagtaactgagagcctaaagaaagtaacccagggagtccggtccagttttaatatttgtggatttgttgtcacacacattgtttagtcctgaaactaaaacctattttataaatagtagggttaattcctcgaaacaatttctttattaataaatgtcctgtgggtttagaaatatcaggtaaatatttgaatacagaatgatgattgcaattactgttacaagcgtgaaacacaaacttcagatcaaatctagagttgcttcatttaatgcatgctagcaacagccttaactttggattcagttatttgaaacacttttccggcatctttccctttctaatgttgtggggtggaaaccggatggcaaatcactgtgagccggatacctcagcacagtccaccttgtgtgtgacttcacaaatgggggacttcacaaatggggtaactgaatgttattactttcaaattttgacatggagcattatgatcaaggaaatggagctgccttatacattaaacccgtgatttaatcctattgacattttcatagccatgcctccagattttatctttttggcaaaattctgattccacagtttggtctgattgaaataaatattccctggacgtctggctaaaaattttgctaacaatcccagaggtgccattttcttattaataaatttcattggagccttatttcttactatattcaatttcgtttcaaacctgcaagtccctgggatggtcccacgactagggcctgcacatttcttacaatggcaaagcattttttaaaatttagggtcaggttgaaaaattctaggactaattctgtagagaggagggactgttaactaacgtgagtggggacggaggagtaggttaccacatttggagcagtaatagatgcaaacgatgtaaatttgaaatttgcccctttagttaaagaaggagcctgcaaagtccatttctctgttttcagccctgtcagtcacccatttaggatgttggcaaagtactgcttgagcagaatgtgtaagaaagtaataatgaaagcaaaagtatgtcagacagttacttcttccacatggttagaggcatgtgattttcagcactgtgtgttacagaaatgtcaggaatggtgtattataacgtgtgcaagataatgtcagtgtgcacagagggtcttttttccttatctgattagtactgttaatgttcaaagaataaaaatggttttacagtttagattctgagatagcaaaacctgatttttcaaccatgacctgcatgagagaagcatcctaggaagtcttagatcatacttttgagtttttaattttaatttatatagtgtttttttatgtcttaatatttttgtgaactggtgtaaattgttaatgcatataagcttgtgtatttttgtaaatagttttgtgatttatttcttgccccatatgtaaatatttagagtctcatttcttgcaaacttatttgaagctgagttgtgggtttgggttttgtttgtttctttggttgcagggtggggtggggggtggcaggggagggaggaagggatttttgtacctggagatggagatatcttgtggtttaaagcaaatgtcccactgaaagtgattcaaatatcaacagaattatttcaggttaaaacaga

SEQ ID NO: 8394 - DNA, 1848 bp, Homo sapiens
gagtatgacctttggtgaatatgtggcactaattttttttaccttaatcatattcttgtcaagtaggcaacccattgccccttggagaccacaccagccctgtaagttctcaccagcagcatggagattaggaagaggggctgctgtgaccaggagatacacacggctttaagtaactgagagcctaaagaaagtaacccagggagtccggtccagttttaatatttgtggatttgttgtcacacacattgtttagtcctgaaactaaaacctattttataaatagtagggttaattcctcgaaacaatttctttattaataaatgtcctgtgggtttagaaatatcaggtaaatatttgaatacagaatgatgattgcaattactgttacaagcgtgaaacacaaacttcagatcaaatctagagttgcttcatttaatgcatgctagcaacagccttaactttggattcagttatttgaaacacttttccggcatctttccctttctaatgttgtggggtggaaaccggatggcaaatcactgtgagccggatacctcagcacagtccaccttgtgtgtgacttcacaaatgggggacttcacaaatggggtaactgaatgttattactttcaaattttgacatggagcattatgatcaaggaaatggagctgccttatacattaaacccgtgatttaatcctattgacattttcatagccatgcctccagattttatctttttggcaaaattctgattccacagtttggtctgattgaaataaatattccctggacgtctggctaaaaattttgctaacaatcccagaggtgccattttcttattaataaatttcattggagccttatttcttactatattcaatttcgtttcaaacctgcaagtcctgggatggtcccacgactagggcctgcacatttcttacaatggcaaagcattttttaaaatttagggtcaggttgaaaaattctaggactaattctgtagagaggagggactgttaactaacgtgagtggggacagaggagtaggttaccacatttggagcagtaatagatgcaaacgatgtaaatttgaaatttgcccctttagttaaagaaggagcctgcaaagtccatttctctgttttcagccctgtcagtcacccatttaggatgttggcaaagtactgcttgagcagaatgtgtaagaaagtaataatgaaagcaaaagtatgtcagacagttacttcttccacatggttagaggcatgtgattttcagcactgtgtgttacagaaatgtcaggaatggtgtattataacgtgtgcaagataatgtcagtgtgcacagagggtcttttttccttatctgattagtactgttaatgttcaaagaataaaaatggttttacagtttagattctgagatagcaaaacctgatttttcaaccatgacctgcatgagagaagcatcctaggaagtcttagatcatacttttgagtttttaattttaatttatatagtgtttttttatgtcttaatatttttgtgaactggtgtaaattgttaatgcatataagcttgtgtatttttgtaaatagttttgtgatttatttcttgccccatatgtaaatatttagagtctcatttcttgcaaacttatttgaagctgagttgtgggtttgggttttgtttgtttctttggttgcagggtggggtggggggtggcagcggagggaaggaagggatccttgtacctggagatggagatatcttgtggtttaagcaaatgtcccactgaaagtgattcaaatatcaacagaattatttcaggttaaaacaga

SEQ ID NO: 8395 - DNA, 5338 bp, Homo sapiens
aatataggattaaataattcccacaaggtaagaaggggaagatatcagtgagatgaaatatactattaccaaaggtatgtcacttttcagcagggtgtgttgttatctttgagtcagacacaacaattacttttaagccctgtggctggtttccatgagatagttcccatttgaggttggagtctgccattaccttgatgctggcttttccccaggaaaggagtagctcctagatgactatagcttaactgtacctgctcccttttcttcctaaagtgtctcggtagtttattccagtaacacaaagagatcaggatcaaatgagacaaagtgggctttacggttgtgggttgctttttcttatttttttccaactccatcactgactcattgtgactttgggcaagtcatttacctaccctctgccaattattcacagttacacaatgaaaatacttcattctcaaaacattcgtaagactgtctgccttgcagactttttggaagtataagagattatagtgccttgggattttttgttactttcctagcattcaccagcagtttgtcccatagtcaggtgcctgtttcaatgagagaatgtagtatgcagaatgctaaggtttcttcctgaatttcctcatattttaagaaagtgccacaggttgtttttcttctatatggtcaccttgaactattaataggacttaagattttagaccttagtggaggatgctgtgtttactgcttctcaaggatagcatgttttcagtatgaggattatctttggccagactaaggtggaatcaaaggtaggagagaggcagtagcttctgatttgaatattgcctttccctatgtttgaagccctaaaactgctaactgtgtacaactgtgaatttcaaaagtctccccagatgatagaattaactcttaatttaacaagatgtcctttgtgttgagactgagctagactaatagaccgggtatgtatttttaagctctacagcattacttgactaaacctctcttttggtttgtatattaaaattatgccataggcaacctcatctcgcatttaaaacctctcataaattagaaaactttgaatggttctccaaagataatactgggtgttgtacaaaatagcagcacaagccttcttttcctagaaatgggtacagattcattgcaaccacatggcttgggaaagttcaagctgctacccaaccagccttaatttgtgagttacaaatttaatagtacttgattcatagagggaacaaaaaatagacccatagtattatcatctttcaataggttcaaggagtagttccagttccagagaggccacctgaacctcgagccatggatgaccctgcgtctgccttcatcagtgacagtggtgctgctgctgctcagtgtcccatggctacagctgtccagccaggcctgcctgagaaagtgcgggacggtgcccgggtcccgctgctgcacctgcgcgccgagtctgtccctgcgcatccctgtggctttcctgcaccactgccccccaccaggatgatggagagtaagatgattgctgccatacactccagcagtgcagatgccaccagcagttcaaattatcattcctttgtcactgcttcatccacctctgtggacgatgcattgcctttaccacttcctgtcccacaacctaagcatgcttctcagaaaacagtttactcctcctttgctaggcccgatgtcaccactgaaccctttggtccagataactgtttgcatttcaatatgactccaaactgccagtaccgtccccagagtgtacctccccatcacaataaattggagcagcaccaagtgtatggtgccaggtcagagccaccagcctccatgggtcttcgttataacacatatgtggccccaggaagaaacgcatctggacaccactccaagccatgcagccgggtcgagtatgtgtcttctttgagctcctctgtcaggaatacctgttaccccgaagacattccaccgtaccctaccatccggagagtgcagtctctccatgctccgccgtcttccatgattcgctctgttcccatttcacggacagaagttcccccagatgatgagccagcctactgcccaagacctctgtaccaatataagccatatcagtcctcccaggcccgctcagattatcatgtcactcagcttcagccttactttgagaatggccgggtccactacaggtatagcccatattccagttcttctagttcctattacagtccagatggggccctgtgtgatgtggatgcctatggcacagtccagttgagaccccttcaccgccttcccaatcgagactttgctttctacaatcctaggctgcaaggaaagagcttgtacagttatgctggtttggctccacgtccccgggccaacgtgactggctatttctctcccaacgaccataatgtagtcagcatgcctccggctgctgatgtgaagcacacctacacctcatgggatcttgaggacatggaaaaataccgcatgcagtccatccggagagagagccgtgctcggcagaaggtgaaagggcctgtcatgtcccaatatgataacatgaccccggcggtgcaggacgacttgggtgggatctatgtcatccatctgcgtagtaaatcagatcctgggaaaactggacttctctcagtggcagaaggaaaggagagccgccatgcagccaaggccatcagtcccgagggagaggaccgcttctataggaggcatcccgaggcagagatggacagagcccaccatcacggaggccatggtagcacgcagccggagaagccatccctgcctcagaagcagagcagcctgaggagcaggaagcttcctgacatgggctgcagtcttcctgagcacagggcacaccaagaagcaagccataggcagttctgtgagtcaaagaatgggcccccttatccccagggagctggccagttagattatgggtccaaagggattccagacacttctgagccagtcagctaccacaactctggagtaaaatatgctgcatccgggcaagaatctttaagactgaaccacaaagaggtaaggctctccaaagagatggagcgaccctgggttaggcagccttctgccccagagaaacactccagagactgctacaaggaggaagaacacctcactcagtcaatcgtcccaccccctaaaccagagaggagtcatagcctcaaactccatcatacccagaacgtggagagggaccccagtgtgctgtaccagtaccaaccacacggcaagcgccagagcagtgtgactgttgtgtcccagtatgataacctggaagattaccactccctgcctcagcaccagcgaggagtctttggagggggcggcatggggacgtatgtgccccctggctttccccatccacagagcaggacctatgctacagcgttgggtcaaggggccttcctgcccgcagagttgtccttgcagcatcctgaaacacagatccatgcagaatgagccctgcgagcaatagagttgaagcagcctctgctggacagtggactgttctatttttttcaataaccaaaaagattaaacaaaaaatactataaaacccctgaccacatttaaaaaatgataataaaagtaaacaaatcagcatctttttccccttccctgcttcattaccccctcttccatctatagactttgtcatttttgtctttagaaaagatctgaaggatggtaaagccccgtgctgaaacccagtagagaaacctgtctcaggacacacttgccatctagggctagcttgaaagagcctgaggactgcctttaactgaatttgaattcagcattgtcctttcttcttagtatttgctgcataattgagagcagttcacatcgatttcctggtaggcgtctgcattccctgttgtgttcctgcttctccttcagtagctgcacaacttgcgcagatcgacacactgttgtcacttcattctccccgtctgagaaggatcttgtgttcagttagagtcgtggaaaaatccctgatccttcaaggtcagtcagacagttggcaacattataattaaaaataagaaattaagactttaaattaaacatttggtagagtcatcataaaacaccagaccacttagactcaggctgaaccatactctttctattcttatttttcatccttgttcctcacggttcagtgaacaggctcatatcatgacagaatggacttttaaaagttagtacttaaggaaacttctttaggtggaagaaagtaaagttcttattgtcagtgaactttattagcaccagaaatctctattgatgcttttaatgcattgcctgccttcaggttttcttcttaccccacccctcaataagatttggtgaattgtaattctagtaaaacatgtcataccattggttttcctaaattatcaactttctttcattaaaaaaaaaaaaaaaaaaaaaggcccactggggttgggggggttaaacacgcataatttattatgaatataaatttcccatgtttgtttctgtgtcctaaaccagagtacgaggtccctgggaatttaagtagctacgcattatctattattagactgcaagttcctgcaataactgcttagttcacagccccgtttcaccagtggagttctgggcagttattgctgtcctaaggcattactgtcgtttgcttactctatacttgtgtggtcacagtcttcttgtaattaccatctacaccagcatttcaggtatagctctttataactctggagacatgtaaaacatgtttaacacccacgagttttgaaagttgcattccttattagagtaggaactctctagcccaactccattctatgttctcagctccctccaccccccaaaatacatcagactagcaaggcagtcctatgtttacaaaacgagtttagattgtcatttcattccataactcttaataatactcaagttttatacattcacgtattttaaatgctcggtctgtagaagacactaggagaattgcattccaattactggatggttgctgctctggctttttagaacttgaaattaatttttatttagagcaaaggaggaaatcttttaagaggctaaaatcatgctgctattattgctgtgaaattgtataaagattaggattcatgccagtttttattttaaaaaataatgtgcattttaagggtttatatttagaaaaaaataaaatgtttcaagaaca

SEQ ID NO: 8396 - DNA, 799 bp, Homo sapiens
aaaaaaaaaaaaaaaaaagcccagcatggtttgactggatagacacgcataatttattatgaatataaatttccatgtttgtttctgttcctaaaccagagtacggggtccctgggaatttaagtagctacgcattatctattattagactgcaagttcctgcaataactgcttagttcacagccccgtttcaccagtggagttctgggcagttattgctgtcctaaggcattactgtcgtttgcttactctatacttgtgtggtcacagtcttcttgtaattaccatctacaccagcatttcaggtatagctctttataactctggagacatgtaaaacatgtttaacacccacgagttttgaaagttgcattccttattagagtaggaactctctagcccaactccattctatgttctcagctccctccaccccccaaaatacatcagactagcaaggcagtcctatgtttacaaaacgagtttagattgtcatttcattccataactcttaataatactcaagttttatacattcacgtattttaaatgctcggtctgtagaagacactaggagaattgcattccaattactggatggttgctgctctggctttttagaacttgaaattaatttttatttagagcaaaggaggaaatcttttaagaggctaaaatcatgctgctattattgctgtgaaattgtataaagattaggattcatgccagtttttattttaaaaaataatgtgcattttaagggtttatatttagaaaaaaataaaatgtttcaagaaca

SEQ ID NO: 8397 - DNA, 9261 bp, Homo sapiens
ggcgagaccttcccctcctgtgcagtctgtgtcccctgctgtgcccacacctccctcgatgtctgctgccctgcctttccctgcaggtgggcttggcatgccccccagtctgcccccacctcccttgcagcctcctagtcttccattgtctatggggccagtactacctgatccgtttactcactatgcccccttgccatcctggccttgttatcctcatgtgtccccttctggctatccttgcctgccccccccaccaacggtgcccctagtgtctggtactcctggtgcctatgccgtgcctcccacttgcagtgtgccttgggcaccccctcctgccccagtctcaccttacagttccacatgtacctatgggcccttgggatggggcccagggcctcaacatgctccattctggtctactgttcccccacctcctttgcctccagcctccattgggagagctgttccccaacctaaaatggagtctaggggcactccagctggccctcctgaaaatgtacttcccttgtcgatggctcctcccctcagtcttgggctacctggccatggagctcctcagacagagcctaccaaggtggaggtcaagccagtgcctgcatctccccatccgaaacacaaggtgtctgccctggtgcaaagtccccagatgaaggctctagcatgtgtgtctgctgaaggtgtgactgttgaggagcctgcatcagagaggctaaagcctgagacccaagagaccaggcccagggagaagccccccttgcctgctaccaaggctgttcccacaccaaggcagagcactgtccccaagctgcctgctgtccacccagcccgtctaaggaagctgtccttcctgcctaccccacgtactcagggttctgaagatgtggtacaggctttcatcagtgagattggtgagtgacacacagttcccccatgtagtccccaagttggctgggggactctagaataggataagccaccctgatgaggctggcctttgttggatttctttggaggagtttttttgtttttattttgagatggagtcttgctctgtctccaggctggagtgcagtggtgcaatctcggctcactgcctcccaggttcaagcaattctcctgcctcagcctcccaagtagctgggactacaggtgcccgccaccacgtctggctaatttttctatttttagtagagacgaggtttcactatgttggccaggttggtctcaatctcctgatctcgtgatccgcctacctcagcctcccaaagtgctgggattataggcgtgagccgctgcaccatgccttttttttttttttttttttttttttttttttttttgagatggagtcttcctctgtcgcccaggctggagtgcagtggcgtgatctcggctcaccgcaacctccgcctcccgggttcaagcgattctcctgcctcagcctccccagtagctgggattacaggcactcacacccacgcccggctttttgtatttttagcagagatgaggtttcaccatgttggccaggttggtctcaatctcctgacctcgtgatccgcctgcctcagcctcccaaagtgctgggattacaggtgtaagccaccgcccttggcctgtttttgtttttaagagatgaggtctcactgtgttgcccaggctggacttgaactcctgggctcaagtggtcctcccacctcagccttccaagtagctgggatttataggcacaggtgtgtgccaccgtgcctggctgtggagggttcttcagaggcagagccctgggttggtttgaatccttcatgctttgtgctgctaccttggttcacttagtacagagggcagggggagtggaaagggagaagtgagatgatttgggggcttcctgggacctgtgtactaagttgataggggctcgttttcaatcctgtgttgtgtgcctccacaggaattgaggcatcggacctgtccagtctgctggagcagtttgagaaatcagaaggtgagggaacatgggtagttttgctccaactctttttttggtgatacttttttgggcccagccctgtagttgcttaaactagggtgagaggggacagccttagccactggagcagacccctaattggaagagagagacaagattgaactgtgacggtaatccaagccagggacggcagtgatacagtaaggaaggtattaaagagtagactgggaatccaggccaggcgtggtggctcatgcctgtaatcccagcactctgggaagctgaggcgggtggatcatgaggtcaggagtttgagaccagcctggccaacatggtgaaaccccgtatctactaaaaatacaaaaattagctgggcgaggtggcgggcacctgtaatcccagttactcgggaggctgaggcaggagaattgtttgaacccagcaggcagagattgcagtgagccgagatcgtgccattgcactctagcctgggccacagggtgagactctgtctcaaaaaaaaaaaaaaaaaaaaaggaatccaagcaggttggggttgtttagggacatttttctagagggaagtagctttcaggctgggcattgaaagacaggtaggaattcacagagagaatatgtgtggcaactaaaggcagagggtaggtataggaagaatggcatatggcacatttgaaaggcaatggatagctggctttcttagtataaggcgtggatgtaggtgctatggaggacactatcttcttctcaaggagcttatggtctaactggggagaagaatctacagaaatgattcctgagttggtaacaaggcaaaatagaaaatgtgatttgtagaacaagagtaggctgtgaggccaggaagctagttaggcagatcatagatcaccttgaacgctaggcttatacatttggactttatctcagattcagtggaggaatgtgggtgtttctgagcagaaaagagacatgattaaaaatagtacttgggcatccactggaggagactagatctctttggggagatcccaacagggaatatgtaggcaaagtggattttcctcctttgggtctcaaagcaagcccttctgtgccgcctcagtctagaacatctggttgggcttttaactagtatggtttctttgcagccaaaaaggagtgtcctcctccggctcctgctgacagcttggctgtaggaaactcagggtaagtatggagacatgagcgagttaccctacagctgttagtcagcagccggctgacactccaggactgtcaactggatgcctctgttgcagggacgctgtagtcagctctagagtctttccctgtttccccaccccttactctgcctatcactaccgggcagtgtcttgggtggtgaggtgagaacggggcatgttcactgccctccagctgattccagtcgggctccaaatgtcctagaggtgccttttatctcctggcaagtcatacctttggggatttctttctttcatttaataacacttcaagtttgctcagtgctggtaatggtgtaacttaaagtggaggaagatgttaatggctaggagtcatttttcatgttcatgatcctccatcctgttctgccaagcatgttcccctccacattgatttcaggttggtgtgagctgggcaggtgagactcgatgtgaaggaggtggggggtattcaaggtcatggccagcctgcctcttggaattgggcagggctcagttgagatccaatttgtagttcagtcaataagacccttttgtgcaggaagaagatgatggaggcagtttgtgcatcccattcttctctgcacccaccccctcccattgatttctgagaaaggcaaatgtataagatattgagaaggcaatgaatcaggctttcccttttccccccccgccagcggcgttgacattccccaggagaagaggcccctagaccggttacaagccccagaactggccaacgtggcaggtgggttcagggtggggaattctgcctgtgattagtctatgcagcaacacttgctgagcctactccaaatccattgtgtgtaggcgttaaggacatagagatctgatctccagccttgagatactcacagtctagggggcagacttgtaaacgaatgagcatgttgagtatcaggtgctatgttacagcctatgggctaggcgcagtggctcgcgcctgtaatcccagcacttgtgggaggctgaggcaggcggatcacttgaggtcaggagttcgagaccagcctggccaacatggtgaaaccctatctctactaaaaaaaatacaaaaattagttgggcgtggtggtacacgcctgtagtcccagctacttgggaggctgaggcaggagaattgctaaaatccaggaggtggaggttgcagggagctgagatcgtgccactgcactccagcctgggggacagagcaagactatctaaaaaaaaaaaaaaatgtcgggcgcggtggcccacgcctgtaatcccagcacttggggaggccgaggcaggtggatcacgaggtcaggagatcgagaccatcctggctaacatggtgaaaccccatctctactaaaaatacaaaaaaattagccgggcgtgatggcgggtgcctgtagtcccagctacttgggaggctgaggcaggagaatagcgtgaacccaggaggttgagcttgcagtgagctgagattgcgccactgccctccagcctaggcgacagggcaagactctgtctttaaaaaaaacaaacaacaaaaaaaaacaaccatggattacagtgagatgtgaagagggacagtcagggaagggttatatagaaactaatcccctaagctgaggcttgagaaactctatcaggtggtagatttagggaacagggcattctaggaagacagagcatcttgaatgaactgaagaaacaaaaccaactgggtatgttttggggaattgtgagaggcttggtttggctggagtgtagtagctgatcagggcagtgggcagaggtaaagcgagagataaaactggagtggtaaatagaaggtcagattattgggacctcgaatgccatattaagctctttggactttatcctgtgcattgaagaaactttgccagattggtttttgggtgctccatctagcaggaatgtagaagacaggtggactctgaagctgcaagtggggagacgatagatgatgactgcatgagtgcaggaaagatgcagcctagaagtcaggcagtactcgggggaaggggcggatctgagaatggagagcttagactctaggacctggctactaggtttgggtagtgagaggatgagggcttcaggaagaccctagctggctggatttctcttgctggtccccaagttggggaacatggggaaggggcagttgaagcagtgggaaaagttgggctgcttaccttgcttggtgtactttgtgagatgaggtgggggtctctggaggctatatacacggtatttggaagcgtagaatcggatctcatcctgctatctccatcctccctccccaccacagggctcacccctccagctacccctccccaccagttatggaagcccctggctgctgtctcactgctggccaaagccaaatctcctaagtccaccgcccaggagggaaccctgaagcctgaaggagttacggaggccaaacatccagctgcagttcgcctccaagaaggggtccatggccctagtcgagtccatgtgggctctggggaccatgactattgtgtccggagcaggacccccccaaaaaagatgcctgccctagtcattccagaggtgggctcccgatggaatgtcaagcgccatcaggacatcaccatcaaacctgtcttgtccttgggcccagctgcccctccgcccccatgcatagctgcctcccgggagccgcttgatcacaggactagcagtgagcaggcagatccctcagcaccctgccttgccccatccagcttgctgtcccctgaggcctcaccctgccggaatgacatgaacactaggactccccctgaaccctcagccaagcagcggtcaatgcgctgttaccgaaaagcctgcaggtcagccagcccctcaagccagggctggcagggccgccgaggccgcaacagccgttctgtcagctctgggtccaaccggactagcgaagcatcttcctcatcctcatcatcgtcttcctcatcccgatctcggtccaggtccctctcccccccacacaagaggtggcgaaggtgagctttgatggccctgtaggtcctctccatttaggaagttcacgtacttctgtggtttactttgaaagcttttacccgttgactttggtactttcaggcgctaaggcttctatttctgactttggcttttgtgttttcccttttcctggattgttgaaggaggcaagctgtgagacaattgcttctgtcccctgttggagcttggggtgtcaggtctcctgcttctttgagacctgccttggggagacttttagggtttgattttgaccatgttgatttttttcacatactgtatcagccttcatttttggtattctgggcgctatgtgaggtagtgggttacttgttaatagaaaatagttcttcccttaatcatctgctgaggaaggtgtctggggcagttcctttgggtgtcactatggcctcatctatttcctggcagtatctttttttctcagtaaccaagttttcccacttaatgaagaattcttgggttttggagatgatatatgtcttcagaactggcccatactacaagtctagcagttaacctctctcatggtcacagtatttcagtgagacctggtaggggagcaatagtaacccaaaagacccaggcttggccccagcaccacagatagctgggtgtgagacctagggctcacccctctccctgagtctccatttattgttcttcctctttctgatttgttaaatatttttcaatttttaagtgcacaattgaaaatgtgatctcttccaaaacacttcacaacattccaggtacacctaaagttccatgaagggcctcagtttgttcatctctgaatgaaaattgttcttctagacctcttctactctgctttgtctttggtcctgagcttcctaaaagaaaggcaggactggggcctgggtgagataagcagagtatacctgaaccactcccagcattcctgcatgccctcttatccttcaggtccagctgtagttcctctggacgttctcgaagatgctcttcctcttcttcgtcatcatcttcctcttcgtcttcctcatcctcatcatccagttctcgaagccgctcacgatccccatccccccgccggagaagtgacaggaggcggcggtgagcatgtgttcagggagcgccatgcacctgggatgcaggtgcctaagagttgagtcttgaattgtcttatgtttggggggctgatgacaccctcttttgtcaggtacagctcttatcgttcacatgaccattaccaaaggcaaagagtgctacaaaaggagcgtgcaatagtgagtagaggaacagatcatgggaggatggggcttaccccctgagccttgagctcagagagctgcctgcagctgtagccctggctaatggtgtgttgattttttttcatttccaaacataggaagaaagaagggtggtcttcattggaaagatacctggccgcatgactcgatcagagctgaaacagaggttctccgtttttggagagattgaggagtgcaccatccacttccgtgtccaagggtaagcttgggccccaggctcaggatgttctttctatcccattcatctaccttggtgtttctttgtcttgcctccttgctctggtgtgctgagcaatatggggcaccttcatttctgcagtcagagggttggccactgggaatgagaagaaccacctctgtaccttgggatgctgtgtctcctctatggcatgggcccatatagccactccagcccctgcctcactctcctcctactagggacaactacggcttcgtcacttatcgctatgctgaggaggcatttgcagccattgagagtggccacaagctgcggcaggcagatgagcagccctttgatctctgctttgggggccgaaggcagttctgcaagaggagctattctgatcttggtgagtggagggagggcctaaagctttggaatgcttcatcccctccccagaagggttcctaaccctttgtgagtggggctaggcagacttaccttagtttgacatacaaagaacccaagggggctgggcatggtggctcacgcctgtaatcccagcactttgggaggctgaggcaggcaaatcacgaggtcaggagttcgagaccagcctggccaacatgatgaaaccccatctctaccaaaaatagaaaaaattagctagaggtggtggcacgcacctgtaatcccagctactcgggaagctgaggcaggagaattgcttgaacccaggaggcggaggttgcagtgagctgacatcacaacactgcactccagcctgggctacagaacgagactgtctcaaaaaaaaaaaaaaaaaagacccaaggggtgggacgagaggagaaatggggactggggactctcctatctctttgacttaaaattagagcagttttcactccatccgtttttgggatgggagatagctagccatttgcagaccctgtggttgggaagtgtggtcagagaccttgaagtttgtctttacctttatagactccaaccgggaagactttgacccagcacctgtaaagagcaaatttgattctcttgactttgacacattgttgaaacaggcccagaagaacctcaggaggtaaccttgggcccttccctgctatcctttttctcctttggaggtgcccaacctcctccacccccttcccctactctaggggagagagctgctagtgagatgactgttttataaagaaatggaaaaaagtgaaataaaaaatatgttgaatcagattttttaaaaggggtatttgtttttttataacaggtattgaaacaagttaacttgcattcctatgtaagataggaggggctgaggggatccccagtgtttggaacataagtcactatgcagactaataaacatcaactagagagaactcccaa

SEQ ID NO: 8398 - DNA, 319 bp, Homo sapiens
gtctttatatggtgctaatgccaaatgtattcacttttcctatctgaacatggtccagggacatgcctctccctggtcaggtgcaaaaatcccactggatttgaaccttggttcctcagatgtattgtctaaaatgagtcatttaggacagtgcttctcaactttaaagggaatttgaatcatctagcgatctttttagaatgtagattctgacaatgggatgatgatactggtccaggaagggattttgataacaaggacctagagaagctcacacttgttccaaagaaaggttttctaaactgcgacaggtgtatac

SEQ ID NO: 8399 - DNA, 797 bp, Homo sapiens
agagaagtgctggacaaagtagtcctgctaaagaaggccctctagacctctacccaaagctggctgacactatccaaaccaatcctataccaacccatctctcattggtcgactctgcccaagccagccccatgccagttgactctgttgaagctgatcccactgcagttggccctgttctagctggccctgtacctgttgaccctgggttggttgaccttgcttcaaccagctcagaactggttgagcctctcccggctgagccagtgctgatcaacccagtcctggctgactcagcagcagttgaccctgcagtggttcccatctcagataacttgccaccagttgatgctgtcccgtctggcccagcaccagttgatctagcactggttgaccctgttcctaatgacctgactccagttgacccagtgctagttaagtccagaccaactgatcccagacgtggtgcagtgtcatcagccctggggggttcagcaccccagctcctcgtggagtcagagtccttggacccaccaaagaccatcatccctgaagtcaaagaggttgtggattctctgaaaattgaaagtggtaccagtgctacaacccatgaagccagacctcggcctctcagcttatctgagtaccggcgacgaaggcagcaacgccaagcagaaacagaagagagaagtgcacagcccccaactgggaagtgggctatccttccaaagacttccacagggcttgcagacataccttgtcttgacataccaccagccccagccaaaaagacagct

SEQ ID NO: 8400 - DNA, 1804 bp, Homo sapiens
aatggaaaagagtgattgtgagtgttagatatggcctttccctttcgtgcttctagccaccttgtcactgattttggaaacctcacttaacctctatgggtgggcctcaatttccatctaaaatagagaagtagggaggaattggatcaaaccagcccaagaaaatttaattaactatttcaaactctaatgaaaaatctctactttaaaaattgaaacacaaaaatgttctgggaggttctattcattgtctgctttcctacatttgccctgattacaagactgagttccttgataattgaaaccatgtctctttatctagtgcctagcatagtgccaagcacacagtgtatgcacagcctattggtatgaaagagaacacaacttcattaattctcatatctctccagttcacaccccttcatctcctgtaaaacaccccttcccctacaattatttctgttagtctctaggtgtttcttgtattcaagagtatgtccacagtttgggtgcctctgtgcattccttctatctgagcatctgccatcattggtgctctgccatgccactgctgggaacatttgacccctctgggagcatcttcctaatagatcccataaactgcaaagccttatggttaccaaaatgatggtgtatatatatatacttggagccttgcaaagcccctaatgaaagtatttccttcaccagctagaagtactctcctttagcgatcagattaaaacacacacccaggtgtgtgttttaaagaaaaaggacccaagagggaaaaagtttccaaggcatgaatgaattaagagtggcaaatgctactgagatagaaagattaggacggagaaaacagcactcactctgacagtattctttccaactggatttggtaaataagagtgaagaggtacctcgagtgagcactgggagaagtcatactggaagggataagcagtgattgacataagaaagtaaaataaattcaggttcatccagacacccccataatcttgccttgacccagaaacattgtgttcacaggactttcagcttcccacccccataagtaagcttcctaattatgatatcttggtcttgccaagcatttagagggccttactctgtggccctccagatagtgatttgaatgattaagtaaacctctttttagataagtgttctagtccagtctaacatcagcttgttggtctttttggcactgtcattgtccagtaccagcacattcttggctccttgccacatctctggcctcaatgtgggaggcaaagacagtgagcatttccagagtggtgagatgggtgcagcacataatgaggcgatgaccacacagcatctctgaacagcatgtccacacagggctcgaagtcattatgctgcatgtccacctcatgtccacaatagctgagcagttgagattggtggagtggaccttctcattactcatcatctagaggaaggtcctcatcatctctacttctcaaaggggtagaattgaacctgaacctgcttgacagacaagagcccaagcctaaccaaggtggctgccatggtgacccttgccctgaaagccatttccattaatttaaaaattgtaggtatataggaactataataacaggcttaaaattaaaatttgctctgtttgttgggtcacacgtgtaatcccaatactttgggaggctaagccgggacgatcacttgagctcagaagtttgagactagcctgggcaacatagtgagatcccggtctctaccaaaaaaaaaaaaaaaa

SEQ ID NO: 8401 - DNA, 231 bp, Homo sapiens
atctgaggtcaggagttagagaccagcctgaccaacacggtgaaaccctgtctctattaaaaatacaaaattagccaggtgtggtggtgcatgtctgtaatcccagctactcaggaggctgaggcaggagaatagcttgaacccaggaggcggaggttgcagtgagccgagatcgcgccattgcactccagcctgggcaacagagcaaaactccttcaaaaaaaaaaaaaa

SEQ ID NO: 8402 - DNA, 109 bp, Homo sapiens
ggcaggagaatggcgtaacccaggaggcggaacttgcagtgagccgagatcacgccactgcactccagcctgggcaacagagtgagactccacctcaaaaaaaaaaaaa

SEQ ID NO: 8403 - DNA, 170 bp, Homo sapiens; identical to SEQ ID NO: 5414

SEQ ID NO: 8404 - DNA, 147 bp, Homo sapiens; identical to SEQ ID NO: 5241

SEQ ID NO: 8405 - DNA, 131 bp, Homo sapiens; identical to SEQ ID NO: 5432

SEQ ID NO: 8406 - DNA, 143 bp, Homo sapiens; identical to SEQ ID NO: 5446

SEQ ID NO: 8407 - DNA, 170 bp, Homo sapiens; identical to SEQ ID NO: 5447

SEQ ID NO: 8408 - DNA, 154 bp, Homo sapiens; identical to SEQ ID NO: 5469

SEQ ID NO: 8409 - DNA, 207 bp, Homo sapiens; identical to SEQ ID NO: 5480

SEQ ID NO: 8410 - DNA, 162 bp, Homo sapiens; identical to SEQ ID NO: 5244

SEQ ID NO: 8411 - DNA, 100 bp, Homo sapiens; identical to SEQ ID NO: 5916

SEQ ID NO: 8412 - DNA, 193 bp, Homo sapiens; identical to SEQ ID NO: 5245

SEQ ID NO: 8413 - DNA, 187 bp, Homo sapiens; identical to SEQ ID NO: 5506

SEQ ID NO: 8414 - DNA, 153 bp, Homo sapiens; identical to SEQ ID NO: 5246

SEQ ID NO: 8415 - DNA, 202 bp, Homo sapiens; identical to SEQ ID NO: 5516

SEQ ID NO: 8416 - DNA, 203 bp, Homo sapiens; identical to SEQ ID NO: 5247

SEQ ID NO: 8417 - DNA, 158 bp, Homo sapiens; identical to SEQ ID NO: 5531

SEQ ID NO: 8418 - DNA, 193 bp, Homo sapiens; identical to SEQ ID NO: 5539

SEQ ID NO: 8419 - DNA, 195 bp, Homo sapiens; identical to SEQ ID NO: 5540

SEQ ID NO: 8420 - DNA, 141 bp, Homo sapiens
agtcccagcaactcgggaggctgaggcaggagaatggcgtgaacccaggaggcagagcttgcagtgaggcgagatctcgccactgcactccagcctgggtgacacagcaagactccatctccaaaaaaaaaaaaaaaagag

SEQ ID NO: 8421 - DNA, 279 bp, Homo sapiens; identical to SEQ ID NO: 5923

SEQ ID NO: 8422 - DNA, 243 bp, Homo sapiens; identical to SEQ ID NO: 5565

SEQ ID NO: 8423 - DNA, 153 bp, Homo sapiens; identical to SEQ ID NO: 5573

SEQ ID NO: 8424 - DNA, 150 bp, Homo sapiens; identical to SEQ ID NO: 5248

SEQ ID NO: 8425 - DNA, 142 bp, Homo sapiens; identical to SEQ ID NO: 5249

SEQ ID NO: 8426 - DNA, 166 bp, Homo sapiens; identical to SEQ ID NO: 5608

SEQ ID NO: 8427 - DNA, 906 bp, Homo sapiens; identical to SEQ ID NO: 5620

SEQ ID NO: 8428 - DNA, 368 bp, Homo sapiens; identical to SEQ ID NO: 5252

SEQ ID NO: 8429 - DNA, 1548 bp, Homo sapiens; identical to SEQ ID NO: 5628

SEQ ID NO: 8430 - DNA, 4704 bp, Homo sapiens; identical to SEQ ID NO: 5253

SEQ ID NO: 8431 - DNA, 1773 bp, Homo sapiens
tattaacaattttctatatttaattttctctattcaaattactagtttgtgcagaatctagattttatagaaaaaaacaaacaaatgcctagtgatttgtttctatctccctcctgtgtggtttctatctccctcctgattggatcctgactgatacgttggggtatgctgctcatgagagatttctttcagagtggtgaataaactatgtcctagaaggcatattgtatcaggaagggtcacgtgttagagctgtggtttacattaatatatacagtgttaggaggagcataaagaggaaaacaccattgtggcaaagtaatcctgtggaaaccagagagagagagatttgataaagtcttggtgactgacctgagtacgaaaccagtggtggtggtagtgggaatctttagattaatgaatattgatttattcataagctacaaaattcaaagggcacccagtttctctttctagaggtaattactatgttcagattcctgggacctttccaggtatctgatgtataaatacctctctctctttccctctctttctaacacagatattagtattcctctgtgtcttactttatccccttaatagtatatcttggaaatcattgttttctttaaaaaaatgttttaattgaggtaagcattcattatacagtaaatgtcttgttccttttaactggctgcataccctgtcaacctatggctgtgccaacactggagagagtctgggttgagtatagtctttttgccattataaacagggttgcagtgaacattcatgtgtatacttctttgtacctatgtatgagtgtatcctggataaattcctaaaagtgacgccactggattggaggtcatttttttttaaactttttattttgaaataattatagattcataagaagttgcaaaaacaggacagagaggccccagttgcccttcacctagtttctcccaatgatagcatcttacataacatgatacagcatggtatatcatatcaaaaccagcacattggtacaatctacaaaccttattcagatttcaccagttttacatgcccttgtgtgcatgtgtgtctgtgtctttgtggttttatgtgcttttatcaggagtagatttgtataacctcaaacaagatgcagaactgttctgtcagcacaaagatcccttgtgctacctcatagtcacaccaaacctcctctcctccttttgtcatcacggcattcctaactgttgacaagcagctaatctgttctccatctctgtaactttgttattttgagaatataattgaaatcgtatagcatgtaaccattgagatgggttttttcactcaccgtaattcccttgaagatcatccaagttgttgcatgtgtcaatggttgttcctttttatttctgagtaatgttccatgatatgaatgtaccacagtttgtttaaccattcacccactgaaggacgtttggattgtttctaagttttgactgtggcaagtaaagatgctatgaacattcatgtacacatgaatttgtaggcatatgtttttattttgctgggagaaaagcccaagaatgcagttgctgggttgtatggtattgtatgattgtttttcttttaagaaactgccaaattattttccagaatgactgtaccactgtacattcttattagctatgtatgagagatgtagtttctccaaatcctcaccagcatttaatattgtcaggattaaaaaaatgttttttacttgtt

SEQ ID NO: 8432 - DNA, 1771 bp, Homo sapiens
tattaacaattttctatatttaattttctctattcaaattactagtttgtgcagaatctagattttataaaaaaaacaaacaaatgcctagtgatttgtttctatctccctcctgtgtggtttctatctccctcctgattggatcctgactgatacgttggggtatgctgctcatgagagatttctttcagagtggtgaataaactatgtcctagaaggcatattgtatcaggaagggtcacgtgttagagctgtggtttacattaatatatacagtgttaggaggagcataaagaggaaaacaccattgtggcaaagtaatcctgtggaaaccagagagagagagatttgataaagtcttggtgactgacctgagtacgaaaccagtggtggtggtagtgggaatctttagattaatgaatattgatttattcataagctacaaaattcaaagggcacccagtttctctttctagaggtaattactatgttcagattcctgggacctttccaggtatctgatgtataaatacctctctctctttccctctctttctaacacagatattagtattcctctgtgtcttactttatccccttaatagtatatcttggaaatcattgttttctttaaaaaaatgttttaattgaggtaagcattcattatacagtaaatgtcttgttccttttaactggctgcataccctgtcaacctatggctgtgccaacactggagagagtctgggttgagtatagtctttttgccattataaacagggttgcagtgaacattcatgtgtatacttctttgtacctatgtatgagtgtatcctggataaattcctaaaagtgacgccactggattggaggtcatttttttttaaactttttattttgaaataattatagattcataagaagttgcaaaaacaggacagagaggccccagttgcccttcacctagtttctcccaatgatagcatcttacataacatgatacagcatggtatatcatatcaaaaccagcacattggtacaatctacaaaccttattcagatttcaccagttttacatgcccttgtgtgcatgtgtgtctgtgtctttgtggttttatgtgcttttatcaggagtagatttgtataacctcaaacaagatgcagaactgttctgtcagcacaaagatcccttgtgctacctcatagtcacaccaaacctcctctcctccttttgtcatcacggcattcctaactgttgacaagcagctaatctgttctccatctctgtaactttgttattttgagaatataattgaaatcgtatagcatgtaaccattgagatgggttttttcactcaccgtaattcccttgaagatcatccaagttgttgcatgtgtcaatggttgttcctttttatttctgagtaatgttccatgatatgaatgtaccacagtttgtttaaccattcacccactgaaggacgtttggattgtttctaagttttgactgtggcaagtaaagatgctatgaacattcatgtacacatgaatttgtaggcatatgtttttattttgctgggagaaaagcccaagaatgcagttgctgggttgtatggtattgtatgattgtttttcttttaagaaactgccaaattattttccagaatgactggccactgtacattcttaatagctatctctgagagatgtagtttctccaagtcatcgccagcatgtataatattgtcaggattaaacaaatgttttttacttg

SEQ ID NO: 8433 - DNA, 475 bp, Homo sapiens
acctatagtactaagtaaaaatctttttatacagtatttgtcttgtgtgggtcatgagcattagcatccaatggtaggtgtgtgattaaaatgcagattccttggccccgtcccaaatttactaaataggcctttgtgggttatagccttgggatctacaaatttaacaagattgagaaaacctaaggcctaattatctttcagcctcatctaatccttccctcccaaagacgtgagcgccacatacattcttatgcagcctctcaacacaccattccttttcgcatctccatacctctgtaatgtttctttccctgcctggaatgtgttcttacccttcaagagtcagctcaaattcacatctgtgaaatctaccttagtttgtacatatcaaataacagatgtgtgtttttgtgattcttcacattatgaacagcataaggtatttgccattgttagtattatcccatatgag

SEQ ID NO: 8434 - DNA, 476 bp, Homo sapiens
acctatagtactaagtaaaaatctttttatacagtatttggcttgtgtgggtcatgagcattagcatccaatggtaggtgtgtgattaaaatgcagattccttggccccgtcccaaatttactaaataggcctttgtgggttatagccttgggatctacaaatttaacaagattgagaaaacctaaggcctaattatctttcagcctcatctaatccttccctcccaaagacgtgagcgccacatacattcttttgcagcctctcaacacaccattccttttcgcatctccatacctctgtaaatgtttctttccctgcctggaatgtgttcttacccttcaagagtcagctcaaattcacatctgtgaaatctaccttagtttgtacatatcaaataacagatgtgtgtttttgtgattcttcacattatgaacagcataaggtatttgccattgttagtattatcccatatgag

SEQ ID NO: 8435 - DNA, 640 bp, Homo sapiens
gccctatagtgagtcgtattacaattcactggccgtcgttttacaacgtcgtgactgggaaaaccctggcgttacccaacttaatcgccttgcagcacatccccctttcgccagctggcgtaatagcgaagaggcccgcaccgatcgcccttcccaacagttgcgcagcctgaatggcgaatggacgcgccctgtagcggcgcattaagcgcggcgggtgtggtggttacgcgcagcgtgaccgctacacttgccagcgccctagcgcccgctcctttcgctttcttcccttcctttctcgccacgttcgccggctttccccgtcaagctctaaatcgggggctccctttagggttccgatttagtgctttacggcacctcgaccccaaaaaacttgattagggtgatggttcacgtagtgggccatcgccctgatagacggtttttcgccctttgacgttggagtccacgttctttaatagtggactcttgttccaaactggaacaacactcaaccctatctcggtctattcttttgatttataagggattttgccgatttcggcctattggttaaaaaatgagctgatttaacaaaaatttaacgcgaattttaacaaaatattaacgcttacaattt

SEQ ID NO: 8436 - DNA, 606 bp, Homo sapiens
gccctatagtgagtcgtattacaattcactggccgtcgttttacaacgtcgtgactgggaaaaccctggcgttacccaacttaatcgccttgcagcacatccccctttcgccagctggcgtaatagcgaagaggcccgcaccgatcgcccttcccaacagttgcgcagcctgaatggcgaatggacgcgccctgtagcggcgcattaagcgcggcgggtgtggtggttacgcgcagcgtgaccgctacacttgccagcgccctagcgcccgctcctttcgctttcttcccttmctttctcgccacgttcgccggctttccccgtcaagctctaaatcgggggctccctttagggttccgatttagtgctttacggcacctcgaccccaaaaaacttgattagggtgatggttcacgtagtgggccatcgccctgatagacggyttttcgccctttgacgttggagtccacgttctttaatagtggactcttgttccaaactggaacaacactcaaccctatctcggtctattcttttgatttataagggattttgccgatttcggcctattggttaaaaaatgagctgatytaacaaaaatataac

SEQ ID NO: 8437 - DNA, 628 bp, Homo sapiens
gccctatagtgagtcgtattacaattcactggccgtcgttttacaacgtcgtgactgggaaaaccctggcgttacccaacttaatcgccttgcagcacatccccctttcgccagctggcgtaatagcgaagaggcccgcaccgatcgcccttcccaacagttgcgcagcctgaatggcgaatggacgcgccctgtagcggcgcattaagcgcggcgggtgtggtggttacgcgcagcgtgaccgctacacttgccagcgccctagcgcccgctcctttcgctttcttcccttcctttctcgccacgttcgccggctttccccgtcaagctctaaatcgggggctccctttagggttccgatttagtgctttacggcacctcgaccccaaaaaacttgattagggtgatggttcacgtagtgggccatcgccctgatagacggtttttcgccctttgacgttggagtccacgttctttaatagtggactcttgttccaaactggaacaacactcaaccctatctcggtctattcttttgatttataagggattttgccgatttcggcctattggttaaaaaatgagctgatttacaaaatttaacgcgaattttacaaatattacgctt

SEQ ID NO: 8438 - DNA, 640 bp, Homo sapiens; identical to SEQ ID NO: 8435

SEQ ID NO: 8439 - DNA, 513 bp, Homo sapiens
gccctatagtgagtcgtattacaattcactggccgtcgttttacaacgtcgtgactgggaaaaccctggcgttacccaacttaatcgccttgcagcacatccccctttcgccagctggcgtaatagcgaagaggcccgcaccgatcgcccttcccaacagttgcgcagcctgaatggcgaatggacgcgccctgtagcggcgcattaagcgcggcgggtgtggtggttacgcgcagcgtgaccgctacacttgccagcgccctagcgcccgctcctttcgctttcttcccttcctttctcgccacgttcgccggctttccccgtcaagctctaaatcgggggctccctttagggttccgatttagtgctttacggcacctcgaccccaaaaaacttgattagggtgatggttcacgtagtgggccatcgccctgatagacggtttttcgccctttgacgttggagtccacgttctttaatagtggactcttgttccaaactggaacaacactc

SEQ ID NO: 8440 - DNA, 612 bp, Homo sapiens
gccctatagtgagtcgtattacaattcactggccgtcgttttacaacgtcgtgactgggaaaaccctggcgttacccaacttaatcgccttgcagcacatccccctttcgccagctggcgtaatagcgaagaggcccgcaccgatcgcccttcccaacagttgcgcagcctgaatggcgaatggacgcgccctgtagcggcgcattaagcgcggcgggtgtggtggttacgcgcagcgtgaccgctacacttgccagcgccctagcgcccgctcctttcgctttcttcccttcctttctcgccacgttcgccggctttccccgtcaagctctaaatcgggggctccctttagggttccgatttagtgctttacggcacctcgaccccaaaaaacttgattagggtgatggttcacgtagtgggccatcgccctgatagacggtttttcgccctttgacgttggagtccacgttctttaatagtggactcttgttccaaactggaacaacactcaaccctatctcggtctattcttttgatttataagggattttgccgatttcggcctattggttaaacaatgagctgattgtaacaaaaatttaacgcgaa

SEQ ID NO: 8441 - DNA, 640 bp, Homo sapiens; identical to SEQ ID NO: 8435

SEQ ID NO: 8442 - DNA, 640 bp, Homo sapiens; identical to SEQ ID NO: 8435

SEQ ID NO: 8443 - DNA, 654 bp, Homo sapiens
gccctatagtgagtcgtattacaattcactggccgtcgttttacaacgtcgtgactgggaaaaccctggcgttacccaacttaatcgccttgcagcacatccccctttcgccagctggcgtaatagcgaagaggcccgcaccgatcgcccttcccaacagttgcgcagcctgaatggcgaatggacgcgccctgtagcggcgcattaagcgcggcgggtgtggtggttacgcgcagcgtgaccgctacacttgccagcgccctagcgcccgctcctttcgctttcttcccttcctttctcgccacgttcgccggctttccccgtcaagctctaaatcgggggctccctttagggttccgatttagtgctttacggcacctcgaccccaaaaaacttgattagggtgatggttcacgtagtgggccatcgccctgatagacggtttttcgccctttgacgttggagtccacgttctttaatagtggactcttgttccaaactggaacaacactcaaccctatctcggtctattcttttgatttataagggattttgccgatttcggcctattggttaaaaaatgagctgatttaacaaaaatttaacgcgaattttaacaaaatattaacgcttacaatttcctgatgcggtatt

SEQ ID NO: 8444 - DNA, 647 bp, Homo sapiens
  SITE (619): n equals a,t,g, or c
gccctatagtgagtcgtattacaattcactggccgtcgttttacaacgtcgtgactgggaaaaccctggcgttacccaacttaatcgccttgcagcacatccccctttcgccagctggcgtaatagcgaagaggcccgcaccgatcgcccttcccaacagttgcgcagcctgaatggcgaatggacgcgccctgtagcggcgcattaagcgcggcgggtgtggtggttacgcgcagcgtgaccgctacacttgccagcgccctagcgcccgctcctttcgctttcttcccttcctttctcgccacgttcgccggctttccccgtcaagctctaaatcgggggctccctttagggttccgatttagtgctttacggcacctcgaccccaaaaaacttgattagggtgatggttcacgtagtgggccatcgccctgatagacggtttttcgccctttgacgttggagtccacgttctttaatagtggactcttgttccaaactggaacaacactcaaccctatctcggtctattcttttgatttataagggattttgccgatttcggcctattggttaaaaaatgagctgatttaacaaaaatttaacgcgaattttacanaatattaacgcttacatttcctgatgcg

SEQ ID NO: 8445 - DNA, 640 bp, Homo sapiens
gccctatagtgagtcgtattacaattcactggccgtcgttttacaacgtcgtgactgggaaaaccctggcgttacccaacttaatcgccttgcagcacatccccctttcgccagctggcgtaatagcgaagaggcccgcaccgatcgcccttcccaacagttgcgcagcctgaatggcgaatggacgcgccctgtarcggcgcattaagcgcggcgggtgtggtggttacgcgcagcgtgaccgctacacttgccagcgccctagcgcccgctcctttcgctttcttcccttsctttctcgccacgttcgccggctttccccgtcaagctctaaatcgggggctccctttagggttccgatttagtgctttacggcacctcgaccccaaaaaacttgattagggtgatggttcacgtagtgggccatcgccctgatagacggtttttcgccctttgacgttggagtccacgttctttaatagtggactcttgttccaaactggaacaacactcaaccctatctcggtctattcttttgatttataasggattttgccgatttcggcctattggttaaaaaatgagctgatttaacaaaaatttaacgcgaattttaacaaaatattaacgcttacaattt

SEQ ID NO: 8446 - DNA, 640 bp, Homo sapiens
gccctatagtgagtcgtattacaattcactggccgtcgttttacaacgtcgtgactgggaaaaccctggcgttacccaacttaatcgccttgcagcacatccccctttcgccagctggcgtaatagcgaagaggcccgcaccgatcgcccttcccaacagttgcgcagcctgaatggcgaatggacgcgccctgtagcggcgcattaagcgcggcgggtgtggtggttacgcgcagcgtgaccgctacacttgccagcgccctagcgcccgctcctttcgctttcttcccttcctttctcgccacgttcgccggctttccccgtcaagctctaaatcgggggctccctttagggttccgatttagtgctttacggcacctcgaccccaaaaaacttgattagggtgatggttcacgtagtgggccatcgccctgatagacggtttttcgccctttgacgttggagtccacgttctttaatagtggactcttgttccaaactggaacaacactcaaccctatctcggtctattcttttgatttataagggattttgccgatttcggcctattggttaaaaaatgagctgatttaacaaaaatttaacgcgaatcttaacaaaatattaacgcttacaattt

SEQ ID NO: 8447 - DNA, 571 bp, Homo sapiens
gccctatagtgagtcgtattacaattcactggccgtcgttttacaacgtcgtgactgggaaaaccctggcgttacccaacttaatcgccttgcagcacatccccctttcgccagctggcgtaatagcgaagaggcccgcaccgatcgcccttcccaacagttgcgcagcctgaatggcgaatggacgcgccctgtagcggcgcattaagcgcggcgggtgtggtggttacgcgcagcgtgaccgctacacttgccagcgccctagcgcccgctcctttcgctttcttcccttcctttctcgccacgttcgccggctttccccgtcaagctctaaatcgggggctccctttagggttccgatttagtgctttacggcacctcgaccccaaaaaacttgattagggtgatggttcacgtagtgggccatcgccctgatagacggtttttcgccctttgacgttggagtccacgttctttaatagtggactcttgttccaaactggaacaacactcaaccctatctcggtctattcttttgatttataagggattttgccgatttcggcctatt

SEQ ID NO: 8448 - DNA, 640 bp, Homo sapiens; identical to SEQ ID NO: 8435

SEQ ID NO: 8449 - DNA, 639 bp, Homo sapiens
  SITE (552): n equals a,t,g, or c
gccctatagtgagtcgtattacaattcactggccgtcgttttacaacgtcgtgactgggaaaaccctggcgttacccaacttaatcgccttgcagcacatccccctttcgccagctggcgtaatagcgaagaggcccgcaccgatcgcccttcccaacagttgcgcagcctgaatggcgaatggacgcgccctgtagcggcgcattaagcgcggcgggtgtggtggttacgcgcagcgtgaccgctacacttgccagcgccctagcgcccgctcctttcgctttcttcccttcctttctcgccacgttcgccggctttccccgtcaagctctaaatcgggggctccctttagggttccgatttagtgctttacggcacctcgaccccaaaaaacttgattagggtgatggttcacgtagtgggccatcgccctgatagacggtttttcgccctttgacgttggagtccacgttctttaatagtggactcttgttccaaactggaacaacactcaaccctatctcggtctattcttttgatttataagggatnttgccgatttcggcctattggttaaaaaatgagctgatttaacaaaaatttaacgcgaattttaacaaaatattaacgcttacaatt

SEQ ID NO: 8450 - DNA, 648 bp, Homo sapiens
gccctatagtgagtcgtattacaattcactggccgtcgttttacaacgtcgtgactgggaaaaccctggcgttacccaacttaatcgccttgcagcacatccccctttcgccagctggcgtaatagcgaagaggcccgcaccgatcgcccttcccaacagttgcgcagcctgaatggcgaatggacgcgccctgtagcggcgcattaagcgcggcgggtgtggtggttacgcgcagcgtgaccgctacacttgccagcgccctagcgcccgctcctttcgctttcttcccttcctttctcgccacgttcgccggctttccccgtcaagctctaaatcgggggctccctttagggttccgatttagtgctttacggcacctcgaccccaaaaaacttgattagggtgatggttcacgtagtgggccatcgccctgatagacggtttttcgccctttgacgttggagtccacgttctttaatagtggactcttgttccaaactggaacaacactcaaccctatctcggtctattcttttgatttataagggattttgccgatttcggcctattggttaaaaaatgagctgatttaacaaaaatttaacgcgaattttaacaaaatattaacgcttacaattkcctgatgc

SEQ ID NO: 8451 - DNA, 624 bp, Homo sapiens
gccctatagtgagtcgtattacaattcactggccgtcgttttacaacgtcgtgactgggaaaaccctggcgttacccaacttaatcgccttgcagcacatccccctttcgccagctggcgtaatagcgaagaggcccgcaccgatcgcccttcccaacagttgcgcagcctgaatggcgaatggacgcgccctgtagcggcgcattaagcgcggcgggtgtggtggttacgcgcagcgtgaccgctacacttgccagcgccctagcgcccgctcctttcgctttcttcccttcctttctcgccacgttcgccggctttccccgtcaagctctaaatcgggggctccctttagggttccgatttagtgctttacggcacctcgaccccaaaaaacttgattagggtgatggttcacgtagtgggccatcgccctgatagacggtttttcgccctttgacgttggagtccacgttctttaatagtggactcttgttccaaactggaacaacactmaaccctatctcggtctattcttttgatttataagggattttgccgatttccgcctattggttaaaaaatgagctggtttaacaaaaatttaacgcgaattttaacaaaata

SEQ ID NO: 8452 - DNA, 509 bp, Homo sapiens
gccctatagtgagtcgtattacaattcactggccgtcgttttacaacgtcgtgactgggaaaaccctggcgttacccaacttaatcgccttgcagcacatccccctttcgccagctggcgtaatagcgaagaggcccgcaccgatcgcccttcccaacagttgcgcagcctgaatggcgaatggacgcgccctgtagcggcgcattaagcgcggcgggtgtggtggttacgcgcagcgtgaccgctacacttgccagcgccctagcgcccgctcctttcgctttcttcccttcctttctcgccacgttcgccggctttccccgtcaagctctaaatcgggggctccctttagggttccgatttagtgctttacggcacctcgaccccaaaaaacttgattagggtgatggttcacgtagtgggccatcgccctgatagacggtttttcgccctttgacgttggagtccacgttctttaatagtggactcttgttccaaactggaacaac

SEQ ID NO: 8453 - DNA, 654 bp, Homo sapiens
gccctatagtgagtcgtattacaattcactggccgtcgttttacaacgtcgtgactgggaaaaccctggcgttacccaacttaatcgccttgcagcacatccccctttcgccagctggcgtaatagcgaagaggcccgcaccgatcgcccttcccaacagttgcgcagcctgaatggcgaatggacgcgccctgtagcggcgcattaagcgcggcgggtgtggtggttacgcgcagcgtgaccgctacacttgccagcgccctagcgcccgctcctttcgctttcttcccttcctttctcgccacgttcgccggctttccccgtcaagctctaaatcgggggctccctttagggttccgatttagtgctttacggcacctcgaccccaaaaaacttgattagggtgatggttcacgtagtgggccatcgccctgatagacggtttttcgccctttgacgttggagtccacgttctttaatagtggactcttgttccaaactggaacaacactcaaccctatctcggtctattcttttgatttataagggattttgccgatttcggcctattggttaaaaaatgagctgatttaacaaaaatttaacgcgaattttaacaaaatattaacgcttacaatttcctgatgcgtattt

SEQ ID NO: 8454 - DNA, 654 bp, Homo sapiens; identical to SEQ ID NO: 8443

SEQ ID NO: 8455 - DNA, 102 bp, Homo sapiens; identical to SEQ ID NO: 5404

SEQ ID NO: 8456 - DNA, 832 bp, Homo sapiens
aagacattaaggaaatgtctgaagaaatggataagaacaaaaacttgttttcccaagcttttccagagaatggtgataatcgagatgttattgaagatactttgggttgtcttttgggcaggttatccttgctagactcagtagtgaatcaacgatgtcatcagatgaaagaaagacttcagcaaatactaaatttccaggtaagtaagatattatcaaaggatacgtgaccattctctaggtattcagtaatagtcagtcacgagtctgtgttacagacctggttgttgtttttctaaatgcgtaatgaagaacaagagcattgtagaaaatgaagggggttgaattaaaggattagaagctaaagattttttgctcctagaaatggaaggttgagaaaaccacccacttcaaactaaggactgaatagaattcaatcaataaaagtcaaatttatggatcattataattataatttttagttactaataccggagtttaaacacattgcgaaagaatatgcagaaaatggccgggcacagtggctcacgcctgtgatcccagcactttgggaggccacggcaggcaaatcatttgaggtcaggagtttgagaccagcttggccaacataatgcaacccatctctactaaaaatacaaaaattagcagggtgtggtggtgcaggcctgtaatcccagctacttggaggctgaggcaggaggatcgcttgaacccgggacgcagaggtagcagtgaactgagattgcaccactgcactccagcctaggtgacagagcaagactccgtctcaaaaaaaaaaaaaaaaaaaaaa

SEQ ID NO: 8457 - DNA, 1165 bp, Homo sapiens
aggtaatattaacggctgctatttgaactattacttttttcttctggctgctattcaaggagctaccctcctgcttttcctcattatttctgtgaaatatgaccatcatcgagaccatcagcgatcaagagccaatggcgtgcccaccagcaggagggcctgaccttcctgaggccatgtgcggtttctgaggctgacatgtcagtaactgactggggtgcactgagaacaggcaagactttaaattcccataaaatgtctgacttcactgaaacttgcatgttgcctggattgatttcttctttccctctatccaaaggagcttggtaagtgccttactgcagcgtgtctcctggcacgctgggccctccgggaggagagctgcagatttcgagtatgtcgcttgtcattcaaggtctctgtgaatcctctagctgggttcccttttttacagaaactcacaaatggagattgcaaagtcttggggaactccacgtgttagttggcatcccagtttcttaaacaaatagtatcacctgcttcccatagccatatctcactgtaaaaaaaaaattaataaactgttacttatatttaagaaagtgaggatttttttttttttaaagataaaagcatggtcagatgctgcaaggattttacataaatgccatatttatggtttccttcctgagaacaatcttgctcttgccatgttctttgatttaggctggtagtaaacacatttcatctgctgcttcaaaaagtacttactttttaaaccatcaacattacttttctttcttaaggcaaggcatgcataagagtcatttgagaccatgtgtcccatctcaagccacagagcaactcacggggtacttcacaccttacctagtcagagtgcttatatatagctttattttggtacgattgagactaaagactgatcatggttgtatgtaaggaaaacattcttttgaacagaaatagtgtaattaaaaataattgaaagtgttaaatgtgaacttgagctgtttgaccagtcacatttttgtattgttactgtacgtgtatctggggcttctccgtttgttaatactttttctgtatttgttgctgtatttttggcataactttattataaaaagcatctcaaatgcgaaatcca

SEQ ID NO: 8458 - DNA, 825 bp, Homo sapiens
gttgctagcaccctcaccgcgtccagactccctcttgagtgcctttctgaaatgctgctcctcggcgctttccccattttacagatgaggaaactgagcacagaggtctcagaggccggattcaagccttatagcttgagctgcatggcccatgatcttatcctctgtgctgtccagcctgcttgggatgcagacgttgcgtgtaaagtgcctccatagtgcccgggactcggttgggtattcagtgtatgctaactctttgtattaaagtatgcagaggtatctgcttgtgtcagtttgaggatgctaaaacctgaacatgtttaagacacattcagaaaccagctcatctcttcctttgatacattgcccagctgtcggccctggtgtgttgggtgtgtcagtgacccatgcagtgaatccagaattcacgatgttcaggctgtgtcatagtgcaatctgtgatgctaaaaagtgcacaggttccatagccaagttacaaagacgctcacctcaggattcgataaagagatagtcaggcgctcttttgttatcttcgcatctgccttcctcaacaatgcagttccaggccaatcataactataaatggaggaagttcccctgaagtagttgaggagaggaacactgcctcagaaaaggcaggaaggaaataacaccagaccggctaacacttgtttctggtggcaagaacacaggaaggtaattttttactttgcccagctgttctggtgtggggggattagcagtcacaggaggctgggttggcaggtttccccttgctcctgatttgcagccttgtcgtgc

SEQ ID NO: 8459 - DNA, 4054 bp, Homo sapiens
aggctgatctcaaactcctgagctcaagtgatctgcctgcctcagcctcccaaagtgctgggattacaggcatgagccaccgcgcccggcctgaaagcattttagaaggctcctgactgaaagaacgggataaagtaagggggtatgggaacagaagatgacagcctggtatatctgggtgacatgcgtaggcagtctgttgtagtggcaattgtcagggctctggagttagactgtcttctttcaaatcttgcaagctgtctgatctcgggcgatttacttaacctctctgagagttctgtaaagtggagaataagaataccaccctacagatgatgaggattcaatgagattgggctggatacaaatcagcttttgttggcatcagcttgagaggagggatggacttgggagtggagagggtggatttgggggagaggacgccacacagtggcaggaactcgcagcaggtgactgagagtggaaggcacaagagagcccagatgctgagccagctcagaatagaaacggtattgatagcagaatgcaaagcagtatcactcgaatgacggatgtttaattggatttctccagggctgactcaccgcctttgatagatgcgattgccctcgtggtgtctatcatgagacttgaaatttttccacctgcacctgcagtctttaggccttgtttcaacaaaatgcagtactgtgtgtaccctccatgcctgccagccttccttccttccttgtgtatttactgcaatgtatcagggacggggtggtgtgctagaaccatgaaggaaaaaggcaaagtcccttaaaggaggtgcagtctgttgaggcagaaacacaaatgcctagatggttctggaatgcctagatgtcaatgggataacaagggggctatggctgcaggaaggaagaggacctgatgtagctgagggcatcaggaagattccagaaggagaagggattagtgaagctgcagagcacttagtttgagacaaagatttctgagctgagggaggagttgggcaaaggcttgagtgcaggagttcaagagaactccttggggccaggctttacacagggatgcacatgggctgtgtaccagtctgttctgacactgctgtaaagatactacccgagactgggtcatttataaaggaaagaagtttaattgactcacagttctgcatggctggggaggcctcaggaaacttgcagtcatggcagacggcgaagggaaagcaagcacgtcttacgtggcggcaggagagagacagcacaagagaaaatgagtgtaggaagtgccacatttaaaaccagcagctctcttgaactcctgcactcaagcgatcctcctgcctcggcctcccttagttctgggataacaggcaggagctgctgtgcccacctggagcttaatctctgttcacatctttaattattctgggccagcttagccaaaggccttaggggtagggttagggacaccaagggccagtcttctatccacttcacagctcgctgggccctccaagggaaggactatgtgtctcattctaggcactggtaagagtctgggggaaaaaaaatcaaaaataacaagtggacgcggtggctcacacctgtaatcccagcactttgggaggccgaggtgggtggatcacttgaggtcaggagttcaagaccagcctcgtcaacatggtgaaaccccgtctctactgaaaatacaaaaattagcagggtatggtggtgtgcccctgtaatcccagctactcaggaggctgaggcacgaggattgcttgaacctgggaggcagaggttgcagtgagctgagattgcaccactgcactccggcctgggcgacagaacgagactccatctcaaaaaaaaaaagaagaagaagaagaagaaatgaactcacaacacttactgtctccttcaaaggagtgaaggatgtgcagagggctaagtgcggtcccagaaactgccaggtagcatcagtgagcaggtgcaggaaatctgttggccaaccttgcatgcactgggcacggcccagttccctgccagagcccagagaagaaaacaagctctggtctcagtcgaagcagtggggtgggaagagccctgctgtctcgccacatggccttggtagctggcctatgtctcaatgtctcttgaaagtgaaaatagatcaggagggctgacacgtagtaggcgctcaagaactgttttctggatgagtcagtgaattggtgaacagcattcacctctctgggcattgatttcttcattcatgtaaggtgagagctcttctagctgcagaaatttctttagagccaggcacagtggctcacccctgttatctcagtactttgggaggccaaggcaggagaatggcttcagcccaggagtttgagaccagcctgagcaacatagtgagacccccatctctaccagacattttttttgagatggagtctcactctgttgcccaggctggagttcagtggtacgatctcagctcactgaaacctccatctcccaggttcaagcaattctcctgcctcggcttcccgagtaactgggatcacaggcatgcaccaccatgcccggctagtttttgtatttttagtagagatggagtttcgccatgttggctaggctggtcttgaactcgtgacctgaattgatccacctgcctcggcctcccgaagtgctgtgactacaggcatgagccaccgtgcctggcccaaaacgtttttttaaaattaccaaggcgtggtggcatgcgcctgtagtcccaactacttggaaggctgaggcaggaggattgctctagccaggaggtcaaggctgcagtgagctatgattacactcctgtaagttcagcaaaatatttctgtaaagggccaagtactaaacaccttaggctctacagagtgtacagtctctgtcgtgattactcacctctgccactgtcgggaaaaacagccacagacaatgctgaaatgaatggacatgacttcgttccaatagcatgttattcacagatgctgaactttgaatttcatataattttcatttatcagaaaatgttatgattttgattttccccaagtatttaaaaatgaaaattaaactattcttagttcgtgagttgtaccaaaacaggcagtgggccagattttgactgtgggctatagtttgccaaccccagctaaagattgaggagcaaacgcatcttccaggaattccttggatcgtcttagacagaaggtcaaagggagagtgcactctctccttggtgtggaaatactgatcaccatgtcttccaaactgggtttcatagacacatctccatgccatgctctcactctagaacctaagatggctcccatgttaaggttctttacaacgcagacacatatgtccctgatatgtcctaattgggcagactcttcattgtcacctaccctggcataccacacccattcctaatatttgtctcagctcccccttctctctgagtgcctggaatcttttcctgacccctccaagttgtgccctcccctgtaagttgcatctcgatttgagcagccttctcccagactatcctgatctctgtcttccttgaactccagtcactggctggagctttcacagtcccagtcgagagcatgggctcagatcagactgcccgagttcaagttcctaccacttactctgtgacgttgaacaagttctttatcctgtctaagagataataataatagtccttacctcatagagttgctgcaagagttcactgagatgatttgtgtaaaatgcttaatccagagcctgacaccaatcatatgaaagcattcaataagtactagcaattatacttctgtattgtttgatgtttttatagtgagaccatatttatgtaatatttgtataattttttaaatagaccaagctgggtgtggtggtatatgcctgtgttcccagctacttgggaggctgaagcaggaggatcccttaagcccaggagttcaagt

SEQ ID NO: 8460 - DNA, 120 bp, Homo sapiens
gcgcctgtagtcccagctactcaggaggctgaggcaggagaattccttgaacccaggaggcggaggttgcagtgagctgagatcacgccactgcactccatcctggcgacagagtgagac

SEQ ID NO: 8461 - DNA, 289 bp, Homo sapiens
ttttttttctttttttttttagatggtgtctcgctctgtcgcccatgctgcagtgcagtggcatgatctcagcgcactgcaagctccacctcccaggttcacgccattctcctgcctcagcctcccaagtagctgggactacaggtgcccgccaccacgcccggctgattttttgtattttcagtagagacagggtttcaccgtgttagccaggatggtctcgatctcctgaccttgtgatccgcccgcctcggcctcccaaagtgctgggattacagacttgagccac

SEQ ID NO: 8462 - DNA, 29053 bp, Homo sapiens
cccttccagaacccaacatcttcctcatcttcagccatggactgcagggctgcctggaggcccagggcgggcaggtcagagtcaccccggcttgcaataccagcctccctgcccagcgctggaagtgggtctcccgaaaccggctattcaacctgggtaccatgcagtgcctgggcacaggctggccaggcaccaacaccacggcctccctgggcatgtatgagtgtgaccgggaagcactgaatcttcgctggcattgtcgtacactgggtgaccagctgtccttgctcctgggggcccgcaccagcaacatatccaagcctggcacccttgagcgtggtgaccagacccgcagtggccagtggcgcatctacggcagcgaggaggacctatgtgctctgccctaccacggtgaggggccgcttgcaggcgggagggtggggtcccctatgtccaggggactggagccatgagggacagattcccagtgacaaggcctttggcctctgtggacccttggcagtcacatgtttaattataataggaagcattttttaataattaagaaaattaacttcaggccaggtgcggtggctcacgcctgtaatcccagcactttgggaggccaaggtgggtggatcacttgaggtcaggagttcaagaccagcctggccaacatggaaaaaccccatctctactaaaaattcaaaaattagccaggtgtggtggagcatgcccatcatagtcccagctacttgggaggctgaggaaggagaatcgcttgaacccaggaggcagaggttgcactgagctgagattgcgccactgcactgtgcagcctgggtgacagagcaagactctgtcccccccccacaaaaaaaaaaagaaaagaaaagaaaaaagaaaaattaacttcaaagcatttaatttacttttgtaaaaattgcaaaatacatgcttgtaaagtcttcaaatagtatacaagtatataacataaaattaaatgaaaattcccttcccccaggcccactctccaggtgaaaccccattgtagccccccatgttgtcttaatgcctgtcttgcatgtggtgaatggggaccagagtcaccatgtgaggggctggcctcttgtggtggacagccccgtcctgggggggcctttcctgggagaccccctgagttccgagatagaactttgtggggacacagagcccatgggctgggtagctgagcagagattccaccgggctcagccctctgtgggtgacttggaggccctcttgcccagctggagtttggatgggattaggggtactagggagccccttcccagccctatgaggtgtgcagcaagacctctctctggttcctgggctgactcaacagcagaagaagccttaaagccactatggggtgccattgcctctcccacctgctgatccctgtgaacacccagcactctgggttttaggggatttctcctgagggtcgaggggcttggcagcctctggtgtccagatgccaagggcctggcccctgtccaccccctgcagaggtctacaccatccagggaaactcccacggaaagccgtgcaccatccccttcaaatatgacaaccagtggttccacggctgcaccagcacgggccgcgaggatggtcacctgtggtgtgccaccacccaggactacggcaaagacgagcgctggggcttctgccccatcaagagtgagagctgttggagccgtgggggcgggggcagtgttcctggagggaggctggtgctgaggggccccggggcccagggtgagatactgccccctcccctacctagtgtagccttttggtgggggagggtctgcactcccgagggaccctggagggggcctgaaggagagggctgtcgtggtggcaggtaacgactgcgagaccttctgggacaaggaccagctgactgacagctgctaccagtttaacttccagtccacgctgtcgtggagggaggcctgggccagctgcgagcagcagggtgcggatctgctgagcatcacggagatccacgagcagacctacatcaacggtgagccggggcctgatgcctgctcgtgcctctggagggcccgggccctttccgcttgtgggttggggagagggcgatggggagcgggggaggctggggctggggatcccctgttcagtgtccctccttgctgtcaggcctcctcactgggtacagctccaccctgtggatcggcttgaatgacttggacacgagcggaggctggcagtggtcggacaactcgcccctcaagtacctcaactgggagagtggtgaggcacaaggttgggggcgcagggcagcataggggccccgcgggctcttggcctcccatggactcctctcctcatgtcctcctgcagaggggcagtgtgggtaggggaagcaccgacctccacccccctccccagactgcgcccccctagcccatgtagggcggcgctgccccaggccgaaggtcttggtgcatatggactgggtgccagcctccactcacctcttcagccacccctgtgggcagcgggcaccagcgcacccagcagcctggacggggaggccggggcggggctggtactggttactgggtagaaggttcaaggcgacgtgcacccaggttagaaagcgcggaggaccccgtggtctggggcggagctggagctgagcaccaggcttcccgaactggctcaggcttccgagggagcagagggaggtaggaggttctgagcagggccccgggagccacggtgtgagcttctctctccgggggtgctggcgccctgccctccccacagaccagccggacaaccccagtgaggagaactgtggagtgatccgcactgagtcctcgggcggctggcagaaccgtgactgcagcatcgcgctgccctatgtgtgcaagaagaagcccaacgccacggccgagcccacccctccaggtgagccagggactgtgccgcagggtggggaggggctcccagggccagggacacagccacagagccgtggcaggcccagcctctcctccggttaccaccacagcacaaggggactctggatcctctgactcttatttcattgttcagttaaagtctgagcaaattggaatatgtcattaattcatttggggaacatgtgctgagatctgtgttaaatgctggcaatacccactgttacctcgtagagaccacagtctgctggaggtgacagacatctcaatgcagttagactatcccaggtcatgagtgattatagaaatatggatcagtgttagaggagcatagagaagaaactgattcagcttctgagagttaaggaggggtttatggaaataacatttgatttgggcctttcaaattgagtctaagtttaaaagatataaagaggtgtgggggaagggcattcctggcagagggaagagcatatgcaaaggtgtggaggcctagaactacactgcagctttaaggggtggtgagtgatggccgggcaccgtggctcacacctataatcccagcactttgggaggccaaggcaggaggattgcttgagctcagtagttcaagaccagcctgggcaacatagcgagaccctgtctctgcaaaatatttttaaaaaattagctgagtgtggtgatgcacgcctgtctactagggaggtcgaggtgggaggattgcttgagcctgcaaggttgaggctgcagtgagcctcgcttgcaccactgcactccaacctgggcaacagagcgagacgagaccctgcctcaaaaaataaataaataaataaataaataaatttaaaaaaaaaaagaaaaaagaaagaaaaagaaaaaaatggatggtgcctgttgcagtttgggtggagtatagattctaaccacttcaagtatggtcatccaaccagcagcacagcatccccagagggcttgttagaaatgcacagtcaggcccgccccagagtaattgaatcagaacctgcatttaacaagatcctcagatgattcatgtgcagacacagtttgggaagccctggcttaaagggcatggtgaagaagaggcaggttgcagccagtctctgcagggtcttggctgctgggccaagtttgggtggggccaggtaggctgtggggagcctttgaagatgtttaagccagggagtgtctggttctcgtttgtgatcatagagacagctttaggggcctcgtggaggagttggggcaatggacagggtctgctttagggattctgccccttactgctgtgtggccctgggcaagcagcttagtctctggggtgcagagtcctcattgcaaatggagaatgaagccaccccccttgcaaggttgttgtgaggaaggctggagatctggcctggcacgaaggagtttttctgtagttggctgtggatgtttactgtggtgtaggttggaggggctgtgcagtttcctgcgaagctgtggggtggtgaggagacttttacaaagaaaatatggcaacacacacacacacacacacacacacacacacacacacacaacactaactacagacagtaaagagtttacagagcaaaacttctgctcctgaccatggaagtcttgccaatgatcgactcaggactggtttttttgtttgtttgtttgagacagggtctcactctgtcacccaggctggagtgtagtggtgcgatcttggctcaccacaacctctgcctcctaggctcaagagattctcgtgcctcagcctcctgagtagctgggattacaggcgggcatcactacttcccggctaacttttgtatttttagtagagacggggtttcaccatgttggccaggctggtcttgaactcctgacctcaggtgatctgcccacctcggcctcccaaagtgctgggattacaggcgtgagccaccgcaccccgcctttttatttttatttttatttatttattttttgaaacagagtctcgctctgtcgcccaggctggagtgcagtggcacaatctccactcactgcaacctccgcctcccaggttcaagcgattctcatctccaggttcaagcgattctcatgctccagcctcccgagtagctgggattataggcatgagtgtgccaccacgcccggctaatttttttgtatttttagagatggggtttcaccatgttgcccaggctggtctcgaactcctgtcttcaagtgattcacccgcctcggcctcccaaagtgctggaattacaggcgtgagccacggctctggcctgattcaggactgctgaccactgctttatctcccattccgtaaggggccaggagcagaagcttgaaacgtcagcaacccgatctagggcacctccacctctagctggagggagccttgggccctagtccagtcctcccacaagcacctttctgaaggaaggggcccgctgggaggcccgggtgtgggcatgcctagcctatctgtggccccttaccaagtcctctgtcctctgggtcttcccggacctgcagacagatgtaaggcctcggatttccgcccctctgcccagcccatatctctctgcacgaggcatattctaggcaggttctgctttcccggtctcatcacttaagtcctgtcatttcgaaggcaggcgccccgtcgtgtccccaaagcatccacatttcccaagctcccttccggtccttgaggcccctcgggtctcagcagccactaaaatccgcttgtctggggcggcagcctcaggtcttagctcattggctaacaagagatgattgacaggtcctgagccagagagcgagcccaccgggctctcagtccgcccagctttgccgggtctccaggagcaggtgtggctggaccactggaatcccagtctgaggccgtgttctagtgggcgcgcagtttcctgcccgactaggcagaatcctgcccgagcatgacactgtgggtggtttggtgaagtcctgttttctcttgccaagaccaagtaagggcttgtttgcctcagctgccctcggatcccaacccctagaaggtgaacctgaaaggcatggaaatcggggcaagggagggcctgggacgggtggatttctcagccctggggttcagggttaggagttaggagcggggaaggagtcccagctgggggatggggccgatctgtagtgactttgagcacctcctaatgttctcggttgcccgtccaccaagacctcagattcctggtgggcttgcctgggccccattagtggctcaaggtcccgtttcccagttttctccctcctgggcttcccagacctgcacagagtgggtgctcaataaatgttatttgagagaataacagtgattccatttactaggcagggggccataagccaagcttgaatctcatagcaggaaaccccatttacagagggagaaactgaggttcatggggctggtttgtcctttctacccatcgtttattgactgattgattgatgcattgattgagataaggtcttgctgtgtcgcccaggctggagtttagtggtgcaatcatggctcactgcagccttgacctccccgggtcaagtgatcctcccacctcagcctcctgagtagcgggaccacaggcgcacatcaccatgcctggctaattttttattttttatagagatggggtctcccctttgttgcccagtctgttcttgaactactgggctcaagcaatcctccagccttagccttccaaagtgctgggattacaggcctgagccaccatgcctggcccacccatcgtattctgagagccacagccagaggaagtgttctgtcctgggtggaatctgccaccacgacttgggtctctgtcccggggctccagcagccctgtaaagttttgtgtttttttagcatttccaagacctgtggtggggaccgggattgatctgggagagtttggagaggaggtgactgggaggccttgcctgtgttgacgtcaacccagtgggttggttcccagactgggcggctcagtccctgagcagcagcctcatgggtctctgcagacaggtgggccaatgtgaaggtggagtgcgagccgagctggcagcccttccagggccactgctaccgcctgcaggccgagaagcgcagctggcaggagtccaagaaggcatgtctacggggcggtggcgacctggtcagcatccacagcatggcggagctggaattcatcaccaagcagatcaagcaaggtgaggagctgcccgcccacgtgtctgggtggagggcagggcctcccactgccccacccatcctgtccaggagcctcagagaatgttccttcctccctactggtggctgaggctgacctctcaatgttttctctcccctcctctcctgctgcacccccagaggtggaggagctgtggatcggcctcaacgatttgaaactgcagatgaattttgagtggtctgacgggagccttgtgagcttcacccactggcacccctttgagcccaacaacttccgggacagtctggaggactgtgtcaccatctggggcccggtgagatctccctctccctatcacagggccacaaaatacacccccaacctccaggtgccaccccagctgaaggacatcctagttactatcagaacctgcctggaacctcttacctctcagcagtccccctcctccccaccaatgccttcccttccatgtgagagactgccggggcttgaatcctacctccacctccacctccaagtagccaagtcaccttgggcaagttactagagggtcactggggagatcagaggagttaattctcgtgaaaccttaggcacagtgcctggcgcattcttggtctcctcccagctgcccttccctgccagaaggtggcatcagaacccacattatgtgcagatactttgcaagcagggctgcactctgccagccctcgcccccagtgctctacccagtccagggtcctgtcatctcaagagattgttgggttttatgacaatttgccatggtttgggcttagatgtggtgtaagtgaaggaattgatggagggcttcaagcagagatgaaagacccttaaaaaagggacaaagccagctgagtgtggtggctcatgcctataatcccagcacattgggaggctgaggcaggcggatcacttgaggtgaggagttcgagaccagcctggccaacatggtgaaaccccatctctactaaaaatacaaaaattagccaggcgtggtggcagatgcctgtaatcccagctactccagaggctgaggcaagagaatcgcttgaacctggaaggcagaggctgcagtgagctgagattgcaccactgcactccagcctgggtgacagagcaagaccctgtctcaaaaaaaaaaaaaataaaataaaaaggagaaagccgtagggacacagaccacccttcctagggacagacaggatgttctgctgtcacatactgcaaacagtgctgtggactgtagtggcagtcatttgccttaggggatgctatttaagaattttaaaacaattatgtattgagtatctaccatgtgccagtcatttttctgggtgctaggatacacaaacacgcctgccctcagaatggagcttagagacagacatactgctggctgggggcctgtggatactggggagggcgaagacagaagcaggggccgaggactaaattcctcctcagcttcatcagctgagattctggtctgggcacactggcctctgcacactctggccctgcaggcactagctagacgccttgggaatccaagctgtctatcctgccatcagttactctaacaatcttagccagtttgtttttgatatttataaaacgagttatcaataatgtaaaaggacgcctttcctttttttttttttttttgagatggagtttcaccctgtcgcccaggctggagtgcaatggcacgatcttggctcactggaacctctgcctcccaggttcaagcgattcttctgcctgagcctcccaaatagctgggattacaggcatgcaccaccacaaccggctaactttttgtattttcagtagagatggggtttcaccatgttggccaggctggtcttgaactcttgacctcaagtgatccgcccacctcggcctcccaaaatgctgggattacaggcatgagccaccgcgccgggccaggatgcctttcccatttagacaatgcttgttaagtttcaaggcgtttgcacatgaactgcttgtgctctcatccaccctgtgaggcttatgggttcatcccgccttccccattgcacagctgggacacagacatgtcagaatcacacagtaagtcagagacagggccagctctaggaaccagattccaagaaggatttgggagatttatggggaggtgggggttgagattcttcctcaccctgtgtccgtaggaaggccgctggaacgacagtccctgtaaccagtccttgccatccatctgcaagaaggcaggccagctgagccagggggccgccgaggaggaccatggctgccggaaggtgagggtgtttctggagctgccctgagtggggccacctgtcagaggggctaccaggggagggagaggtggatgaactcctgctgcctcgcatggcatcgccctctcgtcggcacccccttccctgagctctccaaactgctcctttattgaaggagtgatactggatgggatgggacgggtgggcgctgttgggaggaagcagagctccccacccccagcccagtcctgagtccctccccatgggggaagccacttcctcgagacagcagagaacagggaggtgggggctggtctacccccgagtgccccctcagagtccagcctagtcatgtcaagcagtggctgccgaagtgaagtgtggcccctgtgcaccgccagtcctgacttccccctcctctgccgtctgacacagggcgtgtgctggtctgtctcccctggaggagtgaggccactcagggtggggctgcaccttccccctccttgtgttcccagccccagtgggcttctagaggatgtttagggaggttgagggggggggtgtcaaggaatgaaagctgtgtaagtgagtggggggtgagtgactgagggtgtgagggggtgacagaccctctcctcctccagggagtggagcaggggtgcaaatgctgtgatgggtgcggggagcttgcttctaaaagacactgcttggcccttggccccccccagcagccccttgcagccaggctggctcctcactctgttttcctttggattaagcccctaccacacccacctggaccccaaagcctcccccagaaaatgagcaggaaacactaacaggcatggccccatgggcgaggaagcagaggggagagcagagcccagctgcggagtctgtggactggcaaggacagtgcctggcccaggggctgtgtcatggctgcgaagaggtgaagggaggagtagagaggaattaccaacttctctggcaccaaggccagcctggaatttgtgtggggagtgttgagggtccatggttaacagcccaggatcaccaggggtcttggcacagcccctgccagcagatgaggcccccaccacacataccacatctgcttctcttctgccttggctcctgccagcctcgcctgccagggtctcgtctctgagcccctcctgccatccccgggccaggagcatcctgcgccgactccagctttgccaggccctcgaggactgcccatcccctctccatcctggcagctctccccagcctttagctgtggtttcccagccaacagtaatttccccactgtgtctcttggtttaaatgcccaagagaggagcctgaagggccattcatcttcccgagccgggtcactggccggtcgctggtggcctgccaatcagccacgctggggctgggcctccaccccagcttccacagctgtgggtgatggtggagggggaatgtggagaaacgaggtgcagaacacagcccagtactcaaaccagtcccctccgtcctgagcacgttcagtgatgtccctgatggcatctcccaccacaggatttatgggtgagggtggagagtcatcttccctacagacacccctcttctgtccactcttgagccagggttggacgtggcacagcccatcctgctactggctgggagaagaccaagtgacctacagtgaggcccggcgcctgtgcactgaccatggctctcagctggtcaccatcaccaacaggtacagcaggggcgggtgccctgactagcccttgcccatgtctgggcctattgtggtcccttcagcaaacagggtagcatctgccatcatgcccagagggacctggagtcctgtgaacctcagtgggctccagggcattttaaaatcttgtcagaagaatgactctcacttgttaagtgaccccagtgtagggcagggcccgggcaggcacaggtgtgggctggatacttgagaaagagaggccttggttgtgtctgattttctctactttcttctcagcaaagcaaggggtgcagagaatagaaggggcagctgggggttccataaatcagctgcagggctcccaggcgtccctgctttcttgagcaagttattggtcgggtgcagcacccgagctcccacggtagggcgtctggcctgtgactgggggattgggaagcagggagatccctgccctgaccagcctgtctcctgaaggttcgagcaggccttcgtcagcagcctcatctacaactgggagggcgagtacttctggacggccctgcaggacctcaacagcaccggctccttcttctggctcagtggggatgaagtcatgtacacccactggaaccgggaccagcccggtgagccccttatttgacttgccttggtgaagcgaggagggaggccagggtggactggccctgccagcaccgagccccagggcttccccataaacagatcattggtgcactgtggtgtagtgtctatgagcacaagctctgaaaccaaactgcctggctccgatcatgactctgccatcttttagctgtgcatcctctgagcctcagttttctcatctgtccagtgggaataatgatcctttcctcatagggatgacatgagtcttaaatatgtgtaaagtgctaatatgtgtaaagagttaatgtgtgtaaagtgtctagattacttctctatctgggctcacaaaaaagaaacaaataatctcttctctatctggactcatttaaaaaatgtgttcagaatactgagcgcaatacaagtgcttgttattactattattaccatttcacattcattatctttctaaccccttcaataacctgatgaggtagatgatgaagcaggctcggtgaggttaagcagcttgcctgagccctcacagtgggtgaacccagagccagggctctgcctccattcccttcctccctcctggctccaaccccagagagcatgtctctgaagaggtggccaagctggttcccagtgtgagggccgtgctagtgccctgccgggatgtgagggaggaccagactatgaatccttctcagagcctgggtctcccttccctctccttcagggtacagccgtgggggctgcgtggcgctggccactggcagcgccatggggctgtgggaggtgaagaactgtacctcgttccgggcccgctacatctgccggcagagcctgggcactccagtgacgccggagctgccggggccagatcccacgcccagcctcactggctcctgtccccagggctgggcctcggacaccaaactccggtattgctataaggtagggcagcctgttggccgggtagggggcagggggaggacaggagcaaagagacagtttggatggaggtcccagtgggaccagccacaatccagagacacaccaggctgcagacgggtgatttctggtgagacttgtccatggaatctggaggcctggtgctcagtaatcatttgaggaattgagggaaccacagatcattgatttcagaggttcccaaatgttggggccagcctagctgttcttcagaattgcttggggaacctgataaaaataaaatcttggccgggcgcagtggctcacacctgtaatcccagcactttgggaggtcaaggcgggtggatcacgaggtcaggagatcgagaccatcctggctaacatggtgaaaccccatctctactaaaatacaaaaaattagccaggtgtggtggcaggcgcctgttgtcccagctactcgggaggctgaggcaggagaatggcatgaacccaggaggcggagcttgcagtgagccgagatcgtgccactgcacgccagcctgggtgacagagcgagactccgtctcaaaaataaataaataaataaataaagataaaaatctaggctgtcacaatggagatttagattcattaggtctggattgggcctggtaatctgtatttttaatcacgctaggtttgggagccactggcagagtccgaggtcttttattatgcacagaaactgaagtctagggagaagaagggacttacccacgttaagctgtggctctgctgggattagagcccagatctccctgctggtcaggggatggggctcaggggccctctccagaaggtgactgtgccagctcccctccccagacctctgcagatgaacaggattgtccttagctagccttagccccctgtccagtaaggctccaggcccctcctctgccatggtgggaaaggcagtaggtgccccctgaggggtgggccagtggggacagcttagacagctggactctgcccctgcaggtgttcagctcagagcggctgcaggacaagaagagctgggtccaggcccagggggcctgccaggagctgggggcccagctgctgagcctggccagctacgaggaggagcactttgtggccaacatgctcaacaagatcttcgggtactgagccgggctgaggcgtgttaggagggcacccgcacacgtgtaggagcaggcatggccgacagacccttggttttgttgggcgagcagggggatggcagaatgtgggtgaccccagggaggcctgcatctgctgctggtgccaggaccatcttgtcctcactcaagtagccatggtgccctggcatcttgggagaacaggctggtgtgatccatgcactcataggagactgtgttttgctcaccatcatccccccagcaatgctccaacagacccacaaacttacatatgtaccccccaccccattgcaaaatctcccacatgctggtcctggcaagtgtttcccctcaccttacaccatcctacaatgacccacactcctcaatccacagtttttcctgagagataggaggagaaaggccgcagctatgaggatttgcccatgggcctccctctgagacaccacctctgtcctgggctctgagcattagcacgtggaatcccctagcactgggaaaatcgagatggatctgggcttcctgatagcttaattgaagggatctctcctctcagcaaacattgaaattacattatttgtctcataattacaatagctcatggtcatcacttctcaccacgtaccaggcactgtgctaaacatatagtcctcactcaagcctcccgacaaccctatggagcagacgttaacccctgacccttgtgggttgatagagaggttatttgcccaagttcatgggtgaacggatacttgaatccaggtttatttaactccagagccgtagatccctgccacctcctcatctgaacttcctaaactccgtaaagtaaaagcctgcagaatcttgctggacagggcacccccacccaaaaggaacccaaacaaaggggaggggccactgccccttgagtggatggcttggtccagctctccccagctctgtcttgtggggagaactttaccgaagtgacctcaacgctgtatcgatgggtcaatgtgaagcccagatggagaggccccaggccctgggggctgccccggtcacagctgcaagggacagggggcacgtttgggttcctgcccctctcacttcccatctcttccgtccccactcctgggttgtgctgaagtgaatcagaacccgagatccacgagcagcactggttctggatcggcctgaaccgtcgggatcccagagggggtcagagttggcgctggagcgacggcgtaggggtgagggggcctggggtacttgggactgcgaggccgggagcttggtgggcggggcctgtttggggcggggcctggaggtgggcgggttttcttgagggccgggcccccagtcggagccggcttcaggaaagcaggtccgagaggggtcacccggcccccggtgagaattcgcagctcaggccaggcctcttgttcacctgttccgggcatgggggcggcctgcaccttgcgcctcacgttcctcttccctccacccgcctcctccagttctcttaccacaatttcgaccggagccggcacgacgacgacgacatccgaggctgtgcggtgctggacctggcctccctgcagtgggtggccatgcagtgcgacacacagctggactggatctgcaagatccccagaggttggccggagtggcgctgggggacgcgggatggagcgaagggtggcggggccaggaattccagggagggtctcctttcctcacaacgtctttgtccttgttcccctaggtacggacgtgcgggagcccgacgacagccctcaaggtgagcaccccccagcccatcccgctacccatcgcgtgggagagggcgtcaactctggggtaagtcccgagaggcctgaatgaaatggaggggatgaggagttccggtcgagagaagggggacggggttggctcggacggaggcagccacagccctgtttgcttccgtgtgggaggcgaggcaagcctggggcctggggcctggcacggtgcctgcctgggtccggtgtgcctgcaggctcgcctgctgccgcctggctctgccccggccctgccgcgcccgcctccggggcctggcgtgcagcctctgcctggccgccgctcccacgcccgcgctgctcctgcaggccgacgggaatggctgcgcttccaggaggccgagtacaagttctttgagcaccactccacgtgggcgcaggcgcagcgcatctgcacgtggttccaggccgagctgacctccgtgcacagccaggcggagctagacttcctgagccacaacttgcagaaggtgggcattggattgagcagggggctgcaggctgggggagggcaggcccgggatgagggcagggggctgcctacccacacctgcccgcctggcttctccagttctcccgggcccaggagcagcactggtggatcggcctgcacacctctgagagcgatgggcgcttcaggtaggaacccaggcaggcagcagatgtggaagggggctggctgtccacacacggagcacagaggcagacttgcatttgaatccagccctgccccttccttgctggctgtgtggccttgagcaagatacttaacctttctgggccttggttttctcatctgaaaatgggaatatgaggcctgcctggtaagatttttgtgaagattagaaataacatatgcgaagtgcttacgcagcatccagcacattagttactaaataatggcagctcctgttacgtctggtgtcattcatcatgactaaggccctctcggggaagtgggcagaacatatgatgatccgggggcctctttgtatttggtgcctacttaccatgtactggggggcttgaggcaggaaggaccaggagcacctgggactcagaatttgagcttgtctttttgcccttgggcttcctgccctggagtcctcaggcttcttttctggagcagcaagtgtccagggacagctggggccttatctagaggcaccaggtccttgggtctttgactgccctgagctcagtagctccacccctcagcctacagccactaaaccccagaacctgggcccttccctgcccccattcctgcggccttcattgctgcatccggtggaggcccagctgggggccggtgctggagttacctctgctccatgccattgcagatggacagatggttccattataaacttcatctcctgggcaccaggcaaacctcggcctgtcggcaaggacaagaagtgcgtgtacatgacagccagccgaggtgagggcaaggtgggggcagagtgcgcagtcagctgtgcagagggttgatgctgggcgagcctgggcagaagtcatcagtctgttctcattctctttgttcccacaacccaataaaggctagactcagcgaggggtggacctgtctccatggtccagaagacttgaattcggagctggacacaggccctgagcctctgcccagactcctctcagggcatgaggctgagtgtgctgccagccatgccctgccctgctctgccctgggggtgactgccctcccctcccctttccgcagaggactggggggaccagaggtgcctgacagccttgccctacatctgcaagcgcagcaacgtcaccaaagaaacgcagcccccagacctgccaactacagccctggggggctgcccctctgactggatccagttcctcaacaaggtaggaggtggcaatggggcacccaagggagtcaggggagaggacgtgaacagggaaaggctgagcctcaggagtcctggccttttggcagcaccaaactcatggcctcttgcctgtacccaccaacttctctttcacctggctccagtaccagggccagactccttggaaaatgactcactgtagtagcaccttccaatcctccgggaagcacggttgtccaaataatttggtgagtgttctagatcagtgattgccaaagattttttttttttttttttgagaaggagtttcactcttgtcacccaggctggagtgcagtggcgcgatctcggctcactgcaacctctgcttcctgggttcaaccaattctcttgcctcagcctcccgagtagctgggattacaggcacctgccaccacccctggctaatttttgtatttttagtagagatggggtttcaccatgttggccaggctagtctcgaacccctgaactcaggtgatcacctgccttggcctcccaaagtgctgggattacagatgtgagccaccgcgcccggcctgattgccggcctgattatcaaagattttgataatgaactcctattagtaaaacaaaatattgagcttacatgaccaaactatgtgtgtgtacatttaacttatatatgtatatgtgtgtgtaaataaaacctacttccatactaatatgactaatattatatatagtaaaatatgtataagaacaaaagagtataaaacattagctaaagatttttaaatacttttaagtttaaaacatttttttggctgcgcgtggtgggtcatgcctgtaatcccagccctttgggaggctgaggcgggtgaatcacctgagattaggagttcgagaccagcctgaccaacatggagaaaccccatctctactaaaaatacaaaattagctgagtgtggtggcacatgcctgtaatcccagctactcgggaggatgaggcaggagaattgcttgaatcctggaggcggaagttgcggtgagtcaagatcgtgccattgcactccagcctgggcaacaaaagcgaaactccgtctcaaaaaaataaacaaagaaaaaaaaaacaacaaaaaaaacaccttttttttttttttttttttttactagtggtatgaaaacatttttttgtgctcactcaaaagtgattaattggctgggagaggtggctcacacctgtaatcccagcactttgggaggctgaggcaggaggatgacttgagcccaggagttcgagaccagtctggacaacatggagagaccatgtctctacaaaaaataggaaaattaaccaggtgtgatggtgcacacttgtagttccagctacccaggaggtgggaagtgggaggatctcctgaacccaggaggtagaggcttcaatgagccatggtcatgccactgtataccaccctgggtaatggagtgagaccctttctccaaaaaaaaaaaagatcaattataataattattgtttaatatgctcactttggcagcacatgtacaaaaagtgaaacaatacagagaagattagcatggccctgcacaaggatgctatgcaaattcctgaagggtccatattttgcgtagttcatgaaagttgaaggttgttcaacaaaaaaattgtctaaataattttaataagagcaatgtgattacatgtacttcacgtttttaaaaaattttagtctgacactttatgactcatgactcacaggtctaacgtgttgaaaatcaaagttatttcaaaacatgcatttcatggtggctatagattaaatatgcctcacaaagacaaatagattgaagtgaaaaaagttcatccatcatttctaaataattctccccatttttagtccttctaccaattaaacaaacatttttgtttaaaaattggctagtaggctgggacgctgagcactgggaggatcacttgaagccaggagttcgagaccagcctgggcaatgtagcaagaccctatctagaaaattctttttccaagtgttttgagtgtgcaggtaggaaagtttggggcactgacattaatcactatggatgcatttctcaacacgtttttacaacaccccctccatagtgtgagtttcttccccacagtcgttatttttccatgcacaggctgatttattagacctgattagtccttcattgtttttacctggcgattgacaacgagttcataccaggaagagaaggttgtcattttccttgttatgtgccagggtaattggcattaatctcaagccatggcttctttgcaggacattttaagaacacttagccctgttgtgaagattagattagttaacactgaataatataatccacaaatccttgtcatacacaggaaggcagccagcctcttagtgtcatggatctcctgccctcctcagaatattcaaaagaacattacacggccaggcgctgtggctcatgcctataatcccagcactttgggaggccgaggcgggtggatcacctgagatcaggagtttgagaccaaccagggcaacatcgcaaaaccctgtctctactaaaaatacaaaaaattatctgggcatggtggtggacgcctgtaatctcacctactcgggaggctgaggcagcagaatcgcttgaacctgggaggcagaggttgcagtgagctgagatcgagccactgcactccagcctgggcgagagattgagactctctctcaaaacaaaacaaaacaaaaaccacaaaaaaaaaaattacacctcttctaccttaaaaaattaaggcatgtatattattaaaactttggaaaatacagaagagaaaccaaaactcacccaacactctctagagatcacagctatcaatatttgttattctccttcctgcctttttccatggaattgagctcatactaaataatataatttcctacccaactcttctttctctgtatcatattttgagcatctctcatgttataaagtttttccaaaaacttgttctttttccatccactttttaaacagaatgtattttatatatgtaataggtcccattcttaatcatcattgtcaagataccagttactctcctgccctgtggaaagttctgtttgtttttgtttttgagacagggtcttgctctgtctcaaaaactgctggagtatggtggtaccatcatggcttacttactgcagcctcgacctcctaggcttaagtgatcctcctgcctcagcctcctgagtagctggcactacaggcttatgccaccatgcccagctaatttttctattttttttgtagaaatggggttttgccatgttgtccaggctggttttgaacttctgggctcaagcgatcctcctgccttggccttccaaagggcagggattacaggtgtgcgccactgtgcctggcctgtggaaagctctggaagtatgctagggtgttcactccttcactgcctgccctcacacatcttgctttactagttctgtgcccttctttgtgtccctatagcatttggatgtaggtaaagcatttatggcagctgtccccaacctttttggcaccagggactggtttcttggaagacaatttttccatgtactaggggaggggagggatggttttgggatgaaactgttccacctcagatcatcaggcattagattctcataaggagcacgcaacctagatcccttgcatgtgcaattcacggtagggttcgcactcctatgagaatcttggctgggcgcggtggctcagcctataatcccagcactttgggaggcctaggtgggcagattacctgaggtcaggagtttgaaaccagcctggccaacatggtgaaaccctgtctctactaaaaatacaaaaattagccaggtgtggtggtgggcgcctgtaatcccagctactcgggaggctgaggcaggagaatagcttgaacctgggaggcggaggttgcagtgagctgagattgcgccattgcactccagcctgggcaacaaagcaagactccatctcaacaacaacaacaacaacaacaacaacaaagaatctaatgccctgctgatccaacaggaggtggagctcaggctgtaatgccccttcgcccctctgctcacctcctaagaggccggggacccctggtttgtgggacagcctcttccactagctttaagctcctggagggcagggccactagcacctgccataccccttaatacacttgcacgtggcagggatgccctcagtgtcggctggactgagctgaataccctccccctttagctgtcacttcttgctggtactggtgtgaccttgctgcttccaagtttatgatgaattctactcatgatttaagttgggcctcagcatggctctgaaactacttctgtgaaaccaaatccttgaactttgtgacagacctccaaaaatctgcattatttctgggcttacaattttttaccccaaatctgccatctgcatcagtaaggatggtgctggagctaattattaatagtcacagctctcactggttaagtgcctactgtgtcatgtactgttatctttaatccttaaaatgatccccaaagacaggctttgtattaccactttacagaagagtaaattgaggccataaggttgtcagagctggaatctgacatctcccccttacctgaatcccacccctgtctttatgactccaaagcttccctacaccctttctttttttttcttttgagacagagtttcgctcttgttgcccaggctggagtgtaatggcgtgatctcagctcactgcaacctccgcctcctgggttcaagcgattctcctgcctcagcctcccaagtagctgggattacaggcatgtgccaccacgcctggctaattttatatttttagtagagatggggtttctccatgttggtcaggctggtctcgaactccagacctcaggtgatccacccgccttggcctcccaaagtgctgggattacaggtgtgagccaccgtgcctggccaacaccctttattttccatcacactgcctctgagcagaaaatcattagatattcattttcctaagaaagagtcttcacttgatgagagatttcctacccagggcttttgtttgtttgtttgtttggaaaccttatagagctaatgaaagtgggaaaagagaaatggaaaattacagagttagaagctgctgctaatagatcattcaacaatagagataaaagtgtcctagggctgggcgcggtgaaaccccgtctctactaaaaatacaaaaaattagctgggcatggtggtgggcgcctgcagtcccagctactggggaggctgaggcaggagaatggtgtgaacccaggaggtggagcttgcagtgagccgagatggcgccactgcactccagcctgggagacagagcgagactctgtcttgaaaaaaaaaaaagtgtcctagagatgatcatgtaagttcaaagggcaagataatggatgtcagacaacattcggaagggtgtttagcagaaagcaagatagatccttgtccccatcttcctagtgcttggcctaggcactgttgtcatagcctttgacggcccaaagaaatcctcccatttgaagatcccctggagtgtgggcaggtgtgtgtgaatctgcagtgccaagctgggaggtgctggaggctgccaagcagacccagctgtcctggttctcagatactgttctctcccggccctcaaaggccccccaggacctgctgctgaggggcgcacagtggcctttctgggtttgtggatggggtggtggggctggccattacatccccacctctgccccacagtgttttcaggtccagggccaggaaccccagagccgggtgaagtggtcagaggcacagttctcctgtgaacagcaagaggcccagctggtcaccatcacaaaccccttagagcaaggtagggccagcctatggggagcccccagtatcctctgacactgtccccccaaatagctatagcagagtcactcacaactgtcttctggggaccatagcattcatcacagccagcctgcccaatgtgacctttgacctttggattggcctccatgcctcgcagagggacttccagtgggtggagcaggagcctttgatgtatgccaactgggcacctggggagccctctggccctagccctgctcccagtggcaacaaaccggtgaggatgccctccctgttcccctccgcaccgcgctgccctaagcctgtggggctgcctttgccccagcatctcttgccccagggtctcccttcttccagcctctttgctcacattgcagccttctggggacagtagcacagggaggcagctgctggggctcccctgagcagctccctccccccagaccagctgtgcggtggtcctgcacagcccctcagcccacttcactggccgctgggacgatcggagctgcacggaggagacccatggcttcatctgccagaagggcacgggtatgtgtcaccagtcacctgggaaaccccagtggggccctggcaccgggctggatgctgggaccatgccaggaggaaggaatcatggtccctggcagagcagggctctgcttgggaagcagatgggcagaaaggcaaggtgccaataagatggaaaagcagtagcacccacaggtctcaggaggaagatttgggggtatggagggctcgttgggtcggggggagagctagacgctgggctgcatgaagtgctggcacgtgtggcgtcaaggaccctgaggttccaggtccaagacacctccagctccatgcgtaggtggcctctgcgccgggttccttgggtaggaggaggtcaaggccctcacctccctgtccatttgttagcaaacatgtattattaataacaacaggactgacacctaccaagccttggtctgggccaagcgccgagtctggtggagacctggtctttgcctggtgtgtggccttctcctggccttgtgcctgggaacggggtgagggaagcagagcccagcctgaaccctgaccccttccctgtagacccctccctgagcccgtccccagcagcgctgccccccgccccgggcactgagctctcctacctcaacggcaccttccggctgcttcagaagccgctgcgctggcacgatgccctcctgctgtgtgagagccacaatgccagcctggcctacgtgcccgacccctacacccaggccttcctcacgcaggctgcccgagggctgcgcacgccgctctggattgggctggctggcgaggaggtgggctcccgacacttttgccctgggcctcagccttgcccgggttcccctccctgccccttcctgcccccgccttatccgcaccctatcctgactattcccttcctcccaccccatggccccccatgcccagggctctcggcggtactcctgggtctcagaggagccgctgaactacgtgggctggcaggacggggagccgcagcagccggggggctgtacctacgtagatgtggacggggcctggcgcaccaccagctgtgacaccaagctgcagggggctgtgtgtggggttagcagtggtgagtgcccacctgccagggcgggggcatgggcaaggtgtcggtggccccggggagggtgctgagccacttcttaatcctgtacccccacagggccccctcctccccgaagaataagctaccatggcagctgtccccagggactggcagactccgcgtggattcccttccgggagcactgctattctttccacatggagctgctgctgggccacaaggaggcgcgacagcgctgccagagaggtgggtgaccaggccagagcccacacatggcgggcaggtggcacctcctctcgtgggcactcagacccatgagtacatccccacactgctctctacccataggcagcacttacacaagatgccctcgtgctctcacatgtggagaccatacatgacactatatgtgcatatgctgcccccccacacacttgcacatgtgcacacacacacacatgaatccacagactccacaccatcctctactcaggctgcagagaagagggctggagcagctctgggggactctgcccccccggagacccatccgccctgacgtgggccttctttgcatccagcgggtggggccgtcctgtctatcctggatgagatggagaatgtgtttgtctgggagcacctgcagagctatgagggccagagtcggggcgcctggctgggcatgaacttcaaccccaaaggtgggtgccctgtgtgtggggtggagaggtcaagcctcaggctgtaaggggctgccctccactttgccctgagccttgtcctggggcttgtcgggggacagggagtcggttctagaacacgcctgctctcctccacctactcctgccccaccttgtccctgctccctcagtgccttctttcctgcaggaggcactctggtctggcaggacaacacagctgtgaactactccaactgggggcccccgggcttgggccccagcatgctgagccacaacagctgctactggattcagagcaacagcgggctatggcgccccggcgcttgcaccaacatcaccatgggtgtcgtctgcaagcttcctcgtggtgagcgccgggcaggcccacgctcagcctccttccaccccgtgccgctggtcctgggctggggctgggggctgcttcacaactgcagggggcacagccgatgggaaggcctgaacagaacggactgcgggcagctgggacccccgggataaattagtcagtgggatggactggacctgaaacttatcatccaaactagaccacaaggctcgggggtcagcaaccccctgtcactttgtagtggtcaagggcatggacagagttcaagtcctggccatgtcacttatcagtggtgtgaccttgggcagagtctgtggcctcagtttcctcgtatgtaaaatgggaataatagtagtcccagactgatgtggtggctcatgcctgtaatcccagcactttgggaggctgaggtgggcggatcacttgaggtcaggggttcaagaccagcctggccaacatggtgaaaccccgtctctaccaaaaagtacaaaaattagctgggcgtggtagcacatgcctgtagtcccagctacttaggaggctgaggcatgtgaattgcttcaaccgtggaggtggaggctgcagtgagccgagatcgcaccactgcattccagcctgggcaacacagcaagaccctgtctccaaaaaaaaaaaaaaaaaaaaaaagtcccgacctcctagagtgctagtgaagctagtaaagatgaggtgagttagggaaggggctgacacccaggcctcccacgagggctgggctgagacctagctgagtgcagcatggcgttttccctttctgggggaacctgaagtcttgtctcttgggcctgtgcccccacagtaaccagaggtaggatgggagggggaactagagcctctttctccccagacctcccggcccaggcctgtgtgctttgtatgtttacttaagtgattattacgatgatcactgctattattaactggccccctcctcttgcccacagctgagcagagcagcttctccccatcaggtgagtgaaaggcaatgcccccaggtgggcaggcaggaagcactgctgggcctaacgcccacttggcctttcacgcccactcgccttggcagcgcttccagagaacccagcggccctggtggtggtgctgatggcggtgctgctgctcctggccttgctgaccgcagccctcatcctttaccggaggcgccagagcatcgagcgcggggcctttgagggtgcccgctacagccgcagcagctccagccccaccgaggccactgagaagaacatcctggtgtcagacatggaaatgaatgagcaacaagaatagagccaggcgcgtgggcagggccagggcgggaggagctggggagctggggccctgggtcagtctggccccccaccagctgcctgtccagttggcctatggaagggtgcccttgggagtcgctgttgggagccggagctgggcagagcctgggctggtggggtgccaccctcccacaagggctgggctgagacccagctgagtgcagcgtggcgtttccctttctgggggggcctgaggtcttgtcacctggtcctgtgcccccacaggaaccagaggtaggatgggagggggaacgagagcctctttctccccagagcccccggcccaggcctgttgatccgcgccccaggacccccttctttgcagagcccgaggagcctcccctgtcccctcgggcagatctgttgtgtctctcttcccacctggcagcctcagctctgtgcccctcaccctgctccctctcgccccttctctcccaccccttccttctgagccgggccctggggattggggagccctcttgttcctgatgagggtcagctgagggggctgagcatccatcactcctgtgcctgctggggtggctgtggggcgtggcaggaggggcctaggtgggttgggcctgagaaccagggcacgggtgtggtgtctgctgggctggagataagactggggagagacaccccaacctcccagggtgggagctgggccgggctgggatgtcatctcctgccgggcgggggagggctctgcccctggaagagtcccctgtggggaccaaaataagttccctaacatctccagctcctggctctggtttggagcaaggggaagggttgccagagtcctgggggccccagaggagcaggagtctgggagggcccagagttcaccctctagtggatccaggaggagcagcacccgagccctggagtggcccagtacccttccaagaggccacagtcccagccaggacaaagtatgcggcccatcctggtgcgacagcgtgggacaatgtgaacatggactcgaagacatggccctttctctgtagttgattttttaaatgtgccattattgtttttaaaaaaaaaggaaaaaagaaaagcaaacaaataaaacacctttaagaggcttgaaagagaaggtt

SEQ ID NO: 8463 - DNA, 333 bp, Homo sapiens
ccgggtggagttgggtttgctttttttttttttttttttgagacggagtctcgctctgtcgcccaggctggagtgcagtggcgggatctcggctcactgcaagctccgcctcccgggttcacgccattctcctgcctcagcctcccaagtagctgggactacaggcgcccgccactacgcccggctaattttttgtatttttagtagagacggggtttcaccgttttagccgggatggtctcgatctcctgacctcgtgatccgcccgcctcggcctcccaaagtgctgggattacaggcgtgagccaccgcgcccggcctgggtttgctttt

SEQ ID NO: 8464 - DNA, 5506 bp, Homo sapiens
gcctgccctgagtgtcctaagcgcttcatgaggagtgaccacctgtcaaaacatatcaagacccaccagaataagaagggaggcccaggtgtagctctgagtgtgggcactttgcccctggacagtggggcaggttcagaaggcagtggcactgccactccttcagcccttattaccaccaatatggtagccatggaggccatctgtccagagggcattgcccgtcttgccaacagtggcatcaacgtcatgcaggtggcagatctgcagtccattaatatcagtggcaatggcttctgagatcaggcacccggggccagagacatatgggccataccccttaaccccgggatgcaaggtagcatgggtccaagagacatggaagagagagccatgaagcattaaaatgcatggtgttgagaagaatcaggagagggatacaagagaggagatggggtcccggcacccatctgtatcatcagtgcctctttgaaggtgggaaacattagtgaaaattctgttggtgccacgctttgatgagcatttgtttgaccccagtttcttcttacacttcttaccccagcctacccttcctgcatttctcttctcagctcttccatgatggattcccccccctttcctaaagccatcatgccttgataaatatatatgatcattgaaatactttttaacaaaaaacagattctatattattatatatatatatatatatataaagatatatagagatgcattcacaggggttggctgggaggaggaagaccattctgtgaccaaaataccttggtcattttttttatattgccttatttccctatggctgagccttgttgtgacacatcaagcttttctgtagatgttgtcttggcttcccaccagcttaagcgttcatatgctctgcttttagttcatatatacatacataatgtttttcctttcttaattttgtctttttgtttgggatcagcttcttgcactccttccctaactcaactgttgccgtctcatcttctctcatctgatcacttcatgttttgtttttgttactgcctggatgaggcacttctgtcaattttttcaggaccttagttccagcagcagaatggaaaaatccttgaagcccaggctgatgcttgaagtaactgtggagggagtgttcaaaatactactgacgcaggcaccttcttggcgctggagagtcaaaggcatctcccttcattagctgctctgagcatcaagaattagaagtctttcagtggaattgtacaagagtccctttgaagataataatcttggctcagtttgtataaactgtcaaattttcaaataataggtagggggctttcactaggaaaatcatgtgctcagaagaggaaatgactcgtagtcaggttcaggagttagtggagtatttggactttggtactgctgtcttccaaggtagctctaagttttgatgtgtgggcttctgagtttatattctgaaaggaaatacacttcttttgaacatccccactaggttcttttccattgtcaataaggagcatcagccagtgaatctgtttcaggtttccattctgcagaactcctccaaagcatgtgctagtggcaagacagtggttcttatgatgttttcccttaacttttccttgtatgttcttgggtggttcctaagggaaagggaagcacatgatcatgggaatgatagcccagaacaaaaagaaatcttgtcttaccacagtgttttataggagagattgggagaaatcatcctgttttctctgtgacctgatttcagaagagactgatccaaaaattataacggcagggaacctagtgcatttggcactgagatttaaatgcaaccagaattgtcctcaaggcccagccataaaagcattgtctctctcgaccttctggtatcttgttagagagcttttcactgtgaggaagtgtggaaaaatagctctgtgtgtgtgtgtgtgtgtgtgtgtgtgtgtgtgtgtaatctgttaggttggggataggttttctgctagccaatattaaaagagacctgcaataaaaaaattaccctgatctgatagaaagcaagtgtttttgtatgtgtgggtgaatgtgtgttcatgcccgtatatgtctacacacagatgacaaattatatttgaaatcgttggaaaataaattcagatcaaaatgcctttcaggcccattacctagaaatctatcttaaaacctgggtatgttcctaaggtcatttctttgcttatgctaaattaattacaattatgaatggaggatattctactgtacttttttaaaaagaaactatttttgtgtttgaaagtgaaaccaacatccagatctatagcagagtccttattcttctcataaatctttttactttggctacaaatagatgatggtatgattctattatatattttatataaaatccatccaaattaagttttgggtaagtgtgttgtttaatctgaactatagtaacttaatactctaaacaatagttcactccatttggtcctttctccacagatgtaattatgttttcaactcaggaactatggcaaggaactttccccagatcaaattctattaacgctgagatacaagtcatccatgcacagccactatcataccctttattctcactgaaaggcagaactcagaacctgttattttatgtctgtaatcatgtactttggcatcttttggaggaaaggggcaggataactcactggaatgtacagtattttgctagtgcatttcaaggaatggaatcttctccagtatgaaattaccagatataaaataatgtaatgatgctgaggatataagcttttagaaggtaatttgatggtatttctttctcgaatgaaaagctgctggtttaccctcaaccctattcattagcattaccatgagtgaatttatatctaattatttccacttgccctgttctcttcacaccaaggaagctccagatccagtatcttgtttggcctcaaaacagaagcagcttcttttgtctcccagcagtagtgagccactcagtctcttccacaggaagtttggagcctacattccttgagtcaggagcttattacagaaaaaccccgtttccctgaacttttggctaacagaaattaatttaactgacatgcatattgattctgaaatttttttcctaagtttttttcatttttttgaatgagttttttaaattttttagatgaccaaaacttgcagggcaggggatgcccagaagagtggtgagatagtaaaacacttattccctcatcctttcaggttttcaggttgcccatttatattcatttacatgtcatttgactgtctcactttttacccagaacagtaacaacccacaccgtcttccttcagggatttccaactggcactctgtgggtgctacacagaatgcaatttaatggatatttctcagcctggttcagaataaattgatcctttgatcccagaaagtatatactgaagtgtgggataaagattatgattaggggagggttggagacaaaagctgtaaattactatggctgatttatttctactatatacatatatattttttgcttttgtatatcctatataggaaactaagcattgtattttttttaacaaatctaaaaaagcactatgaactacaggtgtttgactttcaaaatatattttgtattgttaatatcttcacattgtgtgaatactggaagctgcagatctttgctaggacgcaataaatttatatactttttgaggggttcttctggggtgctaatcaggcccctgttatgcttagggggagccctggtgctacttgcttgaagttttcagtgtaagtaccctgatgccttttggaccttgggatcagatcaagagttttggagatcaggtaccaaggaaataaggacagtctagctgcctcaagtgaggggccctttgcatagctctccttccccctcactgaagctgggtagcctattggggttgagagggaaaatgtgaaatctcagaatttatctcccttagaagagagccagtaacttatgtacaaggatgaaagaaaggtcgcagcagtagctttggggaaagggaggaagatatggcacttctccaaccccggaaaacattgcttttgaaaactgctgataaaatatgagccggttattacttctgtttgggagactgtgctctctgtggtgcctctcttggctctactccacagataccagacctcttctaagaggatgagcagaccagctttgaggttgacctgtttctctttgtctgccttcccaaaacaccagcccccaggaagacattaagcagccttaagcttaaattcctactccctcttccaaatttggctcacttgccttagatccaaggcagggaaaggaaaagaaggggggtctctggctttattactcccctaagtctttactctgacttccccaaacccagaaagattttctccacagtgttcatttgaaagaggagtattttgtcccattttccccttcctcattatcaaacagccccagtcttccttgtctctgctaagaaagtagaggcatgatgatctgcctctcaactgccctaagtcctagctaagtatcaggggaaaaaaaaaaaaaaaaagcctaacaaatgggattagactagggctgcaagtagtgaggattttgttgatacctctgctgggatgtgtgctttcccatatcttgccttcaggaattacactgtgccttttccccagggatatgggctctgtctacccagtgctccagtttcccggtaactgctcttgaacattgtggacaagggcaggtcttcatatttttgatcatccctttctcccagtgaaatcccatagcccttacctagagtctagggcacaaagacttcggggaagatacactgagattgacctgaggagacatctacacacaccagtggcagctgccccagggcctgcttccccttcctaagtctgtcatcctctggaagggatgggtggtgctccaatctctggtgcctaaaaacccaagtttatttctctcttaacactggcaataaccagtccacaccactgttgccttttaaaacctcttaataatctcatgctgtgtttgttttgattccaatccaattatcaccagggctgtgtgggtaaatgcttttaaatgctctctcatcttgttcttccccctcaccccccactcttaggtatgtatgatgctaatcttgtccctaagtaagtttcttcctgctccttttgtatcttcctttcttgtctttcctcctaccttttgtctcttggtgttttgggacttttttttttttttttttggccttttgtacaaagattagtttcaatgtagtctgtagcctcctttgtaaaccaattaaaaagttttttaataaaaaa

SEQ ID NO: 8465 - DNA, 252 bp, Homo sapiens
ctctgtcgcccaggctggagtgcagtggcgcgatctcggctcactgcaagctccgcctcccgggtccacgccattctcctgcctcagcctctccgagtagctgggactacaggcgcccgccaccacgcccggctaattttttgtatttttagtagagacagggtttcaccgtggtcttgatctcctgacctcgtgatctgcccgccttggcctcccaaagtgctgggattacaagcgtgagccaccacgccc

SEQ ID NO: 8466 - DNA, 1112 bp, Homo sapiens
aggaaggagtcagatgggtatttaaggagtttgcaaccctcgtgtcctgctgtcctggacaatgctctgtaggtgcttcctctgccaaaaaggaactggtggccttgcctccctctcctggacacctggggtcaaaggtcactgccaaatagacagctagaactggggttcacctaagcatcccttgagatgtacaaccttctaggaggacattcctcctgcctgcccccctccccgcaagaggtcttttcaggaataactgaaaaacccatggggtttgtggtcctgctgctctgccaagtccctcttgggcagctgggctgaggactggaacattctgtggcaagcaggaggcctcagcagagatcaccaagacccagcacacctggtgcagacagccacggcatcctccttcctgcaggtcacccccacgagccacttaacctctcagagcctctgcttctcacctgtcaagtgtgtgaggtagggtaccagttagtcacggtacttgctgtctcacagaggagccgacaggtgagaacagtgtgcatgtgggtgtgaacactcagtgtggaaagcaggtgtgtgtgtattcaatcccccaatggtgtcaagggctcctcaaaatgccatgggtccccaggtcattgtgataaacactgtccccatcctgctgtggttgtggctggaaggtccctcaaggagtagactgtccctgagaacaagatggatgcagggtagtgacgagttcaagcatagctagagttactgttttttagcaactcaacctgattttttaagctgcctacttttactttttactgtgagcttctgtccatcaccatgtaatttgtaataataataatacaaaaagaaaaacgagagagagaagaggacaagatgtccacagaggaatctgcattcgaggctgtttgcagaactaccgcgtttgtaaggactgtttcccactgggaactgtgtgtaattaatgagcagttttatgctttccctctcgtctgtgtacggtgtgattgttgtgtgtttcagaatctctattcagaaccaatagctggtaatgcctgctggctcgctgccctcaagttagcctctga

SEQ ID NO: 8467 - DNA, 2302 bp, Homo sapiens
gtagatctggtccctcttgctgtctccaatgctctagaaagcagcaagtaggcagctgacagtgttcccagggtgagtggcatctcccctcatcatcagaaagattcagtcaaattttggcccagagctgaagaggaggacttgggaatgtcagggaaaacatgacagggctaggggttaacaggcttctttggccaggagatggtttccagttcaccgtcaacccaaaagctctcttcaggtcatggcaaacagaccagggctgtgggtgtggctgtgcttggcactgactcccccacaggccgctgtccaggttggctcaggattccagctgccatccccaggcaggcccctccgctggctcggctgctttcacaatcaccatgtctgtctattagagactgtgccattcaaggagacggggtccccgggggtgcagacttgtaaaattttttaatttttcaacttggctgaactggtccccatcaacaggaaaagccttcggaagtgaatttacagatttctcccatgtttgaaattaacataacatgaacccagaaggcagagcttgcagtgagctgagatcgcaccagtgcactccagcctgggcaacagagtgagactctgtctaggtaggtaggtaagaaggaaggaaggaagaacagacctggatggagttattgggaacatgtcttatcaatgttgaagggccccctatcactgtagggagacatccacgtgggttgttttcgtctgctgtgaaaatctagggttggaatcatggaagcaaactgcaggaattcttaatcatcctgctcacgtggtgggcatcagagggtgtctgcttggcccccacagcactgggacagtcagagaggccatgagtggatgacgccctgatcactgccctttgcagtccaggaatacctcactgggctggggccataccctgtgccctctggaagacaagcctgcgcacttactatgtgccagatgccatgcacagtgccctagttccttgctgtagcaccaacacgtcccacgctggtgcttaaatgcacgcaaacaactttggtggttgtggcccgaaaagctcaaatgttaaagttaagcagtcaggcaagctagaagaggtgaggagcctcctagaaaactcattcgatgacacgcgcttccctcacctattcagatacttgccgagtgcctgccacttgcctggccctgtacccagggcccatctgggagccattcctgctatagctgggaccacttgtgaaacggctagttgtgcctaacagacatgctcagattcacaaaatgaattcagaacacttacctgtcccacccgtgaaagtgaccttggaggtgtcattgccccccaccaccccagtttctagtccaagccaacagctggtgctagatagatgcttgatgaatgagcagatttgactgttagttactctgtacctaaaactcctatctttacatcaaagccctgacagatttgcccttgacagactgaaatccggggctgctgcagggttcacctccaggaggcaccattcacgacactgtcccataaatggtaatgggctcccagggatactgtttacatagactgcactgagaacggtgacccttaggtttgtacaatgaggtaccctgttgaatgaccctaaaccagcctccaaaatgtgcaggatcccacattggtcagcgccaaccctgagcacaggatctaaaactatagatgatatggccaccctggccacagctggaaccaagctggtggcccaagagagagcctcttcttggaattgcatgtcagtttctcatacgcagtttcttcctatttttcccatttcccgttttaaagctagtggcatacctcacagtcaaataaccaagtggtcagtgtctcgacaatgtgcagtaacgaggtgggggctgcaagggtgaggggctcagtcaccttaacaaggcaggagacctcccacaaaaggctgatgtgtcgtccccagggccagctggacaagggcatgcagcgcaggggtagggggatggaaatattttctctcccgtaaactctgacttcatgtgagcaggcatggggtctccctgagagctgataaccgggaaaaccaaaaccaataatattcctaataataatactagaatgtaagaataatcatgtgtttttcactgaccgctgttgctctgcttttgtctttatatacagtagtttttataacaatgtccctaggttttaataaaggagtgtcatgtcaactgttccctagat

SEQ ID NO: 8468 - DNA, 2586 bp, Homo sapiens
tctgaacgttgtgttcaatttttctgtaaacctaaaattcctcaaaaatgtaaagtttataaattttttaaaaagctacagaaaatgaagagaggctctttggacatgttcatgtcctccatagaaaataacataatcaaagaggaaaaaccagcattggtgaattcatcccttcctttcaacttggcctctctcacccactttacttttagtgcagagttcagtgatggctagcagctgtcccctgatatttgttattccaagtatccattcataggtctggggagagattgtggcaagctttccctaaataaatcacacccttatcttctaagcttgagcagtggagggagacttttcattcgaggtgggtggctgaacatcatcattcctgttctggacttcttgtaatcatgttggattcagagggcaccactctctcttgtacagatctgacctaacatagacatagactatagcagagatgaatccaggctataacatttaacaagaccttattaaaagcttcaagatgttagcctttatctgttccatatctagcttacttggttgtttttgggggatcacatgtctgtcctccaaactggaaacgtctaactctccaggagatgcagtagcattatttgttggacagtggcacctactggtagtttgtaatgtttatagcctagtgtgaaaggcattgtaaatgtatacctagcaaaaaggggagtagagcaaaatttccagagttttacaaatgaaatgaaaggatgatatgggggagagtcctttggggccaaggagagagagcacagactagaaagtaatacaagcagaaagaaggatgtcagcccatgtctgtgtggtagaggtcatctttccatctcactgggattgtccctgaaagtgtctcactgcttaggtctccttgcctgtctaaggcttggagaccttccagtatctcatgccttattctagatctgcttttttccccgaggtgaaaaaacctgttcaaatggtcactcacaacttttgtggccttactttttgtctccgaaaggacaaacatatcagaactaacatccacccagaagaagggctgatcagttcctttcaacacagcatggatgaaaacccaggttagcgttagtgcttcttgaattggaagtattctaacctctatgtacctaccaatgtaagaactgagggcccttttaagggaacttacattcctaaagttcaagtcaagttgtcatgaagagtacttaatgaggcatacttttaatctttgaatcgtagtgttgtagggctaaaagaaacctcaggccaggctgcatggtggctcacgcctgtaatcccagtactttgggagaccaaggcaggctgatcacctaaggccagtaatttgagaccagcccaaccaacctggtgaaaccctgtctccactaaaaatacaaaattagcctggtgtggtgatgcatgcgtgtaatcctaactactcgggaggctaaggcagaagaattgtttgaacccgggaggcggaggtttcagtgagctgagatcatgccattgtactccagcctgggtgacaggagccaaactccgtctcaaaaaaaaaaaaaaaaaaaaaaaaaattagccaggcgtggtggtaggcgcctgttgtcccagctgctggggaggctgaggcaggataattgcttgaacctgggaggcagaggttgcagtgagccgtgattgtgccactgcactccagcttgggtgacagagccagactgtctcaaaagaaaaaaagcaaaaaagaaaaaacagaaaagaaacctcagagatctgtcattttccacctattacattcattttatgatacagaaatggtcattcagttgcagatagtacatgactgttgggatcaggcccccaaatctggccataaactggcccccaaactggccataaacaaaatccctgcagcaccgtgacctgtttgtgatggccatgacacccatgctgaagtttgtgggtttaccggaatgagggcaaggaacacctggcccacccagggtggaaaaccgcttaaaggcgttcctgaaccacagacaatagcatgagcgatctgtgccttaagggcttgctcctgctgctgataactagccagacccatccctttatttcggcccatccctttgtttcccgtaaggaatacttttagttaatctatcatctatagaaagaatgcttatcactggcttgctgtcagtaaatatgtgggtgaatgtctgtttgaggctctcagctctgaaggccgtgagacccctgatttcccactccacactatatttctgtgtgtgtctttaattcctctagtgctgctgtgttaaggtctccgtgaccgagctggtcttagcacgtgacttttctcgggtgatagctttaatagtatcagcagagcagggaacagaatctagtttaatgtgtcctaatccagtggttttttttaaccacaaaatactgcctttgagaaaaggccaggccagcagagtcagaagttgagcctgggatttgcatagtcacaaggtctttctt

SEQ ID NO: 8469 - DNA, 323 bp, Homo sapiens
ttttgaaaatacttttgttggctgggcacagtggctcacgcctgtaatcctagcactttgggaggctgaggtgggtggatcacctgaggtcaggagttcaggaccatcctggccaacctggtgaaaccccgtctctactagtaatacaaaaattagctgggcatggtggcgtgtgcctgtagtcccagctactggggagcctgaggcaggagagtcgcttgaacccaggaggcggaggttgcggtgagcctagatcgcaccactgcattccagcctggtgacagagtgagactcttgtctcaaaaaaaaaaaaaaaaggaaaa

SEQ ID NO: 8470 - DNA, 406 bp, Homo sapiens
atgacatggaagttccatacagcccagagtaatttatcattagagactagctttacatttttaatttaatttctgataaattttatttaatttctgataaagtggggacagatacatgagttttaaaaagctacagacagattattagggcagtaaaactattctgtctgctactgtaatggtggacacatgatattatgcatttgtccaaacctgtagaactgtacagtctaaagagtgaacccttagcttgtgaagacaaaatggtattaataaatgaatacataaatatataaaataaagagtgaaccctaatgtaaactatggactttacttaataatgtatcaatattggtttatcagttgtaataaatgtgccacactaaggtaagatgttagtaatggg

SEQ ID NO: 8471 - DNA, 1231 bp, Homo sapiens
gtcactccaaaaagaaaccctgtacccactagcagtcacccatttcctccatccttccccatccccagccctaggcaaccatctgttttctgtctctacagatttgcctattcaagacatttcatataaatggaatcatacgatatgtggtcctttgtgactggtgtctctcacttaacatagcgtttttaagatccatccatgttgtagcatgtatcagtactacattccacttcattgtttaataataataataataatagttcattgtatgggaataccacgtttgtgactggcttctctcacttagcatagtgtttttaagatccatccatattgtagcattatcagtatacattccacttcattgtttgaataataataatacttcattgtgtgggtataccacatttatccatttatcagttgatggatatttgagctgtttccactttttagcaattatgaataatgcctcatctaacactttgattatactttttattatcatatgtgtggcttcaggtttttgtttggttggttggttttgcctgtgtctgtttttatcacttgattataaacttctggaaaaagatcattattttcactctgaaatttccatacagcaagtattcaataagtgtttggcagatggatgaatgggcagatattataggttcttaccatgttgattatgaagaagtacaaagtattcagaataaaaacactaagcacagtaataaaccaagggtgtgccagtaaatttacccagtaaattataactttcaaaaactgacggttcttaaataaactttaatctctgcactatttccgggaatttcacacatggttattacagttgattatttcagggaggcagttcctctgctaataatagttgtgaactggctggacagaggcctggaagacaccagactttctcttctgaattaactccacagtgttttgttgttgctcttggcctgaccgatgttactcttctagcctagagtagtggttctcagctctgactgagcatccaaatcccccatggagatttttcaaggcataattatctaaatcccactgcccagattatgattctgtcggctgagtaggggtctatgtgctcacatgttctaaaaactctagagacatttctgatgcatagccaggttcaagaataactatttcaaaagtcacccacaggttaaaaaaaaaaaaaaaaaaa

SEQ ID NO: 8472 - DNA, 1935 bp, Homo sapiens
gttcatttacactatattttcagcttcttgaaaaagggaggcagaaaacaaatgtggtttttccttgttgtcattttgcttcgaaagagtcacataatttaaaggaccatgttcattttctgtattcttgaaatcaaggaaaatgtcatggtgtttttaagacagggcagaaataaggtacaatatcctggtatagtgcttgttttccacatcttttaggtgggagctttaaaatcttaggtgaaacttaatcatcttggcatatttttctttctttcaaacttcctaaaaaacaaaagaaaaaaacaagcaaataaacaaacatggagaaacattcaacattttattcacaaatctccatgacttcagtcgtaaaggacagtctgttgtgtagtaaatttgggattttaaaatgttccattttggccaggcacggtggctcacgcctgcaatcccagcactttgggaggctgaggcaggtggatcacttgaggtcaggagtttgagaccagcccggccaacatggtgaaaccctgtctctacaaaaaatacaaaacaactagccatgcgtggtggtgggcgcctgtaatcccaactacttgggaggctgaggcaagagaatttcttgaaccagggaagcagaggttgcagtgagccgagatcgcaccactgcactccaacctgggcaacaagagcaaaactccatctcaaataaataaataaataaatataaataaaaatacaaaaattaggtgtggtggcatacgcctgtaatcccagctacttgggcggctgaggcaggagaattgcttgaaccagtgagccaagatcatgccactgcactccagcctgggcaacagagtgagaccctgtctcaaaagaaaaaaaaaaagatttcactcctatgtagttattttttctggaacaacactgagctaaggtgaggggcatgttattgatgggcatcctgagtacactctccagaatctacactcgttctttccatttgtcgccatgtagaagtcaggaatcctactttcaaatctcacatatgtcagttattagctacatgatcgtaggcaagtctcaacctctaagtgcatcaattttttaatccattaaaggaggaataatatgtatctcattagagtgacgcgaaggttagaaaagctgatgtgtggaaaaatacctgtagactaagcacatattagcactaggtacagcacatgttagaataatgagtgaatacgagaagtcagagataagtccaacccccattgcccttgggctgaaatccatgtattcatggattcatccatgtattttggctgggcattcagcatcctgggaaacccgctcctttctactctcctgccctttccccacaacggccctgctgtagtcagatattctccaaaacatcttaaatttgcccaccttcatgtctgtcattcccactagccacacttccatttgccaaaattctacccatccctcatgggccctgaatccaactctctccaggaatcctagggaactctcaccctctcctcctctgaaccctggtccttgctgtctgagcactctaggaggcataattcatgaaccgcttattgtctcagagactgcaggctcttgcaaggtagaggccacatagacaatatccatctctgtgcaccaccaccacacagactttggtgccttgccaagaatagatgcatgattgaatgaatgaacaatttctcaccctgcccctggctttgctcttggacaaaccactttgcctgtttcagtctcagttgcctcagctgtgaacagaggataaatgcacagatgtactccccaggtgtgctgtgaagaataaaccaatgactgaaaagcaatttgaaaatgtaaaaacaaatgctatatataaatgttacataatcaaaatca

SEQ ID NO: 8473 - DNA, 1129 bp, Homo sapiens
agggaagctatctgagcaagaggtaaatacttagtcattcggaatagtccataaatgacgactgcttcatcttcaacaaggggaggtctgattggaaagtgctcacagaatgattggattgcatttctgtcttcaatccacctttgattcacaatatacattcctttgttaaaaaattgaagaatgtctgtaatcaaacccttgttaacagatgtaaagagctacaatttgcttgctggacattatttcaacaaaagttttttcattcaaaataatttgtcaaaaaaggacccatgcccttacgtggtttcagatagtgtgctgtccaatttgtatgcttttccacctactcccccagggccatcagggggtacgtgagtttaatgattctacttcttaaccatttcttaaatctgcctccttggtcgggcgcagtggctcacacctgtaatcctaacactttgggaggcgggaggattgctttgaggtgggaggattgaggtgggaggattgcttgagcccaggagttcaagaccaccctgggcaacatagtgccctgactctactaaaaaaaaaaaatctgtctccttgtttcagtcctcacggcttttgcagtagtcgaaggcttcttcatctctcacctacacattgcaatgcctttgcctcctaaatggcctcccttactcactgctctcctatgccatcttctatctacctcatcaccacttctaattatccttccaaatcacaggtctgatcatccactcacagacctatcgtggctttccattgcctacaaaaatgaaaaccaaaccacagaacttagcatgacagtaaaagccctgcatctagcctccatctactgtatccttcatgcatcttaaactcttgtctattccagataacttgcccttgcatgaaagcaccctcactttgagtgtctctttgagcataccttccctcctttcatccacaccatcttacaaaaatcatcctttttgagtcagctcaaatatcatttcctccaggaaatttcccacgactttcttccaatccaaattaattaatctctctttcctccaagttcatacagctctatctatctatctatctatctatctatctatct

SEQ ID NO: 8474 - DNA, 16301 bp, Homo sapiens
agtccccacctagggcacgctgccacgccgccgttacctggtccaagtgcccgggaggctccgcctgtcggcttcgctctgcagctgcatctctgatctgtcctgcaggctcaggtgagtcaaaggattgggaggcactgaggggtctgcaggggagtaggcatcaagccaggtcaggcgagtgtattttagcagagacgctgcctagggtgccctatctgatttgcagtgcccttccccacttctgcagggtcctttccaaatcgagcccccaccctcaaagccatcaaaataggatcatcccttttctactctcatccctccaggaaccccctgaaatgtccctaagggacttttgagaatttatttacaggcctctcctcccttgctgctccactccctcaacctcacctcagggcatctctgaatctttctttttttaatgcaaggattaactcctcagaggaatcccaggttctagtatcagtcctgccacgacatcgccatgtacccttcagcaagacactaccctctctggacctagttcctttctttgtagaatgaggggtttggaaaggtgatgaactttgaggcatttgctattttgactttctaggattcctggggtggaggcagggtgccaggtgagaagttggctcagaccaagaatgggatgaggggaaccttaaccaagatttaggggcccagaggcatctccgggtaggaaagtatgggaggtggcagaggccccttgtgccttagccctcatgctgtccagggatgttggctttgcctgtggcccaagcttgacaagggttccccgccctcccacttccaccagcgctgccacatcttgcttggtcaccctcccacgacgggccctgccagaggatttatgttcttctaccaggcctgggaggggaaaagggagaagaatccgggatgagaaggtcgcctggagtgagaagcaggcactggcctcgctcagaataggcgcattcacggaattggggggcgggggcggagctgctgttgggttaggggcagctggccctctctgccaagaaacagcaacagaaaaatggctaacacagcttcagcatggggcgcggcggtggggtaggagctggaaggaaatgaggtttagtgaattctaggcgccagggggcctcaagagagagaaggggaaccaggagccctaggttctaatcctgcttttgcagttcggcgggctgcctccttggggcttagttttcctatttgtatagtggggagggggtgggggggtggtccttcgtagttctcacggggcgtctccggggcctcgggagggtaagcgctcacctgctgcccctgcggggtccatggtggctccacggggccccagccgctcacccgccgccctctggacgagtccagtgctgctgtcgctggaaccctgcacacccctgctcctcggctcttgcgcgggttatatcctgtccaggccttatctccaaggccccgggccccggccccctgtttgctcggggtgggcgcacctgctgggcagatgtgggcttcccacgccccctgccatctcgggcgccccctggcggtcgctcctgagagcaggcgggaaacaggcgccaagccgcgcgttctcgtgcgcagtgggttttggtccactcgctgccacgccaccacgctcagccccgcaacagggcgcagcccctccctgccgcctgcggttgggcagtgcatgtctgtgtttgtgtgtgtggaggggtctgggggggttggcgagttgcaaagacagccacacagaagcctgtgtgcgtaggggagtgggccgaggtggggaagggcttctgtctgcagaggttcgcctggcaggaggagaggcaccaaacgcccaggctggctcacagaaactagcaggcgtgggattgtatcctgccgcagccactttttggccgaatgactttgggtaccagcgcttaacttttctgagcctcaatttcattgtctgtatgatgggggacaatcacagccttagtcttacaattgcagagaggattaaatgccacaatgcgtgaagagcatttaacactgtgcctgacatttaaggaagacctgtttttttctgtttaaattttgcatatttgtatctatgtatctattcttatttaccattctcttgtgggccgagcgcggtggctcacgcctgtaatcccagcattctgggaggccgaggtgggaggatcacctgaggtcaggagtttgagaccagcctgaccaacatggcaaaacccgctctctactaaaaatacaaaaaattagccaggtgtggtggcaggagcctgtaatcccagctactcgggaggctgaggccggagaatcgcttgaacctgggaggcagaggttgcagtgagccgagatcatgccactgcactccagccgggacgacagagcaagactctatctaaaaaaaaaaaaaaaaagaatctcttgtgtttcccagcaatcccactgtgatgagaattttttaattctgaaacatttcaaacatacacaaaaatagagagattagtaaaataaacctgtaactgtcttccccctccaagtgcctatcacccagaataagagctctgtaaatactgttgcttttctattttccttcctccctccaggctctgacacctccattctctgtccccaagcgccatgagaggccttctttgctggcccgtgttgctgctccttcttcagccctgggaaacccagctccagttgacaggtgaactggggcccagccctcaccagtgggaggaggggagcggaagcaggtcctccctctgcagccagctcctcctgctggggagagggaagcaagggctttggaacatatgggactgggtttaagttccccacttcacctttctgggcctcagtttcttcatctgtaggatgtggcttagttttgggcgcatgcagaactgcccatggggtgtttaatttggaaaaattatttgaaaacatggaaaaaaaccaggaaattttacataaaaatccctgtttagtatttctcttgaaaaaccagggatctgctgacatccaattcgcaggggcatggcctcatttggatgcagctacctgcccaatttaggagtgataggggctctttgggtctccagcgtcctaacccaaccagttcatccatgttccctgcctggtccctgcaggctttgagtttgcgacgcttccttgccccctcgtcaatgggtaataccgcctcagaatagccctcagatctgtaagatgagggaatttgtgaaatctcctagcccaggtgctaggcacatgccgggcgagtgcatctgtctaatctgcgtttgctgtgctgggcgctgttatgtcggcatagcggcatttcccctgggtttcctagggggtctcctcggaggtgaggctttgctgacctaggagagtcctccctgatctccccgcaggtcccaggtgtcacactgggcccctggatctggtgttcgtgattgacagctcccgcagcgtgcgccctttcgagttcgagaccatgcggcagttcctcatgggcctcctccgaggcctgaacgtgggtcccaacgccacgcgcgttggcgtgatccagtattcgagtcaagtgcagagcgtcttccctctccgcgcgttctctcgccgcgaggacatggagcgcgccatccgcgacctggtgcctctggcgcaaggcaccatgacgggactggcaatccagtacgccatgaacgtggccttcagtgtggccgagggcgcgcgaccgccagaggagcgcgtgccgcgtgtcgctgtcatcgtgacagacgggcggccccaggaccgcgtggccgaggtggcggcacaggcgcgcgcccgcggcattgaaatttacgcggtgggggtgcagcgcgcggacgtgggctccctgcgcgccatggcatcgcccccgctagacgagcacgtcttcctcgtagagtccttcgacctcatccaggagttcggcctgcagttccagagccggctgtgtggtgagttaggagggcgctggagtgaagctcgaactctcaatccaaatgcttggattcctttcccaccacagtaaatcccatcccgtgggggtggccccgcgatttccaggtagagttgccctgacctaccgcaggctgtgtcagatttcagctctgaccacttctgctcagcctccatcaacaaggagcaacctataatttcttgccctacccgccacagcttaccacaggcttaatgtcaaattccagcaccaaccccctgcacacacggaaccagtgattctcaaagctaagagggatcggctgctccaaagagtcgtggccctcccacatggggatgacttctcccattatcatcttagctcctcccacaaatgctgcaagatctgttctgatctgttttgagtttattccgcccacctcgacttagcacctctccaccttcctacccactcctgcccctgtgtagtcctgtcccagcccactgacgtgtctaattgagtgtctcctcttctgagcctactcacaggggctccttaagccttattctttccctaagccctctcacttggtacggcccttctcaaattagtcatttccttctgaaagccatttgagggtgatgcctgcctctgaccccatccccatccagctctctcttgttggaggcttctgcccatctgttccctactgattctagtcctgtgtgtcctcagggaaggaccagtgtgctgaggggggacatggttgccagcaccaatgtgtcaatgcctgggccatgttccactgcacctgcaacccaggctacaagctagcagcagataacaagagctgtttggatgacagctatccctgtcctgcaatctcactgctcctgaaccttctttggctctccattgccccaacatcagaccaatgagtctggaagggcctttggcagtaaaagcacacctccatcactttacaggcctaagaaagaaaggtattgcctggggtcacataagtccctggtgggagcccacagttcagtgtgctttctgccctctttctccctgttttcaggccagtctctaatcaacctcccaaacttgtttctgttttcttcttttcttttctctctctcttttttttttttttttttttttgagacagagtctggctctattgcccaagctggagtgcaatggtgcgatcttagctcactgcaacctccgcctcccgggttcaagtgattcttgtgtgtcagcctcccaagtagctgggattacaggtgctggccaccacacccagctattttttgtatttttagtggagatggggtttcaccatgttggctaggctggtctcgaactcctgacctcaagtgatctgcccgccttggcctcccaaagcgctgggattacaggcgtgagccactgcgcccggccatttctgtcttcttacaggcacatccttacagtttctcttcttagatactgttggggggtcttcaattaggtgggtgtcccccctcatgccacccattcttgactctgcacctcagctctttgtgtgctgctcacctgagctgcccttgccactcccctctgcctttgcaaatctttcaagactctctctttttaagagatagggccttgctatgttgcccaggctggtctcacactcctgggctcaagagatcctcccgccttggcctctcaaagtgctgggattacaggtgtgagctgcttcttcatttttgtcttctgaaaagctatggcatagaatacctcgcttattcaattcagttttttactgagtaccaagttagtattagacattgtgctaggagcattacacatgttattatctctcagcctcacaacaacctggaaaaagaaatcatgtaatcccaataacccagatgtcagctggggtcttcttgtttctagaaactaaaagttggcttgaactctgatttgatgactgtttaacattcaaatctctctccaagacctctggaaatcccccaagtgcttatcttctggttgtcacctcttgctgtgagcctctgctaaattcatttgatttatggatcctctctcatttctcaaccctgcacatgctgttcttgttccatgcatgttaatcaacctcttcgttggtttacacacttgtgtatgcaggggcatacacaagcgtgtatgtgctaagtaactcatagcgcgtgcacacacacacgaaaaactcattataattgaatattagacagctttgtttctgaaagtcctcagtcagcctagtacaagggatttttcacaggcagcctcaacccacagagttactcatcttcatactggctctcttgttcttttttttttttttctttcctctctccactctcatctcctttccaggaaccccaaatactcacttttttatacagggtaattatcttctctccagtccagctctcggccatctttgcctatccagatcatcaagatgctcaacagggcaatagttccccatcttccatggaaggaagctgtgaatagcaatcactgtcttccattatattcccattttgcaaatagaaaaatggaggctcaaataggtaaagtggccaaacctgtcctctgtaagtcagagagcatcttgaggacaggggccctgactaattaggtcaggatttttggggttggggcccaggcgtaggtattctttaaaatttccttaggtggttgtgctaccagagctgagaagggcagtcctgggcatagactgaccccatttcttcctcagccattgatctgtgtgctgaagggacccatggatgtgagcaccactgcgtcaattccccaggctcctatttctgtcactgccaagttggctttgtactccagcaggaccagaggagctgcaggggtgagcaacacccccaccctcccaccacaccctggactgtggcctccgagggctccaatcagaggcaacatcttgctgtttcttccctcctgccagccattgactactgcagctttgggaaccatagctgtcagcatgagtgtgttagcacccctggtgggccacggtgccactgcagagagggccatgacttgcagcctgatgggaggagctgtcagggtgaggagggctctcctacatttgtgggaggggtaagagatcttagctggtggggtccatcctgactcatcctgacctgtctctcctttcagtccgggacctttgcaatggcgtggaccatggctgtgagttccagtgtgtgagcgagggcctctcctaccgctgcctgtgccccgaggggcggcaacttcaggcagatggcaagagctgcaaccgtgagtgatgggcgggagggtgttctgttggcttctgccccattgcccacatttggagtgtccttgactttgccattgctgtggcccctaggctgtggtgtgaatgtctgtgtgtgttgtgggggtgacattggagggtgtgccattccctccttccatctctttcctacaatcctctactctgctgtcaatgttaatttaaaaatacatatttgatcacattcctcctttgtgcacaagccttctgtggctcaccaatgactacaggagaaagatcaaatgacttacccctaagtatttcaaatggtgagcagaaccacattaatgaataatgaaatcaaattactgggttacaaccaacattaaaaaaaaaagagtggaagacaatatagagtttactgcctgtagaaagagttatattatttctgaaattttagttctgtgtgaaatgtctcatgatgtattgtcattattattatttttactgtgggctgtgataaaaattttgaaaccactgccttaggtcatcacgatctagcttcagccaactccatctgcccatctcctgccacacttgaacatttcagtcttactggcctgcccctccccggatgtgtcaggatctccccagatcccaagcctctgcacgtgctgcatctcaccttctagactgtcccttactgccttggcaaactcctactgatctttcaagactgtcttagatcattcaggctgctatatcaaagtactgtagactagacatttagttttcacaattctggaggctgaggagtccaagaccaaggtgccagcagatatggtgtctaaagaaggcctgttttctgattcttagatggcacacctttcaaagcctccccacgccaacacacacacacacacacacacccctacacacacacacccacacacaccaattttcttgctgtgtcctcacatggtgaagacaggaagcaagccctcttcgacttttttttttttttttttttttgagactaagtctccctctgtttctcgggctggagtgcagtggcgcgatgtcggctcactgcaacctctgcctctggggctcaactgattctcctgttacagcctctggagtagctgagactacaggtgtgccccaccatgcttggctaatttttgtatttttagtggagatggggttttgccatctcagccaggctggtctcgaactcctaacctcaagtgatctgcccgcctcagcctcccaaagtgctgggagccaccatgcctgacctcttcagactcttacaaggacagtaattttactcataagcgctgtaccctcatgtcctcatctaatcctaattaacctccaaagatctcacctccggagactatcacataaaggcgtagggtttcaataaatgaattttgggaaacacactcattcagttcataacaaagatcagatagaaggccatcatctccatgcagccttccttaacaactccaggaagaatacactattcctaccttgggatccctgcatgatcttctcttctagcactttccttgaccagagcacatagcatgtctgacttgctctgctctgtcctcatggaacaggattatgttttaattatttcaaaacctttgaaaacctccccacgccaacacacaccacattttgggcctagcaactttcctggctcagaataggggaggtgacattgtagagtcattcaggagcatgggttttggagtcagatggacctggcttcatgtcttggctcagtcagtactagctatgaaatctggggcaatcactttatccatcagaacctcaggtcatagaaaatggggacaatattcaagcttattgggaggattgagaatatatataagcacttcacccagtacctaccacatggtaagctgtcggtaaataatgtttttgttattattattgttaatactggtagagtgcttagaagtgtgcctgatacatagtagatgatcaataaatggtagttattgtggtcattactatgattgttgttaaaaaaagatgcttttagcagagtggtttgttctaagcactgaataaatgtcaagggcgatgatgagggtgatgatgatggtgatggtgatgatgatggtgataattattattacttagcacactgcctggcacaggaaggactcaggaaatgttgtctgttatataataaatgtttgcgaatgaacgactagatggatagacagctgctgccagtccagaatctggtccctcaattcaagcttttctggctgtgcagggtgccgggaaggccacgtggaccttgttctgctggttgatggctccaagagcgtgcgtccacaaaacttcgagctagtgaagcgcttcgtgaaccagattgtggacttcctagatgtgtcccccgagggcacgcgggtggggctggtgcagttctcgagccgcgtgcgcaccgagttccctctgggtcgctacggcaccgcagccgaggtgaagcaggcggtcctggccgtggagtacatggaacgcggcaccatgacagggctggcgttgcggcacatggtggagcacagcttctccgaggcgcagggtgcacggccccgtgcccttaacgtgcctcgtgttggcctggtcttcacggatggccgctcccaggatgacatctcggtgtgggcagcgcgcgccaaggaggaaggtgggcttggcatgggacacagtgggctggggttgggtcagacgctgggaggcagctttcccgaggcctggggcaccctctgagaccccggccttgcaggcatcgtcatgtacgccgtgggcgtgggcaaggcggtggaggcggagctgcgcgagatcgcctcggagccagcggaactgcacgtgtcctatgccccggacttcggcaccatgacgcacctgctggagaacctcagaggcagcatctgtccaggtgagcgcatctctctcggggctcctcctctctctcattgcccgtcctctgatatctccccttcctattcactccctgcccactttgtagttatagccagaggttgggctcactagacagagctttgctactccaaatgtggtctgcaggccagcggcagggcggtcacccggtagcttcttagaactgaaacatttctggtgctctccagaccgaatgaatcagaatttccacttcgacaagattctcaggtgatttgtaagcatattaaagtctaagaaatcctagactaggctacctgtcccccaaatcagtggaggttcagaataatttgggaaatttttttgaaggcacaccagacagcatttgtaagtggagccacagcatatatccctgaacttgttagaattcaaccttatgaacttggcaaagtggcaggactgaatatattttaagtatgcaaagactttttttttttttattggggacaacatacctcataagtgcaatccctctacttcatcatctggtgctcagctgaggaaaaagagactgactctacctgtgaagaaggggactcttgaatcgcatgcagtgtactgtgctctaggtgatacagggaatgtctccagggtaacttttaccctagagactttagacactagcccaggcttaagatgtgactcttcttcccatttatcagactgcagctccagaaacagactaagtagggctggtttgggtctggagaatttgcctttttttttttttagatatatgtaggggggctgggcgcagtggctcacacctgtaatcccagcactctgggaggccgaggcggctggatcacttgagatcaggagttcgagaccatccttggcaacatggtgaaaccctgtctttaccaaaaaatacaaaaattagctgggcaaggtggtgggcactgaggcaggagaattgcttgaacctgggaggtggaggttgcagtgagccgagattgcactactgcactccagcctggtgacagagtgagaccctgtctcaaaaaaagtatatataatatactatatatactatattatataatatgtgtttgtgtatgcatgcacatgcacgtgcatgtatatacacatacaaatatacacatacagtccttcccccaactctccttccctccccgctctcagccaattctaattattgtggctctttcagattaggggctctttcagagctcttcctatgtgactcttatgggccctgcagtgtgactttggacgagtcacttaccccacacctaccttaacttttctcttcggtaacaggagaggcactggctgcccaaggttacctctagttctagagttctaagagaagtctgggttttgtggttgaagctctttatcaattggtggtatgactgttccctgtctccaaccctttgtttagagaaacaaatctgtgaagttaggggtctttgctggattccagcagtttgttcatagtacatataagactaagatgaagagacaacttttaaatcattatggcagtgttttcaaaggttaaatggcaggtattgtgcttattatttcaccacgtgtaatcctttttcttttttttcctaaggtacttttattgtagcattttttttttctatgtcattccctgtaatctttttttttttttttttttttttttttgagatggagtctcgctctgtcatccaggctggagtgcagtggtgcgatctcggcttactgcaacctctgcctgccaggttcaagcgattctcctgcctcagcctctcgagtagctgggacaacaggcgcatgccaccacgcccggctaattttttctagttttagtagagatggggtttcaccgtgttagccaggatggtcttgatctcctgacctcgtgatccacccgcctcagcctcccaaagtgctgggattacaggtgtgagccacagcacctggcctccctgtaatcttaacaatggcacatgcttatagaatttcagtgaatctaagataccattcattttaagattcatcactaccttatgtactgctaagaaaaaacatgtgccagttttaattgtaaggcctcctgcccaacccccaagatgttgatgtgtggggagatagagttggatcaggatcagtggttcctaaaaattaggtcacaccagaatcacctggtggacctttaaaaacacaaattgcagctgggcatgatggctcatggctgtaatcccagcactttgggaggccgaggtgggcagatcacaaggtcaggggatcgagaccatcctggctaacacagtgaaaccccgtctctactaaaaatacaaaaaattagcagggcatggtggcacatgcctgtaatcccagctactcgggaggctgaggcaggagaatcacttgaacccaggaggcagaggttacagtgagccaagattgcaccactgcactccagcctgggagacagagctcaaaaaacaaaacaaaaacaaacacaaattgctgggcttcaactctagattttctaattcagcaagtctggggtgttgtctgataattagcatttttgataaattcctacacgatgccgatgctgctggtccaaggaccacactttgagaatcactggtctagttgaaatacactataaagcagtggtttccaacctttttggcaccaggcagtggttttacggaagacaatatttccatgatggtggtggggagaatggttttgggatggttcaagcacattacatttattgtgcactttatttctattattacattgtaatatacaatgaaataattatacaactcaccataatgtataatcagtgggagccctcagcttgttttcctgcagctagatggtgccatccgtgggtgatgggagacagtgacagatcatcaggcattagattttcataagaagcctgcaacctagatccctcacatgcacagtttacaatagggtttgtgctcccatgagaatctaacaatgccactgatctgacaggaaaggagctcaggttgtaataggagcaatgaggagcagctataaatacagatgaagctcccttgcatgctggctgctcacctcctgctgtgtggcccagttcctaacaggccatgggctggtactggtccatgtaatgtgctggtactggtccatggcctggggattggggacccctgctgtaaagtatttacttgaaccaggcagtgttctagatctgtgctttttcaaaaaggtaggcagtacctatttaattacaattgattaaaataaaatacattttagtcctttagtagcaccagtcatatttgaagtgttaaacagccacatgtggcttgtagctactgctttggacagggcagatgtagaacactttcatcattgcataaaattttatttggagagtgctacacaaagtgtggtccacagaccaggagcatcagcatcatttgggagcttattagaaatgtaccttctgagcttcttctccattctgaagcagaatctatattttaacaagctctcctgatgattccaatgagcattaaggtttgagaaacagtcttgtaagttgtgcgtgagcacacacacacacacacacgtacacaggtgaatgaatcctcgaagccactaatgcgtacactctttcattatatccattttatagatgagaaaactgagcttagaaaggttagtgagtttttcagtatctcacagctacttagcttgggactcagcccaggtctctctaaatccaaagcccatatactcaaccataggcccagtgcagggaaatcagagggccaaagctagggcaatttctcatccccctgaccctctgtgtccggcttgcagaggagggcatcagcgcagggacagagcttcggagcccatgcgaatgcgaaagcctcgtggagttccagggccgcacgctgggggcgctcgagagcctgacgctgaaccatatcctttggggctggtggcgcgggctggagggaaagtgaagggacctcggcgaaccccaacggcctccttaaccgctcactggcccagctgacggcgcgcctggaggatctggagaaccagctggccaaccagaagtgagggccacggacggcccagacccgggctggggcgcggcaccacggacggtgccccttgcgcgccatcggtgcgccggggccaggcagaacctgggcccgtccggcttgggctgtcggggcggaggcgctggcgggcttccggcattgagctgagttggcctcgcccggaccattaggcggactgcggcgtcagggggatagcgggtggtgagggaaggggcacgtgctagaccggcacgccctcgccgcgtgctgcgctcagttctttgttggatttcttgtttgtgttcttaaaaaaataaaaaaaactgatttccacggggtccgtttttgggtcttgctgcgccgcctgggggaggggaagccagacggagcgtgctgtggcggcgcccgggcggcgtctccttggagaaaggcgcattgtgcgggggtcgggctcgggggcaggagacccggcgctgcttccccctgcttgtttattcagccgagaacagatggctccttatgcaggctgcgggaagggagggggctcaacaggaatccttggggtctgagtaagtctgcgccactccattccccagcggactgaacgcttcgctcccggccacgcctatcccatgatgcccccaaatctggctcaaaagctgctagtactgagcgctggtaaggggtgcgggggtggcgttggtgggaaagtgagaggcagtaattgaacccctaaatggatggggtgggagtggatagatgagctttgaccgattttaactctctcctgcactaggtaggaagagaaggaggtatcagctaggacccctgtctgtccagcctgtggccttccttctgtcatcttatcaacccctcccaaaacacctctatcagcaaagaacacaaaccagtaccatttcccgagtgcatgtaagaaacaacgaagtttaaaatgcttccagtcctagagtgatttggggaaaattattttgtgtttgtttcctcatctgcaaagtggagactggaattgttacccccaagcgtgatggggagaatcaaggacattcttctaaggcatgtgccttgtacctatccctcaattaatggtagctattaactgttcttatagtaacagctaacatatttagtgttgggcattattgtaactgatttgcaggtattttcattttatacttggaaccagtgaaataagaattattgcctttatcatccccattttacagatgaggacactgagacacagaaaggttaagtttccaacagtaacataaccagtacgaagctgaaccaggatgtttcctatggctgctctaataagttaccacaaattgagtggctagcaacacacatttattaccttacagtttttaggtcagaagtctaagatgtgttggcaaggctttattccttctagaggcttttgtttcctggccttttccagcttctagaggctacctgaattccttgggtcatggccctacatcacttcagactcagtttccatcagcacatctctttctctgactctgaccttcccgtctctgtcttataaggacccttctgtttatattggcatgaccttgataatcaaagataatcccatctcaagctatctttttttttttttgagatggagtttttgctcttgttgcccaggctggagtgcaatggtgcgatctcggctcactgcaacctccgcctcctgggttcaagcgattctcctgcctcagcctcctgagtagctgggattacaggtgtatgccaccactcccag

SEQ ID NO: 8475 - DNA, 13862 bp, Homo sapiens; identical to SEQ ID NO: 7496

SEQ ID NO: 8476 - DNA, 13186 bp, Homo sapiens; identical to SEQ ID NO: 7497

SEQ ID NO: 8477 - DNA, 187 bp, Homo sapiens; identical to SEQ ID NO: 7498

SEQ ID NO: 8478 - DNA, 5172 bp, Homo sapiens
gaaaacgaattcccactgcctattttgagatctcactaacacttaaagggaaatctgatgaagtttgtaagaagctgtggtgtttctttctgtcaggttctgaagaaagtctccaaatacattcaagagcagaatgagaagatctatgctccacaaggcctcctcctgacagaccctattgagcgaggactgcgagttgtatctttttagttcggatcagaaagtctaaatatttataacaagaaaatgttgatattgtttggcattggctagagagaatttaactctcatcctgtatttgccctaggtagtttctgtgtgaattgcatacctactgtaaaccccgtgtctccaacatttttttttaaagcatgtccctccttccattgcatggtgcaggtctctgtggtttgtttactattcttgtcaccatctttcctggtggttctgagggcatcttgtagtaataatgggggtggtttgagtaatgcatttcagctgcagaaaccctgaacctgaagcccctttgaaatggataaactcataatgtgtggtgagacttgtcatccaaatgaattgcagtttcatgggtttatctgactagttgaaatcagttacagctgccagatgtgtaatttcattacctttgacatactgtgcatatttttagaggcagtaagctttgaaaatcactaagtgaatttggtaaataaaattgcaaaaaactaatttagcttgataactggagtaatgggtaaataaatttttttaaaaacctaggtcacataatcccaggccttccagctgataataatttcagcagttttgttatactctgcaacaatagttcttaaactttcaggggtcatgaaccctttcccaagaaaaaagttttcatataatttcagggtatttttaaatccctgaattcattacctccatggattctcagttaagaactccctagttcaacaaataaagcatcgttttcagaatttatttgttttgttttcaaaacataagttatcagtgtttgggaaggaactacatgtggactactataattacatttcttaaaattttcagcaaattggagaaagcaaacttaagtaggaaaaatgtttaataattgaaaaataaagcaaactgaaagcaaagtctgcagatcacaccctccaccttgccaagtccccctttgtgtgttgtgtcctgtagtgtgttttcttaacagccatgctgtttagattgaaattaccatttatgaagacagaggcatgagcagtggaagataaaccgaagaattaaaggtaaatatgaaatgatatggcttgtatgcagcttttgcaagtttagaggatgcatgaatattcttccccgcatggtaaataaatcattaaatcacgcagttaaataacagtatatttgctgtgttagcttaagctagtcactgtattagcttgatatttaaaatgtgtattcggcccaagttctatttggtgatagagaatttaattctgattttttttcctgctgtattgtgttcagactggttttgttgttactttggtgggggaatgggggatggcagttacttggcttgttttaatatttcaaaactatcctagacatataaatacttgggttttgcatataagaatgagttcagagatgtctacctatatgacaaatggctttaataagcaaaggaacatttcagaggggagtggggagattctgaatatttcatttattatgtttaagtggcttcagacccctgtggaagaaaccttacctactgagtagaaacataaatttcattcctttgtttaaagtattaatgtccttaaatatccagatgctgccctttaatgagtaagaaacaaattaatactactaagaatctctaggcagagtcacgttgaagccctaagtactttagcatagccttctaagtgacaggaagtagcacttcactatttctgccaattttagttacgtggtcttcctacagaaagtgttctgctgctgcgcttttctagttgactgtgcttataggtatctgtcactaattaatagacagcacagacacagaatgtaccaaagcagacacatgtcttcctagggcaacatcaataacagctaccattttgagggcacgtactatgtgcctggtattgtacaaatggtacttctgaatctcacaagaaccctacaaagtatttccccattttatagatgagcaaacttggatacaaatagattaaatgatgttctcacagtcacacagttaacgagtattgggatatgaacccaagtctgattgatcataaaacccctgtcttttacaccgtacttcctctcagtacttgcagcagcaggaacatggagaaagggaagagttcatcagataattctagaggtttatccccttctcttctttttcaatactttaaaaaagaatacattttgtctgctcctgtatgatttattcaatcctgtaagccatgcaacattccagagctgccttctttagcactagtgaatgtgtcacctgaattcctgaaagccaaagatctaaatcatgatatctatcctctgccatatgttgtatttccttaaaaaggctttgttttggaatacttagtgttacttgtccatacgctttctcatgtacaattttcaaactgatacttctcaaacaaccagcaaccttctgtgtggcttttgttccatgccatggtttgtatatcagttgcagctgcgatgacttggcacagcccatttgtcatgactcattttgcagctattgtgtaatcatgtgtttttctgatgtgtgaggtttgagcaattacacaccagaggctaatctatcaatattcaaataactagaattttgaaatgggaaagatttacattaataacttctggataccctctttcatgaatgcagatatttttgttcaacacaatttcgttttgggatttgggtgttcccaaggtccaggatgcaatgtgagctgagatcttagagaaggggaggaaactctaagcataatttattcaattcttccatttttcttcagtctgcaaggtgtctgcaatttgaagcaatatgtgggaattagtgacttaacaaaagactacacaaacatgaggatggcctttatttttaaaaggagctttaaacaaaaatgcctttctttaagcttaatttttataatatcttgcatatatctttattatcacattgttattgttacatgcactggtgttttctctctggattaagattgccatctttatataaaatggaatacatgattattccatcacaactagtgataataaaaacagctaatgtttgttggcacatctgtgccagcactattctaaatgcttaattttaatcatcacaacaaccctatgaggtagatattgttatccctgtttttcagatgaggaagccgaggcagagagaacttaagttgctggcccaaggacaaacagctagtagacagcagtcaaggcagcgtggctccatggtgatgtgcttggtcagagatctgaatatataggacttagatttgtagactattgagctgtagactcatttagacaaatggtaccaagatattttagtagataaaattctaggttagtagaacatagaccacatgttataagctgatatcagttgatggaagaaaaatggttttacaagttattttcaggatctctatcaaacctttacttctccctctaattacagatcccacttccagccgggcccctcatgtatccactggccgaccgcagagtgtccctacctcctctccagagcatcattcctttctatctgctgccagagccacggtgccatttactccaaggactcactttctaaaattccacacctggagtgacctctagtcgctcagcatccactttgtgtctccaaattgtgtaggactctgtaatcttttgattagtttctgagaaaacacaatgaagcacttcacttttttttattcaaagccatttaataaaacacagttggtcagcccagtgcaaagcttgttatctgccaccagtacataccattggttctcttcattccttgggccagcttctcaggtggctttagacctcaacaagccgtatcttcaccagtgttctatcttgttcccctaaattaataaaatgtttttctccaggattttggtgagggttggctgtggctgtcgttttgcacctcccagatttcaaagaattactggttttaccatgactcaaatcttaagatctgtttctactattcagttcctcaaactgaagcttattgaaaaaaaaatgtataatgttatttgttttattatagcaattatgcctaattaaagcagtatttaatgcaatttccagttatttctttggagaattttatgtcattgttccattaccttgaatgttggaaagatatgatacgtgctgcttgttcatcacaaaaatcagtaagcacaataaagtggatgccaaaccatcagacacataaatgttcccgctgtgtccctggatatggaataagcaggtataaaaaatattttaattatagttttgttataaatataacttatgagaaaaaaatttgataggaataatactgtatattactaatttttaactatccctaaggcaaaccttatgacccacagaattttctcatatacagtattcagtgcacagaaatcttatgattggctcaagtacagtaagttacttctcagtaaaactctcaagtctgagtccatatttgtagctctgcttttggctgtacgttcctaggatcggggctgcttatgcctttcgtttatccttggggtttgagagcgctgtatttgggagagagtttaaaaatacattaggagagagaaaccattaaaagtttcactgtcagatatattgtaggtgctaatactggatttcgtctcagatttaatttcttttatgggtctgttagtcattcaacaaatcccataagtatgtgttaatattttaattgtgtaaaactcatttgttactttacagcctgtaatagtgtgtctgcattttcaacctgttgcaataactttgctgaaatattaacacattaataaaacttttcttaaacaagttgtc

SEQ ID NO: 8479 - DNA, 295 bp, Homo sapiens
gatacatgcattgcttcaggtaattagatgaaaaaaacaaatcttttatttagaaataatactcctaatttattacgtaagaaccatgcagattgctctttgaataatcttacgctcttttgaagaagcataaaacatgagatttttttatccccaaaaaatatttgaataaagtgtttaaattacttttcttcaattagaaaattctttatatgaaacaggtagagttttaaattctaaatcagtttataccaaagcatctaaattgtgacatcctaatttgttaagtttggtc

SEQ ID NO: 8480 - DNA, 1368 bp, Homo sapiens
ctctcttccccggacagcatgagcttcaccactccctccaccttctccaccaactaccagtccctgggctctgtccagccgcccagctatggcacctggccggtcagcagcgcagccagcatctatgcaggcactggggggcttgggatcccagatctccatgtcctgttctaccagtttctggggcggcttggggtctgggggcctggccacagagatggctgggggtctggcagaaatggggggcatccagaatgagaaggagaccatgcaaagcctgaacgaccacctggactacctggacagagtgaggaacctggagaccgagaactggaggctggagagcaaaatccaggagtatctggagaagagaccccatgtcagagactggggccattacttcaagaccatcaaggaactgagggctcagatcttcgcaaatactgtggacaatgtccacatcattctgcagatcgacaatgcccgtcttgctgctgatgacttcagagtcaagtatgagacaagagctggccatgcgccagtctgtggagagcaacatccatgggctctgcaaggtcattgatgacaccaatgtcactctgctgcagctggagacagagatgggcgctctcaaggaggagctgctcctcatgaagaagaaccatgaagaggaagtaaaaggcttgcaagtccagattgccaactctgggttggccgtggaggtagatgcccccaaatctcaagtcctcgccaaggtcatggcagacatcagggcccaataggatgagctgtctcagaagaactcagagaagctaggcaagtactggtctcagcagactgaggagagcaccacagtggtcaccacacactctgccaaggtcagagctgctgagatgacacggagctgagacgtacagtccagtgcttggagattgacctggactcaatgagaaatctgaagaccagcttgtagaacagcctgagggaggtggaggcccgctacgccctgcagatggagcagctcaacagaatcctgctgtacttggagtcaaagctggcacagaactgggcagagggccagcgcaaggtccaggagtacaaggacttgctgaacatcagggtcaagctggaggctgagatcgccacctaccgccgcctgctggaagacagcgagggcctcaatcttggtgatgccctggacagcagcaactccatgcaaaccatccaaaagaccaccacccgccagatagtggatagcaaagtggtgtctgagatcagtgacaccaaagttctgagacattaagccagcagaagcagggtaccctgtggggagtaagaggccaataaaaagttcagaggtcaaaaaaa

SEQ ID NO: 8481 - DNA, 12961 bp, Homo sapiens
ccctgagcagcctccacccaatgggaggtaagtgtttcactgctgcagaggagcagcagcacccaggccagcagacccagctaacaacagtcttgggagtttggcatcgtttctgtgaaaacatttttttgcttattatgtaaacctgacctaggataaacatcccaggactcaattttcttgtctctatacagtggctctatggctagttgatgccacattgctctgacgttatctggtgcctcctaaccttttaggtcactgttgaagaagaatatggaaaagggctgtttagctcctatagactgaggctgttctctgataaggggaaaaaattgcaagaactctttatttccattataaagtgacttttccagtgactgcagaaaagccaaagatggcttccatgcaaatgccctaccttgaagcttctagaacccaggcatttggtttacctgtgtatcttcttgtttcttaggtgaattcctattttgttgttgctattatcgtacacagaaaacttaaatggagtgccacaacaaacctgagctagggcccatcaggagtcggttgggggtagggcattggacagctcaaaagctgcctgtgcctacaccctctgcattggatttaggctaggccacatgtgcatctgagaaaggcatagttttcagtgaactgcattttgctctttgaaaattttcgatagtcattcactttgtctcaggaaattatagttggctatatttttggaaagttgctagattgtaatctgtattgtattttaattctcgtttactctttccactccccccacccctcaccccatccatctttccattgtctagtaaatggtttgcagcagcgacagcacagtttagattccttcttcccctttcaactgtgttgtctgggctctacttggaagtctttcactcagtgatttttcctctctcctctttctggtgatgaatctgctattcaagtgacagtgtctttattctttgtgtcattgctgctctgctgtgttctcccttgtttgctcctgggccttctgcatctgccatgttttctgcgtgttcccctctattacagagagcgaatcccctgtaaagtgtgagtgaggggcctggatgcagtcccattctgtgctgtaggttttggcattgttctcctgtgctcctggccctatggtaggcagtttttcttggtttcctaattgcccacacctttattaatgtacacttggcatggtatgctattggattagccatctcttctctgaggaaatgatttcaagtttcttaatgagtgatacatgaatcatttttggagccctgtaatgttgtttgtaaggcttatctagaacagttcctctttgtcagggaccagccctctgccagtgtgtgcttgtcattgctggaatggatatgaagcacccttatctgctggctaatctcttgctttggatgttgtagggttgaatgcaatgcagttacagaatttggctgcactagctgctgcagctagtgcagctcagaacacaccaagtggtaccaatgctctcactacatccagcagtcccctcagcgtgctcactagttcaggtaagcatgaggatgacccagtgtgccattatgtgccttggacagatgctttgtgtttaaaggcagagtccagagagggaaaatagttaacacctgtttccagagaggtcagattatgagcaacaaattttcaaatgtcatcttttgtacttaagagaaatcttcctgattttcaatgtgctgtggccattatttgtctctgtcctgcaaggacagttgttagaattagtaactgaaaacctctttacaaatagcatacttggatagtgacactttttcttgtatttggcgagaatgccagtgatgggttgaattttaactccttgctttctaatagcagggtcctcacctagctctagcagcagtaattctgtcaaccccatagcctcacttggagccctgcagacattagctggagcaacggctggcctcaatgttggctctttggcaggtaaggggcagcacctggctgtcatcagactattctttgtgcaggtagcacatcttaaccctggtaggggcaccactggaatgattgcagtggcccagtgaagttaaaaataatcatgagggccaggtgtggtggctcacacctctaatcccagcactttgggaggtcaaggtgggcgaatcacgaggtcaggagatcgagaccattctggctaacacggtgaaaccccgtctcccctaaaaatacaaaaaaattagctgggcctggtggcgggcgcctgtagtcctagctacttgggaggctgaggcaggagaatggcatgaaccggggaggcagaagttgcagtgagccaagattgcgccactgcactccagcctgggtgacagagcgagagtccgtctcaaaaaagcatgggatttttaaatcagacctgagttaaatcccacctgtgtccgttagctagctataacttcggaccacctttctaaggacattttctcatctttgaagtgggaataatagaatactttgaaggattgttaaaaattaaatgaggccaggtacagtggctcatacctatagtcccagcagtttgggaggccaaagcaggggatcaccctaggtcacaagttccagaccagcctgagcaacatagtgagaactccatctctacaaaaattatctgggtgtagtggtgcatgcctgtagtcccagctacttgggaggctgaggccgggaggattgcttgagcctgggagcttgaggctgcagtgagctatgattgtaccactgaactccaacctaggtgacagagtgagactctgtctccaaaaaaaaaaaaaaaaattagaacataggtaaagtgctgctgagcacattgcatagtacagtagatgacacatagaatgtacttagtacctgttagttgctgttttaatggtagggttcacccacatcttgtcagaaatcacatgtacccctttgagtttgcagtcttgggcctcttcttttatgacattctagctcattatgagaaagtggcagaatagccagatagaaaatggaggctctcattccacagattggatgaaggtaatggggagcacaacacccgcgtatggcatttcttaatgtccccattagcaaggcctggtgaatgtcctgaaatctagccagtcagatagtttcttctcagggagaaactaagagggagataaaggggagaactttggagttttccctcttctagatgtcccaagtagacttgtctttggcatcagtttagtctttctagtatattaatccttctcttcctccaaccaaggaatggctgctttaaatggtggcctgggcagcagtggcctttccaatggcaccgggagcaccatggaggccctcactcaggcctactcgggtatccagcaatatgctgctgctgcgctccccactctgtacaaccagaatcttctgacacagcagagtattggtgctgctggaagccagaaggaaggtgagtgcaaagggagatcggggtcaggtatggggggcggttttcctcctataccagaacggaaaggcagagcaaaggctgagggaaccagttaggtcgtcagaccattgtttttctttgacagtgtcaagtgtagactgagaaaccctgtgaagtgtgatctgctttttaaatgttttctggatgtggctcaaatcagaacctctgtgtgccctcttgggatggggctgcagtttttagatgaagcaacagacactgaccttatcgggtctgacacatttgacaagaatgtttctgttaggaggtcttctctacagattacaaatctatcagaggatcttctgtctggatgtcttctgtttcagtgtcccttttagctatatcatttggcattttcctcactttctgattgatgtttgtcctgattgaagacaaactgaggggtgatgggacagagtttggcccatgagttgatggagtgggaagtatgtcgtttgacacaaatggtattcaatttaggagaaaaataggagagactctttagccagaaagaggcctgaaggtgacttacatgaatagaaggtcctgctgacacctctgtgctcagatttgactgggtttttataaccaggagctggtataagcactaatgtaggaaaaagatgagtgtcctcttgtcacagcagaaagtcctggttcatctctcctcacctgctgtgaatcacttatatcccctagggatgtggtagtaggagaatgtagcgtgaaccaatattttagtggagactgtggagacagacaataaataaatgaaagcatgaggtgtttcagatgatcctctggagaatgacaagccgggaagagagatagggagtgtcagaggcactgcattttatgcagaatgctcagagaatgtctctctagattgacatttaagcagagaactgaaggaagtaggaagcaagtcatgcctgaatctagagaaagaagagtaacaggggcataggaaaagcaagtacagaggccctgaggcagcaatgttccctgatgtgtttgaaaaaaacagggaggccagggtggctggagaatggctggactgcaattgtaataaagctttttggttagaaaatcattgagtaggctgggcgcagtggctcgcgcctgtaatcccagcactttgagaggccaaggcaggcagatcatgagatcaggagttcgagaccagcctgaccaacatggtgaaaccccatcgctactaaaaatacgccaggcatggtggcgcctgcctgtaatcccagctactcgggaggctgaggcaggagaattgcttgaacccgggaggcggaggttgcagtgacctgagttcacgccactgcactccaacctgggcaacagagtgagcctctatctcaaaaaaaaagaaagaaaaaaaaagaaaatcattgagtgtaaatagtcagatgaagaatgtatattctgtttttaagctcagtgttaatcatgggtgcatttttaaaactaatttcttattttcccatttacatatgatgaaactcactgattttggcatacagctatatgagtattgacaaacagtcctagtcctgcaaccatcaccacagattaggaacatttccatcacccctagaaattccctcgtgcccctttgtagtcattccctgcatctggcaactaccaatctgtttgctgtccctgtggtttctaggcattatttggaaacctgttttgtttataaccccttttcacctcctcttctgtgttcctctctgagcctacagtctctgttttcctgctccacacacaagtcggcctgctttattatcccaacactcctcctcctgcgggtagaatttctcacatcctcaatgagatggagcttggctgaatgtgagggaaggaatctgttttaatgtttgcctttggttccttgctttgtatttagagaatctgtttagttccccagatgaatctctgtttttagggattgtgacagttttaacataggtggaaatgaaagatcactggtgcagggcgacgagcatgtttgacactgatacttttccaattcctgggtattttgaaggtccagagggagccaacctgttcatctaccacctgccccaggagtttggtgatcaggacctgctgcagatgtttatgccctttgggaatgtcgtgtctgccaaggttttcatagacaagcagacaaacctgagcaagtgttttggtatgttggcttctctctggtgtcaggatgggattagtattttaccactgagaaagaaggagctcactgcagaaagatctgaatatgagtttgtggtgttgttttaacttggccatgggcaggtcattatgacctctttttgagccccagtttctcattgctgtagtggaggtaaggatttctacccacactgttgctccagagagaaaaataatatatggaaaatggtttgcaaaaaaacctttaaacagtccaggtttgtgcctgtaagtcccagtacttggggaggccaaggcaggaggatcgcttgagcctaggagttcgagaccagcctgagcaacagagtgagacctcatggctacaaaaaattagtcagacgtggtggcgtgtacctgtgttcccagctacttgaggctgaggtgagaggatcacctgagcccaggaggccaaggttgcagtgaaccatggtcacaccactgtactccaccctgggtgacagagcaagaccctgtctcaagaaaaagaaaaaaacctttaaattaccatgtagctgttaagtggtactattaagaacctaatttatttcgtatgacataatgtccagatttcttgtccctgctgaataaaattgggatttgagatgaagcacataaggtatcttgcataaggaggactgagaatctccttgcctcattatgtccctcacctaggtttctgcttggacacacaggttttgtaagttacgacaatcctgtttcggcccaagctgccatccagtccatgaacggctttcagattggcatgaagcggcttaaagtgcagctcaaacgttcgaagaatgacagcaagccctactgagcgtgctcccctctgagactggagtgagagggtcttctggtaagtgggggaggagcacccttaatgattcgaagccctgaggctgtgtgttgacagccctggaccctgatccctgccactctcgcaggcacagcttgccctgaagactcggcaactgccttctgtgggagtttcgcttcgtacagaggacaagtttgtgctttggtttccagtgttttactttggagtttaggtgccatatcctgaggttttttttgtttttgtttttgtttctcctttatttaaagtttgctgtgtttgtaaccagtgtgtgttgagaaggaccaacaccaaaccaccctggggaagggggacagggaaacatttaacacagacgatgatcaggatttgccccaaaccaccccaagagagaggactgagtggaacaaaaaagtgacccccagaacctctcttagtgtgagggtgggtagaatgagaactgacacctgggagctgtggggagcagagcggctttggggaagagtggagtgactagacacctaatgccctggcagctggagactcaaactcctgtacagctaccttctgggaaatagtttttgacacctatttttcagattcttgtccggaatttctgctgctcttttcaaaaaagggcattaacaattctctggaaataaagcacctgttagcctgacatatgcaaaaagcagggcgcatcacccattacgagctcccccagccagcagtcagtattggattggccttgcctggctggtggcagtttgggagaaacagccaaagaggttagtttatttcaacaccaaattagaccatggcccatttccaacgggtctctttaaaggcctctatggaatacattgcctggtttccttctttgcagttcaccacagcaaggaatgtcacctccatcccaagccaccattttctcatgaaggcaaatccaagaagggcttgcagttcttgctgaagggggtaccatttgtgggcagagtgatcaataccatctagttgggggaggaggagcttatttcttggtgtacttgaatcagaaggtccctgcaagccagtatgcttcatttgccagtggccagaaattctcccttgcctccttgattgaggtgtcccagatgtagtattcccacaggggtctggcaggcccctcctgtaaccactccagtcacattttctgctcttgaggcagaggtgacatcaggacgtttacagcctccacatgaattgagtgttcatttacctcagtattaccgtgttcatttttgtcctcgtgctacagttagctccctgccgcctcttgcaggtcttacttcagctcttgcctgtgacccacacagcttctgggctctgcctctgctctaagaagtgctgtgggggtagagaaccaggaaggacatgctgttgggaatgtacacctgggcagaggtggccctgttaagatgtgactgtagccacagccagggatgggatccctgggtctctggaatctgaaacctcaacaaataccagtcttgacccctagcagcagagataagaataaaggggttggtttgctattaagtcagatgggggctctctccttgtcatgctgtccctgtgggtaacagacagggattgaccatcttactgttgtacaggtagctggtggtgttggattatcccattgaagctgggacagctgttcctttctcatagtgataacttgggtctgttgtcctctaaggaacgtgaaacatacacttcttaagctgaaccacgtaaacttgaaattctgcgcactgggagaaatgtgtcctgtgtttcaaaggataaaactgttctaaaggcttccagggtcatgatgggattttttaaataaatgcaaaaaataaaaataaaaaagaaaaaagaaaacaaaaaaaaaaaagaaaaaaatgctaggttggggaggcgctgttctgaatcccaaccggctggaaccaagaatgtcgtttctatttttatagaagttttatacagctccggggtggagaatatttattacctaaattatatctctggaaaaggccaggattttgtagaatccagaatgtgattgttatacacacagggtgctgtgtatgattgaaactactgactttctgtggcccgtttgcagcccagctaacctgcccaaggggaaggtgttaatgctgtgaattggcagaggagagagctgtgctccatagggtgctgccggtgctgtgctccctagccttctgttctgtcttcctccttagccagaacgccactcccttcccacatccccttcttctctccgccttcccccatctcaccattatttgtccatggatttgtcctgggctctgggaccttatgaaacccctttcctaatgacataagaggccaaggtgcaatccacccacctttgataccagaccctgagggcttcatacctgctgatgggttttcttttctaaaaggaatgctcgccccagcagggtcctgggctgcttgagcagccagctggtgagaccatgcacttctctgttctctcctccccctgcccagtgagttagcacagcagtagcactgcccttgagcacagttctttccccaggccaaagatggttttgtgaagaagctgctcccctacaagtctcacgtgtgaaagggctcagctcagagtggagactcgctgtcaagtcttaagcaatccttttctgttgtgtgaaggtttcacttacaatgtgttttctgctgtagttttgtttcttacttgggttacatcatgaaattgatttgccttgaatgcagccagacccactgtctcctggggtcccttgagtgagcaggctggatggagctagagcttgatttctgggaacaaagggccatccccataagattgagcagaaattctggtcctcttccctgaaaaattttccccaccccagccagcatcttctgcttccccttgggttgtgaccagggagtggggagagaggctgaggctctgctcccctggagaccttctcttaggagttgggtgcttcatggaaaatccaagccttaggttcccttctgtctctggcaattagatgtgttcttggtgtcctccatgtcctttttgacttttccctgtgtccattgttagcatgtgcaaaagttccctgtcattacccaacccctgcccgcccacctcatttcagggctgtacacacagtgagtgttcctgttctctctctctttgtttggatgtattgctctgtgtaactcagtgggtctccctctttctggtttgtttttttttctagattcctgccgtttgttcatcgttgtgcctaaagcatgtcgatgtggcgtcaagtacatcgtccaaatccctgtctcttcagcttctctgatgcttgaactctcacctttgaccttgtgttgacctttgatgctgatgtgtatttttattatgtttgtttctttcttcgtttttttttctttttttctttcctttttttttccttttgtgctgccaaattggttttgctagaacgactgctgaaggggaaatatttaaacttgcatttgaatataaaaaaaatctatttttctagaacttcataagataaccacttgattttgtgattccaattctttgtaattgtcttcagagcagccctactagcacataccgcgtggtgtttgtatttctgtgaacacacagccagtccgtttctaggctttgtttctctgtgtgcttagttttaaagacaactttgaagtaaacaatgaaataaaagatgtcactaaaacctctgaggctcctgagcacattttgctgatacagtctgtggggcttgaggagaccgcatgtattgttctttcttttgtttttcttctgagttctcaactgcggagagcacctgaaccccctttcctttttgaccgcaggctgcactttgggccccagccagccctttttctttttctttttcttttgtggttcttccctggagcgactctggggagtcctggatatcccgcctgccccttcccctcagccccatgcttgttccaacagtctccacagcaaaatgtgatgctttgatttttttgttgttgtttttgtttttgtattgtttttgtgtttttgttttgaattttttcctttcctactaagattatgcccagaaaaaagttttgcatgtttcctgctgtttcttcacaccttcgtatatatcaccttcacctctctgttttctatagtttgtgcaaaaactgatcgatttaaaagggtttcaaagaagctgttttaaattgttgtagggttgattatttttttcaagattgtattgtttaattttgaagtggcaactttctcctctattgcccttagagcgtttgcctgtgcacttagactgtcacttcgtgtggcctccaggtcttaccggggcttccgggaggctggctgctttgctcagagagggtgggaagggggcctggagagacacgagaagcagaggtagagcctagaaggtggcagcaggtgggtaagaggcttatttagcacattaggggcagtgagcacctggaggaaggagggcgctcccaatcacccgtaggaggccatctgcacaccaagcggcaattcacctgctggcgcttttcctaggtgacaagcacaatactacagtcttcacactgtttacagccctgggcaccagccacccggcactggctcttcatcacagctctgctcttgcttagctagtggggtgggggaaagggcagggatttgtttttttaattgggtggagagccaaacagctactgtccctgggtgccaagcaagccagttttttggttccctgagggaaactgaccctcctctcttgtggcaccatccagcctcagggtcttggagacttgagtaagaatgtgagtggagggggagaggtgaggagaggagcacagggtggatctgtggagggaagaggttacagggggaggagctgatgatagatcccacccagacttaagctgctggtgggtgggtgagctgggaagtaggactgtccagggaagggtggagagatgtagctaggggctggggagggggaggtggaagcgctattgagcatcctccacaccaaggttgatgaaggaagggatcccagcagggtttctgctctggggctggcaggttgcctggtattatgcccaaggccgctctgcctgggggaaagggcagccaggcagaggcccagtgtctggtaggctgctgaatttcctggaaggggtgattggatggaaagaggccagaaaccccagcctgagagactgctgtgcaccccacagtctgactgcacagagccgcctctgttggcaggaggcactgaggctccccttcctgtgtattgagaagcagtgtttgccaatatattttgctttcaattccaagaggagctctgggaaaacctgtggataaaaccaaatgccaaatgttggacgttgtttccttttccttttctctctctgattgttttaattgttctgtggtggttttaatggatttgagaccctggagcggcagctgcctttctgatttccagctgctttttgtgaataatttaaaaagaaaaaaaaaaagaaactttacattttggagacaaacctgtgtgagttttttattggtacaaacgttgtatttaacactaggggttttgtacagttttttgccttttctactagaaaacaatgtaaagtgatttcacaatgtgaagagaaaaaaaaattgccactatgaccaaacgcacagtctgttctgcagcaacaacgggattcaatcaactcagtcgtgattcagccgtagaaatgcttttcctttatcttgtttgagcttttcctttctttcctgttttgatttgcaaaagaaaatgtcttttttgtgtgaacttgtgttgtactctgtagaaaattatggattttactttaatggtttaaaaaaaggcaaggagagccctcgtcgcttttcttacctaatcacagagtttgtgtagtgaatttaaaaagaaaaaaaaattgttataagtttggagcaagggagtatgtgtttcaaaggaatctccttcctttttttgtgtgtttttccttttgtcccaatggggaacctaaatctgttttaattgcacagacacatggacaaaaagtcattttgtatctgccaagtgtggtaccttcctttgtttatttgctattaaactgtttgagaagaa

SEQ ID NO: 8482 - DNA, 4135 bp, Homo sapiens
caggggtgcagttgggaaaacgaaggtcggaggggcccatggacatatgatgaaacgcactgattttggcatacagctatatgagtagtgacaaacagtccgagtcctgcaaccatcaccacagattaggaacattgccatcacccctagaaattccctcgtgcccctttgtagtcattccctgcatctggcaactaccaatctgtttgctgtccctgtggtttctaggcattatttggaaacctgttttgtttataaccccttttcacctcctcttctgtgttcctctctgagcctacagtctctgttttcctgctccacacacaagtcggcctgctttattatcccaacactcctcctcctgcgggtagaatttctcacatcctcaatgagatggagcttggctgaatgtgagggaaggaatctgttttaatgtttgcctttggttccttgctttgtatttagagaatctgtttagttccccagatgaatctctgtttttagggattgtgacagttttaacataggtggaaatgaaagatcactggtgcagggcgacgagcatgtttgacactgatacttttccaattcctgggtattttgaaggtccagagggagccaacctgttcatctaccacctgccccaggagtttggtgatcaggacctgctgcagatgtttatgcctttgggaatgtcgtgtctgccaaggttttcatagacaagcagacaaacctgagcaagtgttttggtatgttggcttctctctggtgtcaggatgggattagtattttaccactgagaaagaaggagctcactgcagaaagatctgaatatgagtttgtggtgttgttttaacttggccatgggcaggtcattatgacctctttttgagccccagtttctcattgctgtagtggaggtaaggatttctacccacactgttgctccagagagaaaaataatatatggaaaatggtttgcaaaaaaacctttaaacagtccaggtttgtgcctgtaagtcccagtacttggggaggccaaggcaggaggatcgcttgagcctaggagttcgagaccagcctgagcaacagagtgagacctcatggctacaaaaaattagtcagacgtggtggcgtgtacctgtgttcccagctacttgaggctgaggtgagaggatcacctgagcccaggaggccaaggttgcagtgaaccatggtcacaccactgtactccaccctgggtgacagagcaagaccctgtctcaagaaaaagaaaaaaacctttaaattaccatgtagctgttaagtggtactattaagaacctaatttatttcgtatgacataatgtccagatttcttgtccctgctgaataaaattgggatttgagatgaagcacataaggtatcttgcataaggaggactgagaatctccttgcctcattatgtccctcacctaggtttctgcttggacacacaggttttgtaagttacgacaatcctgtttcggcccaagctgccatccagtccatgaacggctttcagattggcatgaagcggcttaaagtgcagctcaaacgttcgaagaatgacagcaagccctactgagcgtgctcccctctgagactggagtgagagggtcttctggtaagtgggggaggagcacccttaatgattcgaagccctgaggctgtgtgttgacagccctggaccctgatccctgccactctcgcaggcacagcttgccctgaagactcggctactgccttctgtgggagtttcgcttcgtacagaggacaagtttgtgctttggtttccagtgttttactttggagtttaggtgccatatcctgaggttttttttgtttttgtttttgtttctcctttatttaaagtttgctgtgtttgtaaccagtgtgtgttgagaaggaccaacaccaaaccaccctggggaagggggacagggaaacatttaacacagacgatgatcaggatttgccccaaaccaccccaagagagaggactgagtggaacaaaaaagtgacccccagaacctctcttagtgtgagggtgggtagaatgagaactgacacctgggagctgtggggagcagagcggctttggggaagagtggagtgactagacacctaatgccctggcagctggagactcaaactcctgtacagctaccttctgggaaatagtttttgacacctatttttcagattcttgtccggaatttctgctgctcttttcaaaaaagggcattaacaattctctggaaataaagcacctgttagcctgacatatgcaaaaagcagggcggcatcacccattacgagctcccccagccagcagtcagtattggattggccttgcctggctggtggcagtttgggagaacagccaaagaggttagtttatttcaacaccaaattagaccatggcccatttccaacgggtctctttaaaggcctctatggaatacattgcctggtttccttctttgcagttcaccacagcaaggaatgtcacctccatcccaagccaccattttctcatgaaggcaaatccaagaagggcttgcagttcttgctgaagggggtaccatttgtgggcagagtgatcaataccatctagttgggggaggaggagcttatttcttggtgtacttgaatcagaaggtccctgcaagccagtatgcttcatttgccagtggccagaaattctcccttgcctccttgattgaggtgtcccagatgtagtattcccacaggggtctggcaggcccctcctgtaaccactccagtcacattttctgctcttgaggcagaggtgacatcaggacgtttacagcctccacatgaattgagtgttcatttacctcagtattaccgtgttcatttttgtcctcgtgctacagttagctccctgccgcctcttgcaggtcttacttcagctcttgcctgtgacccacacagcttctgggctctgcctctgctctaagaagtgctgtgggggtagagaaccaggaaggacatgctgttgggaatgtacacctgggcagaggtggccctgttaagatgtgactgtagccacagccagggatgggatccctgggtctctggaatctgaaacctcaacaaataccagtcttgacccctagcagcagagataagaataaaggggttggtttgctattaagtcagatgggggctctctccttgtcatgctgtccctgtgggtaacagacagggattgaccatcttactgttgtacaggtagctggtggtgttggattatcccattgaagctgggacagctgttcctttctcatagtgataacttgggtctgttgtcctctaaggaacgtgaaacatacacttcttaagctgaaccacgtaaacttgaaattctgcgcactgggagaaatgtgtcctgtgtttcaaaggataaaactgttctaaaggcttccagggtcatgatgggattttttaaataaatgcaaaaaataaaaataaaaaagaaaaaagaaaacaaaaaaaaaaaagaaaaaaatgctaggttggggaggcgctgttctgaatcccaaccggctggaaccaagaatgtcgtttctatttttatagaagttttatacagctccggggtggagaatatttattacctaaattatatctctggaaaaggccaggattttgtagaatccagaatgtgattgttatacacacagggtgctgtgtatgattgaaactactgactttctgtggcccgtttgcagcccagctaacctgcccaagggaaggtgttaatgctgtgaattggcagaggagagagctgtgctcatagggtgctgccggtgctgtgctccctagccttctgttctgtcttcctccttagccagaacgccactcccttcccacatccccttcttctctccgccttcccccatctcaccattatttgtccatggatttgtcctgggctctgggaccttatgaaacccctttcctaatgacataagaggccaaggtgcaatccacccacctttgataccagaccctgagggcttcatacctgctgatgggttttcttttctaaaaggaatgctcgccccagcagggtcctgggctgct

SEQ ID NO: 8483 - DNA, 766 bp, Homo sapiens
aagtgtagacgtgggtgctagtggactgtgtgatagtacatcatcattaattatgaggttctttctggactatgtggacttgagttagccaggctctactgtcctggaggagttggtttttatctttttatcctttgagaagcggggggaaagggtgtataggtgcattttttcccccattctgttcctggaggtttgtagacctcctgaaacttatccatggtctctagcctggaaggatttgcggcgacagagaaaccaggtcagatgtttataggaatgggaaacaggttgaataaaaggatcctgtacaagaataccaattttccataaacaatactaattgggtttagttggagcaaaagttttcagcaagctggttagatgaaggttgtggtttgccaatatacaaagtaaactaatgccacaaactcagggacaggccctcttactttatttgtcatgggaccatcattgaaggagaacgtactctgaacctggtatagactaatccatcagtcatttggtcatctgcaacagggaagaccagtttggaggggaggaagtaaataaggttggatagatgtgtagctggagtgattattagtcatgtggtccattgtgaccaataaagggtaactccaagaaatactatgaaatgtttagatttgatatttaaaatagttgtgtgaagtagaaattgagtatccagatggaaacaatctgcagagtgagatgtgtggacctaactaaggagaacttggga

SEQ ID NO: 8484 - DNA, 1639 bp, Homo sapiens
gttgatcaatgttaggaagcttgctaatgacactctcatccagaacttttggagagtagggagaaactaacaaaataacagagagccgaggaattccacttttactaatcattcattttgaataatctcacttatttactcagtaaatatatgttgcttgcttaccatatatttatttcagtaagtatatgtcgcttgctgggtcctggtaatgacagtggtgagtttccttcccttgttagtgggatctacagccacctataacttaagattctcccccacacagcccagacatacacacaacgctaagatctgaatgcctgtgcccccaaaaattcataagttgaaatcctaacccccaaggtgatgtgaaaaatgtaccaaaccctgtccagaatttttgggaatcgcctcccagatactttatctagagactctttgttctacttccccacaagtttttcattccagtatttaatcattgagtgtttctgcttgtgatacttgttgcaaagtcaatgatagtcaaagaagttcaaaaattggttactttggacttaacaagcaaatgcacttctaggtggcttttgaaaaccaaaagtacacctaagtagagggcttctgttttttatagtgattatatgaagagtaatgggtgaaaagcatcaaagctggaattggagctctggggtctacaccgtttccaatgaatcattcctaatgtgatgctttcatccatgctcttggctctgtctgggatgtctcctctccgccaggccctgatttcagtcatccaggccgagtttaattatgtataactgtcttcgtttatttggggcactaaaacaaaaataacaaaaatactatagactgggtgtcttaaacaccaaaagtttattactcacagttctgcaggccgggaataccaagattaggttatctgcagattctctggtgaggacctgcttcttagttcacagacagcatcttcttgctgtgcccttccatggtataaggggtaagagagctccctgagatctcttttagaagggcactaatcctattcatgagggctccactctcacagcctaatgacctcccaaagggcccagctccaaacaccatcacgacaacatatgaatttgtgggagatataaacattcagcctatagccataaccagatgtttttgcaaccaagatggtgaattcttcctgagcacgtgccagtcagactccaggagagcagggatcccatgcacttatgtacttccatccatctcacagcctccatcgctttcagaaggttgagctgcccccaggtaccaaagcaaggactggaatatagctgagagatagaaatgttttgcaaaatgttgcttacagattcagaacttaaactgatttcgatctcttgggaaagaaatatgaattctaatctgatttcaatctctctggaacaaaaaaccttttgtatctatctttcttcaatgatgggaaaaagtaaaataccttccaagtttccactaatccttctactgatgtcttctatattcgtgattcagatgtgccttgtagacaagcacagatcttcactgctcacttctgccataaatgcttcacaaatttaaaaaaaaaaat

SEQ ID NO: 8485 - DNA, 1637 bp, Homo sapiens
gttgatcaatgttaggaagcttgctaatgacactctcatccagaacttttggagagtagggagaaactaacaaaataacagagagccgaggaattccacttttactaatcattcattttgaataatctcacttatttactcagtaaatatatgttgcttgcttaccatatatttatttcagtaagtatatgtcgcttgctgggtcctggtaatgacagtggtgagtttccttcccttgttagtgggatctacagccacctataacttaagattctcccccacacagcccagacatacacacaacgctaagatctgaatgcctgtgcccccaaaaattcataagttgaaatcctaacccccaaggtgatgtgaaaaatgtaccaaaccctgtccagaattttggaatcgcctcccagatactttatctagagactctttgttctacttccccacaagtttttcattccagtatttaatcattgagtgtttctgcttgtgatacttgttgcaaagtcaatgatagtcaaagaagttcaaaaattggttactttggacttaacaagcaaatgcacttctaggtggcttttgaaaaccaaaagtacacctaagtagagagcttctgttttttatagtgattatatgaagagtaatgggtgaaaagcatcaaagctggaattggagctctggggtctacaccgtttccaatgaatcattcctaatgtgatgctttcatccatgctcttggctctgtctgggatgtctcctctccgccaggccctgatttcagtcatccaggccgagtttaattatgtataactgtcttcgtttatttggggcactaaaacaaaaataacaaaaatactatagactgggtgtcctaaacaccaaaagtttattactcacagttctgcaggccgggaataccaagattaggttatctgcagattctctggtgaggacctgcttcttagttcacagacagcatcttcttgctgtgcccttccatggtataaggggtaagagagctccctgagatctcttttagaagggcactaatcctattcatgagggctccactctcacagcctaatgacctcccaaagggcccagctccaaacaccatcacgacaacatatgaatttgtgggagatataaacattcagcctatagccataaccagatgtttttgcaaccaagatggtgaattcttcctgagcacgtgccagtcagactccaggagagcagggatcccatgcacttatgtacttccatccatctcacagcctccatcgctttcagaaggttgagctgcccccaggtaccaaagcaaggactggaatatagctgagagatagaaatgttttgcaaaatgttgcttacagattcagaacttaaactgatttcgatctcttgggaaagaaatatgaattctaatctgatttcaatctctctggaacaaaaaaccttttgtatctatctttcttcaatgatgggaaaaagtaaaataccttccaagcctccactaatccttctactgatgtcttctatattcgtgattcagatgtgccttgtagacaagcacagatcttcactgctcacttctgccataaatgcttcacaaattaaaaaaaaaaaaa

SEQ ID NO: 8486 - DNA, 1547 bp, Homo sapiens
gaattccacttttactaatcattcattttgaataatctcacttatttactcagtaaatatatgttgcttgcttaccatatatttatttcagtaagtatatgtcgcttgctgggtcctggtaatgacagtggtgagtttccttcccttgttagtgggatctacagccacctataacttaagattctcccccacacagcccagacatacacacaacgctaagatctgaatgcctgtgcccccaaaaattcataagttgaaatcctaacccccaaggtgatgtgaaaaatgtaccaaaccctgtccagaattttggaatcgcctcccagatactttatctagagactctttgttctacttccccacaagtttttcattccagtatttaatcattgagtgtttctgcttgtgatacttgttgcaaagtcaatgatagtcaaagaagttcaaaaattggttactttggacttaacaagcaaatgcacttctaggtggcttttgaaaaccaaaagtacacctaagtagagagcttctgttttttatagtgattatatgaagagtaatgggtgaaaagcatcaaagctggaattggagctctggggtctacaccgtttccaatgaatcattcctaatttgatgctttcatccatgctcttggctctgtctgggatgtctcctctccgccaggccctgatttcagtcatccaggccgagtttaattatgtataactgtcttcgtttatttggggcactaaaacaaaaataacaaaaatactatagactgggtgtcctaaacaccaaaagtttattactcacagttctgcaggccgggaataccaagattaggttatctgcagattctctggtgaggacctgcttcttagttcacagacagcatcttcttgctgtgcccttccatggtataaggggtaagagagctccctgagatctcttttagaagggcactaatcctattcatgagggctccactctcacagcctaatgacctcccaaagggcccagctccaaacaccatcacgacaacatatgaatttgtgggagatataaacattcagcctatagccataaccagatgtttttgcaaccaagatggtgaattcttcctgagcacgtgccagtcagactccaggagagcagggatcccatgcacttatgtacttccatccatctcacagcctccatcgctttcagaaggttgagctgcccccaggtaccaaagcaaggactggaatatagctgagagatagaaatgttttgcaaaatgttgcttacagattcagaacttaaactgatttcgatctcttgggaaagaaatatgaattctaatctgatttcaatctctctggaacaaaaaaccttttgtatctatctttcttcaatgatgggaaaaagtaaaataccttccaagcctccactaatccttctactgatgtcttctatattcgtgattcagatgtgccttgtagacaagcacagatcttcactgctcacttctgccataaatgcttcacaaattaaaaaaaaaaaaa

SEQ ID NO: 8487 - DNA, 425 bp, Homo sapiens
ctcagcttattctcccccaaagctatgcagagccttctgacctttcagaaggtttgcaccctttccctgtaatttctcccaccactctgactgatctcctgcaatgtttaactggtgttatattctaagcttaatcgattgcacacttaaaatgttcagaaaacactcaggatagtggacaagaatcatttcaagtccctgaaacctcaaagtctttagcatatactaaccttcaggtctacatactgatgtgtaattttcaatgcactgtcaataactatcaataacatcatacacacgcacacacacacacacacggccattttggatttgatttttacattgcagttacatatataaaagtgaagttatagattttaaacatttgcatatttcttaaactttctttttaaggatatatagat

SEQ ID NO: 8488 - DNA, 371 bp, Homo sapiens
aaatgggaccgccttcacctttcccaagtgaaaagtcaaatttcaacccacccctattattcactccatccagccttcactgagtacttacattgtgctggggactagggacacaagaactgataagacaggaccctgctcattgtcctctgctcattcccctccaaaaaagtctaggatctgaatgcatgccagtctccacctcatccagtgtataaatctattccaaccctgtggttatgtcactgtgctgagagtgcattgtgctatgtcttgaagacgtctgtcttgtacgttttaaaacatgtcaaggttattataaaataaatgcatcaaagcaatacttttgccagctttcaacttatgaatat

SEQ ID NO: 8489 - DNA, 372 bp, Homo sapiens
aaatgggaccgccttcacctttcccaagtgaaaagtcaaatttcaaccccacccctattattcactccatccagccttcactgagtacttacattgtgctggggactagggacacaagaactgataagacaggaccctgctcattgtcctctgctcattcccctccaaaaaagtctaggatctgaatgcatgccagtctccacctcatccagtgtataaatctattccaaccctgtggttatgtcactgtgctgagagtgcattgtgctatgtcttgaagacgtctgtcttgtacgttttaaaacatgtcaaggttattataaaataaatgcatcaaagcaatacttttgccagctttcaacttatgaatat

SEQ ID NO: 8490 - DNA, 1577 bp, Homo sapiens
ctcccaaagtgctaggattacaggcgtgagccactgcgcccagcctttaggttttattttcaatgagagtttttattttccattacacataactgtctttttaaaaaatatttacaagtgctaggtaatttcatcttccactattcccccaaaatacttcaaaatataggattttagtctcaattctttttttctcatctacaaactgttataattttacctgcttgttcattccaaaggtttgttatcagagtccagttacataacatactctctgaaaaccacaaagtactttccgaatgtgagatagtagcagtgctatcataattttggttctgactatagcacaaatagcttttaaagatagatttacttgagccatatatgtgggtcctctacaaataagactattattattctggtgtctttttccatcgtttttaagttacaggataattcctcccagtaaaactagcctccaaaggttttaatggcaaaatccaagtattcaaatctataatcagccttttaagcaggaacttaaaatgacatgacagttttaattatcttgttcttcgtccaagagtcaagtagtaggcatgagtacactttttacatggcttatggttttacgttatcttctaccaaacagctgttttgtacttaataggcctagtttctgtaacccatttggaacttcccccatcagctgtcgaaaggcttcaagttgagaaacactgcactgtggcttcttcaaatggcttttcttttttgagatagggtctcaatgtcacccaggctggagtgcagtggcgccatcatggctcactgcagcctcgacttcctgggctcaagccatccccctatctctcagcctcccaagtagctgggactacaggctcgcgccactgcacctagctaatttttatattttttggagagacggggttttgccatgttgctcaggctgatctttaactcttgggctcaagcgatccacctgccttagcctcccaaagtgctaggattataggcgtgaaccaccacgccaacctcaaatggctttcctttaaaatttcttgagcctagtccgaagatagtgagttatctcagttgattgttcacagtcagttacagattgaactccttgttccactcttttccccattctcactactgcacttgactattctttaaaaaaaagaaaaaaatttctgaaatgatcggggaaaagctgctataaattttatgaagttgagagtagaaattgaatgtttaccatttggggccacatttcaagaacactgaagaatggaaagtgggcattaactgaagcagacacctcttgaggtaagatttgtggaagaagaggttaaagtgtgccagaaatttgggttaccctcctctagaaagaaattccagtaatggatctgtttaagtgttaagggagcagaagagaagacggtgaatgtacttcaatattttgaacatttttagaaataggaattcttgagtctcttttctttcttcagtcttttccatttctttttcttttctttttcactgtaatttctgtg

SEQ ID NO: 8491 - DNA, 962 bp, Homo sapiens
atcagagtccagttacataacatactctctgaaaaaccacaaagtcactttccgaatgtgagatagtagcagtgctatcataattttggttctgactatagcacaaatagcttttaaagatagatttacttgagccatatatgtgggtcctctacaaataagactattattattctggtgtctttttccatcgtttttaagttacaggataattcctcccagtaaaactagcctccaaaggttgtaatggcaaaatccaagtattcaaatctataatcagccttttaagcaggaacttaaaatgacatgacagttttaattatcttgttcttcgtccaagagtcaagtagtaggcatgagtacactttttacatggcttatggttttacgttatcttctaccaaacagctgttttgtacttaataggcctagtttctgtaacccatttggaacttcccccatcagctgtcgaaaggcttcaagttgagaaacactgcactgtggcttcttcaaatggcttttctttttttgagatagggtctcaatgtcacccaggctggagtgcagtggcgccatcatggctcactgcagcctcgacttcctgggctcaagccatccccctatctctcagcctcccaagtagctgggactacaggctcgcgccactgcacctagctaatttttatattttttggagagacggggttttgccatgttgctcaggctgatctttaactcttgggctcaagcgatccacctgccttagcctcccaaagtgctaggattataggcgtgaaccaccacgccaacctcaaatggctttcctttaaaatttcttgagcctagtccgaagatagtgagttatctcagttgattgttcacagtcagttacagattgaactccttgttccactcttttccccattctcactactgcacttgactattctttaaaaaaagaa

SEQ ID NO: 8492 - DNA, 759 bp, Homo sapiens
gtgcggtggaatcggatgtgagaggaataactggggttgatctatttggaactacagatgcagtggtgaagcatgtactagaggtacttatctttatagccaggggctgaatatgggctgtcatcttgggaaagtcacagtatgttgttcatttattcattccttcaacaaatatttacagagtgcttattaagtgccaggcactgtttgaggtactagaaatcaaattgtgcgtgaaccaacagagaaatgaagcttatgtgccacctgagggagagtcttattaccttataaacccagtgggaaagggagaaagccaggcgtagacctcatcaccatcccaaagcagagcccattctcaagctttctgtaaggcagggcagcaggaaatttaatcggagttatcgagaaccagccatgtgtaacttttgtgcaggtgggaaaacagaaaagcataagggaaagaaactagtttttgttctaaaaaattatctaatcttcatagctacccactgaagtagatattattatccctatttagcagacaaaaaaaaaaaagagatttagagaaattaagtggtctaccaaaatctacatatatctagtaaataaatgtaagaaataagatttgaatttcgatctgactccaaaacccaggtgcttttcgctgcatcatgatacatctcaataatactgctaattcaaaactgccttatccaggattctgtcacaatataccatataactgtataaataggg

SEQ ID NO: 8493 - DNA, 23556 bp, Homo sapiens
aagctgacgctattggtcggtgtggccgtcgctctgcgcaccgcccgtcccccccacgaccctttttaaggccgcgcgaccgctggcgcatcgcctggagcgcggcagcaagcgtgggaacgcgggcggcgagacggcggcaggacggcggcaggtaggcacagtgggcgggtagggcgcccgtgtcccgcgcggtccggtcccgcggggtccccgacgccaggcggggcgtgggggtggaactacctaccgtaatgtccccgggcgcagctcagtggccacccgtgtccctctctgctttttgcctattttccagccacctaagtccaatctgaatgcccaagtcgttgattgtcgtttgcctgtttccaaagattggtagatagatgcctttttaaaaatctcatttttctttaaatctggtttacatggaaaacgttaggagagctcatataatgaacggcaatagcaaccccctatcttgaaacgcgctctatcatcccactgaaattctaccacgtggaataatgcttggagggtcagagttgtggaactgcccaataaccaatcgttactgagggttagtttgtgaaggaggggacagactgcttctaaaattctgtttaatgacagtcaattaagatttctgagtctggcttgagggcctttgcttccatcacagcccagtcgtccttggcaagagagtctgtatatgggccacagctcacaaaagcattgtttgaaaaaatttattgaaagaacattgtttgtaaaatgagtcccaatacataggacagactttcctaaggtgagatgtgttacttacccagagctgtgaaaggctttacggatggaaactagagactgaattttccagaattttaagaagtctccccaaccaatggccccccactttctttttttaaaccaaaggtaagaactggtagttaaaatgacagttcaaagcttgtccttttgggttacggcagcttcctctatgaaaagatttgggagtgattcagtcacttgaggaaggttggtgccagagagagaaatggctttggtgctttctggtctagtgatgcgggtatgctaggccagagcgagtgccctgggccctccgaggcgggggagagggtggggtctgctgctgccagctcaggtgtgacctgtaatctggattaggtgggcccagggcaacctcttatcacgtccctcctggaaagcctgactgctgtatacatttctagggctgcagatagggcttggccaatagattacctcaaaatcaagaagaggaagttataaacatgtgattagacttattaatttttcctggctgggcatttggtggaattcgtttgttaatgtttaataaatcattatggatcataactgtagtagaatctcaggcttttgatgttacttagaatcttggaggagaccacgaaggacacacagacgtggctgcacatgtgcagagatcttgtaatgtaactatggcttttctctgcaccatgtgtgaaataagctgccgctggcgttggggcgccggcctgggttccaacacagtccgctggctgcctcggtatttgccgtgcctctctgggcctcagtttttcctctcttaaataaagaggggactggattagatgatttctaaagtattttccagctttcagatgctatgacttactcttctctttttccttttaaaatttctttttcctgtaaatcaccaagatagttgtcctgaacagtttagatgttatgaatccattaggaatcctgataagaaagtgttgaccctctttctagaaaaatgcgtgtactaacaaaatttttgcttttggttgcaggaggctcaggaactgtggattctagtttaagaaacttgtagcaaggaaatcaggggagttgaaagtctcagaagccaacccctatgttgtgttctggccacctctgtgcagctcattcctcaatctaggagaaatttttctaccttgccccaggaaagagctgctaacttgttttcggggagtgtgggggggtctttggtattggtgttccatttctcttctcaggtaccctctcccaagtctgtcccttctttatgataaacacagtggcctgctttagaattctgggtctcttgagatacagcctctcaacttacaggtgaggaagcctcagggagaggttcaagtgacgtcacaaggtctggttagagaaaagcctttgccagagttcagagttttcaaaccaaggtctaatttgggtgggcgcagtggctcacacctgtaatcacagcactttaggaggctgatgtgggaggatcacttgaggccgagagttcaagaccagactgggcaacatagcgagatcctgtctctaaaatgtatatctgggtgtggtggcatatgtctgtagttccaggtactcaaggggctgaggcaggaagatcgcttaagcccaggagttccaggctgccgcgagctatgatggcaccactgcactcctgcctgggtgacagagcaagaccctgtctctaaagaaaaaaaaattgaactcatccccttttaaatccataaacgcacaactgaggttgttggatggggaatttaagaaatcccacctcctcctccctgggacctggccctgtttcccgtctcatggccacctgcagggtggctgaagtttccagaatgcgtacttcttgtgaaggttctgattgatattttgctttctggaccagtgtggctctaccatattttgggatgttatgtcttgttactgctgattgtttcaaactcgtttgcccaaagaggtcacattttaatcagaagaacaaaaatgctatttttttttttttttgggtgggcgtctatccagctgtcttggggatttccagcactgttcttggaaatgttggctctaagtcgataggtcatgctagttctctctctctttctctgtgctgttggggaagctgtctgcttgggtgagagtgttcttccaaaggatgtctttgggtgccctgggatggttaggtccctagagtgggacatgttctggaagaggagcccagtgaactttgccctgttcggtagctgcagtttatttcctcactcttgtccctatctttcagttggtcgtaggagttgcccaggaaggaagtttggataataataatgacatctggcgtgtaaggtccaggccctgtctcagttgctttccgtgtagcatctgaattctcttacaaccagtacaggtagtgttttgttagctgcatctgggactgggtagctgatgccctgagtttaaatgctgatccagcgtctcccagctgagcggtggcgggacttgaatgagatcgcggttctgtctcattctcaaactgctgctcttatcactgtgaaggaacagctatttagatgggctggcctgagggcctcctctttcccagacggcacggacgcagtattctatcagggaatgtggggccagctgggcatctggtagcccagttggttcttcggataatgggctgctcagtgaaggaacctggtgctgtaaaagtgattccccctctccttccagtcttgggctaaaactggagctgttcactgtggttgtatctgcctgaaaggaaagggcagatgaaagctggaaggagcacagccagcacagtgggaggggcctgcagggggctgctggtggctgcaggtggctgcaggtttcccacggagctttcagtttgcactcagggctgtgaggtcatggaggccagcattgccttctcatggcaggtgtcccggagtccctgaatctgtgggtttcccccaagccagcacctttgctgcaaacctctgagtttcctgttagcagtttttgggttgctgtgatgaatgagacaatatccgtaatatcacagcgtgtatttctgtctttccaaggatgtgtgaccggaatggtggtcggcggcttcgacagtggctgatcgagcagattgacagtagcatgtatccaggactgatttgggagaatgaggagaagagcatgttccggatcccttggaaacacgctggcaagcaagattataatcaggaagtggatgcctccatttttaaggtaaagagcccagctcccttccccactgtgggcacagtgtctcctttccctcatggactagtggagatgttgagtgacatctttctcatttacttaaaaattaatccagttttttaaaagcaaacattggttcaggagtgctgaatgtgtctcagacatgtacatgagctgatttcacatctcttgaattacggagtcacttttgtggtcgcttgtattctgatgaggagatcgaaggctcttttcttctcttttctgctgcttccttttcctgatgagccaagtgggagaaaatacttcgagaccttcacgctaagacctttccccacgggcttccattagaggcgatgcatataccagggaaggtttcagtccttgttctttcaaagctgatacttctgcctggcattgtagggccagctcaggagggtgagatgccatctgtcattcctttgggggctgggccgtgtggggggttgtgaacctgcagcagatgtctaaaaatagtctcacctcccttgagagtaatcggttccccatgcgtggagagacgtgatggagggtttgttctgtgccaggcctggcccacggcttgttttctgctcacatgatcctgtgtggtagatgctgttcccaccctcattctatagaggcactgagaggagaagtgacttgttgaggtctcacagctcttgtatgacggagccagcattcagatgcaagatggcccaactgtgaacccttggtcctaactccagaatagctgatcaacagagatttcttgccattacacctagattcagacagaggaaccaggaattagggcagcccagctctgcagaccagctgggctatcgaatgccttgtgggtcatcagagtcctgtgtgggcatctctaaggctccagatgtccaggtttcacctctgggagattcggagcccaaggtcaaggtcaagctagacttccacgtttgccagtgtggacactacacgtagtctgagtcctagcccaggttataagccattgccatgtgtgcttattctcttgcatttgggggccagagatggggaggggagagtgagtgtgggagaggggtgaaaggggctgagttgttgggggccagaatcagacctgagaccacaaacaaggtgtggagggggtcaaggctgtaggagcccatgacagtgctggactcccagccacagatgactgtcccctgacaccagagaacaaaaatgacaaaagatcacaccttaaccccagagtggaccataaataggtcaaaggtagcttaagatgcattttggtcctgcacgtctctgcctgaccgatgtttgcagtggggctgtgcgtttcagtaattctgttaaatctgcaatttgaggttgctgatcttcttgagaatctgatgcccattactgaccacgccaaggaatatggggacaagggaacgctttgcactcactttcgaggggtcccttggtgcccccacacgttccagattctttctgatcaaggaccccaggtcagggagcctcagcaccaagaagttttgtgatgccactgcctgcctcctcacccttagtgccattgtggatttctctcttgtttgattgcagatcttttttttttttttttttttttttttttgcctttggcatcatggtgaacttctcttgggaaggactgcaaatgtaaacagtgccagagtcccattcagtcggttgggaactctgcattatagataaccccaaaagccggaatttctctgcctcgccactgttgatgtctgggtctgggcaattctttgttgtaagggttccctatgccttgtgggatgtttagtggcatctctgacctctacccaccagatgccagtagcatcccctcccctactgtcacaatcaaaaatgtcttggacattgccaaatatctcctggtggggcagagtcttcccctccccattaagaaccctgataagagctggccactgccaggatcaacagacttaaccagaggtgttgggtgctgaaggcacagttgcaggttggacatcagtaaaacatctttaagacatggcagagggtgctggactaggctgtgtagccctgacatgtggcatgctgacggagacgaagcttctcccttcaccccattccctacttcaacttgtgctcgggggggggtaatgaaataaagccccagatttatacatcttatgcaatgttcttcatggccgtttcaacagtgttgagaaaaatgtgcaagattcccaatgtttccgttggttacgcagtcgcctgatgtggcaatctgaaatgagtctaccatctcagcaggaatggggccaggagggagacgcgggtgcccactggagcagggaggccatcgggagggccaccagtgccggtggagacatggcgccagcaagagcccatcatgtgcttccctgagctatgcttcttcccatccatcctctgagaggcctgtctctgtgacgttggccggatagatctttggctgttggatgaagtcaacctcggtcaggtagagccatcttagggattttccggttatgtagacacttgtttctttcaactgttcaaagaaaacctttcaacaatttaggagttaagaaagaaatttatgagtttggtttcttccgtaataagtggatggtaaaaggggccacttataccagaaaatccctcattgtctgcaggcatcatcctgaggccggcctcatggtatagatcacagaagagaaattgaaaaaacattgagctcattttgtaccgaccctgagtacactgatgaggccctgatagcaactcatttaatttttaaaaagtactttaccttcttgacatgacgacaaggggggaaaatctagttaagtgaggattatgattcatggttattccaggcatcgtaacagtcctgaatgagttaaagctcacttagtagcacagatatttctcattcagcaggccttgaagggaaaaatagcatttaattaaaaaaatgcaacatgaaacaatcatattaaattaggaagacctcctggtcttagttcagtgctgtcagcctgagttgtgcgtcaacaggagaaataagttatggtggaggctgaatgagccatagtgactgttgctggcggcaggggtgggggggccctgaaatcactctcatgtctagtttttgctctagctcaagaaggatctcgagagatcatcaagctaagttgaccttttaatgctggccagagaggctgggagagggccaggtgcctgctgtgtcacagagttcagggcaggcggcaagccaggtacccgatggtggccctggatgcttcctggccgtgggccctgctgtgatggatgatgtggcctggacttgctcgtggggtgagtgtgagcttggcgtgaacgagtgagtatggcagtgccttgcaggcaccgcggttgcgtatgtgtaccagcggatcacaacgttgccatgaaatctgtgcatttcaaggcccgtttgggatgtgggttaactcagtggttctcaggtgggggaggtatcatgatttaccctccagggaatacttggccatgtttggagaccttttttggttgtcacagctaggggaggggtgctattggcatctggtgggtcaaggctagggatgccgctgaatattctacaatccacaggaccaccccgccacaaagaagggtcccagctgatatgtcaggcttgccacggtggggaaaccctgatttaaagtaataaaaatttgaaactacagttgatttagtacatggtttgctggtttatttctttaaaaataaacaacagcaacaaaacccaaattaatgcccggtcagtgatgcagtcaatgaagagagcattaaagaccgtgtgctttaagaaatagttttagaggggagttttacatcaatgtcacatgaggaaactaccacttatgctcactaatgggaatgttcttccagtctctttaccccaggtagaggtgcaacattttgcatcaacaaagtaggcagcattggccttgaacagtaagcattcttgtcttttttgagaggaaaaacagtctgggctattttaaaggagctgtgactcatgggggcatgatggagtttctggaagtgtggtctcctgggtagctaaatccaaatccctggaatactggctaaagacagctacctgggccgggcgcggtggctcacgcctgtaagcccagcactttgggaggccgaggcaggcggatcacgaggtcaagagatcaagaccatcctggccaacatggtgaaacctcgtctgtactaaaaatacaaaaattagctgggtatggtggtgcacacctgtagtcccagctacttgggaggctgaggtaggaggattcgcttgaacctggtaggtggaggttgcagtgagccagattgcgccactgcattccagactggtgacagagtgagactccgtctcaaaaaaataaaaaaactaaaataaataaaaataaaaaataaaaaaagccagctaccgagacccaacctcccttccccagtgagaatcttgaggggcaaggcccaggaatctgcattttcacaagcttcccaggggcagggggttggtatatgcattaagcctgagaacacttgctgtggtggggaaactgttgggttggaagtgggtacagctggcatttaatcccagactgggtggccttgggaaagttacttacctcttggaattgcattttcctgaagtgggtacagctggcatttaatcccagactgggtggccttgggaaagttacttacctcttggaattgcattttcctgaagtgggtacagctggcatttaatcccagactgggtgaccttgcgaaagttacttacctcttggaattgcattttcctgaatgggatcgggatgtccctacagatctcctatcattttaggctggaggacactgtctgatttttcctgaaaccgaagataattctcatctgactgtggttacctcctagttggtgtgtctgtattccaattttgcaagcttaaaatctgtccattcacctgtcttatttttttaaaatctgtactgccccattctacattatgactttaagatttcagctttgaatttctggtcctagttcagatcctaaggtttggaaaagtcagaaaacagatctattaaaaaaaacacacacacattaaagggaaagtacttcattacattttaaacagcacctggggggaaaagtctagaataaatgcaaaaatgcaaaacaaaatttctattaaaagtaacagggcgatggatgaccattttgactttttgcaaatgttcccttttcatgctaaattttaggggttgatctgaaaaagcaacaacttgttctttgttttgaacgctctggtgaaaccatatgcaacttcctctttgtgctgtgtaaacctcaggtgtctccagctcttcagccaggcaagggcttggctaaaaggtgcactccagggttggaggagccttcagcctgggttcgacttctgactcagctgtatgaacctgggggaccccctccctggcttgggtctttccacatctggtccccagatgtgaaaagactcaagacatctgattggagtctctttgggtcctgaaattgaatgagagttgatggccaacaaagactcatgggaagggaaggatgtgtggggtcctggtcatggtgacggatatttgtgattggagtcggccatgaatttaatgtgcttctgtttctttcttcaggcctgggcagtttttaaagggaagtttaaagaaggggacaaagctgaaccagccacttggaagacgaggttacgctgtgctttgaataagagcccagattttgaggaagtgacggaccggtcccaactggacatttccgagccatacaaagtttaccgaattgttcctgaggaagagcaaaaatgtaactatcctttatgggcatgaaaccttccagaagctgccctggcctgtagccttcaccacagaacttgggtctggggtagacacagggtctggggcacatagtttcagttaaacaaagcagttctctccttcgtgtaagcagaaattgagatctctttccagtgacctcagagggaagggcggaggagattgggtgctgcccaacctgtgccccacttgctgcctgaccacagacatttgtagggcctccctggacaggaacaagcatcctccagcagtttctgatgaggaatcctttcattttccagcagcttgcagaggaggccaggggaaaatatggtgaccacagaaggcctggatcgtgagggttgggagtaaagctctcagatgaagttgtcaaagatggcaccatggccttcgttgttggagatgggatatgcctcagtgtgttactagatcctgattgttatttgggaactccgggatgtgatcattcctgaggtttcttccagctctcaaatcccaagaaagcatttgtgacagattaaagcaggacagcaaaaacatgccgcaccctggtcctacatcactaaaataaatcccaaagtactgagctgggatctggcctcagaaggcttctcagagccctgtgctgtgccgctgccatgaattgtagctgatttacgagataaaacctaattaccagcgctggtttagaacatgcttttaacacattgattttcttagccacttgatgaggcttttagaataacccactctggctttctccttctaagcttctgagtagtccacgaatgcctgtaagaaacagaaacccccaaaacttcttggggctgtgcagaagtttgaagtttgcactcttcccgctgtgggggtgttgacttagaattttttaagaagttaaaatggtgattcaaacaaatctatagtgaatctgtgtcagagagttgtgtaatcgtcatgaaggaggcagcatgatggtaaagatggtggacagagaatccgaggtgctggtgaatgtggcccatgaacgagaaagctgagccaaagccgatgcccgacccggacagtacaattgcggtttggggcgtttgtagcctaatcgtctgcaattagcacctaactctactgagcgtgaaccctagtcaatactaaatagtaaggccaacaaactgaccttcccttggagaatcgggtgccctttaggaggaaacctctatataatagtctggggtgaccctgaaaggctaagcagtcatctttttgcctcatttcccagttttggacaattttttttatcaccaaaaagtaaagtgtgatttgaaggaatagagaagtttcttttggcccctactgccacccccaagatcagtcaggcttgaaccggcaggtgaccccaacttgtttatagcatggggtgcagccagcatcacctgctagtgatgttaaagaagcagcaggaggttctcaggggtgaagcaatgtagcatttgcataattgcctacaggggcccactcgcctctaacctcagtggtttgcaggctccatggtgggcgccccacctgctccctacttccccatcagtagcttctcagtgaattctttaatctattgaaatggaatcaaaattcagccgggaggaaacagtgggtaaattctgtaggtcactgggaataatgaatttttgtaagtgttggttgtgatacgtctcacactgataaacttcataaggtaagttgtcgactgaggaagcggcatgagaagggaaagagcagaggctggcccagcgtgcccctgtggacactgtgcacctttaggcggtttgtgattacggctggtgcccactgggcatcagtgagggtgctgcggtgtgtgtgtgtgcatggctgtgtgcactgatgcacatgtgtatatttggaaaggccaaaaagagatttcctgccaactggcaatacaaaaaagaccccaacctgccaacacgttttgccaggaaatctgtgagtgttttcaaatgccctggcttataaatgtaaccttcttaagttagcaaatgcttgctgtaaagtatatctgatacagactcattttggatctcagaaaatagaagaaagagaccaaagtgctgtctttatcctttaaaagtgttagcagaaacaaccaccaccaccaccaccaccaacttctctcttttgactttgctgatcagatgactgaagtatgggaaaaaaattctgtgcctttcccaaaccaatgaagacactcactaacttaatgtttccttaaactcagcatttacagagtagattatggcttcagcaaaggctgtgatgcctccgtgccatgtgtcatggtgtttgtctggttttctgtaggcaaactaggcgtggcaactgctggctgcgtgaatgaagttacagagatggagtgcggtcgctctgaaatcgacgagctgatcaaggaggtaagcagaggcagcatttcaggggtctggccctgccaggaggagtctcatgtcttctggcagggaggggcaccgttcttgctgtatgaaggcagccagaccctcgggctcgctgaggaagtggcatctccacctgtacagatctggaacggaaggactggctgggcgccccctccccaggccagcttctgccgacaggtcaacccctcacgccagatccctccttcatccctagggctgggcctgagctgccggttatgtgtcagtgaagttccttccagctccaaagtgttcgaacactttggacagcagtcttttaaatggcatcgtgaattcccttgccttcctagcaggctacagagaacaaaatgtaaactttccttgctgcctgcgcttgtcatgatggcgggtgttgttgtaccagctctcatggctatttgattgcttcctttttaatgtgcagtttttattccttaacggattggaaagctggataaccaagcatgttcacattgcacataaattcctaacaggctacaagggagagcataatcggggcctccttaggcaagaacacatggcttttgtatacccatttcagctattgggatgcccttttcttctgtctttggcctcttaactatgcttttcatgggtattacaaggtggacatttgcatgactaaacctcgtgcagcctttgcaaaaggttgtgtgtgagtactgcataaattcttcttcttaataacatagcaataatggaatccttaagagtagcttggctgtcagagaatgaagataacagaatgtaacctacccgaacggccttgctcttctgcacaggcagctgccaagtgtctgggtggtctttggcagccgactgagtgaattcttggcttcgtggccctccaccaatgtcctgttttctgtagaaggcttttctgctgactcagctgagagagtgagataatcggattgccacaccggggtcacaagaaaagcaatttcaaaacatttcataattggatttatcagcctcctttaaggaatgggccagagattgaacatctgcatgtggctcgttgagcgagattcttgaaagcatggcagcctttggccagcatcactgttcactggtgtctcagagcttgtctgcgtgtccagggcgttgagggcaattggataacctggaacactgggtctgcaacaggcaggtcgtggaaagggccaagaaacttattagtggcccccaaagagcctagtaatttggccacatggtttgaatgctaagcctggtagatttaaggcctagggcctttcaggttgcaaagtgaaacttgacttttgtctcctgagataaaggtgacaatatggttttacttacacatgaactgttcatttttacaaacactggagccccaggtgggagatcagtgactgagctgccctcctctccctcccctgactgtgcagccttctgtggacgattacatggggatgatcaaaaggagcccttccccgccggaggcctgtcggagtcagctccttccagactggtgggcgcagcagcccagcacaggtgagggtgggtggcctagaattgtcaccaggcatggcctgaagggtttacggcattccaccagccagggacggagtgggggtggttgttgctatcatgatccatgtctcattaaaggtagctcagccctgagaggtgaagaacgatggccctggtttcccaacatgagggcagagcccagctgtgcctttggccctgctctccgctgcttctcaggagggcacaagctgcttgttccctaggtgatgtccatgccagctctccccacgctcctgggaaagtccagggaagagggtctagtgaacttgtgtaaggccagagggaagatgcagctcttggccacgctggcgccccctccctgggtactcccttaggtcggccagtctgttacgacattaaggaccccctcagaaccaaagagagcccagggcatttggaggagaggagaactcagaccaggaacaggaagtttgttcagagccctagatttgaatcccacgctgggaagttacagatcttgagcctcagtttattcatccgtaaaacagagaaaccaggacttgcgccatggggtcacgagggttaagtgaggcattcatcctttgattctcttttgatgagccactcagaacccccagctgcttgaaatgcccccgcccccgccaggcccaggcttctgcagccggtgaatgtgtttgcttcctccctcggcgtcttccccctagccctacatcccctgtgggagtctgggaggtggcagctggccccggaggccttgaaggttgccaggccttgggtgtcgagtaagaggtccctggaaaggcacctctgtctgtgctgcaggaacaccatccggaaagctagcttgcacccccaggctctcccccagagataagccctgggtggtgggtatgcagtccagtggtattctgggggtaagtgcttgaggtgggaaggaaatgtggccccacagtgtcacattgacacatggtcagaaatcccacagcatagaggaagtccccccgacttgccactctggttttctgcatttgtgaaacaatggctctctgctctggtggggaaaagcactgaattcagcggaagcctgtgctccctggagcctctggcacgccatgtgcagccttttaagggacttttggagaaggagcgattggggttactccctgtacaccacacctgggtggctctgagcttgcttttctgtttctcctgcaggcgtgccgctggtgacggggtacaccacctacgacgcgcaccattcaggtacggggtggtccgggctgagaggggcgtgggcactgtttgaagacaaagcccagataacccaagcagggttgcggggtttcgaggatgagcaggacctggtgtggaagtctaggcctggttccaaggatgagcaggacctggtgtggaagtctaggctccgttccgaggatgagcaggacctggtgtggaagtctaggcctggttctgaggatgagcaggacctggtgtggaagtcgaggctccgttccgaggatgagcaggacctcgtgtggaagtctaggcccggttctgaggatgagcaggacctggtgtggaagtcgaggccccaatttctcctcctcaccatttgacaggagctggcgagtggcctcttttgaggccacttttcttggactggaccagcaagtagacagagtactctttgaggctgtaactgtgcaggagagacagtgagggacaggccagcgtctgtcccagcgctgcctctcttttggggctgcaggtggagtggtggagcctctcagagcctcatctcaggctcccctgcccaccacctctaggtggatgcagctgttcccatttcgcgggctcaggtagcttgtgtgctccagactgggggcctccccgcggtgggcagaggtggcctttgtgtgtagtctcagcggctaaggaccctggctgcacttctgccagctgcccctggaagtgacgctcaggcgtggtgacggcatcttctgaacaaggaagctggggcatcttccagcattggctggttctgtgggaggcgagcagctggtctcatcagatgggccacagaacgttagggctgggcctctgggcaggggaggaaatggggcagggatagaagcgtgctggctgaggactgcatgggacagttttgtgggtagcagaggtcggtgctcacccaggcaggaaaactatccagatggcaatgccctgtccatgaagctcttgtctatttcctggcagccctttgagctggggggttgttttcactccggcttcacagatgaggagactgaggctgggaggttcaggatctcatccaggtcgcgcaggcctctggctggagcctgttcttgaggcctccttgtgcccggcagccgccatgctcacaggatctcagttctgggaggcctgggtcatgaggctaagcctccgggctcgccagccactgggctatggcctgggagtctgctgaccagtgctttccgggggctgtggagtagccaggcacagaactgagccatctcggtgagatgcagaggcacagtttggggagagcatgtccttgaattagtccagcagggtcatagccactgcctcatgcacagaacatccttctagaagctgtgagctttggtacctctgtccagccccgcccccacctctatgtaaatccatgcctcagtttccttacctggaaaatgggtataataataatctaccttacagggttaaatgtgctggtaggtcccaagccctgggcacagcacctgatatgagctgtgtagaccatagtctgtggtttataacttcaggagtcttgtctgtgtagataagcatttgtcctgttacccagtttctttaactggtgcttacctgtgccgagcacaaatacaagctccgataatcctcacagcagcccagtgaggtggatgctgtttttatctctactttgctgatgaaaagctgaggcacagagtggggaagcggcttgccccaggtcatccagctgggcagcggctgggctgggaccgcacgtcaggcaggtgggctgcagggtctgtgctgcgggtgtctttgttgctgcctctgtggtcaggccgttccccagcaaggctgttcttgtgggtgagtggctctataagggcagggctgggtcgcagcaggcccttactgttgcagaaggctcacctgcctcaccttggcagcccttggtgagctgcttctcacctgtcaggtacaagcctgacagctggaaccttctcttagcataagacgttctggggtgtgtggtcactaagacactcctgcttaggcgtctctgaagcacttagctgttccgggtgaagctgccagttcacatgactgagaggtgctggtaccaagataaggccccggaaatgacagggcaaagggccaaaggggtgacggagttgcctgaagcgtttcattcatttggaacaaagttcgaaagttgcttcagggtaaagggaggggagtgtgtggagtccgcaggcagtgcagaagttgcagacttggcgtggggggaagatgatgagtgaggaagagcgagaccagcggggaagatggtgagcagggaagagcgagaccagtgctgccatttccttctgggtgaccctatctaggattcagtttcctgaagtgtcaaatcaatgaggtggaccagagcttctgcagctctagcttcctaccctgcatgattctagaacctgcgtaactccagcatggctggaaatggagcccgtgaatggtgggttgtcaaataataaggcagggagcagagcccaatgggagggtccaaggagttctgagtgcccagcagtgtcagcagggaatgcagatggactcagggcctccccagatgtggtcagccttgcacaactctagggggcgccgtggagttaggcacctcacaacttgtgtggctccacaaggcagcctcgaaccggtctggggtacttagaaggagctgcaaactcactaagctcattgctagcgtatgtaattcttttggtttaaggcaattaaaatgcagatacctccctgcatttacatgttatctgcattcctaccttagattagtgttttccaaactttggtcacttgaggtccagtgtcacaattggttttcacagcctggactgttactaacatcatgtttttcctcaaatcttaatcttaaaataaaacttaagtttattttaaatgagaacccactatcattggctgtaaaggaagacctgtggcacctggtataagtaggtaatactgtctggctagaattgattaagattgtatttgtctttcattgaatttgtcttgacctctgacaatgccctgaatttggagccctaagttcagtgccattattcaaaagggaggttgacaggtgttaggtgttagagagctatcagcaccaaactgaggcttgctttttgaggtaatcagaggttggaagaatattgaagatggaataatcttgtgattacatgtatcacccctcccccattattctgtgtgtgccacttttggggaacccctgctttagtttgagtgtttttcagactctttcctgagaacagatttggatgaagggttttgcagagattcttaatctgaaatccaggaaataccaagggcgctgtgaatttgttgagaaaaagattatgtctttattttctttaacttcaggtttaaattgagcatttccttttgttatgaatgtaggcagcagaccgcagtgcccttggcagtgcctatgagacggagtattgtcataagaaatgagttgtcgaaacatcgtttgccctcagcttgacgtgtaaattacaacagttaccagaccttctctagaccttgtatttaaagagtcagtgaagaagtacagagaacactgttgtagttaatatgttcagtcattggtttccttagtcattctgtgtatttattcatgcatataaaaacattacttctacaagcagtacatggatttccccagaatatcaaagtggttcaagacacacaaagagttacccgtgtaggtgtgagacagactgtgcacttgggcaggagggaccctgtatgtctccccgcagcaccgtcatcgtgtccctcttgtccacagcattctcccagatggtgatcagcttctactatgggggcaagctggtgggccaggccaccaccacctgccccgagggctgccgcctgtccctgagccagcctgggctgcccggcaccaagctgtatgggcccgagggcctggagctggtgcgcttcccgccggccgacgccatccccagcgagcgacagaggcaggtgacgcggaagctgttcgggcacctggagcgcggggtgctgctgcacagcagccggcagggcgtgttcgtcaagcggctgtgccagggccgcgtgttctgcagcggcaacgccgtggtgtgcaaaggcaggcccaacaagctggagcgtgatgaggtggtccaggtcttcgacaccagccagttcttccgaggtctgtaccgtcgtcaccttgctgcccccacatcttagagatcacgcctcctatctgtgtgccatttgcagctcagggtggccctgtggtctcatggagggatgtggaggaggagtgaggggcatggtgtggcaaggaggtgctcctttgaatggcactctgccctctccactgagcgatcctggggtgcttctctgtgcctcaacttccccatgtgtacagtgggggtgcagaatcagtaccctcatcaggtgattgtcgggagggtaaaggaacttaacctcatgtaccttggagtatgttccaaggatggtccctgagcgctggctagagacacagagtctgaggccctgctccagccacaagatccgaacctgcatcttagcaaggtccctggggatctgtgtacaggttttgagacacgctgactttccgcacactaagtgctcaggatggcagctgcacacactaagtgctgcctgttagctttcgttacgctgtagggaggatgtgtaggataccagcctgggtgtctcctggagggttaggatggcgtctcccttctccacgtccccatgctctctgctcctctccctgtagcagcacagcccgagatagtgtcaggtctcagctgccactggcctgagaactgccagaggaggggcctggaagggcgggtgcaggggtatgtgtgagctcaggggcataagccctgaggaatccccctagtgaggaggtgtgaggccgcggttatcacccctgagcaggcagagcggcacagaagtgcgtcctgcaatgtacattcccgggcctacctcacatcctctgattccatgggtctgaggcggggcccaagattctacatttctaatgagctcccagggaaggcgactgctgccggtccaccggcccactttgagaccctttcagttggctgtcagagattcgggtgagggctgcagccctccctgggtgtcctcaggtcggggttgccaactcagttgcctccaagggccaggcaggtaagagcaatgcacgaattgagagataagagagagcactgggcagctgtgcccatggagaggcgttcaaacgaggcattaaaatcccggcaacaacctggaatggccaaacgaacagctccttgcttggaatttggcccaagggccaccagtttgagatcccatggtgccctggcctaaatgctacaagccctgggcctcctgatcccccagccctgctgctgcgggagttggaggtcatctcggccttgcttgcaaacaccctctgcctgtgtcattccagagctgcagcagttctataacagccagggccggcttcctgacggcagggtggtgctgtgctttggggaagagtttccggatatggcccccttgcgctccaaactcattctcgtgcaggtaagtatgggcagcttttttttttttttttttttttttgagatggagtcttgctctgttgcccaggctggtgtgcaatggcgtgaccttggctcactgcaacctccgcctcccgggttcaagtgattctcctgcctcagcctcccgagttgctgggactacaggcccgtgccaccacgctcagctaattttttgtatttttagtagagatggggtttcaccatgttggccaggatggtcttgatcttgtgatcctcccagcttggcctcccaaagtactgggattacaggcgtgagccacctcgcccggcagtctgggcagctttgagccctgcatccaggtctcctggccctgtcatgtaaggatcaagttttgggctggagaagaggacacaaggacaagtttccacctgtgtaggaggcaggcctgggcaagaccttcaatatgcgggaagcggattcttgccatctccgagccatcttctggtgtctgggacgcgcacagtctgtgtgtgtgtgttttcttttttcttttttggtttttaaatctaagcctcttctccagaaagattctacctgttcagttgcccgaaggtctaagtgacagattagggcattgccagcccttatttcatgtagtcaagggaatgaatctctaatggtgggatcctgggtgctggctgtcccagctgggacagtactggggagtatggaacagttttggcaggagtactgcttgcccttccttggcattctggctcattcacttgggactcacgtggcactggggtcatcagaggacctggctagggtcaaagacagtgcccaccccctttggagcctccgcctctgcctctgactttctgcacctcccatctagattgagcagctgtatgtccggcaactggcagaagaggctgggaagagctgtggagccggctctgtgatgcaggcccccgaggagccgccgccagaccaggtcttccggatgtttccagatatttgtgcctcacaccagagatcatttttcagagaaaaccaacagatcaccgtctaagtgcgtcgcttgggcgccccaccccgtctgcgtcctgcatccatctccctgttacagtggcccgcatcatgattaaagaatgtggatccctctgtctggggtgggatgccttactttgcacttaatttaataagggcattctcggaggagtagacgtttaatacgaagtggcggcatagccctgccgagatgtcggtgatggcctggatgctgtaaccacaacctgtggctaaaaattttattttctatcctttacccgtcattatcattagttgctatgattctttctgcattttcggttaactatcatttccaaagacttgtcattcagtaatattagcagatagctgcttcgataaaggaatttggagtttaaaaatcaacttgtgaaaacaaggttgtttttgtctttatcgtttgttagagttatagatttatgatttcataggcttgattctatgtgaaatatctttttacttttatgcattttaataagatttaaaaatatttagattaaagccccctttaatgagtacaagaaaaactcttggcttgttagaagaaagtatattctttctagaatttggtgcaggaatatgtgttcatatccaggcaaacgggtgtgtttttatcttcagacaatgaaaccttctcctctggggctttgttgccaggaagattagaactaaatttatttttttcatttctgtcatgaaatcattccagatacctcttttcttctttccaaatggttttcacatgtgtttgaaatatctgtacttcgaattgtcggattttccatgtcctcctttctcctttgtgcccagcctgagtcagcaccatcccgcattcagaacctcccagtgaaagggcagccttcattttgagaaggtggaaggtgttagggtttgggagacagctcatccaatctcccaagtctcatggtggatttgtgactgtgagagtttccggtttaaaatctgaaaagccagatatgcctgtttccttttcccagcaccatgcctgtggaggggacagtcagacccagaggtcctttacgtgtggatggagttcacaggcgaatagaggagaggaccaggggacgtggcttgtcccttttgtccaacaaagcattatatttttaagaatggcagacctgtttgctgaagtgttcataagataacaataggcttgaatctccaattcaaatgaatgtcaaagcacatatctttaatatgctgaatgaatatttatttttgtatccattaaaacagtatattgatctcttttattctttattaaaataaaatgctcttttttaaa

SEQ ID NO: 8494 - DNA, 1606 bp, Homo sapiens
cacgtggcactggggtcatcagaggacctggctagggtcaaagacagtgcccaccccctttggagcctccgcctctgcctctgactttctgcacctcccatctagattgagcagctgtatgtccggcaactggcagaagaggctgggaagagctgtggagccggctctgtgatgcaggcccccgaggagccgccgccagaccaggtcttccggatgtttccagatatttgtgcctcacaccagagatcatttttcagagaaaaccaacagatcaccgtctaagtgcgtcgcttgggcgccccaccccgtctgcgtcctgcatccatctccctgttacagtggcccgcatcatgattaaagaatgtggatccctctgtctggggtgggatgccttactttgcacttaatttaataagggcattctcggaggagtagacgtttaatacgaagtggcggcatagccctgccgagatgtcggtgatggcctggatgctgtaaccacaacctgtggctaaaaattttattttctatcctttacccgtcattatcattagttgctatgattctttctgcattttcggttaactatcatttccaaagacttgtcattcagtaatattagcagatagctgcttcgataaaggaatttggagtttaaaaatcaacttgtgaaaacaaggttgtttttgtctttatcgtttgttagagttatagatttatgatttcataggcttgattctatgtgaaatatctttttacttttatgcattttaataagatttaaaaatatttagattaaagccccctttaatgagtacaagaaaaactcttggcttgttagaagaaagtatattctttctagaatttggtgcaggaatatgtgttcatatccaggcaaacgggtgtgtttttatcttcagacaatgaaaccttctcctctggggctttgttgccaggaagattagaactaaatttatttttttcatttctgtcatgaaatcattccagatacctcttttcttctttccaaatggttttcacatgtgtttgaaatatttgtacttcgaattgtcggattttccatgtcctcctttctcctttgtgcccagcctgagtcagcaccaatcccgcattcagaacctcccagtgaaagggcagccttcattttgagaaggtggaaggtgttagggtttgggagacagctcatccaatctcccaagtctcatggtggatttgtgactgtgagagtttccggtttaaaatctgaaaagccagatatgcctgtttccttttcccagcaccatgcctgtggaggggacagtcagacccagaggtcctttacgtgtggatggagttcacaggcgaatagaggagaggaccaggggacgtggcttgtcccttttgtccaacaaagcattatatttttaagaatggcagacctgtttgctgaagtgttcataagataacaataggcttgaatctccaattcaaatgaatgtcaaagcacatatctttaatatgctgaatgaatatttatttttgtatccattaaaacagtatattgatctcttttattctttattaaaataaaatgctcttttttaaa

SEQ ID NO: 8495 - DNA, 57649 bp, Homo sapiens; identical to SEQ ID NO: 7000

SEQ ID NO: 8496 - DNA, 5541 bp, Homo sapiens; identical to SEQ ID NO: 7001

SEQ ID NO: 8497 - DNA, 887 bp, Homo sapiens
tacaaatataatgttctttgtctacattataagtatttgacacttcagaatgtaggtaattaatatactagtttcttagcaaatataaaaaagccttgtgatcagtcattttatactaactctgcttttactatatccaaaaccagaatgtgtttatataacaccaaaaccagtgaatttttcaaataatactattttctgtacatgaaataaatgatttttcactaattggtttgtttgaattatctagatactctttcataataattctatattgcttatgacttgagtctttgaacaagaatggtaagtggcctcataaaacatagcaattggctgtgtttcaccttagcactagtacatgccaaatgcagcatctctttttctttgttacattgtagctttgccatgctgttatgcagtggcttggatgtaatcttttagtcatagtggagtggtttggattaatttgttgcattttactaatggacacaaaagcatagtatcctgttaattaactggtcacaaacttataaagggacttcctttagagttaaagatttagagttaaaggttaaaggtttaggttgggtgccctggctcatgcctacagtcccagcactttgggaggccaaggcaggcagatcacttgaggccatgagttcgagaccagcctggccaacatggtgaaatcccgtctttacaaaaaatacaaaaaattagctggtgtggtggtgggtgcttgtaatcccagctacttgggaggctgaggcacaagaattgcttgaacccaggaggcggaggttgcagttgagatcatgccactgcactccagcctgagtgacagagcaagactctatctcaaaaaaaaaaaaaaaaaaaaaaag

SEQ ID NO: 8498 - DNA, 887 bp, Homo sapiens; identical to SEQ ID NO: 8497

SEQ ID NO: 8499 - DNA, 887 bp, Homo sapiens; identical to SEQ ID NO: 8497

SEQ ID NO: 8500 - DNA, 441 bp, Homo sapiens
tatctcttaaatgtgagatgggaatgaagaataacctgggtctataaagctaattagtttgtggaagaaaataggaggtaatgggggccaggggagtattgataaaatactgttattttgccctttcaattgatcttgtgagtttttttttttaaagaaaatcttcataagcattcaaataaatttgaatattatgccatgaaatggaaaggatgtgaatgacgggagttcgtaacgccattctttttattcaccacaggaagtttctatcctgcagcccacttcagaatgtaaaggacattaagtaaatgtcagaattggtgccccatgtcccttttttggagatagacacctatgggagacaatcactaactgatttcaggattagataaatagataaataaaaacagcaacattgagatcccatctctactttttaaa

SEQ ID NO: 8501 - DNA, 3916 bp, Homo sapiens
gcggccgccgcgactcttgcctcccgggcgtcgttgctccacgggcctgcctccacccgcggggacaggtgccccggctggggtctgttgggaagatggcgaccccgggcatgagctggcagcagcactattacggcggctcggcggccaaattcgcgccctcgccggccaccgcacagctggctgggcacagcatggactacagccaggagatgcacctgaaaatgagcaagaaaatcgcccagctcaccaaggtaaggggggcagcgacggggcaggtggcgaccccgtgcgggccgcgccggactcacctgtctccccgggaggcagtgcgccctgcgcccgcagcgaggggaactctactcctccgccgaagcaacagccggagacacctccaaaaccctgcaaactttggtggaacgctggcaacatgaatttaagctagacagcacagcggcacggtgcgcgtaagggacttgcacctccttgccctttggggctaaaccagcacagaacaaattaggatttagttcctttatttcacaatactaaatcactttactgttgcttccatgcatctgccagggctccacgaggcatcacactacagtaccatttgaagtacagtaccgtatttacctaatatgactcggaattaaacagtatcttactggttactcagttaagggaagaatcaactttcagaggaatgtaggagggtaaaacataccttgagtgccaatttggggcatttaatgagtcattccttatcctgacaaaatgtcaaacaaggcttattagatgaatctcacactgtgcctgcatctagttcaatgtttgtctgtcgaaggataattttcaaagagcagttagctttcacattcggccacgtgtagtttaggactgtacctaaattagtgaactttttttctaatttaatgttgataatgagaaggaattggtatctgtgaagcaagagcaattcatatctgttatattgctctgcttagaactcaccagcaatctagcaatacctatcggtaagaagtgatttgtggtgtctgaaagttaagaaagatgatataccttaatgtgtttaagctgtctcctaacagcttgttaggagagttggtatgctgaagagagatgggcatcgtgggggttactgctagatagcctctgagtctgactcaactgtaaagttctcacataatcccattgctggttggcacttttgagagagtgaagtaagacatgagattcggaagagaggaaaggaggaaataggagtgaaaaaaggttgaaaagagaataaaaagattttagtgaagaaatgtgattgaggatagaaaagataacataaaaggactacaaaatgagagcacaaatggaagagcaaaagaaaagttacaggtacataacagtaaaactcaaccaacgtcttgtgaagttttcttttttgtcttttgtttgatctcagcactgtctcagaaattgttaggtgtgcggtgttttgtttccttttttgtcagagtattgcattcagagaaaggaaaatctaagaaggaatgatagtagtgtatcatcagaacatttacacatttggagtctaaaagccaggcttcctgcagtagtgtttgatcttccgaatattgatgtcctgaatgaagcacgtgaatatttattctgattttctcttatgatgtgtccataacatccactgttctcattttagatgtaaccctctagagccctactgtaagtaataggaaaactcagtaaactggtagtgggactgtgttctgtttaacaaatgctgttgctcttcagtacattttttttctttctacttaacactttttcagtttcctgttcttttatcagaaaaaaataagtcagcaccactggtaaacgtaggtgtattgatcggaagctggtgttttctcccatgacattacccacctcatatctaatgagacaagagggtgctctcaggccagtgctctcaacaccgcttgaatgcctcatctgatctttactgagtgttacgtggactctctggttttgtgtttgtagttacagtctctaaacactctccaccccctctgctaagtacttaagatatttaatccttcatactaggtttctcagtgtcacgctattgacattttggactggataattccttgttgattgtgggatatcctgtgcattataggatgtttggcagcatccctggcactactcagtgggtactactagtagctgccctcaccccccacccccagtcatgacaataaacatgcctccaggtattaccaaaatttcccaggagcgggcagggtagttgaaacagaatcattccaattaagaaccattgacatatactgaaatatcaagggattatcctgcttttatttactaagatgaggcctgagaatgaaacagtttgataataggactctgttggagccaacatctttctgtttctacaaacatataagacttgctttctttatacaccattttgaaagttgtcaaattttatagtcatatacacttattgtaaatactataccataagcatgacatcatgagtgtatataaacatagagagagagggactgttatgaactttactactgcctgccatatagaatttttactcatgaagagtttattcatattagcagaggtgtgttccaactatggttggaacttgacaatggctaatatttcataattgtacactgtaaatgtaacaattaaaattggattttatttcttttggaaagaagtcagtagaactcaactcttcagcattatagcagcagcacacttaagagcagtgtgggaacctgacacactgagttaaaattctcactccaccacttactactattgtgaccttgagcaagccatgaaacactgagcctcagtttcctcatctttaaaatagggatgatagtacctattttacagagttgtagcggcacatagtaggctcttcattcaggctgtcactcactgaaaagacatataccaatatgagtattaataaaatatggatattttaaaaatgcttctctccttttaaaccattctgcatttaacagcgttgtgtgatagtgtacttattttgagggttttctgctaaactctttaaaaatgtatatatagtagttttttttctccttcgaatatcaaagtttaaaggtttcacatttattctgcattgtggtagaatgttctgaaaatacattgtgcatgtttcaaaggtttggctggctatgaaaggataagcatgaaaagtaataaagattataattttgcccatagcaaagctcaatatatttttaattaaaaagcagtctttgctgtatgcatatttgttcatatcctatttcctaagagcctaacatagctgccttctcatggtaaggagaacaccagttctttaagcaccttttatgtaagggagactttggaaaatgttacagatacagcagggagcaagacacagtccctgccttttaaaggaagtctagcatatttgggtcactcgtgtcaagttttaagaattaatattagattcttgagctacattatggcaagtttctgcaaatgttaatggctgaactatctcaagataggcagtgaagctggatggattcaattatgttttataagaccacatttgtatacttctgtgctctccactgtgttgacttttcaggatatcaggttgaaaagcaggccttgtgggatgtaattataaaagctttttttttgtcactttcaaattactttttttccctttttgtctctttcaatttactctttgagactggttcatcctctttcatgggttaacttaatttttctggttgcttttagataatacaaatcatccttc

SEQ ID NO: 8502 - DNA, 3916 bp, Homo sapiens; identical to SEQ ID NO: 8501

SEQ ID NO: 8503 - DNA, 441 bp, Homo sapiens; identical to SEQ ID NO: 8500

SEQ ID NO: 8504 - DNA, 408 bp, Homo sapiens
gggagcaagacacagtccctgccttttaaaggaagtctagcatatttgggtcactcgtgtcaagttttaagaattaatattagattcttgagctacattatggcaagtttctgcaaatgttaatggctgaactatctcaagataggcagtgaagctggatggattcaattatgttttataagaccacatttgtatacttctgtgctctccactgtgttgacttttcaggatatcaggttgaaaagcaggccttgtgggatgtaattataaaagctttttttttgtcactttcaaattactttttttccctttttgtctctttcaatttactctttgagactggttcatcctctttcatgggttaacttaatttttctggttgcttttagataatacaaatcatccttc

SEQ ID NO: 8505 - DNA, 1275 bp, Homo sapiens
tcttttttttggcctgtcttacctacagttgtattttcctctttaatcataaggatttacatcaggaaaaataacctgagaatagatgtgttttgtttgaatgtcgtagttgtgccctttgtaaaattaccccagggcatgataagaaaaggagtaagcaattaaaatgcacagggctacggcaagggcaggcagatctgagtggaggctgctgtcctgtgaagtagacctggcaggggatggctgctccgggctggcctgggcctcgctctgcctctgttgttgctctgacctttgacaaatcattcccttgcctgtgtctcggttgccccatctgagcgagaggctggactaaaaggtcactaaggtcacttgtagcctgaccttccatggctctataattctctttgttatctttggccacttacatgtttgccatgatcattgccaatcaaactaggaatgtttagcagattttagacactcagactggaaaatacagacgaggccatagaagttagtgttgtcctagggatggctcctggttcacgcaggctcctcatagggtccctgccgctacacaccacgagcccaccgagactgctgcagcctcgctcatccagaacagaggcaccatggccaggaggcccttcctttgttgggtaggagctgcccccgtccatgttccagctcctcccaggcccccatggataaaatagggccacaggtgacaagtgagttctgtgaccctgaccggcagcagctgccagcgaaggaggaaggaaacacagacaggaggtctcagagcacagcacgccagacctctagtccacacagtcctgcacacattgccgtctttgtttaaagagaggcggaggcagaccccaggcattcaaatgatagaatgcttctgctgtgcctgcatccttccctcctccactaggagcctctggttccagcccagatgaacccactgggctgggaacgccacacaaaagcactctccaagccagccagaggtccctgagggccaagacagggctgaccagaggcagtgtctggacatcctactgggagctcgggaggaggcagtgacagctcaggccagtaatgggtattcttgagagcaatcccaggtcatcaagggaagagaaggttatgcttcgtatactgtgttcaggggccagataagttttaatacgttccagaagtgtgctcaagcaaaaaaaattattagaatttttaaaaattaatatttgtgcttaaagagacaaa

SEQ ID NO: 8506 - DNA, 1274 bp, Homo sapiens
tcttttttttggcctgtcttacctacagttgtattttcctctttaatcataaggatttacatcaggaaaaataacctgagaatagatgtgttttgtttgaatgtcgtagttgtgccctttgtaaaattaccccagggcatgataagaaaaggagtaagcaattaaaatgcacagggctacggcaagggcaggcagatctgagtggaggctgctgtcctgtgaagtagacctggcaggggatggctgctccgggctggcctgggcctcgctctgcctctgttgttgctctgacctttgacaaatcattcccttgcctgtgtctcggttgccccatctgagcgagaggctggactaaaaggtcactaaggtcacttgtagcctgatcttccatggctctataattctctttgttatctttggccacttacatgtttgccatgatcattgccaatcaaactaggaatgtttagcagattttagacactcagactggaaaatacagacgaggccatagaagttagtgttgtcctagggatggctcctggttcacgcaggctcctcatagggtccctgccgctacacaccacgagcccaccgagactgctgcagcctcgctcatccagaacagaggcaccatggccaggaggcccttcctttgttgggtaggagctgcccccgtccatgttccagctcctcccaggcccccatggataaaatagggccacaggtgacaagtgagttctgtgaccctgaccggcagcagctgccagcgaaggaggaaggaaacacagacaggaggtctcagagcacagcacgccaggcctctagtccacacagtcctgcacacattgccgtctttgtttaaagagaggcggaggcagaccccaggcattcaaatgatagaatgcttctgctgtgcctgcatccttccctcctccactaggagcctctggttccagcccagatgaacccactgggctgggaacgccacacaaaagcactctccaagccagccagagtccctgagggccaagacagggctgaccagaggcagtgtctggacatcctactgggagctcgggaggaggcagtgacagctcaggccagtaatgggtattcttgagagcaatcccaggtcatcaagggaagagaaggttatgcttcgtatactgtgttcaggggccagataagttttaatacgttccagaagtgtgctcaagcaaaaaaaattattagaatttttaaaaattaatatttgtgcttaaagagacaaa

SEQ ID NO: 8507 - DNA, 579 bp, Homo sapiens
gcatgtgctcagaggctctccccggctggggccctgatggacactttgctcagaggcctctccagctctctgcaccgctccttcccttcctgcaggggcatcatggctgcaggtgtgccgcttctcccctctgttcctgcccatctttttgtccacatgtggcttcatccctctgcctcttaaggtggactctggttaggttgtctgggtggccacaggcatggctgccccatccctgcatcccaacagcctctcaaagcccccacccaggtcccttgccagggcttccttgtccaggagggaagtcctcccaagtacccctggagagccacctacagaaagttccagagaacagatggaagctcctactagactgactttggtgactggaaggaacatgctcaaaaggcacccccataccagtgtcacgtggaagagaggccagagaatggtggggatttgaacttgcatgtgctctgggtttacatcagaagtgtcctcccagcccttcccctacagggtgggttcagaggacacctgacccagttcaggagcaaccaaagggcgttgggggtctct

SEQ ID NO: 8508 - DNA, 579 bp, Homo sapiens
gcatgtgctcagaggctctccccggctggggccctgatggacactttgctcagaggcctctccagctctctgcaccgctccttcccttcctgcaggggcagcatggctgcaggtgtgccgcttctcccctctgttcctgcccatctttttgtccacatgtggcttcatccctctgcctcttaaggtggactctggttaggttgtctgggtggccacaggcatggctgccccatccctgcatcccaacagcctctcaaagcccccacccaggtcccttgccagggcttccttgtccaggagggaagtcctcccaagtacccctggagagccacctacagaaagttccagagaacagatggaagctcctactagactgactttggtgactggaaggaacatgctcaaaaggcacccccataccagtgtcacgtggaagagaggccagagaatggtggggatttgaacttgcatgtgctctgggtttacatcagaagtgtcctcccagcccttcccctacagggtgggttcagaggacacctgacccagttcaggagcaaccaaagggcgttgggggtctct

SEQ ID NO: 8509 - DNA, 924 bp, Homo sapiens
ccagctcgaaaaaatccatgcttttgagaccgagaatctgggaggagttttgagtcatgggcgtgaatgcaaaaggagagtaagagaatgggacgagacggggcagagccgagaatattacaaagaagggctaagctatgggcttcctttctgtctggttcttgcttgcatcttgccatgctatcatttgctacttttcttgcctcggtggtttgtaaaaaataagagccccgggtgcatgtgtcccctcattcactctgtgtgggcaaaggaaaatgaagcccttatggtcacctggtgtttctaactttaaaacagcctcatatctcttatttaattcacacagaaatcctgtgtgcagagccaaggatattcccattttatagacaaggaaatggagaaaaaggttgagaaaactgatcttccagtcacatttacctcttcctgcctcccacaagtgcttcctgggtcctatcccagggtttttttgtactttactgattttaacaaatacagcctttgatcactctcagctacctgccacactggtgccatcactaggtgagttataaagactcatcatcatgatactctccatgattgggagcattctatgtgccaggaatttttctgggggcttttcacatcgtatttccttctgatccccacaactctcctttgagatacacagtgttatgatgcccattgtacagatgaggtgaggtgctttaggccacacagccccagccaacacatgcagacatcacatagctaggaaatgcgaatccagcatctgaatgtgttagcacagagggtcccctccctggataaaaccttctggaactcccggtcatgtaagacaatgtccaaattcctcagtgtggtgtgcatgcacccctgcagccactgccctgcccctcgagt

SEQ ID NO: 8510 - DNA, 23386 bp, Homo sapiens
ctccaggtggctgagaacaacctgtgcagccagtatgaggagaaggtgcgcccctgcatcgacctcattgactccctgcgggctctaggtgtggagcaggacctggccctgccagccatcgccgtcatcggggaccagagctcgggcaagagctccgtgttggaggcactgtcaggagttgcccttcccagaggcagcggtaagaacttacattctgtgttagtctgctcaggctgccataacaaaataccacagacagggtggcttatacaacaaaagtttattttctcacagttctggagactggaagtccaaaatcagggtttagcttctcctgaggcctttctccatggcttgcagatggccacctcctcaccgctcccccatgcggccttccttccacacacaagcatctctgctgtctcttccccttcttcataagggcaccagtcatattggattggggcctaccctaatgacctcatttaaccttaattgcctctttaaaggccttatcttcaaatacagtcccattaggggttagggcttcaacataggaatttggagggaacaccatttcataacgctatctcattgcacatttttttcacataagtcatatgtaatctacagtttgaggagaatctgaataaacacatttgggtcccccagttcagaactatatcagtgaggtctcaaagagttcaggcctgggacgggtcttgcaatacagatcaggtgtggtaggaagaatatggaaggagtttacagtaggaggactgttgtaaggtggcctggtagcagcaggatgctttcctaatgggggtagagtgtgtatgctggggggataatggaagatgttcggatgagtttcgggggattcccaatgtggtctgccacctgagctgatggcagaacactgggatgaggcaggaagccaaaagtggtggctttcaagcgttagtaagcaaaaactcacctgggttacatactcagaatgcatgttcttgaggtcacccagacacagtgcgatgtccccgcatatcagagggtaagaccagaaagtttccagttttaaatgtctccccatatgattgtataaaagtttgagaaccatgggcctaaggcgctatgtaggtcttttaagagcaaagtggagcactgatgtgggcgtggcctcctagggatcgtgaccagatgcccgctggtgctgaaactgaagaaacttgtgaacgaagataagtggagaggcaaggtcagttaccaggactacgagattgagatttcggatgcttcagaggtagaaaaggaaattaataaaggtgagtaccccctgtttggatgcctggtcaagccttctgacatgcatggggtctgtttgtaactgttcatactcccacctccctgggcctgtgctgtcaggacacctttctcctgcacatcaggccacggttccttctacttcttttacctcattatgaccagcacgcttggatatcagcatctgatagcaatcatttatttctggccaggcacagtggcttgtgcctgtaatcccagctctttgggaggctgacacggggggattgcttgagcctaggagttcaagaccagccagggcaacatagtgagaccccgtctcttaaaaaaaaaaaattaaaatagctgggcagggtggcatgcacctgtggtcccagctattcaggaggctgaggtgggagagttgcttgagcctgggaagtcaaggctgcagtgagccgtgatcttgctacggcactctagcctgacaacagagtgagaccctgtctcaaaaacacatgtattgcttattatgtaagtatctagaataatgtgaattttaaaatgtccccacatatggatgatctgtcccttattcaagggcttccctacttagatctggcaggaagaggagccagatatgggggtgagggagctcctccccctgttcctttgtacaaggaactccacattgtggacaggatcgtcactgaaccccactcagaaccagcacccttttctaagaaagaggagtgactgtgtttgcataatcccagcttaggctaattcatggcaggcctccataaatgcaaaccacaaggatcaatttgaagtgtctgcaaggggaaatgacaccagcagtgtagacagggtagagtagctgacaaagaacagcctctgtgagatgcatggataacatcttcctatcgaccttcatgtttttctggcatgtcacatgtttaagtttcattcacactgggaaggtactgaagagacatgaactaatgcccagcagtaggaagggacgggtttagcatttgtaaagatggagcattaatcacatttgttgactgtttaaagaaagataaataatgttattgacaaaccgtgattttgaattagttgggattaggttggctgcttgcagcagaaaactcaaaataactgtgtgccttagcccttgctgtataacaaacccatcttaaaactaatggcttgaccacttttatttctcatgatttgatggaccagctgggcagttcttctctgggctagctgggctggggctgatggtccaggatggcccttggctggagtgaccgggccttctgtctgtgtggtctctcaccctccagaaggctaagctggacttatcaatgtgggtggaggggttcccagcagcaagagagggcaagacccgacatctaacacctttcggtctctcctgacgtggcactgtgtaacatccccttagccagagaaagtcacgtggccaagcccaatttcaagggaccgattttctctctctccatggaagtgacgaaggcaccctgtaaagtagcgtgcatacagggatggaagggaatgtggatgccattgtgccagcaagttgctgagacagcggtctaaacaatgtagaggctttctgtccctctcatataagtctgaaggcgggcagaccagagctgattggggattccaatgtcaggaaccaagatttattcttctcccatttcttcattgggtgtggcctctgtttccaaggcccccccgtgacttagtcagcaagtccgctttgaagccagctggaccatggcaaggggcatatctctgcctttgtaagcacactttctggaagttgcacataacattttcacatggcccattggccagaacccgatctcatgaccacatggcaggtacatggatattgggggaacaattagtggaccataaccactgatatttcctaagttctaaattgatatcaaacatcccaaaaaggcattctagatttagaaaagagtaaagtggtgttagccaacaatttgatgaaacaaattcatatcctaaaattcattaaggaggaaggagcaaaataaaatctcttaatgggatgttaacagccagtgcttatcttagctaaaataagcacatttccccatataattttccagtttatattttaggcatttccatatatttttatttgtttttattttgcttggttgctaatttcctactgacatcaatgagaaggatttaggaatgctaccaggaagaacttcttgcctccgcccagctttggactggtctaagtgggtgtcactcatggtgacgttctcacaaggtctctctacacacagtgctggccaacagcagggaaaatactgagttatcctttgagatctcttttatcccaatcacagaaaattgaatctgctccaaatatgcttttatccatgactcgcagagaggagaagatgctttcagagtattcaccatcatgagatccgtttatcctaagctctgtttgggtttgattttccctgtctcttttctagcccagaatgccatcgccggggaaggaatgggaatcagtcatgagctaatcaccctggagatcagctcccgagatgtcccggatctgactctaatagaccttcctggcataaccagagtggctgtgggcaatcagcctgctgacattgggtataaggtcagacttcagacccattctgaccttggccgtggcgtggggatgggggagtggaggggtgggaggagaaagagggtactgtattagagtaaccgtgagtccagagctgagttttggagttagtatttggaggtgtgagtggggaatttagagagcccgttggtcacagtctgttctgtcaagttgaatggaagcttctttggagaaagtgaggccagtgggcacagttggaaatgtgttctgtgtatttgttttatgttttatgcaatgacttgtttttggttatatacattttgcagcatatctaaagtgctgtgtattaggaaggggtcttatgtgggaagagagcattaaaaataagtataatgggccacacacagtggctcagtcctataatcccagcactttgggaggctgaggcaggaggattccttgagcccaagagtttgacagaaacctgagcaacatagtgagacccccttctctataaaagaaaggttaaaaaattagccaggtatggtggcgtgcacctgtcagctactaggaggattgcttgaaccagggaggctgtgatgagccgtgattgtgccactgcactccagcctgggcaacagagcaagaatctgtctcaaaacaaaaaacaaaacaaaacaagcaagaaagaaataggtataatgatattttagtatcagtgaatctcactttacagattaaagatttaggggtgaagtggggttttttggccaccatttttcattgtgaccatcagatctgaggtcttaggggttaattatctgaaacttcatggttttccctgagcctatagctctgcttctgccacagataatttattttctcataattccagcttggtacctccagggttgtgtttgtgggttcatttctccaaagttacttcttttgggggaaatacccctgggactcttagggcctaaagcaagtgcaaggtcaggacttgtctcacctctcacttgcctttgccatactcacgagtcacctcctctcatttccttacagatcaagacactcatcaagaagtacatccagaggcaggagacaatcagcctggtggtggtccccagtaatgtggacatcgccaccacagaggctctcagcatggcccaggaggtggaccccgagggagacaggaccatcggtgagagtgggggagccccactgtgctcagtgagaatgggggagcccgcctgtgctcggtgagaatgggggagcccacctgtgctcggtgagaatgggggagcccgcctgtgctcggtgagaatgggggagcccgcctgtgctcggtggtctgccagtgggcaagcgtccctccagtctccatgggctttgctcagtggggacctgcctccactaagacctgctaagggagcaggtttggtgcccaccaaggccaagtgaaatgagctgcttttgactctcactggctaggttgccttgtaagccttatctacttgctcagaaaggcacagtgggctcggaagcaggtcaaactcaggaggcacatggtactcattaagaatgcatttgagatgggatgtccataactcaagggataaacaaaacgtggcgtgttctacagtggacccgggtgaaggagcttggggagagccacatgctgttctgggaggcatccctgccttcacgcggcttgtcgtggagttcttttctggagcggggctccactgcccccatggttctgcaggggctatggcctgtcctcaagcaaggatgggaggaaaccctgggaggccgggggcgtgagcagttgttcgttcacctctgcctcgtgactgagcacgttctctccccaaatacatctggctcgcaggaatcttgacgaagcctgatctggtggacaaaggaactgaagacaaggttgtggacgtggtgcggaacctcgtgttccacctgaagaagggttacatgattgtcaagtgccggggccagcaggagatccaggaccagctgagcctgtccgaagccctgcagagagagaagatcttctttgagaaccacccatatttcaggtgcgcttgcctgggtttcatcatggatcagtccaagcccaggatgtcaggccttccaggggacagtggcagccgtcccacagatgtgtggagtgtgtgtgtgtgtgtgtgcgtgtgtgtgtgtgcgcgtgtgtgtgtgactatgcttgttccccaacaaggactatggaattcacctagaagaataggaaggggattacaaaatactgccaagaaaaaaaaaactaaaaaccaatcaaaatagggagagaacaatgtacaataatttacgtagcatggtgctggaaccatattttataaaaacataaatagaagagaataggaaaaaagtagaaagcccagaaatagacctagatatatatatttgacacatgataaatgcagcatttcaaatcaaatagtggactatatcagcttgagtatctattagtggtgttaggataattaatatttgggaaaaaactaaaatactgcccttacttatctcattataccaaaatagttaaagtttaaagttaaatattaagaggaagcaataagcatctcagaagaaaggtaggtgaatagtttataagatttttctatccctcctaccaaaagtgacattttttaaaaggaaaagactgacaaattggtaagatttaaaatgatgagactatgtagagttgtaaacattcttacattcagttctcccagaagcctacagagagccattactcagaattccaggaatatcaaatggaaacttacatcctgttctgcacattcacaattgccagaagatgagatgattcagtgtccattgatggatggatgcagaaagcaatgtggtctgtacaaaaacatggaatactttcagccttagaaaggaaagacattctgacacatgctacaacatggatgaagcttgggaacattctactaagtgaaagaacccagtcgtaagaggacggatactgtctgattccacttagctgaggtccctggagtagtcagattcatagagacagaaagaatgatgggcaccaggggctgggagagagagaatgggcaggtagtgtttaatggggccattgtttcagtttgggaatatgaaaagttctgaagacagacagtggtgatggttgcataatagtgtgaatgtacttaatgccactcaagtgtactcttaaagatggttaaatggtcaattttatatgtagtttaccacaatttagaaaaattgacagagaaactgaagcttaggtatgagtatactcacaaaaaggcacagaaactcatgcttcactgctgcctttatcctaaaatgtcctataaaatgtgggaaaccctgtaataactcactctgtgagcacaaatttggatcgagtgagaagatacttgacttccttcctccaggcagcccatggtttaagtttttatcttggacaagatatcttgtgtctcttctcctcagtgttctgctacccatttatctcaatatgcttcaatgtatttgtatgaagatatgtctgtatccattatgatcacctacacatattacacatagaagggggtatgtgttataaaaacatatctatacatgtctgtgtatttttgtgatgaccaagtctatagtcagacaccatgatacacatttattatatcagctggaagagctcattccatatcattgtggaaatatcctagattgctaaaattcagtcataatcctattcaatccagttctgagtatttgttgggtaccaactgcaagacattccatccagttgtaagcaactgaaatttgccttgactttccccaacagcaaaaaggcagacatgcgtgttctggctacatcaaggtggaaatcggtcctgtgttctcttctagggatctgctggaggaaggaaaggccacggttccctgcctggcagaaaaacttaccagcgagctcatcacacatatctgtgtaagcacgggcagagctgtgggttctctaaaaagaatactacgaccgcagagctgaaccttgctggcttcttaaacatcactgtacacacagatcttctgaggatcttgttaagatgcagtttcagattctgtgggtctggagtggggcctagaattctgcatttccagcaagcccccagacaatgtggatattccttttcaggggaccacagtcagggggaatgctgatagactatatctactgggccaaaataaaaattaaaatcttatgcacaagctactaactcttcctttctcattgacaaccactattataatgtcttagtcattctaatgaacatattttttaacttctaaaagctttgtaaaagctctctgtggttctttttaaaagtctgcctgaatatagtgtcttcctttttcaaattttcttttcttttcttttctttcttttttttttttttttttttttttttgagacagagtctcactctgttgcccaggctggagtgcagtggtgtgatctcagctcactgcaacctctgcctcctgggttcaagcaattctcctacctcagcctcctgagtagctgggattacaggtgcccaccaccatgcctggctaatttttgtatttttagtagagacagggtttcaccatgttgaccagactggcctttttcaaattttcaactcagcaccagagtgcaaggtcttccacgtggtccccaggaatgcgggtgcataacagggttgtttccagccgaccatgatgagtgcagagctctctggggtcccactgtatgcagaaagaggatgcttccttattagattccccacctcgagcaagcccatggggattgattttttgcctctgcaccaagtcaggttcataagttcccgttcgaattttcttacctagacagatgcccttgtggctgagccgggcttcattgctgccttctccttgagcccctgcctggccactgttactggggctggcctctgactacccctcactaacttgtgagtccaccgatacatttaaaggtgcagctttcacatgtcagctggcatttttagatgtttgccgtggaagggtgagccagcatatggcgtcaaccgtattgttaaaaacataagtctctgatcactttttattgattgcaagcaacataaaagttgttgaatctcaaattgctccaaatgccactttttcagaacctactagacaagtggatctctccagtctccctccagagagtttacctaatatgaccacagaggaactgctcccgggtcactctgccggggcctaggacccatgcacagtgggtgccacagtgctgctcatgaggctgctgtcgcaggagtggggaagggggaagacctgggcagaaaacagtgcccccagtgtgtgcccccctgcacctcccccgggtctggaaaagcttccttttagaggaagccaggaagtcaaatggcccacacaactcctctgcagagggaggcccgggacctccttttcattctctgttcatctttacacatttccattattttctctccattttcctcagaaatctctgcccctgttagaaaatcaaatcaaggagactcaccagagaataacagaggagctacaaaagtatggtgtcgacataccggaagacgaaaatgaaaaaatgttcttcctgatagatgtgagtgttgccagctgcatggagctggagaagcacatgtcatggtcaaaaaagggaccctgggccttatgcacttccttcttcactcccccaaggctgatccaaagacatctggcccgtagcactcaaagggtggacagggctgagggaggcagggcagggagtgcagatgtgggggtggagtcagcagcgagggatgctcaggctgcgttgtgcctactctgtcacgagcatcacccagatccctaaggcagtaaggggtgggataggattttctagtgccaaaacctcttctttcccctgatccacagtgtcccataagaaagcaaagaatgactccccaccctccacataggcacggcctccaaatgaccttgacacttggatttgaagtctatccacttatactgatgtttttcttcttgacagaaagttaatgcctttaatcaggacatcactgctctcatgcaaggagaggaaactgtaggggaggaagacattcggctgtttaccagactccgacacgagttccacaaatggagtacaataattgaaaacaattttcaagaaggtgagtgtcttagtcccttcttttgggctgctacaaccgaatacctgagactgggtcatttataaacagtagaaacttattgctcattgttctggaggtgagaaatctattcttaaggaatcaggaaatttggtgtctggtgagagcttgttctctgcttcaaagatggcaccttctagctgtgtcctctcatgggataagggacgaacaagcttcctcggacctcttttttacaggggtaccacaggcatacctcagagatattgtgggttcagttccagacaaaaagaatattgcaataatgcaagtcatataaacttcttggttcctggtgcataaacagttcatttatgccctactgcagtctattaagtatgtaatagcattaggcctaaaaaatatgtatgtaccttagtttaaaacaccttattgctaaaaaattgctggtacagaaacaaaaagtgagcatgtgctactggaaaaaaatggtgctgatttgcttgacatgggattgccacagactttcaatttgtaaaaaatacggtatcagtgaagtgcaataaaacaagatatgcctggaatgccattatgcgggcagagtgctcataacccaatccttcctaaaggtctcctctgttgataccatcacactggggattaagtttcaacataggaatttttaggggacaccaacatgtagaccatagcaatgagtcaataccgtggtaaacctgatacgttggcttaagacagagaagagtggggcagttggggaggatggtcaggataaggagctagtgacaactaaagccatgtttgctctcttctatatcactgaacccaaatgaccatccactgatgaattgataaaccaactggcttgtgtctgtgtgtagcggttggctttggctgtcataacaaagtaccacagacttgggggggcttaaacagtagaaatttattttcttacagttctggaggctggaagtccaagatcaagatgttggtggagctggttccttctaaggcctctctccttgccttgcagatggcctcttctcgttgggtcctcatgtggttgtccctcagtgtgtgtgtcctcatctcctcccacaaggacactaggcagatgggatgagggcccaccctagtgacctgatttcaatttaattacctctttgcctgtctccaaacacagtcagattctgagtttctgagggttaggacttcaacattggagtttgaagaggtcacaactcaagctcagcccgtaacaccaagtcctggaatatttccagccacagacaggcacagagtgctggtccacagcaccccatggatgaaccttgaaaatgtcatgctgagtgaaagaagccagccacaaaggccacacggtctatgattccattgatagaaaatggctagaacaggcaaacccaggcaggcagaaagcagaatagtggctgccaggggctggggagggaaaagtgggaagttatcactgatgggtgatggatgtggggtttgggagttatgtctggggatggtcgcacaactttgtgaatatactaaaattcactcacccatacacttttttttttctttttctttggagacagggtctcactctgttgcccaggctggggtgcagtggctcagtctcggctcactgcaccctctgcctcccagattcaagcgattctcctgcttcagcctccacctccctagtagctgggattataggcacctgtctaatttttgtatttttagtagagatggggtttcaccatgttggccaggctggtctcgacctcctgacctcaggtgatcactggcctcagcctcccagagtgttgggattacgggcgtgagccactgtgcctggcctgaaccatatatttttaacagagtgaatgttatactatgtaaatgacatctcaattagaaaaatccttatgggaaaatatttcctgactaaaaaaagtgttctagattaccactcaaaaaggaactcaaaccctctgaacttctgatggggctaactctctctagtgtggattgttgggagtacaaatcattccaaaagtttaaagaaaaatgcagcatcttacacagtgaacagtgctactgtatcacattcatacaagttgatgtgcctggtttactctgttatcccatttgacttgtaaacactttctacacatggcaatactttcgacacatgaatatgtgatgtattgttaattccagaaagtgttcatgctcatttctaatgggcatgcagttgagggcaaggagtgtattatggtacaatttctttggtaaaactaaaattggattcacaaaacttcatactcgagtacgtttttaagaaggggtcttggccgggcacggtggctcacgcctgtaatcccagcactttgggaggccgaggcaggtggatcatgaggtcaggaaattgagaccatcctggctaacacggtgaaaccccgtctctactaaaaatacaaaaaaattagccgggcgtggtggcgggtacctgtagtcccagctacttgggaggctgaggcagaagaatggcgtgaacccgggaggcagagcttgcagtgagctgagatcacgccactgcactccagcctgggtgacagagcgagactctgtcacaaacaaacaaatgaaaaaaaagggtcttactcgaagtttctgcgtatgtgggttcctggcatcgtacctggctctgcactccccttcctgagatgactaaggaaaattatcttcagatctggttttgtgtgtgtgtgtgtgtgtgtgtgtgtgtgtgtgtgtgtgtgtgtgtgtaatccctggatatttttagtttaccagttagatttgatttgataccactttttcttgccatttatattttcagaaaatttagaatggtattgtgtttagaaaaatgtgcaagattatttttgtaaaataatttagagggttttttttcctgctataggccataaaattttgagtagaaaaatccagaaatttgaaaatcagtatcgtggtagagagctgccaggctttgtgaattacaggacatttgagacaatcgtgaaacagcaaatcaaggcactggaagagccggctgtggatatgctacacaccgtgacgggtgagtgctcagtttcacctctgagcattgatttctaaagaaaggaaaggttcgaaccaaagccagcaccaaacttcagcactttcctcctggggtgcatcccacaccaacgagcaaacctctcattctccagatgccaagttggtattcaacaattcaattcaattctgacactaactaccctcagtcagtgtggaccccatagcttaagggctcagttccacaacactggccccaactacaaatgccggtcacaagtcccagacctcctattcttctgatggactgtttataaatcaaggttcttgcgacccattcctcaggtcaaccaagaactctggaacacacttcactgacatttactggtctattagaaaggatttgataaggggcacaaatgaagctgttggagaggcacatagtaggggcctgaacacagaagcttctgtccccacggggttgggggcaccatcctcatggcacagagatgtggtcatcaaccagggagctcttggaacctcaccgcggagaaggttttatggaggcctcatcatgaaggcatgatggaggattgactcaatctccaggccctccctcctctgtggagctggaagttctaagtttctagccaaggcttggtctttctagtgcccggccccaatcctgaagctatgtaggggcccaccaggcatcatctcttcaaaacacgagatactcctaaggctggacattccaagagatgtaggggctctatgttaggaaatggggacaaagacaaaatatttatatttttcctatcacaccacacctcccccctgctccactgctatgctggcttcacactcaaaatcggctgtttatttgaaatctccgaggagtaaagccaatggttccataactgcacgtgtagatgtgtttggaaccttttggagtgctgtaggaatctaggtgtgtcacggataggtaggaaactagatcctactgtggatccactcccttcttgaaatgctttgctttcttggttttccaggtattaaatctctattcttcatcctctccttgactgacagtatccttactcacacttcagctgcctcatcttagcagtaattaataatcactcatggatccatgaactaaggagctggagatagcctcagaacagctcattcagaggtgtatttccagtaaaattgaccttttagccctgataatcatataccaaaacctgcaatcatgttgttttggtccattgtagactcttaactcattccagaggaaagtttataatacttagagccttatagtcataaaaatcaacatagatatacctatttctttttcagaaatgtatgacatggagatcaataagaggttttcaatcataaagatactataccttgtattacaataaaattctgtgaggaagtagaatagaaatgagtttcaaaaataaaagataaataatataaattttttaatctaagagcttgttcttgtatttttttcaaatggataatgtagacactcaaattccattgatatatttaagagtgatttgacttatattaagagttgtattataaaatattaatatttataatttaaaagaaattacattctttgcagctatttaggataaaaagtttaaatatcaaataaatgtatgccaggggtcatttgcttttaagattcttccagcaaattattaagcaaaaagagcatgccttgctttttcatggtaaagagaagaagggagcggggagaggggaaactttacttcataccatttgatcctcatatttttttgcatcttaagaagagaacaaatgatcctaccaatattgaactatttttctctctttgattagatatggtccggcttgctttcacagatgtttcgataaaaaattttgaagagttttttaacctccacagaaccgccaaggtaaaaccaaccatgtgttgtttaaaaaaaaaaaagaaaagaaattaagcttgacactagaaaatagatttcttggatgaggattatttcaactttattgtatacttttagaacagcaaataacatcactcactagtgcttcttctgatgttaccggtgatgtctggttaaaagcaataaaggagggagtgcttaaacgcacagaacaagagatccacagttagcggagaagattatcacatctaagggcaatggctccaaatccagaaactcactgaggaaactacatataaaaatagaatatttctggcccgagtgggcatgatgagcctgtaatcccagcactttgggaggctgaggccggtagatgacttaaagccaggagtttgagaccagcctggcccacatggcaaaaccccatctctactaaaaatacaaaaaagtagctggacgtggtggtgcatgcctgtaatcccagctacttgggaggctgacactttagaattgattgagcccaggaggtggaagttgcagtgagccaacattgcatcactgcactctagcctaggcgatggagcgagaccccgtctcaaaaaaaaaaaaaaaaacaaacaaaaaaactttccatccagagtgaggaaagagcctacaggaaatgagcctgggggacagactgggccaagagaccagacttagccactcttagaaataggtgtccccggcacagatgaggagcctggccccatgattcaccagctggaggccttgggatgtgccacttccagcctgtgcccctgactcctcattcataaaagaagactgataaggccttcctcagaaggttgagatggacgtggagtaagatgtttaggatgcacctgccactgtgcactgtgcctctcctcaaggcctggagggtccaggggtgaagtttctcctcctcaggttttggcaaccagtttctctaaaccccgggaacataaaacataattttctgacttaaacatggctttcctgctcatccctgtggattatctgatggatatgacaatcctcgccatcagatatagaagcccctaaaagagaaaggaaagaagctgagttacggggcctgaaagcaagcctgtgcaggtccccaggccccgggatgggggtccggcccatctgtggctcaagcctcctgggaagctctgaccctcagccagggctagaaacctgccttagatacaccagggcgcggcccagagggctgttccaggaaacgtgctgtttcactcacgttgggtaacctggtatttacggacttcttacctactttcctgtgactcaggaatttgtgtcttgagggaaactgtatttatttattttttactgtagtccaaaattgaagacattagagcagaacaagagagagaaggtgagaagctgatccgcctccacttccagatggaacagattgtctactgccaggaccaggtatacaggggtgcattgcagaaggtcagagagaaggagctggaagaagaaaagaagaagaaatcctgggattttggggctttccagtccagctcggcaacagactcttccatggaggagatctttcagcacctgatggcctatcaccaggtacgtcttcgcgtggttcaggatgccagcttccattctttccttttcttctgaacgcctctctctttagtcttgctctctctgtaggtgacgttggtcagctctgtcgtttacctccttgttagcctcctgtattagtccattttcatgctgctgataaagacatacctgagactgggcaatttacaaaagaaagaggtttaacggacttacagttccacatggctggggaggccttctaccatcacggcagaaggcaatgggcacttcttacctggcggcggtggcaagagagagaatgagagccaagtgaaaggggtttccccttatcaaaccatcagatctcatgagagttactcactaccatgagaacagtattggagaaactgcccccatgattcagttatctccccctgagtccctcccacaacaggtgggaattatgggagtacaattcaagatgagatttgggtggggacacagagccaaaccatatcgccttcgtagaagcagctcaacctcagacagagagatggtggcttagagccagtgacatctggttttgatggctgtctagctctggccaagttacttaacctctctgagcctcagctttctttgtaaaatggtgtctcctcatagattctagtgcatattccaggagacgagtgtggatgatgataatggattgctaatggaaaaaccaaactctgttaaaatatttgaaagaggtttattctgagccaaatatgagggaccatggctctgggaacagtctcaggaggtcctgaggaagtgtgcctgaggctgtcaggatgcagtttgattttatacatttcagagaggcaggaattgtaggtaaaatcataaatcaatacatgggaggtgtacttgccctccctaaagaggcaggacaccttgaaggagggggagcttaccggtcataggtgggttcagagattttctggttgacgattgcttgaaagagttaaactttgtctacaaacttgacatcaatagaaagaaatgcctgagttaaggcagtgttagaggccaaaggtatgtagatgaagactctgggtagcagccttcagagagaataaatggtaaatgtttcttttcaggccttagaggcagcaggctctcagttaatctctcctagattcagggaaggcctagaaggggagaggtctgactgcattaatggagattctctacaggtgcaaattccccccccacaaaacatggcagggccatttcaatctgttggtcctgttacagccgtttcaaaatatgtccacaaaatatatttttaggtaaaatatttgtatttcctttagggtctgcaatctgtcttgtgatgctataccagagtcgggttggaaagtaagccattttatactgagttcatggaaactcatccaaggagatttcatggtttgtggggtgtgtgtgacttaacccctgcctcacatgactttataatatggtatcttactactccagagtctttttggccaaccttatgatctcaatttcaacctaaactccaaaagggcctggcttctcttcctgttacggccaggaattcagattttcaggtttctctggggtccacttggccaagagggggtctgttgagttggctggaaggcataggattttatttctggtttacaacaatttccttagtgcagcattggaatgcaatggtagcagactaaatggaagctatcgcgtagacacatgctttggttgatactgcacgattcagttaacctgaagtacaatctaattcatcctagggaaggaggcagtgaacacagacacaactcaggtagagcccttgggatgtgtaaacacctgaggaggtaaagcaaattgtaatctctcggtttatcagatgtccccattgccttactatttggatgctttaaagcagggcctctcaaactccacccagcacagaggcctcctgggatcttgtggaaatgcagatgctgattgcaggtcaggatgaagctgagattctgcctttcttttttttttttttttgaaaccgagtctcactccattacccaggctggagtgcagtggcacaatctcagctcactgcaacctctacatcctgggttcaagcaattcacctgcctcagcctcccaagtagctgggattacaggcttaccttgccaccatgcctagctattttttctatttttagtagagatggacttttaccatgttggccaggctggtcttgaactcctgacctcaagtgatctgcctgcctcggcctcccaaagtgctgggattacaggcgtgagccaccatgcctggcctctgcatttctaacgggctctcaggggtcaccatactactggatagaggccacacttggaggagcaaggctctaaaccgagggtcaacatccattcctccagacactgggagctgcatgcacgtgagtgaagccagttaaggggaagacaggcatgcacatcagcttctcctgcagccaagctcacacctgtccgctgcttccactgcctcctagaatgaacagttaccttgagagtaggtgaggcatatacatgcacagaatccaaacaataggatgagtgacaatggcagaggagtctccgagccaagcagctccctggacagaagcagcccttctccgggttcatttctgtcctccgaggctgactcatgcactcaaaagctcccatgcatatacattttataatggtttttacacaaaggttagcagaggagtggacgtgctgctctgtaccctgcctcttttgctgtacctgggagattgttctgcctcagttctgatggggctgccttgttcttttcaatggctgctgagtatcccattttatggatgtggtatattgagccagctccctttaagcgaacagtttgtttgcagtcttttgctaatgcaggtgtgttgctgtgaataggtttgtttgtatatcatgtatctggaagcatcaattcctagaaatgagattcctggtatattaggattgtgcagggaaacagaaccacagatatatgtatgtaaagaagtatatttcagccaggcatggtggctcatgcctgtaatcccggcactctggaaggctgaggtgggtggatctcttgaggccaggagtttgagaccagcctggccaacatggcgaaacccggtctctactaaaaatacaaaaaaattagctgtgcatggtggcccatgcctatagtcccagctacttgggaagctgagatatgagaattgctcgaacctgggaggcagaggttgcagtgagccaagatcacaccactgcactccagcctgggtgacagagcgagactccatctcaaaacaaacaaacaaacaaaaaacaaaacaaaacaaaaaacagaaggaaagaaagaaatatatgtatatttcaaggaattggcttctgccattttgggagctggcaagtccaaaatcccagggcaggccagcaggaagagcaggccagaaattgcagcaggagctaaggctgagtccacaggcggaatttcttctttttagggaaacctcatttttcttcttaagaccctcaactgattggatgaggcccatccacatcattgagaatggtctccttcacttaaagtcagtgggttacacatgttacccacatctacagaatacctccgcagcaatacctagattcgtgtttgatggaatcactggggactcgagcctagccaagctaacacatgaaacacaccatcacagctggggaaaggatggcttattttagactgataaagatgacccagagaaggcctgctccatccacactggccgctttagtctgcactaaagttgttggttttttttgtttgtttggtttttttttggtgacagagtctcactctgtcgcccaggctggagtgcagtggcgcagtctcagctcactgcaacctctgcatcctgagatcaagcgattctcctgcctcagcctcctgagtagctgggactacaggcacgtgccaccacactcggctaatttttgttttttcagtagagacggggtttcaccatattggccaggctggtcttgaacgcctgaccatgtgatccatccgcctcagtctaccaaagtgctgggtttacaggcgtgagccaccacgcccggccttgttggggttttttgacagcctaataggtgaaaatgacatctcattacaatcttaattggcattctcttatgacaacaagctggtacatctttttgtgtgttgagggttatttctatttcttgctcagcaaacagttcatccaggaagagcttcttggtgagatagtagacctctgcgatttctgttgcagacgatctacattttgtcatttgctttgtcatttttgtctatggtggttttagactatgcgtaagttttctagagcagaaactcaagttggatttgggcctcagtggttattgccatactttaaaaggactttgtctccctgagatgataaatgaggtggacaatattttctttaagtaatttcttattttaactgttacatgatacctttggcccatttggagttctttgatgtcaagaatgaggcaggatccagatggcagcagaggtcccagtcccatcctggaagggtcgtctagttcccactggtactccacacgcccactcaggcactcacttcccctctgcgttgggtcttgtctgcaagactctcttatgttttaccatctagtgcagccagcacccccacatcaccctcactttttctttctttaaattgtgcagaaatattcatcatgtctattttgccatcttaaccatttgggggtacatagttcagtggcattaagtacattcatattgtgccagcatcaccagcagccatctccaggaccctatcaccttcccacactgaaactctgtccccattaaacacattccccattccccgcccctgaatccctgacagctaccatcctactgtctgtctctgtgaattcaactaacctaagtacctcataggagttgtgactggcttgtttcatgcagtatgatgtcctcatccaggtggtagcaagtgtcagagtttcacgcctatttatttattattatgagacagagtcttgctctgtcgcccagcctggagtacaatggcgcgatcccagctcactgcagcctccccctgcctgggttcaaacaattctcctgcctcagcctcccatggtgtgccgccacacctggctattttttgtatttttagtagagacgcggtttcaccacgttgaccaggctggtctggaaatgcagtttttgcactgtctgcctgcttacctttatagagcatattttgccctcttccatcagaattacccatttaatggtcaggaaaagctgctgggaatatgactcatagctgggacattctctgcactgtgcatagttcctctctgccaccaccatggaggagattgatgggtttgaaacccaggggaaggtcattgccctgcgagggtctccctcattgagaatctggatcccctcatgtgcacatggtgaggtcagagtcccctcctcacagtgtcccctccaccctcccgtgaactgttctttccttccaggaggccagcaagcgcatctccagccacatccctttgatcatccagttcttcatgctccagacgtacggccagcagcttcagaaggccatgctgcagctcctgcaggacaaggacacctacagctggctcctgaaggagcggagcgacaccagcgacaagcggaagttcctgaaggagcggcttgcacggctgacgcaggctcggcgccggcttgcccagttccccggttaaccacactctgtccagccccgtagacgtgcacgcacactgtctgcccccgttcccgggtagccactggactgacgacttgagtgctcagtagtcagactggatagtccgtctctgcttatccgttagccgtggtgatttagcaggaagctgtgagagcagtttggtttctagcatgaagacagagccccaccctcagatgcacatgagctggcgggattgaaggatgctgtcttcgtactgggaaagggattttcagccctcagaatcgctccaccttgcagctctccccttctctgtattcctagaaactgacacatgctgaacatcacagcttatttcctcatttttataatgtcccttcacaaacccagtgttttaggagcatgagtgccgtgtgtgtgcgtcctgtcggagccctgtctcctctctctgtaataaactcatttctagcagacact

SEQ ID NO: 8511 - DNA, 33042 bp, Homo sapiens
cttcgcggcgcggggcggggctgggcgcggggtgaaagaggcgaagcgagagcggaggccgcactcccgcactgcgcagggaccggtgagtgtcgcttctgggggcagcgcccagtaaccgcgctaggagcgcggagaagggcattgggagagcggcgttcgtggcggagactagcgctccggagcacgggcacgacgggggcaccttctcggctgctagtaactaacaataataataatcataatcatagcaagggcgctgatgggcgggctcggagcacgcctgattctggttcccaccaggctgcccaggctcctgatgacgcatcagaaacatccccctaacccgcggccttcctgcaggagaggttgggaaggggtgggggacggggctcgggggaggtctccgagggactctagtaagcggggaagggcgccgggaaagtttcagatccacggctgcgcgggccacgagcccacccgaacgccgaccactgctttccgtcgacttctatttcctgggaacgcgcgaaagcaaacccaagtcagactgcggaggtcgctggggagggaaggttcaaggagttctcgccgatcctgctgaataaagggggttccgagctgggccgagatggggcatgcgcgggaagacccctgcccgctgttccccccccaccgccccagtggatgccatgcctggggcctccccggcgcgtggggctgacgcaccctcggggtccatcgtagttggccgggatcgtggagtgggtgcggtggacgaagggaggcaggacagtcccgggggtggcagaaggagcccgggcacagctgagacctgcgctcccatcccaccaacactcacagcaggtgctgccgagctgggcaattgggatggcccaagttatttggttaaattttaaatcacgtttgttactgggaagtagagtccagtgatgctaaccgcgcctctacctccaccaccggtgtcagtcccaaagggctcctaaaatggctgtgtcatctttcagccttggaccgcagttgccggccaggaatcccagtgtcacggtggacacgcctccctcgcgcccttgccgcccacctgctcacccagctcaggggctttggtaggtagcagtgcatttggtctaaagggcaagatgttctctcttttattcataacaaatttaaataccagcagggtttggggggaaaaacgctttcagaagaaaaggtgaatgtcagtcctgcaagagttagttttaaaactagactgaattggcacatgtatacctatgtaacaaacctgcacgttctgcacatgtaccccagaacttaaaagcttataaaaaaagaaaaaactagactggattatgttgggaaagtgtagcctcttccatcttaggcatttcctagaacgtaggcagtaggtggtccttattaggagttttgggagaggaagggggctgaatcctacctcccatccctgctcctctatggggtctgagctgaggaagcttcaccacaaggagagaacccccctgacaaccctggatgccacctttaccctcactgcaggaattctgtggccacactgcgaggagatcggttctgggtcggaggctacaggaagactcccactccctgaaatctggagtgaagaacgccgccatccagccaccattccaaggtaaggcagaaatgaagtgggccgttgggttctttcttttctttctttcttttttttgagacaaggtctcactctgtcgcccaggctggagtgcagtggcgccatctcagctcactgcaacccccgcctcccaggttcaagcgattctggtgcctcagtctcctgagtagctgggattacaggcacacatcaccacacctggctaatttgtatgtgtttagtagagacagcatttcaccatattggccaggctggtttcaaactcctggcctcaaatgatccacccgccttggcttcccaaagtactgggattacaggcacgagccactgcacccagtcaggttcattttagttgttatgttaaccaggtttcctgcacctgtgcgctaactttcagtttcccaaaaggtttcagggtgacccagcaggcaatgagtgattctcaaattcaggatttattgtgagagattcacacacacaattgagcagacattcacagtacaatgattaaagggagtgattagggtaaggacccacagtggaggctctggaggccagcccactgacagccactccagggagtccagaagtcccgctctagtgctgggtggtggagggaaatctgttcctccagggacctcgtcctcggctgcccagctgccaaagtcaggaataagctttcagaaatctcactgccaagattccgaaaacgcttcagacattgccagtcccttgtcgcttttgcgatcctccacaggtgtgcgtgccactgggtccttattcactggggtctctggtggcattgggccacagcaagtgttccctcatccccttagtctaccacacacatgcttaccactttgaagaaaaacccctttactatgagcgaaagtgagaaacacgtatgtttattgtttctaaagaaagaaacttaatatgggcttaatgctacctagtgagtgcctccattttgagacattagggtcacaagtcattattatatatcatgggcacaaacctgccctgggcagggacggaaggaagcccctgcacaggggcagttgctcaggatgtgagaagagcctggtgcataaccccatccatgcccacctaacatctcaggctctgacaagtggggctgtgcagtagcgagtggatggagggctggaaccctgcagcctcctctccaaacacagggtgcagccaagacattttaggagcaatttgggatggagagctaggagtcgccacctcttggctcttccaaggccggaactggtgcctgcactcagttcagtttgaagactgcagctggatgccaagttccatggaggaataagaaaccggtttgaactcccgagattgccctgcccctgaaatccaaactgatgttccgaatgatcagggaaaggtacaaacgtttatggtttacagacaaaacccataaggtttagctttcagagaatctcattttatgaagcaaattagggaagggaatctactcaccaagtcctgtttcagctgattgagtggaacctgtggtcatgtggtacaagtcctggtctcaatgatgctccttatctggctgcagaaaggccaactgaggcaaccatagcccagaagactggtactcctgagaggcagatgaagtggtggtctttgatatcgagcctgggatgccctgggcacatgaggtatttccaaaggcatgggagttttagggaataaattcccagattgtcagactccataagtaccgtttacaatggattaccttttataaccatcccaatcctacctgacaaaagaggtgggcggattacgaggtcaggaaattgagaccatcctggctaacactgtgagaccccatctctactaaataaatacaaaaaattagccgggtctggtggcgtgcacctgtagtcccagctacttgggagcctgaggcaggataatcgcttgaacccgggaggtggaggttgcagtgagccaagattgcgccactgctctccagcctggtgacaaagcgagactgtctcaaaaaaaaaaaaaaaaaaagaaagaaatacatccctttcttcccttccaaatcgagcaaggatgcctgccctggaagtgtataaacccggggaagggagacagaaaaggatagttttaagtattggtgttggggacgtgttctttagccaaggcagcatgaacccatggcagcacttcccaaccttcctgacatgggcgtttctgtgaactccagtgtgatggagaaatggcgttggctcaggtgtgcagctagatatgttacagagcagggtgacaggcaggggtgatgagttttgttttaacaacctgtcccttcaaccctcatggtactgacaaagatcacatggctctcgggggagattcctgcgaggggaagcaaggagagcatccttacatattattgatccaggcagcagatttgcagcaaagctctgtgctttattcatctgttaaaatagttaaaatagtcaaaacataggaaaaggattctgggaagtcagaatcggcttcagagcacacccctcctgcacttgcccggttctcagccttgggaatgggactgggtgggtgggtactctcgggtgttccgcgggtttgggtcttacttgtacactttgcttgatttcaaggaggtgcaggagaacagctctgtgataccatttaacttgttgacattacttttatttgaaggaacgtatattagaggtaagttggtgcatgctattttctgtaacatttattttgagtcataggagaaagattttcagttacttttatccaagattattagacactgtaaaatttcatatttaggcacttgtcctacaacattttaaaaatgaatttcaaatacatacgtgtgtatttgtaatgcagacaagtataaggcagtcagttacatgctttcaagagtaaaatgaatgacatttcatttcccccatttgtgggagtaaaagaatgacaatatgaaattgatgatcaaaagaaagagcataaaagatttagagctcacgtgttttttaaactaaaggtttgggtatcaaattaccgtaatatttggattctcttggctacattggaaacagttctataacaattttatttttaaatgtaaagtttttgtttgttgttgtttttaagacggggtctcgctctgtcgcccaggctggagtgcagtggtgcgatctcggctcactgcaaccttcacctcccaggttcaagtgattctcctgcctcagcctcccaagtagctgggactacaaacacacaccaccacttccagctaatttttgtatctttagtagagatggggtttcactatgttggccaagctcgcttcgaactcctgacctcaggtgatccactcaccttggtctcccaaagtgctgggtgggatacaggcgtgagctactgcgcccagcctttaaatgtaaactttttaattgtattacaactgcatcagaagttgtatactttgcaactattcaaatttatactgaaaacgtttttgaagttcaacctaaaattatgacaggagatagttttagaaaatattttggggaacagaggcatattctattttttttttttgagacagagtcttgctctgttgcccagactggggtgcagtggcgtgatctcagctgactgcatcctctgcctgccaggttcaagcaattctttgcctcagcctcccgagtagttgggattacaggtgcccgccaccatgcctggctaatttttttgtatttttagtagagacaagttttaccatcttggccaggatggtattgaactcctgacctcatgatctacctgcctcagcctcccaaagtgctgagattacaggcgtgagccccggggcccggcctggagggatattcttgaagcgccttgagcagggaggcagcgtttgtctttatctgaccttggcttctttgggtcactctgtttctctttccgtgaataaaaagccagtgagcacacactgtgtcccaggcactcttctatgctctggggacatcaccgtgaacaactagtcagagtccccacctccaggggccttccgttctggtggtgggtttggttccatggttgaatgcacccagctgcttatctgttcaataggcatctgctttattttaagcttactttgcaaagaaggaagatggttgtttccgaagtggacatcgcaaaagctgatccagctgctgcatcccaccctctattactgaatggagatgctactgtggcccagaaaaatccaggctcggtaagttgctctctgaaagtcgctatccatgtgacatgagccatgcccattcgaggctgcccttttctacagcggtgctactgctgcccagatatgcctgctctctcgcctctcctgtgccaggacgcagatcctgaccctctacttgccagctgacaaccatgtatagactcgttgccttagctcaccgtgggtggaggtgctgctggggttggggacactggctgagctgtcgatgggttcagctcatctatactagaaggaactggcccaggccctgggttcaaggagcactaggtttgtttttcctgcccacatcatgattcagtctcaagctacaaaccctggggcatcattaagatattatctttgtagggaagccacgtggtgaattttttgcccataatcaagacatatttttggtgggaaccaatcatggcccctggaatcagtccaacctcagttggtcccgacgctgacactctcagctgtgtgattgtgggtagttattcctcctgttataagcctggttttccatatctaaaatgagaataatggtctttgctttatatggctaagagcaaagtgcagggagtgtccaggtactcagagtgctcagtttcttattaccgtggatcactggtctgtttcaggctggctctgttttcctaggcaatgttaaacaatttttcaaacaatattcaaaaaacattgaagcgtttagaaaaatacagaggaccaccacctttccaccaccctgataccactgtttacatttttctgcatttccgtccctggtgcgtctcttgtctggctgtaagagatgtaattatgtcagggtatggggcaggaggaactctcacccactcatacttgcgtgctttggaagcagcttggccttttccagtcaaggagaacagagtgtgtctcatgatctggcagttccacttctggggatagactgtggttctcaaagtgtggcccccagcccagcccattagcatcacctgggaagttgattgaaatgcaaatgaccagcccctcctcccactcttagacctggtgaattggacactctggggcagggcccaccccctgtgctttaccaggctctccaggtgattctgctgtgtgctggagtttgaggaccatgtgtaaacccttgcacatccccctgggagccacatgcatagcagcactgtttataacagcaaaactcagaccctgtctacgtgcctgtcatggtggaatggatactgggagtgtggtatgttcatgtagcagaattctatacagtagtaaagaggaatgaactagagttccaggtatcaaaatggctgcatcaaatgaacaacgttgaaccaaagaatcaagttacaggaaatatacaaaatgattccacttacgtaaaattccccaacaggcagcaataggcaatataccattgtgggaaaaacatataggtggcaaaactataaagaaaagcaaggatgtgatgattgcaagcctcaggatagagggaccctctggaggtgaaggagttgacccagggaggtgtgtgcaatgtcctaagtactgggagtgtttgtgttcttaacccaagtggttggtacatgcatatttgctttattatgtttgacacacttttgtaaatagatagtataaataaatgaaaacaaacaaaaagttataaggtgaactaagaccgaggctaccaactgtattcatgcatttggtaaggctgtggttctttctcagtcagggcccattttgctccctggaacttgtggccaggtctagagacatcttggttgtcacaactcagggtgaatagtgaatagaggccaggtatttggctaaacctcctacaatgtgtagggtagcccctgcaacaaacaatcttctaaccccaaatatgaatagcttcttgtcctgttataaagaagctattctagtaaaaacgtctgtctatgatgaagcatgcacaaaaatagtcattagaaagaggtaaaagacaaaatgattttctcatattttcttcctgaacctcaatcagcccactttaggaaaattgcacccagctgctggtaggtaggcaggaccgagtgtgaagtctgctgctttctctgtttttatgcaagtacttcactattttgattactttagttttatagtaattatggaaattaggtaatgctagtcctctgactttgttcttctttttcaaagtcattttgactaagaatatttagatcatttctatttaatgtgactggtaatataattagatttgagaatatcatcttgctatttgttttctatttgtcccgtctgttcttcgttccccctttcgtctttttctgccttctcttggattattttttatgattccatcatgtctcctttgttgtcttattaagtataactcttggtgtttttagtatatatctttaacttaataagtcaaccttcaagtgatagtctgtcacttcatgtatagtgcgagaaccttagaatagtgtatttccatctctctgctctgagccttcatactatttctatcatgcatcttttacatacatcataaaccccacaatacattgttattattgatgttcaaacattcaattatcttttaaataaagatagcaaaggaatacaaaaaagtgtagtagttaccccttctagtatagactcctttgtatagatccagatttccattcagtatcattttccttctacctaaagaacttctttaacatttcctgtagtgcaggtctgctggtaatgaattagttaagcttttgaatggctaaaaaagtctttgttttgccttcatttttaaaagttatttttgctgggtatagaattctagattgatggtgtttttcagtactttaaaaatactgcttcactgtcttctcgcttgttattgcttctgataagattgacagcagatttctcatttgtgtccctctgctcacactgtatcattctctggctgctcctaacattttctctttattactggttttgagcaatttgaccctcttatggcttgatgatgtttatgtttgctgtgcttaatgtctgttgagtttctgggatctttgggtttatggttttcattaagtttgagggaattgtatgtattatttcttcaaatatttttttctgtctctcttccattctcttttggggattccagtaacctgtgtattagacttattgaagttggccgtctttaatggagtgtattggttcattctcacactgctataaagaactgcctgaaactaggtaatttataaagaaaagaggtttaattgactcacagtccacatggctggggaggcctcaggaaacttacaatcatggaggaaggcatctcttcacaaggtggcaggagagagaatgactgaaggaggaacttgccaaacacttataaaaccatcagacctcatgaaaactcactatcatgagaacagcatgggggaaacctcccccacaatccaattacctccacctggtctctcccttgacacgtagggattatggggattacaattcgagatgagatttgggtagggacacagaaccaaaccatatcatgagcatgatttgcaggccatgaagaattctccatttttgtttcctccaggtggctgagaacaacctgtgcagccagtatgaggagaaggtgcgcccctgcatcgacctcattgactccctgcgggctctaggtgtggagcaggacctggccctgccagccatcgccgtcatcggggaccagagctcgggcaagagctccgtgttggaggcactgtcaggagttgcccttcccagaggcagcggtaagaacttacattctgtgttagtctgctcaggctgccataacaaaataccacagacagggtggcttatacaacaaaagtttattttctcacagttctggagactggaagtccaaaatcagggtttagcttctcctgaggcctttctccatggcttgcagatggccacctcctcaccgctcccccatgcggccttccttccacacacaagcatctctgctgtctcttccccttcttcataagggcaccagtcatattggattggggcctaccctaatgacctcatttaaccttaattgcctctttaaaggccttatcttcaaatacagtcccattaggggttagggcttcaacataggaatttggagggaacaccatttcataacgctatctcattgcacatttttttcacataagtcatatgtaatctacagtttgaggagaatctgaataaacacatttgggtcccccagttcagaactatatcagtgaggtctcaaagagttcaggcctgggacgggtcttgcaatacagatcaggtgtggtaggaagaatatggaaggagtttacagtaggaggactgttgtaaggtggcctggtagcagcaggatgctttcctaatgggggtagagtgtgtatgctggggggataatggaagatgttcggatgagtttcgggggattcccaatgtggtctgccacctgagctgatggcagaacactgggatgaggcaggaagccaaaagtggtggctttcaagcgttagtaagcaaaaactcacctgggttacatactcagaatgcatgttcttgaggtcacccagacacagtgcgatgtccccgcatatcagagggtaagaccagaaagtttccagttttaaatgtctccccatatgattgtataaaagtttgagaaccatgggcctaaggcgctatgtaggtcttttaagagcaaagtggagcactgatgtgggcgtggcctcctagggatcgtgaccagatgcccgctggtgctgaaactgaagaaacttgtgaacgaagataagtggagaggcaaggtcagttaccaggactacgagattgagatttcggatgcttcagaggtagaaaaggaaattaataaaggtgagtaccccctgtttggatgcctggtcaagccttctgacatgcatggggtctgtttgtaactgttcatactcccacctccctgggcctgtgctgtcaggacacctttctcctgcacatcaggccacggttccttctacttcttttacctcattatgaccagcacgcttggatatcagcatctgatagcaatcatttatttctggccaggcacagtggcttgtgcctgtaatcccagctctttgggaggctgacacggggggattgcttgagcctaggagttcaagaccagccagggcaacatagtgagaccccgtctcttaaaaaaaaaaaattaaaatagctgggcagggtggcatgcacctgtggtcccagctattcaggaggctgaggtgggagagttgcttgagcctgggaagtcaaggctgcagtgagccgtgatcttgctacggcactctagcctgacaacagagtgagaccctgtctcaaaaacacatgtattgcttattatgtaagtatctagaataatgtgaattttaaaatgtccccacatatggatgatctgtcccttattcaagggcttccctacttagatctggcaggaagaggagccagatatgggggtgagggagctcctccccctgttcctttgtacaaggaactccacattgtggacaggatcgtcactgaaccccactcagaaccagcacccttttctaagaaagaggagtgactgtgtttgcataatcccagcttaggctaattcatggcaggcctccataaatgcaaaccacaaggatcaatttgaagtgtctgcaaggggaaatgacaccagcagtgtagacagggtagagtagctgacaaagaacagcctctgtgagatgcatggataacatcttcctatcgaccttcatgtttttctggcatgtcacatgtttaagtttcattcacactgggaaggtactgaagagacatgaactaatgcccagcagtaggaagggacgggtttagcatttgtaaagatggagcattaatcacatttgttgactgtttaaagaaagataaataatgttattgacaaaccgtgattttgaattagttgggattaggttggctgcttgcagcagaaaactcaaaataactgtgtgccttagcccttgctgtataacaaacccatcttaaaactaatggcttgaccacttttatttctcatgatttgatggaccagctgggcagttcttctctgggctagctgggctggggctgatggtccaggatggcccttggctggagtgaccgggccttctgtctgtgtggtctctcaccctccagaaggctaagctggacttatcaatgtgggtggaggggttcccagcagcaagagagggcaagacccgacatctaacacctttcggtctctcctgacgtggcactgtgtaacatccccttagccagagaaagtcacgtggccaagcccaatttcaagggaccgattttctctctctccatggaagtgacgaaggcaccctgtaaagtagcgtgcatacagggatggaagggaatgtggatgccattgtgccagcaagttgctgagacagcggtctaaacaatgtagaggctttctgtccctctcatataagtctgaaggcgggcagaccagagctgattggggattccaatgtcaggaaccaagatttattcttctcccatttcttcattgggtgtggcctctgtttccaaggcccccccgtgacttagtcagcaagtccgctttgaagccagctggaccatggcaaggggcatatctctgcctttgtaagcacactttctggaagttgcacataacattttcacatggcccattggccagaacccgatctcatgaccacatggcaggtacatggatattgggggaacaattagtggaccataaccactgatatttcctaagttctaaattgatatcaaacatcccaaaaaggcattctagatttagaaaagagtaaagtggtgttagccaacaatttgatgaaacaaattcatatcctaaaattcattaaggaggaaggagcaaaataaaatctcttaatgggatgttaacagccagtgcttatcttagctaaaataagcacatttccccatataattttccagtttatattttaggcatttccatatatttttatttgtttttattttgcttggttgctaatttcctactgacatcaatgagaaggatttaggaatgctaccaggaagaacttcttgcctccgcccagctttggactggtctaagtgggtgtcactcatggtgacgttctcacaaggtctctctacacacagtgctggccaacagcagggaaaatactgagttatcctttgagatctcttttatcccaatcacagaaaattgaatctgctccaaatatgcttttatccatgactcgcagagaggagaagatgctttcagagtattcaccatcatgagatccgtttatcctaagctctgtttgggtttgattttccctgtctcttttctagcccagaatgccatcgccggggaaggaatgggaatcagtcatgagctaatcaccctggagatcagctcccgagatgtcccggatctgactctaatagaccttcctggcataaccagagtggctgtgggcaatcagcctgctgacattgggtataaggtcagacttcagacccattctgaccttggccgtggcgtggggatgggggagtggaggggtgggaggagaaagagggtactgtattagagtaaccgtgagtccagagctgagttttggagttagtatttggaggtgtgagtggggaatttagagagcccgttggtcacagtctgttctgtcaagttgaatggaagcttctttggagaaagtgaggccagtgggcacagttggaaatgtgttctgtgtatttgttttatgttttatgcaatgacttgtttttggttatatacattttgcagcatatctaaagtgctgtgtattaggaaggggtcttatgtgggaagagagcattaaaaataagtataatgggccacacacagtggctcagtcctataatcccagcactttgggaggctgaggcaggaggattccttgagcccaagagtttgacagaaacctgagcaacatagtgagacccccttctctataaaagaaaggttaaaaaattagccaggtatggtggcgtgcacctgtcagctactaggaggattgcttgaaccagggaggctgtgatgagccgtgattgtgccactgcactccagcctgggcaacagagcaagaatctgtctcaaaacaaaaaacaaaacaaaacaagcaagaaagaaataggtataatgatattttagtatcagtgaatctcactttacagattaaagatttaggggtgaagtggggttttttggccaccatttttcattgtgaccatcagatctgaggtcttaggggttaattatctgaaacttcatggttttccctgagcctatagctctgcttctgccacagataatttattttctcataattccagcttggtacctccagggttgtgtttgtgggttcatttctccaaagttacttcttttgggggaaatacccctgggactcttagggcctaaagcaagtgcaaggtcaggacttgtctcacctctcacttgcctttgccatactcacgagtcacctcctctcatttccttacagatcaagacactcatcaagaagtacatccagaggcaggagacaatcagcctggtggtggtccccagtaatgtggacatcgccaccacagaggctctcagcatggcccaggaggtggaccccgagggagacaggaccatcggtgagagtgggggagccccactgtgctcagtgagaatgggggagcccgcctgtgctcggtgagaatgggggagcccacctgtgctcggtgagaatgggggagcccgcctgtgctcggtgagaatgggggagcccgcctgtgctcggtggtctgccagtgggcaagcgtccctccagtctccatgggctttgctcagtggggacctgcctccactaagacctgctaagggagcaggtttggtgcccaccaaggccaagtgaaatgagctgcttttgactctcactggctaggttgccttgtaagccttatctacttgctcagaaaggcacagtgggctcggaagcaggtcaaactcaggaggcacatggtactcattaagaatgcatttgagatgggatgtccataactcaagggataaacaaaacgtggcgtgttctacagtggacccgggtgaaggagcttggggagagccacatgctgttctgggaggcatccctgccttcacgcggcttgtcgtggagttcttttctggagcggggctccactgcccccatggttctgcaggggctatggcctgtcctcaagcaaggatgggaggaaaccctgggaggccgggggcgtgagcagttgttcgttcacctctgcctcgtgactgagcacgttctctccccaaatacatctggctcgcaggaatcttgacgaagcctgatctggtggacaaaggaactgaagacaaggttgtggacgtggtgcggaacctcgtgttccacctgaagaagggttacatgattgtcaagtgccggggccagcaggagatccaggaccagctgagcctgtccgaagccctgcagagagagaagatcttctttgagaaccacccatatttcaggtgcgcttgcctgggtttcatcatggatcagtccaagcccaggatgtcaggccttccaggggacagtggcagccgtcccacagatgtgtggagtgtgtgtgtgtgtgtgtgcgtgtgtgtgtgtgcgcgtgtgtgtgtgactatgcttgttccccaacaaggactatggaattcacctagaagaataggaaggggattacaaaatactgccaagaaaaaaaaaactaaaaaccaatcaaaatagggagagaacaatgtacaataatttacgtagcatggtgctggaaccatattttataaaaacataaatagaagagaataggaaaaaagtagaaagcccagaaatagacctagatatatatatttgacacatgataaatgcagcatttcaaatcaaatagtggactatatcagcttgagtatctattagtggtgttaggataattaatatttgggaaaaaactaaaatactgcccttacttatctcattataccaaaatagttaaagtttaaagttaaatattaagaggaagcaataagcatctcagaagaaaggtaggtgaatagtttataagatttttctatccctcctaccaaaagtgacattttttaaaaggaaaagactgacaaattggtaagatttaaaatgatgagactatgtagagttgtaaacattcttacattcagttctcccagaagcctacagagagccattactcagaattccaggaatatcaaatggaaacttacatcctgttctgcacattcacaattgccagaagatgagatgattcagtgtccattgatggatggatgcagaaagcaatgtggtctgtacaaaaacatggaatactttcagccttagaaaggaaagacattctgacacatgctacaacatggatgaagcttgggaacattctactaagtgaaagaacccagtcgtaagaggacggatactgtctgattccacttagctgaggtccctggagtagtcagattcatagagacagaaagaatgatgggcaccaggggctgggagagagagaatgggcaggtagtgtttaatggggccattgtttcagtttgggaatatgaaaagttctgaagacagacagtggtgatggttgcataatagtgtgaatgtacttaatgccactcaagtgtactcttaaagatggttaaatggtcaattttatatgtagtttaccacaatttagaaaaattgacagagaaactgaagcttaggtatgagtatactcacaaaaaggcacagaaactcatgcttcactgctgcctttatcctaaaatgtcctataaaatgtgggaaaccctgtaataactcactctgtgagcacaaatttggatcgagtgagaagatacttgacttccttcctccaggcagcccatggtttaagtttttatcttggacaagatatcttgtgtctcttctcctcagtgttctgctacccatttatctcaatatgcttcaatgtatttgtatgaagatatgtctgtatccattatgatcacctacacatattacacatagaagggggtatgtgttataaaaacatatctatacatgtctgtgtatttttgtgatgaccaagtctatagtcagacaccatgatacacatttattatatcagctggaagagctcattccatatcattgtggaaatatcctagattgctaaaattcagtcataatcctattcaatccagttctgagtatttgttgggtaccaactgcaagacattccatccagttgtaagcaactgaaatttgccttgactttccccaacagcaaaaaggcagacatgcgtgttctggctacatcaaggtggaaatcggtcctgtgttctcttctagggatctgctggaggaaggaaaggccacggttccctgcctggcagaaaaacttaccagcgagctcatcacacatatctgtgtaagcacgggcagagctgtgggttctctaaaaagaatactacgaccgcagagctgaaccttgctggcttcttaaacatcactgtacacacagatcttctgaggatcttgttaagatgcagtttcagattctgtgggtctggagtggggcctagaattctgcatttccagcaagcccccagacaatgtggatattccttttcaggggaccacagtcagggggaatgctgatagactatatctactgggccaaaataaaaattaaaatcttatgcacaagctactaactcttcctttctcattgacaaccactattataatgtcttagtcattctaatgaacatattttttaacttctaaaagctttgtaaaagctctctgtggttctttttaaaagtctgcctgaatatagtgtcttcctttttcaaattttcttttcttttcttttctttcttttttttttttttttttttttttttgagacagagtctcactctgttgcccaggctggagtgcagtggtgtgatctcagctcactgcaacctctgcctcctgggttcaagcaattctcctacctcagcctcctgagtagctgggattacaggtgcccaccaccatgcctggctaatttttgtatttttagtagagacagggtttcaccatgttgaccagactggcctttttcaaattttcaactcagcaccagagtgcaaggtcttccacgtggtccccaggaatgcgggtgcataacagggttgtttccagccgaccatgatgagtgcagagctctctggggtcccactgtatgcagaaagaggatgcttccttattagattccccacctcgagcaagcccatggggattgattttttgcctctgcaccaagtcaggttcataagttcccgttcgaattttcttacctagacagatgcccttgtggctgagccgggcttcattgctgccttctccttgagcccctgcctggccactgttactggggctggcctctgactacccctcactaacttgtgagtccaccgatacatttaaaggtgcagctttcacatgtcagctggcatttttagatgtttgccgtggaagggtgagccagcatatggcgtcaaccgtattgttaaaaacataagtctctgatcactttttattgattgcaagcaacataaaagttgttgaatctcaaattgctccaaatgccactttttcagaacctactagacaagtggatctctccagtctccctccagagagtttacctaatatgaccacagaggaactgctcccgggtcactctgccggggcctaggacccatgcacagtgggtgccacagtgctgctcatgaggctgctgtcgcaggagtggggaagggggaagacctgggcagaaaacagtgcccccagtgtgtgcccccctgcacctcccccgggtctggaaaagcttccttttagaggaagccaggaagtcaaatggcccacacaactcctctgcagagggaggcccgggacctccttttcattctctgttcatctttacacatttccattattttctctccattttcctcagaaatctctgcccctgttagaaaatcaaatcaaggagactcaccagagaataacagaggagctacaaaagtatggtgtcgacataccggaagacgaaaatgaaaaaatgttcttcctgatagatgtgagtgttgccagctgcatggagctggagaagcacatgtcatggtcaaaaaagggaccctgggccttatgcacttccttcttcactcccccaaggctgatccaaagacatctggcccgtagcactcaaagggtggacagggctgagggaggcagggcagggagtgcagatgtgggggtggagtcagcagcgagggatgctcaggctgcgttgtgcctactctgtcacgagcatcacccagatccctaaggcagtaaggggtgggataggattttctagtgccaaaacctcttctttcccctgatccacagtgtcccataagaaagcaaagaatgactccccaccctccacataggcacggcctccaaatgaccttgacacttggatttgaagtctatccacttatactgatgtttttcttcttgacagaaagttaatgcctttaatcaggacatcactgctctcatgcaaggagaggaaactgtaggggaggaagacattcggctgtttaccagactccgacacgagttccacaaatggagtacaataattgaaaacaattttcaagaaggtgagtgtcttagtcccttcttttgggctgctacaaccgaatacctgagactgggtcatttataaacagtagaaacttattgctcattgttctggaggtgagaaatctattcttaaggaatcaggaaatttggtgtctggtgagagcttgttctctgcttcaaagatggcaccttctagctgtgtcctctcatgggataagggacgaacaagcttcctcggacctcttttttacaggggtaccacaggcatacctcagagatattgtgggttcagttccagacaaaaagaatattgcaataatgcaagtcatataaacttcttggttcctggtgcataaacagttcatttatgccctactgcagtctattaagtatgtaatagcattaggcctaaaaaatatgtatgtaccttagtttaaaacaccttattgctaaaaaattgctggtacagaaacaaaaagtgagcatgtgctactggaaaaaaatggtgctgatttgcttgacatgggattgccacagactttcaatttgtaaaaaatacggtatcagtgaagtgcaataaaacaagatatgcctggaatgccattatgcgggcagagtgctcataacccaatccttcctaaaggtctcctctgttgataccatcacactggggattaagtttcaacataggaatttttaggggacaccaacatgtagaccatagcaatgagtcaataccgtggtaaacctgatacgttggcttaagacagagaagagtggggcagttggggaggatggtcaggataaggagctagtgacaactaaagccatgtttgctctcttctatatcactgaacccaaatgaccatccactgatgaattgataaaccaactggcttgtgtctgtgtgtagcggttggctttggctgtcataacaaagtaccacagacttgggggggcttaaacagtagaaatttattttcttacagttctggaggctggaagtccaagatcaagatgttggtggagctggttccttctaaggcctctctccttgccttgcagatggcctcttctcattgggtcctcatgtggttgtccctcagtgtgtgtgtcctcatctcctcccacaaggacactaggcagatgggatgagggcccaccctagtgacctgatttcaatttaattacctctttgcctgtctccaaacacagtcagattctgagtttctgagggttaggacttcaacattggagtttgaagaggtcacaactcaagctcagcccgtaacaccaagtcctggaatatttccagccacagacaggcacagagtgctggtccacagcaccccatggatgaaccttgaaaatgtcatgctgagtgaaagaagccagccacaaaggccacacggtctatgattccattgatagaaaatggctagaacaggcaaacccaggcaggcagaaagcagaatagtggctgccaggggctggggagggaaaagtgggaagttatcactgatgggtgatggatgtggggtttgggagttatgtctggggatggtcgcacaactttgtgaatatactaaaattcactcacccatacacttttttttttctttttctttggagacagggtctcactctgttgcccaggctggggtgcagtggctcagtctcggctcactgcaccctctgcctcccagattcaagcgattctcctgcttcagcctccacctccctagtagctgggattataggcacctgtctaatttttgtatttttagtagagatggggtttcaccatgttggccaggctggtctcgacctcctgacctcaggtgatcactggcctcagcctcccagagtgttgggattacgggcgtgagccactgtgcctggcctgaaccatatatttttaacagagtgaatgttatactatgtaaatgacatctcaattagaaaaatccttatgggaaaatatttcctgactaaaaaaagtgttctagattaccactcaaaaaggaactcaaaccctctgaacttctgatggggctaactctctctagtgtggattgttgggagtacaaatcattccaaaagtttaaagaaaaatgcagcatcttacacagtgaacagtgctactgtatcacattcatacaagttgatgtgcctggtttactctgttatcccatttgacttgtaaacactttctacacatggcaatactttcgacacatgaatatgtgatgtattgttaattccagaaagtgttcatgctcatttctaatgggcatgcagttgagggcaaggagtgtattatggtacaatttctttggtaaaactaaaattggattcacaaaacttcatactcgagtacgtttttaagaaggggtcttggccgggcacggtggctcacgcctgtaatcccagcactttgggaggccgaggcaggtggatcatgaggtcaggaaattgagaccatcctggctaacacggtgaaaccccgtctctactaaaaatacaaaaaaattagccgggcgtggtggcgggtacctgtagtcccagctacttgggaggctgaggcagaagaatggcgtgaacccgggaggcagagcttgcagtgagctgagatcacgccactgcactccagcctgggtgacagagcgagactctgtcacaaacaaacaaatgaaaaaaaagggtcttactcgaagtttctgcgtatgtgggttcctggcatcgtacctggctctgcactccccttcctgagatgactaaggaaaattatcttcagatctggttttgtgtgtgtgtgtgtgtgtgtgtgtgtgtgtgtgtgtgtgtgtgtgtaatccctggatatttttagtttaccagttagatttgatttgataccactttttcttgccatttatattttcagaaaatttagaatggtattgtgtttagaaaaatgtgcaagattatttttgtaaaataatttagagggttttttttcctgctataggccataaaattttgagtagaaaaatccagaaatttgaaaatcagtatcgtggtagagagctgccaggctttgtgaattacaggacatttgagacaatcgtgaaacagcaaatcaaggcactggaagagccggctgtggatatgctacacaccgtgacgggtgagtgctcagtttcacctctgagcattgatttctaaagaaaggaaaggttcgaaccaaagccagcaccaaacttcagcactttcctcctggggtgcatcccacaccaacgagcaaacctctcattctccagatgccaagttggtattcaacaattcaattcaattctgacactaactaccctcagtcagtgtggaccccatagcttaagggctcagttccacaacactggccccaactacaaatgccggtcacaagtcccagacctcctattcttctgatggactgtttataaatcaaggttcttgcgacccattcctcaggtcaaccaagaactctggaacacacttcactgacatttactggtctattagaaaggatttgataaggggcacaaatgaagctgttggagaggcacatagtaggggcctgaacacagaagcttctgtccccacggggttgggggcaccatcctcatggcacagagatgtggtcatcaaccagggagctcttggaacctcaccgcggagaaggttttatggaggcctcatcatgaaggcatgatggaggattgactcaatctccaggccctccctcctctgtggagctggaagttctaagtttctagccaaggcttggtctttctagtgcccggccccaatcctgaagctatgtaggggcccaccaggcatcatctcttcaaaacacgagatactcctaaggctggacattccaagagatgtaggggctctatgttaggaaatggggacaaagacaaaatatttatatttttcctatcacaccacacctcccccctgctccactgctatgctggcttcacactcaaaatcggctgtttatttgaaatctccgaggagtaaagccaatggttccataactgcacgtgtagatgtgtttggaaccttttggagtgctgtaggaatctaggtgtgtcacggataggtaggaaactagatcctactgtggatccactcccttcttgaaatgctttgctttcttggttttccaggtattaaatctctattcttcatcctctccttgactgacagtatccttactcacacttcagctgcctcatcttagcagtaattaataatcactcatggatccatgaactaaggagctggagatagcctcagaacagctcattcagaggtgtatttccagtaaaattgaccttttagccctgataatcatataccaaaacctgcaatcatgttgttttggtccattgtagactcttaactcattccagaggaaagtttataatacttagagccttatagtcataaaaatcaacatagatatacctatttctttttcagaaatgtatgacatggagatcaataagaggttttcaatcataaagatactataccttgtattacaataaaattctgtgaggaagtagaatagaaatgagtttcaaaaataaaagataaataatataaattttttaatctaagagcttgttcttgtatttttttcaaatggataatgtagacactcaaattccattgatatatttaagagtgatttgacttatattaagagttgtattataaaatattaatatttataatttaaaagaaattacattctttgcagctatttaggataaaaagtttaaatatcaaataaatgtatgccaggggtcatttgcttttaagattcttccagcaaattattaagcaaaaagagcatgccttgctttttcatggtaaagagaagaagggagcggggagaggggaaactttacttcataccatttgatcctcatatttttttgcatcttaagaagagaacaaatgatcctaccaatattgaactatttttctctctttgattagatatggtccggcttgctttcacagatgtttcgataaaaaattttgaagagttttttaacctccacagaaccgccaaggtaaaaccaaccatgtgttgtttaaaaaaaaaaaagaaaagaaattaagcttgacactagaaaatagatttcttggatgaggattatttcaactttattgtatacttttagaacagcaaataacatcactcactagtgcttcttctgatgttaccggtgatgtctggttaaaagcaataaaggagggagtgcttaaacgcacagaacaagagatccacagttagcggagaagattatcacatctaagggcaatggctccaaatccagaaactcactgaggaaactacatataaaaatagaatatttctggcccgagtgggcatgatgagcctgtaatcccagcactttgggaggctgaggccggtagatgacttaaagccaggagtttgagaccagcctggcccacatggcaaaaccccatctctactaaaaatacaaaaaagtagctggacgtggtggtgcatgcctgtaatcccagctacttgggaggctgacactttagaattgattgagcccaggaggtggaagttgcagtgagccaacattgcatcactgcactctagcctaggcgatggagcgagaccccgtctcaaaaaaaaaaaaaaaaacaaacaaaaaaactttccatccagagtgaggaaagagcctacaggaaatgagcctgggggacagactgggccaagagaccagacttagccactcttagaaataggtgtccccggcacagatgaggagcctggccccatgattcaccagctggaggccttgggatgtgccacttccagcctgtgcccctgactcctcattcataaaagaagactgataaggccttcctcagaaggttgagatggacgtggagtaagatgtttaggatgcacctgccactgtgcactgtgcctctcctcaaggcctggagggtccaggggtgaagtttctcctcctcaggttttggcaaccagtttctctaaaccccgggaacataaaacataattttctgacttaaacatggctttcctgctcatccctgtggattatctgatggatatgacaatcctcgccatcagatatagaagcccctaaaagagaaaggaaagaagctgagttacggggcctgaaagcaagcctgtgcaggtccccaggccccgggatgggggtccggcccatctgtggctcaagcctcctgggaagctctgaccctcagccagggctagaaacctgccttagatacaccagggcgcggcccagagggctgttccaggaaacgtgctgtttcactcacgttgggtaacctggtatttacggacttcttacctactttcctgtgactcaggaatttgtgtcttgagggaaactgtatttatttattttttactgtagtccaaaattgaagacattagagcagaacaagagagagaaggtgagaagctgatccgcctccacttccagatggaacagattgtctactgccaggaccaggtatacaggggtgcattgcagaaggtcagagagaaggagctggaagaagaaaagaagaagaaatcctgggattttggggctttccagtccagctcggcaacagactcttccatggaggagatctttcagcacctgatggcctatcaccaggtacgtcttcgcgtggttcaggatgccagcttccattctttccttttcttctgaacgcctctctctttagtcttgctctctctgtaggtgacgttggtcagctctgtcgtttacctccttgttagcctcctgtattagtccattttcatgctgctgataaagacatacctgagactgggcaatttacaaaagaaagaggtttaacggacttacagttccacatggctggggaggccttctaccatcacggcagaaggcaatgggcacttcttacctggcggcggtggcaagagagagaatgagagccaagtgaaaggggtttccccttatcaaaccatcagatctcatgagagttactcactaccatgagaacagtattggagaaactgcccccatgattcagttatctccccctgagtccctcccacaacaggtgggaattatgggagtacaattcaagatgagatttgggtggggacacagagccaaaccatatcgccttcgtagaagcagctcaacctcagacagagagatggtggcttagagccagtgacatctggttttgatggctgtctagctctggccaagttacttaacctctctgagcctcagctttctttgtaaaatggtgtctcctcatagattctagtgcatattccaggagacgagtgtggatgatgataatggattgctaatggaaaaaccaaactctgttaaaatatttgaaagaggtttattctgagccaaatatgagggaccatggctctgggaacagtctcaggaggtcctgaggaagtgtgcctgaggctgtcaggatgcagtttgattttatacatttcagagaggcaggaattgtaggtaaaatcataaatcaatacatgggaggtgtacttgccctccctaaagaggcaggacaccttgaaggagggggagcttaccggtcataggtgggttcagagattttctggttgacgattgcttgaaagagttaaactttgtctacaaacttgacatcaatagaaagaaatgcctgagttaagggcagtgttagaggccaaaggtatgtagatgaagactctgggtagcagccttcagagagaataaatggtaaatgtttcttttcaggccttagaggcagcaggctctcagttaatctctcctagattcagggaaggcctagaaggggagaggtctgactgcattaatggagattctctacaggtgcaaattccccccccacaaaacatggcagggccatttcaatctgttggtcctgttacagccgtttcaaaatatgtccacaaaatatatttttaggtaaaatatttgtatttcctttagggtctgcaatctgtcttgtgatgctataccagagtcgggttggaaagtaagccattttatactgagttcatggaaactcatccaaggagatttcatggtttgtggggtgtgtgtgacttaacccctgcctcacatgactttataatatggtatcttactactccagagtctttttggccaaccttatgatctcaatttcaacctaaactccaaaagggcctggcttctcttcctgttacggccaggaattcagattttcaggtttctctggggtccacttggccaagagggggtctgttgagttggctggaaggcataggattttatttctggtttacaacaatttccttagtgcagcattggaatgcaatggtagcagactaaatggaagctatcgcgtagacacatgctttggttgatactgcacgattcagttaacctgaagtacaatctaattcatcctagggaaggaggcagtgaacacagacacaactcaggtagagcccttgggatgtgtaaacacctgaggaggtaaagcaaattgtaatctctcggtttatcagatgtccccattgccttactatttggatgctttaaagcagggcctctcaaactccacccagcacagaggcctcctgggatcttgtggaaatgcagatgctgattgcaggtcaggatgaagctgagattctgcctttcttttttttttttttttgaaaccgagtctcactccattacccaggctggagtgcagtggcacaatctcagctcactgcaacctctacatcctgggttcaagcaattcacctgcctcagcctcccaagtagctgggattacaggcttaccttgccaccatgcctagctattttttctatttttagtagagatggacttttaccatgttggccaggctggtcttgaactcctgacctcaagtgatctgcctgcctcggcctcccaaagtgctgggattacaggcgtgagccaccatgcctggcctctgcatttctaacgggctctcaggggtcaccatactactggatagaggccacacttggaggagcaaggctctaaaccgagggtcaacatccattcctccagacactgggagctgcatgcacgtgagtgaagccagttaaggggaagacaggcatgcacatcagcttctcctgcagccaagctcacacctgtccgctgcttccactgcctcctagaatgaacagttaccttgagagtaggtgaggcatatacatgcacagaatccaaacaataggatgagtgacaatggcagaggagtctccgagccaagcagctccctggacagaagcagcccttctccgggttcatttctgtcctccgaggctgactcatgcactcaaaagctcccatgcatatacattttataatggtttttacacaaaggttagcagaggagtggacgtgctgctctgtaccctgcctcttttgctgtacctgggagattgttctgcctcagttctgatggggctgccttgttcttttcaatggctgctgagtatcccattttatggatgtggtatattgagccagctccctttaagcgaacagtttgtttgcagtcttttgctaatgcaggtgtgttgctgtgaataggtttgtttgtatatcatgtatctggaagcatcaattcctagaaatgagattcctggtatattaggattgtgcagggaaacagaaccacagatatatgtatgtaaagaagtatatttcagccaggcatggtggctcatgcctgtaatcccggcactctggaaggctgaggtgggtggatctcttgaggccaggagtttgagaccagcctggccaacatggcgaaacccggtctctactaaaaatacaaaaaaattagctgtgcatggtggcccatgcctatagtcccagctacttgggaagctgagatatgagaattgctcgaacctgggaggcagaggttgcagtgagccaagatcacaccactgcactccagcctgggtgacagagcgagactccatctcaaaacaaacaaacaaacaaaaaacaaaacaaaacaaaaaacagaaggaaagaaagaaatatatgtatatttcaaggaattggcttctgccattttgggagctggcaagtccaaaatcccagggcaggccagcaggaagagcaggccagaaattgcagcaggagctaaggctgagtccacaggcggaatttcttctttttagggaaacctcatttttcttcttaagaccctcaactgattggatgaggcccatccacatcattgagaatggtctccttcacttaaagtcagtgggttacacatgttacccacatctacagaatacctccgcagcaatacctagattcgtgtttgatggaatcactggggactcgagcctagccaagctaacacatgaaacacaccatcacagctggggaaaggatggcttattttagactgataaagatgacccagagaaggcctgctccatccacactggccgctttagtctgcactaaagttgttggttttttttgtttgtttggtttttttttggtgacagagtctcactctgtcgcccaggctggagtgcagtggcgcagtctcagctcactgcaacctctgcatcctgagatcaagcgattctcctgcctcagcctcctgagtagctgggactacaggcacgtgccaccacactcggctaatttttgttttttcagtagagacggggtttcaccatattggccaggctggtcttgaacgcctgaccatgtgatccatccgcctcagtctaccaaagtgctgggtttacaggcgtgagccaccacgcccggccttgttggggttttttgacagcctaataggtgaaaatgacatctcattacaatcttaattggcattctcttatgacaacaagctggtacatctttttgtgtgttgagggttatttctatttcttgctcagcaaacagttcatccaggaagagcttcttggtgagatagtagacctctgcgatttctgttgcagacgatctacattttgtcatttgctttgtcatttttgtctatggtggttttagactatgcgtaagttttctagagcagaaactcaagttggatttgggcctcagtggttattgccatactttaaaaggactttgtctccctgagatgataaatgaggtggacaatattttctttaagtaatttcttattttaactgttacatgatacctttggcccatttggagttctttgatgtcaagaatgaggcaggatccagatggcagcagaggtcccagtcccatcctggaagggtcgtctagttcccactggtactccacacgcccactcaggcactcacttcccctctgcgttgggtcttgtctgcaagactctcttatgttttaccatctagtgcagccagcacccccacatcaccctcactttttctttctttaaattgtgcagaaatattcatcatgtctattttgccatcttaaccatttgggggtacatagttcagtggcattaagtacattcatattgtgccagcatcaccagcagccatctccaggaccctatcaccttcccacactgaaactctgtccccattaaacacattccccattccccgcccctgaatccctgacagctaccatcctactgtctgtctctgtgaattcaactaacctaagtacctcataggagttgtgactggcttgtttcatgcagtatgatgtcctcatccaggtggtagcaagtgtcagagtttcacgcctatttatttattattatgagacagagtcttgctctgtcgcccagcctggagtacaatggcgcgatcccagctcactgcagcctccccctgcctgggttcaaacaattctcctgcctcagcctcccatggtgtgccgccacacctggctattttttgtatttttagtagagacgcggtttcaccacgttgaccaggctggtctggaaatgcagtttttgcactgtctgcctgcttacctttatagagcatattttgccctcttccatcagaattacccatttaatggtcaggaaaagctgctgggaatatgactcatagctgggacattctctgcactgtgcatagttcctctctgccaccaccatggaggagattgatgggtttgaaacccaggggaaggtcattgccctgcgagggtctccctcattgagaatctggatcccctcatgtgcacatggtgaggtcagagtcccctcctcacagtgtcccctccaccctcccgtgaactgttctttccttccaggaggccagcaagcgcatctccagccacatccctttgatcatccagttcttcatgctccagacgtacggccagcagcttcagaaggccatgctgcagctcctgcaggacaaggacacctacagctggctcctgaaggagcggagcgacaccagcgacaagcggaagttcctgaaggagcggcttgcacggctgacgcaggctcggcgccggcttgcccagttccccggttaaccacactctgtccagccccgtagacgtgcacgcacactgtctgcccccgttcccgggtagccactggactgacgacttgagtgctcagtagtcagactggatagtccgtctctgcttatccgttagccgtggtgatttagcaggaagctgtgagagcagtttggtttctagcatgaagacagagccccaccctcagatgcacatgagctggcgggattgaaggatgctgtcttcgtactgggaaagggattttcagccctcagaatcgctccaccttgcagctctccccttctctgtattcctagaaactgacacatgctgaacatcacagcttatttcctcatttttataatgtcccttcacaaacccagtgttttaggagcatgagtgccgtgtgtgtgcgtcctgtcggagccctgtctcctctctctgtaataaactcatttctagcagacact

SEQ ID NO: 8512 - DNA, 33068 bp, Homo sapiens
cttcgcggcgcggggcggggctgggcgcggggtgaaagaggcgaagcgagagcggaggccgcactccagcactgcgcagggaccggtgagtgtcgcttctgggggcagcgcccagtaaccgcgctaggagcgcggagaagggcattgggagagcggcgttcgtggcggagactagcgctccggagcacgggcacgacgggggcaccttctcggctgctagtaactaacaataataataatcataatcatagcaagggcgctgatgggcgggctcggagcacgcctgattctggttcccaccaggctgcccaggctcctgatgacgcatcagaaacatccccctaacccgcggccttcctgcaggagaggttgggaaggggtgggggacggggctcgggggaggtctccgagggactctagtaagcggggaagggcgccgggaaagtttcagatccacggctgcgcgggccacgagcccacccgaacgccgaccactgctttccgtcgacttctatttcctgggaacgcgcgaaagcaaacccaagtcagactgcggaggtcgctggggagggaaggttcaaggagttctcgccgatcctgctgaataaagggggttccgagctgggccgagatggggcatgcgcgggaagacccctgcccgctgttcccccccaccgccccagtggatgccatgcctggggcctccccggcgcgtggggctgacgcaccctcggggtccatcgtagttggccgggatcgtggagtgggtgcggtggacgaagggaggcaggacagtcccgggggtggcagaaggagcccgggcacagctgagacctgcgctcccatcccaccaacactcacagcaggtgctgccgagctgggcaattgggatggcccaagttatttggttaaattttaaatcacgtttgttactgggaagtagagtccagtgatgctaaccgcgcctctacctccaccaccggtgtcagtcccaaagggctcctaaaatggctgtgtcatctttcagccttggaccgcagttgccggccaggaatcccagtgtcacggtggacacgcctccctcgcgcccttgccgcccacctgctcacccagctcaggggctttggtaggtagcagtgcatttggtctaaagggcaagatgttctctcttttattcataacaaatttaaataccagcagggtttggggggaaaaacgctttcagaagaaaaggtgaatgtcagtcctgcaagagttagttttaaaactagactgaattggcacatgtatacctatgtaacaaacctgcacgttctgcacatgtaccccagaacttaaaagcttataaaaaaagaaaaaactagactggattatgttgggaaagtgtagcctcttccatcttaggcatttcctagaacgtaggcagtaggtggtccttattaggagttttgggagaggaagggggctgaatcctacctcccatccctgctcctctatggggtctgagctgaggaagcttcaccacaaggagagaaccccctgacaaccctggatgccacctttaccctcactgcaggaattctgtggccacactgcgaggagatcggttctgggtcggaggctacaggaagactcccactccctgaaatctggagtgaagaacgccgccatccagccaccattccaaggtaaggcagaaatgaagtgggccgttgggttctttcttttctttctttcttttttttgagacaaggtctcactctgtcgcccaggctggagtgcagtggcgccatctcagctcactgcaacccccgcctcccaggttcaagcgattctggtgcctcagtctcctgagtagctgggattacaggcacacatcaccacacctggctaatttgtatgtgtttagtagagacagcatttcaccatattggccaggctggtttcaaactcctggcctcaaatgatccacccgccttggcttcccaaagtactgggattacaggcacgagccactgcacccagtcaggttcattttagttgttatgttaaccaggtttcctgcacctgtgcgctaactttcactttcccaaaaggtttcagggtgacccagcaggcaatgagtgattctcaaattcaggatttattgtgagagattcacacacacaattgagcagacattcacagtacaatgattaaagggagtgatagggtaaggacccacagtggaggctctggaggccagcccactgacagccactccagggagtccagaagtcccgctctagtgctgggtggtggagggaaatctgttcctccagggacctcgtcctcggctgcccagctgccaaagtcaggaataagctttcagaaatctcactgccaagattccgaaaacgcttcagacattgctagtcccttgtcgcttttgcgatcctccacaggtgtgcgtgccactgggtccttattcactggggtctctggtggcattgggccacagcaagtgttccctcatccccttagtctaccacacacatgcttaccactttgaagaaaaacccctttactatgagcgaaagtgagaaacacgtatgtttattgtttctaaagaaagaaacttaatatgggcttaatgctacctagtgagtgcctccattttgagacattagggtcacaagtcattattatatatcatgggcacaaacctgccctgggcagggacggaaggaagcccctgcacaggggcagttgctcaggatgtgagaagagcctggtgcataaccccatccatgcccacctaacatctcaggctctgaccagtggggctgtgcagtagcgagtggatggagggctggaaccctgcagcctcctctccaaacacagggtgcagccaagacattttaggagcaatttgggatggagagctaggagtcgccacctcttggctcttccaaggccggaactggtgcctgcactcagttcagtttgaagactgcagctggatgccaagttccatggaggagtaagaaaccggtttgaactcccgagattgccctgcccctgaaatccaaactgatgttccgaatgatcagggaaaggtacaaacgtttatggtttacagacaaaacccataaggtttagctttcagagaatctcattttatgaagcaaattagggaagggaatctactcaccaagtcctgtttcagctgattgagtggaacctgtggtcatgtggtacaagtcctggtctcaatgatgctccttatctggctgcagaaaggccaactgaggcaaccatagcccagaagactggtactcctgagaggcagatgaagtggtggtctttgatatcgagcctgggatgccctgggcacatgaggtatttccaaaggcatgggagttttagggaataaattcccagattgtcagactccataagtaccgtttacaatggattaccttttataaccatcccaatcctacctgacaaaagaggtgggcagattacgaggtcaggaaattgagaccatcctggctaacactgtgagaccccatctctactaaataaatacaaaaaattagccgggtctggtggcgtgcacctgtagtcccagctacttgggagcctgaggcaggataatcgcttgaacccgggaggtggaggttgcagtgagccaagattgcgccactgctctccagcctggtgacaaagcgagactgtctcaaaaaaaaaaaaaaaaagaaagaaatacatccctttcttcccttccaaatcgagcaaggatgcctgccctggaagtgtataaacccggggaagggagacagaaaaggatagttttaagtattggtgttggggacgtgttctttagccaaggcagcatgaacccatggcagcacttcccaaccttcctgacatgggcgtttctgtgaactccagtgtgatggagaaatggcattggctcaggtgtgcagctagatatgttacagagcagggtgacaggcaggggtgatgagttttgttttaacaacctgtcccttcaaccctcatggtactgacaaagatcacatggctctcgggggagattcctgcgaggggaagcaaggagagcatccttacatattattgatccaggcagcagatttgcagcaaagctctgtgctttattcatctgttaaaatagttaaaatagtcaaaacataggaaaaggattctgggaagtcagaatcggcttcagagcacacccctcctgcacttgcccggttctcagacttgggaatgggactgggtgggtgggtactctcgggtgttccgcgggtttgggtcttacttgtacactttgcttgatttcaaggaggtgcaggagaacagctctgtgataccatttaacttgttgacattacttttatttgaaggaacgtatattagaggtaagttggtgcatgctattttctgtaacatttattttgagtcataggagaaagattttcagttacttttatccaagattattagacactgtaaaatttcatatttaggcacttgtcctacaacattttaaaaatgaatttcaaatacatacgtgtgtatttgtaatgcagacaagtataaggcagtcagttacatgctttcaagagtaaaatgaatgacatttcatttcccccatttgtgggagtaaaagaatgacaatatgaaattgatgatcaaaagaaagagcataaaagatttagagctcacgtgttttttaaactaaaggtttgggtatcaaattaccgtaatatttggattctcttggctacattggaaacagttctataacaattttatttttaaatgtaaagtttttgtttgttgttgtttttaagacggggtctcgctctgtcgcccaggctggagtgcagtggtgcgatctcggctcactgcaaccttcacctcccaggttcaagtgattctcctgcctcagcctcccaagtagctgggactacaaacacacaccaccacttccagctaatttttgtatatttagtagagatggggtttcactatgttggccaagctcgcttcgaactcctgacctcaggtgatccactcaccttggtctcccaaagtgctgggtgggatacaggcgtgagctactgtgcccagcctttaaatgtaaactttttaattgtattacaactgcatcagaagttgtatactttgcaactattcaaatttatactgaaaacgtttttgaagttcaacctaaaattatgacaggagatagttttagaaaatattttggggaacagaggcatattctattttttttttttgagacagagtcttgctctgttgcccagactggggtgcagtggcgtgatctcagctgactgcatcctctgcctgccaggttcaagcaattctttgcctcagcctcctgagtagttgggattacaggtgcccgccaccatgcctggctaatttttttgtatttttagtagagacaagttttaccatcttggccagggtggtattgaactcctgacctcatgatctacctgcctcagcctcccaaagtgctgagattacaggcgtgagccccggggcccggcctggagggatattcttgaagcgccttgagcagggaggcagcgtttgtctttatctgaccttggcttctttgggtcactctgtttctctttccgtgaataaaaagccagtgagcacacactgtgtcccaggcactcttctacgctctggggacatcaccatgaacaactagtcagagtccccacctccaggggccttccgttctggtggtgggtttggttccatggttgaatgcacccagctgcttatctgttcaataggcatctgctttattttaagcttactttgcaaagaaggaagatggttgtttccgaagtggacatcgcaaaagctgatccagctgctgcatcccaccctctattactgaatggagatgctactgtggcccagaaaaatccaggctcggtaagttgctctctgaaagtcgctatccatgtgacatgagccatgcccattcgaggctgcccttttctacagcggtgctactgctgcccagatatgcctgctctctcgcctctcctgtgccaggacgcagatcctgaccctctacttgccagctgacaaccatgtatagactcgttgccttagctcaccgtgggtggaggtgctgctggggttggggacactggctgagctgtcgatgggttcagctcatctatactagaaggaactggcccaggccctgggttcaaggagcactaggtttgtttttcctgcccacatcatgattcagtctcaagctacaaaccctggggcatcattaagatattatctttgtagggaagccacgtggtgaattttttgcccagaatcaagacatatttttggtgggaaccaatcatggcccctggaatcagtccaacctcagttggtcccgacgctgacactctcagctgtgtgattgtgggtagttattcctcctgttataagcctggttttccatatctaaaatgagaataatggtctttgctttatatggctgagagcaaagtgcagggagtgtccaggtactcagagtgctcagtttcttattaccgtggatcactggtctgtttcaggctggctctgttttcctaggcaatgttaaacaatttttcaaacaatattcaaaaaacattgaagcgtttagaaaaatacagaggaccaccacctttccaccaccctgataccaccgtttacatttttctgcatttccgtccctggtgcgtctcttgtctggctgtaagagatgtaattatgtcagggtatggggcaggaggaactctcacccactcatacttgcgtgctttggaagcagcttggccttttccagtcaaggagaacagagtgtgtctcgtgatctggcagttccacttctggggatagactgtggttctcaaagtgtggcccccagcccagcccattagcatcacctgggaagttgactgaaatgcaaatgaccagcccctcctcccactcttagacctggtgaattggacactctggggcagggcccaccccctgtgctttaccaggctctccaggtgattctgctgtgtgctggagtttgaggaccatgtgtaaacccttgcacatccccctgggagccacatgcatagcagcactgtttataacagcaaaactcagaccctgtctacgtgcctgtcatggtggaatggatactgggagtgtggtatgttcatgtagcagaattctatacagtagtaaagaggaatgaactagagttccaggtatcaaaatggctgcatcaaatgaacaacgttgaaccaaagaatcaagttacaggaaatatacaaaatgattccacttacgtaaaattccccaacaggcagcaataggcaatataccattgtgggaaaaacatataggtggcaaaactataaagaaaagcaaggatgtgatgattgcaagcctcaggatagagggaccctctggaggtgaaggagttgacccagggaggtgtgtgcaatgtcctaagtactgggagtgtttgtgttcttaacccaagtggttggtacatgcatatttgctttattatgtttgacacacttttgtaaatagatagtataaataaatgaaaacaaacaaaaagttataaggtgaactaagaccgaggctaccaactgtattcatgcatttggtaaggctgtggttctttctcagtcagggcccattttgctccctggaacttgtggccaggtctagagacatcttggttgtcacaactcagggtgaatagtgaatagaggccaggtatttggctaaacctcctacaatgtgtagggtagcccctgcaacaaacaatcttctaaccccaaatatgaatagcttcttgtcctgttataaagaagctattctagtaaaaacgtctgtctatgatgaagcatgcacaaaaatagtcattagaaagaggtaaaagacaaaatgattttctcatattttcttcctgaacctcaatcagcccacattcggaaaattgcacccagctgctggtaggtaggcaggaccgagtgtgaagtctgctgctttctctgtttttatgcaagtacttcactattttgattactttagttttatagtaattatggaaattaggtaatgctagtcctctgactttgttcttctttttcaaagtcattttgactaagaatatttagatcatttctatttaatgtgactggtaatataattagatttgagaatatcatctttctatttgttttctatttgtcccatctgttcttcgttccccctttcgtctttttctgccttcttttggattattttttatgattccatcatgtctcctttgttgtcttattaagtataacttttggtgtttttagtatatatctttaacttaataagtcaaccttcaagtgatagtctgtcacttcatgtatagtgcgagaaccttagaatagtgtatttccatctctctgctctgagccttcatactatttctatcatgcatcttttacatacatcataaaccccacaatacattgttattattgatgttcaaacattcaattatcttttaaataaagatagcaaaggaatacaaaaaagtgtagtagttaccccttctagtatagactcctttgtatagatccagatttccattcagtatcattttccttctacctaaagaacttctttaacatttcctgtagtgcaggtctgctggtaatgaattagttaagcttttgaatggctaaaaaagtctttgttttgccttcatttttaaaagttatttttgctgggtatagaattctagattgatggtgtttttcagtactttaaaaatactgcttcactgtcttctcgcttgttattgcttctgataagattgacagcagatttctcatttgtgtccctctgctcacactgtatcattctctggctgctcctaacattttctctttattactggttttgagcaatttgaccctcttatggcttgatgatgtttatgtttgctgtgcttaatgtctgttgagtttctgggatctttgggtttatggttttcattaagtttgagggaattgtatgtattatttcttcaaatatttttttctgtctctcttccattctcttttggggattccagtaacctgtgtattagacttattgaagttggccgtctttaatggagtgtattggttcattctcacactgctataaagaactgcctgaaactaggtaatttataaagaaaagaggtttaattgactcacagtccacatggctggggaggcctcaggaaacttacaatcatggaggaaggcatctcttcacaaggcagcaggagagagaatgactgaaggaggaacttgccaaacacttataaaaccatcagacctcatgaaaactcactatcatgagaacagcatgggggaaacctcccccacaatccaattacctccacctggtctctcccttgacacgtagggattatggggattacaattcgagatgagatttgggtagggacacagaaccaaaccatatcatgagcatgatttgcaggccatgaagaattctccatttttgtttcctccaggtggctgagaacaacctgtgcagccagtatgaggagaaggtgcgcccctgcatcgacctcattgactccctgcgggctctaggtgtggagcaggacctggccctgccagccatcgccgtcatcggggaccagagctcgggcaagagctccgtgttggaggcactgtcaggagttgcccttcccagaggcagcggtaagaacttacattctgtgttagtctgctcaggctgccataacaaaataccacagacggggtggcttatacaacaaaagtttattttctcacagttgtggagactggaagtccaacatcagggtttagcttctcctgaggcctttctccatggcctgcagatggccacctcctcaccgctcccccatgcggccttccttccacacacaagcatctctgctgtctcttccccttcttcataagagcaccagtcatattggattggggcctaccctaatgacctcatttaaccttaattgcctctttaaaggccttatcttcaaatacagtcccattaggggttagggcttcaacataggaatttggagggaacaccatttcataacgctatctcattgcacatttttttcacataagtcatatgtaatctacagtttgaggagaatctgaataaacacatttgggtcccccagttcagaactatatcagtgaggtctcaaagagttcaggcctgggacgggtcttgcaatacagatcaggtgtggtaggaagaatatggaaggagtttacagtaggaggactgttgtaaggtggcctggtagcagcaggatgctttcctaatgggggtagagtgtgtatgctggggggataatggaagatgttcggatgagtttcgggggattcccaatgtggtctgccacctgagctgatggcagaacactgggatgaggcaggaagccaaaagtggtggctttcaagtgttagtaagcaaaaactcacctgggttacatactcagaatgcatgttcttgaggtcacccagacacagtgcgatgtccccgcatatcagagggtaagaccagaaagtttccagttttaaatgtctccccatatgattgtataaaagtttgagaaccatgggcctaaggcgctatgtaggtcttttaagagcaaagtggagcactgatgtgggcgtggcctcctagggatcgtgaccagatgcccgctggtgctgaaactgaagaaacttgtgaacgaagataagtggagaggcaaggtcagttaccaggactacgagattgagatttcggatgcttcagaggtagaaaaggaaattaataaaggtgagtaccccctgtttggatgcctggtcaagccttctgacatgcatggggtctgtttgtaactgttcatactcccacctccctgggcctgtgctgtcaggacacctttctcctgcacatcaggccccggttccttctacttcttttacctcattatgaccagcacgcttggatatcagcatctgatagcaatcatttatttctggccaggcacagtggcttgtgcctgtaatcccagctctttgggaggctgacacggggggattgcttgagcctaggagttcaagaccagccagggcaacatagtgagaccccgtctcttaaaaaaaaaaattaaaatagctgggcagggtggcatgcacctgtggtcccagctattcaggaggctgaggtgggagagttgcttgagcctgggaagtcaaggctgcagtgagccgtgatcttgctacggcactctagcctgacagcagagtgagaccctgtctcaaaaacacatgtattgcttattatgtaagtatctagaataatgtgaattttaaaatgtccccacatatggatgatctgtcccttattcaagggcttccctacttagatctggcaggaagaggagccagatatgggggtgagggagctcctccccccgttcctttgtacaaggaactccacattgtggacaggatcgtcactgaaccccactcagaaccagcacccttttctaagaaaggagagtgactgtgtttgcataatcccagcttaggctaattcatggcaggcctccataaatgcaaaccacaaggatcaatttgaagtgtctgcaaggggaaatgacaccagcagtgtagacagggtagagtagctgacaaagaacagcctctgtgagatgcatggataacatcttcctatcgaccttcatgtttttctggcatgtcacatgtttaagtttcattcacactgggaaggtactgaagagacatgaactaatgcccagcagtaggaagggacgggtttagcatttgtaaagatggagcattaatcacatttgttgactgtttaaagaaagataaataatgttattgacaaaccgtgattttgaattagttgggattaggttggctgcttgcagcagaaaactcaaaataactgtgtgccttagcccttgctgtataacaaacccatcttaaaactaatggcttgaccacttttatttctcatgatttgatggaccagctgggcagttcttctctgggctagctgggctggggctgatggtccaggatggcccttggctggagtgaccgggccttctgtctgtgtggtctctcaccctccagaaggctaagctggacttctcaatgtgggtggaggggttcccagcagcaagagagggcaagacccgacatctaacacctttcggtctctcctgatgtggcactgtgtaacatccccttagccagagaaagtcacgtggccaagcccaatttcaagggaccgattttctctctctccatggaagtgacgaaggcaccctgtaaagtagcgtgcatacagggatggaagggaatgtggatgccattgtgccagcaagttgctgagacagcggtctaaacaatgtagaggctttctgtccctctcatataagtctgaaggcgggcagaccagagctgattggggattccaatgtcaggaaccaagatttattcttctcccatttcttcattgggtgtggcctctgtttccaaggcccccccgtgacttagtcagcaagtccgctttgaagccagctggaccatggcaaggggcatatctctgcctttgtaagcacactttctggaagttgcacataacattttcacatggcccattggccagaacccgatctcatgaccacatggcaggtacatggatattgggggaacaattagtggaccataaccactgatatttcctaagttttaaattgatatcaaacatcccaaaaaggcattctagatttagaaaagagtaaagtggtgttagccaacaatttgatgaaacaaattcatatcctaaaattcattaaggaggaaggagcaaaataaaatctcttaatgggatgttaacagccagtgcttatcttagctaaaataagcacatttccccatataattttccagtttatattttaggcatttccatatatttttatttgtttttattttgcttggttgctaatttcctactgacatcaatgagaaggatttaggaatgctaccaggaagaacttcttgcctccgcccagctttggactggtctaagtgggtgtcactcatggtgatgttctcacaaggtctctctacacacagtgctggccaacagcagggaaaatactgagttatcctttgagatctcttttatcccaatcacagaaaattgaatctgctccaaatatgcttttatccatgactcgcagagaggagaagatgctttcagagtattcaccatcatgagatccgtttatcctaagctctgtttgggtttgattttccctgtctcttttctagcccagaatgccatcgccggggaaggaatgggaatcagtcatgagctaatcaccctggagatcagctcccgagatgtcccggatctgactctaatagaccttcctggcataaccagagtggctgtgggcaatcagcctgctgacattgggtataaggtcagacttcagacccattctgaccttggccgtggcgtggggatgggggagtggaggggtgggaggagaaagagggtactgtattagagtaaccgtgagtccagagctgagttttggagttagtatttggaggtgtgagtggggaatttagagagcccgttggtcacagtctgttctgtcaagttgaatggaagcttctttggagaaagtgaggccagtgggcacagttggaaatgtgttctgtgtatttgttttatgttttatgcaatgacttgtttttggttatatacattttgcagcatatctaaagtgctgtgtattaggaaggggtcttatgtgggaagagagcattaaaaataagtataatgggccacacacagtggctcagtcctataatcccagcactttgggaggctgaggcaggaggattccttgagcccaagagtttgacagaaacctgagcaacatagtgagacccccttctctataaaagaaaggttaaaaaattagccaggtatggtggcgtgcacctgtcagctactaggaggattgcttgaaccagggaggctgtgatgagccgtgattgtgccactgcactccagcctgggcaacagagcaagaatctgtctcaaaacaaaaaacaaaacaaaacaagcaagaaagaaataggtataatgatattttagtatcagtgaatctcactttacagattaaagatttaggggtgaagtggggttttttggccaccatttttcattgtgaccatcagatctgaggtcttaggggttaattatctgaaacttcatggttttccctgagcctatagctctgcttctgccacagataatttattttctcataattccagcttggtacctccagggttgtgtttgtgggttcatttctccaaagttacttcttttgggggaaatacccctgggactcttagggcctaaagcaagtgcaaggtcaggacttgtctcacctctcacttgcctttgccatactcacgagtcacctcctctcatttccttacagatcaagacactcatcaagaagtacatccagaggcaggagacaatcagcctggtggtggtccccagtaatgtggacattgccaccacagaggctctcagcatggcccaggaggtggaccccgagggagacaggaccatcggtgagagtgggggagccccactgtgctcagtgagaatgggggagcccgcctgtgctcgatgagaatgggggagcccgcctgtgctcggtgagaatgggggagcccgcctgtgctcggtgagaatgggggagcccgcctgtgctcggtgagaatgggggagcccgcctgtgctcggtggtctgccagtgggcaagcgtccctccagtctccatgggctttgctcagtggggacctgcctccactaagacctgctaagggagcaggtttggtgcccaccaaggccaagtgaaatgagctgcttttgactctcactggctaggttgccttgtaagccttatctacttgctcagaaaggcacagtgggctcggaagcaggtcaaactcaggaggcacatggtactcattaagaatgcatttgagatgggatgtccataactcaagggataaacaaaacgtggcgtgttctacagtggacccgggtgaaggagcttggggagagccacatgctgttctgggaggcatccctgccttcacgcggcttgtcgtggagttcttttctggagcggggctccactgcccccatggttctgcaggggctatggcctgtcctcaagcaaggatgggaggaaaccctgggaggccgggggcgtgagcagttgttcgttcacctctgcctcgtgactgagcacgttctctccccaaatacatctggctcgcaggaatcttgacgaagcctgatctggtggacaaaggaactgaagacaaggttgtggacgtggtgcggaacctcgtgttccacctgaagaagggttacatgattgtcaagtgccggggccagcaggagatccaggaccagctgagcctgtccgaagccctgcagagagagaagatcttctttgagaaccacccatatttcaggtgcgcttgcctgggtttcatcatggatcagtccaagcccaggatgtcaggccttccaggggacagtggcagccgtcccacagatgtgtggagtgtgtgtgtgtgtgtgtgtgtgtgcgtgtgtgtgtgtgcgcgtgtgtgtgtgactatgcttgttccccaacaaggactatggaattcacctagaagaataggaaggggattacaaaatactgccaagaaaaaaaaaactaaaaaccaatcaaaatagggagagaacaatgtacaataatttacgtagcatggtgctggaaccatattttataaaaacataaatagaagagaataggaaaaaagtagaaagcccagaaatagacctagatatatatatttgacacatgatgaatgcagcatttcaaatcaaatagtggactatatcagcttgagtatctattagcggtgttaggataattaatatttgggaaaaaactaaaatactgcccttacttatctcattataccaaaatagttaaagtttaaagttaaatattaagaggaagcaataagcatctcagaagaaaggtaggtgaatagtttataagatttttctatccctcctaccaaaagtgacattttttaaaaggaaaagactgacaaattgataagatttaaaatgatgagactatgtagagttgtaaacattcttgcattcagttctcccagaagcctacagagagccattactcagaattccaggaatatcaaatggaaacttacatcctgttctgcacattcacaattgccagaagatgagatgattcagtgtccattgatggatggatgcagaaagcaatgtggtctgtacaaaaacatggaatactttcagccttagaaaggaaagacattctgacacatgctacaacatggatgaagcttgggaacattctactaagtgaaagaacccagtcgtaagaggacggatactgtctgattccacttagctgaggtccctggagtagtcagattcatagagacagaaagaatgatgggcgccaggggctgggagagagagaatgggcaggtagtgtttaatggggccattgtttcagtttgggaatatgaaaagttctgaagacagacagtggtgatggttgcataatagtgtgaatgtacttaatgccactcaagtgtactcttaaagatggttaaatggtcaattttatatgtagtttaccacaatttagaaaaattgacagagaaactgaagcttaggtatgagtatactctcacaaaaaggcacagaaactcatgcttcactgctgcctttatcctaaaatgtcctataaaatgtgggaaaccctgtaataactcactctgtgagcacaaatttggatcgagtgagaagatgcttgacttccttcctccaggcagcccatggtttaagtttttatcttggacaagatatcttgtgtctcttctccccagtgttctgctacccatttatctcaatatgcttcaatgtatttgtatgaagatatgtctgtatccattatgattacctacacatattacacatagaagggggtatgtgttataaaaacatatctatacatgtctgtgtatttttgtgatgaccaagtctatagtcaaacaccatgatacacatttattatatcagctggaagagctcattccatatcattgtggaaatatcctagattgctaaaattcagtcataatcctattcaatccagttctgagtatttgttgggtaccaactgcaagacattccatccagttgtaagcaactgaaatttgccttgactttccccaacagcaaaaaggcagacatgcgtgttctggctacatcaaggtggaaatcggtcctgtgttctcttctagggatctgctggaggaaggaaaggccacggttccctgcctggcagaaaaacttaccagcgagctcatcacacatatctgtgtaagcacgggcagagctgtgggttctctaaaaagaatactacgaccgcagagctgaaccttgctggcttcttaaacatcactgtacacacagatcttctgaggatcttgttaagatgcagtttcagattctgtgggtctggagtggggcctagaattctgcatttccagcaagcccccagacaatgtggatattccttttcaggggaccacagtcaggggggatgctgatagactatatctactgggccaaaataaaaattaaaatcttatacacaagctactaactcttcctttctcattgacaaccactattataatgtcttattcattctaatgaacatattttttaacttctaaaagctttgtaaaagctctctgtggttctttttaaaagtctgcctgaatgtagtgtcttcctttttcaaattttcttttcttttcttttctttcttttttttttttttttttttttttgagacagagtctcactctgttgcccaggctggagtgcagtggtgtgatctcagctcactgcaacctctgcctcctgggttcaagcaattctcctacctcagcctcctgagtagctgggattacaggtgcccaccaccatgcctggctaatttttgtatttttagtagagacagggtttcaccatgttgaccagactggcctttttcaaattttcaactcagcaccagagtgcagggtcttccacgtggtccccaggaatgcgggtgcataacagggttgtttccagccgaccatgatgagtgcagagctctctggggtcccactgtatgcagaaagaggatgcttccttattagattccccacctcgagcaagcccatggggattgattttttgcctctgcaccaagtcaggttcataagttcccgttcgaattttcttacctagacagatgcccttgtggctgagccgggcttcattgctgccttctccttgagcccctgcctggccactgttactggggctggcctctgactacccctcactaacttgtgagtccaccgatacatttaaaggtgcagctttcacatgtcagctggcatttttagatgtttgccgtggaagggtgagccagcatatggcgtcaaccgtattgttaaaaacataagtctctgatcactttttattgattgcaagcaacataaaagttgttgaatctcaaattgctccaaatgccactttttcagaacctactagacaagtggatctctccagtctccctccagagagtttacctaatatgaccacagaggaactgctcccgggtcactctgccggggcctaggacccatgcacagtgggtgccacagtgctgctcatgaggctgctgtcgcaggagtggggaaggaggaagacctgggcagaaaacagtgcccccagtgtgtgcccccctgcacctcccccgggtctggaaaagcttccttttagaggaagccaggaagtcaaatggcccacacaactcctctgcagagggaggcccgggacctccttttcattctctgttcatctttacacatttccattattttctctccattttcctcagaaatctctgcccctgttagaaaatcaaatcaaggagactcaccagagaataacagaggagctacaaaagtatggtgtcgacataccggaagacgaaaatgaaaaaatgttcttcctgatagatgtgagtgttgccagctgcatggagctggagaagcacatgtcatggtcaaaaaagggaccctgggccttatgcacttccttcttcgctcccccaaggctgatccaaagacatctgacccgtagcactcaaagggtggacagggctgagggaggcagggcagggagtgcggatgtgggggtggagtcagcagcgagggatgctcaggctgcgttgtgcctactctgtcacgagcatcacccagatccctaaggcagtaaggggtgggataggattttctagtgccaaaacctcttctttcccctgatccacagtgtcccataagaaagcaaagaatgactccccaccctccacataggcacggcctccaaatgaccttgacacttggatttgaagtctatccacttatactgatgtttttcttcttgacagaaaattaatgcctttaatcaggacatcactgctctcatgcaaggagaggaaactgtaggggaggaagacattcggctgtttaccagactccgacacgagttccacaaatggagtacaataattgaaaacaattttcaagaaggtgagtgtcttagtcccttcttttgggctgctacaactgaatacctgagactgggtcatttatgaacagtagaaacttattgctcattgttctggaggtgagaaatctattcttaaggaatcaggaaatttggtgtctggtgagagcttgttctctgcttcaaagatggcaccttctagctgtgtcctctcatgggataagggatgaacaagcttcctcggacctcttttttacaggggtaccacaggcatacctcagagatattgtgggttcagttccagacaaaacaaatattgcaataatgcaagtcatataaacttcttggttcctggtgcataaacagttcatttatgccctactgcagtctattaagtatgtaatagcattaggcctaaaaaatatgtatgtaccttagtttaaaacaccttattgctaaaaaattgctgatacagaaacaaaaagtgagcatgtgctactggaaaaaaaatggtgctgatttgcttgacatgggattgccacagactttcaatttgtaaaaaatacggtatcagtgaagtgcaataaaacaagatatgcctggaatgccattatgcgggcagagtgctcataacccaatccttcctaaaggtctcctctgttgataccatcacactggggattaagtttcaacataggaatttttaggggacaccaacatgtagaccatagcaatgagtcaataccgtggtaaacctgatacgttggcttaagacagagaagagtggggcagttggggaggatggtcaggataaggagctagtgacaactaaagccatgtttgctctcttctatatcactgaacccaaatgaccatccactgatgaaatgataaaccaactggcgtgtgtctgtgtgtcgcagttggctttggctgtcataacaaagtaccacagacttgggggagcttaaacagtagaaatttattttcttacagttctggaggctggaagtccaagatcaagatgttggtggagctggttccttctaaggcctctctccttgccttgcagatggcctcttctcattgggtcctcatgtggttgtccctcagtgtgtgtgtcctcatctcctcccacaaggacactaggcagatgggataagggcccaccctagtgacctgatttcaatttaattacctctttgcctgtctccaaacacagtcagattctgagtttctgagggttaggacttcaacattggagtttgaagaggtcacaactcaagctcagcccgtaacaccaagtcctggaatatttccagccacagacaggcacagagtgctggtccacagcaccccatggatgaaccttgaaaatgtcatgctgagtgaaagaagccagccacaaaggccacacggtctatgattccattgatagaaaatggctagaacaggcaaacccaggcaggcagaaagcagaatagtggctgccaggggctggggagggaaaagtgggaagatatcactgatgggtgatggatgtggggtttgggagttatgtctggggatggtcgcacaactttgtgaatatactaaaattcactcacccatacacttttttttttctttttctttggagacagggtctcactctgttgcccaggctggggtgcagtggctcagtctcggctcactgcaccctctgcctcccagattcaagcgattctcctgcttcagcctccacctccctagtagctgggattataggcacctgtctaatttttgtatttttagtagagatggggtttcaccatgttggccaggctggtctcgacctcctgacctcaggtgatcactggcctcagcctcccagagtgctgggattacgggcgtgagccactgtgcctggcctgaaccatatatttttaacagagtgaatgttatactatgtaaatgacatctcagttagaaaaatccttatgggaaaatatttcctgactaaaaaaagtgttctagattaccactcaaaaaggaactcaaaccctctgaacttctgatggggctaactctctctagtgtggattgttgggagtacaaatcattccaaaagtttaaagaaaaatgcagcatcttacacagtgaacagtgctactgtatcacattcatacaagttgatgtgcctggtttactctgttatcccatttgacttgtaaacactttctacacatggcaatactttcgacacatgaatatgtgatgtattgttaattccagaaagtgttcatgctcatttctaatgggcatgcagttgagggcaaggagtgtattatggtacaatttctttggtaaaactaaaattggattcacaaaacttcatactcgagtacgtttttaagaaggggtcttggccgggcacggtggctcacgcctgtaatcccagcactttgggaggccgaggcaggtggatcatgaggtcaggaaattgagaccatcctggctaacacggtgaaaccccgtctctactaaaaatacaaaaaaattagccgggcgtggtggcgggtacctgtagtcccagctacttgggaggctgaggcagaagaatggcgtgaacccgggaggcagagcttgcagtgagctgagatcacgccactgcactccagcctgggtgacagagcgagactctgtcacaaacaaacaaatgaaaaaaaagggtcttactcgaagtttctgcgtatgtgggttcctggcatcgaacctggctctgcactccccttcctgagatgactaaggaaaattatcttcagatctggttttgtgtgtgtgtgtgtgtgtgtgtgtgtgtgtgtgtgtgtgtgtaatccctggatatttttagtttaccagttagatttgatttgataccactttttcttgccatttatattttcagaaaatttagaatggtattgtgtttagaaaaatgtgcaagattatttttgtaaaataatttagagggttttttttcctgctataggccataaaattttgagtagaaaaatccagaaatttgaaaatcagtatcgtggtagagagctgccaggctttgtgaattacaggacatttgagacaatcgtgaaacagcaaatcaaggcactggaagagccggctgtggatatgctacacaccgtgacgggtgagtgctcagtttcacctctgagcattgatttctaaagaaaggaaaggttcgaaccaaagccagcaccaaacttcagcactttcctcctggggtgcatcccacaccaacgagcaaacctctcattctccagatgccaagttggtattcaacaattcaattcaattctgacactaactaccctcagtcagtgtggaccccatagcttaagggctcagttccacaacactggccccaactacaaatgccggtcacaagtcccagacctcctattcttctgatggactgtttataaatcaaggttcttgcgacccattcctcaggtcaaccaagaactctggaacacacttcactgacatttactggtctattagaaaggatttgataaggggcacaaatgaagctgttggagaggcacatagtgggggcctgaacacagaagcttctgtccccacggggttgggggcaccaccctcatggcacagagatgtggtcatcaaccagggagcccttggaacctcaccacggagaaggttttatggaggcctcatcatgaaggcatgatggaggattgactcaatctccaggccctccctcctctgtggagctggaagttctaagtttctagccaaggcttggtctttctagtgcccggccccaatcctgaagctatgtaggggcccaccaggcatcatctcttcaaaacacgagatactcctaaggctggacattccaagagatgtaggggctctatgttaggaaatggggacaaagacaaaatatttatatttttcctatcacaccacacctcccccctgctccactgctatgctggcttcacactcaaaatcggctgtttatttgaaatctccgaggagtaaagccaatggttccataactgcacgtgtagatgtgtttggaaccttttggagtgctgtaggaatctaggtgtgtcacggataggtaggaaactagatcctactgtggatccactcccttcttgaaatgctttgctttcttggttttccaggtattaaatctctattcttcatcctctccttgactgacagtatccttactcacacttcagctgcctcatcttagcagtaattaataatcactcatggatccatgaactaaggagctggagatagcctcagaacagctcattcagaggtgtatttccagtaaaattgacctttttgccctgataatcatataccaaaacctgcaatcatgttgttttggtccattgtagactcttaactcattccagaggaaagtttataatacttagagccttatagtcataaaaatcaacatagatatacctatttctttttcagaaatgtatgacatggagatcaataagaggttttcaatcataaagatactataccttgtattacaataaaattctgtgaggaagtagaatagaaatgagtttcaaaaataaaagataaataatataaattttttaatctaagagcttgttcttgtatttttttcaaatggataatgtagacactcaaattccattgatatatttaagagtgatttgacttatattaagagttgtattataaaatattaatatttataatttaaaagaaattacattctttgcagctatttaggataaaaagtttaaatatcaaataaatgtatgccaggggtcatttgcttttaagattcttccagcaaattattaagcaaaaagagcatgccttgctttttcatggtaaagagaagaagggagcggggagaggggaaactttacttcataccatttgatcctcatatttttttgcatcttaagaagagaacaaatgatcctaccaatattgaactatttttctctctttgattagatatggtccggcttgctttcacagatgtttcgataaaaaattttgaagagttttttaacctccacagaaccgccaaggtaaaaccaaccatgtgttgtttaaaaaaaaaaaagaaaagaaattaagcttgacactagaaaatagatttcttggatgaggattatttcaactttattgtatacttttagaacagcaaataacatcactcactagtgcttcttctgatgttaccggtgatgtctggttaaaagcaataaaggagggagtgcttaaacgcacagaacaagagatccacagttagcggagaagattatcacatctaagggcaatggctccaaatccagaaactcactgaggaaactacatataaaaatagaatatttctggcccgagtgggcatgatgagcctgtaatcccagcactttgggaggctgaggccggtagatgacttaaagccaggagtttgagaccagcctggcccacatggcaaaaccccatctctactaaaaatacaaaaaagtagctggacgtggtggtgcatgcctgtaatcccagctacttgggaggctgacactttagaattgattgagcccaggaggtggaagttgcagtgagccaacattgcatcactgcactctagcctaggcgatggagcgagaccctgtctcaaaaaaaaaaaaaaaaacaaacaaaaaaactttccatccagagtgaggaaagagcctacaggaaatgagcctgggggacagactgggccaagagaccagacttagccactcttagaaataggtgtccccggcacagatgaggagcctggccccatgattcaccagctggaggccttgggatgtgccacttccagcctgtgcccctgactcctcattcataaaagaagactgataaggccttcctcagaaggttgagatggacgtggagtaagatgtttaggatgcacctgccactgtgcactgtgcctctcctcaaggcctggagggtccaggggtgaagtttctcctcctcaggttttggcaaccagtttctctaaaccccgggaacataaaacataattttctgacttaaacatggctttcctgctcatccctgtggattatctgatggatatgacaatcctcgccatcagatatagaagcccctaaaagagaaaggaaagaagctgagttacggggcctgaaagcaagcctgtgcaggtccccaggccccgggatgggggtccggcccatctgtggctcaagcctcctgggaagctctgaccctcagccagggctagaaacctgccttagatacaccagggcgcggcccagagggctgttccaggaaacgtgctgtttcactcacgttgggtaacctggtatttacggacttcttacctactttcctgtgactcaggaatttgtgtcttgagggaaactgtatttatttattttttactgtagtccaaaattgaagacattagagcagaacaagagagagaaggtgagaagctgatccgcctccacttccagatggaacagattgtctactgccaggaccaggtatacaggggtgcattgcagaaggtcagagagaaggagctggaagaagaaaagaagaagaaatcctgggattttggggctttccaatccagctcggcaacagactcttccatggaggagatctttcagcacctgatggcctatcaccaggtacgtcttcgcgtggttcaggatgccagcttccattctttccttttcttctgaacgcctctctctttagtcttgctttctctgtaggtgacgttggtcagctctgtcgtttacctccttgttagcctcctgtattagtccattttcatgctgctgataaagacatacctgagactgggcaatttacaaaagaaagaggtttaacggacttacagttccacatggctggggaggccttctaccatcacggcagaaggcaatgggcacttcttacctggcggcggtggcaagagagagaatgagagccaagtgaaaggggtttccccttatcaaaccatcagatctcatgagacttactcactaccatgagaacagtattggagaaactgcccccatgattcagttatctccccctgagtccctcccacaacatgtgggaattatgggagtacaattcaagatgagatttgggtggggacacagagccaaaccatatcgccttcgtagaagcagctcaacctcagacagagagatggtggcttagagccagtgacatctggttttgatggctgtctagctctggccaagttacttaacctctctgagcctcagctttctttgtaaaatggtgtctcctcatagattctagtgcatattccaggagacgagtgtggatgatgataatggattgctaatggaaaaaccaaactctgttaaaatatttgaaagaggtttattctgagccaaatatgagggaccatggctctgggaacagtctcaggaggtcctgaggaagtgtgcctgaggctgtcaggatgcagtttgattttatacatttcagagaggcaggaattgtaggtaaaatcataaatcaatacatgggaggtgtacttgccctccctaaagaggcaggacaccttgaaggagggggagcttaccagtcataggtgggttcagagattttctggttgacgattgcttgaaagagttaaactttgtctacaaacttgacatcaatagaaagaaatgcctgagttaagggcagtgttagaggccaaaggtatgtagatgaagactctgggtagcagccttcagagagaataaatggtaaatgtttcttttcaggccttagaggcagcaggctctcagttaatctctcctagattcagggaaggcctagaaggggagaggtctgactgcattaatggagattctctacaggtgcaaattccccccccacaaaacatggcagggccatttcaatctgttggtcctgttacagccgtttcaaaatatgtccacaaaatatatttttaggtaaaatatttgtatttcctttagggtctgcaatctgtcttgtgatgctataccagagtcgggttggaaagtaagccattttatactgagttcatggaaactcatccaaggagatttcatggtttgtggggtgtgtgtgacttaacccctgcctcacatgactttataatatggtatcttactactccagagtctttttggccaaccttatgatctcaatttcaacctaaactccaaaagggcctggcttctcttcctgttacggccaggaattcagattttcaggtttctctggggtccacttggccaagagggggtctgttgagttggctggaaggcataggattttatttctggtttacaacaatttccttagtgcagcattggaatgcaatggtagcagactaaatggaagctatcgcgtagacacatgctttgattgatactgcacgattcagttaacctgaagtacaatctaattcatcctagggaaggaggcagtgaacacagacacaactcaggtagagcccttgggatgtgtaaacacctgaggaggtaaagcaaattgtaatctctcggtttatcagatgtccccattgccttactatttggatgctttaaagcagggcctctcaaactccacccagcacggaggcctcctgggatcttgtggaaatgcagatgctgattgcaggtcaggatgaagctgagattctgcctttcttttttttttttttttgaaaccgagtctcactccattacccaggctggagtgcagtggcacaatctcagctcactgcaacctctacatcctgggttcaagcaattcacctgcctcagcctcccaagtagctgggattacaggcttaccttgccaccatgcctagctattttttctatttttagtagagatggacttttaccatgttggccaggctggtcttgaactcctgacctcaagtgatctgcctgcctcggcctcccaaagtgctgggattacaggcgtgagccaccatgcccggcctctgcatttctaacgggctctcaggggtcaccatactactggatagaggccacacttggaggagcaaggctctaaaccgagggtcaacatccattcctccagacactgggagctgcatgcacgtgagtgaagccagttaaggggaagacaggcatgcacatcagcttctcctgcagccaagctcacacctgtctgctgcttccactgcctcctagaatgaacagttaccttgagagtaggtgaggcatatacatgcacagaatccaaacaataggatgagtgacaatggcagaggagtctccgagccaagcagctccctggacagaagcagcccttctccgcgttcatttctgtcctccgaggctgactcatgcactcaaaagctcccatgcatatacattttataatggtttttacacaaaggttagcagaggagtggacgtgctgctctgtaccctgcctcttttgctgtacctgggagattgttctgcctcagttctgatggggctgccttgttcttttcaatggctgctgagtatcccattttatggatgtggtatattgagccagctccctttaagcgaacagtttgtttgcagtcttttgctaatgcaggtgtgttgctgtgaataggtttgtttgtatatcatgtatctggaagcatcaattcctagaaatgagattcctggtatattaggattgtgcagggaaacagaaccacagatatatgtatgtaaagaagtatatttcagccaggcatggtggctcatgcctgtaatcccggcactctggaaggctgaggtgggtggatctcttgaggccaggagtttgagaccagcctggccaacatggcgaaacccggtctctactaaaaatacaaaaaaattagctgtgcatggtggcccatgcctatagtcccagctacttgggaagctgagatatgagaattgctcgaacctgggaggcagaggttgcagtgagccaagatcacaccactgcactccagcctgggtgacagagcgagactccatctcaaaacaaacaaacaaacaaaaaacaaaacaaaacaaaaaacagaaggaaagaaagaaatatatgtatatttcaaggaattggcttctgccattttgggagctggcaagtccaaaatcccagggcaggccagcagggagagcaggccagaaattgcagcaggagctaaggctgagtccacaggcagcatttcttctttttagggaaacctcatttttcttcttaagaccctcaactgattggatgaggcccatccacatcattgagaatggtctccttcacttaaagtcagtgggttacacatgttacccacatctacagaatacctccgcagcaatacctagattcgtgtttgatggaatcactggggactcgagcctagccaagctaacacatgaaacacaccatcacagctggggaaaggatggcttattttagactgataaagatgacccagagaaggcctgctccatccacactggccgctttagtctgcactaaagttgttggttttttttgtttgtttggtttttttttggtgacagagtctcactctgtcgcccaggctggagtgcagtggcgcagtctcagctcactgcaacctctgcatcctgagatcaagcgattctcctgcctcagcctcctgagtagctgggactacaggcacgtgccaccacactcggctaatttttgttttttcagtagagacggggtttcaccatattggccaggctggtcttgaacgcctgaccatgtgatccatccgcctcagtctaccaaagtgctgggtttacaggcgtgagccaccacgcccggccttgttggggttttttgacagcctaataggtgaaaatgacatctcattacaatcttaattggcattctcttatgacaacaagctggtacatctttttgtgtgttgagggttatttctatttcttgctcagcaaacagttcatccaggaagagcttcttggtgagatagtagacctctgcgatttctgttgcagacgatctacattttgtcatttgctttgtcatttttgtctatggtggttttagactatgcgtaagttttctagagcagaaactcaagttggatttgggcctcagtggttattgccatactttaaaaggactttgtctccctgagatgataaatgaggtggacaatattttctttaagtaatttcttattttaactgttacatgatacctttggcccatttggagttctttgatgtcaagaatgaggcaggatccagatggcagcagaggtcccagtcccatcctggaagggtcgtctagttcccactggtactccacacgcccactcaggcactcacttcccctctgcgttgggtcttgtctgcaagactctcttatgttttaccatctagtgcagccagcacccccacatcaccctcactttttctttctttaaattgtgcagaaatattcatcatgtctattttgccatcttaaccatttgggggtacatagttcagtggcattaagtacattcatattgtgccagcatcaccagcagccacctccaggaccctatcaccttcccacactgaaactctgtccccattaaacacattccccattccccgcccctgaatccctgacagctaccatcctactgtctgtctctgtgaattcaactaacctgagtacctcataggagttgtgactggcttgtttcatgcagtatgatgtcctcatccaggtggtagcaagtgtcagagtttcacgcctatttatttattattatgagacagagtcttgctctgtcgcccagcctggagtacaatggcgcgatcccagctcactgcagcctccccctgcctgggttcaaacaattctcctgcctcagcctcccatggtgtgccgccacacctggctattttttgtatttttagtagagacgcggtttcaccacgttgaccaggctggtctggaaatgcagtttttgcactgtctgcctgcttacctttatagagcatattttgccctcttccatcagaattacccatttaatggtcaggaaaagctgctgggaatatgactcatagctgggacattctctgcactgtgcatagttcctctctgccaccaccatggaggagattgatgggtttgaaacccaggggaaggtcattgccctgcgagggtctccctcattgagaatctggatcccctcatgtgcacatggtgaggtcagagtcccctcctcacagtgtcccctccaccctcccgtgaactgttctttccttccaggaggccagcaagcgcatctccagccacatccctttgatcatccagttcttcatgctccagacgtacggccagcagcttcagaaggccatgctgcagctcctgcaggacaaggacacctacagctggctcctgaaggagcggagcgacaccagcgacaagcggaagttcctgaaggagcggcttgcacggctgacgcaggctcggcgccggcttgcccagttccccggttaaccacactctgtccagccccgtagacgtgcacgcacactgtctgcccccgttcccgggtagccactggactgacgacttgagtgctcagtagtcagactggatagtccgtctctgcttatccgttagccgtggtgatttagcaggaagctgtgagagcagtttggtttctagcatgaagacagagccccaccctcagatgcacatgagctggcgggattgaaggatgctgtcttcgtactgggaaagggattttcagccctcagaatcgctccaccttgcagctctccccttctctgtattcctagaaactgacacatgctgaacatcacagcttatttcctcatttttataatgtcccttcacaaacccagtgttttaggagcatgagtgccgtgtgtgtgcgtcctgtcggagccctgtctcctctctctgtaataaactcatttctagcagacact

SEQ ID NO: 8513 - DNA, 33072 bp, Homo sapiens
cttcgcggcgcggggcggggctgggcgcggggtgaaagaggcgaagcgagagcggaggccgcactccagcactgcgcagggaccggtgagtgtcgcttctgggggcagcgcccagtaaccgcgctaggagcgcggagaagggcattgggagagcggcgttcgtggcggagactagcgctccggagcacgggcacgacgggggcaccttctcggctgctagtaactaacaataataataatcataatcatagcaagggcgctgatgggcgggctcggagcacgcctgattctggttcccaccaggctgcccaggctcctgatgacgcatcagaaacatccccctaacccgcggccttcctgcaggagaggttgggaaggggtgggggacggggctcgggggaggtctccgagggactctagtaagcggggaagggcgccgggaaagtttcagatccacggctgcgcgggccacgagcccacccgaacgccgaccactgctttccgtcgacttctatttcctgggaacgcgcgaaagcaaacccaagtcagactgcggaggtcgctggggagggaaggttcaaggagttctcgccgatcctgctgaataaagggggttccgagctgggccgagatggggcatgcgcgggaagacccctgcccgctgttcccccccaccgccccagtggatgccatgcctggggcctccccggcgcgtggggctgacgcaccctcggggtccatcgtagttggccgggatcgtggagtgggtgcggtggacgaagggaggcaggacagtcccgggggtggcagaaggagcccgggcacagctgagacctgcgctcccatcccaccaacactcacagcaggtgctgccgagctgggcaattgggatggcccaagttatttggttaaattttaaatcacgtttgttactgggaagtagagtccagtgatgctaaccgcgcctctacctccaccaccggtgtcagtcccaaagggctcctaaaatggctgtgtcatctttcagccttggaccgcagttgccggccaggaatcccagtgtcacggtggacacgcctccctcgcgcccttgccgcccacctgctcacccagctcaggggctttggtaggtagcagtgcatttggtctaaagggcaagatgttctctcttttattcataacaaatttaaataccagcagggtttggggggaaaaacgctttcagaagaaaaggtgaatgtcagtcctgcaagagttagttttaaaactagactgaattggcacatgtatacctatgtaacaaacctgcacgttctgcacatgtaccccagaacttaaaagcttataaaaaaagaaaaaactagactggattatgttgggaaagtgtagcctcttccatcttaggcatttcctagaacgtaggcagtaggtggtccttattaggagttttgggagaggaagggggctgaatcctacctcccatccctgctcctctatggggtctgagctgaggaagcttcaccacaaggagagaaccccctgacaaccctggatgccacctttaccctcactgcaggaattctgtggccacactgcgaggagatcggttctgggtcggaggctacaggaagactcccactccctgaaatctggagtgaagaacgccgccatccagccaccattccaaggtaaggcagaaatgaagtgggccgttgggttctttcttttctttctttcttttttttgagacaaggtctcactctgtcgcccaggctggagtgcagtggcgccatctcagctcactgcaacccccgcctcccaggttcaagcgattctggtgcctcagtctcctgagtagctgggattacaggcacacatcaccacacctggctaatttgtatgtgtttagtagagacagcatttcaccatattggccaggctggtttcaaactcctggcctcaaatgatccacccgccttggcttcccaaagtactgggattacaggcacgagccactgcacccagtcaggttcattttagttgttatgttaaccaggtttcctgcacctgtgcgctaactttcactttcccaaaaggtttcagggtgacccagcaggcaatgagtgattctcaaattcaggatttattgtgagagattcacacacacaattgagcagacattcacagtacaatgattaaagggagtgatagggtaaggacccacagtggaggctctggaggccagcccactgacagccactccagggagtccagaagtcccgctctagtgctgggtggtggagggaaatctgttcctccagggacctcgtcctcggctgcccagctgccaaagtcaggaataagctttcagaaatctcactgccaagattccgaaaacgcttcagacattgctagtcccttgtcgcttttgcgatcctccacaggtgtgcgtgccactgggtccttattcactggggtctctggtggcattgggccacagcaagtgttccctcatccccttagtctaccacacacatgcttaccactttgaagaaaaacccctttactatgagcgaaagtgagaaacacgtatgtttattgtttctaaagaaagaaacttaatatgggcttaatgctacctagtgagtgcctccattttgagacattagggtcacaagtcattattatatatcatgggcacaaacctgccctgggcagggacggaaggaagcccctgcacaggggcagttgctcaggatgtgagaagagcctggtgcataaccccatccatgcccacctaacatctcaggctctgaccagtggggctgtgcagtagcgagtggatggagggctggaaccctgcagcctcctctccaaacacagggtgcagccaagacattttaggagcaatttgggatggagagctaggagtcgccacctcttggctcttccaaggccggaactggtgcctgcactcagttcagtttgaagactgcagctggatgccaagttccatggaggagtaagaaaccggtttgaactcccgagattgccctgcccctgaaatccaaactgatgttccgaatgatcagggaaaggtacaaacgtttatggtttacagacaaaacccataaggtttagctttcagagaatctcattttatgaagcaaattagggaagggaatctactcaccaagtcctgtttcagctgattgagtggaacctgtggtcatgtggtacaagtcctggtctcaatgatgctccttatctggctgcagaaaggccaactgaggcaaccatagcccagaagactggtactcctgagaggcagatgaagtggtggtctttgatatcgagcctgggatgccctgggcacatgaggtatttccaaaggcatgggagttttagggaataaattcccagattgtcagactccataagtaccgtttacaatggattaccttttataaccatcccaatcctacctgacaaaagaggtgggcagattacgaggtcaggaaattgagaccatcctggctaacactgtgagaccccatctctactaaataaatacaaaaaattagccgggtctggtggcgtgcacctgtagtcccagctacttgggagcctgaggcaggataatcgcttgaacccgggaggtggaggttgcagtgagccaagattgcgccactgctctccagcctggtgacaaagcgagactgtctcaaaaaaaaaaaaaaaaagaaagaaatacatccctttcttcccttccaaatcgagcaaggatgcctgccctggaagtgtataaacccggggaagggagacagaaaaggatagttttaagtattggtgttggggacgtgttctttagccaaggcagcatgaacccatggcagcacttcccaaccttcctgacatgggcgtttctgtgaactccagtgtgatggagaaatggcattggctcaggtgtgcagctagatatgttacagagcagggtgacaggcaggggtgatgagttttgttttaacaacctgtcccttcaaccctcatggtactgacaaagatcacatggctctcgggggagattcctgcgaggggaagcaaggagagcatccttacatattattgatccaggcagcagatttgcagcaaagctctgtgctttattcatctgttaaaatagttaaaatagtcaaaacataggaaaaggattctgggaagtcagaatcggcttcagagcacacccctcctgcacttgcccggttctcagacttgggaatgggactgggtgggtgggtactctcgggtgttccgcgggtttgggtcttacttgtacactttgcttgatttcaaggaggtgcaggagaacagctctgtgataccatttaacttgttgacattacttttatttgaaggaacgtatattagaggtaagttggtgcatgctattttctgtaacatttattttgagtcataggagaaagattttcagttacttttatccaagattattagacactgtaaaatttcatatttaggcacttgtcctacaacattttaaaaatgaatttcaaatacatacgtgtgtatttgtaatgcagacaagtataaggcagtcagttacatgctttcaagagtaaaatgaatgacatttcatttcccccatttgtgggagtaaaagaatgacaatatgaaattgatgatcaaaagaaagagcataaaagatttagagctcacgtgttttttaaactaaaggtttgggtatcaaattaccgtaatatttggattctcttggctacattggaaacagttctataacaattttatttttaaatgtaaagtttttgtttgttgttgtttttaagacggggtctcgctctgtcgcccaggctggagtgcagtggtgcgatctcggctcactgcaaccttcacctcccaggttcaagtgattctcctgcctcagcctcccaagtagctgggactacaaacacacaccaccacttccagctaatttttgtatatttagtagagatggggtttcactatgttggccaagctcgcttcgaactcctgacctcaggtgatccactcaccttggtctcccaaagtgctgggtgggatacaggcgtgagctactgtgcccagcctttaaatgtaaactttttaattgtattacaactgcatcagaagttgtatactttgcaactattcaaatttatactgaaaacgtttttgaagttcaacctaaaattatgacaggagatagttttagaaaatattttggggaacagaggcatattctattttttttttttgagacagagtcttgctctgttgcccagactggggtgcagtggcgtgatctcagctgactgcatcctctgcctgccaggttcaagcaattctttgcctcagcctcctgagtagttgggattacaggtgcccgccaccatgcctggctaatttttttgtatttttagtagagacaagttttaccatcttggccagggtggtattgaactcctgacctcatgatctacctgcctcagcctcccaaagtgctgagattacaggcgtgagccccggggcccggcctggagggatattcttgaagcgccttgagcagggaggcagcgtttgtctttatctgaccttggcttctttgggtcactctgtttctctttccgtgaataaaaagccagtgagcacacactgtgtcccaggcactcttctacgctctggggacatcaccatgaacaactagtcagagtccccacctccaggggccttccgttctggtggtgggtttggttccatggttgaatgcacccagctgcttatctgttcaataggcatctgctttattttaagcttactttgcaaagaaggaagatggttgtttccgaagtggacatcgcaaaagctgatccagctgctgcatcccaccctctattactgaatggagatgctactgtggcccagaaaaatccaggctcggtaagttgctctctgaaagtcgctatccatgtgacatgagccatgcccattcgaggctgcccttttctacagcggtgctactgctgcccagatatgcctgctctctcgcctctcctgtgccaggacgcagatcctgaccctctacttgccagctgacaaccatgtatagactcgttgccttagctcaccgtgggtggaggtgctgctggggttggggacactggctgagctgtcgatgggttcagctcatctatactagaaggaactggcccaggccctgggttcaaggagcactaggtttgtttttcctgcccacatcatgattcagtctcaagctacaaaccctggggcatcattaagatattatctttgtagggaagccacgtggtgaattttttgcccagaatcaagacatatttttggtgggaaccaatcatggcccctggaatcagtccaacctcagttggtcccgacgctgacactctcagctgtgtgattgtgggtagttattcctcctgttataagcctggttttccatatctaaaatgagaataatggtctttgctttatatggctgagagcaaagtgcagggagtgtccaggtactcagagtgctcagtttcttattaccgtggatcactggtctgtttcaggctggctctgttttcctaggcaatgttaaacaatttttcaaacaatattcaaaaaacattgaagcgtttagaaaaatacagaggaccaccacctttccaccaccctgataccaccgtttacatttttctgcatttccgtccctggtgcgtctcttgtctggctgtaagagatgtaattatgtcagggtatggggcaggaggaactctcacccactcatacttgcgtgctttggaagcagcttggccttttccagtcaaggagaacagagtgtgtctcgtgatctggcagttccacttctggggatagactgtggttctcaaagtgtggcccccagcccagcccattagcatcacctgggaagttgactgaaatgcaaatgaccagcccctcctcccactcttagacctggtgaattggacactctggggcagggcccaccccctgtgctttaccaggctctccaggtgattctgctgtgtgctggagtttgaggaccatgtgtaaacccttgcacatccccctgggagccacatgcatagcagcactgtttataacagcaaaactcagaccctgtctacgtgcctgtcatggtggaatggatactgggagtgtggtatgttcatgtagcagaattctatacagtagtaaagaggaatgaactagagttccaggtatcaaaatggctgcatcaaatgaacaacgttgaaccaaagaatcaagttacaggaaatatacaaaatgattccacttacgtaaaattccccaacaggcagcaataggcaatataccattgtgggaaaaacatataggtggcaaaactataaagaaaagcaaggatgtgatgattgcaagcctcaggatagagggaccctctggaggtgaaggagttgacccagggaggtgtgtgcaatgtcctaagtactgggagtgtttgtgttcttaacccaagtggttggtacatgcatatttgctttattatgtttgacacacttttgtaaatagatagtataaataaatgaaaacaaacaaaaagttataaggtgaactaagaccgaggctaccaactgtattcatgcatttggtaaggctgtggttctttctcagtcagggcccattttgctccctggaacttgtggccaggtctagagacatcttggttgtcacaactcagggtgaatagtgaatagaggccaggtatttggctaaacctcctacaatgtgtagggtagcccctgcaacaaacaatcttctaaccccaaatatgaatagcttcttgtcctgttataaagaagctattctagtaaaaacgtctgtctatgatgaagcatgcacaaaaatagtcattagaaagaggtaaaagacaaaatgattttctcatattttcttcctgaacctcaatcagcccacattcggaaaattgcacccagctgctggtaggtaggcaggaccgagtgtgaagtctgctgctttctctgtttttatgcaagtacttcactattttgattactttagttttatagtaattatggaaattaggtaatgctagtcctctgactttgttcttctttttcaaagtcattttgactaagaatatttagatcatttctatttaatgtgactggtaatataattagatttgagaatatcatctttctatttgttttctatttgtcccatctgttcttcgttccccctttcgtctttttctgccttcttttggattattttttatgattccatcatgtctcctttgttgtcttattaagtataacttttggtgtttttagtatatatctttaacttaataagtcaaccttcaagtgatagtctgtcacttcatgtatagtgcgagaaccttagaatagtgtatttccatctctctgctctgagccttcatactatttctatcatgcatcttttacatacatcataaaccccacaatacattgttattattgatgttcaaacattcaattatcttttaaataaagatagcaaaggaatacaaaaaagtgtagtagttaccccttctagtatagactcctttgtatagatccagatttccattcagtatcattttccttctacctaaagaacttctttaacatttcctgtagtgcaggtctgctggtaatgaattagttaagcttttgaatggctaaaaaagtctttgttttgccttcatttttaaaagttatttttgctgggtatagaattctagattgatggtgtttttcagtactttaaaaatactgcttcactgtcttctcgcttgttattgcttctgataagattgacagcagatttctcatttgtgtccctctgctcacactgtatcattctctggctgctcctaacattttctctttattactggttttgagcaatttgaccctcttatggcttgatgatgtttatgtttgctgtgcttaatgtctgttgagtttctgggatctttgggtttatggttttcattaagtttgagggaattgtatgtattatttcttcaaatatttttttctgtctctcttccattctcttttggggattccagtaacctgtgtattagacttattgaagttggccgtctttaatggagtgtattggttcattctcacactgctataaagaactgcctgaaactaggtaatttataaagaaaagaggtttaattgactcacagtccacatggctggggaggcctcaggaaacttacaatcatggaggaaggcatctcttcacaaggcagcaggagagagaatgactgaaggaggaacttgccaaacacttataaaaccatcagacctcatgaaaactcactatcatgagaacagcatgggggaaacctcccccacaatccaattacctccacctggtctctcccttgacacgtagggattatggggattacaattcgagatgagatttgggtagggacacagaaccaaaccatatcatgagcatgatttgcaggccatgaagaattctccatttttgtttcctccaggtggctgagaacaacctgtgcagccagtatgaggagaaggtgcgcccctgcatcgacctcattgactccctgcgggctctaggtgtggagcaggacctggccctgccagccatcgccgtcatcggggaccagagctcgggcaagagctccgtgttggaggcactgtcaggagttgcccttcccagaggcagcggtaagaacttacattctgtgttagtctgctcaggctgccataacaaaataccacagacggggtggcttatacaacaaaagtttattttctcacagttgtggagactggaagtccaacatcagggtttagcttctcctgaggcctttctccatggcctgcagatggccacctcctcaccgctcccccatgcggccttccttccacacacaagcatctctgctgtctcttccccttcttcataagagcaccagtcatattggattggggcctaccctaatgacctcatttaaccttaattgcctctttaaaggccttatcttcaaatacagtcccattaggggttagggcttcaacataggaatttggagggaacaccatttcataacgctatctcattgcacatttttttcacataagtcatatgtaatctacagtttgaggagaatctgaataaacacatttgggtcccccagttcagaactatatcagtgaggtctcaaagagttcaggcctgggacgggtcttgcaatacagatcaggtgtggtaggaagaatatggaaggagtttacagtaggaggactgttgtaaggtggcctggtagcagcaggatgctttcctaatgggggtagagtgtgtatgctggggggataatggaagatgttcggatgagtttcgggggattcccaatgtggtctgccacctgagctgatggcagaacactgggatgaggcaggaagccaaaagtggtggctttcaagtgttagtaagcaaaaactcacctgggttacatactcagaatgcatgttcttgaggtcacccagacacagtgcgatgtccccgcatatcagagggtaagaccagaaagtttccagttttaaatgtctccccatatgattgtataaaagtttgagaaccatgggcctaaggcgctatgtaggtcttttaagagcaaagtggagcactgatgtgggcgtggcctcctagggatcgtgaccagatgcccgctggtgctgaaactgaagaaacttgtgaacgaagataagtggagaggcaaggtcagttaccaggactacgagattgagatttcggatgcttcagaggtagaaaaggaaattaataaaggtgagtaccccctgtttggatgcctggtcaagccttctgacatgcatggggtctgtttgtaactgttcatactcccacctccctgggcctgtgctgtcaggacacctttctcctgcacatcaggccccggttccttctacttcttttacctcattatgaccagcacgcttggatatcagcatctgatagcaatcatttatttctggccaggcacagtggcttgtgcctgtaatcccagctctttgggaggctgacacggggggattgcttgagcctaggagttcaagaccagccagggcaacatagtgagaccccgtctcttaaaaaaaaaaattaaaatagctgggcagggtggcatgcacctgtggtcccagctattcaggaggctgaggtgggagagttgcttgagcctgggaagtcaaggctgcagtgagccgtgatcttgctacggcactctagcctgacagcagagtgagaccctgtctcaaaaacacatgtattgcttattatgtaagtatctagaataatgtgaattttaaaatgtccccacatatggatgatctgtcccttattcaagggcttccctacttagatctggcaggaagaggagccagatatgggggtgagggagctcctccccccgttcctttgtacaaggaactccacattgtggacaggatcgtcactgaaccccactcagaaccagcacccttttctaagaaaggagagtgactgtgtttgcataatcccagcttaggctaattcatggcaggcctccataaatgcaaaccacaaggatcaatttgaagtgtctgcaaggggaaatgacaccagcagtgtagacagggtagagtagctgacaaagaacagcctctgtgagatgcatggataacatcttcctatcgaccttcatgtttttctggcatgtcacatgtttaagtttcattcacactgggaaggtactgaagagacatgaactaatgcccagcagtaggaagggacgggtttagcatttgtaaagatggagcattaatcacatttgttgactgtttaaagaaagataaataatgttattgacaaaccgtgattttgaattagttgggattaggttggctgcttgcagcagaaaactcaaaataactgtgtgccttagcccttgctgtataacaaacccatcttaaaactaatggcttgaccacttttatttctcatgatttgatggaccagctgggcagttcttctctgggctagctgggctggggctgatggtccaggatggcccttggctggagtgaccgggccttctgtctgtgtggtctctcaccctccagaaggctaagctggacttctcaatgtgggtggaggggttcccagcagcaagagagggcaagacccgacatctaacacctttcggtctctcctgatgtggcactgtgtaacatccccttagccagagaaagtcacgtggccaagcccaatttcaagggaccgattttctctctctccatggaagtgacgaaggcaccctgtaaagtagcgtgcatacagggatggaagggaatgtggatgccattgtgccagcaagttgctgagacagcggtctaaacaatgtagaggctttctgtccctctcatataagtctgaaggcgggcagaccagagctgattggggattccaatgtcaggaaccaagatttattcttctcccatttcttcattgggtgtggcctctgtttccaaggcccccccgtgacttagtcagcaagtccgctttgaagccagctggaccatggcaaggggcatatctctgcctttgtaagcacactttctggaagttgcacataacattttcacatggcccattggccagaacccgatctcatgaccacatggcaggtacatggatattgggggaacaattagtggaccataaccactgatatttcctaagttctaaattgatatcaaacatcccaaaaaggcattctagatttagaaaagagtaaagtggtgttagccaacaatttgatgaaacaaattcatatcctaaaattcattaaggaggaaggagcaaaataaaatctcttaatgggatgttaacagccagtgcttatcttagctaaaataagcacatttccccatataattttccagtttatattttaggcatttccatatatttttatttgtttttattttgcttggttgctaatttcctactgacatcaatgagaaggatttaggaatgctaccaggaagaacttcttgcctccgcccagctttggactggtctaagtgggtgtcactcatggtgatgttctcacaaggtctctctacacacagtgctggccaacagcagggaaaatactgagttatcctttgagatctcttttatcccaatcacagaaaattgaatctgctccaaatatgcttttatccatgactcgcagagaggagaagatgctttcagagtattcaccatcatgagatccgtttatcctaagctctgtttgggtttgattttccctgtctcttttctagcccagaatgccatcgccggggaaggaatgggaatcagtcatgagctaatcaccctggagatcagctcccgagatgtcccggatctgactctaatagaccttcctggcataaccagagtggctgtgggcaatcagcctgctgacattgggtataaggtcagacttcagacccattctgaccttggccgtggcgtggggatgggggagtggaggggtgggaggagaaagagggtactgtattagagtaaccgtgagtccagagctgagttttggagttagtatttggaggtgtgagtggggaatttagagagcccgttggtcacagtctgttctgtcaagttgaatggaagcttctttggagaaagtgaggccagtgggcacagttggaaatgtgttctgtgtatttgttttatgttttatgcaatgacttgtttttggttatatacattttgcagcatatctaaagtgctgtgtattaggaaggggtcttatgtgggaagagagcattaaaaataagtataatgggccacacacagtggctcagtcctataatcccagcactttgggaggctgaggcaggaggattccttgagcccaagagtttgacagaaacctgagcaacatagtgagacccccttctctataaaagaaaggttaaaaaattagccaggtatggtggcgtgcacctgtcagctactaggaggattgcttgaaccagggaggctgtgatgagccgtgattgtgccactgcactccagcctgggcaacagagcaagaatctgtctcaaaacaaaaaacaaaacaaaacaagcaagaaagaaataggtataatgatattttagtatcagtgaatctcactttacagattaaagatttaggggtgaagtggggttttttggccaccatttttcattgtgaccatcagatctgaggtcttaggggttaattatctgaaacttcatggttttccctgagcctatagctctgcttctgccacagataatttattttctcataattccagcttggtacctccagggttgtgtttgtgggttcatttctccaaagttacttcttttgggggaaatacccctgggactcttagggcctaaagcaagtgcaaggtcaggacttgtctcacctctcacttgcctttgccatactcacgagtcacctcctctcatttccttacagatcaagacactcatcaagaagtacatccagaggcaggagacaatcagcctggtggtggtccccagtaatgtggacattgccaccacagaggctctcagcatggcccaggaggtggaccccgagggagacaggaccatcggtgagagtgggggagccccactgtgctcagtgagaatgggggagcccgcctgtgctcgatgagaatgggggagcccgcctgtgctcggtgagaatgggggagcccgcctgtgctcggtgagaatgggggagcccgcctgtgctcggtgagaatgggggagcccgcctgtgctcggtggtctgccagtgggcaagcgtccctccagtctccatgggctttgctcagtggggacctgcctccactaagacctgctaagggagcaggtttggtgcccaccaaggccaagtgaaatgagctgcttttgactctcactggctaggttgccttgtaagccttatctacttgctcagaaaggcacagtgggctcggaagcaggtcaaactcaggaggcacatggtactcattaagaatgcatttgagatgggatgtccataactcaagggataaacaaaacgtggcgtgttctacagtggacccgggtgaaggagcttggggagagccacatgctgttctgggaggcatccctgccttcacgcggcttgtcgtggagttcttttctggagcggggctccactgcccccatggttctgcaggggctatggcctgtcctcaagcaaggatgggaggaaaccctgggaggccgggggcgtgagcagttgttcgttcacctctgcctcgtgactgagcacgttctctccccaaatacatctggctcgcaggaatcttgacgaagcctgatctggtggacaaaggaactgaagacaaggttgtggacgtggtgcggaacctcgtgttccacctgaagaagggttacatgattgtcaagtgccggggccagcaggagatccaggaccagctgagcctgtccgaagccctgcagagagagaagatcttctttgagaaccacccatatttcaggtgcgcttgcctgggtttcatcatggatcagtccaagcccaggatgtcaggccttccaggggacagtggcagccgtcccacagatgtgtggagtgtgtgtgtgtgtgtgtgtgtgtgcgtgtgtgtgtgtgcgcgtgtgtgtgtgactatgcttgttccccaacaaggactatggaattcacctagaagaataggaaggggattacaaaatactgccaagaaaaaaaaaactaaaaaccaatcaaaatagggagagaacaatgtacaataatttacgtagcatggtgctggaaccatattttataaaaacataaatagaagagaataggaaaaaagtagaaagcccagaaatagacctagatatatatatttgacacatgatgaatgcagcatttcaaatcaaatagtggactatatcagcttgagtatctattagcggtgttaggataattaatatttgggaaaaaactaaaatactgcccttacttatctcattataccaaaatagttaaagtttaaagttaaatattaagaggaagcaataagcatctcagaagaaaggtaggtgaatagtttataagatttttctatccctcctaccaaaagtgacattttttaaaaggaaaagactgacaaattgataagatttaaaatgatgagactatgtagagttgtaaacattcttgcattcagttctcccagaagcctacagagagccattactcagaattccaggaatatcaaatggaaacttacatcctgttctgcacattcacaattgccagaagatgagatgattcagtgtccattgatggatggatgcagaaagcaatgtggtctgtacaaaaacatggaatactttcagccttagaaaggaaagacattctgacacatgctacaacatggatgaagcttgggaacattctactaagtgaaagaacccagtcgtaagaggacggatactgtctgattccacttagctgaggtccctggagtagtcagattcatagagacagaaagaatgatgggcgccaggggctgggagagagagaatgggcaggtagtgtttaatggggccattgtttcagtttgggaatatgaaaagttctgaagacagacagtggtgatggttgcataatagtgtgaatgtacttaatgccactcaagtgtactcttaaagatggttaaatggtcaattttatatgtagtttaccacaatttagaaaaattgacagagaaactgaagcttaggtatgagtatactctcacaaaaaggcacagaaactcatgcttcactgctgcctttatcctaaaatgtcctataaaatgtgggaaaccctgtaataactcactctgtgagcacaaatttggatcgagtgagaagatgcttgacttccttcctccaggcagcccatggtttaagtttttatcttggacaagatatcttgtgtctcttctccccagtgttctgctacccatttatctcaatatgcttcaatgtatttgtatgaagatatgtctgtatccattatgattacctacacatattacacatagaagggggtatgtgttataaaaacatatctatacatgtctgtgtatttttgtgatgaccaagtctatagtcaaacaccatgatacacatttattatatcagctggaagagctcattccatatcattgtggaaatatcctagattgctaaaattcagtcataatcctattcaatccagttctgagtatttgttgggtaccaactgcaagacattccatccagttgtaagcaactgaaatttgccttgactttccccaacagcaaaaaggcagacatgcgtgttctggctacatcaaggtggaaatcggtcctgtgttctcttctagggatctgctggaggaaggaaaggccacggttccctgcctggcagaaaaacttaccagcgagctcatcacacatatctgtgtaagcacgggcagagctgtgggttctctaaaaagaatactacgaccgcagagctgaaccttgctggcttcttaaacatcactgtacacacagatcttctgaggatcttgttaagatgcagtttcagattctgtgggtctggagtggggcctagaattctgcatttccagcaagcccccagacaatgtggatattccttttcaggggaccacagtcaggggggatgctgatagactatatctactgggccaaaataaaaattaaaatcttatacacaagctactaactcttcctttctcattgacaaccactattataatgtcttattcattctaatgaacatattttttaacttctaaaagctttgtaaaagctctctgtggttctttttaaaagtctgcctgaatgtagtgtcttcctttttcaaattttcttttcttttcttttctttcttttttttttttttttttttttttgagacagagtctcactctgttgcccaggctggagtgcagtggtgtgatctcagctcactgcaacctctgcctcctgggttcaagcaattctcctacctcagcctcctgagtagctgggattacaggtgcccaccaccatgcctggctaatttttgtatttttagtagagacagggtttcaccatgttgaccagactggcctttttcaaattttcaactcagcaccagagtgcagggtcttccacgtggtccccaggaatgcgggtgcataacagggttgtttccagccgaccatgatgagtgcagagctctctggggtcccactgtatgcagaaagaggatgcttccttattagattccccacctcgagcaagcccatggggattgattttttgcctctgcaccaagtcaggttcataagttcccgttcgaattttcttacctagacagatgcccttgtggctgagccgggcttcattgctgccttctccttgagcccctgcctggccactgttactggggctggcctctgactacccctcactaacttgtgagtccaccgatacatttaaaggtgcagctttcacatgtcagctggcatttttagatgtttgccgtggaagggtgagccagcatatggcgtcaaccgtattgttaaaaacataagtctctgatcactttttattgattgcaagcaacataaaagttgttgaatctcaaattgctccaaatgccactttttcagaacctactagacaagtggatctctccagtctccctccagagagtttacctaatatgaccacagaggaactgctcccgggtcactctgccggggcctaggacccatgcacagtgggtgccacagtgctgctcatgaggctgctgtcgcaggagtggggaaggaggaagacctgggcagaaaacagtgcccccagtgtgtgcccccctgcacctcccccgggtctggaaaagcttccttttagaggaagccaggaagtcaaatggcccacacaactcctctgcagagggaggcccgggacctccttttcattctctgttcatctttacacatttccattattttctctccattttcctcagaaatctctgcccctgttagaaaatcaaatcaaggagactcaccagagaataacagaggagctacaaaagtatggtgtcgacataccggaagacgaaaatgaaaaaatgttcttcctgatagatgtgagtgttgccagctgcatggagctggagaagcacatgtcatggtcaaaaaagggaccctgggccttatgcacttccttcttcgctcccccaaggctgatccaaagacatctgacccgtagcactcaaagggtggacagggctgagggaggcagggcagggagtgcggatgtgggggtggagtcagcagcgagggatgctcaggctgcgttgtgcctactctgtcacgagcatcacccagatccctaaggcagtaaggggtgggataggattttctagtgccaaaacctcttctttcccctgatccacagtgtcccataagaaagcaaagaatgactccccaccctccacataggcacggcctccaaatgaccttgacacttggatttgaagtctatccacttatactgatgtttttcttcttgacagaaaattaatgcctttaatcaggacatcactgctctcatgcaaggagaggaaactgtaggggaggaagacattcggctgtttaccagactccgacacgagttccacaaatggagtacaataattgaaaacaattttcaagaaggtgagtgtcttagtcccttcttttgggctgctacaactgaatacctgagactgggtcatttatgaacagtagaaacttattgctcattgttctggaggtgagaaatctattcttaaggaatcaggaaatttggtgtctggtgagagcttgttctctgcttcaaagatggcaccttctagctgtgtcctctcatgggataagggatgaacaagcttcctcggacctcttttttacaggggtaccacaggcatacctcagagatattgtgggttcagttccagacaaaacaaatattgcaataatgcaagtcatataaacttcttggttcctggtgcataaacagttcatttatgccctactgcagtctattaagtatgtaatagcattaggcctaaaaaatatgtatgtaccttagtttaaaacaccttattgctaaaaaattgctgatacagaaacaaaaagtgagcatgtgctactggaaaaaaaatggtgctgatttgcttgacatgggattgccacagactttcaatttgtaaaaaatacggtatcagtgaagtgcaataaaacaagatatgcctggaatgccattatgcgggcagagtgctcataacccaatccttcctaaaggtctcctctgttgataccatcacactggggattaagtttcaacataggaatttttaggggacaccaacatgtagaccatagcaatgagtcaataccgtggtaaacctgatacgttggcttaagacagagaagagtggggcagttggggaggatggtcaggataaggagctagtgacaactaaagccatgtttgctctcttctatatcactgaacccaaatgaccatccactgatgaaatgataaaccaactggcgtgtgtctgtgtgtcgcagttggctttggctgtcataacaaagtaccacagacttgggggagcttaaacagtagaaatttattttcttacagttctggaggctggaagtccaagatcaagatgttggtggagctggttccttctaaggcctctctccttgccttgcagatggcctcttctcattgggtcctcatgtggttgtccctcagtgtgtgtgtcctcatctcctcccacaaggacactaggcagatgggataagggcccaccctagtgacctgatttcaatttaattacctctttgcctgtctccaaacacagtcagattctgagtttctgagggttaggacttcaacattggagtttgaagaggtcacaactcaagctcagcccgtaacaccaagtcctggaatatttccagccacagacaggcacagagtgctggtccacagcaccccatggatgaaccttgaaaatgtcatgctgagtgaaagaagccagccacaaaggccacacggtctatgattccattgatagaaaatggctagaacaggcaaacccaggcaggcagaaagcagaatagtggctgccaggggctggggagggaaaagtgggaagatatcactgatgggtgatggatgtggggtttgggagttatgtctggggatggtcgcacaactttgtgaatatactaaaattcactcacccatacacttttttttttctttttctttggagacagggtctcactctgttgcccaggctggggtgcagtggctcagtctcggctcactgcaccctctgcctcccagattcaagcgattctcctgcttcagcctccacctccctagtagctgggattataggcacctgtctaatttttgtatttttagtagagatggggtttcaccatgttggccaggctggtctcgacctcctgacctcaggtgatcactggcctcagcctcccagagtgctgggattacgggcgtgagccactgtgcctggcctgaaccatatatttttaacagagtgaatgttatactatgtaaatgacatctcagttagaaaaatccttatgggaaaatatttcctgactaaaaaaagtgttctagattaccactcaaaaaggaactcaaaccctctgaacttctgatggggctaactctctctagtgtggattgttgggagtacaaatcattccaaaagtttaaagaaaaatgcagcatcttacacagtgaacagtgctactgtatcacattcatacaagttgatgtgcctggtttactctgttatcccatttgacttgtaaacactttctacacatggcaatactttcgacacatgaatatgtgatgtattgttaattccagaaagtgttcatgctcatttctaatgggcatgcagttgagggcaaggagtgtattatggtacaatttctttggtaaaactaaaattggattcacaaaacttcatactcgagtacgtttttaagaaggggtcttggccgggcacggtggctcacgcctgtaatcccagcactttgggaggccgaggcaggtggatcatgaggtcaggaaattgagaccatcctggctaacacggtgaaaccccgtctctactaaaaatacaaaaaaattagccgggcgtggtggcgggtacctgtagtcccagctacttgggaggctgaggcagaagaatggcgtgaacccgggaggcagagcttgcagtgagctgagatcacgccactgcactccagcctgggtgacagagcgagactctgtcacaaacaaacaaatgaaaaaaaagggtcttactcgaagtttctgcgtatgtgggttcctggcatcgtacctggctctgcactccccttcctgagatgactaaggaaaattatcttcagatctggttttgtgtgtgtgtgtgtgtgtgtgtgtgtgtgtgtgtgtgtgtgtgtgtaatccctggatatttttagtttaccagttagatttgatttgataccactttttcttgccatttatattttcagaaaatttagaatggtattgtgtttagaaaaatgtgcaagattatttttgtaaaataatttagagggttttttttcctgctataggccataaaattttgagtagaaaaatccagaaatttgaaaatcagtatcgtggtagagagctgccaggctttgtgaattacaggacatttgagacaatcgtgaaacagcaaatcaaggcactggaagagccggctgtggatatgctacacaccgtgacgggtgagtgctcagtttcacctctgagcattgatttctaaagaaaggaaaggttcgaaccaaagccagcaccaaacttcagcactttcctcctggggtgcatcccacaccaacgagcaaacctctcattctccagatgccaagttggtattcaacaattcaattcaattctgacactaactaccctcagtcagtgtggaccccatagcttaagggctcagttccacaacactggccccaactacaaatgccggtcacaagtcccagacctcctattcttctgatggactgtttataaatcaaggttcttgcgacccattcctcaggtcaaccaagaactctggaacacacttcactgacatttactggtctattagaaaggatttgataaggggcacaaatgaagctgttggagaggcacatagtgggggcctgaacacagaagcttctgtccccacggggttgggggcaccaccctcatggcacagagatgtggtcatcaaccagggagctcttggaacctcaccacggagaaggttttatggaggcctcatcatgaaggcatgatggaggattgactcaatctccaggccctccctcctctgtggagctggaagttctaagtttctagccaaggcttggtctttctagtgcccggccccaatcctgaagctatgtaggggcccaccaggcatcatctcttcaaaacacgagatactcctaaggctggacattccaagagatgtaggggctctatgttaggaaatggggacaaagacaaaatatttatatttttcctatcacaccacacctcccccctgctccactgctatgctggcttcacactcaaaatcggctgtttatttgaaatctccgaggagtaaagccaatggttccataactgcacgtgtagatgtgtttggaaccttttggagtgctgtaggaatctaggtgtgtcacggataggtaggaaactagatcctactgtggatccactcccttcttgaaatgctttgctttcttggttttccaggtattaaatctctattcttcatcctctccttgactgacagtatccttactcacacttcagctgcctcatcttagcagtaattaataatcactcatggatccatgaactaaggagctggagatagcctcagaacagctcattcagaggtgtatttccagtaaaattgacctttttgccctgataatcatataccaaaacctgcaatcatgttgttttggtccattgtagactcttaactcattccagaggaaagtttataatacttagagccttatagtcataaaaatcaacatagatatacctatttctttttcagaaatgtatgacatggagatcaataagaggttttcaatcataaagatactataccttgtattacaataaaattctgtgaggaagtagaatagaaatgagtttcaaaaataaaagataaataatataaattttttaatctaagagcttgttcttgtatttttttcaaatggataatgtagacactcaaattccattgatatatttaagagtgatttgacttatattaagagttgtattataaaatattaatatttataatttaaaagaaattacattctttgcagctatttaggataaaaagtttaaatatcaaataaatgtatgccaggggtcatttgcttttaagattcttccagcaaattattaagcaaaaagagcatgccttgctttttcatggtaaagagaagaagggagcggggagaggggaaactttacttcataccatttgatcctcatatttttttgcatcttaagaagagaacaaatgatcctaccaatattgaactatttttctctctttgattagatatggtccggcttgctttcacagatgtttcgataaaaaattttgaagagttttttaacctccacagaaccgccaaggtaaaaccaaccatgtgttgtttaaaaaaaaaaaagaaaagaaattaagcttgacactagaaaatagatttcttggatgaggattatttcaactttattgtatacttttagaacagcaaataacatcactcactagtgcttcttctgatgttaccggtgatgtctggttaaaagcaataaaggagggagtgcttaaacgcacagaacaagagatccacagttagcggagaagattatcacatctaagggcaatggctccaaatccagaaactcactgaggaaactacatataaaaatagaatatttctggcccgagtgggcatgatgagcctgtaatcccagcactttgggaggctgaggccggtagatgacttaaagccaggagtttgagaccagcctggcccacatggcaaaaccccatctctactaaaaatacaaaaaagtagctggacgtggtggtgcatgcctgtaatcccagctacttgggaggctgacactttagaattgattgagcccaggaggtggaagttgcagtgagccaacattgcatcactgcactctagcctaggcgatggagcgagaccctgtctcaaaaaaaaaaaaaaaaacaaacaaaaaaactttccatccagagtgaggaaagagcctacaggaaatgagcctgggggacagactgggccaagagaccagacttagccactcttagaaataggtgtccccggcacagatgaggagcctggccccatgattcaccagctggaggccttgggatgtgccacttccagcctgtgcccctgactcctcattcataaaagaagactgataaggccttcctcagaaggttgagatggacgtggagtaagatgtttaggatgcacctgccactgtgcactgtgcctctcctcaaggcctggagggtccaggggtgaagtttctcctcctcaggttttggcaaccagtttctctaaaccccgggaacataaaacataattttctgacttaaacatggctttcctgctcatccctgtggattatctgatggatatgacaatcctcgccatcagatatagaagcccctaaaagagaaaggaaagaagctgagttacggggcctgaaagcaagcctgtgcaggtccccaggccccgggatgggggtccggcccatctgtggctcaagcctcctgggaagctctgaccctcagccagggctagaaacctgccttagatacaccagggcgcggcccagagggctgttccaggaaacgtgctgtttcactcacgttgggtaacctggtatttacggacttcttacctactttcctgtgactcaggaatttgtgtcttgagggaaactgtatttatttattttttactgtagtccaaaattgaagacattagagcagaacaagagagagaaggtgagaagctgatccgcctccacttccagatggaacagattgtctactgccaggaccaggtatacaggggtgcattgcagaaggtcagagagaaggagctggaagaagaaaagaagaagaaatcctgggattttggggctttccaatccagctcggcaacagactcttccatggaggagatctttcagcacctgatggcctatcaccaggtacgtcttcgcgtggttcaggatgccagcttccattctttccttttcttctgaacgcctctctctttagtcttgctttctctgtaggtgacgttggtcagctctgtcgtttacctccttgttagcctcctgtattagtccattttcatgctgctgataaagacatacctgagactgggcaatttacaaaagaaagaggtttaacggacttacagttccacatggctggggaggccttctaccatcacggcagaaggcaatgggcacttcttacctggcggcggtggcaagagagagaatgagagccaagtgaaaggggtttccccttatcaaaccatcagatctcatgagacttactcactaccatgagaacagtattggagaaactgcccccatgattcagttatctccccctgagtccctcccacaacatgtgggaattatgggagtacaattcaagatgagatttgggtggggacacagagccaaaccatatcgccttcgtagaagcagctcaacctcagacagagagatggtggcttagagccagtgacatctggttttgatggctgtctagctctggccaagttacttaacctctctgagcctcagctttctttgtaaaatggtgtctcctcatagattctagtgcatattccaggagacgagtgtggatgatgataatggattgctaatggaaaaaccaaactctgttaaaatatttgaaagaggtttattctgagccaaatatgagggaccatggctctgggaacagtctcaggaggtcctgaggaagtgtgcctgaggctgtcaggatgcagtttgattttatacatttcagagaggcaggaattgtaggtaaaatcataaatcaatacatgggaggtgtacttgccctccctaaagaggcaggacaccttgaaggagggggagcttaccagtcataggtgggttcagagattttctggttgacgattgcttgaaagagttaaactttgtctacaaacttgacatcaatagaaagaaatgcctgagttaagggcagtgttagaggccaaaggtatgtagatgaagactctgggtagcagccttcagagagaataaatggtaaatgtttcttttcaggccttagaggcagcaggctctcagttaatctctcctagattcagggaaggcctagaaggggagaggtctgactgcattaatggagattctctacaggtgcaaattccccccccacaaaacatggcagggccatttcaatctgttggtcctgttacagccgtttcaaaatatgtccacaaaatatatttttaggtaaaatatttgtatttcctttagggtctgcaatctgtcttgtgatgctataccagagtcgggttggaaagtaagccattttatactgagttcatggaaactcatccaaggagatttcatggtttgtggggtgtgtgtgacttaacccctgcctcacatgactttataatatggtatcttactactccagagtctttttggccaaccttatgatctcaatttcaacctaaactccaaaagggcctggcttctcttcctgttacggccaggaattcagattttcaggtttctctggggtccacttggccaagagggggtctgttgagttggctggaaggcataggattttatttctggtttacaacaatttccttagtgcagcattggaatgcaatggtagcagactaaatggaagctatcgcgtagacacatgctttgattgatactgcacgattcagttaacctgaagtacaatctaattcatcctagggaaggaggcagtgaacacagacacaactcaggtagagcccttgggatgtgtaaacacctgaggaggtaaagcaaattgtaatctctcggtttatcagatgtccccattgccttactatttggatgctttaaagcagggcctctcaaactccacccagcacggaggcctcctgggatcttgtggaaatgcagatgctgattgcaggtcaggatgaagctgagattctgcctttcttttttttttttttttgaaaccgagtctcactccattacccaggctggagtgcagtggcacaatctcagctcactgcaacctctacatcctgggttcaagcaattcacctgcctcagcctcccaagtagctgggattacaggcttaccttgccaccatgcctagctattttttctatttttagtagagatggacttttaccatgttggccaggctggtcttgaactcctgacctcaagtgatctgcctgcctcggcctcccaaagtgctgggattacaggcgtgagccaccatgcccggcctctgcatttctaacgggctctcaggggtcaccatactactggatagaggccacacttggaggagcaaggctctaaaccgagggtcaacatccattcctccagacactgggagctgcatgcacgtgagtgaagccagttaaggggaagacaggcatgcacatcagcttctcctgcagccaagctcacacctgtctgctgcttccactgcctcctagaatgaacagttaccttgagagtaggtgaggcatatacatgcacagaatccaaacaataggatgagtgacaatggcagaggagtctccgagccaagcagctccctggacagaagcagcccttctccgcgttcatttctgtcctccgaggctgactcatgcactcaaaagctcccatgcatatacattttataatggtttttacacaaaggttagcagaggagtggacgtgctgctctgtaccctgcctcttttgctgtacctgggagattgttctgcctcagttctgatggggctgccttgttcttttcaatggctgctgagtatcccattttatggatgtggtatattgagccagctccctttaagcgaacagtttgtttgcagtcttttgctaatgcaggtgtgttgctgtgaataggtttgtttgtatatcatgtatctggaagcatcaattcctagaaatgagattcctggtatattaggattgtgcagggaaacagaaccacagatatatgtatgtaaagaagtatatttcagccaggcatggtggctcatgcctgtaatcccggcactctggaaggctgaggtgggtggatctcttgaggccaggagtttgagaccagcctggccaacatggcgaaacccggtctctactaaaaatacaaaaaaattagctgtgcatggtggcccatgcctatagtcccagctacttgggaagctgagatatgagaattgctcgaacctgggaggcagaggttgcagtgagccaagatcacaccactgcactccagcctgggtgacagagcgagactccatctcaaaacaaacaaacaaacaaaaaacaaaacaaaacaaaaaacagaaggaaagaaagaaatatatgtatatttcaaggaattggcttctgccattttgggagctggcaagtccaaaatcccagggcaggccagcagggagagcaggccagaaattgcagcaggagctaaggctgagtccacaggcagcatttcttctttttagggaaacctcatttttcttcttaagaccctcaactgattggatgaggcccatccacatcattgagaatggtctccttcacttaaagtcagtgggttacacatgttacccacatctacagaatacctccgcagcaatacctagattcgtgtttgatggaatcactggggactcgagcctagccaagctaacacatgaaacacaccatcacagctggggaaaggatggcttattttagactgataaagatgacccagagaaggcctgctccatccacactggccgctttagtctgcactaaagttgttggttttttttgtttgtttggtttttttttggtgacagagtctcactctgtcgcccaggctggagtgcagtggcgcagtctcagctcactgcaacctctgcatcctgagatcaagcgattctcctgcctcagcctcctgagtagctgggactacaggcacgtgccaccacactcggctaatttttgttttttcagtagagacggggtttcaccatattggccaggctggtcttgaacgcctgaccatgtgatccatccgcctcagtctaccaaagtgctgggtttacaggcgtgagccaccacgcccggccttgttggggttttttgacagcctaataggtgaaaatgacatctcattacaatcttaattggcattctcttatgacaacaagctggtacatctttttgtgtgttgagggttatttctatttcttgctcagcaaacagttcatccaggaagagcttcttggtgagatagtagacctctgcgatttctgttgcagacgatctacattttgtcatttgctttgtcatttttgtctatggtggttttagactatgcgtaagttttctagagcagaaactcaagttggatttgggcctcagtggttattgccatactttaaaaggactttgtctccctgagatgataaatgaggtggacaatattttctttaagtaatttcttattttaactgttacatgatacctttggcccatttggagttctttgatgtcaagaatgaggcaggatccagatggcagcagaggtcccagtcccatcctggaagggtcgtctagttcccactggtactccacacgcccactcaggcactcacttcccctctgcgttgggtcttgtctgcaagactctcttatgttttaccatctagtgcagccagcacccccacatcaccctcactttttctttctttaaattgtgcagaaatattcatcatgtctattttgccatcttaaccatttgggggtacatagttcagtggcattaagtacattcatattgtgccagcatcaccagcagccacctccaggaccctatcaccttcccacactgaaactctgtccccattaaacacattccccattccccgcccctgaatccctgacagctaccatcctactgtctgtctctgtgaattcaactaacctgagtacctcataggagttgtgactggcttgtttcatgcagtatgatgtcctcatccaggtggtagcaagtgtcagagtttcacgcctatttatttattattatgagacagagtcttgctctgtcgcccagcctggagtacaatggcgcgatcccagctcactgcagcctccccctgcctgggttcaaacaattctcctgcctcagcctcccatggtgtgccgccacacctggctattttttgtatttttagtagagacgcggtttcaccacgttgaccaggctggtctggaaatgcagtttttgcactgtctgcctgcttacctttatagagcatattttgccctcttccatcagaattacccatttaatggtcaggaaaagctgctgggaatatgactcatagctgggacattctctgcactgtgcatagttcctctctgccaccaccatggaggagattgatgggtttgaaacccaggggaaggtcattgccctgcgagggtctccctcattgagaatctggatcccctcatgtgcacatggtgaggtcagagtcccctcctcacagtgtcccctccaccctcccgtgaactgttctttccttccaggaggccagcaagcgcatctccagccacatccctttgatcatccagttcttcatgctccagacgtacggccagcagcttcagaaggccatgctgcagctcctgcaggacaaggacacctacagctggctcctgaaggagcggagcgacaccagcgacaagcggaagttcctgaaggagcggcttgcacggctgacgcaggctcggcgccggcttgcccagttccccggttaaccacactctgtccagccccgtagacgtgcacgcacactgtctgcccccgttcccgggtagccactggactgacgacttgagtgctcagtagtcagactggatagtccgtctctgcttatccgttagccgtggtgatttagcaggaagctgtgagagcagtttggtttctagcatgaagacagagccccaccctcagatgcacatgagctggcgggattgaaggatgctgtcttcgtactgggaaagggattttcagccctcagaatcgctccaccttgcagctctccccttctctgtattcctagaaactgacacatgctgaacatcacagcttatttcctcatttttataatgtcccttcacaaacccagtgttttaggagcatgagtgccgtgtgtgtgcgtcctgtcggagccctgtctcctctctctgtaataaactcatttctagcagacact

SEQ ID NO: 8514 - DNA, 401 bp, Homo sapiens
tttgtgtgagcaacatggctgtgtatttcacctgggtgcaggcgggctgagtccgaaaagagagtcagcgaagggagataggggtggggccgttttataggatttgggaaggtaatggaaaattacagtcaaagggggttgttctctggtgggcaggggtgaatctcacaaagtacattctcaagggtggggagaattacaaataaccttcttaagggtggggaagattacaaagtacattgatcagttagggtggggcaggaacaaatcacaatggtggaatgtcatcagttaaggctgtttttacttcttttgtggatcttcagttactttaggccatctggatgtatacctgcaagtcacaggggatgcgatggcctggcctgggatgcgatggcctg

SEQ ID NO: 8515 - DNA, 401 bp, Homo sapiens; identical to SEQ ID NO: 8514

SEQ ID NO: 8516 - DNA, 401 bp, Homo sapiens; identical to SEQ ID NO: 8514

SEQ ID NO: 8517 - DNA, 597 bp, Homo sapiens
tatgctagtactttaaaaggaaataagggaaaagccggtcttaactatatagatttttttttaacataaatggctgctatttggcactttgctttttgcacttacctagatgtcctggacatctctccacgtccacttatagacaactgcccaggtgttttcctggctgcagagatgatgtggactgaattcatttggccaatccccaggcaatggccacttaggttatttcccaagttttgacaccacaaacaaagctgcagcgagtgaatcagcttgtctgggctcgtgtgtctgtgaaaactatgtggcaacactgaaacagattgcacacccaaagcctgacttctggctcctcttgggaatcagaagctctgcctccctggcccacacgccatacttttagaagccccactgccccagagccctatttgtccatgaattcctgactcattgtctggagcctgcttgagggaggctgggcagggtgtgagccaccaggattaaaggttgtttgtagcctctgcctccaaatagttacctgcaaaaggggacaagtgaagccacaaagattctactttaaaaaaagaaaaagaa

SEQ ID NO: 8518 - DNA, 597 bp, Homo sapiens; identical to SEQ ID NO: 8517

SEQ ID NO: 8519 - DNA, 110 bp, Homo sapiens
gctactcgggaggctgaggcaggagaatcgattgaacctgggaggtggaggttgcagtgagccgagatggcaccactgcactccagcctgggtgatagagtgagactctg

SEQ ID NO: 8520 - DNA, 110 bp, Homo sapiens; identical to SEQ ID NO: 8519

SEQ ID NO: 8521 - DNA, 583 bp, Homo sapiens
  SITE (136): n equals a,t,g, or c
  SITE (356): n equals a,t,g, or c
  SITE (511): n equals a,t,g, or c
  SITE (571): n equals a,t,g, or c
tggtggatgcctgtagtcccagctactagggaggccaaggcaggagaatcgcttgaatctgggaggtggaggttgcagtgagccgagatcacaccactgcaccccagcctgggcaacgagtgaaacttcctctcanaaaaaaaaacactgcactgagaggcagaagacctaatctcctgaacctctgtgtatctcagtgtcatcatggacatgatgagactggataagcctcagagcctctggggaaggctgtttgcaaacatgaccacagtttctcccatccctataagttgcctctttgcagcttgacattgctgcttctcttgtcaagaagtggagatttttttcccctctcncttgaatctgggctagctctgtaacttgctttgaccaatagacagaagtgacctgatgtgacttttgagtctaagccttaattgcctccactgtcaccgtcttggagcgatagtgtagccctgtgaagaagcctgggctggcttccttgaggatnaaaagaccaggtgccacagaaaggcagtcatgtgagtcagccccaggcaaaaccagcagnaaaaaaaaaaaa

SEQ ID NO: 8522 - DNA, 531 bp, Homo sapiens
  SITE (41): n equals a,t,g, or c
  SITE (124): n equals a,t,g, or c
  SITE (134): n equals a,t,g, or c
  SITE (181): n equals a,t,g, or c
  SITE (194): n equals a,t,g, or c
  SITE (294): n equals a,t,g, or c
  SITE (474): n equals a,t,g, or c
cccccaaaaaaacctcataaacaaaaattagatgtaaatgngacaaaatgagggaatatctctagcaactatacagctcttaaaatcaacttttaaaaatatgcatagcggccaggcacagtgngctcacaccntataatcccagcactttggaaggctgaggcaggaggattacttgagncccacgagttagnagaccacccggggcaacatggctaaactctgtgtctacaaaaatacaaaaattagctgagcgtggtggtgcgcgcttgtggtctcagctacccgggagtnctgaggtgggacagcggctcgggcccaggaggtcgaggccgccgtgagctgagatcaccccattgcaacagagtgagaccctgtctaaaaaatagcaagataaaaataaaaacatgcataatgatgaaaatctaaagccgggttgtggtactgtttgcccaatcttacaaatttcccccncaaaaaagcactgaatcgtacacttaagtgaattttacggtagatggattctatctc

SEQ ID NO: 8523 - DNA, 225 bp, Homo sapiens
  SITE (26): n equals a,t,g, or c
ggtgaaaccccgtctctactaaaaantacaaaaaaaaaaaaaaaattagcctggtgtggtggtgggcgcctgtagtcccagctacttgggaggctgaggcaggagactggcgtgaacctgggaggcggaggttgcagtgagccaagatcacaccactgtactccagcctgggtgacagagcaaaactccatctcaaaaaaaaaaaaaaaaaaaaaaaaaaaaaaa

SEQ ID NO: 8524 - DNA, 21710 bp, Homo sapiens
gatggtctgcgagcagccggaggtctttgcttccgcctgtgccctggcccgggccttcccgctgttcacccaccgctcaggtgcctctcggcgcttggagaagaagacggtcaccgtggagtttttcctggtgggacaagacaacgggccggtggaggtgtccacattgcaggtgggtgtctggaagggcagacactgcccctgggcccgggcaagatcgggcaggtgggagggaggtcgggagagggaaaagcttgttgcgggggcaggagggggttcctgcccttcccaggagctttggttcctgggaagcggcagaggcttttccaaacccaggccccctgcctctgcctcagcgtggtctgtgacttcaggattctgttgtatacaggcagtgtttgttgagcacgtaatcagtgccaggaacgtccatgctgttttccaaataaccctgcccgtttatgtgagctccgtgtgcacgtgtgtgatgtatgcacgtgtgtgtgtatgtgcgtgcacatgtgtgttgctgtgcgtgtatgagtgtatgtgcatgtgttgtatgtgtggggggtgtgtgtgtgcatgtgtgatgtgtgttgcgtgtgtatgagtgctggtgtgtgcatgaatggtgtgtgtggtgtgtttatgtgtggtgtgtgttgctgtgtgagtgctggtgtgtgcatgagtggcgtgtgtgtggtgtgtgttgctgtgtgtgtatgagtgctgatgtgtgcatgagtggtgtgtgtgtggtatgtgttgctgtgtatgtttgctggtgtgtgcatgagtggtgtgtgtggtgtacgtgtggtatgtgttgctgtgtgtgtgtgtttgctggtgtgtgcatgagtggtgtgtgtgtgtggtgtgcatgtgtggtgtgtgcatgtgtggtgtgtgttgttgtgtgtgagtactggtgtgtgcatgagcagcatgtgttgctgtgtgtatgagtgctggtgtgtgcatgagtggtgtgtgtgtgtgttgtgtgtgttgctgtgtgtgtatgagtgctagtgtgtgcatgagtggtgtgtgtgtggtgtgtgtgcatgtgtgttgctgcaccctttacagggagcacttctacatgtgttatttcactcaatgctgagaatgatccttttgaggctgcaaggccggaagtgatttcccagctccagatccttggatgggcctgacatcaggctcctgtccccacggcagcggtcccagcctctgcgcctgccacctccagtccccgagcccacagcgccacccaggttgtcttttctcatgtgtcagcgctcattcttcacttctggctctggaaggctgtcgccttcacccaggcaagctctcccacatcagcacttgggccacacctcatttctttcactgtgtgctctctgaggcctgtaaccactgcccctcaacccaaattcttccatcttcaccagcatgagatagctccccttttttcccttcgtctctgagcttttaaaaaagtctaactggtttgccttgcttaatcctcttttccctcttaacccatggagacagagtttttgcccccatcctgacattgttttctaaggactgctggatggggtgttgccgtccctccttgaagtgcatctgccccatccagaggtctccctccctcccgctgctccccagactgctgccacctctcggcatccccttcatggcctctccagcgttccgacctgctcagccctctccgggtcagacaccagcatctgcctcttctctctgtctttagggattttcttctgacttccaggcctgccatccaggtgggcacgggtgcccgcagagcccaccgggggctcaagcatcacccttatttccgaggacagcagggcaccctgacctctgctgccctcagtcccttcccctcctgtggacttcctgctgtcccttagactggccacgcccactcctgctcttgctcctctgcaggggtccttccctctccagcccagcatggtctccatccagcctctgcccacattccctccccagggaggcctggccctcttggctagcaccaccctcccatttgtcagctaaaccatcactactagacatgtcacatctttgttgatctcctgtgctcctcactgggttgggagtccccagagggcagggacctggtcttgtgcacagtgatcccagcacccgaccccacacatgaaaaaggcccagtaaacatctggtgatggaaccagtgggggcagtcagtccccatggcccccgaccccattggtcccaactagctagtgtgtcctgtttcttgtctttgctctgcccagtgccgtgccttgaggtgctctcctgggctgtggcagcagtctcctggtcaccctgccacagatggcctccttccagctcctgcgtcactcgccttccaaaggcacatctgggtgtgtgcaaggtggcatcttctgagtgctgtcagctgtcaggccctgcgctgaggcaggagtgtgcacacagcacgtgctggtgcactgaattctcactacagccctgtgagatacatcctgttgtccccacgacattgagtggctcaccggggccacggcagcaaggggcagagccaggtgttaagctgcagctgccaccactcagccctcttgggtcctgagcacaccatcatctgacacccacgtggcctgtactcagcttctcccttttcttccctgcgggaaccttccagtccccacccaggaccctgtcccctctgcatcctgtggcctcatcctcttctgtagcagggactgggactgtgtactgtgagtctctgctgagcttgactcccttggacgtctctgaattctcagagtcttgcacgatgcctggcacatgtggacagaatgagtggtcctcctctcatggtaagggacacccttccccagtgcagcatggctgtgtgttggtggagggcacccgcagccctgccctccctcccacaggagcgctcttgcgtcagagccccgagctcgccgtggtctggggtcttccaggtgacacctggcctccttggaggcaagtcacacagcattgacgcacttctcagacagtccttgtcgagtccccacatgccctcacagacagagaacccgctgacaggcggcagggacggctcaggcacattcatatcagagctgtcaaggtccaggtttctacctttgaggctttggggtttaattacctcggcagggcgggggaggtggccaggctgcagtatcgacccggcgcctgctgccctgacattatgagactagaggcagggatgataaacttgctgctgtcctgcacccccgcaaaacagcgctgctcttctcttaatattgtctttctggtgagcaagggaggccgtgcaagcagccagctgtctgaagcttctgtgcctggggatgcacagtggggaacagggtggggaaggggtgcccgcagattcagctgagagagagtgaagctcccagggcagatgtgagacacacatgagaaggcaaagaatggcccaagccagggctgaaggacacatttttgggacccacgtgatgtgtgctttggtgcatgtgcccctctctgccctgccttcgagtgtgggctctgaagccctgccaggccagcagggcccatgttttcagttcctgggtggacacgtcagttccatgaggcgagacctccctctgtgtccttcccctccgtgcccagaaccgtgctgtgtcaagtgacagcactagggcagccagacccccatctgtcttgcagggtttatgagggacttgcgtgggactcatgaggaaagcaacggcccagagggaaggcgtctgggagggccagcaggttcaagcactcaggatgtagagtgcttctgcttggtggggaggatctggaaaagctactggtagatacggcctatgagaagtgcctcgaaggatgactgggatcttggtgggagggaaaggactgtgggatctgcagaggtgaggcgtgggaagctcagggcatactcaggggctggcatgagggccacctaccttcagttgtagctggaatcaggggagaaacaggacacagggcttggaaaagatccagatacagaagggcaggaccccaggctggggactcctgtatatttgtggaggcgcagggtggtggctgtgctgaaggttctttctacaggtggccggtggccctgggttgctgggggtggggcaggcagcgagagccatggtccccctctcccctctctttgctgccctgtcagtagccctgtgggtgatgtttgcctctgctgccttttgttcctgggggatggacaaggggagaacatctgcctcccacctggtccccagtgatggcctttttctccctagtgcttagcgaatgccacagacggcgtgcggctagcagcccgcatcgtggacacaccctgcaatgagatgaacaccgacaccttcctcgaggtttgtggcgtcatcaggccgggggtgggaccaggctggggtgggtgtcatagactcccaggagagccagaggaaacctggggctgtccacaccctgacgtggccagggaacctcagggctgccctcggcggagcgctgctgtctgccgggctccaggaagcctcaggaaagggtgtgtggggaggacagagcctcctcttcaaggccccttggcaggaccacagccagagctacaggaaatgagagtgtgtggagggtgagccccctcttctgggtttcatcacacgcgaagctggctcccaagcccggctccccgacgcggcacaggcagcggttcatccctggccccagcctcggcctctcctgtttccagccatcttcatgtgttgttgtgctgttgttttttccatgaacatgtccaggagattaacaaagttggaaaggagctggggatcatcccaaccatcatccgggatgaggaactgaagacgagaggatttggaggtgggtgggggctgcatccctgcagctcttggcctcgggcagtggccaggggcacttgggtggcagggggtcggcgggccacatggcacattgtcccaaacttcatcctgcttgtgacctgaaaggaatcagcctgtgtccaagcccagtgccggaccctgggaagcagccgtccctgggggagaaggggaggcaatccagattctgatttggattctggaagctgctagatccaagtccttccctgcctgcagcctctccagcgtcctcgcgtgctgcacacccttactcctgggactggctcagcagggcctttctgttccttgaatacacaagttcccatcacggcaggcagggcctgtgtgcggatggctctccctatctggaatactttcccccaagatatatttttggtggaggccatctcaaccaatgccccctcctcagagaggccttccccaagtccccagacccacctttccccactgcccaggaaccagaggggcagataagtatgactcagctgccccgtggtgcttgtagactggcaagaggaaggcggctgtctgtgttatgtgtggctacaaaacaaatcactcggaagatagcagctgaatgcagcaacacttatcccctccccgtgctgtgggttggggatcttcccctggtgcagcgtctctgcctgctgttgtcaggttgttggctggggctgcagtcatctgagggcttgcctggggctggcgatgtgcttccgggcaggctcacaacaggctgctggcaggtctcagggcctcacaggccattagctggaggcagcaggtccttgctgtttgagccaccctccgagcaaggtctctgagcgagagatagggataaagagcgagcaaacaagatggaaactcccatctttttctgtgacctaatcccaggagtgatatctcatcacttctacctttttcttttggttagaggtgagacatcaggacctgctcacatgagggggagggactgcacaaggacatgaatacccagacgtgggggccacaggggccatcctggtggtgtctacctagacaggagccatttacaagtggagggagaggccgcttgtgtcaggaaaagcttcacagaggaggtggcatttgctgtggatcttacaggatgagttggagtttgtcaggcagccatgattagctctcgtcattgttgctatgattgtttgactcaattattgcaggactttgagccatagactctgcacacgcacaggccacagctttcttgagaagatgtgtcatgtaaaccaaagaggcagtggtgcagggactgtgggagcgagtgtgaaagggcggtgcagtccctgagtgctcaaaggattcaggaagtggggacgagcatgggctggggcagccttgaggtgttatccaaacatcgtttcattctgcaatcctgttcttttctttctggaaaggatacaatatttttttcccttagtgggttttcttgcttaacaaacaacactttgcatagaatttgtttgcaatctcagacattggagctaatttgcattccccaatcccacactggccaggggcaggagaaggggcagggagcaccaggctcaggcaggcggctctccaggagaaacaccagccggccagagtttccaggggcctctgggagttccccgctcagctcagcccgagcctaacccagttctccccacgctttccataggaatctatggggttggcaaagccgccctgcatcccccagccctggccgtcctcagccacaccccagatggagccacgcagaccatcgcctgggtgggcaaaggcatcgtctatgacactggaggcctcagcatcaaagggaaggtgaggtgcgggctggctctcagggtgccctgggggaggggaggggaaggtgaggtgcagggcccggctctcccgggtgccctggggtggggtggggtggggtggggaggggaaggtgaggtgtgggcccggctctccagggtgccctggggttggggtggggtggggtggggaggggaaggtgaggtgccggcaggctctccagggtgccctgggggggggggaggggcccagtttgggtccagccagccctctgagaggtgtcatggggtggggggcggcgaggtttctgggggttctgggttggggtgggttcggggagagtgcgcagggcgggttcccatgtgctgaggcgacagcttcacgtggctccctgggtttcatgcccacccttcagaagggtctggaaacaaaagcctggccagggcccaagagcagccccggaaatgacggaagaaatggcaagcagggccagggaggcagggcttgctgcttgggggctttgtcccgagaagagaagggcaaggggacgcctgtgtctctgagtctgcccatggtccccactgagaaaacgctcagagtggccacacaagaccctccaaaggcacgtgacccccaagagcgaggggaatctgggcacggcacagaagcgagtcacccgggaacatcccggtgcggtggccctagaagcctgtcccgtggtacggctttctgtcctgccatcccaggaggacaggtgcttgtggagcccccgtcgtggccgagtctgcccgccccagcaagccctgccctcctccgcaccatctccatccattcatcctacacaccgtgtgagcagcctctgtgctcaggcctgggctgggaaggacagggagggagcagactgggaagtacatacctcaggaggtctggaaggagcagggagtgcatccgcagcagacactgcaaactagcagcctgcaaggctcacggaggcctggcatttttaaaatttgaattagctaccaatatttgaaaccaggaaggattctcatcaaagcctggatttccggccttttgtgcactcagaaggtctgccagtgctggcgttctgttcccgcctggcagcattcccctgcagccagtgggcctgcccctggtgtcacccattctccagtttggtttgcggtaggccccaccacttgctgctgccttcctgacactgagccctagtgtcagctgctgttcagggtggcgctggtgcagctcgccgcgctctctagcacgcctagtttatttcatacctggagaggatgagcagttcccatccctcctctaaaccacaaaactgtttagaactaagcagaaaatgacactaatcataaaaagggttttttgtttttttttaatagaaaaaacatgcctccctatgggtctcttggggtaatagatggtggaatgaatgtttgtttctggctttgggtcttagcatctacacgtttgacaatggtttcatttaaattgatcttctttactaatgtatgttcagtaggcagagttgccagctgtcttcactcatagttggtccaagaatactatctgttaactttgattttgaagagctccaatctcgtgaggcaacagatacacagatacttaggaaaagtctttaatacggtatcatttggcagagattcttaaaaatcccatttcacagtaaattccagcaatcacaacacccactgtgtgttcagttcttcagggtggattcttgtggctttcagatgtctgcagaacaaaagcattttggacacagtaactccaagtgttcacatggaatgagggaagtgaaggaacgcaggttccgcgtcttcgttttgaccatcccgcactctcgtgttttattttgggtcctctgtttcgacaccgggaggtaggaaatcatgggccctggaggccccgactgtgcccagagccagcccacaggatctgactgtcagagcgattctcagaaggaatgtgggtagtagattttgtgtcgggtcattgctaacgtccatgtaatgttactttcaggataagtaacaacgatatgcgaatttgaagcttttgtttgtgtgattaaaacgcaaccgtagccacagcaattttttaaacttcaatcaacaacagattttcggaggaggaatatgttattgctgactttgttcagagataccggcacacggtggtaataagcaaactgacttctagtcggttatgattcctaaattcgccacagatagtgcaccccctactgcctgcacctggtactggctgctcccaccctcgcacgcaccctcaatacccacggtcaccctggaagccgctacattctggctggtagagtcgtggaccctcttctccttggatcagatgcttgtttttgatgtcggcttgttgtggaccaatgtgagaagatgagcttcctgggaattcattcgtttgcttgtggcactaactctagtcacttagggaaaatatcgttgcacctgacttcatctcatgtggctgtgggtagacctgtgcagttagtcagctcccggcctggaaattaacacaaaggaaaaacctgaccacacaggccttccctagaggccacagctgcacagccttcagggaagctgtggtctgagggtggctggtagaactgccagagagtagggcattttccatggctccagatcaccttctgaaaatgcgactatagcccctgcctattcccggggtccacctggtctgcagaccccataataccaggaagagctgggtgttctggcaccagtgaaacaatacctggttttttattttaaaccagcccatcttccccgctgcagttggaaccgttctacgtggatttgggatcaaccagcaggcctttcctgagctgttactgtgtggagtgggcgctgaggctccagccattgatgcaaagaccccaatcctgacctgaaggcgctcacaatctctccccaacggcctggtgtgaaacgcagacgcaacgcagcaggcattctccccagtggctgcctgtagagcaaatggtgcagaaatggtcactcctcaaaaagcaagccggctggagccagcccagctcccagttttgcaagaaaaaaaaaatcacagctccattttcaaagatttcaagggcagctcaagaccagcctggactagcaggcctcaaatgcattactggagacccctttacgctcttaacaagtaccgaccccaaagaggctttttgtataacaatgtctattgatatttactctactggaaattaaaagtgagaaatttataacatgtataattcattaaaaataacatataaatccattgcatgttatcataaataattttatgaagataagcatcttccaaaatgaaaaaataatttactgagagagtagcattgttgtacattttcacaaatcctgtcagtgtctggcttaatagaagacagctagggaccttgcgtctgcttccgatgtagtctatggaaatgtgttgtttcagttgaactgtatcaagaaaatctggcctcacgcattttatagttgaaacagggaaaaggattttagtacctttttcagctaactaactatgaacattctttgctactacaccaaaactcaacaagtggtagcttcttaaaggctggttataacatggaatctgaagcctcatgaatagacttttgggctctgtggcagttaaatccgctgttctctctcactttgaacatgtggtttttcatggaaaaatgaatgttcacttgaaaaatgttggttcacagagttctgcagaaattcaaatttttgacacattacattatatagtatcaaaaaatcacttaatatcaccatccatctcatcagaaaactcattatgaggaagttgtcatggtgataggagaaagtttttcaaaattctgatttttgcttaaaagctcaaatgtataccattggcaataaataatgtcagctgtttctggaagtaagaggctcagtttgttccttttctgggaaatatctgccagatacctaaatccaattaaatgccatttgtctgtcagtttttctttcaagtaaagatggtgtcgtggccagagtggctcatggagctcagaactcccccagcaatcacagctgagcttctgctctgaccgaccactgcccgtcagcaacagcaggagtacattatgagtcacacggaatatggaaaatgtattgtacccaagggttgagagttttaaaaattaattttactgcttcagcaaggaaattctaacgtgaaattggcattggttcattttcccagagggcacggaaacgaatacagtggctcccggacctctttgggactgtggcctgatactccagcacagggggtgtaagtgtcagccccgtgaaaaaggcagagaccgtcttaaatcactgcgaaaatggtttcttctataaaaacagaaacaacatatgggggctggtgaaactttgcacaatcaatcagttgagctgtatttgcaagcccagtcctggctccacctgcaattgggaaggagctggcagctgtgacgggggagacatggtgtacagtgagcagccgtttccaggcattgctgtgtgacccattttgcacatggtttgattccagatcggaggccctgtttttccatttaaacaatcctgtgctttctcaaacagattagctcagaagagatggcttattttcagtagtacaagatgggtcattttcactcaattataaaagcagctcaatttacatctaaaaatactttgcactaaaattcaaagcttgtgtaataagataagggttcaaaaatgattcagtaaatttcatacccaaacctttacctctgaggacctgctgttaatttaaaatatgaacttgtgaatttgatttgggaacctgtaaaatgtaaaaatgtgtaacactgtcaaccagcgtataggaaacagtgtggacactgcaggagaagggtggcccctctttagacccaggttaaccaggaggtgtgaactattaaccaggaggtgtgaactagcaggagggcagaggtggccccttcttctggcgatagacctggcagtgacatgaaggagcgacaggtgtcctcactgctggtggtgtcagtgggggtggatgtgactgattttggcgaagagttcacatcaaccctcaccatcattcaaggttgtgatgaggggcagagaatgctgagcctaagtctcgttaggtggtaaagccctctaagtgccagggagaggaagctaggccctgttctggggggcgacaggtggccagggcaggtttgcattgcggcagcagcccctcaggcttcctccctgccataagcacactaggaatctgcaatgggtgcaggaagcacgcaagcccacccaggtccctgaggtgctggccagggacctccagcaagccccagaggctccctggacctcagcttccttctcacgctgtgcggaggagtggagagagtggccctgcagacagacccccaggcggcgtggcagcccgggactgaggtcagggtgcccggcgtcaaagcacggggtccctgtttcaatgtcagagcccggccacagcgaattctgcagctccgggcatctcctcgggttccccctccgtgcagttactgtttgataaccccaaagttctgtcaaaacaaaagggagcctcaccatctatggccatgactccctgttgcttctggagaacaccccacttggccaatatgaggttcatgagttctgtgggtgcccaggaggcctggtgtgggggctgcccaggcctgagagctggggaaggtggggctagcgtggggccgggtgggggtggggggcttccgctgccaggcctggacctcacagctcacctttgtcctggtccctttgtaccacccgcagactaccatgccggggatgaagcgagactgcgggggtgctgcggccgtcctgggggccttcagagccgcaatcaagcaggtgagtgggccctgcccgccctctgcaggggcatcctgggtgtgcctcgtgggtgctcccctctcccctgtccgtcccgccacaggccccaccagggtcctacccgagtctccccagcggatgcttgtcccccctctgcccccaggctcttctggggcccccagagcttcccgccttcatcagagctgctctgggaggccccgagggcaaggtgcagccatgttctctgctcagggcctgccttggctccagagccccatgagcggttggctcaatgaggaagcctggcctagaccctcatggcatgtggcaggcagaagctcatggcaggggcacacgttgttctgcgtacccctcccgcaacccttctttgcagcagagctgcctctggtgactggtctcaccaagtcaccacctccaacccccaggcctggccaggcccccttcctctcttgcgtgggcaggtgccccaatgcttagcccttgctcagtggcagtagtcactcggggggcgtggggggggtggggggtgaccttgagtgaccttcccatggagcccagatgtccctggggccataaaaagtgcttattaaacaaatgaagaggccagctcatgctggtaatcccagaactttgggaggcggaggcaggaggatggcttgaaagccagaaattcaagactacccatagcaaccttgcaagaccccgtttctataaaaaaaaatttaaaaactagccaggcgtggtggcgcgcacctgtagtctcagctacttgggaggctgaggtggcggaggatcgattgagcccgggaggttgaggctgcagtgagctaagatcccactgctgcactgcagcctgggagatagagcgagaccctgtctaaagaaacaggccaatgaggagtgtgcattgactcatcagccgaggttttaccttcctagcctacctttctcaggccagcaacccagttccttggggtaaacttgaaatggaaaaacaaaaaggccttggcaagtagtttccaatctggagggtcctgctcctggccgtgagggaggaggaggaatcccaggaggaaggagctccttctgccggggcttcccagctggccgtgcacattccagactgtgtgacgggcttctgctaccaggcccagccggtggggacacggaggtgcggggctgaggcggcctgggcaggaggggctggcaggccctcacctgtgctctgcacgggtttggaaacggcctcttagggctcacggctgtttctctcgtgctgagcacacagctggggctgtacgcagcctgcaagccccatgcctccatgagcacctgccgtggcccgtccactgcagagcctgtcggaagaggctggaggaggagcatgtgtcctctgtgcgctactccttcactggttataaactaccaagggacacggctggcactcaaggagggtcttgactgccccagcatcataggccacggggcagggtggctctgggctcccactacctggccctcctccttgcctctgcccaggccccgtggctttggcagatgggctcaccagaagaatgctgaggcggacgggcccagctgtgcggtgctcgctgggcagctctctctgaagggagcagttgctgctctggggtggcacgggggcaggggtgggcaagtggttctggaggagccgtgtggccagccctctgtggccgtctttgccgttcacccctggttactcctccaacagagggtctgtcctgcctctgggacaggctggctgggaatgccccagcaggaagactcttctgagcttgaattccctgttcacaggaagccacttgacaaatgatcacagattcatcaggcagcagccgtgagtgttctcagcactcctccacctctagaggtgctgcggcctctagaggtggaggagcacctctagatttgaggggtgctgaggacaccccacccccactctggacaaagatccccctcccacaagagctccagcctggaggctccactgtgaacgcgaatgtcctgcttggccttcacatatccttgttggcctcttagaaaggaatacgcctctgtctgagccacagaatcaatcctcagggtaatgcatttacccagagaataaaatcagcatccacgtgtccacactggtaggaatagatcactgaaggaataaatgaatgggggagaaccgtttctcacactgaatcccagtttcaggctgcagaggtagtgatggaaacaggaagtcgtcaccccacagccaggcttcattccaggtgagagtggcccacagtgctggaactggagcatgagagtgggatgggaagaggacagtcaaatgctctcagagtgcctctcgcagctttatagtggtgacactcacaacccagcctaaccaggtgtcccagggcatgtcaccagggcagggacagagccacctgacatgcctccagaggcagtgtacagggaaggacagagcatttctgcaggattcccaccaaaaatgcatggcctgcctgtagtcacaaggacacgtcagacaaacccagcactgaaagtgccaaggccacaaaagacaaagccagactatgcagtcgcccagattaaggagggcaagcaggccaggcttgatgtgtggtctgatctgatctggacgtctgaggagcacatggaatctggatggtcccgagaggtgatggtcctgtgttggtgattactaccccctgctgcccattgtcccatggctggacaagatgctgacattggcagaatctgggtgaagggtgttgaggaattgtttgtggcttttttttttttttttttttccccgagatggtgtcttgctctgttgcccaggctggtgtgcagtggtgcgatctcggctcactgcaacgcctcccaggtttaagtgattctcctgcctcagcctccagagtagctgagattacaggcatgtgccaccacccttggctaatttttgtatttttagtagagacagggtttcaccttgttggccaggctggtcttgaactcctgacctcaagtgatccgcccacctcagcctcccaaagtgctgggattctggcatgggccactgctcctggctgtttgtgactatttctgcaatttttttgtaagtttgaaattatttcacagtgaaatgttttgaactttttagaaagaggatgtaccattcaaagatggaagggtacgccaggagctcggtggccctgggctctgggggtgttagcgaccctccaagcctggcaccaaaaaaaaaagcccctgacccacttaccaacccaaaacccttggccgccctgggggaccaggcccaagccctggcgtagcactggagacccttcccacgctgtcgctgaagcactcacagtccagccccatctttggccaccctcttctgttagaccagcaagtcccaactgtgccaggtaacacccaggaagtgtgtgaacattgacagctccagggctcacctccagctctgctgagtcttggattttttcagccgctcctggtgattggagaacacctccagactggccgtgagggccgcaagggcagggccgtgcctgtgctgtctctgtctcacgtcttccagccgtgcagacctcagcactgtttgccccaggactgcagctcgctcgtcttctaagccagcacttctcaagtggggtccccatgttgttagtaatatgggttctcagctctgccccagacctgctggatcagaaattaggggcagggcccagccttcagcgggtagcagccctccctgggaggctgaaagcatccatttgggaatcctcctcctccccgctcctccctcctccccccccgcctcctctcctcctcctcctccccccctcctccccctctcctcctcctccccacgccccagcaggctacagatccagaactctgctttctaggaggacttcagggctcccctcctttgttggtggagctcatctctgtggcgtccatggcctggagccccatggcctcatcctgtgacctcagggtcatgctgtcatttattcgttgttcctaaacacccacttctccctggaatgaccacaggaggcctcagcacagggacaggccgtggtcactgtacacacagatggaatgtcagtgctggggtatctggggaggagctctgagaggaggaggctgagggtcctgaagcccctgccccgtgtccctgacacaggctgggctgcgagagtgggagcgggggacttggggcccttgtggagctgacaggtggctccgatatcatcaccctgaggctggtggggttctttcccctgtgctgcgtgggggtgcggggccatctgtgaggctcaaggactgagcggggacccagggaggtctcagggactcgcagctgccatgcccagcaccactgctgcagctcctgccactggccactccttgccctgctggctgcccctgccccaccatcccaagtgtttgcctttggtgagggctctgcacccgtggtggaagagtcggctgttccaggagatgagaaagacgctggatcctatagagctgtgtgtccgcgctctcgaggcatgctccatgctaggaggatgtattctggttaaagattcgtctgcgggagcagaggaagggcagggacaggggtctgggagctctactccatttgacattgctgcccgggtgtggcccgcttcggggtcagggggcacccttagaacctgtgcagggcaggaactgccaccatctgttggccacacatttctcagtgaacaaatgacttttggcatcagaaagccataacttcacacctaaacttccacgaggctgagctcttcctgcccctctgtgtgtgtacgtgtgtgtgtgtgtgtattgaggggacgcggctgctggccaccttctgtcggcacaggttggcgaggcttcatgactgcccagcccatgcagtccaagagtcccacagcccagcccatgcccaggctcatccactgcggcgggtggcctctgccaggggaggctaggaaaccccagtggtgagccttggccttgggatctgccaggactgtacccgggatggcagggagggcgagctttggtccctgcaacttggagccatctctctctctcctgctgtctgtgggtctgagaacccccagctcgtcctcccccctccccaaacctatgacctacaactggagcctctgcccacttctccctccagggtttcaaagacaacctccacgctgtgttctgcttggctgagaactcggtggggcccaatgcgacaaggccagatgacatccacctgctgtactcagggaagtacgtctggccctcccactccttcctgcccactgttggaactcgcgacccttcccggcctgcaatgccagctcactccaggcatatcgggagggcactcagcgttggggtcccctgggcagcaggctccttgcttcccggagggctggggagctttggtagcaggcgcacctcacgttgaggggcccatggcacctggatgaggtgctaggctcccgtgcagtgcctggcccaggagctcgtggtctaccctgcattaccaggacaggtctttccaaaatttaggcctgaaatctttgggtgtgtgaagctctgacccccagattccctgctcggggacacctcctgcatctcccccttgagattgaccctggaaagtcaaagctgagctggcagctgaggagcaagtggctccagaattcaaaagagaagagccctctccccagccccatgagctggtgcctgagtgggcgcctccccgcatctcctgctcttcctccccatctgccgggtgccaggcacagtgtgctgaaggccagcccagccggttcatgccacccactttacagaagaagaaactgaggcatgggagagccaaatggctggtctctggctctccagagcagcggggcagggatgtcacctggaagccctttgctccaggcactgcattgctgtagggactgggggcatcccggccttcccattcagggaacgtgttggggttcggggagccacagggatgggcagctccaaatggggtctccccagtttcaaaggggctcatgccagtgtcccaggaaatcccgtccctgagcggggatctctaccatgccccaggacggtggaaatcaacaacacggatgccgagggcaggctggtgctggcagatggcgtgtcctatgcttgcaaggacctgggggccgacatcatcctggacatggccaccctgaccggggctcaggtgagtgctccctggatccaccccttagctgtagtcccagggaaccccaccccactcttgacctcaaggtggggaaggcagcgcgtgggggctgccgtcaggaagttttcataactgggcacgaggaggcaggaggagctgcccgtcaagcttggtgtgggcagtaccgaggcccaggctggatgcagagccgggaaccgcctcctgtgtgcttcatggccatggtcctttctgcctgtgttttttctttttttctcaaccgtctcttttctggctcccttatttctctgtctgcctcccggtccctcttttgccttgggtgtttctctcctgccgtcccgtccacacgcttcccgggttcctgcccgcccagggcattgccacagggaagtaccacgccgcggtgctcaccaacagcgctgagtgggaggccgcctgtgtgaaggcgggcaggaagtgtggggacctggtgcacccgctggtctactgccccgagctgcacttcagcgagttcacctcagctgtggcggacatgaagaactcagtggcggtaggtttggagcctcgaacctggagcctgccacatgggtggagccgggcaggcggagccctgccttcagggtgctggtgcacccagggagctggggccccccagaagcagccacagtgcagacgagggcttgagaggcaggcgtcagggcacaggagtcatcccagacagcgtgggccactcactggcttccctgccacacagccaagggtttctcccccagtcttgggtctggctcagttgccccatcaggccctttgctggcttcccccttggcctatggtgggggcagactccttagctcatggtcaaggccctcccagcccagcttctgctgcctccccacacgctccctcccagccaccccgagctccttgcagacagcaatagtgacaggcgatggggcagggtggagagggcccggccggagcaacccacaggcactgtgtcctcctggcctccctaggaccgagacaacagccccagctcctgtgctggcctcttcatcgcctcacacatcggcttcgactggcccggagtctgggtccacctggacattgctgcaccggtgcatgctgtgagtgtctcccctccccactggccctggctgctcccgcccgcttgtccaaacagcgcccctctggctctggagctgctggcagagctcatcagaaacttctgtctgtgacccagcttccagcccgctgtccccaccacccccaggtctcatcctccctgggaacagagtggctgctgtgtgcgacccttccccagccagcctgtcctccataggggatcctgggccctgtctcacccatccccaccctgaggagctcccggggtgaaggcagagcacacagggccttgccccctgcctacgcctggcctgccagccctgaacgtgtccagccagcagcatggaaggctctgggctccggctggtgctcaggatctccttcctgagaaggggactgtggggcacgtggaggggacccaggaggtgaggggtccccaggaacccctcctgtgctgcagccccacgcccagagtctgtgtcctgccctttgcttgcagggtgagcgagccacaggcttcggtgtggccctcctgctggcgctcttcggccgtgcctctgaggaccctctgctgaacctggtgtccccactgggctgtgaggtggatgtcgaggagggggacctggggagggactccaagagacgcaggcttgtgtgagcctcctgcctcggccctgacaaacggggatcttttacctcactttgcactgattaattttaagcaattgaaagattgcccttcatatgggttttggtttgtctttctggtcgtcagcgtggtggtggaaacagctgaagttttaggagacagcttagggtttggtgcgggccacggggaggggaccgggaagcgctggggcttgtttctgtttgttacttacaggactgagacatcttctgtaaactgctacccctggggccttctgcaccccggggtgaggcctcctgcctgcctggtgccctgtcccagccccaggtcctgtgcagggcacctgcgtggctgacagccaggctcttactccagccggggctgccagcgcatccagccagcccagccctgtgaaagatggagctgacttgctgcaggggacctgatttatagggcaagagaagtcacactccggcctctcagaattcacttgaggttcaattaaatacagtcacaccgccccctcacctggcctcgttcttctttctccccctccattttagaaacgggtcctggagcccatctagggaatgtagtgcagggctgcctcctgcttctcccagaccggctctggctttgagccccagctggtcaaccca

SEQ ID NO: 8525 - DNA, 208 bp, Homo sapiens
gtggctgcagggcagggcctcctggcacgtggccgctgtttgaagcctctgtgtcttgtctctcccttctgatctagctctggcaggctgccctgagcacgctcaaccccaaccccacggacagctgtcccctctacctgaactacgccaccgtggctgccctgccctgcagggtgagccggcacaacagcccctcggccgcccactt

SEQ ID NO: 8526 - DNA, 10831 bp, Homo sapiens
cagtttttctccttttgcctattaatgtaatgactattgaaatagatttcccagtgggaagacgtttcacgctgaaggaccagtgtgtgcagaggtgaaggcaagagctgcggcagatgggcgaaatgggtgtcatgtgtttgatatcatctatgcagaaatcattagagttggctgcagctgcttggtctttttctgtaaacagccatcttgctgtcctcagatgctggacagtgttaggtctgggaaggtgggcagaggcatgatgcttgcccttttcattgtgctacttcttatccctcccagacaaaatgaaaatcaaatgccgtttccagaaggcctatcggagggctttggaccatgaggaggaggccctgtcatcgggcagtgtgcaaggtatgggaagggatgagcacaccattttaatgtgaagccctctttttccttctgatctctaagtgcatagttcccatgctttggcttacttccaaaacctctcttggaatgctgggaatgaggaactgtgggattcagcccagtccactgagggccagagaggttgattggcttacccaagcctgaccactgtgtcagctgaatgtgagtgaaggggtgggttaggcattctttggggctggggggagatggaatggtgttttgctcttggtgtaccacctgttcttgcccccagaggcagaagccatgttagatgagcctcaggaacaagcggagggctccctgactgtgtacgtgatatctgaacactcctcacttcttccccaggtaaggtaacagagaggctgcgactttgccttatcccttcagctcgtggactcctgggtcacctccttcttgcatcattgctacccatttcttccatttgctacagaaaactctccaaaaaaaaatttttttttttttgagacggagtcttgctctgttgcctaggctggagtacagtggcgggatctcggctcactgcagcctccgcctcccgggttcaagtgattctcctgcctcaacctcctgaatacctgggattacaggcatgtgccatgtaatgtatttttagtagaaatggggtttcaccacgttggtcaggctggtctcgaactcctgaccttgtgatctacctgccttggccccccagagtgctgagattacaggcgtgagccaccgcacccgtcctccacatatttttaataaagaatgctggctgggtctggtggctcacactgtaatcccagcactttgggaggccgaggcgggcagtttgcttgaactcaggggttcaagaccagcctgggcaacatggcaaaaccccatctctacaaaaaataaaaaaaattagctggatgtggtagtccctgttacttttggaggctgaggcagggggagcgcttgagcctgggaggtggaggttgcagtgagctaatatcatgccattgcactccccatctctactaacaatacaagaatcggccgggtgcggtggcacatgcctgtaatcccagcactttgggaggccgaggcaggcggatcacttgaggtcaggagtttgagaccagcctggtcaacatggtgaaaccccatttctactaaaaatacaaaaattagccgggcgtggtggtgggtgcctgtagtcccagctactcgagaggctgaggcaggagaatcacttgaacccaggaggtggaggttgcaatgagccaagatagtgccactgcactccagcctgggcgacagagtgagactctgtctcaaaaagaaaatttataatcaaatatttaatttttataaaagcactaaagaaaatgttaatgaacgtccccatccccacccccagctcacaaactgcagtgcagtagcacggtgtgtacttccatggttatactccattcccttttggcccaaggcaaccagattttgtgtttgtaattttcttgcttttccttagagtttgatcacatatgctgtatctctgtaaacaatgtatttaattttacatttttgaatttatataaatggtggcttataacacatgttcctctgccacttttattttattcccttcatgtggcagagcctggtgagagaatcatccataattatgtagttgaatctatgtatcattgtataaacataaacataatttacccattctattgctaatggacatttggattatttctaggttttactgttagaaataatgctattatgaatacttgtttctttgccatgtgccatttttatatcagactctccagttgtctgtttattccgcttttcttgctcagcatgccatctctgagtttccatttcaccattttaccagcccctgaagagttagatgctgcctggacccatgtcaactgggaaaaagaagagaacggagacaaatgaaaatactcaatatatactcatagctcagaaatgctgagttaatagctcatgaatctcaagagaggtgcaaacctgttggtcattggcaaaggggcagattcggaacagtaggagccagggtgctttttggctttcttttctgagccatgggcattctgtctcttgctcacccccacaggacatgatgagctacattgggcccaagaggacagcagtggtgcgggggataatgcaccgggaggcctttaacatcattggccgccgcatagtccaggtggcccaggccatgtctttgactgaggatgtgcttgctgctgctctggctgaccaccttccagaggacaagtggagcgctgagaagaggcggcctctcaagtccagcttgggtagggcaccaggctctgccacatgaagggagaggaaatgaattacatggggcaggagggaaatctgcatgccaacttctttctcctttcttctctagtctcaatttttttcttatttattttatgttattattattattattattttttttagttatttattttgagacggagtctcactctgttgcctgggctgagtgcagtggcactatctcggctcactgcaagctccgcctcccgggttcacgccattctcctgcctcagcctcccaagtagctgggaccacaggtgcccgccaccactcctggctaatttttttgtatttttagtagagacggggtttcactgtgttagccaggatggtctcgatctcctgacctcgtgatctgcccgcctcggcttcccaaagtgctgggattacaagtgtgagccaccacacctggcctatttattttattttattttttgagacagagtcttgctctgttgcccagactggagtgcagtggcgtgatcttggctcaccacaacctctgcttcccacgttcaagtgattctcactcctcagtttcctgagtaggattacaggtgcatgccaccatgtctggctaattcttgtatttttatttttattttatttttttttgagacggagcctcctgtcgtccaggctggagtgcagtgacgtgatcttgtctcactgcaacctccgcatcccaggttcaagcgattcccctgccccagcctcctgaatagttgggattacaggcgcccaccaccatgcctagctaatttttgtatttttagtagagacggggtttcaccatgttgaccaggctggtcttgaaatcccaacctcaaatgatctgcctgcctcggcctcccaaagtgctgggattacagcgtgagccaccacacccggccgatatttgtattttcagtagagatggggtttctccatgatggccaggctggtcttgaagtgctggcctcaagtgatccgtctgcctcagtctcccaaagtgctgggattacagacatgagccacagcgcccggcagctttttcttactcagtgttcctcatcccagttttgtcctccttttggttccatgatggaaagcagccccattccagaggagaaacaagttcagctcagctgggagtacaggctgcccctcttctttgatccacaagagcctctgacttccctgactcctgtttctgtaggctatgagatcaccttcagtttactcaacccagaccccaagtcccatgatgtctactgggacattgagggggctgtccggcgctatgtgcaacctttcctgaatgccctcggtgccgctggcaacttctctgtggactctcaggtgagaccgggagcaagttgaggagtccttttcaatgtctatacatatttacaagtgcagtctgttcctccatctcttagagcttgctgatttgctaggaatttcctgtgtgtatatgtatgtgagtgtcataagggtgggtactgggggtgcgtgtgtgcccttgtctgtgtccatccatccattgagggcagattctggtgtctttacttccttggcatcctattgagagagtttgtcagtgcttgttaacaaaccaccttcctatagctccctctagacctgtactcaccaattgtgcttagatgttaatgccatgacccatctttttttttttttttttttttttgagacagagtcttgttctattaccaggctggagtgcagtggtgtgatcccagctcactgcaacctccgcctcccaggttcaagcgattctcctgactcagcctcctgagtagctgggattacaggtgcgtgccaccatgcccagctgatttttgtattttagtagagacgggttttcaccacattggccaggatggtcttgatctttgcccagctgatttttgtattttagtagagatggggtttcaccacgttggccaggatggtctcgatcttttgacctcgtgatccacctgccttggcctcccaaagtgctgggattacaggtgtgagtgatggagcccagcagagccattcttaaggaatttagtttttagaaaaatgcttcctgaaatttgttattgtagtaacaataaagatgtgaagggccaggtgcggcggctcacgcctgtaatcccagcactttgggaggctgaggcaggcggatcacgaggttaggagatcaagaccatcctggccaacatggtgaaaccccatctctacaaagataaaaattagctgggcatggtggcgcgtacctttagtcccagctactcgggaggctgaggcaggagaattgcttgaacccgggaggtggagtttgcagtgagccaagattgtgccactgcactccagcctggcaacagagtgagactccatctcaaaaaaaaaagatgtgaagaatgtagctttctgtatcacgctgtctccttgtagggaaaacacgtgggagaaatttttatcaggtcttcctagtgggagtaattgcttctgaataactggcttgatttgatcttgtagacactgaattatgctgttctttgtttctctctttgtgtagactgttaggaaacctggtaaaatacgtgatttttaaagcacgtatttagtttattcagtttacccttggctttgctattttcttctgcaattattttctctcagccctgattttgtctcttatatgttgccttgtcctgattgtgtcttttttaaggcacctcaaatcttttttgggagaaagtagaatataaatctaaacaaagtaaccactccctgtttgctctacagattctttactatgcaatgttgggggtgaatccccgctttgactcagcttcctccagctactatttggacatgcacagcctcccccatgtcatcaacccagtggagtcccggctgggtgagcacctaaggatgagggtctttcttttctgccaggctagggagggaccctgacggctcagctgggtaggggacaggagttggaggtggattatatacagtgatggttcccaggttgggttggtccgaggagactgtggagattgaggctcctttttttctttttttgagacaaggccttgctctgttgcccagtctaaagtgcagtggcacagtcatagctcactgcagcctccaactcctggactcaagtggtcttcccacctcagcctctcgagtagctagaactataggtatgtgccactacacttggctaattttcaaaattttttttagagacaggatctcattatgttgcccatgctggtcttgaactcccctcaagtgatcttcccaccccagccccctaaaatgctgggattataggcgtgagccactatgcctgagccctaggttcctttttcatgatgctctgttgatatctccatcttcacacctatcatatccaaaagcatttattaaacgtgattcctagcactttttacaaatgaatgactaggctgggtctatctccctaaaagccatctaggagagaggctgtcacacacataggaaagacaacagcaaaagtacttgagggcagaatttgaattgacagttctgctgattgaggttgaataaccttgaagctagtattagagtttttcatttttcgggtggaaactaggaagaggaggtgtgactaagaactgtaacacaggcaaaccaaagtgagtatatctaattgtggaatctcagataccagaggcaggctagtgtggcccaaggattgtgagggggtggcatgtgaggccttagaaaattcctccgttcatttattcattcagcaaacattgactgagggactaccttatgacagtgctgagtagagaaaagaagggcatttcaggcaaagggaactgtgagcttagatgcagacaagtgagagagcttaggcattcaggaagctcagagtagtttagtgtggctgaaatgtgagtgagtgaccaaagatgaagccggttaggcaggcaggagccaggtcataaaggaccatgttaaggagtttgaactttaacctgatatgggtggctagtgattgagggatattaagcagggaactgacataaggtcagatttctggtttgcataaaactatctgtagtaatatgggtacattgtgggagtggccaagaaagctgtcgtagacagtcaaggggcctttgaggagggagaattcgggggtgttttggagctaaggactatgtttccatcggtatggcacatctcgggagaacattctgaagccctttactagagacaccctggacaggaggatatcctaatgattgttagttggggaatcagtcccagagtgagtgaccagcaagttagaggccgacctgggactaaggtccaggtccagcatgttttgatattctgctttccctttataccacaggatccagtgctgcctccttgtaccctgtgctcaactttctactctacgtgcctgagcttgcacactcaccgctgtacattcaggacaaggatggcgctccagtggccaccaatgccttccatagtccccgctggggtggcattatggtaatagtcacactacgcagaccccagagcccatgcttctgggacaggcaggtgtccctgaaactgtgttccttctgttttccttctggtgtcctccatggcccagcctgtgggaggggcaggcaccaggaaggtgagggtgctatgtgctcatgcccctcttctgccggccccacttttgtttccgccagtgttttctatactgtgaccctttgcccttacctaggatcattctgtgtccatcttagatcttcgccttatttgtgggagtcttgcaaggttgggagccttgtctcccttgttagactggaagtttctcatgggggagaattctaaaatgggataagaaaaaaatatgttctacaggactttcaagggggtaattgggataatgtatttaatgctctccgtagtaggtactcaaaaaatattagctataccatgaggtttatagcttctaaagagcacagaatatgttttccttttctctccagagtgcctagggcagagctgtgcaagggcctggtatgatgttgtggcaatctcattccccctttcaggtatataatgttgactccaaaacctataatgcctcagtgctgccagtgagagtcgaggtggacatggtgcgagtgatggaggtgttcctggcacagttgcggtgaggtcctggatgatccacttggggacatagtctccttggctgtagaggggagttgcaaagtggaatcaagtcttacctggcagggatatcttggctgtgcctagagccccagggaaaccaagaaaagtttctaaggatcccatcatccttctaagaaggactagtaggtgacaaaatcatttatttttttttttgagacggagtcttgctctgttgcccaggccggagtgcagtggtgccattttggctcactgcaacctccacctcccgggttcaagcaattctctgcctcagcctcccgagtagctgggactacaggtgcccgccaccacaactggctaattttttgtaattttagtagaaacggggtttcaccatcttggccaggctggtcttgaactcctgacctcgtgatccacccgcttaggcctcccaaagtgctgggattacaggcgtgagccactgtgcccagccagcaaaaccagttttaagaaaaatagactcatgaatgtcaggtccatggagtgtgattagggctgcttaagaaaatagctgttaattcttatgctgcctgatggattgagagtggctgcctgaggctctgtgttgaggattctaaggctgtatctgggctcattaggaaagagtattcttctgattgactagcagtgtctctcacggatgcaggcttagagaagcacagcacatgtgccttggcaaaggcagtcctggatcatcccttaatgctaagtcccattggccccatttgttcaaagagagggtagaaaaggtgaaaggattaaactgagttggtgttatcagaagtattttagccatggaacctttttttaaaaaacaagatcttggaaatctaatgtagaaacaggtaaaagcagaaacacctgttgaagcagcgtttggggccaacttgtttggtgttgccccttatgcccccaagaccctgaggtacttccctttaacccctatggttctgggtaagattgaaaatcactggctcaggacagatatttgagaaatcttagccatgatctcccgccttgtggtctcagccaccttgatcttactccgatgttcctacaggttgctctttgggattgctcagccccagctgcctccaaaatgcctgctttcagggcctacgagtgaagggctaatgacctgggagctagaccggctgctctgggctcggtcagtggagaacctggccacagccaccaccacccttacctccctggcgcagcttctgggcaagatcagcaacattgtcattaaggacgacgtggcatctgaggtaagcaggcaggggatggattctgcagcttgggactggagtagccagagagggccagagtgtggtgagaccagagagcctgtgaggtccatggtatgtgtgggcttgccatctttagtgtcccagccttcctctagacggcagtaccagcccccaagcaggagtgcagatgagagtgcgaggtttcaagctgaccctaggaaaataaaccatatccctgtagaaagacttccatagatcctggatgaactccaggcatcttccttggtagatggaaggcacagtaaggcccagcaccctttccaccaatgcctaggacttactggtataccctcttgtcccttctccttcctaggtgtacaaggctgtagctgccgtccagaagtcggcagaagagttggcgtctgggcacctggcatctgcctttgtcgccagccaggaagctgtgacatcctctgagcttgccttctttgacccgtcactcctccacctcctttatttccctgatgaccagaagtttgccatctacatcccactcttcctgcctatggctgtgcccatcctcctgtccctggtcaagatcttcctggagacccgcaagtcctggagaaagcctgagaagacagactgagcagggcagcacctccataggaagccttcctttctggccaaggtgggcggtgttagattgtgaggcacgtacatggggcctgccggaatgacttaaatatttgtctccagtctccactgttggctctccagcaaccaaagtacaacactccaagatgggttcatcttttcttcctttcccattcacctggctcaatcctcctccaccaccaggggcctcaaaaggcacatcatccgggtctccttatcttgtttgataaggctgctgcctgtctccctctgtggcaaggactgtttgttcttttgccccatttctcaacatagcacacttgtgcactgagaggagggagcattatgggaaagtccctgccttccacacctctctctagtccctgtgggacagccctagcccctgctgtcatgaaggggccaggcattggtcacctgtgggaccttctccctcactcccctccctcctagttggctttgtctgtcaggtgcagtctggcgggagtccaggaggcagcagctcaggacatggtgctgtgtgtgtgtgtgtgtgtgtgtgtgtgtgtgtgtgtcagaggttccagaaagttccagatttggaatcaaacagtcctgaattcaaatccttgtttttgcacttattgtctggagagctttggataaggtattgaatctctctgagcctcagtttttcatttgttcaaatggcactgatgatgtctcccttacaagatggttgtgaggagtaaatgtgatcagcatgtaaagtgtctggcgtgtagtaggctcttaataaacactggctgaatatgaattggaatgatacaaa

SEQ ID NO: 8527 - DNA, 4101 bp, Homo sapiens
cagtttttctccttttgcctattaatgtaatgactattgaaatagatttcccagtgggaagacgtttcacgctgaaggaccagtgtgtgcagaggtgaaggcaagagctgcggcagatgggcgaaatgggtgtcatgtgtttgatatcatctatgcagaaatcattagagttggctgcagctgcttggtctttttctgtaaacagccatcttgctgtcctcagatgctggacagtgttaggtctgggaaggtgggcagaggcatgatgcttgcccttttcattgtgctacttcttatccctcccagacaaaatgaaaatcaaatgccgtttccagaaggcctatcggagggctttggaccatgaggaggaggccctgtcatcgggcagtgtgcaaggtatgggaagggatgagcacaccattttaatgtgaagccctctttttccttctgatctctaagtgcatagttcccatgctttggcttacttccaaaacctctcttggaatgctgggaatgaggaactgtgggattcagcccagtccactgagggccagagaggttgattggcttacccaagcctgaccactgtgtcagctgaatgtgagtgaaggggtgggttaggcattctttggggctggggggagatggaatggtgttttgctcttggtgtaccacctgttcttgcccccagaggcagaagccatgttagatgagcctcaggaacaagcggagggctccctgactgtgtacgtgatatctgaacactcctcacttcttccccaggtaaggtaacagagaggctgcgactttgccttatcccttcagctcgtggactcctgggtcacctccttcttgcatcattgctacccatttcttccatttgctacagaaaactctccaaaaaaaaatttttttttttttgagacggagtcttgctctgttgcctaggctggagtacagtggcgggatctcggctcactgcagcctccgcctcccgggttcaagtgattctcctgcctcaacctcctgaatacctgggattacaggcatgtgccatgtaatgtatttttagtagaaatggggtttcaccacgttggtcaggctggtctcgaactcctgaccttgtgatctacctgccttggccccccagagtgctgagattacaggcgtgagccaccgcacccgtcctccacatatttttaataaagaatgctggctgggtctggtggctcacactgtaatcccagcactttgggaggccgaggcgggcagtttgcttgaactcaggggttcaagaccagcctgggcaacatggcaaaaccccatctctacaaaaaataaaaaaaattagctggatgtggtagtccctgttacttttggaggctgaggcagggggagcgcttgagcctgggaggtggaggttgcagtgagctaatatcatgccattgcactccccatctctactaacaatacaagaatcggccgggtgcggtggcacatgcctgtaatcccagcactttgggaggccgaggcaggcggatcacttgaggtcaggagtttgagaccagcctggtcaacatggtgaaaccccatttctactaaaaatacaaaaattagccgggcgtggtggtgggtgcctgtagtcccagctactcgagaggctgaggcaggagaatcacttgaacccaggaggtggaggttgcaatgagccaagatagtgccactgcactccagcctgggcgacagagtgagactctgtctcaaaaagaaaatttataatcaaatatttaatttttataaaagcactaaagaaaatgttaatgaacgtccccatccccacccccagctcacaaactgcagtgcagtagcacggtgtgtacttccatggttatactccattcccttttggcccaaggcaaccagattttgtgtttgtaattttcttgcttttccttagagtttgatcacatatgctgtatctctgtaaacaatgtatttaattttacatttttgaatttatataaatggtggcttataacacatgttcctctgccacttttattttattcccttcatgtggcagagcctggtgagagaatcatccataattatgtagttgaatctatgtatcattgtataaacataaacataatttacccattctattgctaatggacatttggattatttctaggttttactgttagaaataatgctattatgaatacttgtttctttgccatgtgccatttttatatcagactctccagttgtctgtttattccgcttttcttgctcagcatgccatctctgagtttccatttcaccattttaccagcccctgaagagttagatgctgcctggacccatgtcaactgggaaaaagaagagaacggagacaaatgaaaatactcaatatatactcatagctcagaaatgctgagttaatagctcatgaatctcaagagaggtgcaaacctgttggtcattggcaaaggggcagattcggaacagtaggagccagggtgctttttggctttcttttctgagccatgggcattctgtctcttgctcacccccacaggacatgatgagctacattgggcccaagaggacagcagtggtgcgggggataatgcaccgggaggcctttaacatcattggccgccgcatagtccaggtggcccaggccatgtctttgactgaggatgtgcttgctgctgctctggctgaccaccttccagaggacaagtggagcgctgagaagaggcggcctctcaagtccagcttgggtagggcaccaggctctgccacatgaagggagaggaaatgaattacatggggcaggagggaaatctgcatgccaacttctttctcctttcttctctagtctcaatttttttcttatttattttatgttattattattattattattttatttagttatttattttgagacggagtctcactctgttgcctgggctgagtgcagtggcactatctcggctcactgcaaggctccgcctcccgggttcacgccattctcctgcctcagcctcccaagtagctgggaccacaggtgcccgccaccactcctggctaatttttttgtatttttagtagagacggggtttcactgtgttagccaggatggtctcgatctcctgacctcgtgatctgcccgcctcggcttcccaaagtgctgggattacaagtgtgagccaccacacctggcctattttttttattttattttttgagacagagtcttgctctgttgcccagactggagtgcagtggcgtgatcttggctcaccacaacctctgcttcccacgttcaagtgattctcactcctcagtttcctgagtaggattacaggtgcatgccaccatgtctggctaattcttgtatttttatttttattttatttttttttgagacggagcctcctgtcgtccaggctggagtgcagtgacgtgatcttgtctcactgcaacctccgcatcccaggttcaagcgattcccctgccccagcctcctgaatagttgggattacaggcgcccaccaccatgcctagctaatttttgtatttttagtagagacggggtttcaccatgttgaccaggctggtcttgaaatcccaacctcaaatgatctgcctgcctcggcctcccaaagtgctgggattacagcgtgagccaccacacccggccgatatttgtattttcagtagagatggggtttctccatgatggccaggctggtcttgaagtgctggcctcaagtgatccgtctgcctcagtctcccaaagtgctgggattacagacatgagccacagcgcccggcagctttttcttactcagtgttcctcatcccagttttgtcctccttttggttccatgatggaaagcagccccattccagaggagaaacaagttcagctcagctgggagtacaggctgcccctcttctttgatccacaagagcctctgacttccctgactcctgtttctgtaggctatgagatcaccttcagtttactcaacccagaccccaagtcccatgatgtctactgggacattgagggggctgtcc

SEQ ID NO: 8528 - DNA, 101 bp, Homo sapiens
gtagagatggggtttcatcacgttggccaggctggtctcaaactcctgacctcaggtgatccacccgccttggcctcccaaagtgctgggattacaggtgt

SEQ ID NO: 8529 - DNA, 5916 bp, Homo sapiens
ccccggctccagccggcgcaggcagcggcggcagcagcaggcgagcctcggccccgcaaggccatgaaggtgaagaagggcggcggtggggccgggacggcgacggagtccgctccggggccctcgggccagagcgtggcccccataccacagccgcctgcggaatccgaatctgggtccgagtcggagccggacgcaggcccagggcccaggccggggccgctgcagaggaagcagccgatcgggccggaggacgtgctggggctgcagcggatcaccggtggtgagcacccgcgagggagcgccgcccgcgggtgggaaggggagagggtgcgaggggccctcccggcgcgccaagccctggcccccgccccctttcccgcctcccctcccccaccgagtcccctctcctgtgtcccctgctctcccttctgccgccaggtctgagatctctgtgtacccccttcccttgatctctctctgtgcctccttcttctccctttcgagatttattccttccttttccaggggcccgtccccttttcccagcgtggaggtacgtgcggcagcagctgcaaccatagccctgtagctgtggagtctccagagcgctttgaggcccgtccctgcactaatgaagagaggggctgagtgcagcctgtcctcagcccccacgctggaggctaggtggaggctgagttacttgggaggcattcagactcttcatgtctccccaaccattaataccctcaccctgatcctccaggaagacttgggccattttcttccccgggaaagaaactgagcaggcagctttagtgtgttggctgtggttcctctcatggggagtggcataatgtccctccaagcctggactagcacctgtcctcttctgggggctctgtcatcaagggaggcttggtctccactgtggttaagagtttctgagctggactgcctgggttggagttccaactctgccatataattgtctgtgtgaccttgggcaagtaacctcacctctctgagcatgtcttttcatctgtaaaatggggataatgatacctttctcgtaagattattgtgaagataagtcctctgattctgtacagtgcctggcatctatgcatgctgtgtacattgggctctttgatcagtagtatttttgggccctacagggctgctcatagctgctgcctggagtcaaacaacttggctttcagggcaggggagggggtcatcataggcagggaacgagggctaggaaacctcatagcagaggctttggatgagcctcaaaggatgaaaggtgcatggagagacagtggctctccaccttggccacattcaccagcaacctgccctggccccctttgtgagaataactgttggggggggcctctctgtgggtatggggggcatgtattggagtggacctgagccctagagcttccaaagcagcagaacaccggactcccagacagagctgtggaggggagacagccttgagcctgtgctcctgggtccctgggggccaattcctctctccttactgagctaggcagcagccattcttagctgggcccccagagtactgagctcccttgcccaagcaggcatcaatggagagagggaggctggaccaggctgatgttgaagccagttgggctacaatttgcaatagcagcatttaggattcagcttagctctggggcagaactttctcagactgactgagtcctgagtaactttgggggtttattttgcaactagagggagcttccagctcatgtaccaccatttgtctcctaatttggaggaaattcatagcccttagagatggggcatctgtgaagggtaagtagaggaaagggcttcatgagaaccccttcctgtgcaggaattgagaacagagttccagggatttccaccctggcaccccttgcctggtctcttctgaccctaatcatgcaggtctgaggtttgctgttcccagattactgggccctgaatccagcttaggaagctatttgtggctgagaggaatagagcagttgtgttctgagcccttggccactctgccccttattctgacctgaccctgggtcccaggcctcatcctttctagaagagaaggagtggccgtggtgttctgagccatagatatccgtgttcctcacttcttctaaggacagagaggttgatagattgagtttgcagtagaagagactgaggttagactgcaggaagttgttcccaaatgagagaggctccaaaagttggagaatgggagaagagaaggccttacagggatctgggagttgggcactgggatcctgctccccactctgccacctccgttccctatgctctgtaccttctttctatgtctttatactggtgcttactttctgtgaaaatagggtgaatggggtgagataggggttgcccacttccattctctccccaccccacatgtgggctgtagtagactcagggccctgcctcttccccaagctgtataaagtccatgctgggccccagggtaccagatggctgccaggagggcttcctggaggggacagcgtcaggcttggggaagaagcagacctggggaagagaaaatgactttatattcacttcctgttcctgccccagaggaataggaggtggcccaggggcctggagggtgatttccaggcctctgtgggccaccaggggaggatgtgatgctgtgcaggctgacagcacgagtccctccctgcacctctcagctctttttgttgccagggcctccctgagcacttgaagttgctgctgcaagagctgtgagggttagatcaggccctgtagctccctgagcttcctcaggcagggcctcccactgttcttggttcccttcctgggcctgaggactccccttaccccttccacacccactgctgcacctgccacaccctcctcctggcctagcctgtgttcttctctatgggggtccaggactactttctccatggtggtggctcatagccagggctgcgtaaatgacctctaagggggttctctctgcttgctaagacttcctcccatttggagatcaacaaaggatgagagcaaagttggcctcctcccacctgccatatcccaggctctgggcttgagtcagcagagctttggttaagctgcttaagggagctgggctggtgtaagcttcttactgagaggagggggtttggaggagaggaggaatagggaaggggttgttcacctgccccagccccacccatatcagggaaagtccccttaacatcagcctcacctgatacatctagatgtcatgccaggggcagctgtggggtgagggtaggagtatcctccagagaaggacagtgactctcccaagacagagctgtgtggccccctttacaggtggttctcaaaggcagggtaccagagaagttgatacactgagttgcagtagaagagacaggtcagactgcaggaagttgttcccatatgagaagagaggctcccaccaggctggatacctaattctcccaaagtcatctagccagccttggcagagcggaggccagaatgaggaccctcaactccagagtgggagagagagtgttcaggaggtggccttgtcctctacccttctctgccctgcccttccctggcccccagagaccagtaggatggcactccttatcccctgttagatccccatggcggagttatgtctcttccacactgggggtgtaccccaagggcagggactgaggtccctctttccagagggcagtgatcccagggatgagaagatggtagctactctggggtcccacacaagctgacctggcagcaggggctttgcggccccttccttgctcagctgcctgtttcccctagactacctctgctcccctgaggagaatatctacaagatcgactttgtcaggtttaagattcgggacatggactcaggcactgtcctctttgaaatcaagaagcccccagtctcaggtgagtgggctgggtgggccattgatggggaggcagataggagctgcggagtgggctgcccagggaatccttgggccacagaggagtccacagagctggggcttggaccccagcattctcaggagtctgcaggcaggggggccctttcttttccttcccatatgtttctgaggctggacatcttgcgaggtcagccctaccccttcggtccctgccaacctgccctctgcagggctctctgggaactgcagtcctacgggtcccaggcctcagcatcctgtggcccggggaagcacagtggcgattgggaacatgcagacctagaacccctaggtggcactatttggccaatggtctgagccctcagtgtgccccggaatttcttggggagtttaaaaaaaatcagatagatggggacccaagggtagaaccctgggtggacaagggcccagcctgaagcccactgagccccagctggggtacattgcagaacggttgcccatcaaccggcgggacctggaccccaatgctgggcgctttgtccgctaccagttcacgcctgccttcctccgcctgaggcaggtgggagccacgtgagtcgctgggctatgggtggtggtgggggtgagggagagggtgtgagtgggcccttctcagcctctcgtaggggtggcctgtcctgagcctggctggctagttgacttcaaggacagacttagccctgcctccttttcttgctcagggtggagttcacagtgggagacaagcctgtcaacaacttccgcatgatcgagaggcactacttccgcaaccagctactcaaaagcttcgacttccactttggcttctgcatccccagcagcaagaacacctgcgagcacatttacgacttcccccctctctccgaggagctgagtgcgcgggcagggtcttctgggagtggggaagtgggggcgtctagagactgagctgcgggagggagagggacttgtgggtctgatcccatttctccccaccctggggctcttctgtgtctgccaccattcccatatcatccgtagagaaagaggctggggatatttcaggctgtttggctgtccctgtaccccagtcctgaagcccctgcagtggcgggactcaagctcctgacctttgcccggcctggctgggcctctcttgcagtcagcgagatgatccgccacccgtatgagacccagtctgacagcttctacttcgtggatgaccggctggtgatgcacaataaagcagactattcctacagcgggacaccctgaccccacggctgccctgaccccaggaggctccagttctgggctgggagctgtgacctccccaacgctcacccctcaaccccaagtcctctgcttggggagttctccaggagctccggaccctgagtcaatgttgggaggaagggtacctggtgtccccagtcaagcccatgaagcccatgcggcctgctacatggggtggggtcgtagggaggctgtttgcctccacgtctaggaaggcctgtgagaggagcagtcaggacttccggacaacttagctgggccctacttgggcccaagtttcagaatagtgttcccctatcaaggctgtgactagatcaggcagggatccattccctgtcccctgcccactaccttcaggccatttagagttgtaaatttacaaagatccacggtgggctccagctgccaagccacccaagggagtctgggccctaggcctagccccatccctccccatgaggggccaagacactgcctaaggtgtgggagggactggctgagattgcagcccatggtaggagctggaccaactgtatatagttttcaataaactttttccttttctgttctc

SEQ ID NO: 8530 - DNA, 101 bp, Homo sapiens; identical to SEQ ID NO: 8528

SEQ ID NO: 8531 - DNA, 2477 bp, Homo sapiens
gctctcctggttgaggagggaggggcctggctgacccctccagcttcagcctccagctttaacttctgtctgctcctaatgggggcccaaagctcagggctggggagcctggggtccccacttgaatctccagcaggagggtccttctctccctggcccgtcctcctcccaccccctccccctgggggcaaatcaggacacaacagagggcagaggccccattagctttaaaatgtagccccaggttggagctgggaacactgtactggccacttaccctctggggcctcagctttccctccggaaggctgggaggaggtgggctagatgatctttggagcttaaggagtcccagccctttctctgatgccaccacctgaaccctgctccctcgtgggccagtgaaaatagactgtaggtcctcagagccttcagagatgatccagcccaaaccccattttgcagagaggaaaactgaggcctagaagggaggagtggtccacccacggtcccagcacaaggcagagctgggatgaaaacagggctgaaaagactcagggccaattattggctgagcccacggtcccctcagcagggatgcgatggtctctgaatcagtgtgcagctggggtcccaggcagcgctgcctgggggctggggaggggaggcccagaggagggctggccatgtgagcaccccatgaagggaccgccccctcccaaggatggtccctttgggtgcagcagcagaggtcacctcctgacatgcgctctgggaaaggtggcagagggcaggacaccatgagctcaggatctgtgtgaggtgtgggaggtgggaagggtgagggtctgggggaatgcggagaaaagggaggcttgaccccgggcaccatgggccactccaggatgggacacggcccctctttcttggggacccagtatgtcctctcctctagacccagacatacagttataaccgtctgtcctagcccctccctaatccctggccctcccagctgtctgggacttcagtggacccccagcccctgcccccactcaccaaggcctcgctcgtccctctcgtctgacatgtctgtgtgcacccccctcctctccaccctaccttccatcaaccagggcagatccaccgtgccctggttccccagacattccagaatgccccacatcattggcacaggagtggggcagccccggaaggaaccagggattaggctgtaggggggtgagaaggagagaagggaccaccccattcttctcaagcaaggattgccagcgcgcgctgacacagtgatgggctgcccagggctggaggggacgctgttcctcccgccgccactgcccaacctttcctgataatcgtggcatgcgccctttcctcttccctgccccaccccctggccgcagcaggccagcactgcagagtttgggtgctggtggtgtggctgtaggggaggggagaccacacccaaggtgggggctgtggccatgtgtggccgtgatgtcgatgatactcgttttccctgatccgtggtgttgcagtccgttgtcaccagccttgtttctagtgtgtatatatgtcgcccccgtgatgcatatatacacaggtattaaatatatcgctctatataatattatatatgtgtgtggtatccaaggaatcacttttatgagggctaaagataaagaatttggccagaaaatgcagccatccttgtgtgattaggagggtttcaggggccactggactatttgcaaggtgacagggactggagccatggctcagaggtgattcgggcagccagggacaggagccaccctccccaggcccaactctgctagcttcccagaccacccccatcgagtgcggagagagtgggagtgctcagggaaagaaggtgatttgtatttgtctccccgctgaaaagaacaggattcaagtccagagttttcatcttcagcctgtgatctgtccagggacccttgggatctggggcttcctggcctggccagagctggagcccccacagggtaaggaagagagagtgggaggcagagtgtgatggggaggagggacaggaagacccttttaatgatgagggtaactatttcagttgtgagccttctagggccccaggctgggaggctcagaggactgaatctgggacctgtgttccccccggcaggcagggacaagatggcatggcaagcatgggggcggggtgggtggggagggatgctgcatttctcagctgggcagtaatcaatttaatggtcctttaaaatgtctgtgtattaaaaatttaagaataccacactttaatattaaatattcataaggtctagtatcttgataataatgtagatgttttaataacaatttttgtccttcttaaaataaaatgaaagaaacttgcttcccttagcctttgttctagaaaataaacttgtgcactttga

SEQ ID NO: 8532 - DNA, 1164 bp, Homo sapiens
tggacatgcagcagacctatgacatgtggctgaaaaaacacaacccaggaaagcctggagaagggacccccatcagttctcgggaaggggagaagcagatccagatgcccacggactacgcggacatcatggtaacgcctccgccctgcatgctcggggctgcggtcggggctgtggtctgagcctcacctgggaggggcagcctggagggcccagccggccagcgctcagcctctccgaggtgggtggtccgggcagaggtgtgggggagcaggcacccatgatggctgtgctcccagatgggctaccactgctggctctgcggcaagaacagcaacagcaagaagcagtggcagcagcacatccagtccgagaagcacaaggagaaggtcttcacgtccgacagtgacgccagcggctgggccttccgcttccccatgggcgagttccggctctgcgacaggtgctcctgggagggcagggcctggcgggacatggggtggcccgaggagatggagtccgtggccagctctggctcctcttggcctggaggtggtgtgcagggagtggtgaggcttggctgtgactgcagccatgggggtggtggggaagggtggatgggagggctgggctcagacctatctagacctttaatttgcagctgtggggcagatcccagagagggtcaggacacccaggttttccctgagctgggacccagctgcccagggagaggcttgtcttcggggaggtcaagcggccggccccagatggacagcctggggtgggaagggcacagagctcgggcagtgagcctcctgccacccacaggctccagaagggcaaagcctgcccagatggggacaagtgccgctgcgcccatggacaggaggagctcaacgagtggctggaccggcgcgaggtgctgaagcagaagttggccaaggctcgcaaggacatgctgctgtgcccacgggacgacgactttggcaaatacaacttcctgctgcaagaggacggggaccttgccggtgccaccccagaagcccctgctgctgctgccaccgccaccactggggagtagggccaggtgttggccgtgggtgaagtcctggggtcagggggtggggtggggccagaaggcctgatagaagggtcagggca

SEQ ID NO: 8533 - DNA, 865 bp, Homo sapiens
ccttcatttccattcctacagatttgttaactggaatttctgtacttccatctctttttgttgacagcttctctttgttcaggttctccatttcctgcacatttttaacacatttgcaagttgtaaattatcttctttctgcaaactcctgtaaagatttatgtgcacctctttgattcaagccttcactttctaccttgtgttaacttatttatgcacatgtcttatctcctccaaccacttataaatcccttgaggacaggattcacgtctcatttacatgctcttagaaatttacagtgcgtacacagtaggcaatccatacatgcccattcagtacacatttactggcagtcttgggaatgaacatcaaattaggtattgatgaaattttggcccgatgataaagaatatcttaggctaaaagtaatgggaaaattaaattgtttgcaggatgtttcagcactactccctacttagctagatttatctcctctttcttctctgtgtgtcagtttgcaaacaagaactgcccttttctctttgaaaaaaaatgaacactaaaggcagagattttcatttggctgtctttgtattcccacaaccaagcatggtacgtggttcaagaaatggctgtttaatcacagcagtaactcccagtaggaaagattctcaaaggaattgttcttttaaaaaaaaaaaaattcacaaagtaggctgtaccctcaaagtgctaaggagagcttctgtcctcgaaaatctccctgaaatactgaaagcatacaaaaaaggagaaagctcaaaactaaattttgactctcagtggctgggttttgtatctcttttctttaaaaaaaaaaaaaaa

SEQ ID NO: 8534 - DNA, 865 bp, Homo sapiens
ccttcatttccattcctacagatttgttaactggaatttctgtacttccatctctttttgttgacagcttgtctttgttcaggttctccatttcctgcacatttttaacacatttgcaagttgtaaattatcttctttctgcaaactcctgtaaagatttatgtgcacctctttgattcaagccttcactttctaccttgtgttaacttatttatgcacatgtcttatctcctccaaccacttataaatcccttgaggacaggattcacgtctcatttacatgctcttagaaatttacagtgcgtacacagtaggcaatccatacatgcccattcagtacacatttactggcagtcttgggaatgaacatcaaattaggtattgatgaaattttggcccgatgataaagaatatcttaggctaaaagtaatgggaaaattaaattgtttgcaggatgtttcagcactactccctacttagctagatttatctcctctttcttctctgtgtgtcagtttgcaaacaagaactgcccttttctctttgaaaaaaaatgaacactaaaggcagagattttcatttggctgtctttgtattcccacaaccaagcatggtacgtggttcaagaaatggctgtttaatcacagcagtaactcccagtaggaaagattctcaaaggaattgttctttaaaaaaaaaaaaaattcacaaagtaggctgtaccctcaaagtgctaaggagagcttctgtcctcgaaaatctccctgaaatactgaaagcatacaaaaaaggagaaagctcaaaactaaattttgactctcagtggctgggttttgtatctcttttctttaaaaaaaaaaaaaaa

SEQ ID NO: 8535 - DNA, 210 bp, Homo sapiens
ttttcaggcaagaggactgtccatctaggccagaggcagaagtctgcaactcttaattatatttcctgtccctggttcttttctcacagtgccttctatttatccagaggaattccagcaccagcgatggtatgcaaacctttagtggcacacgttgactcagatacagcccagattccttggccatgctttccaggtcttccataaacc

SEQ ID NO: 8536 - DNA, 491 bp, Homo sapiens
catgttcatctagttctgtcccttttcagctttacagagaggcttcctacttagatggttctctctagctatggggcttggagagtaaatgggcaggagtgggagtgtgggaaggggccatgctctgttgatctcagccagttgaagctgatgcctctgtcctggtgtttataaggggctccatcacacatgtacccgtcctctattgtgtgggaggtaccccaggcaatgaaacggagaggtgtctcctggtgttgcagtggggaggagacctctggaccaggacgtgctgtggggcgtcagctaccaaccttgtggtctcgggaaagtgacctatcaagggggcatacaacagggacaccaccttgaaatctgaagtcactgagtagcaggggaggttggagcctggggcaccccatggcctgcccttgggtttcatttaactgtggcctccccaggatgttacacgtcctggcctcctccctgcagaa

SEQ ID NO: 8537 - DNA, 210 bp, Homo sapiens
ttttcaggcaagaggactgtccatctaggccagaggcagaagtctgcaactcttaattatatttcctgtccctggttcttttctcacagtgccttctatttatccagaggaattccagcaccagcgatggtatgcaaacctttagtggcacacgttgactcagatacagcccagattccttggccgtgctttccaggtcttccataaacc

SEQ ID NO: 8538 - DNA, 491 bp, Homo sapiens; identical to SEQ ID NO: 8536

SEQ ID NO: 8539 - DNA, 5088 bp, Homo sapiens; identical to SEQ ID NO: 7545
  SITE (5): n equals a,t,g, or c
  SITE (6): n equals a,t,g, or c
  SITE (7): n equals a,t,g, or c
  SITE (8): n equals a,t,g, or c
  SITE (9): n equals a,t,g, or c
  SITE (10): n equals a,t,g, or c
  SITE (11): n equals a,t,g, or c
  SITE (12): n equals a,t,g, or c
  SITE (13): n equals a,t,g, or c
  SITE (14): n equals a,t,g, or c
  SITE (15): n equals a,t,g, or c
  SITE (16): n equals a,t,g, or c
  SITE (17): n equals a,t,g, or c
  SITE (18): n equals a,t,g, or c
  SITE (19): n equals a,t,g, or c
  SITE (20): n equals a,t,g, or c
  SITE (21): n equals a,t,g, or c
  SITE (22): n equals a,t,g, or c
  SITE (23): n equals a,t,g, or c
  SITE (24): n equals a,t,g, or c
  SITE (25): n equals a,t,g, or c
  SITE (26): n equals a,t,g, or c
  SITE (27): n equals a,t,g, or c
  SITE (28): n equals a,t,g, or c
  SITE (29): n equals a,t,g, or c
  SITE (30): n equals a,t,g, or c
  SITE (31): n equals a,t,g, or c
  SITE (32): n equals a,t,g, or c
  SITE (33): n equals a,t,g, or c
  SITE (34): n equals a,t,g, or c
  SITE (35): n equals a,t,g, or c
  SITE (36): n equals a,t,g, or c
  SITE (37): n equals a,t,g, or c
  SITE (38): n equals a,t,g, or c
  SITE (39): n equals a,t,g, or c
  SITE (40): n equals a,t,g, or c
  SITE (41): n equals a,t,g, or c
  SITE (42): n equals a,t,g, or c
  SITE (43): n equals a,t,g, or c
  SITE (44): n equals a,t,g, or c
  SITE (45): n equals a,t,g, or c
  SITE (46): n equals a,t,g, or c
  SITE (47): n equals a,t,g, or c
  SITE (48): n equals a,t,g, or c
  SITE (49): n equals a,t,g, or c
  SITE (50): n equals a,t,g, or c
  SITE (51): n equals a,t,g, or c
  SITE (52): n equals a,t,g, or c
  SITE (53): n equals a,t,g, or c
  SITE (54): n equals a,t,g, or c
  SITE (55): n equals a,t,g, or c
  SITE (56): n equals a,t,g, or c
  SITE (57): n equals a,t,g, or c
  SITE (58): n equals a,t,g, or c
  SITE (59): n equals a,t,g, or c
  SITE (60): n equals a,t,g, or c
  SITE (61): n equals a,t,g, or c
  SITE (62): n equals a,t,g, or c
  SITE (63): n equals a,t,g, or c
  SITE (64): n equals a,t,g, or c
  SITE (65): n equals a,t,g, or c
  SITE (66): n equals a,t,g, or c
  SITE (67): n equals a,t,g, or c
  SITE (68): n equals a,t,g, or c
  SITE (69): n equals a,t,g, or c
  SITE (70): n equals a,t,g, or c
  SITE (71): n equals a,t,g, or c
  SITE (72): n equals a,t,g, or c
  SITE (73): n equals a,t,g, or c
  SITE (74): n equals a,t,g, or c
  SITE (75): n equals a,t,g, or c
  SITE (76): n equals a,t,g, or c
  SITE (77): n equals a,t,g, or c
  SITE (78): n equals a,t,g, or c
  SITE (79): n equals a,t,g, or c
  SITE (80): n equals a,t,g, or c
  SITE (81): n equals a,t,g, or c
  SITE (82): n equals a,t,g, or c
  SITE (83): n equals a,t,g, or c
  SITE (84): n equals a,t,g, or c
  SITE (85): n equals a,t,g, or c
  SITE (86): n equals a,t,g, or c
  SITE (87): n equals a,t,g, or c
  SITE (88): n equals a,t,g, or c
  SITE (89): n equals a,t,g, or c
  SITE (90): n equals a,t,g, or c
  SITE (91): n equals a,t,g, or c
  SITE (92): n equals a,t,g, or c
  SITE (93): n equals a,t,g, or c
  SITE (94): n equals a,t,g, or c
  SITE (95): n equals a,t,g, or c
  SITE (96): n equals a,t,g, or c
  SITE (97): n equals a,t,g, or c
  SITE (98): n equals a,t,g, or c
  SITE (99): n equals a,t,g, or c
  SITE (100): n equals a,t,g, or c
  SITE (101): n equals a,t,g, or c
  SITE (102): n equals a,t,g, or c
  SITE (103): n equals a,t,g, or c
  SITE (104): n equals a,t,g, or c
  SITE (105): n equals a,t,g, or c
  SITE (106): n equals a,t,g, or c
  SITE (107): n equals a,t,g, or c
  SITE (108): n equals a,t,g, or c
  SITE (109): n equals a,t,g, or c
  SITE (110): n equals a,t,g, or c
  SITE (111): n equals a,t,g, or c
  SITE (112): n equals a,t,g, or c
  SITE (113): n equals a,t,g, or c
  SITE (114): n equals a,t,g, or c
  SITE (115): n equals a,t,g, or c
  SITE (116): n equals a,t,g, or c
  SITE (117): n equals a,t,g, or c
  SITE (118): n equals a,t,g, or c
  SITE (119): n equals a,t,g, or c
  SITE (120): n equals a,t,g, or c
  SITE (121): n equals a,t,g, or c
  SITE (122): n equals a,t,g, or c
  SITE (123): n equals a,t,g, or c
  SITE (124): n equals a,t,g, or c
  SITE (125): n equals a,t,g, or c
  SITE (126): n equals a,t,g, or c
  SITE (127): n equals a,t,g, or c
  SITE (128): n equals a,t,g, or c
  SITE (129): n equals a,t,g, or c
  SITE (130): n equals a,t,g, or c
  SITE (131): n equals a,t,g, or c
  SITE (132): n equals a,t,g, or c
  SITE (133): n equals a,t,g, or c
  SITE (134): n equals a,t,g, or c
  SITE (135): n equals a,t,g, or c
  SITE (136): n equals a,t,g, or c
  SITE (137): n equals a,t,g, or c
  SITE (138): n equals a,t,g, or c
  SITE (139): n equals a,t,g, or c
  SITE (140): n equals a,t,g, or c
  SITE (141): n equals a,t,g, or c
  SITE (142): n equals a,t,g, or c
  SITE (143): n equals a,t,g, or c
  SITE (144): n equals a,t,g, or c
  SITE (145): n equals a,t,g, or c
  SITE (146): n equals a,t,g, or c
  SITE (147): n equals a,t,g, or c
  SITE (148): n equals a,t,g, or c
  SITE (149): n equals a,t,g, or c
  SITE (150): n equals a,t,g, or c
  SITE (151): n equals a,t,g, or c
  SITE (152): n equals a,t,g, or c
  SITE (153): n equals a,t,g, or c
  SITE (154): n equals a,t,g, or c
  SITE (155): n equals a,t,g, or c
  SITE (156): n equals a,t,g, or c
  SITE (157): n equals a,t,g, or c
  SITE (158): n equals a,t,g, or c
  SITE (159): n equals a,t,g, or c
  SITE (160): n equals a,t,g, or c
  SITE (161): n equals a,t,g, or c
  SITE (162): n equals a,t,g, or c
  SITE (163): n equals a,t,g, or c
  SITE (164): n equals a,t,g, or c
  SITE (165): n equals a,t,g, or c
  SITE (166): n equals a,t,g, or c
  SITE (167): n equals a,t,g, or c
  SITE (168): n equals a,t,g, or c
  SITE (169): n equals a,t,g, or c
  SITE (170): n equals a,t,g, or c
  SITE (171): n equals a,t,g, or c
  SITE (172): n equals a,t,g, or c
  SITE (173): n equals a,t,g, or c
  SITE (174): n equals a,t,g, or c
  SITE (175): n equals a,t,g, or c
  SITE (176): n equals a,t,g, or c
  SITE (177): n equals a,t,g, or c
  SITE (178): n equals a,t,g, or c
  SITE (179): n equals a,t,g, or c
  SITE (180): n equals a,t,g, or c
  SITE (181): n equals a,t,g, or c
  SITE (182): n equals a,t,g, or c
  SITE (183): n equals a,t,g, or c
  SITE (184): n equals a,t,g, or c
  SITE (185): n equals a,t,g, or c
  SITE (186): n equals a,t,g, or c
  SITE (187): n equals a,t,g, or c
  SITE (188): n equals a,t,g, or c
  SITE (189): n equals a,t,g, or c
  SITE (190): n equals a,t,g, or c
  SITE (191): n equals a,t,g, or c
  SITE (192): n equals a,t,g, or c
  SITE (193): n equals a,t,g, or c
  SITE (194): n equals a,t,g, or c
  SITE (195): n equals a,t,g, or c
  SITE (196): n equals a,t,g, or c
  SITE (197): n equals a,t,g, or c
  SITE (198): n equals a,t,g, or c
  SITE (199): n equals a,t,g, or c
  SITE (200): n equals a,t,g, or c
  SITE (201): n equals a,t,g, or c
  SITE (202): n equals a,t,g, or c
  SITE (203): n equals a,t,g, or c
  SITE (204): n equals a,t,g, or c
  SITE (205): n equals a,t,g, or c
  SITE (206): n equals a,t,g, or c
  SITE (207): n equals a,t,g, or c
  SITE (208): n equals a,t,g, or c
  SITE (209): n equals a,t,g, or c
  SITE (210): n equals a,t,g, or c
  SITE (211): n equals a,t,g, or c
  SITE (212): n equals a,t,g, or c
  SITE (213): n equals a,t,g, or c
  SITE (214): n equals a,t,g, or c
  SITE (215): n equals a,t,g, or c
  SITE (216): n equals a,t,g, or c
  SITE (217): n equals a,t,g, or c
  SITE (218): n equals a,t,g, or c
  SITE (219): n equals a,t,g, or c
  SITE (220): n equals a,t,g, or c
  SITE (221): n equals a,t,g, or c
  SITE (222): n equals a,t,g, or c
  SITE (223): n equals a,t,g, or c
  SITE (224): n equals a,t,g, or c
  SITE (225): n equals a,t,g, or c
  SITE (226): n equals a,t,g, or c
  SITE (227): n equals a,t,g, or c
  SITE (228): n equals a,t,g, or c
  SITE (229): n equals a,t,g, or c
  SITE (230): n equals a,t,g, or c
  SITE (231): n equals a,t,g, or c
  SITE (232): n equals a,t,g, or c
  SITE (233): n equals a,t,g, or c
  SITE (234): n equals a,t,g, or c
  SITE (235): n equals a,t,g, or c
  SITE (236): n equals a,t,g, or c
  SITE (237): n equals a,t,g, or c
  SITE (238): n equals a,t,g, or c
  SITE (239): n equals a,t,g, or c
  SITE (240): n equals a,t,g, or c
  SITE (241): n equals a,t,g, or c
  SITE (242): n equals a,t,g, or c
  SITE (243): n equals a,t,g, or c
  SITE (244): n equals a,t,g, or c
  SITE (245): n equals a,t,g, or c
  SITE (246): n equals a,t,g, or c
  SITE (247): n equals a,t,g, or c
  SITE (248): n equals a,t,g, or c
  SITE (249): n equals a,t,g, or c
  SITE (250): n equals a,t,g, or c
  SITE (251): n equals a,t,g, or c
  SITE (252): n equals a,t,g, or c
  SITE (253): n equals a,t,g, or c
  SITE (254): n equals a,t,g, or c
  SITE (255): n equals a,t,g, or c
  SITE (256): n equals a,t,g, or c
  SITE (257): n equals a,t,g, or c
  SITE (258): n equals a,t,g, or c
  SITE (259): n equals a,t,g, or c
  SITE (260): n equals a,t,g, or c
  SITE (261): n equals a,t,g, or c
  SITE (262): n equals a,t,g, or c
  SITE (263): n equals a,t,g, or c
  SITE (264): n equals a,t,g, or c
  SITE (265): n equals a,t,g, or c
  SITE (266): n equals a,t,g, or c
  SITE (267): n equals a,t,g, or c
  SITE (268): n equals a,t,g, or c
  SITE (269): n equals a,t,g, or c
  SITE (270): n equals a,t,g, or c
  SITE (271): n equals a,t,g, or c
  SITE (272): n equals a,t,g, or c
  SITE (273): n equals a,t,g, or c
  SITE (274): n equals a,t,g, or c
  SITE (275): n equals a,t,g, or c
  SITE (276): n equals a,t,g, or c
  SITE (277): n equals a,t,g, or c
  SITE (278): n equals a,t,g, or c
  SITE (279): n equals a,t,g, or c
  SITE (280): n equals a,t,g, or c
  SITE (281): n equals a,t,g, or c
  SITE (282): n equals a,t,g, or c
  SITE (283): n equals a,t,g, or c
  SITE (284): n equals a,t,g, or c
  SITE (285): n equals a,t,g, or c
  SITE (286): n equals a,t,g, or c
  SITE (287): n equals a,t,g, or c
  SITE (288): n equals a,t,g, or c
  SITE (289): n equals a,t,g, or c
  SITE (290): n equals a,t,g, or c
  SITE (291): n equals a,t,g, or c
  SITE (292): n equals a,t,g, or c
  SITE (293): n equals a,t,g, or c
  SITE (294): n equals a,t,g, or c
  SITE (295): n equals a,t,g, or c
  SITE (296): n equals a,t,g, or c
  SITE (297): n equals a,t,g, or c
  SITE (298): n equals a,t,g, or c
  SITE (299): n equals a,t,g, or c
  SITE (300): n equals a,t,g, or c
  SITE (301): n equals a,t,g, or c
  SITE (302): n equals a,t,g, or c
  SITE (303): n equals a,t,g, or c
  SITE (304): n equals a,t,g, or c
  SITE (3943): n equals a,t,g, or c
  SITE (3944): n equals a,t,g, or c
  SITE (3945): n equals a,t,g, or c
  SITE (3946): n equals a,t,g, or c
  SITE (3947): n equals a,t,g, or c
  SITE (3948): n equals a,t,g, or c
  SITE (3949): n equals a,t,g, or c
  SITE (3950): n equals a,t,g, or c
  SITE (3951): n equals a,t,g, or c
  SITE (3952): n equals a,t,g, or c
  SITE (3953): n equals a,t,g, or c
  SITE (3954): n equals a,t,g, or c
  SITE (3955): n equals a,t,g, or c
  SITE (3956): n equals a,t,g, or c
  SITE (3957): n equals a,t,g, or c
  SITE (3958): n equals a,t,g, or c
  SITE (3959): n equals a,t,g, or c
  SITE (3960): n equals a,t,g, or c
  SITE (3961): n equals a,t,g, or c
  SITE (3962): n equals a,t,g, or c
  SITE (3963): n equals a,t,g, or c
  SITE (3964): n equals a,t,g, or c
  SITE (3965): n equals a,t,g, or c
  SITE (3966): n equals a,t,g, or c
  SITE (3967): n equals a,t,g, or c
  SITE (3968): n equals a,t,g, or c
  SITE (3969): n equals a,t,g, or c
  SITE (3970): n equals a,t,g, or c
  SITE (3971): n equals a,t,g, or c
  SITE (3972): n equals a,t,g, or c
  SITE (3973): n equals a,t,g, or c
  SITE (3974): n equals a,t,g, or c
  SITE (3975): n equals a,t,g, or c
  SITE (3976): n equals a,t,g, or c
  SITE (3977): n equals a,t,g, or c
  SITE (3978): n equals a,t,g, or c
  SITE (3979): n equals a,t,g, or c
  SITE (3980): n equals a,t,g, or c
  SITE (3981): n equals a,t,g, or c
  SITE (3982): n equals a,t,g, or c
  SITE (3983): n equals a,t,g, or c
  SITE (3984): n equals a,t,g, or c
  SITE (3985): n equals a,t,g, or c
  SITE (3986): n equals a,t,g, or c
  SITE (3987): n equals a,t,g, or c
  SITE (3988): n equals a,t,g, or c
  SITE (3989): n equals a,t,g, or c
  SITE (3990): n equals a,t,g, or c
  SITE (3991): n equals a,t,g, or c
  SITE (3992): n equals a,t,g, or c
  SITE (3993): n equals a,t,g, or c
  SITE (3994): n equals a,t,g, or c
  SITE (3995): n equals a,t,g, or c
  SITE (3996): n equals a,t,g, or c
  SITE (3997): n equals a,t,g, or c
  SITE (3998): n equals a,t,g, or c
  SITE (3999): n equals a,t,g, or c
  SITE (4000): n equals a,t,g, or c
  SITE (4001): n equals a,t,g, or c
  SITE (4002): n equals a,t,g, or c
  SITE (4003): n equals a,t,g, or c
  SITE (4004): n equals a,t,g, or c
  SITE (4005): n equals a,t,g, or c
  SITE (4006): n equals a,t,g, or c
  SITE (4007): n equals a,t,g, or c
  SITE (4008): n equals a,t,g, or c
  SITE (4009): n equals a,t,g, or c
  SITE (4010): n equals a,t,g, or c
  SITE (4011): n equals a,t,g, or c
  SITE (4012): n equals a,t,g, or c
  SITE (4013): n equals a,t,g, or c
  SITE (4014): n equals a,t,g, or c
  SITE (4015): n equals a,t,g, or c
  SITE (4016): n equals a,t,g, or c
  SITE (4017): n equals a,t,g, or c
  SITE (4018): n equals a,t,g, or c
  SITE (4019): n equals a,t,g, or c
  SITE (4020): n equals a,t,g, or c
  SITE (4021): n equals a,t,g, or c
  SITE (4022): n equals a,t,g, or c
  SITE (4023): n equals a,t,g, or c
  SITE (4024): n equals a,t,g, or c
  SITE (4025): n equals a,t,g, or c
  SITE (4026): n equals a,t,g, or c
  SITE (4027): n equals a,t,g, or c
  SITE (4028): n equals a,t,g, or c
  SITE (4029): n equals a,t,g, or c
  SITE (4030): n equals a,t,g, or c
  SITE (4031): n equals a,t,g, or c
  SITE (4032): n equals a,t,g, or c
  SITE (4033): n equals a,t,g, or c
  SITE (4034): n equals a,t,g, or c
  SITE (4035): n equals a,t,g, or c
  SITE (4036): n equals a,t,g, or c
  SITE (4037): n equals a,t,g, or c
  SITE (4038): n equals a,t,g, or c
  SITE (4039): n equals a,t,g, or c
  SITE (4040): n equals a,t,g, or c
  SITE (4041): n equals a,t,g, or c
  SITE (4042): n equals a,t,g, or c
  SITE (4043): n equals a,t,g, or c
  SITE (4044): n equals a,t,g, or c
  SITE (4045): n equals a,t,g, or c
  SITE (4046): n equals a,t,g, or c
  SITE (4047): n equals a,t,g, or c
  SITE (4048): n equals a,t,g, or c
  SITE (4049): n equals a,t,g, or c
  SITE (4050): n equals a,t,g, or c
  SITE (4051): n equals a,t,g, or c
  SITE (4052): n equals a,t,g, or c
  SITE (4053): n equals a,t,g, or c
  SITE (4054): n equals a,t,g, or c
  SITE (4055): n equals a,t,g, or c
  SITE (4056): n equals a,t,g, or c
  SITE (4057): n equals a,t,g, or c
  SITE (4058): n equals a,t,g, or c
  SITE (4059): n equals a,t,g, or c
  SITE (4060): n equals a,t,g, or c
  SITE (4061): n equals a,t,g, or c
  SITE (4062): n equals a,t,g, or c
  SITE (4063): n equals a,t,g, or c
  SITE (4064): n equals a,t,g, or c
  SITE (4065): n equals a,t,g, or c
  SITE (4066): n equals a,t,g, or c
  SITE (4067): n equals a,t,g, or c
  SITE (4068): n equals a,t,g, or c
  SITE (4069): n equals a,t,g, or c
  SITE (4070): n equals a,t,g, or c
  SITE (4071): n equals a,t,g, or c
  SITE (4072): n equals a,t,g, or c
  SITE (4073): n equals a,t,g, or c
  SITE (4074): n equals a,t,g, or c
  SITE (4075): n equals a,t,g, or c
  SITE (4076): n equals a,t,g, or c
  SITE (4077): n equals a,t,g, or c
  SITE (4078): n equals a,t,g, or c
  SITE (4079): n equals a,t,g, or c
  SITE (4080): n equals a,t,g, or c
  SITE (4081): n equals a,t,g, or c
  SITE (4082): n equals a,t,g, or c
  SITE (4083): n equals a,t,g, or c
  SITE (4084): n equals a,t,g, or c
  SITE (4085): n equals a,t,g, or c
  SITE (4086): n equals a,t,g, or c
  SITE (4087): n equals a,t,g, or c
  SITE (4088): n equals a,t,g, or c
  SITE (4089): n equals a,t,g, or c
  SITE (4090): n equals a,t,g, or c
  SITE (4091): n equals a,t,g, or c
  SITE (4092): n equals a,t,g, or c
  SITE (4093): n equals a,t,g, or c
  SITE (4094): n equals a,t,g, or c
  SITE (4095): n equals a,t,g, or c
  SITE (4096): n equals a,t,g, or c
  SITE (4097): n equals a,t,g, or c
  SITE (4098): n equals a,t,g, or c
  SITE (4099): n equals a,t,g, or c
  SITE (4100): n equals a,t,g, or c
  SITE (4101): n equals a,t,g, or c
  SITE (4102): n equals a,t,g, or c
  SITE (4103): n equals a,t,g, or c
  SITE (4104): n equals a,t,g, or c
  SITE (4105): n equals a,t,g, or c
  SITE (4106): n equals a,t,g, or c
  SITE (4107): n equals a,t,g, or c
  SITE (4108): n equals a,t,g, or c
  SITE (4109): n equals a,t,g, or c
  SITE (4110): n equals a,t,g, or c
  SITE (4111): n equals a,t,g, or c
  SITE (4112): n equals a,t,g, or c
  SITE (4113): n equals a,t,g, or c
  SITE (4114): n equals a,t,g, or c
  SITE (4115): n equals a,t,g, or c
  SITE (4116): n equals a,t,g, or c
  SITE (4117): n equals a,t,g, or c
  SITE (4118): n equals a,t,g, or c
  SITE (4119): n equals a,t,g, or c
  SITE (4120): n equals a,t,g, or c
  SITE (4121): n equals a,t,g, or c
  SITE (4122): n equals a,t,g, or c
  SITE (4123): n equals a,t,g, or c
  SITE (4124): n equals a,t,g, or c
  SITE (4125): n equals a,t,g, or c
  SITE (4126): n equals a,t,g, or c
  SITE (4127): n equals a,t,g, or c
  SITE (4128): n equals a,t,g, or c
  SITE (4129): n equals a,t,g, or c
  SITE (4130): n equals a,t,g, or c
  SITE (4131): n equals a,t,g, or c
  SITE (4132): n equals a,t,g, or c
  SITE (4133): n equals a,t,g, or c
  SITE (4134): n equals a,t,g, or c
  SITE (4135): n equals a,t,g, or c
  SITE (4136): n equals a,t,g, or c
  SITE (4137): n equals a,t,g, or c
  SITE (4138): n equals a,t,g, or c
  SITE (4139): n equals a,t,g, or c
  SITE (4140): n equals a,t,g, or c
  SITE (4141): n equals a,t,g, or c
  SITE (4142): n equals a,t,g, or c
  SITE (4143): n equals a,t,g, or c
  SITE (4144): n equals a,t,g, or c
  SITE (4145): n equals a,t,g, or c
  SITE (4146): n equals a,t,g, or c
  SITE (4147): n equals a,t,g, or c
  SITE (4148): n equals a,t,g, or c
  SITE (4149): n equals a,t,g, or c
  SITE (4150): n equals a,t,g, or c
  SITE (4151): n equals a,t,g, or c
  SITE (4152): n equals a,t,g, or c
  SITE (4153): n equals a,t,g, or c
  SITE (4154): n equals a,t,g, or c
  SITE (4155): n equals a,t,g, or c
  SITE (4156): n equals a,t,g, or c
  SITE (4157): n equals a,t,g, or c
  SITE (4158): n equals a,t,g, or c
  SITE (4159): n equals a,t,g, or c
  SITE (4160): n equals a,t,g, or c
  SITE (4161): n equals a,t,g, or c
  SITE (4162): n equals a,t,g, or c
  SITE (4163): n equals a,t,g, or c
  SITE (4164): n equals a,t,g, or c
  SITE (4165): n equals a,t,g, or c
  SITE (4166): n equals a,t,g, or c
  SITE (4167): n equals a,t,g, or c
  SITE (4168): n equals a,t,g, or c
  SITE (4169): n equals a,t,g, or c
  SITE (4170): n equals a,t,g, or c
  SITE (4171): n equals a,t,g, or c
  SITE (4172): n equals a,t,g, or c
  SITE (4173): n equals a,t,g, or c
  SITE (4174): n equals a,t,g, or c
  SITE (4175): n equals a,t,g, or c
  SITE (4176): n equals a,t,g, or c
  SITE (4177): n equals a,t,g, or c
  SITE (4178): n equals a,t,g, or c
  SITE (4179): n equals a,t,g, or c
  SITE (4180): n equals a,t,g, or c
  SITE (4181): n equals a,t,g, or c
  SITE (4182): n equals a,t,g, or c
  SITE (4183): n equals a,t,g, or c
  SITE (4184): n equals a,t,g, or c
  SITE (4185): n equals a,t,g, or c
  SITE (4186): n equals a,t,g, or c
  SITE (4187): n equals a,t,g, or c
  SITE (4188): n equals a,t,g, or c
  SITE (4189): n equals a,t,g, or c
  SITE (4190): n equals a,t,g, or c
  SITE (4191): n equals a,t,g, or c
  SITE (4192): n equals a,t,g, or c
  SITE (4193): n equals a,t,g, or c
  SITE (4194): n equals a,t,g, or c
  SITE (4195): n equals a,t,g, or c
  SITE (4196): n equals a,t,g, or c
  SITE (4197): n equals a,t,g, or c
  SITE (4198): n equals a,t,g, or c
  SITE (4199): n equals a,t,g, or c
  SITE (4200): n equals a,t,g, or c
  SITE (4201): n equals a,t,g, or c
  SITE (4202): n equals a,t,g, or c
  SITE (4203): n equals a,t,g, or c
  SITE (4204): n equals a,t,g, or c
  SITE (4205): n equals a,t,g, or c
  SITE (4206): n equals a,t,g, or c
  SITE (4207): n equals a,t,g, or c
  SITE (4208): n equals a,t,g, or c
  SITE (4209): n equals a,t,g, or c
  SITE (4210): n equals a,t,g, or c
  SITE (4211): n equals a,t,g, or c
  SITE (4212): n equals a,t,g, or c
  SITE (4213): n equals a,t,g, or c
  SITE (4214): n equals a,t,g, or c
  SITE (4215): n equals a,t,g, or c
  SITE (4216): n equals a,t,g, or c
  SITE (4217): n equals a,t,g, or c
  SITE (4218): n equals a,t,g, or c
  SITE (4219): n equals a,t,g, or c
  SITE (4220): n equals a,t,g, or c
  SITE (4221): n equals a,t,g, or c
  SITE (4222): n equals a,t,g, or c
  SITE (4223): n equals a,t,g, or c
  SITE (4224): n equals a,t,g, or c
  SITE (4225): n equals a,t,g, or c
  SITE (4226): n equals a,t,g, or c
  SITE (4227): n equals a,t,g, or c
  SITE (4228): n equals a,t,g, or c
  SITE (4229): n equals a,t,g, or c
  SITE (4230): n equals a,t,g, or c
  SITE (4231): n equals a,t,g, or c
  SITE (4232): n equals a,t,g, or c
  SITE (4233): n equals a,t,g, or c
  SITE (4234): n equals a,t,g, or c
  SITE (4235): n equals a,t,g, or c
  SITE (4236): n equals a,t,g, or c
  SITE (4237): n equals a,t,g, or c
  SITE (4238): n equals a,t,g, or c
  SITE (4239): n equals a,t,g, or c
  SITE (4240): n equals a,t,g, or c
  SITE (4241): n equals a,t,g, or c
  SITE (4242): n equals a,t,g, or c
  SITE (4243): n equals a,t,g, or c
  SITE (4244): n equals a,t,g, or c
  SITE (4245): n equals a,t,g, or c
  SITE (4246): n equals a,t,g, or c
  SITE (4247): n equals a,t,g, or c
  SITE (4248): n equals a,t,g, or c
  SITE (4249): n equals a,t,g, or c
  SITE (4250): n equals a,t,g, or c
  SITE (4251): n equals a,t,g, or c
  SITE (4252): n equals a,t,g, or c
  SITE (4253): n equals a,t,g, or c
  SITE (4254): n equals a,t,g, or c
  SITE (4255): n equals a,t,g, or c
  SITE (4256): n equals a,t,g, or c
  SITE (4257): n equals a,t,g, or c
  SITE (4258): n equals a,t,g, or c
  SITE (4259): n equals a,t,g, or c
  SITE (4260): n equals a,t,g, or c
  SITE (4261): n equals a,t,g, or c
  SITE (4262): n equals a,t,g, or c
  SITE (4263): n equals a,t,g, or c
  SITE (4264): n equals a,t,g, or c
  SITE (4265): n equals a,t,g, or c
  SITE (4266): n equals a,t,g, or c
  SITE (4267): n equals a,t,g, or c
  SITE (4268): n equals a,t,g, or c
  SITE (4269): n equals a,t,g, or c
  SITE (4270): n equals a,t,g, or c
  SITE (4271): n equals a,t,g, or c
  SITE (4272): n equals a,t,g, or c
  SITE (4273): n equals a,t,g, or c
  SITE (4274): n equals a,t,g, or c
  SITE (4275): n equals a,t,g, or c
  SITE (4276): n equals a,t,g, or c
  SITE (4277): n equals a,t,g, or c
  SITE (4278): n equals a,t,g, or c
  SITE (4279): n equals a,t,g, or c
  SITE (4280): n equals a,t,g, or c
  SITE (4281): n equals a,t,g, or c
  SITE (4282): n equals a,t,g, or c
  SITE (4283): n equals a,t,g, or c
  SITE (4284): n equals a,t,g, or c
  SITE (4285): n equals a,t,g, or c
  SITE (4286): n equals a,t,g, or c
  SITE (4287): n equals a,t,g, or c
  SITE (4288): n equals a,t,g, or c
  SITE (4289): n equals a,t,g, or c
  SITE (4290): n equals a,t,g, or c
  SITE (4291): n equals a,t,g, or c
  SITE (4292): n equals a,t,g, or c
  SITE (4293): n equals a,t,g, or c
  SITE (4294): n equals a,t,g, or c
  SITE (4295): n equals a,t,g, or c
  SITE (4296): n equals a,t,g, or c
  SITE (4297): n equals a,t,g, or c
  SITE (4298): n equals a,t,g, or c
  SITE (4299): n equals a,t,g, or c
  SITE (4300): n equals a,t,g, or c
  SITE (4301): n equals a,t,g, or c
  SITE (4302): n equals a,t,g, or c
  SITE (4303): n equals a,t,g, or c
  SITE (4304): n equals a,t,g, or c
  SITE (4305): n equals a,t,g, or c
  SITE (4306): n equals a,t,g, or c
  SITE (4307): n equals a,t,g, or c
  SITE (4308): n equals a,t,g, or c
  SITE (4309): n equals a,t,g, or c
  SITE (4310): n equals a,t,g, or c
  SITE (4311): n equals a,t,g, or c
  SITE (4312): n equals a,t,g, or c
  SITE (4313): n equals a,t,g, or c
  SITE (4314): n equals a,t,g, or c
  SITE (4315): n equals a,t,g, or c
  SITE (4316): n equals a,t,g, or c
  SITE (4317): n equals a,t,g, or c
  SITE (4318): n equals a,t,g, or c
  SITE (4319): n equals a,t,g, or c
  SITE (4320): n equals a,t,g, or c
  SITE (4321): n equals a,t,g, or c
  SITE (4322): n equals a,t,g, or c
  SITE (4323): n equals a,t,g, or c
  SITE (4324): n equals a,t,g, or c
  SITE (4325): n equals a,t,g, or c
  SITE (4326): n equals a,t,g, or c
  SITE (4327): n equals a,t,g, or c
  SITE (4328): n equals a,t,g, or c
  SITE (4329): n equals a,t,g, or c
  SITE (4330): n equals a,t,g, or c
  SITE (4331): n equals a,t,g, or c
  SITE (4332): n equals a,t,g, or c
  SITE (4333): n equals a,t,g, or c
  SITE (4334): n equals a,t,g, or c
  SITE (4335): n equals a,t,g, or c
  SITE (4336): n equals a,t,g, or c
  SITE (4337): n equals a,t,g, or c
  SITE (4338): n equals a,t,g, or c
  SITE (4339): n equals a,t,g, or c
  SITE (4340): n equals a,t,g, or c
  SITE (4341): n equals a,t,g, or c
  SITE (4342): n equals a,t,g, or c
  SITE (4343): n equals a,t,g, or c
  SITE (4344): n equals a,t,g, or c
  SITE (4345): n equals a,t,g, or c
  SITE (4346): n equals a,t,g, or c
  SITE (4347): n equals a,t,g, or c
  SITE (4348): n equals a,t,g, or c
  SITE (4349): n equals a,t,g, or c
  SITE (4350): n equals a,t,g, or c
  SITE (4351): n equals a,t,g, or c
  SITE (4352): n equals a,t,g, or c
  SITE (4353): n equals a,t,g, or c
  SITE (4354): n equals a,t,g, or c
  SITE (4355): n equals a,t,g, or c
  SITE (4356): n equals a,t,g, or c
  SITE (4357): n equals a,t,g, or c
  SITE (4358): n equals a,t,g, or c
  SITE (4359): n equals a,t,g, or c
  SITE (4360): n equals a,t,g, or c
  SITE (4361): n equals a,t,g, or c
  SITE (4362): n equals a,t,g, or c
  SITE (4363): n equals a,t,g, or c
  SITE (4364): n equals a,t,g, or c
  SITE (4365): n equals a,t,g, or c
  SITE (4366): n equals a,t,g, or c
  SITE (4367): n equals a,t,g, or c
  SITE (4368): n equals a,t,g, or c
  SITE (4369): n equals a,t,g, or c
  SITE (4370): n equals a,t,g, or c
  SITE (4371): n equals a,t,g, or c
  SITE (4372): n equals a,t,g, or c
  SITE (4373): n equals a,t,g, or c
  SITE (4374): n equals a,t,g, or c
  SITE (4375): n equals a,t,g, or c
  SITE (4376): n equals a,t,g, or c
  SITE (4377): n equals a,t,g, or c
  SITE (4378): n equals a,t,g, or c
  SITE (4379): n equals a,t,g, or c
  SITE (4380): n equals a,t,g, or c
  SITE (4381): n equals a,t,g, or c
  SITE (4382): n equals a,t,g, or c
  SITE (4383): n equals a,t,g, or c
  SITE (4384): n equals a,t,g, or c
  SITE (4385): n equals a,t,g, or c
  SITE (4386): n equals a,t,g, or c
  SITE (4387): n equals a,t,g, or c
  SITE (4388): n equals a,t,g, or c
  SITE (4389): n equals a,t,g, or c
  SITE (4390): n equals a,t,g, or c
  SITE (4391): n equals a,t,g, or c
  SITE (4392): n equals a,t,g, or c
  SITE (4393): n equals a,t,g, or c
  SITE (4394): n equals a,t,g, or c
  SITE (4395): n equals a,t,g, or c
  SITE (4396): n equals a,t,g, or c
  SITE (4397): n equals a,t,g, or c
  SITE (4398): n equals a,t,g, or c
  SITE (4399): n equals a,t,g, or c
  SITE (4400): n equals a,t,g, or c
  SITE (4401): n equals a,t,g, or c
  SITE (4402): n equals a,t,g, or c
  SITE (4403): n equals a,t,g, or c
  SITE (4404): n equals a,t,g, or c
  SITE (4405): n equals a,t,g, or c
  SITE (4406): n equals a,t,g, or c
  SITE (4407): n equals a,t,g, or c
  SITE (4408): n equals a,t,g, or c
  SITE (4409): n equals a,t,g, or c
  SITE (4410): n equals a,t,g, or c
  SITE (4411): n equals a,t,g, or c
  SITE (4412): n equals a,t,g, or c
  SITE (4413): n equals a,t,g, or c
  SITE (4414): n equals a,t,g, or c
  SITE (4415): n equals a,t,g, or c
  SITE (4416): n equals a,t,g, or c
  SITE (4417): n equals a,t,g, or c
  SITE (4418): n equals a,t,g, or c
  SITE (4419): n equals a,t,g, or c
  SITE (4420): n equals a,t,g, or c
  SITE (4421): n equals a,t,g, or c
  SITE (4422): n equals a,t,g, or c
  SITE (4423): n equals a,t,g, or c
  SITE (4424): n equals a,t,g, or c
  SITE (4425): n equals a,t,g, or c
  SITE (4426): n equals a,t,g, or c
  SITE (4427): n equals a,t,g, or c
  SITE (4428): n equals a,t,g, or c
  SITE (4429): n equals a,t,g, or c
  SITE (4430): n equals a,t,g, or c
  SITE (4431): n equals a,t,g, or c
  SITE (4432): n equals a,t,g, or c
  SITE (4433): n equals a,t,g, or c
  SITE (4434): n equals a,t,g, or c
  SITE (4435): n equals a,t,g, or c
  SITE (4436): n equals a,t,g, or c
  SITE (4437): n equals a,t,g, or c
  SITE (4438): n equals a,t,g, or c
  SITE (4439): n equals a,t,g, or c
  SITE (4440): n equals a,t,g, or c
  SITE (4441): n equals a,t,g, or c
  SITE (4442): n equals a,t,g, or c
  SITE (4443): n equals a,t,g, or c
  SITE (4444): n equals a,t,g, or c
  SITE (4445): n equals a,t,g, or c
  SITE (4446): n equals a,t,g, or c
  SITE (4447): n equals a,t,g, or c
  SITE (4448): n equals a,t,g, or c
  SITE (4449): n equals a,t,g, or c
  SITE (4450): n equals a,t,g, or c
  SITE (4451): n equals a,t,g, or c
  SITE (4452): n equals a,t,g, or c
  SITE (4453): n equals a,t,g, or c
  SITE (4454): n equals a,t,g, or c
  SITE (4455): n equals a,t,g, or c
  SITE (4456): n equals a,t,g, or c
  SITE (4457): n equals a,t,g, or c
  SITE (4458): n equals a,t,g, or c
  SITE (4459): n equals a,t,g, or c
  SITE (4460): n equals a,t,g, or c
  SITE (4461): n equals a,t,g, or c
  SITE (4462): n equals a,t,g, or c
  SITE (4463): n equals a,t,g, or c
  SITE (4464): n equals a,t,g, or c
  SITE (4465): n equals a,t,g, or c
  SITE (4466): n equals a,t,g, or c
  SITE (4467): n equals a,t,g, or c
  SITE (4468): n equals a,t,g, or c
  SITE (4469): n equals a,t,g, or c
  SITE (4470): n equals a,t,g, or c
  SITE (4471): n equals a,t,g, or c
  SITE (4472): n equals a,t,g, or c
  SITE (4473): n equals a,t,g, or c
  SITE (4474): n equals a,t,g, or c
  SITE (4475): n equals a,t,g, or c
  SITE (4476): n equals a,t,g, or c
  SITE (4477): n equals a,t,g, or c
  SITE (4478): n equals a,t,g, or c
  SITE (4479): n equals a,t,g, or c
  SITE (4480): n equals a,t,g, or c
  SITE (4481): n equals a,t,g, or c
  SITE (4482): n equals a,t,g, or c
  SITE (4483): n equals a,t,g, or c
  SITE (4484): n equals a,t,g, or c
  SITE (4485): n equals a,t,g, or c
  SITE (4486): n equals a,t,g, or c
  SITE (4487): n equals a,t,g, or c
  SITE (4488): n equals a,t,g, or c
  SITE (4489): n equals a,t,g, or c
  SITE (4490): n equals a,t,g, or c
  SITE (4491): n equals a,t,g, or c
  SITE (4492): n equals a,t,g, or c
  SITE (4493): n equals a,t,g, or c
  SITE (4494): n equals a,t,g, or c
  SITE (4495): n equals a,t,g, or c
  SITE (4496): n equals a,t,g, or c
  SITE (4497): n equals a,t,g, or c
  SITE (4498): n equals a,t,g, or c
  SITE (4499): n equals a,t,g, or c
  SITE (4500): n equals a,t,g, or c
  SITE (4501): n equals a,t,g, or c
  SITE (4502): n equals a,t,g, or c
  SITE (4503): n equals a,t,g, or c
  SITE (4504): n equals a,t,g, or c
  SITE (4505): n equals a,t,g, or c
  SITE (4506): n equals a,t,g, or c
  SITE (4507): n equals a,t,g, or c
  SITE (4508): n equals a,t,g, or c
  SITE (4509): n equals a,t,g, or c
  SITE (4510): n equals a,t,g, or c
  SITE (4511): n equals a,t,g, or c
  SITE (4512): n equals a,t,g, or c
  SITE (4513): n equals a,t,g, or c
  SITE (4514): n equals a,t,g, or c
  SITE (4515): n equals a,t,g, or c
  SITE (4516): n equals a,t,g, or c
  SITE (4517): n equals a,t,g, or c
  SITE (4518): n equals a,t,g, or c
  SITE (4519): n equals a,t,g, or c
  SITE (4520): n equals a,t,g, or c
  SITE (4521): n equals a,t,g, or c
  SITE (4522): n equals a,t,g, or c
  SITE (4523): n equals a,t,g, or c
  SITE (4524): n equals a,t,g, or c
  SITE (4525): n equals a,t,g, or c
  SITE (4526): n equals a,t,g, or c
  SITE (4527): n equals a,t,g, or c
  SITE (4528): n equals a,t,g, or c
  SITE (4529): n equals a,t,g, or c
  SITE (4530): n equals a,t,g, or c
  SITE (4531): n equals a,t,g, or c
  SITE (4532): n equals a,t,g, or c
  SITE (4533): n equals a,t,g, or c
  SITE (4534): n equals a,t,g, or c
  SITE (4535): n equals a,t,g, or c
  SITE (4536): n equals a,t,g, or c
  SITE (4537): n equals a,t,g, or c
  SITE (4538): n equals a,t,g, or c
  SITE (4539): n equals a,t,g, or c
  SITE (4540): n equals a,t,g, or c
  SITE (4541): n equals a,t,g, or c
  SITE (4542): n equals a,t,g, or c
  SITE (4543): n equals a,t,g, or c
  SITE (4544): n equals a,t,g, or c
  SITE (4545): n equals a,t,g, or c
  SITE (4546): n equals a,t,g, or c
  SITE (4547): n equals a,t,g, or c
  SITE (4548): n equals a,t,g, or c
  SITE (4549): n equals a,t,g, or c
  SITE (4550): n equals a,t,g, or c
  SITE (4551): n equals a,t,g, or c
  SITE (4552): n equals a,t,g, or c
  SITE (4553): n equals a,t,g, or c
  SITE (4554): n equals a,t,g, or c
  SITE (4555): n equals a,t,g, or c
  SITE (4556): n equals a,t,g, or c
  SITE (4557): n equals a,t,g, or c
  SITE (4558): n equals a,t,g, or c
  SITE (4559): n equals a,t,g, or c
  SITE (4560): n equals a,t,g, or c
  SITE (4561): n equals a,t,g, or c
  SITE (4562): n equals a,t,g, or c
  SITE (4563): n equals a,t,g, or c
  SITE (4564): n equals a,t,g, or c
  SITE (4565): n equals a,t,g, or c
  SITE (4566): n equals a,t,g, or c
  SITE (4567): n equals a,t,g, or c
  SITE (4568): n equals a,t,g, or c
  SITE (4569): n equals a,t,g, or c
  SITE (4570): n equals a,t,g, or c
  SITE (4571): n equals a,t,g, or c
  SITE (4572): n equals a,t,g, or c
  SITE (4573): n equals a,t,g, or c
  SITE (4574): n equals a,t,g, or c
  SITE (4575): n equals a,t,g, or c
  SITE (4576): n equals a,t,g, or c
  SITE (4577): n equals a,t,g, or c
  SITE (4578): n equals a,t,g, or c
  SITE (4579): n equals a,t,g, or c
  SITE (4580): n equals a,t,g, or c
  SITE (4581): n equals a,t,g, or c
  SITE (4582): n equals a,t,g, or c
  SITE (4583): n equals a,t,g, or c
  SITE (4584): n equals a,t,g, or c
  SITE (4585): n equals a,t,g, or c
  SITE (4586): n equals a,t,g, or c
  SITE (4587): n equals a,t,g, or c
  SITE (4588): n equals a,t,g, or c
  SITE (4589): n equals a,t,g, or c
  SITE (4590): n equals a,t,g, or c
  SITE (4591): n equals a,t,g, or c
  SITE (4592): n equals a,t,g, or c
  SITE (4593): n equals a,t,g, or c
  SITE (4594): n equals a,t,g, or c
  SITE (4595): n equals a,t,g, or c
  SITE (4596): n equals a,t,g, or c
  SITE (4597): n equals a,t,g, or c
  SITE (4598): n equals a,t,g, or c
  SITE (4599): n equals a,t,g, or c
  SITE (4600): n equals a,t,g, or c
  SITE (4601): n equals a,t,g, or c
  SITE (4602): n equals a,t,g, or c
  SITE (4603): n equals a,t,g, or c
  SITE (4604): n equals a,t,g, or c
  SITE (4605): n equals a,t,g, or c
  SITE (4606): n equals a,t,g, or c
  SITE (4607): n equals a,t,g, or c
  SITE (4608): n equals a,t,g, or c
  SITE (4609): n equals a,t,g, or c
  SITE (4610): n equals a,t,g, or c
  SITE (4611): n equals a,t,g, or c
  SITE (4612): n equals a,t,g, or c
  SITE (4613): n equals a,t,g, or c
  SITE (4614): n equals a,t,g, or c
  SITE (4615): n equals a,t,g, or c
  SITE (4616): n equals a,t,g, or c
  SITE (4617): n equals a,t,g, or c
  SITE (4618): n equals a,t,g, or c
  SITE (4619): n equals a,t,g, or c
  SITE (4620): n equals a,t,g, or c
  SITE (4621): n equals a,t,g, or c
  SITE (4622): n equals a,t,g, or c
  SITE (4623): n equals a,t,g, or c
  SITE (4624): n equals a,t,g, or c
  SITE (4625): n equals a,t,g, or c
  SITE (4626): n equals a,t,g, or c
  SITE (4627): n equals a,t,g, or c
  SITE (4628): n equals a,t,g, or c
  SITE (4629): n equals a,t,g, or c
  SITE (4630): n equals a,t,g, or c
  SITE (4631): n equals a,t,g, or c
  SITE (4632): n equals a,t,g, or c
  SITE (4633): n equals a,t,g, or c
  SITE (4634): n equals a,t,g, or c
  SITE (4635): n equals a,t,g, or c
  SITE (4636): n equals a,t,g, or c
  SITE (4637): n equals a,t,g, or c
  SITE (4638): n equals a,t,g, or c
  SITE (4639): n equals a,t,g, or c
  SITE (4640): n equals a,t,g, or c
  SITE (4641): n equals a,t,g, or c
  SITE (4642): n equals a,t,g, or c
  SITE (4643): n equals a,t,g, or c
  SITE (4644): n equals a,t,g, or c
  SITE (4645): n equals a,t,g, or c
  SITE (4646): n equals a,t,g, or c
  SITE (4647): n equals a,t,g, or c
  SITE (4648): n equals a,t,g, or c
  SITE (4649): n equals a,t,g, or c
  SITE (4650): n equals a,t,g, or c
  SITE (4651): n equals a,t,g, or c
  SITE (4652): n equals a,t,g, or c
  SITE (4653): n equals a,t,g, or c
  SITE (4654): n equals a,t,g, or c
  SITE (4655): n equals a,t,g, or c
  SITE (4656): n equals a,t,g, or c
  SITE (4657): n equals a,t,g, or c
  SITE (4658): n equals a,t,g, or c
  SITE (4659): n equals a,t,g, or c
  SITE (4660): n equals a,t,g, or c
  SITE (4661): n equals a,t,g, or c
  SITE (4662): n equals a,t,g, or c
  SITE (4663): n equals a,t,g, or c
  SITE (4664): n equals a,t,g, or c
  SITE (4665): n equals a,t,g, or c
  SITE (4666): n equals a,t,g, or c
  SITE (4667): n equals a,t,g, or c
  SITE (4668): n equals a,t,g, or c
  SITE (4669): n equals a,t,g, or c
  SITE (4670): n equals a,t,g, or c
  SITE (4671): n equals a,t,g, or c
  SITE (4672): n equals a,t,g, or c
  SITE (4673): n equals a,t,g, or c
  SITE (4674): n equals a,t,g, or c
  SITE (4675): n equals a,t,g, or c
  SITE (4676): n equals a,t,g, or c
  SITE (4677): n equals a,t,g, or c
  SITE (4678): n equals a,t,g, or c
  SITE (4679): n equals a,t,g, or c
  SITE (4680): n equals a,t,g, or c
  SITE (4681): n equals a,t,g, or c
  SITE (4682): n equals a,t,g, or c
  SITE (4683): n equals a,t,g, or c
  SITE (4684): n equals a,t,g, or c
  SITE (4685): n equals a,t,g, or c
  SITE (4686): n equals a,t,g, or c
  SITE (4687): n equals a,t,g, or c
  SITE (4688): n equals a,t,g, or c
  SITE (4689): n equals a,t,g, or c
  SITE (4690): n equals a,t,g, or c
  SITE (4691): n equals a,t,g, or c
  SITE (4692): n equals a,t,g, or c
  SITE (4693): n equals a,t,g, or c
  SITE (4694): n equals a,t,g, or c
  SITE (4695): n equals a,t,g, or c
  SITE (4696): n equals a,t,g, or c
  SITE (4697): n equals a,t,g, or c
  SITE (4698): n equals a,t,g, or c
  SITE (4699): n equals a,t,g, or c
  SITE (4700): n equals a,t,g, or c
  SITE (4701): n equals a,t,g, or c
  SITE (4702): n equals a,t,g, or c
  SITE (4703): n equals a,t,g, or c
  SITE (4704): n equals a,t,g, or c
  SITE (4705): n equals a,t,g, or c
  SITE (4706): n equals a,t,g, or c
  SITE (4707): n equals a,t,g, or c
  SITE (4708): n equals a,t,g, or c
  SITE (4709): n equals a,t,g, or c
  SITE (4710): n equals a,t,g, or c
  SITE (4711): n equals a,t,g, or c
  SITE (4712): n equals a,t,g, or c
  SITE (4713): n equals a,t,g, or c
  SITE (4714): n equals a,t,g, or c
  SITE (4715): n equals a,t,g, or c
  SITE (4716): n equals a,t,g, or c
  SITE (4717): n equals a,t,g, or c
  SITE (4718): n equals a,t,g, or c
  SITE (4719): n equals a,t,g, or c
  SITE (4720): n equals a,t,g, or c
  SITE (4721): n equals a,t,g, or c
  SITE (4722): n equals a,t,g, or c
  SITE (4723): n equals a,t,g, or c
  SITE (4724): n equals a,t,g, or c
  SITE (4725): n equals a,t,g, or c
  SITE (4726): n equals a,t,g, or c
  SITE (4727): n equals a,t,g, or c
  SITE (4728): n equals a,t,g, or c
  SITE (4729): n equals a,t,g, or c
  SITE (4730): n equals a,t,g, or c
  SITE (4731): n equals a,t,g, or c
  SITE (4732): n equals a,t,g, or c
  SITE (4733): n equals a,t,g, or c
  SITE (4734): n equals a,t,g, or c
  SITE (4735): n equals a,t,g, or c
  SITE (4736): n equals a,t,g, or c
  SITE (4737): n equals a,t,g, or c
  SITE (4738): n equals a,t,g, or c
  SITE (4739): n equals a,t,g, or c
  SITE (4740): n equals a,t,g, or c
  SITE (4741): n equals a,t,g, or c
  SITE (4742): n equals a,t,g, or c
  SITE (4743): n equals a,t,g, or c
  SITE (4744): n equals a,t,g, or c
  SITE (4745): n equals a,t,g, or c
  SITE (4746): n equals a,t,g, or c
  SITE (4747): n equals a,t,g, or c
  SITE (4748): n equals a,t,g, or c
  SITE (4749): n equals a,t,g, or c
  SITE (4750): n equals a,t,g, or c
  SITE (4751): n equals a,t,g, or c
  SITE (4752): n equals a,t,g, or c
  SITE (4753): n equals a,t,g, or c
  SITE (4754): n equals a,t,g, or c
  SITE (4755): n equals a,t,g, or c
  SITE (4756): n equals a,t,g, or c
  SITE (4757): n equals a,t,g, or c
  SITE (4758): n equals a,t,g, or c
  SITE (4759): n equals a,t,g, or c
  SITE (4760): n equals a,t,g, or c
  SITE (4761): n equals a,t,g, or c
  SITE (4762): n equals a,t,g, or c
  SITE (4763): n equals a,t,g, or c
  SITE (4764): n equals a,t,g, or c
  SITE (4765): n equals a,t,g, or c
  SITE (4766): n equals a,t,g, or c
  SITE (4767): n equals a,t,g, or c
  SITE (4768): n equals a,t,g, or c
  SITE (4769): n equals a,t,g, or c
  SITE (4770): n equals a,t,g, or c
  SITE (4771): n equals a,t,g, or c
  SITE (4772): n equals a,t,g, or c
  SITE (4773): n equals a,t,g, or c
  SITE (4774): n equals a,t,g, or c
  SITE (4775): n equals a,t,g, or c
  SITE (4776): n equals a,t,g, or c
  SITE (4777): n equals a,t,g, or c
  SITE (4778): n equals a,t,g, or c
  SITE (4779): n equals a,t,g, or c
  SITE (4780): n equals a,t,g, or c
  SITE (4781): n equals a,t,g, or c
  SITE (4782): n equals a,t,g, or c
  SITE (4783): n equals a,t,g, or c
  SITE (4784): n equals a,t,g, or c
  SITE (4785): n equals a,t,g, or c
  SITE (4786): n equals a,t,g, or c
  SITE (4787): n equals a,t,g, or c
  SITE (4788): n equals a,t,g, or c
  SITE (4789): n equals a,t,g, or c
  SITE (4790): n equals a,t,g, or c
  SITE (4791): n equals a,t,g, or c
  SITE (4792): n equals a,t,g, or c
  SITE (4793): n equals a,t,g, or c
  SITE (4794): n equals a,t,g, or c
  SITE (4795): n equals a,t,g, or c
  SITE (4796): n equals a,t,g, or c
  SITE (4797): n equals a,t,g, or c
  SITE (4798): n equals a,t,g, or c
  SITE (4799): n equals a,t,g, or c
  SITE (4800): n equals a,t,g, or c
  SITE (4801): n equals a,t,g, or c
  SITE (4802): n equals a,t,g, or c
  SITE (4803): n equals a,t,g, or c
  SITE (4804): n equals a,t,g, or c
  SITE (4805): n equals a,t,g, or c
  SITE (4806): n equals a,t,g, or c
  SITE (4807): n equals a,t,g, or c
  SITE (4808): n equals a,t,g, or c
  SITE (4809): n equals a,t,g, or c
  SITE (4810): n equals a,t,g, or c
  SITE (4811): n equals a,t,g, or c
  SITE (4812): n equals a,t,g, or c
  SITE (4813): n equals a,t,g, or c
  SITE (4814): n equals a,t,g, or c
  SITE (4815): n equals a,t,g, or c
  SITE (4816): n equals a,t,g, or c
  SITE (4817): n equals a,t,g, or c
  SITE (4818): n equals a,t,g, or c
  SITE (4819): n equals a,t,g, or c
  SITE (4820): n equals a,t,g, or c
  SITE (4821): n equals a,t,g, or c
  SITE (4822): n equals a,t,g, or c
  SITE (4823): n equals a,t,g, or c
  SITE (4824): n equals a,t,g, or c
  SITE (4825): n equals a,t,g, or c
  SITE (4826): n equals a,t,g, or c
  SITE (4827): n equals a,t,g, or c
  SITE (4828): n equals a,t,g, or c
  SITE (4829): n equals a,t,g, or c
  SITE (4830): n equals a,t,g, or c
  SITE (4831): n equals a,t,g, or c
  SITE (4832): n equals a,t,g, or c
  SITE (4833): n equals a,t,g, or c
  SITE (4834): n equals a,t,g, or c
  SITE (4835): n equals a,t,g, or c
  SITE (4836): n equals a,t,g, or c
  SITE (4837): n equals a,t,g, or c
  SITE (4838): n equals a,t,g, or c
  SITE (4839): n equals a,t,g, or c
  SITE (4840): n equals a,t,g, or c
  SITE (4841): n equals a,t,g, or c
  SITE (4842): n equals a,t,g, or c
  SITE (4843): n equals a,t,g, or c
  SITE (4844): n equals a,t,g, or c
  SITE (4845): n equals a,t,g, or c
  SITE (4846): n equals a,t,g, or c
  SITE (4847): n equals a,t,g, or c
  SITE (4848): n equals a,t,g, or c
  SITE (4849): n equals a,t,g, or c
  SITE (4850): n equals a,t,g, or c
  SITE (4851): n equals a,t,g, or c
  SITE (4852): n equals a,t,g, or c
  SITE (4853): n equals a,t,g, or c
  SITE (4854): n equals a,t,g, or c
  SITE (4855): n equals a,t,g, or c
  SITE (4856): n equals a,t,g, or c
  SITE (4857): n equals a,t,g, or c
  SITE (4858): n equals a,t,g, or c
  SITE (4859): n equals a,t,g, or c
  SITE (4860): n equals a,t,g, or c
  SITE (4861): n equals a,t,g, or c
  SITE (4862): n equals a,t,g, or c
  SITE (4863): n equals a,t,g, or c
  SITE (4864): n equals a,t,g, or c
  SITE (4865): n equals a,t,g, or c
  SITE (4866): n equals a,t,g, or c
  SITE (4867): n equals a,t,g, or c
  SITE (4868): n equals a,t,g, or c
  SITE (4869): n equals a,t,g, or c
  SITE (4870): n equals a,t,g, or c
  SITE (4871): n equals a,t,g, or c
  SITE (4872): n equals a,t,g, or c
  SITE (4873): n equals a,t,g, or c
  SITE (4874): n equals a,t,g, or c
  SITE (4875): n equals a,t,g, or c
  SITE (4876): n equals a,t,g, or c
  SITE (4877): n equals a,t,g, or c
  SITE (4878): n equals a,t,g, or c
  SITE (4879): n equals a,t,g, or c
  SITE (4880): n equals a,t,g, or c
  SITE (4881): n equals a,t,g, or c
  SITE (4882): n equals a,t,g, or c
  SITE (4883): n equals a,t,g, or c
  SITE (4884): n equals a,t,g, or c
  SITE (4885): n equals a,t,g, or c
  SITE (4886): n equals a,t,g, or c
  SITE (4887): n equals a,t,g, or c
  SITE (4888): n equals a,t,g, or c
  SITE (4889): n equals a,t,g, or c
  SITE (4890): n equals a,t,g, or c
  SITE (4891): n equals a,t,g, or c
  SITE (4892): n equals a,t,g, or c

SEQ ID NO: 8540 - DNA, 142 bp, Homo sapiens; identical to SEQ ID NO: 5400

SEQ ID NO: 8541 - DNA, 319 bp, Homo sapiens; identical to SEQ ID NO: 5402

SEQ ID NO: 8542 - DNA, 286 bp, Homo sapiens; identical to SEQ ID NO: 5406

SEQ ID NO: 8543 - DNA, 300 bp, Homo sapiens; identical to SEQ ID NO: 7804

SEQ ID NO: 8544 - DNA, 316 bp, Homo sapiens; identical to SEQ ID NO: 5409

SEQ ID NO: 8545 - DNA, 170 bp, Homo sapiens; identical to SEQ ID NO: 5414

SEQ ID NO: 8546 - DNA, 300 bp, Homo sapiens; identical to SEQ ID NO: 5417

SEQ ID NO: 8547 - DNA, 184 bp, Homo sapiens; identical to SEQ ID NO: 5421

SEQ ID NO: 8548 - DNA, 147 bp, Homo sapiens; identical to SEQ ID NO: 5241

SEQ ID NO: 8549 - DNA, 131 bp, Homo sapiens; identical to SEQ ID NO: 5432

SEQ ID NO: 8550 - DNA, 235 bp, Homo sapiens; identical to SEQ ID NO: 5438
  SITE (230): n equals a,t,g, or c

SEQ ID NO: 8551 - DNA, 143 bp, Homo sapiens; identical to SEQ ID NO: 5446

SEQ ID NO: 8552 - DNA, 170 bp, Homo sapiens; identical to SEQ ID NO: 5447

SEQ ID NO: 8553 - DNA, 135 bp, Homo sapiens; identical to SEQ ID NO: 5451

SEQ ID NO: 8554 - DNA, 125 bp, Homo sapiens; identical to SEQ ID NO: 5454

SEQ ID NO: 8555 - DNA, 183 bp, Homo sapiens; identical to SEQ ID NO: 5243

SEQ ID NO: 8556 - DNA, 319 bp, Homo sapiens; identical to SEQ ID NO: 5458

SEQ ID NO: 8557 - DNA, 175 bp, Homo sapiens; identical to SEQ ID NO: 5462

SEQ ID NO: 8558 - DNA, 196 bp, Homo sapiens; identical to SEQ ID NO: 5463

SEQ ID NO: 8559 - DNA, 296 bp, Homo sapiens; identical to SEQ ID NO: 5466

SEQ ID NO: 8560 - DNA, 219 bp, Homo sapiens; identical to SEQ ID NO: 5467

SEQ ID NO: 8561 - DNA, 154 bp, Homo sapiens; identical to SEQ ID NO: 5469

SEQ ID NO: 8562 - DNA, 2548 bp, Homo sapiens; identical to SEQ ID NO: 5470

SEQ ID NO: 8563 - DNA, 207 bp, Homo sapiens; identical to SEQ ID NO: 5474

SEQ ID NO: 8564 - DNA, 189 bp, Homo sapiens; identical to SEQ ID NO: 5479

SEQ ID NO: 8565 - DNA, 150 bp, Homo sapiens; identical to SEQ ID NO: 5482
  SITE (21): n equals a,t,g, or c

SEQ ID NO: 8566 - DNA, 162 bp, Homo sapiens; identical to SEQ ID NO: 5244

SEQ ID NO: 8567 - DNA, 301 bp, Homo sapiens; identical to SEQ ID NO: 5486
  SITE (98): n equals a,t,g, or c

SEQ ID NO: 8568 - DNA, 301 bp, Homo sapiens; identical to SEQ ID NO: 5488

SEQ ID NO: 8569 - DNA, 267 bp, Homo sapiens; identical to SEQ ID NO: 5493

SEQ ID NO: 8570 - DNA, 246 bp, Homo sapiens; identical to SEQ ID NO: 7852

SEQ ID NO: 8571 - DNA, 100 bp, Homo sapiens; identical to SEQ ID NO: 5916

SEQ ID NO: 8572 - DNA, 129 bp, Homo sapiens; identical to SEQ ID NO: 5494

SEQ ID NO: 8573 - DNA, 311 bp, Homo sapiens; identical to SEQ ID NO: 5495

SEQ ID NO: 8574 - DNA, 193 bp, Homo sapiens; identical to SEQ ID NO: 5245

SEQ ID NO: 8575 - DNA, 3991 bp, Homo sapiens; identical to SEQ ID NO: 5499

SEQ ID NO: 8576 - DNA, 140 bp, Homo sapiens; identical to SEQ ID NO: 5978

SEQ ID NO: 8577 - DNA, 280 bp, Homo sapiens; identical to SEQ ID NO: 5505

SEQ ID NO: 8578 - DNA, 187 bp, Homo sapiens; identical to SEQ ID NO: 5506

SEQ ID NO: 8579 - DNA, 246 bp, Homo sapiens; identical to SEQ ID NO: 5507

SEQ ID NO: 8580 - DNA, 153 bp, Homo sapiens; identical to SEQ ID NO: 5246

SEQ ID NO: 8581 - DNA, 202 bp, Homo sapiens; identical to SEQ ID NO: 5516

SEQ ID NO: 8582 - DNA, 275 bp, Homo sapiens
gcctgtaatcccagcactttgggaggctgaggcgggtggatcacgaggtcaggagatcgagatcatcctggctaacatggtgaaaccccgtctctactaaaaatacaaaaaattagctgggcatggtggcgggcacctgtagtcccagctactcgggaggctgaggcaggagaatggtgtgaagctgggaggcggagcttgcagtgagcccagattgtgccactgcactccagcctgggtgacagagcaagactctgactcaaaaaaaaaaaaaa

SEQ ID NO: 8583 - DNA, 203 bp, Homo sapiens; identical to SEQ ID NO: 5247

SEQ ID NO: 8584 - DNA, 166 bp, Homo sapiens; identical to SEQ ID NO: 5519

SEQ ID NO: 8585 - DNA, 190 bp, Homo sapiens; identical to SEQ ID NO: 5523

SEQ ID NO: 8586 - DNA, 2364 bp, Homo sapiens; identical to SEQ ID NO: 5525

SEQ ID NO: 8587 - DNA, 1367 bp, Homo sapiens
atgaaacccggtctctactaaaaatccaaaaaattagccgggtgtggtggcaggcgcctgtagtcccagctactcgggaggctgaggcagtagaatggcgtgaacccgggaggcggagcttgcagtgagcggagatcgcgccactgcactccagcctgggcgacagagcgagactccgtctcaaaaaaaaaaaaaaaatctttattaaattgacaccccccttgaacacctgttattatgaggtacgtaggttctagaccaaagctaatagaacactgcaatgttgaaaatgttctacatcttcagtatagtatctaatatgatagccactagccacatgtggctattgagcacttgaaatggaattagtgtgactggggaaccaaattcttaattatatttatttttcattaacttaactttaaatagcccactatgggtagtggctatcataatggacagtgcagatctgtacaacaaggatgcaacgcagcagggtgttagacacaaacggcccctgccccctggggactttacattttagtgtaggaaatcagcaagaaggaagaaagtgattagataaggaaaataagagctcttcagaaaataaaatagagagttcctggagcgtggaggggcaacttcagcaaaggtcagggagggcactttttgaggaggagacatttgggctaagacctcaacagatgaagcagctgggcaaagttttgagggaagggcttcccagacagagggagcagcaggtgcaaaggtcccgaggtggtggccgggtgcggtggctcacacctgtaatcccagcactttgggaggccgaggcaggaggatcacgaggtcaggaaatcgagaccatcctggctaacacgatgaaaccccgtctctactaaaaatacaaaaaaattagccgggcgtggtggcgggcacctgtagtcccagctactcaggaggctgaggcaggagaatggcgtgaacccgggaggcagagttcgcagtgagacgagatcgcgccactgcactccagcctggcgacagagcaagattctgcctcaaaaaaaaaaaaaaaaaaaaaggtctcaaggtgggaaccagcctgatgtgtttaagaaaatgctgtggctgggccgggcacggtggctcacgcctgtaatcccagcactttgggaggctgaggcgggtggatcacaaggtcaggaaatcgagaccatcctggctaacaaggtgaaaccccgtctctactaaaaatacaaaaattagccgggcgtgatggtgggcgcctgtaatcccagctactcgggaggctgaggcaagagaatggcgtgaacccgggaggcggagcttgcagtgagccgaga

SEQ ID NO: 8588 - DNA, 261 bp, Homo sapiens; identical to SEQ ID NO: 5527

SEQ ID NO: 8589 - DNA, 776 bp, Homo sapiens
cgcctgtttgtagtccggggacagccagccgacgtgttcccaaggctgttcaaggtaagcgtgcagagccccagagaagacagtgagattctgtccctgacggtttccccacagcctgagtgatatgatattccgactgagggaatggaaacatcagggctggtctggctgttgctgctagagaagttgggagcaaaggcagccagttagcttgctcttggaatggaaactgtgttaaggaaaaaaattctgggaaaccagtgtcttgttggaaagctctcagctcagtccagacataggatgtggtaagtcattccactctggatgccactggcttccttcaatgttttcttggctcaagccagccagatttattagggttccttctaggccaagactttgaggtggggtttcatgtctagcaaggtacatttcccatcttgctttgctctgcttattgggaaaagtcagccttttctgccgggcgaggtggctcacgcctgtaatcccagcactttgggaggccgaggcaggcggatcacgaggtcaggagatccaggccatcctggctaacatggtgaaaccccgtctctactaaaaatacaaaaaattagctgggcatgttggctggcacctgtagtcccagctactcgagaggctgaggcaggagaatggtgtgaacccgggaggcggagctttcagtgagccgagattgtgccactgcactccagcctgggcaacagagcgagactccgtctcaaaaaaaaaaaaaaaaa

SEQ ID NO: 8590 - DNA, 318 bp, Homo sapiens; identical to SEQ ID NO: 7879

SEQ ID NO: 8591 - DNA, 276 bp, Homo sapiens
cactttgggaggccgaggcgggtggatcacgaggtcaggagatcaagaccatcctggctaacagcgtgaaaccccgtctctactaaaaatacaaaaaaaattagctgggcatggtggcgggcacctgtagtcccagctactcgggaggctgaggcaggagaatggcgtgaacctgggaggcggagcttgcagtgagccgagatggtgccactgcactccagcctgggcaacaaagcgagactctgcctcaaaaaaaaaaaaaaaaaaaaaaaaaat

SEQ ID NO: 8592 - DNA, 108 bp, Homo sapiens; identical to SEQ ID NO: 5529

SEQ ID NO: 8593 - DNA, 61 bp, Homo sapiens; identical to SEQ ID NO: 7550

SEQ ID NO: 8594 - DNA, 312 bp, Homo sapiens; identical to SEQ ID NO: 5530

SEQ ID NO: 8595 - DNA, 158 bp, Homo sapiens; identical to SEQ ID NO: 5531

SEQ ID NO: 8596 - DNA, 193 bp, Homo sapiens; identical to SEQ ID NO: 5539

SEQ ID NO: 8597 - DNA, 95 bp, Homo sapiens; identical to SEQ ID NO: 6151

SEQ ID NO: 8598 - DNA, 323 bp, Homo sapiens; identical to SEQ ID NO: 5548

SEQ ID NO: 8599 - DNA, 310 bp, Homo sapiens; identical to SEQ ID NO: 5552

SEQ ID NO: 8600 - DNA, 253 bp, Homo sapiens
ctttgggaggccgaggcaggcagatcacgaggtcaggagatcgagaccatcctggctaacatggtgaaaccccgtctctactaaaaatacaaaaaattagctgggtgtgtttgcaggtgcctgtagtcccagctactcgggaggctgaggcaggagaatgggctgaacccaggaggcggcttgcagtgagccgagatcgcaccactgcactccagcctgggcgacagagcgagactccatctcaaaaaaaaaa

SEQ ID NO: 8601 - DNA, 183 bp, Homo sapiens; identical to SEQ ID NO: 5556

SEQ ID NO: 8602 - DNA, 136 bp, Homo sapiens; identical to SEQ ID NO: 5560

SEQ ID NO: 8603 - DNA, 260 bp, Homo sapiens
ccttgggaggccgaggcgggcagatcacgaggtcaggagatccagaccatcctggctaacacggtgaaaccccgtctctactaaaaatacaaaaaattagccaggcatggtggcgggcgcctgtagtcccagctactcgggcagctgaggcaggagaatggcgtgaacccgggaggcggagcttgcagcgagccaagattgcgccactgcactccagcctgggcgacagagcgaggactccgtctcaaaaaaaaaaaaaa

SEQ ID NO: 8604 - DNA, 279 bp, Homo sapiens; identical to SEQ ID NO: 5923

SEQ ID NO: 8605 - DNA, 202 bp, Homo sapiens; identical to SEQ ID NO: 5567

SEQ ID NO: 8606 - DNA, 320 bp, Homo sapiens; identical to SEQ ID NO: 5570

SEQ ID NO: 8607 - DNA, 300 bp, Homo sapiens; identical to SEQ ID NO: 5574

SEQ ID NO: 8608 - DNA, 150 bp, Homo sapiens; identical to SEQ ID NO: 5248

SEQ ID NO: 8609 - DNA, 322 bp, Homo sapiens; identical to SEQ ID NO: 5582

SEQ ID NO: 8610 - DNA, 142 bp, Homo sapiens; identical to SEQ ID NO: 5249

SEQ ID NO: 8611 - DNA, 123 bp, Homo sapiens; identical to SEQ ID NO: 5589

SEQ ID NO: 8612 - DNA, 270 bp, Homo sapiens; identical to SEQ ID NO: 5591

SEQ ID NO: 8613 - DNA, 301 bp, Homo sapiens; identical to SEQ ID NO: 5592

SEQ ID NO: 8614 - DNA, 214 bp, Homo sapiens; identical to SEQ ID NO: 5597

SEQ ID NO: 8615 - DNA, 243 bp, Homo sapiens; identical to SEQ ID NO: 7930

SEQ ID NO: 8616 - DNA, 307 bp, Homo sapiens; identical to SEQ ID NO: 5607

SEQ ID NO: 8617 - DNA, 166 bp, Homo sapiens; identical to SEQ ID NO: 5608

SEQ ID NO: 8618 - DNA, 228 bp, Homo sapiens; identical to SEQ ID NO: 7553

SEQ ID NO: 8619 - DNA, 214 bp, Homo sapiens; identical to SEQ ID NO: 5614

SEQ ID NO: 8620 - DNA, 268 bp, Homo sapiens; identical to SEQ ID NO: 5616

SEQ ID NO: 8621 - DNA, 906 bp, Homo sapiens; identical to SEQ ID NO: 5620

SEQ ID NO: 8622 - DNA, 368 bp, Homo sapiens; identical to SEQ ID NO: 5252

SEQ ID NO: 8623 - DNA, 131 bp, Homo sapiens; identical to SEQ ID NO: 7941

SEQ ID NO: 8624 - DNA, 823 bp, Homo sapiens; identical to SEQ ID NO: 5623

SEQ ID NO: 8625 - DNA, 2925 bp, Homo sapiens; identical to SEQ ID NO: 5990

SEQ ID NO: 8626 - DNA, 4706 bp, Homo sapiens; identical to SEQ ID NO: 5625

SEQ ID NO: 8627 - DNA, 3322 bp, Homo sapiens
acgggatgcagccatcatgaagatggccaaggaggctggtgtggaagtagtgacggagaattctcataccctctatgacctggacaggtaagagatggggcccagggatcaggttaccaattgtgagagttagtaatttgggcccctgctgagcggaactcagagaggttcagcattagggctacctgacccaggaggcatggcatcttctagaagctggaggagaataggccagagtcaggacctgtagaacaggtcacaaagagctttaccccattgaggtggcagagaggcttgttaggcccaaagcatggaagcagtgaggacccacactcagggtatttacaaatctgctcctagtatgcccgagtcccacctgtgcctcatattcccacttccatcctgctcaacagctgccctctgacctcagtggaccctgtctgttacccctccaacagacctctgttcacacaggtccagtttttgtacctaagatgagttcctaggctgggcatgctggctcatgcctgtaatcccagcactttgagaggatcacatgagtccatgagttcaagatcagcctgggcaacatagtgagacccccgtctctactaaaaataaatatattagccatgcatggtgggacatgcctgtagtcccaattactgaagaggctgaggttggaggatcacttgagcccaggggcttgaggctgccatgagctgtgatcatgccacgtcactccagcctgggtgacagagcaagatcctgtgtcaaaaaaaaaaaaaaaagagttcccaggttctatgactatctgggtttccaggccatgttgcttggtggcggggagggctctagagatccctgcagggagctgctaactacagaggagcctcctcccctggtgacagcctctgtgctttcagagattctaggaggaaatcctctcctccccttccctgccatgccagagctgtcaccctcctgctgctgctgctgctgttgctgctgctgccaagccagcagccgccgccgctccccacccccacttcccaacccagtgctggctgccaagaagccaggtcacacagctgtgcacgtgagccgggccctcaggaggagaggctgggtgtggagatcctcctcctgctgcgtgccagaggagagggaggcatagcagaggcagcagccgaccatatatctccactaacgtggggagagcaaactgagaaatgaactcacccagccagatgggccttgcgtaagctacttcttggccaagaagagccccgggaatgtggctccataccatcccaattcatccttatataaacagcctccgttctcttcttcgccctctgatactccttccttcttgcatgagtgcagttatgttttccctggtcatgaaaaatactttgtaaactacaagactctctttaagtatcagttgtggctatgaactctagctccagtctctgaatttgggaggataagctgtcttccacctctctgttcaatgttctaataaatggaggctaagaaggggatgattttccaagaaaggaacatgtctgctattccttatgatgttagagttaaaaaaaaaaaaaaaaaaaacatgtcttcagctcttatcaaagaactttctccagggcttacatgggtggtagaggcctatggggattcccttagcttggacagataggccaagtgccaagcaggctagtagggatttttctgtgattagagattttgtcagtctctgtctttaggcggctctgcgtcaacaccagggagcccggaattgagtcccagctctggccctgccttgctccattactgaggcacctgcttcagctctctgggctttattttccctctcggtaaaatggagatgcggcctcccttgccccctcctttccactcaggcatgggacctgtgagtggatgaggaaagccaccctcaaagccttcagagtctgggttcttttttgggtgggcagggacccacatcacagggccatgtgggtaacactagctatgctttgggctccccaggatcattgagctgaatgggcagaagccaccccttacatacaagcgctttcaggccatcatcagccgcatggagctgcccaagaagccagtgggcttggtgaccagccagcagatggagagctgcagggccgagatccaggagaaccacgacgagacctacggcgtgccctccctggaggagctgggtgcgtacttcctgcccagagccacttgtgctggtgcctgcttttgtgtaaagaaattctttgtgaaagtaatgcatgtcattatagaaaggttagaaagcacaggaaaacaaaaatggaaatggcagtcactattactccaccacccagaggtaaccacaattaattttaaactgtgtccttctagtatttgttctgttcatactcatacatgtaatcttctgtttctggttctagatcatgcctctatttttgtactaacctctcgcagacaatacaggcactgcctggtgctggtgtccatgggcttctcagtaacaagatagctagtattgcttctgttgaaagcagggaatctgtcagcctctcagattactaactacactctttcacccctccctctttcttaccttttttttttcttttttagacggagtctggctctgttgcccagtctggagtgcagtggcacagtcttggctcactgcaacctccacctcccgggttcaagcaattctgctgccccagcctcctgagtagctgggactacaggcgcctgccatcacgcccagctaatatttgtatttttagtagagacggggtttcaccatgttggccaggctggtcttgaactggtgacctcgagtgatccacccacatcggcctcccaaagtgctgggattacagacgtgagccacacctccagtcttttgatctgaacaaagctattagcctttttcacctgaaaaccacagttgttgccagctaatctgaaaaggcaggaggtccgggattgttgtcatctacctggagcgatgagggtgcaggggaaagcagagaaaatagtgactgtgggaagagaaccaagttgacctagaaaacgctaaaactttaaggattatctaacccccagtagcaccgagacactgtggttcaattctcataaagttcaaataacagaacagccgtgccgggctatcactgaaatggtcaaacctcctgtcttgtgacctttccttctcttcagggttccccactgaaggacttggtccagctgtctggcagggaggagagac

SEQ ID NO: 8628 - DNA, 4704 bp, Homo sapiens; identical to SEQ ID NO: 5253

SEQ ID NO: 8629 - DNA, 1049 bp, Homo sapiens
tctatgacagagccctgcgtagccccctgagctttgtcaaggctgctgagaggtttaggggcaggtgcagtgtcaggagtcccccagccaggccctggcacatagaggccatgcggccagacttggatgtggcagtggtcttggggcaggtgctgcaggctctaccactcttcaactgtgtcttcctgttctcctcttctcccatcagcaagctcaccccctggcttttgatgccagcctcctttgtggtgtggcaggaatgtcctgggaagagacaaggcttgaccacgtggatggagtgggaagacaggaggcactggggacagcatgtggctggggtgagctagtgggcggtggtactttccccaaagtccagagcactgggtgggagcagcgctcagctgtagggatgtctggtgtgaggttcttctgggcacctggcagagatcccaggtggcaactggcagaaggtccccagctcagagtgggccctgcatggcgttgtatgctggtgttcttttgtgggcaggacacctgcaagagggctacagctggagaaatgggtggggaggagtggctgttgacagctccctgggcccagagagaattgagtcagaattggggaaattgcagagcgagctcaaaagcagaaacccagttgggggaaagtatcgtacccagggctctaaatgactaatgcagaaatgatgttaagtttacctccagtcagagtgaaactttggcagcccccgctccctacacgcagctgccttcaggggaagtgagaattgacccaagccacaggtgaccatgacaggaccttgcactagctgagacccgagggtttaggaaattatatgagaaatgaagcaagagatgattatcttttgacagccaagtccccagatggaatttagatatttgaactaggcctaaggaatgtctgtctattaagtgtctgtagaaatttctgtcatctgcttgcagcgttgctgttttagctctgctaccattcttttctctctccatctcgtaaagaaaaaaaaaaa

SEQ ID NO: 8630 - DNA, 394 bp, Homo sapiens
tcatccaagtgacactgaggctgaggctccgttggtggaaactctgaagaagtgttttccagatggaagtgaatagacctagggttctctagaggtgcatggatggaaatggctgcggggcgggggactgggaggagcggcagagacaggaagagccaatggcatgtgggggcggccaggccagaaggacactccctggggtctgtacttcaccctcagtgaggcagcagggtttccagggggagcctgccccagtgccctctgagctcactgagctttgccctgatcagtcagccccactctttttgcttgtttgtgtaatgaagcccactgaagataaaattgcattcagaagaaagaaaattatgacctcaaggggaagcaaagagaaacc

SEQ ID NO: 8631 - DNA, 6717 bp, Homo sapiens
cctcccagtctgaggctgcatcctccattaccatcgcccttcctgtgggctgggaggccaggtcctttcctgcccagcgatgtcagcgtttcctcaggggccaggcactcatcaggagaaaggaactaattacttgagtaatttgccttgccttgctgagaggagtgtgccctgagggactccatgtgagtgtggtgacgggtgtgggggtgtccctgtgttattttaaaatgggtgccttcaggacgatgagcatgtgaccatttcctctctatttccatcacaagagtattatggtatgagggtctcaggttagattatcctcccaagactcttctctcttccttctctactggaagcccacatagcatttccttatggcttgagggagaggttcggagccacttacaaattagataaagtacatttacaatcttgtacaaagccacacaatgaagtcatttttctcagctttttttttttttttttttttttttttgagcctgagtctcgctctatcgtccagactggagtgcagtggcgcgatcttgcttcactgaaacctctgcctcccaggttcaagagattctcatacctcagcctcctgagtagctgggattacagacatgcaccactatgcctggctaatttttggatttttagtagagaccgggtttcaccctgttggccaggctggtctcgaacccctgacctcaagtgatcttcccgcctgggcctcccaaagtgctgggattataggtgtgagccacagtgcccagccttgtttttgtttttgttttgttttgacagtctgtcactctgtcacccaggctggagtgcagtggtgcgatctcacctcacttcagcctctgcctcccaggttcaagtgattctcctgtctcagcctcctgagtagctgggattacaggcgtgccaccacgcccagctatttttgtaatttcattaaagacagggtttccccatgttggtgaggctggtcttgaactcctggcctcaagtgatccacctgcttcagcctcccaaagtgcagggattacaggcatgagccactgtgcctggcctcagctatcttgaatgctggagaattaaatccttttctgtctagggtgtcagctccctaagggctgggccaaaacagttggatttataagacactagagtcttgcctcagtagctcctttgaattctgcactgaattgatcagtttcttggcccaaagtaaactcagatggcagcccaagagccactctgcagtgccttctttcacatggtcatcatgctctctgatccctcaggttctgtctaagcctcatgttttatgaccgtgctgttctcagcccacctcaccctgccccatgccttctcaatggtttgttcacctgaattccccagatttcatgccagtatccccaaggttccttgacctcttggtgtaagcattcagcatctaaaattcattttattcccgtcaacgcatttctaactgtagaacaagaattataaatgacaaagctcatagaaaattggcaccttgtcttccccctccctcttattttatacataaaagagaatatgggctgggcattgtggccaaggctgggcatgatagctcatacttgtaatccagcactttgggagggtgaggcagatggatcacctgaggtcaggagttcaagaccagcctggccaacatggtgaaacctcatctctactaaaattacaaaaaaaaaattagctaggcatggtggcagatgcctgtaatccagctactcaggaggctgatgaaggagaatcacttgaaccctggaggcagaggttgtagagagccaagatggcgctactgcactccaacctgggcgaaagagagcaagactccgtctcaaaaaaaaaaaagacaaaaattagccaggcatggtggtgccacctgtagtcccagctgcttgggagcctaaggcaggagaatcgttttgacctgggagtaggaggttgcggtaaccgagattgtgccactgcacttgagcctgggcaacagagtgagactctgtctcaaaacaataagaacaacagcaacaaaagagagagaccatgccttgctccaggtctcttagctattgaagatgtacctggacccaggtctccggtcttctagttgaagcaattgtactgccttacaaagtcacattctctttggtgctttttgattgacgtatttatccaactagaaagttactcatgccctcatccaaaaatgtggtagaggccagattagtgctggtaggaataagagatataacctttggctttggaaccacaagcattagcagtctccatgttctttaaagacttggtgatattggtatttaggctggacaccatgcaaagactacacaggctcggttcctgcatgcagagaagttatctaagagatatgaccaggccggaatagaatgctcagaccacgtggaggctgttaaacttttacataatctagggaaagaagggacacaaggtggcattagtctagggtcaggtgggaaaaggttatgctgaaaagtctctgcagctcaggacagctttgtgcaaagaactgaagttcacagctgctagtgcctgggagatcaaatagtataaatgagggcagacaaccctgaggggcagatggagctttccagacaatcttggcatgaggatgagtgagtttcaaatcagtcctgccgaggcagatggcttcctccagctctgcttactgaatgcgaagtcacagtcagtaagaaaactggttttcttcttcccaggcgctgccccatacctgaagaccaagtttatctgtgtgacaccgtaagtggcttcctttccccgttttgccttcatttctaatatcctcagttatccctgggaatgggacactgggtgagagttaatctgccaaaggttggaagcccctgggctatgtttagtactcaaagtgaccttgtgtgtttaaaaagcttgagcttttatttttctgttggagaccagagtttgatggcttgtgtgtgtgtgttttgttcttttttttttttccattgtgtcttgtcaaccccccgtttcccctcctgctgccccccatttcctacagaacgacctgcagcaataccattgacctgccgatgtccccccgcactttagattcattgatgcagtttggaaataatggtgaaggtgctgaaccctcagcaggagggcagtttggtgagtatttggttgacagactttgtccctataagggaagttggtcccctttgtgtgatgctctcacatgtacacaccgagagctggtcactcggaatggtaggagattctagagctttgctttccaaaagagatggtatgaatgccacatgtgtgagtataaatcttctagcagccacactggaaatagacgaacttaatttttacaatatattttatttaacccactaaatccaacatactctcaatttaacatttcagaaaaagttgaggctgggtgagtggctcatgcctgtaatcccagcactttgggaggccgaggtgggtggatcacttgaggtcaggagttcgagaccagtctgaccaaaatctctaaaatataaaaattagctgggcatggtggcgcatacctgtaatcccagctactcaagaagctgaggtgggaggatcgcttgagcctgggaggtggaggttgcagtgagcagagatcgtgccactgcactccagcctgggcgacagagtgagactccatctcaaataaacaaaactaaactaaaaagaaaaagttgagacctttttttattcttttttttcatactaagcctttaaaatccagtgggcttttgacagccacagcacagctcagtttggacaaaccaaatctcaaatgcttggtggccacgtgtgtctcggggctcctgaattaaacagtagatcaagggcagaagatctcaggacagccttagagcttctgtaaacatggagctctgggaatcagttaaggtgggaatgagaaaggacccttcccgaggcagggtcctccagggaggagggtaaatctggcttttctgaccatccctgggccttaaggggcaggagattggatagcagtggtagcctgggccctgtcctctgaagggctgggggcgtggcctgccagttgcagagggtggacaactgaactagttttccctgtctgtccctccagagtccctcacctttgacatggagttgacctcggagtgcgctacctcccccatgtgaggagctgagaacggaagctgcagaaagatacgactgaggcgcctacctgcattctgccacccctcacacagccaaaccccagatcatctgaaactactaactttgtggttccagattttttttaatctcctacttctgctatctttgagcaatctgggcacttttaaaaatagagaaatgagtgaatgtgggtgatctgcttttatctaaatgcaaataaggatgtgttctctgagacccatgatcaggggatgtggcggggggtggctagagggagaaaaaggaaatgtcttgtgttgttttgttcccctgccctcctttctcagcagctttttgttattgttgttgttgttcttagacaagtgcctcctggtgcctgcggcatccttctgcctgtttctgtaagcaaatgccacaggccacctatagctacatactcctggcattgcactttttaaccttgctgacatccaaatagaagataggactatctaagccctaggtttctttttaaattaagaaataataacaattaaagggcaaaaaacactgtatcagcatagcctttctgtatttaagaaacttaagcagccgggcatggtggctcacgcctgtaatcccagcactttgggaggccgaggcggatcataaggtcaggagatcaagaccatcctggctaacacggtgaaaccccgtctctactaaaagtacaaaaaattagctgggtgtggtggtgggcgcctgtagtcccagctactcgggaggctgaggcaggagaatcgcttgaacctgagaggcggaggttgcagtgagccaaaattgcaccactgcacactgcactccatcctgggcgacagtctgagactctgtctcaaaaaaaaaaaaaaaaaaaagaaacttcagttaacagcctccttggtgctttaagcattcagcttccttcaggctggtaatttatataatccctgaaacgggcttcaggtcaaacccttaagacatctgaagctgcaacctggcctttggtgttgaaataggaaggtttaaggagaatctaagcattttagacttttttttataaatagacttattttcctttgtaatgtattggccttttagtgagtaaggctgggcagagggtgcttacaaccttgactccctttctccctggacttgatctgctgtttcagaggctaggttgtttctgtgggtgccttatcagggctgggatacttctgattctggcttccttcctgccccaccctcccgaccccagtccccctgatcctgctagaggcatgtctccttgcgtgtctaaaggtccctcatcctgtttgttttaggaatcctggtctcaggacctcatggaagaagagggggagagagttacaggttggacatgatgcacactatggggccccagcgacgtgtctggttgagctcagggaatatggttcttagccagtttcttggtgatatccagtggcacttgtaatggcgtcttcattcagttcatgcagggcaaaggcttactgataaacttgagtctgccctcgtatgagggtgtatacctggcctccctctgaggctggtgactcctccctgctggggccccacaggtgaggcagaacagctagagggcctccccgcctgcccgccttggctggctagctcgcctctcctgtgcgtatgggaacacctagcacgtgctggatgggctgcctctgactcagaggcatggccggatttggcaactcaaaaccaccttgcctcagctgatcagagtttctgtggaattctgtttgttaaatcaaattagctggtctctgaattaagggggagacgaccttctctaagatgaacagggttcgccccagtcctcctgcctggagacagttgatgtgtcatgcagagctcttacttctccagcaacactcttcagtacataataagcttaactgataaacagaatatttagaaaggtgagacttgggcttaccattgggtttaaatcatagggacctagggcgagggttcagggcttctctggagcagatattgtcaagttcatggccttaggtagcatgtatctggtcttaactctgattgtagcaaaagttctgagaggagctgagccctgttgtggcccattaaagaacagggtcctcaggccctgcccgcttcctgtccactgccccctccccatccccagcccagccgagggaatcccgtgggttgcttacctacctataaggtggtttataagctgctgtcctggccactgcattcaaattccaatgtgtacttcatagtgtaaaaatttatattattgtgaggttttttgtcttttttttttttttttttttttggtatattgctgtatctactttaacttccagaaataaacgttatataggaaccgtc

SEQ ID NO: 8632 - DNA, 418 bp, Homo sapiens
aaaggtgtcagagtggaggcctccctccccggccccctcctaccccccagagcggcctcgtcctgtctggggtcagataagccacctaagcggggtggggggtagatactcccaccgcaccaaggcctccccttccacagttggctcctttatcactttcccttcagttcacccagcggggacaacacgcagacacccggtggtggctgcagggcccccggcagccagcggtgataatgcagggaaaggcgccccaacctcagctacgcgggcgcccacagggcttctccccacccctacacgtgccccagcgccctggagaccgcgcctgggagctacgagcgagcaccttccctcgcagagatggatcagattagccccctggggcggtggcacctgcccgtcccctcccctcctc

SEQ ID NO: 8633 - DNA, 327 bp, Homo sapiens
tccagcctgggtggcagagtgagactccatctcaaaaaaaaaaaaaaaaaaaaaagcactttgggaggccgaggtgggcgaatcacgaggtcaggagatcgagaccatcctggctaacacggtgaaaccccatctctactaaagatacaaaaaattagccgggcatggtggcgggcgcctgtagtcccagctatttgggaggctgaggcaggagaatggcgtgaacccaggaggcagagcttgcagtgagccgagatcctgccactgcactccagcctgggtgacagggtgacagagcaagactccatctcaaaaaaaaaaaaaaaa

SEQ ID NO: 8634 - DNA, 90 bp, Homo sapiens
gtgaaaccacgtctctaccaaaaatacaaaaattagccgggcgtggtggcaggtgcctgtaatcccagctacttgggaggctgaggcagg

SEQ ID NO: 8635 - DNA, 11566 bp, Homo sapiens
  SITE (8601): n equals a,t,g, or c
  SITE (8602): n equals a,t,g, or c
  SITE (8617): n equals a,t,g, or c
  SITE (8619): n equals a,t,g, or c
  SITE (8625): n equals a,t,g, or c
gcggccgcctgcagggccctgcaagccgccggagccgggcaaccaggtgagactgcgcggggcccggctgggcgcgggcgggcggtggctcgggcacgtcccccaagttggacccctttggccattcccttattgagcaccgaggtaaactgaggctcagagcagggaggtgcctagagccaggcctcgcagctagcggagagcgggccgtgcgtagcggatcgagtctgtcccggaagggtccggagtgcacgggagatgcctagggggcgtgggaaagctgaggggccgagtagaaggcagagggagtgggtagagagaagggatgaatcgggcaaggccgagatctaggagttacggggtgggtgggggtggggagagaagaggagtggggaaggaaatgggaaagccttgggatgggaaagtttcaagggggtggatgggtgctaaggagattggcggtgccagaagctaaattctagggcgctgcgcagccagagatgcgtcgggagctctaggaggggcggaggggcatctccagcgcggtggaggctcgtcctggaagccctgcctggttttaggaagagggcaaggaatgggtgctcgggacttgacgtgtggggaggtgagagggactaagagtacattttctattgatttctggccacccaccaaggctgtgcacccaactgctgtgtccctcagcctcccccaggtctgctgaggccaccttttccctccacattctcctgaaaggtggaagggatttaagggtcttttcccagcccccgtgactgctgccatcagcagaagggtcaggatctccttcctcctggaacacaaggctttacaggaactctccaatgttctaggatgaaaatatgcacattaagagtagctgcatctggctatcgcaaggacaaaaaaccaaacacagcatgttctcactcgtaggtgggaattgaataatgagaacacatggacacaggaaggggaacatcacacaccagggactgttgtggcgtagggggagggaggagggatagcattaggagatatacctaatgctaaatgacgagttaatgggtgcagcacactaacatggcatatgtatacatatgtaacaaacccgcacgttgtgcacatgtaccctaaaacttaaagtattaaaaaaaaaaaaaaaaaagagtagctgcatctggcaaacccgggagatctttgcactctccagctcccagctttctctccctgcccagctgggcagcccttcaagccctccagccccttcctcttaagtagataatgaagaaagtggctgtattgtgtgtctcctggagtattggcgttggttggggggcggagggtcccagcaaggagacctgtcacctgtgatgctgccaatgtcacattcacctgccagcctggcctgcctgggcgagcgcgcctgccctaaccctcctcccttagggtgcaatccatttttttgttgaggctgtgattgttctgatttttgtttcaacccctttgctgaccaggcctccaatagaaagaagggaattcacacacattttctataccctaatgagtgcatgcattttttttttttttagatgaagtctctctttgttgcccaggctggagtgcaatgatgcgatctctgctcactgcaacctctgcctcccagtctcaagcaattcttctgcctcagcctcccaagtagctaggactacaggcgtctgccaccacacccagctaatttttgtttttttggtagagacggggtttcgccatattgaccaggctagtctcgaactcctgacctcaagtgatccacccactttggcctcccaaagtgctgggattacaggcatgaactaccacgccctgtccctcctaagctttttgtagacacattgctgttgcctgagcctgaagagccttttctcctccctcctcctcacctggccaatcccatttgtgcattcagaactggacttcctcctccgggaagcctcccttgaccttccctgctcccacttgcaagttcactggcgaaatcccagaaccctttatccctttgctctctgagctcttaccacatgatttcgttcccttgtgaacatgattttgttcccttgtgggtttaaacaccatctgcagtcccatttcctgataccctgcctggcatgcagacagagtgaatgaatcctcccttccttttaaataaacactaatacttttgagattttaacactttgcaagggaattgttctctatgttaagcgctttcctacttttataaaaacatactgaacaaaattaaacctctcgcaaatgactaaaggtcgtgagtggaattataacttatagcccactgatttctttgcagcttttgcagtgggcagaactattatcttcacaccaaatggattcatgtcactaagatttcgctagtggttggatctgtttttttaaagttttccaatttctttcctcaccgtctgatgataattcttattctaggttgcttgccttttggcagtgcccttttacccagttcgtggtacctaatccagctgcctttgggttgaaaaactaaggatacagtctctttacctttgggtgcgggttaagagtaaattggtcctgaataaagattatgaacaaggattttccttgttttggttgcctgaagtcttttaaaaataaataaataaataaaataaacaacctagttcctgttgactttatagattactaaaaaatgtatctattcctgccaagaaatagtttgaactaaaatcagagggaacgtgcagctctttgagtattttgtttggtgctatgtaattgtaattaatttcatgtcattttcattgctttatttcctcaacatggtacctacatcacagggcttttgtaagaattaaatgagataacatagataaaagtaaagcaatcatttttaaagttcggttttaaaaacccacccacttttgcaaatcagactctgtgtttttaatcagacagttgaaactagggcagttgaccgttggggcacttgatttgctaaacgaaatctctcagtcttgtgaagtgggaaccatgtgaccctctgactcaggttttgtgttcttcctagtggaaggagcctgggagaggccaggcctccccggactgctagcctgcttttcctggggtccctggagccggaggaagaaccaggatgttgctgcctgcagaagctcagctcagggtgagtgctccccgacctcctgcatcctgagggccaggtgcatggaattatgggagtggtcacgtgaacttggggaccttagggacagagtggaccaacatctatggagtgcttgccatgtgccaggtgtggggatgagcaatgtgaggtgcccatatgccaggcagtgggcacatgggctcggtcaggctgggctctttccccaggagtctccacctaatgaaggcagtatggggagggctgtaacaaaggtgtctccaggagcatggtggggtgcatgggacgtgcatgggaccaaacacagcaagtctccctggagggtccagggagtatcctagagcaagtgatatttgatccggggatggagggattttcgtaggcagaaatgggaagttttggaaaaggagcactgagctaaggagtgacagcatgatgtcatgctcagaaaagggaccaccttcgagaggccctgggagtgaggtgcagaaggaaaccagtgagggccaaggctgaagggaagagtttggaccaaatcagtgtcccagatgtgcagccttcaggagtagtgtgccatgagcgatttctgagcagagagattggggtgtgtttagagagatggactctaggagagggagacacctcggcagagcccacctaggaggaggctgtcgtgtcccaggagggataacaggcggcctgggcccgacctgggcagtgggaatggaggggagaaaactcacccggagccactcctaggtggaatcatcaggccactaaatggaaatgagggagaaggggaaggggaagacacccctccatgtcaatgctgatgttagagagataggaagcgcactgatcccccccttatccacgtgagatgctttaagacacctgtggatgcctaaaaccatgggtagcaccaagccctacgtatacactgtgttttttactgtacatatatacctacgataaagcttaatttataaactaggcacagttaagacatttaacaatatataacaaaagttacaggaatgaggtatctctctgaaaatatcttattggactgtaccgcaggtaactgaaactgcggatagtgacgccatggatgggggtggctacagtactcggaagcatggtgtagcctgctgaatgcacacagcccatcccaaagtgcactgagaagtatagctttgttacagaaacaatggatggtggttcaaaattaactttcattgtgtctctcatttaagaaagaaaaccattagttgatgtgtcagtcttcattgctgcataagaaatgatcgcaagtaggttgggcatggtgactcatgcctgtaatcccagcactttgggaggccaaggtgggcagatgacctgaggtcaggagttcaagcccagcctgaccaacatggtgaaactctatctctactaaaaatacaaaattagccgggtgtggtggcacatgcctgtaatcccagctacttgggaggctgaggcagaagaactgcttggaccccggaggtggaggttgcagtgagccaaggttgtgccattgcactccagcctaggcaacaagagtgaaactccgtctcaaaataaataaataaataaataatcacaagcttagcagcttcaaaggcattgattaggtgtctgacttcttgctggctgtcagctggggctgctctcagctccaagaggcccctgccattccttgctctcacaagccctctcacaagagatcctccttcaatcagcaggagaaccccgctctccagtctgctaggagggagtccacataacctaaggagtcaaggtagtcactagccattgcatttgtcagagagacaacctactccccagagtgactaagctatcacattcacagagcccatccagactcaaggaagggctttataaggggccagaatcttgggggctgtcttagaattctgcctgtcatgtttgaaaactcaaaaaaaagtacaaaaaaaaaaaagaaagaaaacaaatgtgaaacatcattcacttaattccatcattcagagataactacaattatattttggggtacgccattctatttacctatctctccttgtgctctttaaaatttaataaactcacttctatatcatcttcaaaatgcagtagatatttaaaatgtttaattgcaaaaatgctaacttcaacctctccaccatcattttggatatacttggaaactaaaggagaaaagatgaagcaacagaatcattaaccattttacataaatcttggataatttctctctctgtggtatgtacaaatctcatatagaagtgaatgtattaaaatgcaaatggcatttatggactatgtacacacattgatagcatatgataaatataggatatcataattacatgcatttatacaatcatgagttgcttaatgacagggatatacattctgaaaaatacatctttaggggatttttgttgtgtgaacacgatagagtgtacttagaaacctggatggtataacctactacatgcctatgctatgcggcatagcctatcgttcctaggctacaaacctgtacagcaggttactgtcctgaatattgtgggcaactgtaacacaatggtaagtagctgtgtgtctcaacatacctaaacatagtaaaggtgcagtaaaaatatgctataaaagatcaaaaaatggtacatctgcataggacacttaccatgaatgaagttttcaaggctggaagttgctctgggtgagtcagcgagtgagtggtgagtgaatgggaagacctaggacattgctgtgcactactgtcgactatataaacgcagtacacttaggctacactacatttattttaaaatatttctttcttcaataataaattaaccttagcttactgtaacttttttactttataagctttttgattttttggccaggcatgatggcgcgtgcctgtagaccctgctactccagaggctgaggcaggaggatggctcgggcccaagagttcgaggctacagtgatccgtactcctgccattgcactgcagcctgcacaccatagtgagactgtctcaaaacaaacaaacagacaaacaaaaaccacctttttaaattattaaaagctttttcactcttttgtagtaatacttggcttaaaacacaaaatattgtagaaatgtacaaaaatattttctttctttatatccttatttagtaggctttttcctattttaattttttttttttttttttttttgctaaaaactaagacacaaacatgcgccttagcctacacctacacacaaggtcaggatcatcagtatcactgtcttctgcttccacatcttgtcccactggaaggtcttcagggacaataacacacatggagctgtcacctcctatgataaacaatgccttcttctggatacctcttgaagggcttgcctgaggcagttttacaattaactatatatatatataaactttatatacgtgtgtgtgtatatatatctttatatatatatatatatacacacacacacacatataagtagagggagtacactctaaaataatgttaaaacatatagtaggccgaggctggcggatcacctgaagtcaggagttccagaccagcctggcccacatggtgaaaccccatctctactaaaaatacaaaaattagccagggcgtggtggcacacgcctgtaatctcagctactcgggaggctgaggcaggagaactgcttgaacctgggaggcggaggttgcagtgggcagagatttcgccagtgcactccagcctgggcaacagagcaagactccatctcaaaaaataataataattttatatatatagagagagagagagacagtacagtaacatagtcatttcttattattatcaagtattgtctactgtatataattgtatgtactagacttttacatgactggcagcgagttaggttgtttccaccagcattgccacaaacatgtgagtaatgcattgcactgcaacatcaggacaactacaaggttactaggtgacaggaattttttagctgtgtttcaatctttttttttttttttttttttttttgaaacagagtctagctctgtcacccaggctgcactgtgcagtggcacgttttggctcactgcaagccccgcctcccaggttcacgccattctcctgcctcagcctcccaggtagctgggactacaggctcccgccaccacgcccagctaattttttgtatttttagtagagacggggtttcaccatgttagacaggatggtctcgatctcctgacctcgtgatctgtccgccttgacctcccaaagtgctgggattacaggcgtgagccacggcgcccggccagctgtgtttcagtcttatgggaccactctcttattaaggttcgtaattgaccaaaatgtcattatgttgcacgtgactgtacttactggtttggaatctgctttcttcatcaataacatactataactgccttccacagcaataattatatgtcaacaacatattttcttttttgaggtaattctaaattaacatgcagtggcaagaaatcatacagaaatcccagcactttgcgaggccgaggcagggggatagcttgagctcaggagttcaagaccagcatgagtgacatagtgagaccctgtctcaaaaaacaaaaagggagatcacccagagagatcctgtgtatactttgcccagtttcccccaatggtaacattttgcaaaactatagtgcaatagcacaaacgggatattgacactgacgtaatccacagatcttattcggatttccccaattttacttctatgcagtgtgtgtgtgtgtgtgtgtgtgtgtgtgtgtgtgtgtgtgtgtgtgtttaggtctgtggaattttatatattgtctttaatacctgaatcccattatatgtgtgagccatagttcactcaaccagtcccattgttggacatggaatcgggacactttcaactgcaagtaaagataccatgacacacatgagcacaagcagtaagagaaatcattatctcacctaaaagacagtccagagatggagtcggcttcagagttggttgattcaggggctcagggaccccaccaaacacccaggtttgctctttctctctgttgggccatcttcagtgtcagtttcatccttaggctggtagcaagatagctccagcagttccactaattattcctaattattttcttaggataaaatcctagaagtgaaatttgtgggtcaaagggtgtgtacatcgttaaggttnntgatatgtattttgntntgtttnttaagtaggtatttgctggggacaactttctcctttcccttcctagataactcactcacaacctttctcttctgattcagtgatttcttctcctgtgttccagaagacttccaggaacctgaggaggagctgccactaacagccatatttcccaatggagactgtgatgaccttggaagggggtcaaaagcctgtgatggagtcgtacacactcctgctgagcccaccggagactcaagatgaaggctggacccttgcgctgtccctggctctaacctacagactggggcctggctccgtcttactggcccccaggtctccatggagactgcagaaacccccgcctgctggaggcctgccacactcacagttaccagctagacagtggggcttactaagacaagcaggacctaaaacagtgtctcccctgggaacctactccccacccagcatttgctaagtctgatcacagggaggttattttgtctctctgtctcggtttctctgagccactgagacagatggctgtccgctttgaggctctgcagagctgtggcaccccatggtgtgtctgcagtgttctgggcacatgcatgggcacccatcgttgagagtgcagctgggaagaactctgaaccagaagtcatcagagctgaggcatggccttgaacatgtcactcagtctctggggcttctgtttcacaaatgcatgagggggccaccagcccagtggctttaaaccaggggcaggttgtccctccaggcagcattggaaatgtgtgtgtgttgagggggtcacagtgactgtgggggcacccctggcatctagtgggcatcccacaatgtgcagaacagtctctgacagcaaagaattggtccattcaatgccaattgtagtacctttgagacattctggctgagccaatgccttctccctgtcagagtcccccagagcagagagggtcaggcttccctggaccttggctcccagagcaagccaaaataaagactacactgttgccttgggggcttgtcgggccagggccaagacggtctgcgtgctgcagggccaggacagaaatagccacacatgccggtgagaacaaagagcctctttctttctcatgttgacatcgactttctgtgccaagtcctttgggtataaggatgctagggaattcctataggcaccaaacagaaggaaagctaggggcttggactactgggtataggacttgctctagctctcaggtcctagcccaagctcaatgcaaacacagcccctccgggctctctgtttctgtgaggttctggaatcccttcctctgtgtccgtgagtctgacagaatcgatgatgttcccttagagctgggaaatccatgtgtttattcacggagggaactcaccattacctcccttgtcttctttgcctgccttggagaaatccagagtcttcggaatggcaaaggcagctcctggatttccctggaggggaggcactagctgagggaagtagctcccttcattcatgatgcacagtttacgcagcagacacacaactgcgcctactatttgctcggtgccctgcaaggtgctgcctaactttgatttgttatttcagctctctccaggatagtgccaaatggtgcaatgggaaacctgttttgctggggggctctagatcactggctccagaactcccggctgccagggtagcccctacccccagccccttgctcctggacagcagtgggtctcacctttagcctctgcccccagttctggtctgacccaacagaggggctctatgatattaagaaggggcccttcctgctctgtgcctcaacctattctccataatagggagtctaatcctattccttccctgcctgatgaggatggtgtgaggatgaggaggacggcatctcatttggggctttttggcagtgggcctcattttaatcctgcagggctgcctgccagtggatctatccagctgcttccttgtagccaagaatgagttcaatgaattgtgattcactgattttattgattttgttttaaaacagggagactggtatttttgaagctgctatcattttctatttctttattaatttctttgtaatcatcttattaaagttttcttatttagtgggagagggagctttgtttaagtttggaatttgcctaaggcagaagttataaggcttcataaccttttgtatgtattgccaatatttgaaacttgggagattacgtataaaaaatacctagttttctgggtggaggatggggcatgctgtcatctcaagtctgctgcggctcacccccaccacctttaccccctcccccgcccttcccatcccccactgcacttcactcatgtaagacgtctgcccggtgctggtccaggcgggcatgtgagtttgtagcctctgctccaaaggatggtttacacattattttttcattaccttcagtattcctgtgaatggttcaagagagaaagtcttcatttactaagatttgggttctgcctcccaagtgacaatacggggctgagatccctctcagcttctttgagatgtggccaccataagcatcatcgttgtagggacagtctcattgctgtcttctagcagacagaagagttaggtgccagaaaggacaatcttgatggtgggtcccctccctgaaggactttaagaaggcataaaggggttggggtggagggtggcgtgtgaaggaggaggcccttgattaggtcagtggtccctgggagccatcggcgagaggcctccagccgggtgacagtctgggctctcgggtactaatctttctaatatggcagtggttgtggcacttctgacttgaattgataattctcatatctaataaaaccaagaagtacctcgttgatatcttatagaaaacaaaa

SEQ ID NO: 8636 - DNA, 693 bp, Homo sapiens
tacagaaacttagtctgtgtcttgtagccctgagctcctcctcttcctcaccagttaacaatatctcaaagaagggtgttgtcctgaaccattaccataaccccagcctaagctcaccctgaccaccactgtcccaggtatatcaccggctccagaactcctggctgccagggcaaccccccgcccccagccccttgctctgggacaggagggagtgggtctcacctttagcctctgcccccggttctggtctgacccagcacatggcagctccaaagagcggacaaaaccttgaagcaaagccaaagggccaggcctgaatgggaggtcagagggaagaaggcccaggagagggtctaagccagccctgtctaagaggaatctaacgcaggcacataggtagctttctatggtggccacattagaaaaaagtaaaaagaaatagataaaattaattttaagcatacatttcatttagcccaatatatctaaaatatcatttcaactgtaaattatcgagacattctgcattctgttttgcatattgtctttgaatcccatgagtttacacttagagcccaattcagatactacattttcatcagaaaaacttgatctgtatttagatttaattaaatgtacagtcgtaaacattcacatcctcaaattgtttcagaaatactgaaaggtttt

SEQ ID NO: 8637 - DNA, 576 bp, Homo sapiens
tttagtgttatgatgtcttttaaaccacagtttatgcctctatcccttttttttccttagtttttatgttgaagaacccagggagagttaaccaaagtttgaattttactgattgtacactcatgttgcatctttcttcattccttgtatattttgcaaattggttactgaactcagagacttggtcagactctggttcggtctctttagcaatactgtaggcagtgttgtgttctttcatggggaggcagaagtctggttttctcttttttttaaatcatgtccgcagttgttgggctcagtgcccagatccattaatttatcaatggtttaaaaatagtgacattctaattgtgtgggtttttttaaaattttttgttggaatacttttattaagagatgcttctgcttacctgctgttcagttatccagtggcacagttatataggaaaggtaggatatatacttgattctttgcctttatttattcttttttcaaaatagtgacttagttccctattattctctaagagaaccagctatttaatttaatttaattaattaatttttttgaga

SEQ ID NO: 8638 - DNA, 576 bp, Homo sapiens; identical to SEQ ID NO: 8637

SEQ ID NO: 8639 - DNA, 366 bp, Homo sapiens
ataatgaactagaatatcctcattattaattactcgcttgttttctcgtatattacacagtagtctcagaatagcaatactaataataccataaccaatgtgattgctgagaatagttgcataaattgtttcatgtatgctgtcctcatcaccccccgacatcatcatatctgtattatatctatcttgtcagattattcattacatgcaatattctctttcaaccttaatttgtttttattctgtaagtaattatatagttcagtggctggcattctttttctgtaaaaggccaggtagcagatgttttaatttttgcaggcccggaggcaaaattaaagatactatatttagggtgggcaaagt

SEQ ID NO: 8640 - DNA, 246 bp, Homo sapiens
aataagttagccaagtgtggtggtctacctgtaatcttagctacttgggaggctgaggttggaggattgcttgagcacagaagtttgaggctgcagtgagctatgattgtgccattgtactccaatctgggtgacagagtgagaccctgactcttaaaaaaaaaaaattctgttgtttataagccacccagtttatgacttttggtatagcagcttgaatgaactaagtaggtatgttttctaagt

SEQ ID NO: 8641 - DNA, 245 bp, Homo sapiens
aataagttagccaagtgtggtggtctacctgtaatcttagctacttgggaggctgaggttggaggattgcttgagcacagaagtttgaggctgcagtgagctatgattgtgccattgtactccaatctgggtgacagagtgagaccctgactcttaaaaaaaaaaattctgttgtttataagccacccagtttatgacttttggtatagcagcttgaatgaactaagtaggtatgttttctaagt

SEQ ID NO: 8642 - DNA, 366 bp, Homo sapiens; identical to SEQ ID NO: 8639

SEQ ID NO: 8643 - DNA, 7639 bp, Homo sapiens
  SITE (7413): n equals a,t,g, or c
gtgtgtgtgtgtgtgtgtgtacaatataaaccaaatacaaccagatccattaacacttgatgaatttaggtgaaactctcacttacgtatggaaaatcccagaaagatctggagctggaacagaggattctgcttgtattccatgggcttattattcaactgtggatcaagttaaggtaaaatacaaatcatttgttttgtgacacttcccaaaatagacacacaattgaaggaagacaaggttagtgttttcctgtggtccaattctacgttaaaatcctaagaaaataaactgtttgcaatctactttagcaactatgctgctacctatgacacacaagacaaaaatctaacatttcctaatatgatacagctcaaaggcctttcaagatatttgggaagtttagatttttgtcttgtgggtcacaggtagccactgaaaaattgaccaagaatggcagtatatttgcatttcagatccttcattctggtggaatgaaggaaggcttggagggggaagagactggaggttgggaggccgttgtaatacgtgaggcaaatttcaaggacctctactgtaaggagggagaaaagaaatggagtcggttatagataggtgggtgaagtgcctgagtgagccgggggaagtagctccttgataattcagtgttctggctcaaacaaatgagtaaatctggtatttgtggtcctatttattattacacatttcattcatctatggatttttagggactgccatagcgcttggctcacactcaagagttcatgagtttatggaacaaaccaacactgttcatttgggattcttttaaaatcactgctcattagctgagctaatttttgcctctgcagacatttctgttatgtcagcatcacccacatgacctacctactactcaccattgttccaatttaactacttcaagtgaaaagttactaaattggcagtaccacattgggcaaagtctgttacttcaattggtctctccaaaattcctgaggccctgggtgcaaagtctcagttctctgaaatcctgacctaattcacaagggttactgaagatttttcttgtttccaggacctctacagtggattaattggccccctgattgtttgtcgaagaccttacttgaaagtattcaatcccagaaggaaactggaatttgcccttctgtttctagtttttgatgagaatgaatcttggtacttagatgacaacatcaaaacatactctgatcaccccgagaaagtaaacaaagatgatgaggaattcatagaaagcaataaaatgcatggtatgtcacattattctaaaacaatttttctacttttttatcattttctctttcaaataaaattattttggagaccattcatttgttttgtcttaaaataaaccacttctgcctcactttgtatgtcaggtagaatcctgttcaaaacaaaaaggggactatgttcaaaatcatttgctaatttattttccaattccaaaatctcatttcctttgaaataatccaaaactaagattaaggcttttggtgcaaagtgcctagaaaagcaatgtgatattattgactttaaagtatccatttctctcatttgtagtaaaataagtcctattacatcaaaaagattctttacattaacctaataatcatattttctttgaaatagctattggtttaaaatatcctgaaaagtaacataaaaccatatgctttccctagctattaatggaagaatgtttggaaacctacaaggcctcacaatgcacgtgggagatgaagtcaactggtatctgatgggaatgggcaatgaaatagacttacacactgtacattttcacggccatagcttccaatacaaggtaagagctatccatggcaattactcttgctctgtttgaaaatgttttaatacaagtgaagaaaatattttctcagagagacttatgaaaaaaagctgcaaagagtacagccggtgcttcatatccgtggattccccacccaggattcaatcatggattgaaaatattcaggaaaaaataattccactaagttccaaaaagcaaaacttggatctgctgcactgagtactatgttgaatccatgcaaatgaaatgatatgtaggcactgtattaggtattataataatctagagatgatttaaagtatatggaaggatgtgcataagttaaatggaaatatgccattttatataagggacttgagcatccatggattttggtatgggggcattcctgaaaccaatcctccatagatactgagggatgcctatataaggcacagcaatttcaattgacacactagcctttgttacacattgagctcttcctaggatttgcatttttaactgaattttcatggagttctgctcagattcctgattaaggcaactgagcggaattgctaacaaagagggtaggaatgttcacataatgatggatgagagtagagaccacaacaagactttattataacccttgccctgcctgttctaagttctgtatcttaaatggcccatggtgagcaagatcagttaggtgacaagcaactggtctgtacatctcaatcttacttctattctttctcagtactgatttcagcagaagccagtggccctcctggaaatgctttttccttatgctttgggctaatttagaaaaggcagaagttatcaaaaagcatactgcagaaagcctgttttgttacctgcattttgttttacatagatatattgtattcttagtgggctttcaattctatccttgcagaaatagactattgtcacccaactactgtttccagccgagactccctgaagtgcctctggtttttgtcgttttcatcagcctccttttctgcttcctttattatttaccttgacttaaagcttcagacaagctaggacagattcaggcaaaagtgaggctagggctgaaatggggccacagctgagttccttttgtgtagcttaagtgctatgacaaacaggcaaaccagaatcaaggtacaggaggtttgtaggtagtcctgattgatgaattcattctcatcacatctttctttcacacccacttgatgtggataccaaagacttattaggaatacaaaaaccacattttaccatttgtattaaacacagaaacgagctcgattttttaaaaacagatttatccattttttcaatatccctgagctgaacattaacaaatgacatgagtgaactctcatatacaatattatacattatttgtcatttttctaattaagcacaggggagtttatagttctgatgtctttgacattttccctggaacataccaaaccctagaaatgtttccaagaacacctggaatttggttactccactgccatgtgaccgaccacattcatgctggaatggaaaccacttacaccgttctacaaaatgaaggtgaatatccaggtagtaattctagaagccatatataaaagatataactaaaggaactactttgcctaaatacttcccccaatatgatgcatcaatatgaagcatttgtgaatctgctgccctgatttcttccttctctacctccaaacaggatttttttcctgctaaatggtgagggatactgctcatttcctgacagccagtacttgtaacagcaccagtcatttctaagttaatacaaatgtgtaattatacttaaagctgatataagggagtagtcatgttatttaccaagaaacaaaccattatttacataagacacatttagaatctaatttctttcttaacaaaaaacaattttttttctaggtggcacctccatgtaagagaagcccaagacaaccccaaataatataatttcaaataggcagtgtcttttctgtgcttccaaggggaaggaggaaccttaccgataattgtttgtgaaagatccagggaagaaacaaaatttaaatgcactgctccccaacccctgcaataaccctccccatgtgtaggtacacacacacacacacacacacacacttaaaatggagaaaaatgaacagtttttttggtaagattcctgcactgtggctgcaggctttggtctttcctgggtctttcgagttgaggattgttgtaattagaaatggtaaattcaaagggaggaaattatgtaaagaaaaccaatctatgtctttcctccctaaaatggggaaaaagggaacatacaaatgaagaaaatataaatgtaaatatatttgaagatttaaaaagccctgaaaggttaacctttagtgcaaatggaaagttttaatttctgctcctgggtcttacacaaacaacttacatcatgaaaaactatttccattaatgccctttttattagagcagtcactgataacactagaatatcaaagactctaacagacaagccactaaatttaacgccaataacttgaacaaagtgaagagagccaaatatgagaaagaaaactttagtctttaaataacacttgcaaccatgtggttacatgtggttgcatgtaaaccacacaaaaggatggtcttgctcaaaaaaataatggtgagtaagtaacatggaggcatttggggaattcatgtgtgcaaatgcctggcatgcagagtatggcactacagggtaaccctacacacacagccacagagaagattcctcctgtgtaacaaccgtgaaagaagagggagattactgcttggttaagaaaggcgagatagtttttaaagctatagtaaaaattacagaacaaatagcaaatatgaagtaaaaatcaacactagataaaaaattaaagagaaatttgacttttgcaaagagaaaaggtattgcatgagactgaaagcagcagactgaataaaaaaagatagtttgaactatctttggcccataaaatcagtggccatgtttatcagtctgaatcatctttaaataagtccaataaagctttgagcaagtttacattaattatgagtcttagaaaagcctgcttagctttaaatttcttacaggcagggactatatattctgtatttctagctaagtacccaaatccaatacaatagtttgcttactgaatgtataacaacatattaattcaatgaagagaaacttttgaaacttttttgacataatttcagattcccatatacctttcacccagattccccaaatattaatgatgtgcgtagccacattggctttctcattcttttccctatctccctctcatgctcaccctctatatgtacacacacagacgtgtatagatacacatacaactatctttcctaaaaacaagaatattcttgtacatgaccacaatacaatgatcgaaattagaaaagcaacaatgatttaaaaactagagatcttcaaatttcgctaataatcctaatcatgttctttacagaaaaagaaaatcccggatcatgtactgcattgttgccatgtcttttaagtctcctttactctgaataattccttaataaagggcactttgtagaatgtccttcaatttgagtttgtctaatgtttccttatgattagatttaggttatgcacttttggcaagactatcatggcatgatgttgtgtttttcttagtacaccatatcaggaggcacaagatattgatcagttctattactggttatgttaacttcaagctttggttaagatggtgtctgccaggtgtctccattgtaaagttattcattttccctttacaattaataaagatcttgtagggaagaaagtaatctttctttaaataaagcagcaatagaatgagagatttttaaacatataaaaagcagaaaaatataaatgaatcaggagtaaagtaacattaaaaattggaatacatttaaagaaccatctactaatttctaaccatatattatttttaataatggtcttaaaatttctttttctatagacaccaaatctggctgaatgaaataaattggtgataagtggaaaaaagagaaaaaccaatgattcataacaatgtatgtgaaagtgtaaaatagaatgttactttggaatgactataaacattaaaagaagactggaagcatacaactttgtacatttgtgggggaaaactattaattttttgcaaatggaaagatcaacagactatataatgatacatgactgacacttgtacactaggtaataaaactgattcatacagtctaatgatatcaccgctgttagggttttataaaactgcatttaaaaaaagatctatgaccagatattctcctgggtgctcctcaaaggaacactattaaggttcattgaaatgttttcaatcattgccttcccattgatccttctaacatgctgttgacatcacacctaatattcagagggaatgggcaaggtatgagggaaggaaataaaaaataaaataaataaaatagaatgacacaaatttgagttttgtgaacccctgaacagatggtcttaaggacgttatctggaactggagaaaagcagagttgagagacaattctatagattaaatcctggtaaggacaaacattgccattagaagaaaagcttcaaaatagacctgtggcagatgtcacatgagtagaatttctgcccagccttaactgcattcagaggataatatcaatgaactaaacttgaactaaaaattttttaaacaaaaagttataaatgaagacacatggttgtgaatacaatgatgtatttctttattttcacatacactctagctaaaagagcaagagtacacatcaacaaaaatggaaacaaggctttggctgaaaaaaacatgcatttgacaaatcatgttaatagctagacaagaagaaagttagctttgtaaacttctacttcatttgattcagagaaacagagcatgagttttcttaaaagtaacaagaaaaggaacaaaaaaaatgaggtttgaaatcttttaccatggcaaaacattaacatctttctcaaaaacatagagaaatctggaaaaatcaagaagataaaattctggaccagttagtgacattctttcaagcatacttgtaaaatgtttccttaaagtgttcttgggatgaaaatgattgtcatgtctccaacaacagtgaactgatgttgttccttggaataaaagtcaatccccaccttaaaaaatgtatggcttctttgaggaattcttatgtcttaaagactttttacattctagacaattaaattgattgaggtcataaattaagaagtgaatagttaccactacacggtaaggtaagcagcctgaaagcatttgtatcatatatgtgtgtgtgtgtgtgtgtgtgtgtgtgtgtgtgtgtnatatataaaataaaaaactcctctacttgtactttggcattcaatttttagaaattcagtctcaaatgccattatggtatttttcaaatgatacctttaagtcaatggtttctttcgactgcaatagagaagatatggcaagaaaaatgttgcagtaccatcttctgggagaacattcatgaaatccttcagttctagttccacagcaacaattgacaatgtttct

SEQ ID NO: 8644 - DNA, 3339 bp, Homo sapiens
tggtcttccccactttctcatcctctttcctgtgcaccataacttccccagcagtagtctccagtgggaatttgggagggcaggacagaagccaaatccaggccctgagcaaacagaacgctagatgatatcgtcagggagcagcaggtatgcagagacctgggacctactcctgtttctgcgactgacatgctgtgcacactgtgcatggaccccatggcacgatgcaggacggggctgcagaacccacacaagctttgaggtcagacagtccacgaatcccagctctaccacccacagcttttcctcttctcagctgtgtggccttgggcaaattgcataacctctctgaaactactgtcatatctttaaaatgagtaggaaatgagacctcctttgcaaggtaattgtgaggattaagttgtgagggttaattgttctaggtgctttcacccagaacaatacaccagcatataaaactgacctccaacaaatatgaagtcactttatccttgtctggcctgttctgcctcttcaattctatgcaatgaggcataaaaactcggatgtcctggacctccacgttttacatgtataaaactggggtatcctgtaatcccagcactttggggggccaaggtgggcagatcacctgaggtcaggagttcgagaccagcttggctaacatagcaaaaccctgtttctactaaaaatacaaaaataattcgccgggcctggtggcatgcacctgtaatcccagctactcaggaggctgaggcaggagaatcgcttgaacctgggaggcggaggttgcagtgagacaagatcgcaccattgccctccagcctgggcaacaagagcaaaactctgtctcagaaaaaataaaaacaaaaacaaaaacggggtatccattgctgtacttccctgatcccctgaaataatgcatacatcctgcagcccagtacttagcagagagtaattgctcaataaatgtcagttccttcctcgttcctttctagaagaggaaagtgggcttaaagttcaacaccagtccaggaagctagtgccagggagcccacaactaaagcaactgtgtggcttgcactatgatttctaactaagcctgcatcagccagtctctgctctctggtggcttggactctctccccatctgtctgtaagaaggacgccctttcttcctacctggcgcggctgttgtaagtgccaaatgagaacttggatggcattgtattctgaacaagaaaaagtaaaatttggggagcactttctctgtgctaggcaattaattggtggtgcctgggggctgatccacaaagagacaagaagacatgttttctgcccacatagagttacagtggaagtgaaagggcggaagtgacgagtacaaggtcatccatgcagatatactcaaagcgaggtcggcaaaccctcattggagtcagctaaaaatgtaaattccctggccccatccctgacctctagagacaggatctctgacagtggggccccgtagtttgtgcctcaaatttgagaaccatttatggctggacgcggtggctcacgcctgtaatcccaacactttgggaggctgaggccggcggatcacctgaggtcaggagttcgcgaccagcctggccaacgtggtgaaaccccatctctacgaaaaatgcaaaaattatctgggcatggtggcaggcgcctataatcccagctactcgggaggctgaggtaggagaattgcttgaacccaggagacagaggttgcagtgagccgagatcacgccattgcactccagcctgggtgacagagcgagactccgtctcaaaaaaaaaaagaaaagagaataatgtatttataggagtgcagagagtgagtgccacaggtgttcagaaagtgataaactcatccaggaaagccgcaccagggacatgtgctctgagcatggtcttgaaggatggacaggagtggcaggctattcccagggggcagatggcaccatactatcccactgtactgtaattgcacgttacacgtatgtccatgtctgctccttcccaccctacccccttaaaattgggagagtccacagtgaatgagaggatgagttatggatgttagggcttaagcatggttgtttaggagacaatagagagccagtcctgttaatattacaggtttaggctaagaccagataagtttgggtaaataaaatagagccaaatagccataaagcttaaatgtgagactataaggtttggactttggccttcagatataagggaaaatctgaatttattggggcaggggaatgacatgaagaaagcaatctttcaggaagagacatctgaattttaaaaagagtgggggctgtgtgtggtggctcacgcctgtaatcccagcactttgggaggccaaggcaggtggatcacaaggtcaggagttcgagaccaacctggccaatatggtgaaaccccgtctctactaaaaatacaaaaattagctgggtgtggtggcgcgtgcctgtagttccagctactcgggaggcagaggcagaagaatctcttgaacccgggaggcagaggttgcagtgagctgagattgcgccactgcactccagcctgggtgacagagcaagactccgtctcaaaaaataaataaaaataaaaagagtaggactgaaagacacaggcacagggggctgtcacaacagtccaggtgtgaggccctctatgacaaggagggcatgaggctgcaataagatggaaagagaaaggaagggcaggatgcagagaacgtgccagggcaggtgggaaggatttggtgacattggtgtgaagggaaaggaagagggcatcaaagatggttttgagattctgatctggggtgaactggaggataacaagactgtgggaataggaaaggtggcaggaggggatggcttatagtacttgtatacaaatttatttgcttgtttattaattacagggtctctctctgttgcccaggctggagtacaggggcacaatcgtaactcctgggctcaagtgatcctcctgcctcaggctcctgagtaacttggattacaggcacatgccaccaggcccagctgattttttcaaattgtctcactatgttgcccaggctggtctccaacttctgggctcaagtgatacttccaccttagcctcctattagtttttcccttacagcaattcctgcaatatataaaaggtctttacttcagtgagctgtgattgcaccactgcaatctccagcttgtcagaggatgacagagaccctgtctccaaaaaagaaaa

SEQ ID NO: 8645 - DNA, 3334 bp, Homo sapiens
ttccccactttctcatcctctttcctgtgcaccataacttccccagcagtagtctccagtgggaatttgggagggcaggacagaagccaaatccaggccctgagcaaacagaacgctagatgatatcgtcagggagcagcaggtatgcagagacctgggacctactcctgtttctgcgactgacatgctgtgcacactgtgcatggaccccatggcacgatgcaggacggggctgcagaacccacacaagctttgaggtcagacagtccacgaatcccagctctaccacccacagcttttcctcttctcagctgtgtggccttgggcaaattgcataacctctctgaaactactgtcatatctttaaaatgagtaggaaatgagacctcctttgcaaggtaattgtgaggattaagttgtgagggttaattgttctaggtgctttcacccagaacaatacaccagcatataaaactgacctccaacaaatatgaagtcactttatccttgtctggcctgttctgcctcttcaattctatgcaatgaggcataaaaactcggatgtcctgggcctccacgttttacatgtataaaactggggtatcctgtaatcccagcactttggggggccaaggtgggcagatcacctgaggtcaggagttcgagaccagcttggctaacatagcaaaaccctgtttctactaaaaatacaaaaataattcgccgggcctggtggcatgcacctgtaatcccagctactcaggaggctgaggcaggagaatcgcttgaacctgggaggcggaggttgcagtgagacaagatcgcaccattgccctccagcctgggcaacaagagcaaaactctgtctcagaaaaaataaaaacaaaaacaaaaacggggtatccattgctgtacttccctgatcccctgaaataatgcatacatcctgcagcccagtacttagcagagagtaattgctcaataaatgtcagttccttcctcgttcctttctagaagaggaaagtgggcttaaagttcaacaccagtccaggaagctagtgccagggagcccacaactaaagcaactgtgtggcttgcactatgatttctaactaagcctgcatcagccagtctctgctctctggtggcttggactctctccccatctgtctgtaagaaggacgccctttcttcctacctggcgcggctgttgtaagtgccaaatgagaacttggatggcattgtattctgaacaagaaaaagtaaaatttggggagcactttctctgtgctaggcaattaattggtggtgcctgggggctgatccacaaagagacaagaagacatgttttctgcccacatagagttacagtggaagtgaaagggcggaagtgacgagtacaaggtcatccatgcagatatactcaaagcgaggtcggcaaaccctcattggagtcagctaaaaatgtaaattccctggccccatccctgacctctagagacaggatctctgacagtggggccccgtagtttgtgcctcaaatttgagaaccatttatggctggacgcggtggctcacgcctgtaatcccaacactttgggaggctgaggccggcggatcacctgaggtcaggagttcgcgaacagcctggccaacgtggtgaaaccccatctctacgaaaaatgcaaaaattatctgggcatggtggcaggcgcctataatcccagctactcgggaggctgaggtaggagaattgcttgaaccccggagacagaggttgcagtgagccgagatcacgcccttgcactccagcctgggtgacagagcgagactccgtctcaaaaaaaaaaagaaaagagaataatgtatttataggagtgcagagagtgagtgccacaggtgttcagaaagtgataaactcatccaggaaagccgcaccagggacatgtgctctgagcatggtcttgaaggatggacaggagtggcaggctattcccagggggcagatggcaccatactatcccactgtactgtaattgcacgttacacgtatgtccatgtctgctccttcccaccctacccccttaaaattgggagagtccacagtgaatgagaggatgagttatggatgttagggcttaagcatggttgtttaggagacaatagagagccagtcctgttaatattacaggtttaggctaagaccagataagtttgggtaaataaaatagagccaaatagccataaagcttaaatgtgagactataaggtttggactttggccttcagatataagggaaaatctgaatttattggggcaggggaatgacatgaagaaagcaatctttcaggaagagacatctgaattttaaaaagagtgggggctgtgtgtggtggctcacgcctgtaatcccagcactttgggaggccaaggcaggtggatcacaaggtcaggagttcgagaccaacctggccaatatggtgaaaccccgtctctactaaaaatacaaaaattagctgggtgtggtggcgcgtgcctgtagttccagctactcgggaggcagaggcagaagaatctcttgaacccgggaggcagaggttgcagtgagctgagattgcgccactgcactccagcctgggtgacagagcaagactccgtctcaaaaaataaataaaaataaaaagagtaggactgaaagacacaggcacagggggctgtcacaacagtccaggtgtgaggccctctatgacaaggagggcatgaggctgcaataagatggaaagagaaaggaagggcaggatgcagagaacgtgccagggcaggtgggaaggatttggtgacattggtgtgaagggaaaggaagagggcatcaaagatggttttgagattctgatctggggtgaactggaggataacaagactgtgggaataggaaaggtggcaggaggggatggcttatagtacttgtatacaaatttatttgcttgtttattaattacagggtctctctctgttgcccaggctggagtacaggggcacaatcgtaactcctgggctcaagtgatcctcctgcctcaggctcctgagtaacttggattacaggcacatgccaccagccccagctgattttttcaaattgtctcactatgttgcccaggctggtctccaacttctgggctcaagtgatacttccaccttagcctcctattagtttttcccttacagcaattcctgcaatatataaaaggtctttacttcagtgagctgtgattgcaccactgcaatctccagcttgtcagaggatgacagagacccttgttcccaaaaaaaaaa

SEQ ID NO: 8646 - DNA, 3292 bp, Homo sapiens
tcctgtgcaccataactccccagcagtagtctccagtgggaatttgggagggcaggacagaagccaaatccaggccctgagcaaacagaacgctagatagatatcgtcagggagcagcaggtatgcagagacctgggacctactcctgtttctgcgactgacatgctgtgcacactgtgcatggaccccatggcacgatgcaggacggggctgcagaacccacacaagctttgaggtcagacagtccacgaatcccagctctaccacccacagcttttcctcttctcagctgtgtggccttgggcaaattgcataacctctctgaaactactgtcatatctttaaaatgagtaggaaatgagacctcctttgcaaggtaattgtgaggattaagttgtgagggttaattgttctaggtgctttcacccagaacaatacaccagcatataaaactgacctccaacaaatatgaagtcactttatccttgtctggcctgttctgcctcttcaattctatgcaatgaggcataaaaactcggatgtcctgggcctccacgttttacatgtataaaactggggtatcctgtaatcccagcactttggggggccaaggtgggcagatcacctgaggtcaggagttcgagaccagcttggctaacatagcaaaaccctgtttctactaaaaatacaaaaataattcgccgggcctggtggcatgcacctgtaatcccagctactcaggaggctgaggcaggagaatcgcttgaacctgggaggcggaggttgcagtgagacaagatcgcaccattgccctccagcctgggcaacaagagcaaaactctgtctcagaaaaaataaaaacaaaaacaaaaacggggtatccattgctgtacttccctgatcccctgaaataatgcatacatcctgcagcccagtacttagcagagagtaattgctcaataaatgtcagttccttcctcgttcctttctagaagaggaaagtgggcttaaagttcaacaccagtccaggaagctagtgccagggagcccacaactaaagcaactgtgtggcttgcactatgatttctaactaagcctgcgtcagccagtctctgctctctggtggcttggactctctccccatctgtctgtaagaaggacgccctttcttcctacctggcgcggctgttgtaagtgccaaatgagaacttggatggcattgtattctgaacaagaaaaagtaaaatttggggagcactttctctgtgctaggcaattaattggtggtgcctgggggctgatccacaaagagacaagaagacatgttttctgcccacatagagttacagtggaagtgaaagggcagaagtgacgagtacaaggtcatccatgcagatatactcaaagcgaggtcggcaaaccctcattggagtcagctaaaaatgtaaattccctggccccatccctgacctctagagacaggatctctgacagtggggccccgtagtttgtgcctcaaatttgagaaccatttatggctggacgcggtggctcacgcctgtaatcccaacactttgggaggctgaggccggcggatcacctgaggtcaggagttcgcgaccagcctggccaacgtggtgaaaccccatctctacgaaaaatgcaaaaattatctgggcatggtggcaggcgcctataatcccagctactcgggaggctgaggtaggagaattgcttgaacccaggagacagaggttgcagtgagccgagatcacgccattgcactccagcctgggtgacagagcgagactccgtctcaaaaaaaaaaagaaaagagaataatgtatttataggagtgcagagagtgagtgccacaggtgttcagaaagtgataaactcatccaggaaagccgcaccagggacatgtgctctgagcatggtcttgaaggatggacaggagtggcaggctattcccagggggcagatggcaccatactatcccactgtactgtaattgcacgttacacgtatgtccatgtctgctccttcccaccctacccccttaaaattgggagagtccacagtgaatgagaggatgagttatggatgttagggcttaagcatggttgtttaggagacaatagagagccagtcctgttaatattacaggtttaggctaagaccagataagtttgggtaaataaaatagagccaaatagccataaagcttaaatgtgagactataaggtttggactttggccttcagatataagggaaaatctgaatttattggggcaggggaatgccatgaagaaagcaatctttcaggaagagacatctgaattttaaaaagagtgggggctgtgtgtggtggctcacgcctgtaatcccagcactttgggaggccaaggcaggtggatcacaaggtcaggagttcgagaccaacctggccaatatggtgaaaccccgtctctactaaaaatacaaaaattagctgggtgtggtggcgcgtgcctgtagttccagctactcgggaggcagaggcagaagaatctcttgaacccgggaggcagaggttgcagtgagctgagattgcgccactgcactccagcctgggtgacagagcaagactccgtctcaaaaaataaataaaaataaaaagagtaggactgaaagacacaggcacagggggctgtcacaacagtccaggtgtgaggccctctatgacaaggagggcatgaggctgcaataagatggaaagagaaaggaagggcaggatgcagagaacgtgccagggcaggtgggaaggatttggtgacattggtgtgaagggaaaggaagagggcatcaaagatggttttgagattctgatctggggtgaactggaggataacaagactgtgggaataggaaaggtggcaggaggggatggcttatagtacttgtatacaaatttatttgcttgtttattaattacagggtctctctctgttgcccaggctggagtacaggggcacaatcataactcctgggctcaagtgatcctcctgcctcaggctcctgagtaacttggattacaggcacatgccaccaggcccagctgattttttcaaattgtctcactatgttgcccaggctggtctccaacttctgggctcaagtgatacttccaccttagcctcctattagtttttcccttacagcaattcctgcaatatataaaaggtctttacttcagtgagctgtgattgcaccactgcaatctccagcttgtcagaggatgacagagac

SEQ ID NO: 8647 - DNA, 3339 bp, Homo sapiens
tggtcttccccactttctcatcctctttcctgtgcaccataacttccccagcagtagtctccagtgggaatttgggagggcaggacagaagccaaatccaggccctgagcaaacagaacgctagatgatatcgtcagggagcagcaggtatgcagagacctgggacctactcctgtttctgcgactgacatgctgtgcacactgtgcatggaccccatggcacgatgcaggacggggctgcagaacccacacaagctttgaggtcagacagtccacgaatcccagctctaccacccacagcttttcctcttctcagctgtgtggccttgggcaaattgcataacctctctgaaactactgtcatatctttaaaatgagtaggaaatgagacctcctttgcaaggtaattgtgaggattaagttgtgagggttaattgttctaggtgctttcacccagaacaatacaccagcatataaaactgacctccaacaaatatgaagtcactttatccttgtctggcctgttctgcctcttcaattctatgcaatgaggcataaaaactcggatgtcctgggcctccacgttttacatgtataaaactggggtatcctgtaatcccagcactttggggggccaaggtgggcagatcacctgaggtcaggagttcgagaccagcttggctaacatagcaaaaccctgtttctactaaaaatacaaaaataattcgccgggcctggtggcatgcacctgtaatcccagctactcaggaggctgaggcaggagaatcgcttgaacctgggaggcggaggttgcagtgagacaagatcgcaccattgccctccagcctgggcaacaagagcaaaactctgtctcagaaaaaataaaaacaaaaacaaaaacggggtatccattgctgtacttccctgatcccctgaaataatgcatacatcctgcagcccagtacttagcagagagtaattgctcaataaatgtcagttccttcctcgttcctttctagaagaggaaagtgggcttaaagttcaacaccagtccaggaagctagtgccagggagcccacaactaaagcaactgtgtggcttgcactatgatttctaactaagcctgcgtcagccagtctctgctctctggtggcttggactctctccccatctgtctgtaagaaggacgccctttcttcctacctggcgcggctgttgtaagtgccaaatgagaacttggatggcattgtattctgaacaagaaaaagtaaaatttggggagcactttctctgtgctaggcaattaattggtggtgcctgggggctgatccacaaagagacaagaagacatgttttctgcccacatagagttacagtggaagtgaaagggcagaagtgacgagtacaaggtcatccatgcagatatactcaaagcgaggtcggcaaaccctcattggagtcagctaaaaatgtaaattccctggccccatccctgacctctagagacaggatctctgacagtggggccccgtagtttgtgcctcaaatttgagaaccatttatggctggacgcggtggctcacgcctgtaatcccaacactttgggaggctgaggccggcggatcacctgaggtcaggagttcgcgaccagcctggccaacgtggtgaaaccccatctctacgaaaaatgcaaaaattatctgggcatggtggcaggcgcctataatcccagctactcgggaggctgaggtaggagaattgcttgaacccaggagacagaggttgcagtgagccgagatcacgccattgcactccagcctgggtgacagagcgagactccgtctcaaaaaaaaaaagaaaagagaataatgtatttataggagtgcagagagtgagtgccacaggtgttcagaaagtgataaactcatccaggaaagccgcaccagggacatgtgctctgagcatggtcttgaaggatggacaggagtggcaggctattcccagggggcagatggcaccatactatcccactgtactgtaattgcacgttacacgtatgtccatgtctgctccttcccaccctacccccttaaaattgggagagtccacagtgaatgagaggatgagttatggatgttagggcttaagcatggttgtttaggagacaatagagagccagtcctgttaatattacaggtttaggctaagaccagataagtttgggtaaataaaatagagccaaatagccataaagcttaaatgtgagactataaggtttggactttggccttcagatataagggaaaatctgaatttattggggcaggggaatgccatgaagaaagcaatctttcaggaagagacatctgaattttaaaaagagtgggggctgtgtgtggtggctcacgcctgtaatcccagcactttgggaggccaaggcaggtggatcacaaggtcaggagttcgagaccaacctggccaatatggtgaaaccccgtctctactaaaaatacaaaaattagctgggtgtggtggcgcgtgcctgtagttccagctactcgggaggcagaggcagaagaatctcttgaacccgggaggcagaggttgcagtgagctgagattgcgccactgcactccagcctgggtgacagagcaagactccgtctcaaaaaataaataaaaataaaaagagtaggactgaaagacacaggcacagggggctgtcacaacagtccaggtgtgaggccctctatgacaaggagggcatgaggctgcaataagatggaaagagaaaggaagggcaggatgcagagaacgtgccagggcaggtgggaaggatttggtgacattggtgtgaagggaaaggaagagggcatcaaagatggttttgagattctgatctggggtgaactggaggataacaagactgtgggaataggaaaggtggcaggaggggatggcttatagtacttgtatacaaatttatttgcttgtttattaattacagggtctctctctgttgcccaggctggagtacaggggcacaatcataactcctgggctcaagtgatcctcctgcctcaggctcctgagtaacttggattacaggcacatgccaccaggcccagctgattttttcaaattgtctcactatgttgcccaggctggtctccaacttctgggctcaagtgatacttccaccttagcctcctattagtttttcccttacagcaattcctgcaatatataaaaggtctttacttcagtgagctgtgattgcaccactgcaatctccagcttgtcagaggatgacagagaccctgtctccaaaaaagaaaa

SEQ ID NO: 8648 - DNA, 423 bp, Homo sapiens
ggctttgacagccgccgccacaagtctttccgcctccccagcccgcccgggagctgcgagccgcgagctggattatggtggcctgagcagccaacgcagccgcaggagcccggagcccttgcccctgcccgcgccgccgcccgccggggggaccagggaagccgccaccggcccgccatgcccgcccctcccagccccgccgggagcccgcgcccgctgcccaggctggccgccgccgtgccgatgtagcgggctccggatcccagcctctcccctgctcccgtgctctgcggatctcccctgaccgctctccacagcccggacccgggggctggcccagggccctgcaggccctggcgtcctgatgcccccaagctccctctcctgagaagccaccagcaccacccagacttgggggcaggc

SEQ ID NO: 8649 - DNA, 1482 bp, Homo sapiens
ttgtttatttcaggtgctttgaagaggaagccattatggatggatgaaggatagtaatgcaatacctccaccttaatttgggtgcatgtgtatgtgtgtgtgtgtttgtgtgtgacttgtatgcttgtgtgtgtaaatgtgtgtacatatacatatatacatatctacacatacatatatacacatatatgtgtgtatgtagatatgtagactatcctaatgatgtaaagtttaatatttatgtttgaaattatttattgtgatgtaatatttttgtacgtaaaatgattctattatgactgcctttgcatgtagtaatatgacaaagtgatccttcattatcacggtacactattgtttacttttcatctgtaaatgttttattgttacttttttaaaatgaatttttttaaaacaatctagccatcatcaaggtgctataagagttgtataaaagatatttttggcatttctaggcaagtatcagccaataagtatgttagtgatatcacagattgtaccaactattaactatgttaaataagtattcagtttcatgtgatctctgggaaaaaaatatgctgccttggtgctaatattgtatgtatttaaatgatcatccgactcagaaatataaacacttttaatgaaagggaggaacggaaggacaatttccagtgcacagaatcacttggatgaaataagaccagctctttacccttatttttggatatgccttttttggaagagacttagactttatccttattgttgttagtgttgttaatattcgttgcttcagcccacggtgccttggtctctccacaatcaaatggaggatcccccaagcagcttcattacagagtgatattgggaaagtgagatcctctcaccattttgccaagatactctaaaatgacatccaagtttaccagtagaaagacacaggatgcacagaatgggcatgaccttcagctcacgagcacacctggagaaattcagaaccaggttctgaatcatcacgattgccttttgcatgaaaacatcggctggtgatgtgacttctcttcaggccatgagcctaacaccctgccggttttcatgcccgctgcagtaatggacgtttgtgtgaagaaatgaactgtggagtacaaaatgctttgagtctttccgattgctcattaattcacttttttgttacttctttccaaaatggaagtgctgaagccatggtctttctgcccctccaagctgatgaagggaagcctttgccaatggcccatggaagacacttggtttgagaaaccctgcccacttccaaagaccaaagagattaggaaaagcctggcagtattctccaactccaaacaagctctagagtgctccaggaaaagttatattcagtatatgaataagtgttattctccattattaatgtgttctgaaaatatattatgaataaatacatcaccacacccaaac

SEQ ID NO: 8650 - DNA, 305 bp, Homo sapiens
aggtcgggcacggtggctcacgcttgtaattccagcactttgggaggccgaggcgggcggatcacgaggtcaggagatcgtgaccatcctggctaacacggtgaaaccccgtctctactaaaaatacaaaaaaattagccgggcctggtggcgggcgcctgtagtcccagctactcgggaggctgaggcgggagaatggcgtaaacccgggaggcagagcttgcagtgagccgacattgcaccgctgcactccggcctgggtgacagagcgagactccgtctcaaaaaaaaaaaaaaaaaaagtg

SEQ ID NO: 8651 - DNA, 22058 bp, Homo sapiens
ggacacggaactccctgggtaggagtttgaagctttcttaactcagaaagaaacttccaacacagtttcccaaagaaaaatgggcaccaagggcaaagtaagcaagtaagctgtatctttgttcagtttgtgcttttctgtgtccttgtatgtttggctaaaaggagcttccttcaggaactcaggaagcagtgacttacagttgatcaaaaggatatgagtgacccctatgccaggaatttattctagggaaattaactgtggattgccaaaatgtttattagaagggtgttcagttaatattaatattatttaaatggccaaaagaagagagatttaagtaactgtgctgtaaccataaaatataatatgcatatgttacaaataatgttgcaggagaatatgggaaaatgttcacagtatattaatagtagaaaaagtatattacaaaatactatggacaatgtatcttatttggggatactcgaagaatctgcatcaaaagcataaagtgggtgatgagcttacagatgaatcttattctattttttgtctttaaaaacttgataggccttggcattttgaaacttcctgttaattaatatatacttcatttgaaacaaaataaataatattcaaaaacataattcaaaattatgtaactattgaaaaatatacattaatgtggtcaaagactttgggaaaagtataccaaatgtaagcatagtagtgttagaacagaagattataggtttgtttctttctactttctttcaatgttgcttatatttgaaattaaaaatataatttgaggctagaaaaaattggggttatagaatcctaaatatttaatttctgttcattcatctttacccaaattcttacaattagatgaaatttttatttaatttatatcctacagataaatttaataatgatgtaagcctcatttctcagacttttaatgaattctctggggatattgttcaaatgcagattttgatttagtggatttgaggcagggctttcatctctaacaaattcccaagtgatgtgaataaatgcttgtccgaggaccacacttcgagttgcagagatgtaaaacacatctattctccagcaattatctgactcaggtaattcagaggtgatttcaaacagttcactcaatagatttttataggccatctaccttattcaaactccataaatctattctctctgttatagagggaaaaacttgagacattatatcaaggtaaactttaatacacctgtttttttttcaagaaataaaaaatgtaatgactataatgtagaatttaacttcttatttttctttaagatcccttgtctttaaaataatatctataagatccagctacaaactctttaactctttgtcatgaaattacagtatcaatatattctaattttttctcatgatctcctctctcctacccccaaccctgtcaaaatctctatctctatctccctcttccttttctttctctctttcaggttattaaatgcaaagcagccatcgcctgggaagcaggcaagcccctttgcattgaagaggttgaagtagctccccccaaggctcatgaagttcgcattcaggtaagtggagactttccttgggtgggaacagacagggccccaagtggagacctggcttctgtcaggtcaatcctctgtgctatgattcagaggccttggagtttctagtacagggaagctgtatttttagattcagtcaaaaacaggcattatcccaaaaaggaataaatcatccattattttagtaattttcaaataatgggcttaaaatttaattgatcttaacattaatcatttaccctaagaatcagacaaaggaattcactttggatttgaattagttaggttttctttttgctttccaattgctaattatttgaaagtgttattaaaaggaagatagacaatttgatcgaaaacaagacagaagaaaaaacctgacgtgctgccctaggcagccgaagggtcctgggtatccagaggaagggacaggagtaggtcacagggagaagagagtgcatggaatggagtgagatcactgatggcaagtttggacaatttccccatttttcccaagctgaccaggcttatattttccttgaggacccccacattaagagtctgtacatgagagtgaatgggacattctcactgacagaaccttaaagaagaatataggtatacattggtaattaattcagacaatccttgatttgatattgttctctcaactgtaaaaggtgtattacctcaacttcatttcaataagccctattacctttgattttttcctctcctggaggcaataattgccaatcctatctcttttatgattttctgacaacagcaaaaggtagaaaacaaagatgcattataagaggaaaataatctaacccagtatatttttattggttcttttttcaaaaggtgattcttttattgagttctagaagtcttataaagttttaaaatgatatcaagcctaatcttatatgtaacatccagcccaataatatagttgcagaaacacaattaaagtctgtgattgccttgtagatcattgctacctctctgtgccatactgatgccactgttatcgattctaaatttgagggcctagctttcccagtgatcgttggccatgaggctgcaggtattgtggaaagtattgggccaggagtgaccaacgtcaaaccaggtattttattttattcagaaaaaatggaaatgtcacaatatttcagagataattattgatagagtcctggcttggcatgctataattgatctctatttacaaaaggggaccatcttttccaaagtaaaacgagagacacaatttatcacagtctagcaataggacagaatatttgaaatcagaattgtctaataaaatctaggaaatgtggtcactttatttacacatagcactgagaaactgtcccatgaagcaaagttatgaggttagctctaactgaaacttccatgtttaacaaatgacaccttataaaagaacaagatcatgtcctttgcagaaatatggatgaagctgtcagccattatccttagcaaactattgtaggaacagaaaaccaaatactgaatgttcttacttataagtaggagctaaataatgagaacacatggacacaaatggggcaatgacaggcacactgggtcctacttaaggatgaaggatggagggaggagaggctcagaaaaataactatcgggtactatgtttagtacctgggtgacaaaattatctgtacaccaaacttccgtgacacaagtttacttatatagcaaacctgcacatgtacccttaaatctaaaattaaaggtgttgtttttccttttttttttttttttgagatggagccttgctctgtcacccaggctggagtgtagtggcacgatctcagctcactgcaacctccgcctcctgggttcaagcaattatcctgcttcagcctcccgagtagctgggattacaggcatgtgccaccacacccggctaattttgtattttcagtagagacgggttttcaccatgttggctaggctggtctcgaactactgacctcaggtgatccacccacctcggcctcccaaagtgctgggattacaggcatgagccaccttgcccagacttttttttttgttcgaaacagagtctcactctgtgccaggctggagtgctgtggcacgatcttggctcactgcaacctgcacctcccaagttcacacaaatcttgtgcctcagcctccagagtagctgggattacaggcatgagccatcacatctggctaatttttgtatttttagtagagacagggtttcaccatgttggccaggctgctcttgaactcccaacctcaggtgatctgcctacctcagcctcccaaagcactgggattacagatgtgagccactgcacctggtgtaaaataaaaggtttttaaatgacatgttataataacttctatataaaaaagcaaactattttaatattaacagcaaactatgtaaagaatgaggacttagaggtagctttagtgagaaatattatatatatgtcaacgttagctgaagtgtttttttggaagtttgtaagataaagataatacctaaatgaagcaccccaatagctgaaattatttactccacattttacaacagatcctccagatactggaatatgggctatgtaatcctcatttggcaggccagatgaaccgtgccactcttttctcttttaatgagaatgctccaaagttagaggtatattagtatctttccattccaaaaaagattgtacaaacaaattgcttcccaaaattttgtgtcaatgaaggagtctggccaatataatccctttagccccagctctgccacttactggctatgtgatcttggccagttatgtcacttttctgtgattcagctcagatttctgttttctatagtgtgaataaaaatagggctcgtctcaaagagttgctctgagaattaagttctgaaataatacatgtaagtagttataatggtgcgtggtatgtattaaatgttgaatgaatgtgaattatcatcattagacctcaggcatcgaagcacagaagtcactattaaattggaatttattaaaaagtggaaaaatgtggaatttgaaagtgaatctaaaggtgaaacatagcaatgatataaagtttatacctagcctataattgtttacctctcctattatctaaggatgttatgtttcgtacatggtgtttggaaatgtaataaacaatagtcatgatgcagagagtcacaatgacagcaaagtcccagagttctgtatctgatgatatcaacatagatttgttgctggactgcctagcagagtaattttttaaaaaatacaatatatgcaatacgttggggaatctgcagtcttgtaaggtaatgaaatactgtagccacctatactttccactgaatataaaatgtatactataaagaaaaggtgttttccactgatttatctggtagaagctataagtaacaccttaggcaccatccaacatatggcctttctttctaggtgacaaagtaattccactttatgcacctctatgtagaaaatgcaagttttgtctgagtccactcacaaatttgtgtgggaaaatcaggtaagcactctacactgttagtattagtataaatttgaatgaatattttggaaagcatattgacattacctaaatggccttgaagaggtgcaaaccttccacccactaattctaatcctaggtgtgtacaagatactattgcaagtgcacacaaagaaacatgtgctggaatgttctttgtaacactgtttattagagtaagcaatttaaaacagcacaaatgtccatcagaaagagaatgaattttaaaactgctatgtagtagcacaatggactactacacaacaataaaaatggctaaacttgagctgcatgtattaacataaaataatctcacacacataatgttaagggaaataagcaaattgctgaaggaatatttagtaaagtgtcatatacaaaaacaatactatactttcttatggttatttgtatatgtagtaaaagcataaacaaatcactgaaataataaatgccaaattcagaataatagctacttctacagggatgagagagggatacaataaggcacagtaaagtaatttactccaaggcaacatagttataagtcttagagccaggtttttaaccccggcagtatggctctggagtctaaaatcttaatcatcttgtttttgctttactagactacagaaggatcctttcatccttaacactaattgaaagcagttatttaagaagctaaaattgtactactcttacatctattactgtgcctcaattttttcatctataaaatgaggagcaaaataatgcctgcttcatagacttgttctagatattcaaagaactaattttttttgcaaagctttaatgaaataatggatttaggcaataccaataaattctttctaataaatgttataaaaagagataatcagatattccaaatgaaatatacgataccacctataaagtattaccacaaaaatataaaatctgaatcagatcaagtgtttagatcaaaaatactaatttatgaggggatgcagggatagagaaatatgttcaaccagattacaggaatgttatgagcaaaattcagaatgagaaaaactctataggacaaatgattcaatttcttcaacaaataaattgcaaggggaaaaagagagggagaagggatctataatttaagataattaagagacaacaaaaatgtggacctaaagtaatcctttagagatatatggtaatgtttttacagatgaaatcgtgatatctgggatttgcttcaaaatattccaatgtgggggagggagcagatattgtggaggaataatagatgaaacctgactggccatgaattgatggttactggagctgggacatggacacataagggttcattatgctattccttctacttttatacatgttcaaattttccacaacaaaaatgttttaagagttaatacatgtaaagcccttaaaagcatttctggtacacaaaagcattcaatgaaagtttgttccctggccgggtgcggtgggtcatgcctgtaatcccagcacattgggaggccaaagctggcagatcacctgaggtcaggagttcgagaccagcctgaccaacacggagaaaccccgtctctactaaaaatacaaaattagggccaggcgaggtggctcacacctataatcccagcactttgggaggctgaggcgggtggatagcgaagtcaggagttcgagaccagcctggccaacacgatgaaagctcatctctactaaaaatacaaaaattagccgggcctggtggtgcgtgcctgtagtcccagctactcgggaggctgaggcaggagagttccttgaacccaggaggcggaggttgcattgagctgagatcgcgccactgcactccagcctgggcgacagagcaagactccgtctcaaaaaaaaaataataataataatacaaaattagccaggcgtagtggtgcatgcctataatcccagctactcgggaggctgaggcaggaaaatcgcttgaactcggaaggcggaggttgcggtgaacggagattgtgccactgcagtccagcctaggcaacaagagcaaaaactccgtctaaaaaaaaaaaaattgttccctgcactccagcctgagtgacgaaatgacaccctgtcactttttaaaaaattgttgctgttattttttaaatttgctgttattcaacaaactatattttgtgaaaagtcttgttgtttccctaatttttctgtcttgtaaattgtcatcaaaaatatataatgctcaacatattttgtaggaaaatgatcagtgttccatttattataacttctctttatttgtatcactcttttttttaattttctagtaatctcaaaagtcctgctagtgatcaacaactaatggaagacaaaaccagcaggtttacctgcaaaggaaaaccagtttaccatttctttggaaccagtacattctctcagtacactgtggtgtcagatatcaatcttgccaaaatagatgatgatgcaaatttagagagagtttgtctgcttggatgtgggttttcaactggctatggggctgcaatcaacaatgccaaggtaaatggttaaacaccagtttgtgtaaaacagaagttactaggaggcagtgtgatacagatgaactagagttagttatcttcaaactgtggctgtgtcatttattacctctgtgattttaagcaagttatttaatccctctagaataatatctactacaaatacttatgaggataattgaataatattatatatgtaaaacatctggcccagtagcctacatataattgacccagcatatgttcttatactatactaacatattaggttatagatcttccctgatttaaatacagcctgtttaaatatgtctcctaaggatgaatgctcatcctaggacagctgactcagtcaaagggcaacaaaaatgacagaaactcacttccatcttcacacaaccacccctgtcttctccctgttgctacagatttatctccctccatcagtagtaattcatttctgctactcatcatgtccctttgtggcttcaaaggagggtctctggtagcagccgtaatgttgaccagatgtgtccctggaatcccatgttagaatttagaaactcttacaaagcatctgatctagaactagagagacatcaaagagggatctcacaattggacatctcaacctgcttatctgaacctccctgacatcgatctttattcctgactcaaaaccgcaaaatgcagccagagtggtctttcaaacaacaagtctgaagattttatttttcctgcattatttcatttttccctcagggtgagctcaaattcctcagtaggctacagtgacttcctacttctccctttccactgtgcactcactgttcccttggctccactctgagtctccaggcttcagtcactgtggtctctgggctttccacacttggcttccagcaacaatgcagagaagactgccctacctccttcaggctgactccacttatcacttcctctcagagatctacttcaggctctcagccatgctttgggtatccctcccagttttcaccccaaatttttttcttttttgagacagggtctcactctgttgcccatgctaaaatgcagtggcatgatcattgcttactgcagccttgacctcctgggctcaagtgaacttcccacttcagccctccaagtagctgggattacaggcatgcaccacgatgcctggctatttttttaattttttatagagacagggtctccctatgtcgcccaggctggtcttgaactcctaggctcaagcagtcctcccacttcgacctcccaaagtgctaggattacaggcatcagccaccaccagcctctgtcttcattcttatcacactatagagaaatctcccatttatttttttgtcctattgtactatttgttccttgagggcaagaactctctgttgttcattgtgatagctccagagcctggaattgtccctggcacataacaggagcttgataatttttcaacgaatgaataaataaaaccaggtgcataaaacatcctggtgaggcctggtcctcggctttgtaatccagaaagtccttcttatcaggttacctagagttgttcagtgtcaaggaaacaaagtcagcctcaccacaataagaggttgatctagtagccaagataccaaagtatgactcttcattgagaattttatctgccacatagacaaaaatgctaccctttgctatcaacatgttatctccctttaaaaatgtatttacgcacacaattactcattaataaaaaatttaaaaaattgtgttagaaaccaaactacaatcagagaagggtactagtagctgggtggagttgacagcagatgtgcacatggcagtcaaagcctattttctgctgtatggcgctagagacttagggaagaagtatcactcttcaagtcttcctttgctgggctccatgcagtccatcctcttctactactccagtccttttaagggccatcagcactagaggttcagctacagctttcttttttaattacttatttatttttaattgaaaaaaatttatacatttatgaagtgcaattaacgttttgatatatatatacactgtagaataattaaatcaagctaataatgtatccatcacttcatatacttatctttttgtggagagaacattaaaaatctactatcttagcaattttcagatatacaatacattattattaattatagtcaccagagcgtacaatgaaattccagaaattattcctccactctatccgaaattttgtaacctttgaccaacatcctcctattcgtcatttatccccccagactctggtaaccaccatcctagtctctgcttctgtgagcttgtcttttccacatataagtgagatcatgcagtatctgtctttctgtgcctggcttatttcacctgacataatgtcctccaggtttatccatgttttcaccataacaggattttcatttttttaaaagcataattagtactccattgtgtatatacatatcatatttttcttatctattcatctatttgtggagcaaaagccagaggtgtgcatacctaatattattgataaataaggaaaacattgcagtttacctgttgcttagtaattttgtttccaatttagaatgtattaaacttaccttgagcagattttctgttttccttttgtttaaggattggttccacattttggctattgtgaataatgcttcattgaacatgggtatgcacatctcatttcctttggttgtatatacagaagtggaattgtacagctttcttttaaatccagtcaaagtcgacctaaatttccaggagttgttcttcccactgttaaggaagagattctagctgctaagccacctcatgagatcctcagagagaaatgaatctgataggaagaaattaaggaaagtgaagtatcagtaattctgcccaaaaggcaagagctttagtaaaatttaacttacttctgggaagaaaagtgaagcaacttctctgtataattattgagaacacaccaacatcaccagaacccctctttctttttgatgtgcttgtatcctttactgccaattaaacaacattacacagagacctttggaagtgtggaaatgtcctctaacagtggtacttgcagatagataatcatctactgtgtgtagactcacttgcaaattgtgggggcaatttatagtgaccccacctaagttctgcaaacaaaggcacttttacacacaggggtccagttgtataatacaagtaatgcagcatattatatttatacactgttgtgagctagcctgagaatccaactactagttacattgctgcaatgggaaaaatgcatttccacttcctaagagactcacaggctccttttaactgagactctggagcaatatattaagaatcatactgaacacatgccacaacattatagtaaagaagccatcataagaacaatattcttactatttgcaatatatatacatatttattatttcctctgagtagcaaaagccagaggtgtgtatacctaatattatagtaaataaggaaaatattgcagtttacctgttgcttagtaattttgtttccaatttagaatgtattaatacttaccttgagcagattttctcttttccttttgtttatgttttaatcctaacagctttgcatcctcattaggaaatattaagtatttctctatgtagtatttttctatcgctataatagtctgtagaataacatattccagttacagcatcttttcttaccatcttatctattatttccatttaatgcaatgaaacaaatatttattaaagactcaatatacagaagactctttcataataatatggaatttaaaaagtttctgccttcataaaatttacggtcttttaaagaaacacaccatacacccacaatcaaggcaggttataaattatataataaaagaaaagcaaaaagacaggcattgatttctgattgaaaaatcaagaaaagtttcatagacagaatgtcttggaagtcaggcctaggagtataggttatactttaattaaagaaaataaggttaaaagtacatcagtctgagggagcagcgtcaactacggcatgagaagaaagtgcaacaatctgttcgcagttcttgtactgggaatatcatggggatgaagctggaaggtaaacagaggtcagacaataaaaatgctttcatgccatgcaaaacaaattggacttcattccaaactggtgatttggagtgatcaagtaaatcactgtaatattaatacaaccaaatgaggactattcgaaatatagatgtcaaattaatagtgatccaattttaaaaggaaagcaataaacccttcagaatgtgtgggttttcaaattttgttcagataacactgaagggaaaaagtaaaacaagggaattatttttacttgggtttgtttcttataatcttaatgaacactaaataattctccaaatttaagtagtaatgcatccattttcgcattggcagatttcctccattggctatatcatagagtttaatagcaggctgtctttaattcatatgttcatgcccccacttcctcctgactcttaaaagaaaaaaagtgggactggctgctttagaagttactttataattttcctgcttgcaggtcacccctggttcgacttgtgctgtctttggcctaggaggtgtgggtctttctgctgtaatgggttgtaaagcagcaggagcttccagaatcataggtattgacatcaacagtgagaagtttgtgaaggctaaagccctgggagccactgactgcctcaatcctagagacttacataaaccgatccaggaagttatcattgaattgaccaagggaggtgtggattttgcccttgactgtgcaggtggatctgaaaccatggtatgtatattttgttcttggatcatattttcaatgtattctttggctgtcaaataataggggaaagtggattatgtttattatggtacttagtactttcaaatggatgacagggtggtagaactataagccacaaatcatttcccattccctcagctatactccatttccttcaatgcccatgaatgtgtccccccaaatgccagtactatcttggtgagttcagtcttctcttgtgataagaagccataccagcattatttgtagatgctgatttttcttttgagatccctttaaaaagctcaatattatttgtctggagataatattttctaattttgttttctatgataattccaattcctattccttggagacaattttaggggttttttcatttttaattagagaaatgttccttttgactattaaatcaaataaaatgacaagtgcattaactagacagcattctttagccaaagatataaagggatgaattaactgcaatgcataaataggaataaacacctattttgtttagctatcttatgcattatatacattattaatattaacatttgttaatgtagaatcttttctttaacagtatataatatttaaaattaataaacaatatgtgcatgtgttgttatatttaatattaacatattctcaacactagctatatgttagaatttcctgaggggtttttcgttgttttgttgcttttttaataccaatgaatgggccaaacccaggatattcttgtgtgctgggagcccactgacaacattttaaaaattaatttctcaagttgagaaccactgacctaaaagttagcatcttctattattaagctgacttattataccatgaaagtcattttcaattatggaacagaattatattagagaatccaaatggaaagagaaagatttatttaatcaccaaaagatgagttacctactctcccaccaaaagtttctatagctaggaaaagcttctatagaaagtttctaggttccaatgacctctaaccctctaaaccaagggtcaacaccctgtagcttaccagcacaaggattgtttactaacacctgctaaggacccttttaaggagctgaatgtagtgatactggagtctatgacctgactggaagctgtagaaagattttataaccttgcagtgattaattttttagagctttgataacccccagcaataagtcagagacttaatttagaatttaattttgaaagtgtttgtcaaaaatgttaaaggcctcaaaacatttgattaaaacagaaccacaggtcattgtaaaacaatagttacttatttagccaaataaatcatcaaaagactttaaaggcaatacatgaggatgtatggatgtaaaaaccttaacactatttttttaagcaattaaaaacctaatgtagacaacatgggaattattttgataaaatgtaaaatgttgtttcttaagtcagttaccagaaatggaaagaaaaactggtagtgtgactgcttctccttatgggaagcccatttcaataaacctgatgggaaaagtgcttgaatttaatcagacatgggaaaagtgtgttcaggattatgagtacagcaggggaatacataattcttagtaactgcatgagaaattttctggttacattgaaaaatttaaacatatcaagaaaagccaagagtacagaatcaagttgtactggaggaaaacattcactcctagacctttaagataaaacattttagtatcaggccataagaatagttagaactggaggaaaaaaacttataatagctgatgaaaaagctaaagaaaagagttatctctgtccaaggggagacaaagctgaaagcagggagacatagcaaaaggtgaactgacatatgattttgagaagttttcaaaagaaacaggttataaaactaaaagttaagtttcttttaattgtattaagagcaaatcaatactgtaaagagactttgttttaacataggggaataatcttagaaagactattctaaataatccttttttaatcacagcaaatttaatcacatacaaaatttttttataaattcctcttcatgaaacttattatgacttacacagatgatctatgacatgcttggacttctgacttatcctaattttttccttttaaataataagtcattttattttaggacaagattttaccataagattcttttttatatgaaattattcttttttaataacccttttattaaaaatacatttttatatttataactttacatttctctcccctacttacttttttttatctttttaagtaaataactttaaaataatttccaaattatgtaaaattattctttaataagaatacaggccaggcacagtgggtcatgcctgtaattccagcactttggaaggctgaggtgggcagactgcttgagcccaggagttcgagagcagcctgggcaacatggcaaaaacccacctctactaaaaatatgaaaattagtcaggtgtagtggcacacgcctatagtaccagctacttgggagggtaaggtgagaaaataacttaagcccaggaagttgaggctgcagtgagctatgatcacgccactccactgtagcctgggcaacagagtgagactgcctcaaaaaaaagataatacaattatatatttatatatgaattagaattcttattcctagtaaccttaaattttcatgaaaacttagaaagcaagaaatcctgaactgttagatgtaagcattttatagatgaaatcatttcacaattttagaaacatgttttcctatatcataattttttaattggaaatgactcacatatccagcatttattatttaatttaaaataattttcagattttatattacacaaaaagtccacttataagcatttatttcatttacatatactttttcatttttaatagttatctagataacttttgataactgagatattatgcagaactagccattatttaaagttatttccttgttaactttttttttgagatggagtctcactctgtcgcccggtggagtgcagtggcacgattttggctcaccgcaacctccacctcctgggctcaagcaattttccttcctcagactcctgagtagctgggactacaggcacatgctgccatgtctggctacttttttgtatttttagtagagacggggtttctccatgttggccaggctggtcttgaactcctgatctcaagtgatccacctgccttggcctcccaaagtgctgggattacaggcgtgagccaccatgcctggcccttgttaactaaagtctaaacattaggtgaaaacctaagtaagaaccataaggttaaacacataggtattttgctgataaattaggtgattcagttgctgttattgacctaacaattttaaattagtcttatttgtcaaaaaaaaaaaagtcacacaacgatagatttggctgggtttacagtctcacaacctttgtcccaaaccctgacactttaaacatttagcagaggcaaatataaaacttatttacttacacacaaatgtatgctgattttttagacatctttatttttattttactaataattttttttttttttgagacagagtctcactctgtgacccaggctgcagtgcagtggtgtggtctcggctcactgcaacctcctcctcctcccgggttcaggcagttctccagtctcagcttcccgagtagctgggactacaggcaggcacaaccacacccagctaatttttgtatttttagtagagacggggttttgccatgttggccaggctggtctcgaactcctggcctcaagtgatccacccaccttggccacccaaagttctaggattacaggaatgagtcacctgcacccggactgtgctgaacattctatttgtaatggaacactgggccctcaaggctcaatctacaatgatactatgatgtcattagcttgaatcccattatcttacatgcagagttggattaatttttttctaaagcattgtacattgccacactggagttcatattctacttttccactgactcaagtattcttttatgctccatcacagaaagcagccctggactgtacaaccgcaggctggggatcatgtactttcattggagtagctgctggtagcaaaggattgactatttttccagaggagctaataatcggccgtactataaatggaacattctttggtggtcagttttttttttcttcatagctttaaattcttttcctagtagttctgaaattcttagagtgaaggttattgaaaagaaataaaaataatttattcaaccattgaatccctagagcatatccaaatactacataaaaactattaatgacttataaataatttatataaaaaggtaattataatttgcaaattgaaatttaatttgcatttgaatgaaccaacatggaggaacaaaaaataaacattgaccttattgagataatttcttatatagagtggaaaataatcttaaatttttcttataaagaaaaattttaaaatagatataagtacagaaaattaaagatggaaggagtttaatctatttgaagcaaaccaaatctgacctaataatttcattcattcagcaaatgctgattaaactacttcgtgtcaagtgccatgtctttattttgcattttgtccacattacaggttggaaaagtgtagattctatcccaaagctggtcactgactataagaataagaaattcaatctggatgcactggtgacccataccctgccttttgacaaaatcagtgaggcatttgacctaatgaaccaaggaaaaaggtacattactaatagatgactgaatgatttaaaaaacgtttacaatgattctatcttctttttgatgttaagaagcaaccagcttgttttttctgacattttccacatcccaggtactagatgtgcttaaaagattaaatagtggtcatttcagaggggaaaaccttccatttcaataatgcacatctgtacactgttacaatatagaatggtggcataaattgatacaatttccatttcacaaaccattaactcagttgggcctgctccctagaaagagaggtttctgtgtagtatgttagatccctctagtagagtgtacccctgagtttagcaccgtggtgttctgcagtttgacacagagtgcctaccccagacccttcacaatcagaatggggtgaaaaccatgcctctgtggcagggatcagacatgtaaaggatgccccaactgtctcattctcttgctttgtcatggagttcctctaagataccttctgatccactattttagttatacagtgctcccatgtcagggatcccaggaactgatgcatagaaatgttccacctggaagattcttaggggttgggggattagtaagactaggatcaatgattctaggtaaaatgttcaagcacagccttgatcaatagaaacaaaggtcaaaaacattaggaacaatgttacatagaggagacgcaggaccaagaagaaatgaaaagagaagatacaacaaaagagaggaggaaaagtctaaagtaaaattaaaataactgggatttgaagcagggaataaatgttgcagaagaagaagatagtttcatggtgtgaggacccagactacttcttggggaagaaacctgaggaaatatccccactgacatgaactccccaatttgcaaacgtgtcagtcacaacatatcagaaggaagttcaataaaaagaaaatacaagcattattttttaagctacaccatgtaaacttagtatataagccctgcaatgtattatacaacttcaatatccccataaggaatactcctcaagttaggagatagaagttgaagtggggtttgagcctcacacccttctattcatatcctcgaacacaaaccttttctcctagaattctcaattatggaatacatccataaggaatgctaagtggcagccaggtggaaaatgctgcattgctttatgggcaagtctcccacattctcccaggaggcttccctggtaatcagcctaggggtagacaccagagtgaggcctcctgctccttctctggcccactgagaataccacctgactgcccacacagatggaaaggtggcaatgaggaaggcagaagttgggcctcatcaggtgtgtccaccatatgggcacaggaagcacaagagagggcaggccctcctaccacccaactgcaaagaagcaaggaagtggggggaaggggatgggatacaatgactgactagcctgttgaggtgtagtgatcctgccccagagtgaggaaaggacacagagattctccttccacaggtaggggtgtcttccagtcctgggtgaagaaaacatttatgcatagcaccctgctcatagcaggggttccacagttccagcagtaatgtttgagataaggactgctctgtcgttgaggcttatccccctctttgtgtctacatgttggagttacccagaaataagaacatctgggttcttaaaaagtagcatcccaacacaccaactttgatgcccactccctccttcgatgctcaactttgccctcagctataggagatccgagaacagtgactattccaagactaaaacctgactccctccttggtacattctaattctcctcaacagcaccactgagtaacaaggacgctgcctaaggtaagtaagggtcctcaattccccccaagtttactagcacatgcataaaatattattaacaccatgaatggaagaggatgacgggataaaagaaattaggcttaataaagtgaatgtctataaaggaagaccagatcctgaaatgaaaaggcaaaacttatttgtgagctttggttaaatttatcatgaaaattacacttattaatgttttattgttattaacagcgtccgaacaatcctcatcttttgaagatgccaggagcaattcggaatactatctgattgaatgtgaacctgcctggttaatttattacctgatttgatgaaccaaggaaagccatgcgtttaaacaaatatttacatttaatatgggaacataaaagagctttaaatattatagactttgtacctgttatatatatgaatattccctatgttaaataataataataactagtgtttatgaatagaatcatatcatctttagaaattgtttaaaattagttctgggaagttgaaagtggggaatgaagagataataaataaaactagattggccatatgtttataatttttttagattgggtaatgaatacatggagtttcattatacttttctctccacttttgtctatgttgaaaattttctgggagctaaatgatgagaacacatggacacatgatggggaacaacacacactggggcctgttgagggcagggagtcggcagagagagagcatcaggaagaatagctaatggatgctgggcttcatacctgggtgatgagatgatctgtgcagcaaagcaccatggtacatgtttacctatgtaacaaacctgcacatcctgcacatgtaccctggaacttaataaaagttggaaatttttaaaaagaatgaataagacctggtatttgatagcacaacagggagactatagtcaacagcaatttaattgtatattttaatatgactaaaagagtataatggattgtttgtaacacaaataaatgcttgaggggatggacaccccatattacatgatgtgattattacacattgcatgcctatatcaaaacatctcatgtaccccataaatatatacacctaatacccacaaaacttaaaatataaaatgttttaaataaaaataaagaaaagatttcccacaataaaaagatttttactggaaaaaaatcactgtatttcacatacatgtgtacatatatacattatatatatatatacacactatatatatgaaatatatagtaattgtgattatgtgtgtatatatatattaatatatacacacatatatacataaaacattattatatactttgtgttccaataagccacaagctactttttaaaaataagttgctaaataattttctttttaacatctgctaatttcttttctcttagccccactctatcatattaactgcaatcacatggaaggagatatcagaatctatttaagtgaatattttaaaaagaataaaagcatatctactctctcaagtttctatctctgtaaaataactgccctttcatctttgataattttttttcttcaacttttaagttctggggtacgtgtgcaggatgtgcaggtttgttacataggtaaatgtgtgccatggtggtttcctgcagagatcaacccatcatttaggtatgaagcccagcatccattagctattcttcctgatgctctccctcccgccacccccctcaacaggacctagtgtgttgtttcccaccatgtgtccatggattctcattgttcagctcccattataaatgggaacacacagtatttgtttttctgttcctgcattagtttgctgaggataagggcttacagctccatccatgtccctgcaaaggacatgatctcattccttttcatggctgcatagtataccatagcatatatgtgccacattttctttatcctatctatcattgatgggcatttggtttgattccatgtctttgctattgtgaatggtgctgcaatgaacatacatgttcatgtatctttataatagaataatttatattcctttggagatatacttggtaatgggattgctgggtcaaatggtatttttgcctctagatctttgaggaatcaccaccctgtcttccacaatggttgaactaataatttacattcccaccaacagtgtaaaagcattcctttttctctgcaacctcaccagcatctgttgttccttgactttttaataatcaccattctgactggcataagatggtatctcattgtggtttgggtttgcatttctctaatgatcagtgatctttcctaatttttacaacacataatgttgagcttaatgatctgcaattggcactaattaatactattgatctgtaactggcactaattaatgctattttcaatagtcaatt

SEQ ID NO: 8652 - DNA, 1844 bp, Homo sapiens
ttccctggtaatcagcctaggggtagacaccagagtgaggcctcctgctccttctctggcccactgagaataccacctgactgcccacacagatggaaaggtggcaatgaggaaggcagaagttgggcctcatcaggtgtgtccaccatatgggcacaggaagcacaagagagggcaggccctcctaccacccaactgcaaagaagcaaggaagtggggggatggggatgggatacaatgactgactagcctgttgaggtgtagtgatcctgccccagagtgaggaaaggacacagagattctccttctacaggtaggggtgtcttccagtcctgggtgaagaaaacatttatgcatagcaccctgctcatagcaggggttccacagttccagcagtaatgtttgagataaagactgctctgtccttgaggcttatccccctctttgtgtctacatgttggagttacccagaaataagaacatctgggttcttaaaaagtagcatcccaacacaccaactttgatgcccactccctccttcaatgctcaactttgccctcagctataggagatccgagaacagtgactattccaagactaaaacctgactccctccttggtacattctaattctcctcaacagcaccactgagtaacaaggacgctgcctaaggtgagtaagggtcctcaattccccccaagtttactagcacatgcataaaatattattaacaccatgaatggaagaggatgacgggataaaagaaattaggcttaataaagtgaatgtctataaaggaagaccagatcctgaaatgaaaaggcaaaacttatttgtgagctttggttaaatttatcatgaaaattatacttattaatgttttattgttattaacagcgtccgaacaatcctcatcttttgaagatgccaggagcaattcagaatactatctgattgaatgtgaacctgcctggttaatttattacctgatttgatgaaccaaggaaagccatgagtttaaacaaatatttacatttaatatgggaacataaaagagctttaaatattatagactttgtacctgttatatatatgaatattccctatgttaaataataataataactagtgtttatgaatagaatcatatcatctttagaaattgtttaaaattagttctgggaagttgaaagtggggaatgaagagataataaataaaaccagattgggcctatgtttataatttttttagaatgggtaatgaatacatggagtttcattatacttttctctccacttttgtctatgttgaaaattttctgggagctaaatgatgagaacacatggacacatgatggggaacaacacacactggggcctgttgagggcagggagtcggcagagagagagcatcaggaagaatagctaatggatgctgggcttcatacctgggtgatgagatgatctgtgcagcaaagcaccatggtacatgtttacctatgtaacaaacctgcacatcctgcacatgtaccctggaacttaataaaagttggaaatttttaaaaagaatgaataagacctggtatttgatagcacaacagggagactatagtcaacagcaatttaattgtatattttaatatgactaaaagagtataatggattgtttgtaacacaaataaatgcttgaggagatggacaccccatattacatgatgtgattattacacattgcatgcctatatcaaaacatctcatgtaccccataaatatatacacctaatacccacaaaacttaaaatataaaatgttttaaataaaaataaagaaaagatttcccaca

SEQ ID NO: 8653 - DNA, 707 bp, Homo sapiens
cctcaacaggccctagtgtgttgtttcccaccatgtgtccatggattctcattgttcagctcccattataaatgggaacacacagtatttgtttttctgttcctgcattagtttgctgaggataagggcttacagctccatccatgtccctgcaaaggacatgatctcattccttttcatggctgcatagtataccatagcatatatgtgccacattttctttatcctatctatcattgatgggcatttggtttgattccatgtctttgctattgtgaatggtgctgcaatgaacatacatgttcatgtatctttataatagaataatttatattcctttggagatatacttggtaatgggattgctgggtcaaatggtatttttgcctctagatctttgaggaatcaccaccctgtcttccacaatggttgaactaataatttacattcccatcaacagtgtaaaagcattcctttttctctgcaacctcaccagcatctgttgttccttgactttttaataatcaccattctgactggcataagatggtatctcattgtggtttgggtttgcatttctctaatgatcagtgatctttcataatttttacaacacataatgttgagcttaatgatctgcaattggcactaattaatactattgatctgtaactggcactaattaatgctattttcaatagtcaatt

SEQ ID NO: 8654 - DNA, 3326 bp, Homo sapiens
ctgttttgggttccccagctacagtcggaaagacatcagagtgttcaaggcggagtccaggcctgagatctcagcaggccagacaggcagcagatgcttgttgcttttcttgtgttatatttttcgttcccttacttagcatttgtgggaccaaagccaacaaacaacaggttgttaaaagaatgagagtaatttgacttccgacagtgattggggctcggggttgttgggtgttttgttttctgatttgaaactagctgtatggtaaccactaactctcgccttattcttttcttgcagatgagctcacagtgcctgcactttaccccagtagccctgaagtgtgggccccgtaccctctgtacccagcggagttagcgcctgctctacctcctcctgctttcacctatcccgcttcactgcatgcccaggtaattgatacccatcggccaggacttcactcacttcaccaccagtcctttcaaacttggttcccgagagcacaccatacaactaacacctatccagctaacagatccaccctcaagagattaatgatcccctctaaatcaagctgacactccttcaggactgacgaggatcgtctgacagcaatgatatcacccactgcctgatgtttgccccaaatgacacctctctcttccttaatgatctcacctcatatcgcacatgagagaccggggcaggtttatccacctggctcccagctagctagagggcatcaccagagtgtatacgtgtgtgccttgtgtggaagggctgcagaggaaggtgtgtgctaggagaaggggatatgtgcgtctgtgcgtgtttctgtgtgttgagagttttccactctcgtgtacggtgagaagaatctctgaccaaagggaaagcttccaggggggaaggctgtactttcttaaatatgttacaggaaagattaagggttccttctctccattttcaggaaaccctgtagaaaaggagatacaagatagtgtctaagatggaattacaggtcaaggtagagatctctattctgaccagctttctttcttagttaaaaatagcctgatttttataaacaaacttcctgtttctccacaaagattactgtctacatactaacacttcctctccccttggagaaaatatttctcttagcttcgcttttagtgcaagtggtagtaatcagtgtaaagattcacctctggagatcaccactcattctttggcctgcaaagattgatgaccagtaacaaatagaaagtacgtacgtaggtttcatttgtctttctgcatgtgtaattcagcctttaaattttaaatttttaaaaattattaggctggacaggcagagttttcgtttgcctgttttgctcagtgtttgtttacaaggctgggtgaaataaacagcttcccagaaaacctccttctgacttaaaactcttttatgttgtacagaattccctgtcttgataaagaccacctagaagcagcccccagcgagggttcttgaaagtcatggggtcgagattgttgttggctgaacatcttttaattctgagttaccaacacgttgtgcgtgcattgatgacccggcttcctggcctgcccttggtgcctgagccccagtaatgattgccctctatgttgggagaagaagggagaaagtagtacaagtagtgaagaaaaaaatgtaggtggtgttggtggttgagagtacatggcacagaaaataaaggagccaggattacctgtgcctttggcttctccttcccctgctgctttttcttcctttttccatgtcagtgcttgggaaccctcacaactggcaggtaacggggtcgggataaaatgtaaacctgtgggtgtcttctgctgagtcattaggatctttgtagcaggctgcggataaatatgtggatgacatggggcaactaagagccccttttgcttgccacctcccacccctgctctggatggtgtctcctcttgctagactgccgggtacagatcacgtggcaattaaggcaaatgttaataaataccatgaaacagtggtttgcatagtcttctgaatagccatggctttggttagtcagcaacaaagcctttcacccttaccctggataatcaagagttgacaacagccagaaagtactgggaatagtggcttttggccatgacatctgctcattcttcattcatgtaatgggtcaaatcagaagtaattctggagatacggtatggtaagagaagggcctaaagagtctcaagagattagaaagcatatgccattgtaaggaaggatggggagagacagtgccaagattaaatggactcagccatttgacttaatgggatgcactgcccatggtggcaccctcccctgggagttcttccttgatcttgagactttcccaaactggaatccacttagctctgccacatcggtcccagatttggtgggactctcctctggtatcagttttcaacgccacttcttgtttggagtcattcccagtgcagtcatggactctatgaacaaatacggttatttaaatgtatttgtccagtatgagaatcagaatgaactagtagaggctttacagatcagctggtctgacccattttacagatgaggaaacaggcctgagaagatggagggagttacccacaatctgaaggggttctaccatgactagacccaggtcacctgcctcccaggcctggctctttccactccgaggtgctggctcaccacagacttattctttaatggaattttggaaaggcctcactccagtgactctttggatctttcttctctaagtagatgggaagcctgtaagaagagacttggaggcaaagcaaagggaatcagcacttaaccctcacccaaagggcccaagagaatctttagtaactggaggcagagcagactggagcctctatggggcatctccccatattggagaattcagtctttgttttggaaatcttataatgtctttggagaggctttaaataattttgtttttcttagcaatgttatgctctattttgagacatggattttttttttcttctagtgtttctctcctgaggcaaagcccaacacacctgtcttttgtccacttctccagcaaattagatttgtctctgggaatgtgtttgtaacataccaacctactgcagaccagcagagggagctcccatgttgaatttgtttgttagctattttcccccctttcacaaaaactatttcttgacgacctttgagagatttcaataaaaattttaatcagagcaaaaatgaa

SEQ ID NO: 8655 - DNA, 296 bp, Homo sapiens
ttaattaggagaggaaactttcatctgttgctttcaaaaagcttatacactgaagagagcacacagctgttctgtcacctcacattcacacacttccgcctcttaggtttgagctcatgttctgctttcagtcttgttgtgatgggcagagagaaagtcgttaaagtatactgtccttaccacattctcgaaacacaccatacaccctgtacttcaggcagagtcacagtgtggggccagaagcttctgtaggtaagtaggactgagagagaaagtcctggttacctaattccttt

SEQ ID NO: 8656 - DNA, 1751 bp, Homo sapiens
ttttaatggataaatttgtgtgttgattttggaggaataaactcagaatactccctaaagatagtgaattttggtctgggtaatgaaaagtaggaatataattgattggaataatgttgtcatatgttgttttaatgtttatcttaaaattagtaacttttccaaggaaaattttatttgatagcataacttctctggatattattttaaatcagtctggtaaagagaaaaaatacagaaagtattataatttgtgttttcatcataaaatattttgcatcagtatcttattgcagtacggtaggagactatgagaaatattttgaatcttaaaagtaccagataaagacacaataactaatgattttgtctttaggagggccagaactaattgatcctgctggtctgccattacctcagccagctcagtcctgggtatggcttgtggatctagaaagaacaattgctctccttattgggcggtgtcttggtggcatgcttcagggctcccctgtgtctccagaggaacaggacactgcatattggatgaaaacgccactgttcagtgacggtgtagaaatggacactcctcaattgggtaatgtgcttctctgcagcatttaaaatacatgcctgtttgtacctcagttggagatttctctattctgatttgctaaatagagaactgacaggcaccaattgcaacattagcagtgtagggaatctggggctatgacttggagccctaagaaaaatggttaaatcgtgcagcacaatatggtgaaaagagcccccagaggaaatagaaattgtaggtctggtcctactctgtcatatttatcactcattttgagcaagtcatctaactcaatgcttcatcacttattttccgaggcttggaggttatgaaactgcttcccagaatgtaaagcactgtaagagtacttaaccatgacttatcagtgcagcacccctgagatgtgagtggcagcctcttttcctcccagcctgtcttgctttcatgctgacattatattatgtcctaattttttcttcgccacttaaagtgcctttagaatttcccttctgcagcatctcccatttgtatatattgctggcaggctagttcctagactgaacatgaagacttatctggtaccccagataatccagttgttttatctagaattggtcctttaatctctctaggcttctaattttgattctataaaataatgatttggattagacaggctacatgatattattagatctaaaatttattatttctctgataagacaaagagactcaacatgtccctgaaggaaagtctaagagagactgagaggaaagaaggagagcggaaaagaaaagaaaaaacaaaacaaaatgagaaagattatactttgggatttggagggttggagagtgggagtgagggaagcagttgaggattttcctccatttccaaatatgagtgtacattcatcatttcatttatgaaccagaaagtgattttggccatggctggtgaatgttggactggtgtttatgaaacattttgttaaagaaagtaaaatcatggtttttcaaggggtctttaacatgataaagataattccactgctgtcagtgtttaaccttgtgacagtcctaaaggacctcctgagaacaaaagtatctctatctctaccctcttcatatttctgttatatttattcaattaaactggcctttaatatgaagaaaa

SEQ ID NO: 8657 - DNA, 1751 bp, Homo sapiens; identical to SEQ ID NO: 8656

SEQ ID NO: 8658 - DNA, 4828 bp, Homo sapiens
gacttggcattgggttgttctaaagagcctgcccgaagcctttggatcagcatgcaggactatgctgttagtaaaggtaagataaagaagataaagggagtaaatttgtagttagctcataatgctcgcaaatatatatgcaatatatgtaagtgaaaattatagggatcacccttttttttaatagaaaaagatattttattaacatttttaaacaatttgtttttccctttgtggaaaatagtgtaactattttttatatacatgtattccacttaaacctactgtgtgaaaattgagatttatataatacatttataggtaatcattttactgaagtatagtagtctccccatatccgcgggtgatgtgttccaagactcccagtagattgcttgaaaccacaggtagtaccgtaccttatatacattacgttttttcctgtgtgtacatacttgcccatggtaaagtttaatttataaattaggcatagtaagacattaacaacaacagtaataaaatagaacaattacaataatatgctaactgaatcactactcttgcattttggggccagtattaagtaaaataagggttacttgaacacaatcactgtgataccgcagcagtagatcataaaaccaagagggttactaagtgacttcgtgagatttcatcatactactcagaagggcatgcaatttaaaagttatgaattgtttatttctggaattttccatttaatatttttggaccacagttgatcgcaagtaactgaaaccatgaaaagcaagatcatggataagggagactgttatattccgtgctatgtaaatggatctattttaagagtctgtttaacgattatcttccctttgcaagccatggtttaatgactgaaaggatgtgtacttagaagtctaagctataggtgtggtcagtattcatctataaaacattttgcctactctagagtgctggtgaagattccagtttgagataagatatactattaagtaccatggtaaagtactatgcaagtttgtggtggtatttcagtttctaatattatttgagaaaattaattttataggctgggcacagtggctcacgcctgtaatctcagcactttgggaggctgaggtgggaggtatcacttgaggtcaggagtttgagaccagcctggccaacatggcaaaaccctgtctctactaaaaatacaaaaaaatattagctggtcatggaggcgtgtgcctgtaatcccagctactcgggaggctaaaggacaacaatcacttgaacccaggaggtggaggttgcagtgagtcaagattgcaccactgcattccagcctgagtgacagagtgagactctgcctcaaaaaacaagcaacaacaacaaagaaaattaattttatgtacatattttcaaaggctgtacctgatttctttttagctcctttgtttttttaacgatgatcgggattgttcagaatcacctatctctagttttctttctctgtgtcattctcttatcctgtcattagttttgtccattttttttggattttctttcttgtgtgatcaaaatggcaaaaataaatacatttttactttttattggcctttattttttataaagaaaatgaaatgagatacatattattcagatctgccaataagatgacacctttgaatgtttaatctcatcttttttttgttttttgttttttgagacagagtctcctcttatcgtccaggctggagtgcagtggcgtgatcccagctcactgcaacctccgccttccgagttcaaacgattctcctgcctcagcctcctgagtagctgggattacaggcctgcaccaccacacccagctaatttttgtatttttagtagagatggggtttatgccatgttggccatggctggtctcgaactcgtgacctcaggtgatccatccgcctcggcttcccaaagtgctgggattacaggtgtgagccacggcgcctggccccattttgtttgttaatcatttattcattcattctgttgtggtgactcctaccagaggtgaaatagtaatgaggaggaaaaaagtttactttctaagatgtattttctgatatttcatatttgtaacatttgcttgggatgtgcagttaggttttctataccacattatcacttattaccttgcagtgagaactaaaaaaaaaactagatataaggtgaataaaaacttgttgtatgggtctgtttgttgtattgcttatacactgtaagcatagactttattcctgaatagtggaaacattctttgttgtttggtatgaaatgaacataattttaatgaaggtgttttaaaggaacccattattttaaaaatggcataggagagtaatacctgctaaatttaaaacacaacaaagagtgttactttagtttgcttttaaaattgaatattaggttccttgaaatggagtcttgttggattttttagtcatagcagttctcagaatagcaagcaattccatggaatggatgatttcctaagagcctgatgaggattgtcattctaagattctctgtgggctttaagaatttcttaaaatctggcatatttgtccttgtcaattttttttactgataaagcaggataagtctgaacttaaatttctgacttaggcatactgaaatgaaaaccagcatataacatttttatctctggagatgagagttttaagaaggaattaagaaccaaaattaatttgaggctaaaaatttttcaagcgtgttttttgttggttttgttttgtttataagtagcccagatatttagcaaatctgtcaaatgaacggagactagcagtccctctgggagcagggtggacaataactctcccacccccatttgaaatctactgaatatactacattgttaaagtacaatactggtgtgccaacatagaattaaagaatgggaagaggccgagtgtggtagctcatgcctgtaactctagctacttaggaggctgaggcaggaggatcgcttgagcccaggggtttgagactgcagtgagctatgtagccaccactgcactccagcctggacagcagagtgagaccctgtctcttaaaaaaaaaaaaaaagggaagaaaaagcacctgactagtcctcatcatctaatgttgtgatttcggttttcaactacatgtcttcatttctgttttaagaaatgttgtttcatttcttacccacttaaatgtacttgtattcacagtatatacttttatggcatcaaataccagatacatgtatatttgactagtttactcactatctcctctagaatgtctaatggagagtattcaaaactagactcctgattccagctccctaccctcgaaactgttcatgtggtcttcctttctcagtaaatgccaactacattttaaatacatttagaatcacctttgacttctctcatattctcacatcacagatctgatctatcaacaaattctgtcaattctgccttcaaaatgcatgtggactctccagccacttgtcattaccttcgctgctcttacctttttctgagtcatcatcatttctcacttgaattactgcaataattacttctgctattgctgtccctataagtcagttctccactcagcagagtgagctttcaaaaatacatctcagatcatgttgtatctctgttcaaagccttctaatgctgcttctcatttttccccgagtaaaacctggaggacttgtactggcctgcaaggccgttgggatctggtccccagccagctctctgatgtcttctacccattctgtgcatgcacggtttgccccagccacactggcctccttgaacccatcccagatcctctgcactagctttttctgaggggacccattttcacaagctttttcccccacttcatttagatctctgctcaaatgtaaccttatcagaaactttcccagaccaccttatataaaatagtaatcccacatatacagtactccctgttctccttaccctgctttattttccctcatagcacttacctgtcatattaatgttttcttttaaattttatctcccaccctgctcctcctaacaataatataagctctgttagatcagggatttagttttgttcactgctatatccacagcgcttggaacagtaagtgggatctaatgaggtgcatttgttaagtaacagtttagaaagatgataaaattcaggtgttggatgactaaagctataaaaattacctctgaactgttttctgagcccttttaaatgtcaatgcatcatttttattttcagattgggacagtgcaactttaagtaatgagtcactcttggacactgtgtctagatttgttcttgcagctcttctgaaacacacaaatttacttagtcaagcatgtggagaaagccggcaagtaacttaaaactatcctcagacaaatatttgctctcatgatgtcagaaattaggtaacttttctattttggttcttcatttagatatcaacctggtaaacacttatcagaagtgtaccgttgtgtatacaaagttcgaagtcgtttacttgcttgcaagaaccttgaacttattcaaacaaggtcatcatcacgggacagatgggtaaagtttgaaatcaattaatttctatgtttttctgcaagctgtgagagctagctctaaattggtttatgtgagaaaaaaatgtgccttggttattgcatatgttcaatacatgttgagtagttcttttcctagcagaaaaaaa

SEQ ID NO: 8659 - DNA, 2295 bp, Homo sapiens
taacaataaattcaactgattcgttaatcagttctaataactttctttcttatttttaccagaattttcctttggatactggtcgaagaggcagtcagatctccgggctgagagagatcctgagtttgccccgccgtcagattactttgtgggtcagaagagaactggtttttccagcagccaggcatggagcagacctgggccagcacagagtgacccagggcagtgctgacccagagccacggacctagccctgaacatacgtcacccactcctgcccccgacaacccaccacaagcccccacagttactttcaaaactctggatgacatgatttcctattacaaacaagtgacatgatctttcaaagcacgctgacttgggtttgtactttgacagtgcctttctctcccagagggagaaataactttaggaactgaattgtacctttgtcctgtcctttccctaggaggcacagacttcgggttggatttgtcagcaaggaggaaagttatggaaactttggccacttggctgttcattttattctaagtgggatagggacatacctacctggatttacatgtgagctgcgatagaatagaagtatttattctgtaaaattagacactgagatgtgcttataaccctgtttcatatctactcccacgacttactcatatttaagggttcttttccattccttttgcaaatccgagcatgcaggtgtctttattccaagggttcagcttccagatcagccgatggaccataggtcacgaggaatttctccctgtcaagcagtggaaaactgcatgggaggcaaaatgctctgttctccaagaggacccggaagtaatcacataggaaatgataaggaagaccaggaggagctcttcgtagtccagaaaggtagaagtgggagttgtttacttaattttactgtcataccatgctattacctacactcctgtgtgcagtgggcattcagtaaatgtgtgttgaaggactgggacgtacgtggaggctgctggacctggtcagagactgatgctgccttagcggcaatggttagagcttttcagtgcatcccacctccctgtcgcccccatgctcggcttcctcacattcaggagcctgacttggatcagacttggggctgcacagtggagcaggtgggttcccgtgtcattagtaataaggagagcagttgggcggtgggcagggtccagaaagtcagcagtgtgcctgggcccaccccatcctctacctgccacacctcagagggttcctacagctgcacacaagcagttgagagttgatgaccaggcccacaggactccacagctggttcccaggccagtgagtgctgtgagaatacagtagcacaagtccttgttctcttgagagtgggaaggagaggagtgagtgaagtagcctgtcccctgcaggtcctctgcgatggcattgtctcggttcccgcagtgctgcagtgtggaagggagtgccccatcctcattacagatgacacactggagtgtggaggggtcgatgacttgtgcagggtcatatggtacctaaggggcagatctcagacttaaacacaattgatgtctaacccctagacagtctttttagtgccctctgctctcagtcttgttgccctagtatcaagcaatcttagacaaacatcctgaattcttacaaacttacctctaaactctgaggataaagttgccagtccttttaatggtcagcctaatcattctgtcagcctaatcgggtaattgctttttttaataaatacacataaaaaccaactaacccagctgccttttttgcagaaattgacaagctaatcttaaaattcacatggaaatgcaaggaacccagaatagtcaaaacaatctagagaaaaaacaaagaggactcacacttcctgatttcaagattgaccacaaagctacgataatctacacagtgtggtagtggcataagaatagacacatagatcagtggaatagaggcgagagtccagaaataaaacatatatccgtggtcaattgatttttgacagtggtgccaggaccatccagtggggaaagagcagtcttttcaacaaatggttctgggacaagtgaatattccatgcaaaagaatgggtttggacttctgcctcacaccacatacaaaaaatcaactcacgatgaatcaaagacctaaatgtaagagctaaaactacaaaacctactgaaacagcttgtaggataaagagggaggagacaaaaagaaaaa

SEQ ID NO: 8660 - DNA, 11544 bp, Homo sapiens
aaccgcgcaagaaaggaggcatctgttgcccatagagattctcaaaggcaggagaaagggacgacgatgaggaaaaccttcctgagggagagatccctcctccccaagaccccagtgaagaatggttggtaacatcatggattagctcagaggaacatcctcagacttgcgctgacattttgggagtgattttgttgggttgttatcgagccatttctctttattcttcctgggtgttcttttgagacttccctttaagttaggttggattaggttattatagttgtaaaaacagtagctcaaatgaagacataattacaataattacaataattacatataattacaaatactgactgggcttctgctgtgtgcccagctctgtgccaggccgaaggaaacccagtgcctggcagacttggcttgcctggctcactaacatgaaacagtgagggcagagcgccttccttttgtacctgtgctgctgccttacccgtgttcttgttctgacatggtggagagctgtcatctaggagaaggaagccggcagaggtggcacagtgtgttttactccgcctgtgacattgtttggcactgtggtgtggactcgtgggccttggatggttccatctgcaccttttactggctgtatgatcttaatcaggttccttagtctttgaggctcaggatcttccattataaaatagagattataatgcctcattcccatggccctttgctttaacacccccccgccccccttcaagaagtaagtgttccaggctacacaagaaagtgcagcctgtggagtataagcaggcattttgtaaacttttattattgtcattttcctgaattttgcctatatgtagatgaatgatagaagaaccaaactcgtcttttccttaaagagactttgtatcaataagtagagagaccagaatgggaattctgttacaatgatttttttctacctaagatattattgtttggaaactgttcagcagtgcttgaaattgctgagagctgtactgatgctctgacaatttcctgggaacccatcctcttgcctttgggattcttcttatcctcctttcaaggctcaaatgtcctccttgtggtgggcatttgttaggaactgctcaggactctttgtagcaggcgttcatcttttgtcagcctttggccttgtgggcagtcattgatgagctgaagagagcagtcccagctactgtggatggcagagaaactgcatcttcattctactgagggtgtccatgttggtttagaaataacattctcattgggataaaacaggtatctttttacctactgtcttaaaaacttagatctaaatagtttgataccatttggaacaggtgtcagcctgcaagctataagaaaccaaaagagaagaacatgcagtctcttcttttggtgtctttcttcatcatttctttctttcttttttatttatttgtttttgaggcagggtctccacactccgtcacccaggtgggagtgcagtggcatgatcatggctcatcacagcctcgacctcctgggctgaagcaatcctcctgcctcagtttttaattttttttgtagaaacaaggtctcactatgttgcctaggctcttcttgaactcctgggcttgagcaatcctcctgcctgggcctcccaaagtgctggtattacaggcgtgagcaccacgcctggcctatcatttctaatgtctaagtgattgctccctcatctgaagtcaggtagcacttaatatacttcctgctcttcgggtattaccttttatttattactgacacatactaggcctcattatcagaaaaagattttagcaaacttttggtagtctttacgtacccagtgttgttaataagcgtttcatgggtgtgtgccttaacttccctagacccttggaagatggcatggctgttagccctcttgtattactctccttgcctggggaaagctttgtttgcctgcaggggttgctcagtgggtgattgctgattagatggagccgtggctgactactgtcttgcctcttctatttaatgagatctgtatgttttggaggccttctccagaaacagaatggtctatgattgcttttcatagcagaaatctcatctcctttgaaaggtctaatgtctttttaaaaatttttgcttattaatgcctgtgtgattacaagcaatttgctagtgatttgaagagtttggagggcaattgaaggtgtcacatgccaccatatggtgaaggaagacgctctgcaagcagttctgacacatttttttgtttttaaattaagctccagaattgtaattgcttgtaaaatccttttgatagttaaattccaggtggtagaaaatctttccgtaaagatactgtaaataattacacagaccatctggctagatggttttcttcccccatccatttggggggaaaaaaaggaagaaagaaactgcttgctgcagttggaggttttatttcttgtgataatcagcttcagtactagagtaaacactcagtttttaaatcacaactaacaattgaaatcagcattgcttgagaggaaaaaaaattgctaacaaaagcaaagccacatacctgccaaatctgaccttgaattggtctgccagctagtacttattggaccttactgtgtattcggtaccctgctaaaggctctaggaggttctctgcccataatttaaaaagtaaaatatctgttgcgtcataatacaaatgagatgtttttcatgaacatctgtccgtattttccattgtaggaagtcagaatatttcactttgccttgctatctgcctggcttagctgtctgaccactgtctagtttgagcaaagatgaggagagaggtatggtgtttggcttcctcctaattaagaagagtccaactctgaaaaatactgtgcatttcttacattaagagtttgctaatacattgggtagaattataccaattagaggaaataagagaaagaataaaaagtcagacttgaagactgtgaggaaatgagcaagttgagaatctcaggcacaaggcaaagttattaagatactgataaaatgtctggaattgtctcaactaggttaaagtaagttcgtagatgctgcagcaaaattccgtgtgggtgatttatctgtgagatcaaaggcataaatgatcaaaattattgttaacagtttctaaaactaatatttaataaggggcacaatgagcttattgtgtgtcagctttaaaaagcatattcctatcagtggtagtggtctctgaggttgggggctcttcttggtagtgaggcctatcttcccccttcactgttcacctactccctgacttaggggcttgtacatgtgtacaagtccttcttcacatctttttgctttcatttcagggtggattacgtggactctttggggcgttcccggcgctgtatgagaaaggatttgccagatctgctggagatggataaaaatcttcaggggagactgtaagtgtgtgtggtatacagagctctgccaaggtctgaaatgcagccacagggattgttttgtgaggggaggctgttttataattaatgatctctgttgctccagtaaggagatattgattgattgattgattgattgaagcactttttagtggttagcatgcacatacacacataatccacacttggggaacaacctgactggtggatgagtagagctgtctcttttacttggaaggatgtctgacaacagagtaacagaataaacccaaacgaaaccagcaaaccaggctttgtggagacaagtggtttgagaatatacacttgattatcccacaaacaagtggctctagggagagaacttactcactttttctttatgtatcattgcatttttgaagtaagggccttataactagatttttcagcagggcctaagacctaagacataactctaaaacgtaagacctaagagataactctgaaacatccaggggaataaattcctcttaccataggaacttttatgtgaaaagtgttgggagaaactccaccttgtccaagtcctgcaggttcaggcatccagcacatagcctttggcttggcataagaaagggagaatggaagctgggcgcggtggctcacgcctgtaatcccagcactttgggaggccgaggcgggcggatcacaaggttaggagttcgagatcatcctggctagcacagtaaaaccccgtctctactgaaaatacaaaaaaaaaaaaaattagccaggtgtggttgcggccgcgtgggagtcccagctactcaggaggctgaggcaggagaatggcgtgaaccaggaggcagagcctgcagtgagccaagatgacgccactgcactccagtctgggctacagagcgagactccgtctcaaaaaaaaaaaaaaaaaaaaaaagaaagaaagggagaatggaaacctttgagcctctcagggcccagccatctgcaaggacaggagacaccactcaggccacagtgctaagcagttttcatgtccccagatgagagaccatccacaggaggagacccagagttcctcctccctgcctgggccacctcccatctggtcagcccaggacctgggtggaaggaaagttttttgtcttgagtgctcaggcaagattccgtcaggctaaggtaacaagtctggtgcttgagtaagaagggtgaaggctggccgggcgcagtggctcatgcctgtaatcccagcactttgggaggccaaggcaggcggatctcctgagatcaggagttcaaaaccagcctagccaacatggtgaaaccctgtctctactaaaaatacaaaaattagccagatgtggtggtgggtgcctgtaatcccagctactcgggaggctgaggcaggagaatctctttaacctgggaagccgaggttgcagtgagccgagatcgtgccactgcactccagcctgggcgacagagcaagactagtctccaaaaaaaaaaaaggcgaaggctgttttattgattttccagcagtcttgtgggtcagaagcctctgtagttccctgttttctttatcaaatagtgttacttatgcatgatgcaactgactgtacttaaacactgatatctcaatccttatctgaagatagtttttgctctgttttcctgctagttttattagtcctgctaatgaaaaaaccctattatctgaagatatgagaaaagaacttcagcgccagcaatgggaggaagaagaaagagaggccctgaagagcccatggggcccgtacattatgaagacattcgggaaaatggtatgactattttcttgcagctttgcaaatcttatttttaaccttaaactgatggcaaacataaagggaagtattcataaagcaatagcttttacatggaaattaaagatcctgctttggaaatagaaaatatctcctttgttcacttcatagccttaaaatactcacatttgggaatatcttcctgacagagggtctggtaatccaagggattgttccctgagagaagtggagacagcccatggctgaaagcaaacgaacccttgttatgcttcccttggcaaacaggacgaaaacttggtctaacttttgtgtttctttggttttttgtttcttcgcttagctgttttctttttctttttaaaacttgtgccaaatatcactgtgtttctttttgctttggtaggaaatgtggcttgagtgtagttgaatgatcaggacagtctgatcttttgggtaattcatacttctttcagaggcccggcaacttggtgttgggtattttgcctttgcccgagacaaagagttgagaaacaagcagatgaaaaccttagagatgctgcgtgaacaggtacagataaatcccaagtgactgtgaggaaagatgtgagcgcttggtttcttgctggaccatactgcagaaaaatctagtaaattagttagaaattaaaattgatattcagaattgcataaaggtagttgccatactatttttgtgtttcaaattttataactgctcacaagtaacctgtgtaactttgatgttttaaatctggtcccaaatgtggtacttttggggtggcttggatgggaaaatagaaagttacttaaaggattaaggtgtaggacggaatgggttggtttcttgagtgttaaggcttgcaagatgctctgtgaactcttatgaaactttgtaagacatcagagggttcataggagagtacttcatagggcttcattgtgaggatctcaaggacagcttcttagaggtggcctgaagatcaattaactagtctatttttagaagaaaatttcatctttttggacaggaatattgcaaatttggcttcaagcaaataattttctgattttctgttcagacaacagatcagagaacaaaacgagaaaacataaaggaaaagcgaaaggctatcttagaggcaagacttgccaaacttcgacaaaaaaagatgaaaaaatcaaaagaaggtggaacagaagaagaaaatagaggtatatcatggctatgttgctgaacttcaaaagggaaaattttatttccattgatgtcttgctaatagggctggcaatgtgaaaattagccatttagttttatatttaagcaaacagtatacctttgaggtactggcaggagcaatttttataaccaaagtgatgcagaatgacattcaatatttttaggctatagatgaggatatgaagcaacaatacattgtgttgcatcttagaatggcatagtcttgtaattgagacttagtaaagagatattttaagataaagtttagctttgcatatatatgttttagacttaaattttttgctattggttattttatatatatatttaaagaaatttatattcataaagttacatagtaaaagaatttagaaatatgaatatcgacagcttgccaaagcttaccaaagaactgtgctccagaagttggtgatgtggaacttggagcacggttccccttggaaacactgttaaatgctatgtcagactagcttattgcatgagttgtggtagtacaggctaaattgccatcaatctagagactcctacatagaatggctcaaacaaaatagagatctgtttctctacttaacaacttggaggtaggtgggtgagtgggtatccagggcatgtgagtagctctgccctagatggtcatctagtcccaggcttcctccaggcttgctgtttctgccatttcctagagtatttttctcttctgcatagtcaaagcttgctcccctgctcacctgttcatgatccagcctaggggtaggcagggagactgggaaggggagccaccttcctttttagagatgtgagtgggaagttacatacagcctatgcatttacatcctgctggccagagctcagtcctgtgggccacacctcactgtaggagaagctgggaaatggcctctccagcaaggtggccacatgctcagctgcaaccggggggcattctgttacccaaaggaaaaggaggagtgtgggtatgaagggacgtatagctctccagctctcacaaagcttatgtgaagccatgggccatttcctaatgtctgaacaaaacagaccagaaacatttaggaatttgaaaaccatctgtttagtttcagataaatgctcgctctataacatgttaagctgtgcagattgtttctcaaattttgctccatctcctgaacatctgtcatgtccagaaaatgtgaagcgccaccacagtgttttttaaaaatccatttttcttttacattttaaaaatgtgaccaaaattgaacagcctacaccagaccccagctgttcatccccttggctctgcttgcttcgcctgagattgtgatgttagttgagtgatttggggatttctggtcctgcaattgccagtttggagaagcagagtggcatagtgaggggcacagagactaaaatccatccagcccagcccaggactccagcccgtatcactttctacctgtgtaccatttctgagcttaattttccccctctataaaatggggataatatggaagtattgaatttattaggattgttacaagaattaaatgacctgttgtatacaaaagacttaatccactgcctgggacatgttaggtacttcataaatactgatggttacttttactttcaggattagcatgttctgtatttttaaaaatagctttaggcttttttataacagtgtcttattcttttacaaaaaatagatggagatgttattgggcctttgccaccggagccagaggctgtgccaaccccacgtcctgctgcccagagtagcaaagtagaagtcattgtccaggagaggaaggacaccaagcctggagtgccacacatccgggagtgggaccgcggaaaaggtaagggaggtgggctctgaggtgtaagaactctccagtgaatggaaaatggttttttttctagaagcacttggggtaagttttaacttcgtgctgccttgtgtggttttacagctttggaatgccatttctcaggacctgcctttaaagtattatgaaagtttggtgttctcatatgctctgtttttagcagcctcttttatgttcagttgaaaatggtctacatgccagtgtactaacctggattcacacatggttccattggggaatttccctggccattttttctgtaattttccagagtgtccacagcagcctctctggaaggactatggtttatgcctctttgaaaaagatcatttcagtagaacattagcccatgctgtctgagctgataagatccaaagctaaagtaagagaaatgcaagagccactgttagaaatagagatgaaataccagacaaggttggacagttcccttttgtgtcttccaaaactcaataacggacaaaatttgtattttggtatgaaatacctacaatgtcatgtcaagcagataatttgtctgtatttctctttttctgtatttccccatctagagatagtcactcccttttcttagcctggtcttttatactcgttgtaggtattacttataccttgtaatatagttttgctgttgccattcttattctttggataatttgtggtggcttttaagaaatatatgatacaattagataatagtaacaataaattcaactgattcgttaatcagttctaataactttctttcttatttttaccagaattttcctttggatactggtcgaagaggcagtcagatctccgggctgagagagatcctgagtttgccccgccgtcagattactttgtgggtcagaagagaactggtttttccagcagccaggcatggagcagacctgggccagcacagagtgacccagggcagtgccctgaccagagccacggacctagccctgaacatacgtcacccactcctgcccccgacaacccaccacaagcccccacagttactttcaaaactctggatgacatgatttcctattacaaacaagtgacatgatctttcaaagcacgctgacttgggtttgtactttgacagtgcctttctctcccagagggagaaataactttaggaactgaattgtacctttgtcctgtcctttccctaggaggcacagacttcgggttggatttgtcagcaaggaggaaagttatggaaactttggccacttggctgttcattttattctaagtgggatagggacatacctacctggatttacatgtgagctgcgatagaatagaagtatttattctgtaaaattagacactgagatgtgcttataaccctgtttcatatctactcccacgacttactcatatttaagggttcttttccattccttttgcaaatccgagcatgcaggtgtctttattccaagggttcagcttccagatcagccgatggaccataggtcacgaggaatttctccctgtcaagcagtggaaaactgcatgggaggcaaaatgctctgttctccaagaggacccggaagtaatcacataggaaatgataaggaagaccaggaggagctcttcgtagtccagaaaggtagaagtgggagttgtttacttaattttactgtcataccatgctattacctacactcctgtgtgcagtgggcattcagtaaatgtgtgttgaaggactgggacgtacgtggaggctgctggacctggtcagagactgatgtgccttagcggcaatggttagagcttttcagtgcatcccacctccctgtcgcccccatgctcggcttcctcacattcaggagcctgacttggatcagacttggggctgcacagtggagcaggtgggttcccgtgtcattagtaataaggagagggttgggggtgggcagggctccagaaagtcagcagtgtgcctgggcacccaccccatcctctacctgccacacctcagagggttcctacagctgcacacaagcagttgagagttgatgaccaggcccatagggctcccacagctggttcccaggccagtgagtgctgtgagaatacagtagcacaagtccttgttctctgaagagtgggaaggagaggagtgagtgaagtagcctgtcccctgcaggtcctctgcgatggcattgtctcggttcccgcagtgctgcagtgtggaagggagtgccccatcctcattacagatgacacactggagtgtggaggggtcgatgacttgtgcagggtcatatggtacctaaggggcagatctcagacttaaacacaattgatgtctaacccctagacagtctttttagtgccctctgctctcagtcttgttgccctagtatcaagcaatcttagacaaacatcctgaattcttacaaacttacctctaaactctgaggataaagttgccagtccttttaatggtcagcctaatcattctgtcagcctaatcgggtaattgctttttttaataaatacacataaaaaccaactaacccagctgccttttttgcagaaattgacaagctaatcttaaaattcacatggaaatgcaaggaacccagaatagtcaaaacaatctagagaaaaaacaaagaggactcacacttcctgatttcaagattgaccacaaagctacgataatctacacagtgtggtagtggcataagaatagacacatagatcagtggaatagaggcgagagtccagaaataaaacatatatccgtggtcaattgatttttgacagtggtgccaggaccatccagtggggaaagagcagtcttttcaacaaatggttctgggacaagtgaatattccatgcaaaagaatgggtttggacttctgcctcacaccacatacaaaaaatcaactcacgatgaatcaaagacctaaatgtaagagctaaaactacaaaacctactgaaacagcttgtaggataaagagggaggagacaaaaagaaaaa

SEQ ID NO: 8661 - DNA, 300 bp, Homo sapiens
ctgggcacggtggctcacgcctgtaatcccagcactttgggaggccaaggcgggcggatcacgaggtcaggagatcgagaccatcctggctaacacggtgaaaccctgtctctactaaaaatacaaaaaattagccaggcgtggtggcaggtgcctgtggtcccagctactcaggaggctgaggcaggagaatggcatgaacccaggaggcggagcttgcagtaagccaagatcgcgccactgcactctagcctgggcaacaagagcaaggctgtgtctcaaaaaaaaaaaaaaaaacaa

SEQ ID NO: 8662 - DNA, 949 bp, Homo sapiens
ctgggcacggtggctcacgcctgtaatcccagcactttgggaggccaaggcgggcggatcacgaggtcaggagatcgagaccatcctggctaacacggtgaaaccctgtctctactaaaaatacaaaaaattagccaggcgtggtggcaggtgcctgtggtcccagctactcaggaggctgaggcaggagaatggcatgaacccaggaggcggagcttgcagtaagccaagatcgcgccactgcactctagcctgggcaacaagagcaaggctgtgtctcaaaaaaaaaaaaaaaaacaatgaatagacaaagaaagatggaaagaggatgtgtgtgtaacccagagcagaaggacttgaggctgactgtggagtagaaaggagaagggagacagagacaaggcaggcagcaggaagagctgtaggtgtgggagccagcatcacaaagggtccatcccaggtgaccacatccatgcctgcagcacccgggtggacggcgaagcagttatgctcgttggctcatggtcactgttatctgaagataactgtgagtcacattttctctgggatttcaaaaactaaataaacctatttataatcccctcttaacagtataatttagttcagtgttttgtgagcccttttctgtttcagatccagttctttgagtattgacacaccatcacagtcttactgtgacacgggcctgtcttgtaccagtgtatccagcagatggcattagaattcttaaatgtcagctccatactcttaaaacagcacactccaacagaaataaaaaataaatctgtggcgcatgcctgtaatcccagctacttgggaggctgaggcaggagaatcgctggagcctgggaggtggaggttgccgtgagctgagattgcgccattgcacttcagcctgggcaacgagtgaaactccgtctcaaaatta

SEQ ID NO: 8663 - DNA, 424 bp, Homo sapiens
gtagatcttaactgtactcacccctccaatacacaccatacatgcacaaaatggtaactgtgtgtggtaatggctgtgtaatctgtggtaatcacaaattaatgtatatcaaatcaccatgttgtgcatgtttaatatatgtaatttttatttgtcaattatgcctcaccaaagcttgtgggtggggggaataatgaactctgatgtaaggtatggcctctgggttatgatgtgtaaatgcaggctcatcagtcccacaaatgtcccactctgggggaatgtgagaatggagactgtgcatgtgtgggggcatggggtatatgggaactgtaacttcccttccatttttctgtgaagttaaaactgcttttttaaaagtctgtttaaaaaataaaaataaaatgaagaatgatgaccgtgctga

SEQ ID NO: 8664 - DNA, 314 bp, Homo sapiens
ctccagccattctttttttatttatttttttagacggtgtctggctctgtcgcccaggctggagtgcagtggcgcgatctcggctcactgcaagctccgcctcccgggttcacgccattctcctgcctcagcctcccgagtagctgggactacaggcgcccgccactacgcccggctaattttttgtatttttagtagagacggggtttcactgtgttagccaggatggtctccatctcctgacctcgtgatccacctgcctcggcctcccaaagtgctgggattacgggcctgagccaccgcgcccggccact

SEQ ID NO: 8665 - DNA, 1458 bp, Homo sapiens
caaacacagtttcacactgattcttaacattttgttcaacttttactcagagggcaggctgagccagggagcaaaaaggcaaaggactcctactcacatacccacttagcaaaaccaaagcaccttgggctttgaacgccacccttcttagaaggcaggtttgggggttgaggccccttgagaagctcacttcaccctctccatgccatcccattcctacccatcccaagatgcttctcttgtatttctttcagcacatccagccatctccctgggagcgtttcatatctgactctttatacttccagtgatgttttggcatccctaatagactggctcccaaggcagtctttaatcaggagtcttcccctaatctagctcctcaagaacccaagggaagaggcacaaagagaagtatgaataggaagatagaagggtaacccagtcagagagggagtggcagatgacactgctgaaaaggagtttccagagagttgcacaccatgagccacgctgtctgtccctgaccacaacctccactggccaccacctcctgggcttcccctccctccacccacagaaaccattgctcaatctcaactggactcttgcaggcctatctctccctccaaacagagatgtcctggacacagagctgcagacctctaaccactcctggaacataaaaaaacccacggtggttctacagcatttacacctccagtttccctcagacagaatccagaagagaagaacctcgctgatctctgagcggagcatgtctccaagctcaggccagccccagaactccaatggcctcaactggagtggaaatccctcaaaggcacaaacccagttcctaccatctccctcagtgcctggcaatgtttgtggttggttgagtgagttaacaggagaccatcttttggccttttttctacctctgttttctcttactatacttgcctacatctcatcttctgtcaacaccaggtactcaccccatgagcttcttgtgaacttgtctggggcccaccggcctaaacatcatcttttttgtttggaattaagctttgttgaacttttcacaggtttcatttatgcaaatgcctgtgatgggacaaaaaggtctgcaaacatggaaacctggtctaaagatgtccaaagtaaactgtctgtggagtcgaatgacatttgagccctggacctaaactccaaatccaagctctttcccactgtgaccttgggcctctcaaggctcagtttcctcacctataaactgtagagaagccaataacagactcatccacactatgaggctgtgcataaggtcatgtatgtaaaactacttgctttgttgatcattctgtcccagataagtatgaattattatgcatcatttcattaaacaagaaagcttcactgtgttaatatgcacaagtaaaagattagcatgta

SEQ ID NO: 8666 - DNA, 1460 bp, Homo sapiens
caaacacagtttcacactgattcttaacattttgttcaacttttactcagagggcaggctgagccagggagcaaaaaggcaaaggactcctactcacatacccacttagcaaaaccaaagcaccttgggctttgaacccacccttcttagaaggcaggtttgggggttgaggccccttgagaagctcacttcaccctctccccatgccatcccattcctacccatcccaagatgcttctcttgtatttctttcagcacatccagccatctccctgggagcgtttcatatctgactctttatacttccagtgatgttttggcatccctaatagactggctcccaaggcagtctttaatcaggagtcttcccctaatctagctcctcaagaacccaagggaagaggcacaaagagaagtatgaataggaagatagaagggtaacccagtcagagagggagtggcagatgacactgctgaaaaggagtttccagagagttgcacaccatgagccacgctgtctgtccctgaccacaacctccactggccaccacctcctgggcttcccctccctccacccacagaaaccattgctcaatctcaactggactcttgcaggcctatctctccctccaaacagagatgtcctggacacagagctgcagacctctaaccactcctggaacataaaaaaacccacggtggttctacagcatttacacctccagtttccctcagacagaatccagaagagaagaacctcgctgatctctgagcggagcatgtctccaagctcaggccagccccagaactccaatggcctcaactggagtggaaatccctcaaaggcacaaacccagttcctaccatctccctcagtgcctggcaatgtttgtggttggttgagtgagttaacaggagaccatcttttggccttttttctacctctgttttctcttactatacttgcctacatctcatcttctggtcaacaccaggtactcaccccatgagcttcttgtgaacttgtctggggcccaccggcctaaacatcatcttttttgtttggaattaagctttgttgaacttttcacaggtttcatttatgcaaatgcctgtgatgggacaaaaaggtctgcaaacatggaaacctggtctaaagatgtccaaagtaaactgtctgtggagtcgaatgacatttgagccctggacctaaactccaaatccaagctctttcccactgtgaccttgggcctctcaaggctcagtttcctcacctataaactgtagagaagccaataacagactcatccacactatgaggctgtgcataaggtcatgtatgtaaaactacttgctttgttgatcattctgtcccagataagtatgaattattatgcatcatttcattaaacaagaaagcttcactgtgttaatatgcacaagtaaaagattagcatgta

SEQ ID NO: 8667 - DNA, 268 bp, Homo sapiens
gttctctgcccttacaccaggtgcttcaaaacccttagtggctcctcattacttacaaatgaagtccatacactttagcaaggctttcaaggcctccacaatccgatgccagccaacttttccattcttattccactctaagcctcctccccacagcagcttgggatccaaccccaaaacaccactggccttctttcagacacatatctccccagtaccctacctctaggcatttgtcatgctgtcacctgggcctggaacatgttct

SEQ ID NO: 8668 - DNA, 268 bp, Homo sapiens; identical to SEQ ID NO: 8667

SEQ ID NO: 8669 - DNA, 888 bp, Homo sapiens
aggaagctttgataacataaattgcttgcctgccatttaacaatttttgaaatgaattattgtctgaatagtttcaatatatgttttattttatgaatttaacaaaattcttttttcttgatttagctaattttaatagagtgttttcttatcaaacatttacttatcttctaaaactccattcttgcaaactgtttggagggatttgtttttatttttattttgtagtatagctcatgtatctagaataacttgttatgtttgttatttcatcatcataaattggcttatatttcatatgcttgcagacatatagaataatcgaaaacaacaaaattatatgtatatacatatgcatacacacatatgtaaaatgtgaatgttttttatgttttgccttttattacacgttctgccttttattacatgttttgccttttattaaatctcactttgctcttcctcattcttttcggggagacatactttttcttttaaattctactactggctccttacaaaattaactatcctttaaagtttatttattaaatttatagagtcaagtttgaaaaattgttttatttcatcctttatgcaacaaggtatttattatacttttatttttcatcatctgtgaatatttagagccaaatttttatggtctttgtggttttattcttgctatattatctctgtctggaatatttatttatgtatatatttattaaataagatttacataaaaggttgagccatttattttagaattaattcaaagctctttggatgtaattttattctaaggctttgttattcttaagttcttaattttaattcctatcactgtgatttagaataaagtgatatttcttcaataattgaaaa

SEQ ID NO: 8670 - DNA, 2015 bp, Homo sapiens
tgtggtgaagctgtagagaaaaacaagcgtctcatcacggcagaccagagggaatatcagcaggaactcaaaaagaactataacaagctaaaagagaacctcaggccaatgatcgagcggaaaattccagaactgtacaagccaatattcagagttgagagtcaaaagaggtaagaacagggcagaggaggcctcttcctgtgggataaagagcagcgcatggggcctagcaccttggggcatgctctgctgcacttggggagctgcagaacctcgaaagggtggaagagggtcccacagtcagagaggctaccagagtgtgattcattctgcctctgtcctccccatccctgctccttgacctctcccagacaccttggtgttggtcttgtgccagggtattcccagggctgaatgatggcctgtgttggtttttttgtttgtttggttggtttgtatgtttgttttggcacagtgtgaaggggtcgcagacctttcacttattatttgctgagttgtccatgactgatgtccatttctactgggtgatccacccccaaccctttctaaaaggctaactgatcttttcttgcttctgtacgctctctttccctctcctccctctcttttcttaatttcagggactccttccacagatctagtttcaggaaatgtgaaacccagttgtcacagggcagctaagaaaagccatcttcattcgtggagactgtggccctgcaaccctggagaaggacttgctggtacttaaaaaatgggacatttgccacccaggactgactgtacactccctgatcagccagcactctggaagctttgggatcccaggaaccatggaattattcccaaatggactctgaccagatttttgccatactggggggtggcgggatggaggatgggtactcaggcatgactgcgtatttattaaagtgtgtttttccacaatgtaccaaacaaggcataagcagcttctcctgctgactggccaatcactgcccatctgagagatgatttcctctggcccatatttgaatttattggagtaactcaaattgcctgaggaaaaatggaaaaattatccaccagtcgattcaaactgaatttcactctttataggaaggcagggcaaacttgtaggagtacgaaacattttcaataaatctacaaagggaagccttactacaattccaaaaatcatcatggttggaaatttgggaggagattatttgtgaacttgttacccttttggtaatggtggactaattgctgtatagttatttttgttttattattactgttacattaatttaacatgcatttatagaagaatacattcaaagcactgatgtaggagatacacggtacttggagcagtcagccagaaatcacagatactgctttcacttaaatggaaacaattctccgataatgctttgctttttttcttatgtcactcttgtgtactatctatttttctcctctctgggaccaagtttctttttataaagcaataatatctctgttttcatttcagaacattgtgctgtctgtcagcatatgtatatcagctacaaaatatattcaactttgacttcttttgacaaaggactttaggaaaaagaggaacaaagacattatttgagaattaaattatatatttttaatatgactgtgaccttgactgataataaagatgtaataagaattgcaagctaaatgtttccctttgcaactcatgctttgtgttttgttttgatgacctactcgctcgtaatgttttgtaaggcacttcagagagaagacagatgcatcatcctggcctccatcaaataacactatccaaggtggcacctcttctgcaatgtttaaccctgctagtaatgaacgatgacttagttcggatatttcagaactttttgtttataccatcaggtatgcatgaatttataatctgaaagaggacttaaaataataattaaaacttaccagcttaa

SEQ ID NO: 8671 - DNA, 2026 bp, Homo sapiens
ttcatctcagatgtggtgaagctgtagagaaaaacaagcgtctcatcacggcagaccagagggaatatcagcaggaactcaaaaagaactataacaagctaaaagagaacctcaggccaatgatcgagcggaaaattccagaactgtacaagccaatattcagagttgagagtcaaaagaggtaagaacagggcagaggaggcctcttcctgtgggataaagagcagcgcatggggcctagcaccttggggcatgctctgctgcacttggggagctgcagaacctcgaaagggtggaagagggtcccacagtcagagaggctaccagagtgtgattcattctgcctctgtcctccccatccctgctccttgacctctcccagacaccttggtgttggtcttgtgccagggtattcccagggctgaatgatggcctgtgttggtttttttgtttgtttggttggtttgtatgtttgttttggcacagtgtgaaggggtcgcagacctttcacttattatttgctgagttgtccatgactgatgtccatttctactgggtgatccacccccaaccccttctaaaaggctaactgatcttttcttgcttctgtacgctctctttccctctcctccctctcttttcttaatttcagggactccttccacagatctagtttcaggaaatgtgaaacccagttgtcacagggcagctaagaaaagccatcttcattcgtggagactgtggccctgcaaccctggagaaggacttgctggtacttaaaaaatgggacatttgccacccaggactgactgtacactccctgatcagccagcactctggaagctttgggatcccaggaaccatggaattattcccaaatggactctgaccagatttttgccatactggggggtggcgggatggaggatgggtactcaggcatgactgcgtatttattaaagtgtgtttttccacaatgtaccaaacaaggcataagcagcttctcctgctgactggccaatcactgcccatctgagagatgatttcctctggcccatatttgaatttattggagtaactcaaattgcctgaggaaaaatggaaaaattatccaccagtcgattcaaactgaatttcactctttataggaaggcagggcaaacttgtaggagtacgaaacattttcaataaatctacaaagggaagccttactacaattccaaaaatcatcatggttggaaatttgggaggagattatttgtgaacttgttacccttttggtaatggtggactaattgctgtatagttatttttgttttattattactgttacattaatttaacatgcatttatagaagaatacattcaaagcactgatgtaggagatacacggtacttggagcagtcagccagaaatcacagatactgctttcacttaaatggaaacaattctccgataatgctttgctttttttcttatgtcactcttgtgtactatctatttttctcctctctgggaccaagtttctttttataaagcaataatatctctgttttcatttcagaacattgtgctgtctgtcagcatatgtatatcagctacaaaatatattcaactttgacttcttttgacaaaggactttaggaaaaagaggaacaaagacattatttgagaattaaattatatatttttaatatgactgtgaccttgactgataataaagatgtaataagaattgcaagctaaatgtttccctttgcaactcatgctttgtgttttgttttgatgacctactcgctcgtaatgttttgtaaggcacttcagagagaagacagatgcatcatcctggcctccatcaaataacactatccaaggtggcacctcttctgcaatgtttaaccctgctagtaatgaacgatgacttagttcggatatttcagaactttttgtttataccatcaggtatgcatgaatttataatctgaaagaggacttaaaataataattaaaacttaccagcttaa

SEQ ID NO: 8672 - DNA, 265 bp, Homo sapiens
ggaggctgaggtaggaggatcactggggcccaggaggtcgaagtttgccatgagctgtgatcatgccactgcactccagcctgggtgatagagtgagccccgtctcaaaaaataataaaataaggtaaaaaaaaaaaacaaacacagagatttctgggtgctacccctcagcagttatgattcattaagtctgagatagatcccagaaatctgcattttgaaaagctccacaggtgatcccgatatgccacccagtttgaaaacg

SEQ ID NO: 8673 - DNA, 265 bp, Homo sapiens; identical to SEQ ID NO: 8672

SEQ ID NO: 8674 - DNA, 2015 bp, Homo sapiens; identical to SEQ ID NO: 8670

SEQ ID NO: 8675 - DNA, 2026 bp, Homo sapiens; identical to SEQ ID NO: 8671

SEQ ID NO: 8676 - DNA, 265 bp, Homo sapiens; identical to SEQ ID NO: 8672

SEQ ID NO: 8677 - DNA, 265 bp, Homo sapiens; identical to SEQ ID NO: 8672

SEQ ID NO: 8678 - DNA, 2654 bp, Homo sapiens
cagcaaagcccaccagagcagagaattatttgacacaaaatgtcactagttccgaagctgagaaatagttacatatgtgtcatttctcactgagtgctctcaagagttttgtctttaattctctgaaatttggatttgatattctagacatggatttcattgcatttattctatttgggtttcattcatcttcttgaatgtgtaggtttacatcttttgccaaagttgggtagttttaaggccttctttcttcaaatatatttttagctctgctccttttctgtttctgggactctgatatgaatgtttgatcttttgttattatccctatggcccatgggcttccattctttttttcccccaattgattttatttcttgtctagaatggataatttctattgatgaatgttcaagtttattatttcctctgccatctccattctgttattgagccaatccagtaatttttaaaaatttacttgttgaatttttcatttccatttttttctatttggttctttgttatatcttctatttctttacttagtgccccctcctttaatttgatttaagagtgtttgcaattgcttggtgcattttaatgataggtctcttaaactcattgtcagtgaattattaatggcaaaaactgaaattacttttgcaccaaccaaatacagtatcagtgtaatcttggtgttggtatctgttctctttttctattaggtttagatttgcctggttttggtataatgaatatttttaattgtatccttgatattttgagtattaggttatgaggcccaggtttctattcattttgtgtttaactttttaagaaactgccacactgtttcccaaagtaattgtaccattttaatttccaccagcagtatgagcttcacctgcttcttatcttcactaacacttgctatacttagctttttaagtgctagccattatattaggcacatagtgttaacttattgtgttttaatttgcatttcacttgtgactaatcatatgtttatttgacatctgtatatcttctttgggttgttgaattttaaggtctttttatattcaagtctttgtcagatatatataagattagaaaatattttctcccagtctgtggctaatcttttccttctcttcacaaagtcggttaagagcaaaagctttcaattttgatgactaattaatttatttgttaaggacttgcagtttcagtaacatatataagaaatttttgcctactccaaggttctgaaagttttatagttttaagcatatgatacatttttagttaacttttttttttttaagacagaatctcactctgtcacccaggctggagtgcagtggcgcgacctctgctcactgcaacctctgccttccaggttcaagagattctcctgcctcggcctcccaagtagcggggactacaagcttgcaccaccatgtccagctaatttttctttttttgtattttcagtagagatgaagtttcaccatgttggccaggctggtcacaaaccagccagcctcagctgatctgccagcctcagccccccaaaatgctggaattacaggtgtgtaccaccattcccagcatttagttaacgttttttgtaggtgctttgagctataaatcaatgtaaatttttaaacatatatataacaagttcttctagcattgtttgttaaaaagattacctcttctttaataaatttcctttgcaccactgtcacaaatcagttgtccatgtatgtgtgtttctcaactctctattttattccatgaataccacacagtcttgattactgtagctttataataagtcttaaattcaggtaacatatgttctccaactttttctttttttttttttgagtcggagtctccctctgtcatccagactagagtgcaatggcgtgatctcggctcacttcaacctccgactcccaggttcaagcaattctccctgcctcagcttcccaagtagctggaatttcaggtgcctgccagcagacctggctatttttgtattttttagtagagatgggttttgccatgttggctggtcttgaactcctgacctcaggtgatctgtccaccgcagcctaccaaagtgctgggattacaggcatgagccatcgcgcccagcctattttccaactttcagaattatttttaaaagttgttttcactaatctaggtcctttgcatgtccatatgtattttagaattgagttcccaatttctacaaaacaaaaagcctcctgaatattcaaaatgggatttcactgaatctataggtcaggttggaaagaattgacatattaatggtattgagtcttgtagtctctgaacatagtatatctctatttaggtcttttttaaagttctcccagaagtgtttttaatttttatactatacatcttgcacttcttttgccagatgcatcactatgtatttcatattgtttatggtgttataaatggcatttaaggttttaaggttcagattgttcatggctagttcatgcaaaatcatctgctttatatatattgatctttattttgcagtctcactaagctcatttagttctaatagtgttgtagataccttcagattttttttatat

SEQ ID NO: 8679 - DNA, 300 bp, Homo sapiens
atactttgtattctttcatttattgcactagctagaacttccagtataatgcttagtggaagtgtttagaccaggtatcctctttttgctgatctttggacttttaccattaagtatgatgttagcagtaggtttctcacacatactctttattggttaaggaaattcccagaatcccagaattcttttcctccttaactgaattattctccttaatgaatgctggatgcctagtaaattttttattttattttattttttaatttttatttatttttttgagctggagtctcgctctgt

SEQ ID NO: 8680 - DNA, 5622 bp, Homo sapiens
ctctgcctggtggcgccgggaggctgtttttccactcactggcgcgcagactccatcccactgttttcttctctcttttctggagttagattagtctgaagccgccaccagccccaggcccccgtgcagaagaaaagcgggagggaacggcggaggccgccgctgccctgcaccgccctcctggaggccacttggagagtccggccccgaggaggccatggccacaagtgcccacagctggccccaggtaaggaaggggccctccctggggtgtgccaggtgtcagccgagcatgttggggcctgtcccacgctgcccagagggagagaggcccctagctgaggttccctccacccggttgaacagggagcagtcctgcccctccccgagccgtcagtctcctgtcgtcactgatgttggaggaggtcccactgggggtctggatgtgacccatccttggcctgggggcagtggtctcagaagatggcctggcccatcctctgctcaccacccaccctgtgcaggtatcttgtaccccactttgagccagtttatgaacccagggcctccacagggagctatattaggagcctagaagccaagaagggaaaaggatggggcaaagggggctgactttaacccattcttccccagcagtgatgcaaactgcctttcccaggaagttaggctggaagctccaggctgtgaagtgggggaagaatcagactcctcctcctcctcctcctcctcctcctcctcctgttgttcctcctggtcctcctcctccagcttctccttttcttggagtctgcatggccacatggctctgcctgagcccatctggcagccttccttggcagggacagaaggggtgatctagaaggggtgatccctccatgaagcatggaagggaacagggctaggtctgtgtttggcgctcaccccatccctccactccctggcttcctctggcctggggagttttgtttttcaccctccagagggggaggacatggggccacaccctggcctgtctctcaggcttgtgtgggtggaggctgggaagggagttgggctaaacttcgctgttgcccgaggccatggccacttcccggcaggttgccagcgtcgctacagcccagaccaaggcagaataatctccggatgagctggtggcaccgctgagcctttggtctcaccagggcttcctgttgctggcaggcggggtggagcggagctgctgggaggctgctggataggagaggggtcacggctgcggaagaggaggttcttcgggacacccgtggatggacacggcaaggtcagtaggagacagaaaaaaagagggttcacttagtgcagaatcacccttatccacttcccaagtctccttaggttgtggttagaggtcctgctgtggcacctctgtatttcttgggcctcagcaaggcactttatcctcttcaggtctcagttccctgatctttgcaggcaggagaatcgtccccaccccaaagacaagacagggtggaagagatggagagtttcacgcagagcacaatcaggcatcttttattcttttctttccctccaacatccctaggaaagagcaaggctcaggatgatttatcctcttttcactgatgaggaatctgaggcccagagaacagtcatgaagtgtgatcagaccctgaggtctccaaaaagataatgtccttgcgaactccagggattctggcatcttgctgtacccaccccagcccacacggcaggatcctatccaagtcccttatccacccggacactcactttagcttttacaccctcaaggctgagaccctaaggacacgccctggatccaaggagtccctggcccctctgctaatatgcgccacctggactcccagagggaaagccggtcagcaccccacatgcattagcaccatgggccacccccaagccctaccccaggagaagctcgtggtggcaaaaagaacctaagcatttgaggcaggtcacccaagcttgaatctcagtctgcctctcatctgtgaccctggcgagccactcgtcctcaggaagccttcactttccctagtgcacggcgggcacacagctcaacgtgggactgtgaggatgggaaatgaggggtgccatgcaccctggaggaactcagtgaacagtggcaactgtcacttccctggggccctatggtccttcctttctccccagcctgtccacactagcatcttcctcaactcctggttttcagagggaaacacttatcggtcatctgctccacaggaaacaccaggccaaccacagctggggataaaatagcacaaccacaccctgccgtccagcgcctcccagcctgtgccccttcctagtaccaccagcaaccatcaatcccgtctcctcctgcctcctctcctgcaatccaccccgccacgactatcgccatggcagccctgatcgcagagaacttccgcttcctgtcacttttcttcaagagcaaggatgtgatgattttcaacggcctggtggcactgggcacggtgggcagccaggagctgttctctgtggtggccttccactgcccctgctcgccggcccggaactacctgtacgggctggcggccatcggcgtgcccgccctggtgctcttcatcattggcatcatcctcaacaaccacacctggaacctcgtggccgagtgccagcaccggaggaccaagaactgctccgccgcccccaccttcctccttctaagctccatcctgggacgtgcggctgtggcccctgtcacctggtctgtcatctccctgctgcgtggtgaggcttatgtctgtgctctcagtgagttcgtggacccttcctcactcacggccagggaagagcacttcccatcagcccacgccactgaaatcctggccaggttcccctgcaaggagaaccctgacaacctgtcagacttccgggaggaggtcagccgcaggctcaggtatgagtcccaggtaaggagctgtgcaaagggaagctcctcttccctagtggtggctggtgagaggtccggggatggcctagtgctaaagctggggttggtcctcaggggctgaggtctgtgggaaagcactagcgttaggtatcagggctggttaactggtgcatggtggggcaagggccagttccagacacaaataagacagttttatcaatttttttttttactgtaaatctcagttgtatatgaccaaattagttttaaacattaaaggaacattcttctggctcagtctgggccttaattgcaatcacagataagccccttaccccagccagattgagcatgggcccttgacagtggagtgtggctggctctggggatgaacacattcctatcccaggaagggcccagccaagcactgagtcagcctcaagtgttgctgacctaaggggagtcccttgggtcaggatggagtgttgagtcaggaagatgcagttgccgtcctgagccttagctgggctctgaaggagaggaggttggtcaagggacagagggcaagggaagagaactgggaagtagcagaaaatctcagctgcaagtgttaacttagagaagcagggggtgagggagagacaggaaggagaacaagttttcttttttttctttttttttttttgagacagagtctcactcttcttgccaggttggagtgcagtggcacgatcttggcttaccgcagcctccgcctcctgggttcaagcaattctcctgcctcagcctcccgagtagctgggattacaggcacgcagccaccacatccacctaatttttgtatttttagtagagatggggtttcgccatgttggccaggctggtctcaaactcctgacctcaagggagcacagattttctaaaaggtttcttcaataggtaaataagaaatgtaaacagagctgggcagtggctcacacctgtaatctcagcactttgggaggcctaggctggtggatcactggaggtcaggagttcgagaccagcctggccaatatggtgaaaccctttctctactaaaaattctttatatttagccaggagtggtggtgggcgcctgtaatctcatcttcttgggaggctgaggcaggagaactgcttgaacccggaaggtggcggttgcagtgagccaagatcacgccactgtactccagcctgggcgacagagcaagactccatctcaaacaaaaaaaaaagacaaagaaaaaagaaaaagaaacgtaaagagagaaaaggctggagatagcaccagagcgggaagatggtagacaaagaaatgatacttatttgatgctgatcaaatgcccccagatctctgtacaggagcaagtggtgaaacaaggatgaccttgcctgtccttgccctccaagcatttcagacaagcacatgtgtgacctccaaacaaggcagatggtgatgagaggaaccaggccacgggagattcagaaaaggcacaagtgctcccagaggggcctttgaagccttcccagaggtggcatctgagctgagcctggcaggttgagctgggttttgatggcctgagatgatggcaggggaaggaggtgctcttaagtttgcaggggtggcagcagaaaacgcaggctaagtctaagcgcaagtagagtgtgagttaaagggggtaaggaaacgatggaatcacagccacaagggcctgcttctcttacccaagcagaacttgctccttttccattcgctctggggggtagggcttaggcagttcctcgcccctcctgaactgtgcccattctctggccagctctttggatggctgctcatcggcgtggtggccatcctggtgttcctgaccaagtgcctcaagcattactgctcaccactcagctaccgccaggaggcctactgggcgcagtaccgcgccaatgaggaccagctgttccagcgcacggccgaggtgcactctcgggtgctcgctgccaacaatgtgcgccgcttctttggctttgtggcgctcaacaaggatgatgaggaactgattgccaacttcccagtggaaggcacgcagccacggccacagtggaatgccatcaccggcgtctacttgtaccgtgagaaccagggcctcccactctacagccgcctgcacaagtgggcccagggtctggcaggcaacggcgcggcccctgacaacgtggagatggccctgctcccctcctaaggaggtgcttcccatgctctttgtaaatggcactacttggtcccaaactgaaccccactgcttgctcacatccatatcagaaggggatttttaaaaaactgttatcttcttggccaggggaaaggaccacaaggcaatctggggtgtggacagacccagtagacaatggaagccccagccagcagggccaggtgacagtgaagctcaccagtgggctcctttatggtactctatgcagttaacatgtatctagctgcatagggacacccagcgcagcagtgcaccactgggaagtggcctccagtgcagcctctggccttattttatatatttaaatttttgataaagtttttcttactaaaaggacta

SEQ ID NO: 8681 - DNA, 201 bp, Homo sapiens
gacagatgtcgggggtcctctccctccatgctaagggtcatctagcctgtccgtagactctcctgtgcagcattcctgacccgtgacgcttcagcccgcatcttgaccacttttagatacaggctgggcagctctgattattacacagggcttccttcagaaacctgcctccttgtaactttcacccaccagttggagctc

SEQ ID NO: 8682 - DNA, 14112 bp, Homo sapiens
gctctgccagagaaaacgtttaattccctcatgaccaagacaaaaaagaactggcttcaacaactagctgggtctgtgctggcctccaagaccttgaatagcccagatatggagaggttaggtaatgtggccatagtgggcgtgggatgagacatcatcagttcacgccaacacccgtggctttcctcagcagcccaggtttctccatttccccctctgggctctgaatttgtcctcctgtcccagactcatagcctcccctaaagggcagaaggtaccagtgaggctgaggctgaaggaacacccagagactccaagatcggaggggagggcccactccctggagcctactgaccccctccagctggactgacagcctgccagggacaaagcaggaccctgaccacaggaccctcgggaatagcccctctactcttgctccccagggaactcccctggaagagggaccctcagcatttctgggagtccaggggcctgctgcccacaatccccaggtagcctcagataaggaaaaagataacaagttggtactgaaaataaagcaagcgaagagggatttaaaaaatctcaacttccttttcatcctgacaggatttccccaagcgtgctgcagaaaaagcagcatttaaatagagtcctgaggtaacagttttccgagtgcccaggcactcgaggcggggccgggctggcccattgttgacagtgtcccacagagccagcctgccactagtcctctagcactgagctcttggcctccacatactccagggccttggccttgactgcctgcacatccttctcagtgccatgctgcttctcgtagtccaggtagcgcttgaagaagaacttcattctcttgggggccaagctcagatgaatgacccgctcaaagatgtccctgttgaggaaaagcagagtggcatttgcctgtcagtcccaggtcacgtgcttcctgcctagcactcacccacttgctctcagccctggaaccaggaccctctcccatccaggactcccacttctaccattatctttattaatccatgatgaactcccatgatgccttggggagaggcactaccaccctcatcttccagatgagcagatggacacccagagatggtaagggacttccctgcctaaagccacacagtgatcaagacaaagctactggggatgggggacacacagtgataaacatacatagtgaagggcttgggtgaggcacctgttctttttggacctcagtctactcagggggagaccctccctgtcttgtggagacgctggggtcaaaagcagagaatgcctgtgaaagtagtctacaatgagagtcaggaacagtgttaattatgagagaaactcgagtctcttgacaaggctacctcctaccaatggtttcagacacagaccagatgctggcctttgaggcagaaagaggagttgaagtgaatgtcactgggcctggggcatcacatctagctggttttctagatcaagtaagagaactgggatgctgagagctgctgtgggaccagtgcctaccacgccctctcctgaggaactcggccttggccagctgccccactcaccggacgtccttctggctgccgtgcttgatggtcatgtcgatatagaccgaccagacatctgtgcgctttgggtaggtgctcagcgtgttctcaaaaatggctttggcccgctctgcatcccccagctgaaactcaagctgggcaaacttggcaatgacatccacatctgcagggagaggactgctcagagacccaacaagcagacagccccctcaccacaacacagtgttccgcagggtcagcgtgcacctgactccctgctcttgggtcccaagactcaggttgtgacaagagggacaaagacccaaaaggggtgggtttggggccaaatacacagatgggcactgcagacacaccactctctgggcacagaagaggtgggggatcccaggggcaacagaactagtactaactgcgttttgttcctccatcttttggagcctgacatttgaaatttaacatgcactgttatgctgaggggcagagaatcaacaggcagcaagaggaaagccctcacaaggctctcctgacttagaagaagcaatgccacagccagttcctactccccgatcctggagtgctcatgggctcaggagctgggaatgagcactcacgctccttgctaggcaggcactccagggctcgctgcagcacgcggtgactggctgcagcctggctcctccgcagaaggaaggcgccgtatttgatccacacagctttctcctgccggaaacgcttcagcatccggttgtagagttcaccagcttcctgtgggaaaagacgaggcacgctgaggagagtgtgatactacagaggggacaagacagacaagcagcaacactcacaagaagctagacctgggctcccagacaccaaatcactctcagggcctaatgctagagacctgagaggagcgggagggaggctcacagaagggcaccgtgaacaggcacaacacgacggaggggattccctgctgatccgcacccatgggagggcggtcctagcctagaacatgagaatgacaagggggagtaggagagacgccagagcggatgctgggccgggacgtccccttctgtctgtgatgccctgccagcagcccaaggcagacacaccaggggtccactgccccttcacttccaaagccactccttccctcaccttgaccccacaggcctgaagaagaggtgagggaaatgacttcttttacttggaagatagggaagttggggccccgatgttgggtggcaagctcacagcaggactggacccagcaccccaggggctcttctctgagattgtggccctggaactcccaggagttcgtctgtggcccaacctcctacctggaatttctctgacttggcgtagatgtcagccaggtggagaaagactttgagaggctcgttgtactgcacggctcgctcaaagaccttggtcagggactcctgagagccgtacatgttctccaggttcagcagagccacccacacgttcagcttctcctgctcctctctggagggagagcagtcagcacatgagcgccacatgaaaccagtgagcctcccgccccatccagacagactcaggaaccacctccccctcccagcctctatctgtgtcctcagatcccaccccaaatgtagaccctaagaggctgtgtccccacagctcctgcagcattagaaacccctgccccaaccccaatggctgagtctgaggctctcctggattctgcctccattcctagaaaggatgcccaccagatcccaaacgggcctgaggtttgggctggacgcagagtcctgggtctgattctctcttcaagctaagaggatgaagcaaaggactgccttccctcttcattaggcctcaaaaactccctctgtttggaaaaccaccacagggatttcgcccaggtatgtagtgagttcttttcttactgtgtttctgctcaaactggttccctcatataagtgtatggactcttgtgaaggttacccttagcagtttcagggaagaagactataaaatataaatgagtagatctatttcacagatggccgcagctatggcagaaagcctgaggacccatgggcccctggtggcagccacccaaaatgctgccggcctgcctaggaggagctaccccacaggttgagaaacttcccagcccagaacgtgcgaagacactgtgctccctggggcaaagctgagacctgaaggagatggtcttaagggccctctcagccacggcacgggccttctcgatctccgtggcctgcaggtggaaagccatgtactgcagccacagaatggagctgttgggggagctcagcaccagtcggtcaaaatcatccgcggactctggctgccgcccaggatccatcagcgcctcctcaatgcgggacagttccttctctgccttctgcttctccaactccctttctttcttgcttttctttatctgctatggaaagcagaaacaccgtgagtcatctgctcctcaaggcctaggggaggtctgtggtggaagtcacgagttggctgggcagcccagggctctatatataccccctggcctgggactggccgctgccccctcccccactcacccaggaagacacccagtctaggaacagagcacaagagactgacaccaaggggtccctgcaaaaaggacatgccctgcaaaatacagcaccgtggcttggtgtggcttctcatcctcctcgctgtctgagctctctgctagaggtggcaaggccggggtcagagagtctagtcccacattccaagcgaagcctgaagacagctgcagccggggcgcttctgctggcttggtttgcttctcctggaggaacacagaggcgctaaagaaagcacctggctcaggctgctccctgttcccccgtgccagcccacctggaggagcatggactcctaccaagcccagagacccctcctctcctctcctctcctcctaggccatgccaggccccagcccactggggaaactttatagcagtgacataaaagttttctttgtaaatacatttatttagataacaaaattttcacacacacacatgcatatgcataccagtatataaaataacagtagaagccaggtgtggtggctcacacctgtaaccccaacactttaagaagctgaggcgggccgatcatttgaagtcaggagttcgagaccagcccggccaacatggcgaaaccccctctctactaatacaaaaattagccaggcatggtggtgcataccggcagtctcagctactcgggaggctgagtcatgagaattgcttgaacctggaaggcagaggttgcagtgagccaagatcacacaactgcactccagcctggatgacaaagcgagactctgtctcaaaataataaaaataaaaataacagtagagctgggacagagagatgacaataattctgagggtggcagggaggccctgcccagatggttataagccatcccatacccggtcctctcagcccaggtattactattctcatcttttggaggatgcaggctcagaacggctcagcctcctctttctctgcccagcctcctaatttaattcagttccacccaataaatattccttagaatttattttatgcagcctgctctgggtaaaaagggtcccttgtcctcaaggagctgacggtcaatggaggcaactgacagcccctgctttcgtattttataggaaatgaagtaaaagaggatgaggcagaggatggcccagctcttcccttgcctggagcagccttcccctccccgcgacgtcaccctcaccttgggcagcacattcgtctcttctgcctcctcttttccctcccgatagtacacgtccacaaggctgtcgtcctcctctgacaggccggctttctttggcttcttgctcactctttcctgagaggccaggtgggagaatgcctaggagcatcctcctgcagccccaggcgacaccctccctcggccccactgggtgccctgtccccacgccctcatggctgtccctccaggaggaggataggcagccacagccctccgcaggacctcacctgctcactcccagactcccggcactcccgcccgccccgcttctgcgcctgtggcttctggggctgttgcttctccttgctgggcatctccacctcctcctgccccttctggttcttcttctcgttccttttctgatttttcttttcccctttttggtctctctcctcagcctctgttttcctctcctcttgctttgtaagttgcccttccaaggaagcagaaagcacgtctggcttcccagtgtctccggggaggaaagacagctctaccaggttcttctggtggttaaggctatgacagagcaagatggggaggtaaagacatcataaaaagcagagggcaccacaggcggcccaggcctttttcctcctgatcagcccacgattctgggccctgcccccatctgccttgggagtcctttcaatattctcaagaatgatttgcacaatttttcatgcttagtagaaaaatacagggggtagatgtgatgccccctccaccatccccaacaacaggagctatgcagagataagttaccacctgttttcacaggcactgggggagaaggttccaaacaaaggccttttattcatctgaacaccactacgcaagccattatgtttacagttcaccctgaaatctcctcccagggctcctggagaaaggggtttgattcacattacagagagagagagaacgggaaggcacctaccgtaggaccctggctgtgagcagcttcccttcagggaggtgtttgttataaagggctttcttggacgggctgtgctgggagacatgggagtaccgagccaaacccacaacggaggggccaaggctgaaaggagagaggcaagagtcctgtggtcacaaatgcaacaacagaattccaaccaggcctcgggacttcactctcacagggactcaagttgtgacaaggatttgtgacagacataagttcctggcattcagcaggatgaagtgggctttgtaaacttgaaatcatcatcaagcataatgaagatatgattgagggtattttttactccacactgtggtatcataatatataaatcacaaactgctaggagaaactgcagaaacagcatggcagggaaggctgcagtatcaggtgcttgtgaacatgaggtgatttcacagaacgaacacttacaaatcatgatcaaacactaaaacagaatatccacatttatgtattttttaatttaaatttaatttttttagacacagggtatcactgcctcccaggctggaggtcagaggcacaatcatagcttaatgtaacctcgaacttatgggctcaagcaatcctcccgcctcagccttccaaatagctgggactacaggctcatgctaccacacctggttaatttttaatttttttctggagacatgggggtcttgctttgttgcccaggctggtcttgaactcctggccttcaaagcaattctctcatctcggcctctcaaagcgctaggattccaggcatgagccaccacgcccggccccagacttacttagaacagaaattagaaatgccatattctttgtccaaaacaccaaataactaataactcaacagttgttttaaaagtattagaaaacttggaattttaaaaatgagtggggactcataaactctcctcccttcatattcccatcaaagaagttgaccgaggaacacagtggaccccagagcaacacaggctcagggaaggcacttgggtccgggtgcagagcccccctcactcaccgaaagaacacaccgtgtggctggatggaccctacatagcccctcagaagctgcccttccttaatgtcctggatggagttaatctctggatcttctactttgcttttcgtctccgggtttgttctaaaggaataaaaggcttacatgcacacctttaacctccactgtcccatgccacccccaatacacctgcaaccatcatacttagtaaataagaatatgactctggacctgtcagcaggatataacctttagagcccaactctactctctcctaacatcttgccaggccagaagcaggtgcctggggcccagctatgtagaaatggggagaggcggaccaagccagagaggtcaaacctaaagccttggcctcattaacattgatgtctaaccatacagcaagctgacctcaagccaactccatacatggcacgctcacccctacaatggaaccctggaggctaaagcatctcccctcaccaggactaccatctgcaaccttggacacccacatctggatatctgaccctttccatggaaaacaagagcctgagcagacaggattcttgcagcaatctgaacagcctcagcttttctgggtaaaagaggttcaggataaaaagtgatgagcagagaaggtgggaagcccaaaattctgtgtcagatacacgtagcctccccttgatcctgagtgggtcttcctcctttctttttccaacaacacagaaacccacctggatgatcgcagcgacaaagtcaatacgttgtctgcagtggacaggatgtaacatctgaatgaaggcaaaagagaaggaaacgctcaattttcagcatctgtgaacagcaaagggtctcagcttcctctcctccaggctgacgaataggcaggagtgaggagacaggagactctggtcatgtttcttcattctgttgaaaacctgctgagggactctggacaagtcacgtcacctctgtgggcttcagtttactagtctattaaatagaaataacactaccgggctgggcacggtggctcacgcctgtaatcccagcactttgggaggctgaggtaggcggatcacaaggtcaggagattgagaccatcctggctaacacggtgaaaccccatctctactaaaaatacaaaaaaaatagccgggcgtggtggcgggcgcctgtagtcccaactactggggaggttgaggcaggagaatggcgtgaacccaggaggcagaggttgcagtgagccgagatcgtgccactgcactccagcctgggcgacagagcaagactccatctcaaaataaataaataaataaataaataacactacctactcttcttacctaacaagggtgttggggccaggtgtagtggctcacatctgtaatctcaacactttgggaggccgaggcaggagaactgctagaagccaggagctcaagaccagtctgggcagcaaagcgagaccctgtctctataaaaaaacttttttaaaaagccaggtgtggtggcacacacctgtagtcccagccacttgggaggctgaggacagaggattgtttgagcccaagaatttgaggttgcagtgagctacgatcacaccactgccctctagcctgggcaactaagtaagaccctgagaaagaaagaaaggggagggagagagggaagaagaaaaggaagtctcacagaggcatacagtatgtccttaaaagaagaaccagctctgtgttagatcctgagaacgtttgatctcagcagagagacacactaaccccaggagatcatgcccaaggcatcagctaggtactactgcagacacacaagagcagttcagaggaggcgggtcagcgcttccaggagggacagcagggttgcatctctaaacatttcatctaaaatggcaattagtagtccaaaaccataatatacagattcttagaggtagaaaggatctcagcaaaaatccagtccaaaattttcccacgacagatgtctgcctttggtaacgtggcatcatagccatcagagctggacagaacctcaagggaccgtctacctttaggcaagtaatttatcgtaggtttggccacaataaaacacatttaaaaccacaacctcattatctaagcctcaagagaaaccagagatgatcctggctgtctctaggactcattctttgtcttctcccaggccctgggcatgtgtgtgccgtgcagtggttgtgagtggttgagaatttaggcaggtaggtgctggtggctgggacagctgagacaggagagggcagttactattttccagtctctgcctccaagggcatctactgtactgtcagttgactactggatgcagctgaaatctgtctcctcaagtttagtttattcaggctattaaaacagtcttaaaactccaattggctgggtgcggaggctcactttgagaggccaaggcaggcagatcacttaagcccaggagcttgagaccagcctggccaacatggtgaaaccctgtctctactaaaaacagaaaaattagccaggcatggtgacacaacgcctgtaatcccaggtacttgggtggctgaggcacaagaatcgcttgaacccaggaggcagaggttgcagtgagccaagattgcgccactgcactccagcctgggtgacagagcaagactctgtctcaaaacaaaacaaaacaagagccaagattgtgccactgcactccagcctgggcaacagagcgagactctatctcaaaaaaaaaaaaaaagaaaaaaacaagagaccaatttttgctgaaccaatggctaagacacaaatttaaaatatccagtgccaatagtggtgtgagaaatggacagtcatatttactgttaatggggacataaattagcacagtcattttggagggtatgtaacccatcaatttcacttctaggaatttatttaccaaacatacctgcattagtatccaaatatatgcaaaagggccaggcaccgtggctcatgcctgtaatcccaccactttgggaggccaggatgggcagatcacctgaggtcaggagttcgagaccaacctgaccgacatggcgaaacctagtctctactaaaagtacaaaaattagccaggcgtcatggcgcatgcctataatcctagctacttgggaggctgaggcaggagaattgcttgaacttgggaggagactgcagtgagctgagatcgcgccactgcactccagcctacgcactgcactccagccagactgcctcagttaaaaaaaggctgtgtctcgcgccactgcactccagactctgtctcacgccactgcactccagccagactctgtctcaattaaaaaaaaacaaaaaacccaaatatatgtacaaagatacttcaacattattgtctatcaaaaaaagtattgtctatcaacagagaattggttacacaaatttcaattaaaaaaaccccagaatactaaacaaacgttttaaaataaggtaaaaggacaaaatagattttgatatattagcatagaaaaggaaaaaaattcatgataaactatgagaaaaaaacagtatatcaaatgatattctattatttatataaagaaaaactatatatatatgcattaaagtctagaaagatagaaatcaaagtacataatggcaaaaagtggtagagaaacagaggggttacagaaattttcattttctatttcatatacctgtttttctgataaaaagtcatgtattacaacaacgtttttttttaaatataccaattccacagacaggtgaaaagaggaagaacacttcgcttacctgacaaccttctgggggacgaagtcttccaggggcgtctcggagtaggagtcactcatgtgaaatatactgactgttcctatcttcccaaaggggaaggagacggtcagcccctcgttgggagtcaccttcaccactcggcccatggccacttccccttcctcaagcttgtgaggacctggtggaagaaccaacctgattcagggaagaggaaatgagctaagggaggagcgggaatgccagccacacacaggctggggaaggtggaggctgcccagacttggggtatctgggctgagtgatccagaaccatctagactgagatcaccctgccatgtagccaaggacctcagggccaagtggtggacaactctttcccagggacttgagaaaaacacctgtgtaggtaagggtaacctgtataggtaaaggtaactcagagagcagtggagtaactgggccagagcaaagcccaagagaaaaactgttccaagaaggttttttaccaggctttctgaggattccataccgaagggtcctccaactcaagcaatagctgaaaacccatcccaccccttcctgccgctccccttccccgaccaggcactgtttcatccccacacctgtgagggacagacataagagggtcttggaggaatctgggccaacaacggtggccctcagggcctggccaacccggaacttcttatctggatgcttcagaacctggaaggataaaaaaactcctgtgatgcttgaagaaaggctgtcatttatccaaaaccacagcatttaagtctccaaagcaagtatctcccaaagcaacccttaaataaagaacaagctttctcaaatccactgtaaacccacacaccaggcactgggccaagcttagggaacttgggtcccctctccaggcatctcaagcacactgaccttcaagctcacacaagtgagcaataagggaattctcccccggatgtctggggcaatctccacctcaagccatttcttcaccacattgtactgagggaaaaaaaggaaccagagtagggcaaatacaaatacaaggtttcccgccattaaaactttcctaaaaccacaaggtggaaagggccccagtacacttttccaagagacaggaatccacccttccatcccactgcccttgcccaacctccacttctcaccagcttccctcagactccagctcagaacctttgctagcctagcagaatgtgcatctcttccagggtctcagctgaccaggaggcaaaagagactccagagatgtcctcaaactggagaaccaatcccacagacctctgtagcctcctccaagctcagctgtgcccagcgattgttaaccatctccagaggccaatttttaatttctaaaccaatttggatttggatccttcactgtttatgcagtgtcttgccctaaatatgcactccaattttctcctttttttttgagacagagtctcgctctgtctcctaggctggagtgtgtggcggcaatctcggctcactgcaatctccacctcctgggttccagtgattctcctgcctcagcctccagggtagctgggattacaggcgcgcacgccccaggcccggctaaatttttgtatttttagtagagatggggtttcaccatgttggccaggctggtctcaaactcctgacctgaagtgatctgcccacctcggcctcccaaagtgctgggattacaggcgtgaaccaccacacctggccgtaaatacatactccaattttctagtcaacttaacaaatcatttatcgagcagctactatgcacatggcatcataatgataaataaaagccagagcctgccttcaaggagattacagcctacaagcagtaagtcaaatcagtgtgcaaataactacaacagcaagcaacatgtaggaagtacaacatgctacaggaactagtaacgagggaaggttatctgtgctgaaccttgatgggcagtaggcaattggaatagaaggtactccagatgtagaaaccagcatgaataaagacaggaagggaaaaagacagaaaagcttttcagaatgactgccacacaaggtgcacggaaggtcagattatgaagagccttatctgccacgctaaggcatctggggtgtatgaatgtctatagacaataggtaactgaagggatcaagcatcagagacgatcatgctcaaagatgctcatcgaagaggaatctggcaacaatggagaggtattattcttcaaggtcaaacccaatccagccgcctctcctacatgtttcaaccagtacaggctgctttccttcctttttgaactcctgttccagttggggttggaacacataatctggcacccaatttcatgttgttttacagtgcacctgaacttcatgaaaagcatgaatctaaaatccaaattatatacatttatattctaaatcttgccatgtattttactttccatttctacaattaacctaccaacaatgaattacgagctgcttgctaattgtgtgtaagccatattttagctccctaattagaccagaagttctctagtggcagaggccacgtactgtctcccacaaacccagcatggtagcacagactcaaatgcctttctctgctaatggcttttctctccaacgtcatgaccttttttctgaaagaagaatgacatctcattgccgagtggcaaaactacttactttctttaagaagcaagtaacagtctggccggcctggtactgtttaatcttct

SEQ ID NO: 8683 - DNA, 152 bp, Homo sapiens; identical to SEQ ID NO: 6129

SEQ ID NO: 8684 - DNA, 130 bp, Homo sapiens; identical to SEQ ID NO: 5837

SEQ ID NO: 8685 - DNA, 143 bp, Homo sapiens; identical to SEQ ID NO: 5839

SEQ ID NO: 8686 - DNA, 116 bp, Homo sapiens; identical to SEQ ID NO: 5840

SEQ ID NO: 8687 - DNA, 151 bp, Homo sapiens; identical to SEQ ID NO: 5841

SEQ ID NO: 8688 - DNA, 202 bp, Homo sapiens; identical to SEQ ID NO: 6792

SEQ ID NO: 8689 - DNA, 158 bp, Homo sapiens; identical to SEQ ID NO: 8242

SEQ ID NO: 8690 - DNA, 126 bp, Homo sapiens; identical to SEQ ID NO: 6134
  SITE (9): n equals a,t,g, or c
  SITE (10): n equals a,t,g, or c
  SITE (14): n equals a,t,g, or c
  SITE (20): n equals a,t,g, or c
  SITE (95): n equals a,t,g, or c
  SITE (107): n equals a,t,g, or c
  SITE (108): n equals a,t,g, or c
  SITE (110): n equals a,t,g, or c
  SITE (118): n equals a,t,g, or c

SEQ ID NO: 8691 - DNA, 118 bp, Homo sapiens; identical to SEQ ID NO: 5844

SEQ ID NO: 8692 - DNA, 77 bp, Homo sapiens; identical to SEQ ID NO: 6798

SEQ ID NO: 8693 - DNA, 15017 bp, Homo sapiens
ggtggttggttctagctattgccatggtacgtttttatatggaaaaaggaacacacagaggtttatataaaagtattcagaagacacttaaatttttccagacatttgccttgcttgaggtaagttttccatcatgctgtttttctattgctgtaatatttatgtgaacattttttgttgtgcaaaatcaatatgattttgctgattacataccacctatggatttgctgaatgccaatgttgacagtggtttatttaatgttttctattattgacgtaatgatttttttctatttgcttacagatagttcactgtttaattggtgagtttttgcttcaattttatacttttattataaattgcctttagggcaatagttcacttgtttttctttttaaggaattgtacctacttctgtgattgtgactggggtccaagtgagttcaagaatctttatggtgtggctcattactcacagtataaaaccagtaagtgacacaaacatgttgtctacttgagcctgcaggaaagctttccattcataggaatctaaaatattaacatttgtatatttcaggaggtggaagtgttggacaaaaaggagttgggtttgagttttagatgttgtgcattgacttagtgccttagcagaatgactttgatacacaaacaaacccaaatattggcatcttagatccgtaatatattctcctttgatattttccagtttttgaaatcagtattcaggttctgtcaaataacctgcagaaaatgttcttttctatagaagtttcttttcaatccaagttgtcctctttgattatgtaatcgaagttgtcagtatacaatttattatttctggccagccgcagtggcccacacctgtaatcccagcactttgggaggccaaggcgggtggatcacctgaggtcaggagtttgagaccagcctggccaacatggtgaaaccctgttcctactaaaaatacaaaaattaaccaggcgtgggggcgagcacctggaatcccagctactcaggaggccgaggcagaagaatcgcttgaacccgagaggcaaaggttgcattgagctgagattgtgccactgcactccagcctgggcgacagagcgagactccgtctgaaaaaaaaaaaaattatatcttatttagcattgagtattacagcaacagacataaaaagtaaatgcagttctgtagatctgaacaaacggaaaagactgaaagttagaaggggtcaaaggataaaaattttagttaggaggaattaagttcaagagatctattatgcaacgtagtgactatagttaatagcaatgtattgtatatttgaaaattgctaagagaatagtgatcttaccacaaataaataagtacataaggtaatacataggttcgttagcttgatttagccatttcacaatgcgtacatatttcagaacatcatgttgtacaccataaatatatgcaatttaaattttcaattaaaaataattgtcaaaaaattgctaaggagctttaggaaaaataaacaatttttattgaggcatgacaggagacagacctaattattgaatctaattaatgattcaaacctttcaggcgagatagacaccatgctgctatgtcaagatattgggcattttaaacccatgacagggccgggcgaggtggcacaagcctgtaatcccagcactttgggaggccaaggtgggtgaaccacctgagggtcaggagttcgcgaccagcctggctaacgtggtgaaacctcatctctaccaaaaatacaaaaatcagccagatgtggtggcgggcgcctgccatcccagctacacgggaggctgaggcaggagaattgcttgaacctgggaggtggagggtgcagtgagctgagatcgcaccactgcactccagtttgggtgacagagtgaggctccatctcaaaaaaaaaaaaaaattaaacccatgacaggaacatttcctatgtcaacccttctgaccttcttgacagcctttagagcctcctgtctactcgaggacagatctctggcctcctttccatttctcacatgcctttcttagatgcttggggactgacacctgacctcttctctgttcctcttagcttcactggccccctgtctgcatggggacagctcactgacctcctgctctttatactttatccctcttgactagtatctttcactcaacttgcatgatttacctgcaccctaaacagcgactgccatgcagatagtgcagatagcagtgagcacatgcaatgggagaggcaaactattaattaactttgcctactagtttaaaagcaggaggacagcattaacagactagaagacagactcttccaggcagtgagggaatataatagctgagttaggaccaccatgagtctgaagaatgaagaagaaagacaacattaactagacattaactagagagatggaggtaaagggaagcttgagagtcgcgagttccaaaaataaaacaggacccgtctgccccgtttatcctccagaggatctctgccttaatattcctatttattttttgctgacgatagtttcccactggtacctattcagcactcgttaattaattcaaccaatattattgaatgcgttctctacacctggtgctgtgcaaatttctggatttacagaaatgaataaggtgggcgggtggggtggctcacgcctataatcccagcactttgggaggctgaggcaggtggatcacttgaggtcaggagttcgagaccagcctggccaacatggtgaaaccctgtctctactaaaaattcaaaaattagccaggtgtggtggtgcgcacctgtagtcccagctactcgggaggctgaggcagaagaatcacttgaacccaagaggcagaggttgcagtgagctgagatcgcatcactgcactccagcctgggtgacagagcgagattctgtctcaaaaaaaaaaaaaaagaacaaggcaatcccagctgtccagtgtactggctgttgggaagtggggtacacttaacgttaaatcacgcacaatgctaatcatgcacctcatctgtgcccggcagtgtgctgggatatggctgttgataaaacaaacatggttctcgcctggtggagcctatacttgggagagaagctaaacaaatatttaatcatatacgtgttaagtgctttgaagcaagagctcggtatgcgttgcagtatacctaaggacttagtctgacgtagggagtgcaagaaggcttcccttaaggagggatacagatgttgaatgctgacatgtacaagagttagccagacaactcttagtacagattggcaaatgccacaacacagatatgaacaaagtacagtagaagaagggtgctgggctgggcatggtggctcatgcctgtaatcctagcactttgggaggctgaggcaagcagattacatgagatcaggaattcgagaccagcctggccaacacggtgaaaccccgtctctactaaaaatacaaaaattagcagggcatgtaatcccagctactccggaggctgaggcatgagactcatttgaacctaggacgtggaggttgcagtgagccgagatcatgccactgcactccagcccgggtgacacagcaagactccgtctcacataaataaataaataagctaaataaataaataaataaaggtggtgagcaaataactgctcagggtgagaggagagggttggagtcagttttctagagggcgagatgttttagctgaatcttgaaagataggaaaagattttttatggaataagagagtaacattccagtgagagtgaatagcatgtgttaaattgcacaagttcagagcatattctggaaataacaacatctagtgtcaccagagagagaagtaggtagaagggttgaataattgtagatgaagttggagagatttccgagcaaggattgcaaagaaccttgaatatggtgcccaggtattagggctcatccttttattctgttaagaagtgtgggaccagtgaaacttttaaatcacaggacttagctgattccaatttgttttttatgtatttgcttctttgacttctttttaaaagacaacttgcattcatgaggacaataaagggaggaaagactatttaggaaacagttacagtagtcaagatgagagatgataaacccctgaattaaaatagtagtaaaagggccaaagatgagtgagcaattcaagcgttggtcctacagtagaacaggtgtgattcaatgattactagaagtaggagggtcagattttggtttcagcaaggtaacattgtcctctgatgatagcgttatttcctgaagtgaaggacgagggaagaaaaacgagtctatgctcaactattcctgtgcataagatacgtttaagttccacgtttataattaattatgttaatggtgactgcattaagttttctatattgcatttgcctaaccctaacattccattataaataaaaggcaataaataagtaaagtaagtaccttcactgaaaagtaagttctaggttgaatgacactgggtttctctgtaattctgcagatccagaatgaagagagtgtggtgctttttctggtcgcgtggactgtgacagagatcactcgctattccttctacacattcagccttcttgaccacttgccatacttcattaaatgggccaggtggcgatatcttgcagtttagtttctccttgtcctgtgcatgcttattttgtgtgctaacgccagagaattaaaattcgtgtttcagccccacgatgccagaatgctgttataggaggtataactggtataactaataattatacaagttatgatttgtattctaaaagcttaatgatgagagaggaatcgtattaataaatattttgagtgaaatcaatgtgagacaaattgtggtatccttaacctcagaattagtcattcatttttttttggaaagcacaatatacatttttggaattagcttacataagcagtaccaaaaatatgttttttttttgtctgtgatgtaaattattttaatagtcaatctagcagccacaatttataccatttacacaatgcgattggtttttttctttgctttaagttgcagagacatttttaaaagtcacacttacttaaaattgtattatttggaatgtggataaaatttatatttgaagggctccaaatatatcctaaagcaacagtttttaaaggaaaagatatctgttcttcttgaagtttgaattctttgagcaattgacgttttagaaagttattataaaagcaaaactgctctttggagaacaagtcacaaatcagtatagacttgttcattttattctttgtattgtactttatggtagcaataacaatgacaaatggtgtgtgcctactgcatgcctgagatgtaggtatgaacaaaacaaattctctgtcttatgatgaagacaaaacataaactaataatatgtgatatgtcaggtggtgataaatgctgggattataggtgtgagccaccatgcctggtcaattactattttttaatcccaagtattatacatgttcaaatataataaatgagaatatataaaccaaaaagaaggaaaaccacttttaaattacttataatctctctaaccaaggataaccactgttaattgtgttttatgggtttttttctcttttttttttttttttttttgagacagggtctcattctgtcacccaggctggaggatagtggcacgatctcggctcacttcaatatccaccacctgggctcaagcgattctcctgcctcagcctcccaagtagctgggagtacaggtgcaggccaccacacctggctaatttttgtattttttgtagagatggggttttaccatgttgcccaggctggtctcgaacacctgagctcaagtgatccacccacctcggcctccctaagtgctaggattacaggtgtgagccactgcgcctggccatgttatatactctttgtgactttttaatattctctagctcttttttagacacttgcggcttaccactttgtatatgatgagatactttgaaattataatttgagcttaagtgtcttgtctgtcataagaaggttgtactaccatttatatggatttggttggttttaatcttactgtacatgaaaatgtgtttacctttagtgactgagctttttaaaggttggcagttttgaatgtagctggactctaatcctagaacacatcaatatcatttcgcatgacaatgttctggacctctggcacctttgaaaatactaacttaccatatagtctcttttcatgtgctgaatttacaaaatttgtctgaagaggatagcagaatgtacattgcatattttcctgaggttggcacattagacttgatggctttgtgtgtctgtcttttggaatgcatttgcatgtcttgagtgtctggaaaagataaaaactctgccatcgtatgtttaaatttgctgtttagaaagtgtttatccattgcaggctgggcgtggtggctcatgcctgtaatcccaacactttgggaggccaaggtgggcggatcacttgaggtcaggagttccagatcagcctggccaacatggtgaaaccccatctctactaaaaaattaaaaaattagccacatgtgcctgtaatcccagctacttgggaggccgaggcaggagaattgcttgaactaggaggtggaggttgcagtgatctgagatcacaccactgcactccagcttggtgacacagcgtgactctgtctcaaaagaagaaagtgtttatccattgccttaatgttaaacaagttatacagtctttcagctttgaaatcatatgttacataatactttgtcagttgatcataatcataaataattatgtttcatgtcaaaaagatcttaaaaatcccagccatctaaatatgtttcccaactccattaagtaaggtaaaataatatttgtatttatgttcagatgttgaagctgtcattctcgaataaaactacactttagaaatggcttcttagttataagtagtttggcctattgttacagtttgaatatactttgattctatttatgtgtcataagtgttcttggaaaagtcctcagaataggtaattgtatatattaagttaggtttttcatattgatttaaaatgcactcccttcaaaaaaattttagatagtaattgggaaccttcaaagaagcattgtatctttttttttaatgtggtctatccatagttaaatctcccatactgccctcagaacttagagaagtagtaacatgcaatctttttgaagtgcaagtaaagtcaaattatataatttgttcccatttcattagaaattttcattgcccttaagactttcaactagcttattgtaggagtgttaattttttcttctattgaagaacaatcctgccaaaaaaaaaaaaaatcttttgaaaaccacataaagtaaaaattgcaacttaatcagtttgggtattttactgagacaggtatataaaatgtccagttatgggatttaataaattgaggaatagggaaagattgatttaaatgatacacaaataactacccaaaactggtaagaaagcagggagtttctccaaggccaagaagggattaacaggtacagtgaaggaatcattcttctttcttgaatagctcatctattttggcaaataattctgcccttctccccatctcttatcttcgcatatccttgacatacaggaataatgcaatttttaatttgtctccaagcttcttcaatactgacaactttgacttttctttatagatatttcctaatgccaacaaaatgattaaataaaatacagattaatttgatttctttttccatcaaaatgttgaccttttgttttaaattaaaaacatttttctttttttaaattaaatttattttttttgagacagggtctcgctgtgtcacccaggctggagtacagtggtgcggtcttggctcactgcccccttgacctcctaggctcaagcaatcctcctgccttagcctcccaagtagctggggcgacaggcatgcaccactgtggtctgctcattaaatttttttttgtgagacggggtcttactatatcgcccagagtggtcttgcactctggcctcttaagttttctgtggtaactgttatatagtgactgagtcagagaaaaatgatttttttttttaatgaagaaatatgatcatcttggatcctttaggcccctcttattggagaccagccagtagaacacagagtgtttcctaattggaagcatacaggatgcctggcctactgtgtgttccagaccttgccacagaccaaatgaacacatgatgactttggatttagagtagaactttcttaactctactttaaacaagctcactcttcttttaatgtgggaattcaggaactaacttgtcaatttattttgttacggtagcagttttagacaatataatatactcattagtagctactcatgcttcaggtggtattatcagttttctgcaataattggttttcattagtaaccacaaagactttttcaaatgcctcttaaaaataactaccttggtaatttcaaggtttagatataaaatttaggataatcactggtctttttaaacgcagtgtttgatcaataaattactagctgccgcggacaaaagcagtcatttgtgattttatgcaccaaagaagttaccattacaatactttttttaaagctacataggccgggcatggtggctcatgtctgtaatcccagcactttgggaggctgaggcgggtggatcacctgaaggcaggagttcaagaccagcctgaccaacatggtgaaaccctgtctctactaaaaatacaaaaattaaccgggcgtggtggcgggcgcctgtagtcccagctacccaggaggctgaggcaggagaattgcttgaacccgggaggtggaggttgcagtgacccaagattgtgccactgcactccagtctaggcgacagagtaagactccatctcaaaaaaaaacaaaaaacaaaaaaaaaaaacaccaaaaattagctgggtatggtggcacacacctgtaatcccagctacttgggaggctgaggcaggagaattacttgaacccaggaggtggaggttgcagtgagccaagactgtgccgctgcactccagcctggtgacaagagcgaactccatctcaaaacaaaaacaagaaaaactacatatacattttttaatacataaaagtattttggtactctaaaataagttgatactattttattaaaaagacattgcctattatggaaactggtattaggaaaaaaaggatgataatcaataagcaaatgattaaagtagaactattaaccttacgtaaggttattgtaaatatgtaaagaaaagagaattttgaagtttaaatttagtagtagcaatagacctgcaatgtaaagtctaataattattgtagaaaaataattctctgaggtttttctttctccagatataatttttttatcatcttatatcctgttggagttgctggtgaacttcttacaatatacgctgccttgccgcatgtgaagaaaacaggaatgttttcaataagacttcctaacaaatacaatgtctcttttgactactattattttcttcttataaccatggcatcatatataccttgtaagtatatacttattagtactttgatttgacatatgatgtggaaatttttgaaaggatataataatatgcaaggggaaataattagaaataattgcttacaaatacattaaaacttcggtttaactccatatttactgataatttgggaaaagtgaagggagatagaggcagaagacagttcattagctatgagaataaaggcaggtaaattaacgcatggattattgctttctcaaaatcatttaaacatcagcttagtatgatttttttaaagaaagataaaaacaaatcatgtttaaagcattagtgcactttttacaagcatttagaattatatgtctgagtataaacactgtgtccaagaaaatttcagatcatttctatctattcattaagcatatacttggaaaaatcatctaggagtagttttgagtcttatttgtgttgctctatgtacttgcaaataataaagcctcttttcttaaaggattttgaataagtcagcctcttcactaatttctcatcatctttcagcagttgaagtgaattggtaaggctttactccatttcagtgctgctaatagtgaggcagggctccgtggctcatgcctataatcccagcactttgggaggccgaggcaggtggatcacctgaggtcaggagttcgagaccaggctggccaacatggcaaaaccctgtctctactaaaatacagaaattaactgggcatggtggcgcatgcctgtaatctcagctactcaggaggctgaggcaggagaatcgtttgaacctgagaggcagaagttgcagtgaactgacatgatgccattgcattccagcctgggcaataagagtgagactctgtctcaaaaaaaaaaaggcgtgggggctaatagtgatatatttttaagtcaaatattgatagctctaaaatctacatcgacatgatacaaattatttcatctaaaggagatgcgcataaaacttggccagccccttgaggtctccaacttttttttgttgttttttttgagacagagtcttgcgcttttgcccaggctggagtgcagtggcgccatctcagctcactccaatcgctgcctctcaggttcatgggattacaagcgcctgccacagtgcccacctaatttttgtatttttagtagagacgaggtttcaccatattggccaggctggtctcaaactcctgacctcaagggatccacccaccttggtctcccaaagtgctgggattacaggcatgagcccctgcccccggcagatgtctccaacttgtatctttcccaaagtcaaaattgacttagtggtgaaagatatgttttccccttgtcttctaccacttcagcctgattctgtatctgattttctaccccagccagttcgggagagctaaggaggggatgcctactctattggttcacatccctctcttttcccaatggcaggttaatggtagcattacttgaacagaaccagagcttgcttcggtgtctgtctgacagttacaggttcaaacagtgggttctcttcctcctcatggcttttgaggcatctccatggaaatggagagcctgaagcacctttttcagttgtcctgggagatgtagactctggcctgtaccagtagcagcttcccagttcaccatgctgccagctactgagtcccactggccagagaatcactcagcccagaacatgttttccactgcatttttttttaattccctcctccccctgcattcttaatgttagtaataaatcaattaattttacttattaaatcctttgctaattaaaagtactttttgagtacttagtattcaaaagtagtagtattatttctcatttacattaagatgaaagaggttaagtgagttgcttaaaaatcactagcttgtggcctggtgtggtggctcacacctgtaatcgcagcactttgggaggccaaggtgggaggattgcttgaggtcaggagttcaagaccagcctgaccaccatggtgaaaccccgtctctactaaaaatacaaaaattagccagacatggtagtgggcacctgtagtcccagctactcaggaggctgatgcaggaaaatcactgaaaccggggaggcagaggttgcagtgagccaagattacaccactgcactccagcctgagtgacagagtgagactccatctcaaaaaaaaaaaaaaaaaaaaaaatcagtagctggtgagttaaggcagggtttgaactcaagcccataccttctgttcagctactcggaattttatggaagtatttacaataattggtcagtgagtttaagtaattatgacctgagtaaatttagccccctaggtatatataatgtgatggtaacctttcttaagttaggaagaacctaaatagaaagactttttatccaaagttgcctaagcaggatattcaaagcttgttttgtgataaggttcattggtttgattattctgatcatcatattcagaaatatttttacactggcattgtttatagctgatattaatttgtttatccaccaacatttatactatgaaacactggtttgaaacactggttcaaattggttcaaaatattcttcaaatttgactggacagatgacaatttgtccaactgacctaataacgtatgtatttatgtgttattatataatggattaaatacccttacacccagccaggaggagcttctgctttaggctctgttaagaggaccttgctgtagctcttctgtggtcactccacacagcaccccactgccttctagatcacattctagaaacctgagaccatggaatttgctacccagagggcaatgagcatgcatctgggccctaaccaggcttcttcgttgatccatggtcctgagggttaaccatgtatcagtatacgcacccctgagaaaacaggatagccagggggcagctgtttgtgaggggtatggatgaagcttagatgtatgcacccgggtatcctcacacatgtgcaggagaccccttgcagtacaggatacagccagtagaatggagaagaggaggctgggtggggccagttttccctgtgctggaatgttctggcgcagcattccaaagagttcagaattctaaactcaaacatggtcttccaggtcattatgaaggtatttttatcaaggtatttaagtttgttaaaaacaagcaaaaataggccgggcgcagtggttcatgcctgtaatcccagcactttgggaggccgaggcaggcggatcacttgaggccaggagttcaagaccaggctgaccaacctggtgaaatcccatctctactaaaaacagaaaaattagtcaggtgtggtggtgatgcatgcctgtaatctcagctactcgggagactgaggcaggagaactgcttgaacctgggaggcagaggttgcagtgagctgagatcatgctactgcactctagctggggcaatagagtgagactctgtctcaggaaaaaaaataaataagcaaaagtaaaaacaaaacctcaacagttacagcattagaatatttaggcatgtggtatgtgggcttccatttgcactcttatagtcttgagctctgtaaatatccagggaacagcagtggtatgggatgtatttactctctaacattgccacatttaacaggtttcaagtataaataattttaaagcaatagcttgtttttctttgttttctttttcaatgaagtgtttccacaactctattttcatatgttacgtcaaagaagaaaggtgcttcatggagaggtgattgtagaaaaggatgattaaatgatctctgcaaacaaggtgctttttccagaataaccaagattacctgagtccaagttttaataacaagaataaacaactttgtgaaatatcatggattgtatggtttcttaaaatataacttgagacacgtggtatttgccagtatttgtgttcctcttgtgccagatctattttttacaagaactgtgcaaatatcagtaacttttgggtaggtattgattattaggaaaataattaggtgtattatctgggggaaaaaaaaacttttgctaagttttttttgaaacatgctcaaagctttttaaatcaatatttagaaattagtttaacgatttactattatacctgctagtgatatttatgtgatatttataaatgaaaataaatgcaaaattataacaacttgttaataatgtattggtatttttgaacccacaatctattttttcaggaataaggcagcattatgactaataacagtgtttggaagcgtggatataatttgctaaagtaagacttttgatgtagataaagtagcagcataaaaacacacaaatattcaagtagatgtcacagttggaaaatattctttggaaatatttctaggcagctgaaattacttatactgctaaggaaatctgctttttatttaaattagccacttaaggacaaggttttcaactgtgaaggttttaaggggttaggaagagcataagtatttgccccactattaaaaaaaaaacatgacatctgactataatgttgtattcaggctgggagtggtagctcatgcctgtaatcccagcactttggaagactgaggcaggaggatcgtttgagcccagaagttcaaggccagtctgggcaacatagcaagaccccatccctaaaaaaattacaaacaaaaaaaattaaccaggcatggtgacacatgcctgtagttccagctgcttgggaggctgaggtgggaggatcacttgagcccaggaattcaaggttacaatgagctatgatggtaccactgtacttaagcctgggtgacagagcaagaccctgtctctgaaaaatagtgatgatgatgatgatgatgataacgatgatgaggaagatgatcatgctgtactcagaactttggttgagaaagtcttctctatactgtagaattatcttgtaacaattgttatgataatccctttgtggtacttaggtaactaaacattttggggtatgatctttggacagactcctttcattctgaattccattgaatagcaaaaggtcttgtaataaagttcctgtccttgtgtttaataaaaaaaatacaccaga

SEQ ID NO: 8694 - DNA, 8737 bp, Homo sapiens
ttttgtttttgtttttttttttttgagacggagtcttgctctatcacccagctggagtgcagtggggagatctcggctcactgcaagttccgcctcccggattctcgccattctcctgcctcagtctcctgagtagctgggactactggcgcccgccaccacgcccggctaattttttttggatttttagtagatacgggatttcaccgtgttggccaggttggtcttgatctcctgacatcgtgatccgcccgcctcgccctcccaaagtgctgggattacaggcatgagccaccgcgcccggccccctcttccaagtttttactcaaaacttcattctcaaggaggccttacctggtcatcttaatttgaatagtgaaacacatactccttatctcccttgcctgtttatttttctccatcccactttctttcatatgattgtacaatatattttacttattcgcaatgcttattgtctgtcatctccattagagtgtaaactccaagaagtactcaataaatatttgaatgaatgaatgagtgaatgtattacagcattgctgttataatatctgctgtattgtatatttttccattttcacttaatagtctgtcaggttttcatctgtttttcataattatactttttgacagttacatttgagtgtatagaattaattatacaataatggattaaatcatgcgcctaacgacattttgcttttatttgtttctgttcaattcgtggcttagtgtaataaattcctggaagaagaattacacctttaaaggatgtaaggattttttagggtttttttttttttttttttttttttgagatggagtttagctttgttgcctaggctggcgtcaaactcctgggctcaagtgacttcctgcattagcctcatgagtagctgggattacaggtgagtgctaccatgcctggcagatgtaaggatttttttttttttcaagacagagtctcgctctgtcacccaggctggagtgcagtggtgcgatctcagctcactgcaagctccgcctcccgggttcatgccattctcctgcctcagcctcccgagtagctgggactacaggcaccccccaccacgcctggctaatttttttgtatttttagtagagacggggtttcaccgtgttagccaggatggtctcgatctcctaacctcgtgatctgcctgcctcggcctcccaaagtgctgggattataggcgtgagccaccacacctggccagatgtaaggatttttatggcacttgctcataatagggaagtgagcatttctctccctccctctctctttctttctgacaaatacttttgtgcccgtatatataaatgcattgtccttcaaatactttaggccctgtccttgaagcagggtaacctggggcattaatatataaacaacaattgcaataaaataatgagataagtgctaagcagatgtgtcagaggacagacaggtagggagaattagagaaagttttctgtgagagatcacagcatttaaactgagcggtgaaggacttaagtaggcataagtggggaaacagcatgagttagaggacagagatctgaaattgcaagacatctgttgaggcatcaagaagagggcttgggccgggcgcggtggctcatgcctgtaatcccagcacttgaggctgaagcaggcggatcacgaggtcaggagatcgagaccatcctggtctaacacagtgaaaccctgtctctactaaaaatacaaaaaattagctgggtgtggtggcgtgcacctgtagtcccagctactcgggagactgaggcaggaaatctcttgaacccgggaggcagaggttgcaggatccgagaccatgccactgcactccagcctgggcaacagagcgagactgtctcaaaaaaaaaaaaaaaaaaaaagaagaggacctgaagtgtagagtgggaaatgaaggcggacaggtagcttggggcattgcactgggcctcagatgctttgctaacatgtttggattttagtctgtacacaatacacaaaggtgttgtttaaaggttgtgtctcattcctttgtagctgggtaacctcagataagctacttaacctctctgactcttagttttctcatctgtaaagttggaacagcacaactacttagctagattataaaggaataaagagataatggatatgaagttcttagcaggatgcctgatgcacagtggatgtttacaaatgttcatttttattcctagtggtttatttaaaattgtacttttttttttttttgagacagagtctggctctggagtgcagtagcaccagctcagctcactgctcagcctcccaggctcaagtgatcctcccacctcagcctcccgagtagctgggactacagtcacgtgccaccacacctggctaatttttaaattttttgtagaaacaaggtcttgccatgttgcccaggctggtcttgaactcctgggcccaagcaatccacccaccttggcctcccaaaatcctgggattacaggtgtgagccactgcgcctggcctaaaattgcacttcttgcagaaagagaaagtaagatattttcacagtatacttagtatgatttaatagaacaagaaacccaaggttcatttcccagaatgttaagtaagagccatatcttttattgctgcgtagaatctattttgttgctgaggacagatccgcaaatggacctaccacaaattgttcatccatccatttgttgatggacatttgggctctcttcagtttttgctattacaaatcaagctataagcatgcatgtacatgtctatgtacgaacatatgcttttgttttgcttgggtaaatacctaggagtggaggggctgggtcataggatagttaagtgtttaatttctttcgttcttttttttttttttttttgagatggagtctcactgtgccacctacgctggagtgcagtggtgcatcctcggctcactgcaacctctgcctgcggattcaaacgattctcctgcctcagcttcctgtgtggctgggactccaggcgtgcaccaccatgcctggctaattttttttctatttttagtagagacggggtttcaccaggttggccagcctggtctcaaactcctgacctcaaatgatccaaccgccttggcctcccaaagcgtaatttcttatgaaaccgccaaactggtttccaaagtggttatacccttttatcttccctctcgcaatgaatgggacttcccattggtgcacatccttgccaacccttggtgtggtcagtcattgtaattttagacattccgagaagtacattctgttatctcattgggattttgattttgttttccctagtagctaacgatactgagtatcttttcatgtgcttcacttgccaatcatatatcttcttgggtatctgcttcaaatcttttgcccatttttagctgggcacggtggctcacacttgtaatcccagcactttaggagggcgaggcgagtggatcatgaggtcaggagatcgagaccattctggctaacacggtgaaaccccatttctattaaaaatacaacaaattagccgggcgtggtggcgggcgcctatagtctcagctactacggaggctgaggcaggagaatggtatgaacccggaggtggagcttgcagtgagccgagatcgcgccactgcacttcagcctgggtgacagagcaagactctgtctcaaaaaaaaaaaaaaaaaccttttgcacattttttttctttaatgggctgtttgatttcctattatagggttttgaaagttctttatacaatctggacacaagtgctttaccagatatgtgatttgcaaatattttcttccagtttgggcttgattttttattctcttaacagtgcctttcaaagagcaggtgtcttaatcttagtgaaattcagtttctcaagcgtttgttttttcttttatgaatctttcagcttgactcgttattggcatgagtgctggtgtacaatcagttgaagcactcacatattggctgctaaacaaaagtataacttttatctagaaaaggcagtttagaggtgtcaatgaacaatatatgaaagtatgggccagacgtggcggctcacgtctgtaaccccagtactttgggaggctgaggcaggcagatcgcttgaggtcaggagttcgagaccagcctggccaacatgttgaaaccccatctctactaaaaatacaaaaattagctgggtatggtggcaggtacctgtaatcccagccacttgggaggctaaggcacgagaatcactggaacctgggaggttgaggttgcagtgagctgaaatcacaccagactgggtgacagagcaagactccatttcaaaaaaaaaggagacaaagtgtggagtatatgaaagttgaagactatcttcggtccaagcctccaaatggctaaaggaggtatacaaaggaaatagcaagctagaatattgtttttcaatgattgttgaaataatggatctagccaatgatcatcagtaactgctagcatcacaaaagagagagtctggccaggcgcagtggctcacaccggtaatcccattactttgggagactgaggcaggcagatggcttgagcccaggagttcaagattagcctgggcaacatagggagaccccatctctactaaaaaaaaccccacaacagcaagaacaataatgagccaggtatggtggtacacccctgtggtcccagctactcgagaggctgaggtgggaagattgctgaagcctgggaacccaaggctgccatgagccatgggcacaccactcactccagcctgcgggacagagcgagaatctgtctaaaaaaaaaaatcctaattgcagaaattccagttgcttttgaaatattttctgtttgttttattatagttactaaaccgatagatgaaggaagttcaaaactagttcaatataggacccttaaagagactttctttgactgtcaccctttctgatggagggcttaggaagtgaaccctgattcaattggctcctggccttacttaggaaaaacagacaagaggttagaatagatgtttcgatgggtcctttcaaatccctgagcctgtcaatttcttttatttcccacagtttagtgagtggcacgatcatgatactatgctaggtggtacaatactgccacctatggagcaacagtagaacttgttataatgttaacgatgcatggatttttatacaatgctgtttaaaaatgtagaaaacttgccatccaaatgactcctttgattggtaggttaataactgcctctcaaacttatcttttgtggacatctgatttgggttcacctaaaaaagacaagtgtatggaaaatgtgaatgaaaatatcttaataaactttttgttttcttagtagaagaaatatggggactttgaattgaagataatgaaatcataatactttagttgtggaaggtacctaaagcatgattccgatgagtgctgtaggatcagtccagttcagtgttggcgctcacatgagatggatccatcagttgtagccacagtgaagctggggtagagtggaaaggggtcaggactagggagtctagagactgcagaggttctattacagactcagtcatgaacttactctaagactcagggtaagtaactgaatgttctggaagatgattatctcatctaaaagagtggccttcaaactttttggatagcatgctactatcaattaaaatatttgagcatagactctccatataactttaaaaatatatttataatgtaaatatgaattgctatcattaactggtatctcagggcacagtatatacttagagccagaccgacacagcatagtggcttaagagcatatactccgagcttagtggtggctgtgtgaccctctctgcctatttcctcagtagtgaaataggataatagaagaccctcgcctcatagggttattgtgaggatttgaggttaatatgttatgaattgaaaacagtgtctaagacatagaaagcactctgacaatacacttattattgtcattgttattatcatgaatatgtctgcatttcaaaggtccttgtggtcctttcagatatttacttgacttcttgccaatctgataaacaagtcattgcttttaccttattatgttctaagaatagaagtgtcattctgccatcttattattctcttgagaatgcattttcatcagattcagttagtagattctttgcaggaatcttttcaagccatttgtccactgtatgagtgttctttgattaaaaaagttaaaactgcatgataattttatatttcataaatctacttactagactctttggagactatctaaaagactagggtagctcctcatttccctgggtgagttattagagcttttaaaaagttacagatgaggtaagttgcttaaacttaaacgtgcttttggaattgcaggggaaactggaaaaaaataaacttcttattggtgactttaggaagagtaagaagtagtatgagaaagctggtctccacaactctagcttatatttaaagcacgattattattcacagaacataagctatatttatatgcaaacgtaagtttaaaagcgagggcatatagtatttttttctttcttttttctttctctctctcttgttttttttgagacagggtctttgttgcacagcctggactgcagtggcacaaacatagcttactgcaaccagcgcctctgtgctcaagtgatcctcccacctcagccttccaagtagctggaaccacaggcatgtgccgccatgcctctaaaattttttttttttgtagagacgggatcttgccatgttgcccaggctgtttttttcttttcttttcttttttttgagacagagtctcactctgtcacccaggctggagtgcagtggcaccatctcagctcactgcaacctccgcctcatgggttcaaacaattctcctgcctcagcctcccgagtagctggcactataggtgcccaccggcacacccggctaagttttgtatttttaatagagatggggttttgctatgttggccaggctggtctcaaactccggacctcaggtgatccacccacctcaaccttccaaggtgttgggattacaggggtgagccactatgcctggcctcttcttttgtttttttttttttaaacaacctttttgaaagcaggcccatggctgatcttctatctgtggctcagcaattgttgttgttgttgtttttagtgaaaattaagtaaatattaattgatgactttttttttttttttcccgagatggagtcttgctctgtcacccaggctggaatgcagtggcgtgatcttggctcactgcaacctccacttcccaggttggagcaattctcctgcctcagcctccggagtagctgggactacaggtgtgcgccaccatgcttggctaattttcgtatttttagtagagacagggtttcaccatgttggccagactggtctcaaacctctggcctcaggtgatccacctgcctcggcctcccaaagtgctgggattgcaggtgtgagccactgcacccggcccatcttaactttttaaagtgtaagttcagtggcattaagtacattcacatttttgtgtaaccattacttccttctgtctccataacttttcatcttgcaaaactgtaaactctgcacccagtgaacgctaactcctcattgccccatctgtccccagcccctagccaccactatcctactttctgtctctatgaatttgactaccctgtgtatacctcatataaattaaatcatacaggctgggcatggtggctcactccatgtaatcccagcactttgggaggctgaggtggatggatcacttgagttcaggagtttgagaccagcctgggcaacatggcgaaaacccatatctacaaaaaatacaaaaattagctggatatgatggcgcacacctgtagacccagctatggggaaggctgagatgggaggatcgcttgagccctggacgtcaaggcagcagtgaggcaagactgcgccactgcccttcagccagggtgacagagcgagaccctgtctcaatcaatcagccaataattgttctttgttaaagatgacagcaacacataatgcaaaaaaagaaattttttaaagaaaaaaatgatcatacagtattagtccttttgtgcctagcttatttcacatagcataaggtcttcaaggtttatccgtgttgcatgatatgtcagaatttctttttctttttaaggctaatattctattgtctgtatagaccacatttcttttttttttttttttttttgagacggacagctctgtcgcccaggctagagtgcagtggcgtgatcttgcctcactgcaagctccgcctcccaggttcacaccattctcctgcctcagcctcctgagtagctgggactcaggcgcccgccaccacacccggctaattttttgtatttttagtagagacggggtttcaccgtgttagccaggatggtctcgatctcctgacctcgtgatccgcccgtcttggcctcccaaagtgcggggattacaggcatgagccaccgtgcc

SEQ ID NO: 8695 - DNA, 8774 bp, Homo sapiens
agaacttgctctcttcctgcacccagggctttaggaatcagcccgttgcttctctgtagcaagcatgaggagcctctgatgatcccagtcttgggtgactcactgtctctctgttgtgtctcaaggaagggaggtgcagcagcatcctggcagtcagtggtgacatgcggagagcccacgggtccaggcgtcctggtggtattttggaagggccaaatctctggctttagcactttggaaacttgttgatcttccttggtcttctacggctattcattgcttctggggaatggtgacttgtgaatttttagcagccttttcctatccccaaaacccatttgtataagatgggtttgcttctgctgatgcaactacgtctctaaaatgtccatcttacactccctattgcaattgaagatccaatatgtaagagggtggaggaggaagtgaacatttgtgaccttttgatttgatattctggccatatgtttaaatgggggtatgcttctgattttaaatccagccttcccttgtttgatttcttttaaatgttatctctctttcaactgtgttgtcttatttctatttactgctttccccctctcctccttcccaaataacccctcatgcctgttatttgggatgctcttcccaggctttttgttatttttgtttctagaccttattgcgggaagagaatcgtgattgtttggttgccttctcttcatagcttactccatttttgttttgcttgtggcagtttcttacttattggagttcctgagccattatgttcactgattgagaaagattcataaaggctatttttatgtgttttttttttccttccctcctgctttgcctggagctccccatggctgagagttttctcctgtggccgtggtgctggctgtcacgtcaggtgccatgggagcctgctttgacacacagacccgagtcagaccttaaaaatcagggcaaaccatcttgccttgttcctctagtcaccatcacttttgtactctggatttgtcctgcctacctttaatctgtgtctccagcatttatttttttgtttgtgtcatcgggttcctggttttcttttaagacatagtcaactgtgtggacctgtaggtttggggcagcaaccaattccattgttttcctttttgtcaaatccaagagaaaatataccataaggagctagaagattctagttcacagccttttgaatcttcatggcctttgaatcctcatggcctctgaaatctgaatcagttttctcccaggaggtctctgggggctgagctgctacaggggcagagggtggggtggggttgggtgggagaatcatcccggcacttcatcgtgcatgctatttcgggcagcatcttttttttttattttattattattttttttcctgatgcttgagttatgaatgaggatgacctctgcaatcatgatgtctcccatagactctgttccttgttcctttgccagctttctcatgcatggtcctaacacttccatgatttaatctgctgcagaccatagtcttcagccacctcagcaataacttgttagaacattaaaaggaagtaaattgagaacaacttgttgccatcccattttcattagaaatcagacatcttagagatgtcaagaaagcagctagcagctagggggtatggggacctgtcctgctcacactgctgtgtgtcagaccagacctgatcctggagctcaggaccctagagagccctgatctctggaactcttgccacgttgttgctgaggcagctgaagtccccatctcccaccataacaatcacaaatagacagtagtggagccagcatccccaggcccctttttgtgtaagcagaaagggagctgtgagccttgccctgtttgcaggtttcaagtgcctctccctgcctgtacttctccccttcctctgagcagagctttggtagctgttgccaatgcaaagaaatgtaaagcagcaaaagaagacagcaggttctgacctgaggagggaaaccaaatttatcccacaaaggcccattaccccacccccctcgcctcccacccccagactggatccactactggcccaagaatactgatgagaaacctagtctggattgggtcggaagctggaatttggtgctctgcagaccagtgctcaaaattgtggttatttttgaggactcgccttcaatccagaacatttgcgtttcaccttcctcgcccagatccagttaacaaggtagctcatcacttcttgcatctgttgagtgacatgctggattttaatttttattgtggttgtacttggatgcaaggaatatgttttgttcctcccaatttagcgcaccatcctgggaagtgcatgtctcagaccaactccaccttcaccttcaccacctgtcgcatcctgcatccttcagatgagctcactcgggtcacaccaaggtaagggaccctggctttggggtgggcaggggtggggtgaagtcagggcactcccttccctgcaaggcttaatgttgaggaaagccaagtagagaggctcatagaaaaaccaactgaagccagtgtaagcatctcagcatttgcaggcacttgttttgggtcccatccttccttttgttgttgttatgtgtttttttttttttttttttttttttttgaggcagagttttgctctgttgcccaggctggagtgtagtggcgtgatctcggttaattgaaacctccacctcctgggttaaagcccatttttctttttgagtggaggctattatttatttggatctggctcaaataaagagacctggaccgacccacctttagttgcccttttagttggctatttagttagaaatggattcctaggccgctccttaaccagctgaagttgacactacccaggccctatggctaaagtctgttggattttttgcccccaagtttgtcagtagagcacagagttcttttatttatggatggagttactgagccctgtggaaccccttgtgcctctggaataggccccaggaaccatgcagcacagccaaacggtaatgaccaaaatgagaagactccaaaattgagccatgtgcccagcatggtccatttctctctggagcaccatctatggggaggacttgtctggggtgagttggtctgtttggcctgatttcaggcctttcactgctgccagcaaaagagaaaatgctctcccctaacagagtagaacgaccccctcagctgtttcctctgtggtgtaagatgctgggttgctggaaggtaaagcagaaggggtgggaacagtcagccagggagcaccttaaactatgaataattctccgcaggtcatgtgaggaggacgacgaagcagccatatgccccgttgagctgagaggagatatagggcagagagtctgagcccacgggcgaggcagggggtgagcacaccgccagcagtgcctgccctggcagggccctgtggaaggagctgtgtgtgcacgcgtggccgccactaacccggggacttaggcttggatgtgtctctgtggttgtgcctggctaactcggccttgatggtcgatgcccctaacccagctaaacacccccagtcaagccgagtgccagcactaataaaggcctaaccctaagttctcaccagacggggatcataaatattagctttgtctcctccgtctctctgcccctggagaacttggcttcctcatcctgtggctttatgttgggaagagattgttttcaaaaccatggaaccaagcttctccctatgagaggctggtgccctgggtaactagatggcactcctgactgtagccataggactcaaaccaaacacaggttttcatgtggctgtgtcagggccgaacaaagcctgggaagtcagtagcaagagaaggctcttttttttttttttttttttttggcttgagtttgaaagaaaggctgcttgaaataaaatggaaacaaatcaattgaatcttttttaaatggaaacaaaatctccctagggatggccacatcaacatgattttaagtctagagcatttttgccctttactgagggtacatcaacatttgtaaaactccacaaatgccttctgaaaaaatccatgtttaaccttaggaatttgttgtggtttctaatcatgcttttccgagtcccccagcccaccagcatccccacccctgagcttgtgtgagatgggcctgttctgggatccccaccctgtgctgacctcccagggctgaggtcacctgaatgtggggccagttggttcccctagcttgtacgttgctttgaacctcgtgtttcccacgagggagggggccccttctctggtcatcgcaaagacctgctccagaatgggcccttttccttcccattccctcctttggtgcctttctcagagtacatggacttccttctgccagactggggagagaagtctccatccccagctcctagggaccatgcagctgacctgctccaaggcacactggcagccccagcaaaatcctggagccggcaccagggcatgtcccacgagactgttaggagggctgtgcatctttgccccttggttgctcattgagaagcagtatagggcttccatgcctgtttggcctcccctggatccctgtagcagctgttaaaagagaacctttccaagctttgcacagtggcagtatcatagccaatgaggtttattactagttgaaaattttccccaataccccgccgtgacgacttgagatagaggcagcattggcaatttttgacagtttttagggatactgaattattaggttggtgcaaaagtaattgcaattataaaaaaaaaaaagaacctttcctgctttttaagcagacaacaatgcattcccctctgctgcccttctggaaacttttctgtcctaatggactccacgactggatcccaactgctggaacctagcaagtccctagtgagcacaacacgagtgaatgaacaaatctttctgctttccttccgtaactcaggccccacacatttcagtgggcctttccctgggtagcaccgttgatgtagatctcttcatatgtgacatgtctccccgcgaccctctaactccactggttagaatggatttgggcaaggatataaagagggttaagggcagcacggtgcagaggaaagggctctgcacccaggattcaggagctcacggccacaactgactggatgggcacagcctggcctcagtccatgcactgtggccaaccttacccttcctaagataaggagtatctcatctcccagagtcctggttcacgtcttgcttcagggagaagtaggtactaagaaggaatgctggaatctgggtaaatttggtggagaaagaatgcctctttgccaaagggcttcctttcccgttctctaacagatttagagtccctcaacttgggttgtccacttaacagccagatgtgacaccaagtaaacccttagctctgagcctgtttcttcatctgcaaaggggacaactgtacccaccaaccagggatgggcaaaggggatcatgtgcagcttcctgttaacttaaaccatgcttcccttgaagggtgagagggaggagcagacgtggacagagcctttgggggcctcagctggtggaaccctctcatcgtgtcctgggtcgtccctaccccccctgcaggaaactggccactgaccctttctctggagctcatgggcatttctggtgaataacctgtcatttcttctttcagccttaactcagccccaactccagcttgtggcagcaccagccacttgaaatccacgccggtggccacaccatgcactccacggagactgagcctggctgagtccttcactaacacccgtgagtccacgaccaccatgagcacatccctggggctcgtgtggctgttgaaggagcggggcatttctgctgccgtgtacgacccccagagctgggacagggccggccggggctccctcctgcactcctacacgcccaagatggctgtgatcccctctactccgccgaactcgcctatgcagacacccacatcctccccaccctcctttgagttcaagtgcacgagccctccctacgacaatttcctggcttccaagccagccagctccatcctgagggaagtgagagaaaagaacgtccgcagcagcgagagccagaccgacgtgtccgtctccaacctcaacctcgtggacaaagtcaggaggtttggggtggccaaagtggtgaactcagggcgagcccatgtccccaccttgactgaggagcagggacccctcctctgtgggcccccggggccagcaccagcccttgttcccagaggcctggtacctgagggcctgcccctcagatgccccactgtcaccagtgccatcggtgggctgcagctcaatagtggcatccggcggaatcgcagcttccccaccatggtgggatctagcatgcagatgaaagctcctgtgactctcacctcgggcatcttgatgggtgctaagctctccaaacaaactagcttacggtgaggactggaggggggccggttgccctagaggagacccacgttctcctctcttgctcccacctccctctcttccccccacagtgcactccctccctctgcccttctctgtccaccccctcctaagctagacaaatcaacctcgtgcctaatggaggaagtgtggaaactttgtaaaatgtgtacataggacttggagaccttgtgtccgccctgctctttcttccgatcccacaggaagtgcccctgcactgtcatcactctcacgaggacgtcacctgtgctaacctgggggaaggtggggtcctttcttctttccttttgagaagcactgaaactcccaagtgtgttcttatcccatggataggaaaccagtgaattccgtggctggcacaccacgagctgtcacgcggcacgggtcataacacatctgggtgtcatcggacacctcacctcgcccaccctgtaggagcgtaaggagcctccatcctcagccacgtgcagctgacgtggctttcctgatcggagggcttttcttttatgggtggcccagcttcttcaagaccttcactgctctgcctcagtggacagtcgtttcttttttgaggtgtgaccttttgttttcatgccttccccttgaagtcatcctgtgttttgtaatcagctgtcaggccaaatgtctgacccgaaagagaatgtatttacactcatgctgcgttgttcagcagcccctctgtgttctgtgtgatttgttttatttttccttttttttacatatatatgcagggaagtaatggtactggtagtgtatgttttctatgtggttcaaatatgaatttcgaacacaccaagccgctaatgagatagcagcttttttctgggacccagagtcacaaccaaattgatttaagaccggacccaagacacctttaacaataggactgaaaggaaaaaggatagggaaaaagcttattaaagaaatgtgtcaacaccaaatgtagaggggaagaaccacaaccaggcataataccaaaccggttccagggggaaacaaggctttggtattccgctggctccagcgctttttctgaaacccgaggctggccagggtgctgtcaccatgcggtctttgattgcagccattcaatgcccacatgcttttccttcttgtttcagaacagcacatggtcacaacaagatattttctttccctccaaagccttttgtctccttgtgcctctttttatccttaggaaaagatccaggtgcttgtgaaaagaatcatgaatgcaacaagggaggctggtcctgttgctgtcgccgattaagttttaaacttttatttattatttatgtctgccgtattttaaataaacattctcgttccttccagtttcagtcatagtgtgtctgtggcattccagtccaaccatgtgacttatttattctaatttgagggctgcactgtacaccatggtgtcctgtgacaccgtgttccagacatttatggaaggaaaacatcccatataaatgaaactgtcatgctgtgtcctccccggcagcagaagatgtgtccttccattgagtgagggtaaccttatgtccaccaaggatactttgagaaagcccctaaggaacaagcctcagtcccacggtttcagactatttattctctgaacacaagagtattggttaattatgttctcagctctccctgctgttgtatgtgtgcattcactgcaagtaacttatatctttttatttgaatgtattttaaagcagtagatagaataacaaaggaatatgaaaaccatggactgaatggaccattttatgtattcagagagagaagccactcatcattgccagaaataccatgtaaaaattggcagttcagaggttgcaatacttagtatagtaaataaataaacggtcaacattgtgcaaccactaccaaaaagtgtgttgtaatgcatcaaaaatcaacacaattttattcactaatgagtatcaataaaataagttcaaatgatggaaaccacactggtattctgatttgtattttgtttttatcttttcatcaaggagacgatctctttatgtaagacttgaaagtgtttagctctttgcaaaattaaatgaaaggcatatacttca

SEQ ID NO: 8696 - DNA, 38771 bp, Homo sapiens; identical to SEQ ID NO: 7561
  SITE (7892): n equals a,t,g, or c
  SITE (7893): n equals a,t,g, or c
  SITE (7894): n equals a,t,g, or c
  SITE (7895): n equals a,t,g, or c
  SITE (7896): n equals a,t,g, or c
  SITE (7897): n equals a,t,g, or c
  SITE (7898): n equals a,t,g, or c
  SITE (7899): n equals a,t,g, or c
  SITE (7900): n equals a,t,g, or c
  SITE (7901): n equals a,t,g, or c
  SITE (7902): n equals a,t,g, or c
  SITE (7903): n equals a,t,g, or c
  SITE (7904): n equals a,t,g, or c
  SITE (7905): n equals a,t,g, or c
  SITE (7906): n equals a,t,g, or c
  SITE (7907): n equals a,t,g, or c
  SITE (7908): n equals a,t,g, or c
  SITE (7909): n equals a,t,g, or c
  SITE (7910): n equals a,t,g, or c
  SITE (7911): n equals a,t,g, or c
  SITE (7912): n equals a,t,g, or c
  SITE (7913): n equals a,t,g, or c
  SITE (7914): n equals a,t,g, or c
  SITE (7915): n equals a,t,g, or c
  SITE (7916): n equals a,t,g, or c
  SITE (7917): n equals a,t,g, or c
  SITE (7918): n equals a,t,g, or c
  SITE (7919): n equals a,t,g, or c
  SITE (7920): n equals a,t,g, or c
  SITE (7921): n equals a,t,g, or c
  SITE (7922): n equals a,t,g, or c
  SITE (7923): n equals a,t,g, or c
  SITE (7924): n equals a,t,g, or c
  SITE (7925): n equals a,t,g, or c
  SITE (7926): n equals a,t,g, or c
  SITE (7927): n equals a,t,g, or c
  SITE (7928): n equals a,t,g, or c
  SITE (7929): n equals a,t,g, or c
  SITE (7930): n equals a,t,g, or c
  SITE (7931): n equals a,t,g, or c
  SITE (7932): n equals a,t,g, or c
  SITE (7933): n equals a,t,g, or c
  SITE (7934): n equals a,t,g, or c
  SITE (7935): n equals a,t,g, or c
  SITE (7936): n equals a,t,g, or c
  SITE (7937): n equals a,t,g, or c
  SITE (7938): n equals a,t,g, or c
  SITE (7939): n equals a,t,g, or c
  SITE (7940): n equals a,t,g, or c
  SITE (7941): n equals a,t,g, or c
  SITE (7942): n equals a,t,g, or c
  SITE (7943): n equals a,t,g, or c
  SITE (7944): n equals a,t,g, or c
  SITE (7945): n equals a,t,g, or c
  SITE (7946): n equals a,t,g, or c
  SITE (7947): n equals a,t,g, or c
  SITE (7948): n equals a,t,g, or c
  SITE (7949): n equals a,t,g, or c
  SITE (7950): n equals a,t,g, or c
  SITE (7951): n equals a,t,g, or c
  SITE (7952): n equals a,t,g, or c
  SITE (7953): n equals a,t,g, or c
  SITE (7954): n equals a,t,g, or c
  SITE (7955): n equals a,t,g, or c
  SITE (7956): n equals a,t,g, or c
  SITE (7957): n equals a,t,g, or c
  SITE (7958): n equals a,t,g, or c
  SITE (7959): n equals a,t,g, or c
  SITE (7960): n equals a,t,g, or c
  SITE (7961): n equals a,t,g, or c
  SITE (7962): n equals a,t,g, or c
  SITE (7963): n equals a,t,g, or c
  SITE (7964): n equals a,t,g, or c
  SITE (7965): n equals a,t,g, or c
  SITE (7966): n equals a,t,g, or c
  SITE (7967): n equals a,t,g, or c
  SITE (7968): n equals a,t,g, or c
  SITE (7969): n equals a,t,g, or c
  SITE (7970): n equals a,t,g, or c
  SITE (7971): n equals a,t,g, or c
  SITE (7972): n equals a,t,g, or c
  SITE (7973): n equals a,t,g, or c
  SITE (7974): n equals a,t,g, or c
  SITE (7975): n equals a,t,g, or c
  SITE (7976): n equals a,t,g, or c
  SITE (7977): n equals a,t,g, or c
  SITE (7978): n equals a,t,g, or c
  SITE (7979): n equals a,t,g, or c
  SITE (7980): n equals a,t,g, or c
  SITE (7981): n equals a,t,g, or c
  SITE (7982): n equals a,t,g, or c
  SITE (7983): n equals a,t,g, or c
  SITE (7984): n equals a,t,g, or c
  SITE (7985): n equals a,t,g, or c
  SITE (7986): n equals a,t,g, or c
  SITE (7987): n equals a,t,g, or c
  SITE (7988): n equals a,t,g, or c
  SITE (7989): n equals a,t,g, or c
  SITE (7990): n equals a,t,g, or c
  SITE (7991): n equals a,t,g, or c
  SITE (7992): n equals a,t,g, or c
  SITE (7993): n equals a,t,g, or c
  SITE (7994): n equals a,t,g, or c
  SITE (7995): n equals a,t,g, or c
  SITE (7996): n equals a,t,g, or c
  SITE (7997): n equals a,t,g, or c
  SITE (7998): n equals a,t,g, or c
  SITE (7999): n equals a,t,g, or c
  SITE (8000): n equals a,t,g, or c
  SITE (8001): n equals a,t,g, or c
  SITE (8002): n equals a,t,g, or c
  SITE (8003): n equals a,t,g, or c
  SITE (8004): n equals a,t,g, or c
  SITE (8005): n equals a,t,g, or c
  SITE (8006): n equals a,t,g, or c
  SITE (8007): n equals a,t,g, or c
  SITE (8008): n equals a,t,g, or c
  SITE (8009): n equals a,t,g, or c
  SITE (8010): n equals a,t,g, or c
  SITE (8011): n equals a,t,g, or c
  SITE (8012): n equals a,t,g, or c
  SITE (8013): n equals a,t,g, or c
  SITE (8014): n equals a,t,g, or c
  SITE (8015): n equals a,t,g, or c
  SITE (8016): n equals a,t,g, or c
  SITE (8017): n equals a,t,g, or c
  SITE (8018): n equals a,t,g, or c
  SITE (8019): n equals a,t,g, or c
  SITE (8020): n equals a,t,g, or c
  SITE (8021): n equals a,t,g, or c
  SITE (8022): n equals a,t,g, or c
  SITE (8023): n equals a,t,g, or c
  SITE (8024): n equals a,t,g, or c
  SITE (8025): n equals a,t,g, or c
  SITE (8026): n equals a,t,g, or c
  SITE (8027): n equals a,t,g, or c
  SITE (8028): n equals a,t,g, or c
  SITE (8029): n equals a,t,g, or c
  SITE (8030): n equals a,t,g, or c
  SITE (8031): n equals a,t,g, or c
  SITE (8032): n equals a,t,g, or c
  SITE (8033): n equals a,t,g, or c
  SITE (8034): n equals a,t,g, or c
  SITE (8035): n equals a,t,g, or c
  SITE (8036): n equals a,t,g, or c
  SITE (8037): n equals a,t,g, or c
  SITE (8038): n equals a,t,g, or c
  SITE (8039): n equals a,t,g, or c
  SITE (8040): n equals a,t,g, or c
  SITE (8041): n equals a,t,g, or c
  SITE (8042): n equals a,t,g, or c
  SITE (8043): n equals a,t,g, or c
  SITE (8044): n equals a,t,g, or c
  SITE (8045): n equals a,t,g, or c
  SITE (8046): n equals a,t,g, or c
  SITE (8047): n equals a,t,g, or c
  SITE (8048): n equals a,t,g, or c
  SITE (8049): n equals a,t,g, or c
  SITE (8050): n equals a,t,g, or c
  SITE (8051): n equals a,t,g, or c
  SITE (8052): n equals a,t,g, or c
  SITE (8053): n equals a,t,g, or c
  SITE (8054): n equals a,t,g, or c
  SITE (8055): n equals a,t,g, or c
  SITE (8056): n equals a,t,g, or c
  SITE (8057): n equals a,t,g, or c
  SITE (8058): n equals a,t,g, or c
  SITE (8059): n equals a,t,g, or c
  SITE (8060): n equals a,t,g, or c
  SITE (8061): n equals a,t,g, or c
  SITE (8062): n equals a,t,g, or c
  SITE (8063): n equals a,t,g, or c
  SITE (8064): n equals a,t,g, or c
  SITE (8065): n equals a,t,g, or c
  SITE (8066): n equals a,t,g, or c
  SITE (8067): n equals a,t,g, or c
  SITE (8068): n equals a,t,g, or c
  SITE (8069): n equals a,t,g, or c
  SITE (8070): n equals a,t,g, or c
  SITE (8071): n equals a,t,g, or c
  SITE (8072): n equals a,t,g, or c
  SITE (8073): n equals a,t,g, or c
  SITE (8074): n equals a,t,g, or c
  SITE (8075): n equals a,t,g, or c
  SITE (8076): n equals a,t,g, or c
  SITE (8077): n equals a,t,g, or c
  SITE (8078): n equals a,t,g, or c
  SITE (8079): n equals a,t,g, or c
  SITE (8080): n equals a,t,g, or c
  SITE (8081): n equals a,t,g, or c
  SITE (8082): n equals a,t,g, or c
  SITE (8083): n equals a,t,g, or c
  SITE (8084): n equals a,t,g, or c
  SITE (8085): n equals a,t,g, or c
  SITE (8086): n equals a,t,g, or c
  SITE (8087): n equals a,t,g, or c
  SITE (8088): n equals a,t,g, or c
  SITE (8089): n equals a,t,g, or c
  SITE (8090): n equals a,t,g, or c
  SITE (8091): n equals a,t,g, or c
  SITE (8092): n equals a,t,g, or c
  SITE (8093): n equals a,t,g, or c
  SITE (8094): n equals a,t,g, or c
  SITE (8095): n equals a,t,g, or c
  SITE (8096): n equals a,t,g, or c
  SITE (8097): n equals a,t,g, or c
  SITE (8098): n equals a,t,g, or c
  SITE (8099): n equals a,t,g, or c
  SITE (8100): n equals a,t,g, or c
  SITE (8101): n equals a,t,g, or c
  SITE (8102): n equals a,t,g, or c
  SITE (8103): n equals a,t,g, or c
  SITE (8104): n equals a,t,g, or c
  SITE (8105): n equals a,t,g, or c
  SITE (8106): n equals a,t,g, or c
  SITE (8107): n equals a,t,g, or c
  SITE (8108): n equals a,t,g, or c
  SITE (8109): n equals a,t,g, or c
  SITE (8110): n equals a,t,g, or c
  SITE (8111): n equals a,t,g, or c
  SITE (8112): n equals a,t,g, or c
  SITE (8113): n equals a,t,g, or c
  SITE (8114): n equals a,t,g, or c
  SITE (8115): n equals a,t,g, or c
  SITE (8116): n equals a,t,g, or c
  SITE (8117): n equals a,t,g, or c
  SITE (8118): n equals a,t,g, or c
  SITE (8119): n equals a,t,g, or c
  SITE (8120): n equals a,t,g, or c
  SITE (8121): n equals a,t,g, or c
  SITE (8122): n equals a,t,g, or c
  SITE (8123): n equals a,t,g, or c
  SITE (8124): n equals a,t,g, or c
  SITE (8125): n equals a,t,g, or c
  SITE (8126): n equals a,t,g, or c
  SITE (8127): n equals a,t,g, or c
  SITE (8128): n equals a,t,g, or c
  SITE (8129): n equals a,t,g, or c
  SITE (8130): n equals a,t,g, or c
  SITE (8131): n equals a,t,g, or c
  SITE (8132): n equals a,t,g, or c
  SITE (8133): n equals a,t,g, or c
  SITE (8134): n equals a,t,g, or c
  SITE (8135): n equals a,t,g, or c
  SITE (8136): n equals a,t,g, or c
  SITE (8137): n equals a,t,g, or c
  SITE (8138): n equals a,t,g, or c
  SITE (8139): n equals a,t,g, or c
  SITE (8140): n equals a,t,g, or c
  SITE (8141): n equals a,t,g, or c
  SITE (8142): n equals a,t,g, or c
  SITE (8143): n equals a,t,g, or c
  SITE (8144): n equals a,t,g, or c
  SITE (8145): n equals a,t,g, or c
  SITE (8146): n equals a,t,g, or c
  SITE (8147): n equals a,t,g, or c
  SITE (8148): n equals a,t,g, or c
  SITE (8149): n equals a,t,g, or c
  SITE (8150): n equals a,t,g, or c
  SITE (8151): n equals a,t,g, or c
  SITE (8152): n equals a,t,g, or c
  SITE (8153): n equals a,t,g, or c
  SITE (8154): n equals a,t,g, or c
  SITE (8155): n equals a,t,g, or c
  SITE (8156): n equals a,t,g, or c
  SITE (8157): n equals a,t,g, or c
  SITE (8158): n equals a,t,g, or c
  SITE (8159): n equals a,t,g, or c
  SITE (8160): n equals a,t,g, or c
  SITE (8161): n equals a,t,g, or c
  SITE (8162): n equals a,t,g, or c
  SITE (8163): n equals a,t,g, or c
  SITE (8164): n equals a,t,g, or c
  SITE (8165): n equals a,t,g, or c
  SITE (8166): n equals a,t,g, or c
  SITE (8167): n equals a,t,g, or c
  SITE (8168): n equals a,t,g, or c
  SITE (8169): n equals a,t,g, or c
  SITE (8170): n equals a,t,g, or c
  SITE (8171): n equals a,t,g, or c
  SITE (8172): n equals a,t,g, or c
  SITE (8173): n equals a,t,g, or c
  SITE (8174): n equals a,t,g, or c
  SITE (8175): n equals a,t,g, or c
  SITE (8176): n equals a,t,g, or c
  SITE (8177): n equals a,t,g, or c
  SITE (8178): n equals a,t,g, or c
  SITE (8179): n equals a,t,g, or c
  SITE (8180): n equals a,t,g, or c
  SITE (8181): n equals a,t,g, or c
  SITE (8182): n equals a,t,g, or c
  SITE (8183): n equals a,t,g, or c
  SITE (8184): n equals a,t,g, or c
  SITE (8185): n equals a,t,g, or c
  SITE (8186): n equals a,t,g, or c
  SITE (8187): n equals a,t,g, or c
  SITE (8188): n equals a,t,g, or c
  SITE (8189): n equals a,t,g, or c
  SITE (8190): n equals a,t,g, or c
  SITE (8191): n equals a,t,g, or c
  SITE (8192): n equals a,t,g, or c
  SITE (8193): n equals a,t,g, or c
  SITE (8194): n equals a,t,g, or c
  SITE (8195): n equals a,t,g, or c
  SITE (8196): n equals a,t,g, or c
  SITE (8197): n equals a,t,g, or c
  SITE (8198): n equals a,t,g, or c
  SITE (8199): n equals a,t,g, or c
  SITE (8200): n equals a,t,g, or c
  SITE (8201): n equals a,t,g, or c
  SITE (8202): n equals a,t,g, or c
  SITE (8203): n equals a,t,g, or c
  SITE (8204): n equals a,t,g, or c
  SITE (8205): n equals a,t,g, or c
  SITE (8206): n equals a,t,g, or c
  SITE (8207): n equals a,t,g, or c
  SITE (8208): n equals a,t,g, or c
  SITE (8209): n equals a,t,g, or c
  SITE (8210): n equals a,t,g, or c
  SITE (8211): n equals a,t,g, or c
  SITE (8212): n equals a,t,g, or c
  SITE (8213): n equals a,t,g, or c
  SITE (8214): n equals a,t,g, or c
  SITE (8215): n equals a,t,g, or c
  SITE (8216): n equals a,t,g, or c
  SITE (8217): n equals a,t,g, or c
  SITE (8218): n equals a,t,g, or c
  SITE (8219): n equals a,t,g, or c
  SITE (8220): n equals a,t,g, or c
  SITE (8221): n equals a,t,g, or c
  SITE (8222): n equals a,t,g, or c
  SITE (8223): n equals a,t,g, or c
  SITE (8224): n equals a,t,g, or c
  SITE (8225): n equals a,t,g, or c
  SITE (8226): n equals a,t,g, or c
  SITE (8227): n equals a,t,g, or c
  SITE (8228): n equals a,t,g, or c
  SITE (8229): n equals a,t,g, or c
  SITE (8230): n equals a,t,g, or c
  SITE (8231): n equals a,t,g, or c
  SITE (8232): n equals a,t,g, or c
  SITE (8233): n equals a,t,g, or c
  SITE (8234): n equals a,t,g, or c
  SITE (8235): n equals a,t,g, or c
  SITE (8236): n equals a,t,g, or c
  SITE (8237): n equals a,t,g, or c
  SITE (8238): n equals a,t,g, or c
  SITE (8239): n equals a,t,g, or c
  SITE (8240): n equals a,t,g, or c
  SITE (8241): n equals a,t,g, or c
  SITE (8242): n equals a,t,g, or c
  SITE (8243): n equals a,t,g, or c
  SITE (8244): n equals a,t,g, or c
  SITE (8245): n equals a,t,g, or c
  SITE (8246): n equals a,t,g, or c
  SITE (8247): n equals a,t,g, or c
  SITE (8248): n equals a,t,g, or c
  SITE (8249): n equals a,t,g, or c
  SITE (8250): n equals a,t,g, or c
  SITE (8251): n equals a,t,g, or c
  SITE (8252): n equals a,t,g, or c
  SITE (8253): n equals a,t,g, or c
  SITE (8254): n equals a,t,g, or c
  SITE (8255): n equals a,t,g, or c
  SITE (8256): n equals a,t,g, or c
  SITE (8257): n equals a,t,g, or c
  SITE (8258): n equals a,t,g, or c
  SITE (8259): n equals a,t,g, or c
  SITE (8260): n equals a,t,g, or c
  SITE (8261): n equals a,t,g, or c
  SITE (8262): n equals a,t,g, or c
  SITE (8263): n equals a,t,g, or c
  SITE (8264): n equals a,t,g, or c
  SITE (8265): n equals a,t,g, or c
  SITE (8266): n equals a,t,g, or c
  SITE (8267): n equals a,t,g, or c
  SITE (8268): n equals a,t,g, or c
  SITE (8269): n equals a,t,g, or c
  SITE (8270): n equals a,t,g, or c
  SITE (8271): n equals a,t,g, or c
  SITE (8272): n equals a,t,g, or c
  SITE (8273): n equals a,t,g, or c
  SITE (8274): n equals a,t,g, or c
  SITE (8275): n equals a,t,g, or c
  SITE (8276): n equals a,t,g, or c
  SITE (8277): n equals a,t,g, or c
  SITE (8278): n equals a,t,g, or c
  SITE (8279): n equals a,t,g, or c
  SITE (8280): n equals a,t,g, or c
  SITE (8281): n equals a,t,g, or c
  SITE (8282): n equals a,t,g, or c
  SITE (8283): n equals a,t,g, or c
  SITE (8284): n equals a,t,g, or c
  SITE (8285): n equals a,t,g, or c
  SITE (8286): n equals a,t,g, or c
  SITE (8287): n equals a,t,g, or c
  SITE (8288): n equals a,t,g, or c
  SITE (8289): n equals a,t,g, or c
  SITE (8290): n equals a,t,g, or c
  SITE (8291): n equals a,t,g, or c
  SITE (8292): n equals a,t,g, or c
  SITE (8293): n equals a,t,g, or c
  SITE (8294): n equals a,t,g, or c
  SITE (8295): n equals a,t,g, or c
  SITE (8296): n equals a,t,g, or c
  SITE (8297): n equals a,t,g, or c
  SITE (8298): n equals a,t,g, or c
  SITE (8299): n equals a,t,g, or c
  SITE (8300): n equals a,t,g, or c
  SITE (8301): n equals a,t,g, or c
  SITE (8302): n equals a,t,g, or c
  SITE (8303): n equals a,t,g, or c
  SITE (8304): n equals a,t,g, or c
  SITE (8305): n equals a,t,g, or c
  SITE (8306): n equals a,t,g, or c
  SITE (8307): n equals a,t,g, or c
  SITE (8308): n equals a,t,g, or c
  SITE (8309): n equals a,t,g, or c
  SITE (8310): n equals a,t,g, or c
  SITE (8311): n equals a,t,g, or c
  SITE (8312): n equals a,t,g, or c
  SITE (8313): n equals a,t,g, or c
  SITE (8314): n equals a,t,g, or c
  SITE (8315): n equals a,t,g, or c
  SITE (8316): n equals a,t,g, or c
  SITE (8317): n equals a,t,g, or c
  SITE (8318): n equals a,t,g, or c
  SITE (8319): n equals a,t,g, or c
  SITE (8320): n equals a,t,g, or c
  SITE (8321): n equals a,t,g, or c
  SITE (8322): n equals a,t,g, or c
  SITE (8323): n equals a,t,g, or c
  SITE (8324): n equals a,t,g, or c
  SITE (8325): n equals a,t,g, or c
  SITE (8326): n equals a,t,g, or c
  SITE (8327): n equals a,t,g, or c
  SITE (8328): n equals a,t,g, or c
  SITE (8329): n equals a,t,g, or c
  SITE (8330): n equals a,t,g, or c
  SITE (8331): n equals a,t,g, or c
  SITE (8332): n equals a,t,g, or c
  SITE (8333): n equals a,t,g, or c
  SITE (8334): n equals a,t,g, or c
  SITE (8335): n equals a,t,g, or c
  SITE (8336): n equals a,t,g, or c
  SITE (8337): n equals a,t,g, or c
  SITE (8338): n equals a,t,g, or c
  SITE (8339): n equals a,t,g, or c
  SITE (8340): n equals a,t,g, or c
  SITE (8341): n equals a,t,g, or c
  SITE (8342): n equals a,t,g, or c
  SITE (8343): n equals a,t,g, or c
  SITE (8344): n equals a,t,g, or c
  SITE (8345): n equals a,t,g, or c
  SITE (8346): n equals a,t,g, or c
  SITE (8347): n equals a,t,g, or c
  SITE (8348): n equals a,t,g, or c
  SITE (8349): n equals a,t,g, or c
  SITE (8350): n equals a,t,g, or c
  SITE (8351): n equals a,t,g, or c
  SITE (8352): n equals a,t,g, or c
  SITE (8353): n equals a,t,g, or c
  SITE (8354): n equals a,t,g, or c
  SITE (8355): n equals a,t,g, or c
  SITE (8356): n equals a,t,g, or c
  SITE (8357): n equals a,t,g, or c
  SITE (8358): n equals a,t,g, or c
  SITE (8359): n equals a,t,g, or c
  SITE (8360): n equals a,t,g, or c
  SITE (8361): n equals a,t,g, or c
  SITE (8362): n equals a,t,g, or c
  SITE (8363): n equals a,t,g, or c
  SITE (8364): n equals a,t,g, or c
  SITE (8365): n equals a,t,g, or c
  SITE (8366): n equals a,t,g, or c
  SITE (8367): n equals a,t,g, or c
  SITE (8368): n equals a,t,g, or c
  SITE (8369): n equals a,t,g, or c
  SITE (8370): n equals a,t,g, or c
  SITE (8371): n equals a,t,g, or c
  SITE (8372): n equals a,t,g, or c
  SITE (8373): n equals a,t,g, or c
  SITE (8374): n equals a,t,g, or c
  SITE (8375): n equals a,t,g, or c
  SITE (8376): n equals a,t,g, or c
  SITE (8377): n equals a,t,g, or c
  SITE (8378): n equals a,t,g, or c
  SITE (8379): n equals a,t,g, or c
  SITE (8380): n equals a,t,g, or c
  SITE (8381): n equals a,t,g, or c
  SITE (8382): n equals a,t,g, or c
  SITE (8383): n equals a,t,g, or c
  SITE (8384): n equals a,t,g, or c
  SITE (8385): n equals a,t,g, or c
  SITE (8386): n equals a,t,g, or c
  SITE (8387): n equals a,t,g, or c
  SITE (8388): n equals a,t,g, or c
  SITE (8389): n equals a,t,g, or c
  SITE (8390): n equals a,t,g, or c
  SITE (8391): n equals a,t,g, or c
  SITE (8392): n equals a,t,g, or c
  SITE (8393): n equals a,t,g, or c
  SITE (8394): n equals a,t,g, or c
  SITE (8395): n equals a,t,g, or c
  SITE (8396): n equals a,t,g, or c
  SITE (8397): n equals a,t,g, or c
  SITE (8398): n equals a,t,g, or c
  SITE (8399): n equals a,t,g, or c
  SITE (8400): n equals a,t,g, or c
  SITE (8401): n equals a,t,g, or c
  SITE (8402): n equals a,t,g, or c
  SITE (8403): n equals a,t,g, or c
  SITE (8404): n equals a,t,g, or c
  SITE (8405): n equals a,t,g, or c
  SITE (8406): n equals a,t,g, or c
  SITE (8407): n equals a,t,g, or c
  SITE (8408): n equals a,t,g, or c
  SITE (8409): n equals a,t,g, or c
  SITE (8410): n equals a,t,g, or c
  SITE (8411): n equals a,t,g, or c
  SITE (8412): n equals a,t,g, or c
  SITE (8413): n equals a,t,g, or c
  SITE (8414): n equals a,t,g, or c
  SITE (8415): n equals a,t,g, or c
  SITE (8416): n equals a,t,g, or c
  SITE (8417): n equals a,t,g, or c
  SITE (8418): n equals a,t,g, or c
  SITE (8419): n equals a,t,g, or c
  SITE (8420): n equals a,t,g, or c
  SITE (8421): n equals a,t,g, or c
  SITE (8422): n equals a,t,g, or c
  SITE (8423): n equals a,t,g, or c
  SITE (8424): n equals a,t,g, or c
  SITE (8425): n equals a,t,g, or c
  SITE (8426): n equals a,t,g, or c
  SITE (8427): n equals a,t,g, or c
  SITE (8428): n equals a,t,g, or c
  SITE (8429): n equals a,t,g, or c
  SITE (8430): n equals a,t,g, or c
  SITE (8431): n equals a,t,g, or c
  SITE (8432): n equals a,t,g, or c
  SITE (8433): n equals a,t,g, or c
  SITE (8434): n equals a,t,g, or c
  SITE (8435): n equals a,t,g, or c
  SITE (8436): n equals a,t,g, or c
  SITE (8437): n equals a,t,g, or c
  SITE (8438): n equals a,t,g, or c
  SITE (8439): n equals a,t,g, or c
  SITE (8440): n equals a,t,g, or c
  SITE (8441): n equals a,t,g, or c
  SITE (8442): n equals a,t,g, or c
  SITE (8443): n equals a,t,g, or c
  SITE (8444): n equals a,t,g, or c
  SITE (8445): n equals a,t,g, or c
  SITE (8446): n equals a,t,g, or c
  SITE (8447): n equals a,t,g, or c
  SITE (8448): n equals a,t,g, or c
  SITE (8449): n equals a,t,g, or c
  SITE (8450): n equals a,t,g, or c
  SITE (8451): n equals a,t,g, or c
  SITE (8452): n equals a,t,g, or c
  SITE (8453): n equals a,t,g, or c
  SITE (8454): n equals a,t,g, or c
  SITE (8455): n equals a,t,g, or c
  SITE (8456): n equals a,t,g, or c
  SITE (8457): n equals a,t,g, or c
  SITE (8458): n equals a,t,g, or c
  SITE (8459): n equals a,t,g, or c
  SITE (8460): n equals a,t,g, or c
  SITE (8461): n equals a,t,g, or c
  SITE (8462): n equals a,t,g, or c
  SITE (8463): n equals a,t,g, or c
  SITE (8464): n equals a,t,g, or c
  SITE (8465): n equals a,t,g, or c
  SITE (8466): n equals a,t,g, or c
  SITE (8467): n equals a,t,g, or c
  SITE (8468): n equals a,t,g, or c
  SITE (8469): n equals a,t,g, or c
  SITE (8470): n equals a,t,g, or c
  SITE (8471): n equals a,t,g, or c
  SITE (8472): n equals a,t,g, or c
  SITE (8473): n equals a,t,g, or c
  SITE (8474): n equals a,t,g, or c
  SITE (8475): n equals a,t,g, or c
  SITE (8476): n equals a,t,g, or c
  SITE (8477): n equals a,t,g, or c
  SITE (8478): n equals a,t,g, or c
  SITE (8479): n equals a,t,g, or c
  SITE (8480): n equals a,t,g, or c
  SITE (8481): n equals a,t,g, or c
  SITE (8482): n equals a,t,g, or c
  SITE (8483): n equals a,t,g, or c
  SITE (8484): n equals a,t,g, or c
  SITE (8485): n equals a,t,g, or c
  SITE (8486): n equals a,t,g, or c
  SITE (8487): n equals a,t,g, or c
  SITE (8488): n equals a,t,g, or c
  SITE (8489): n equals a,t,g, or c
  SITE (8490): n equals a,t,g, or c
  SITE (8491): n equals a,t,g, or c
  SITE (8492): n equals a,t,g, or c
  SITE (8493): n equals a,t,g, or c
  SITE (8494): n equals a,t,g, or c
  SITE (8495): n equals a,t,g, or c
  SITE (8496): n equals a,t,g, or c
  SITE (8497): n equals a,t,g, or c
  SITE (8498): n equals a,t,g, or c
  SITE (8499): n equals a,t,g, or c
  SITE (8500): n equals a,t,g, or c
  SITE (8501): n equals a,t,g, or c
  SITE (8502): n equals a,t,g, or c
  SITE (8503): n equals a,t,g, or c
  SITE (8504): n equals a,t,g, or c
  SITE (8505): n equals a,t,g, or c
  SITE (8506): n equals a,t,g, or c
  SITE (8507): n equals a,t,g, or c
  SITE (8508): n equals a,t,g, or c
  SITE (8509): n equals a,t,g, or c
  SITE (8510): n equals a,t,g, or c
  SITE (8511): n equals a,t,g, or c
  SITE (8512): n equals a,t,g, or c
  SITE (8513): n equals a,t,g, or c
  SITE (8514): n equals a,t,g, or c
  SITE (8515): n equals a,t,g, or c
  SITE (8516): n equals a,t,g, or c
  SITE (8517): n equals a,t,g, or c
  SITE (8518): n equals a,t,g, or c
  SITE (8519): n equals a,t,g, or c
  SITE (8520): n equals a,t,g, or c
  SITE (8521): n equals a,t,g, or c
  SITE (8522): n equals a,t,g, or c
  SITE (8523): n equals a,t,g, or c
  SITE (8524): n equals a,t,g, or c
  SITE (8525): n equals a,t,g, or c
  SITE (8526): n equals a,t,g, or c
  SITE (8527): n equals a,t,g, or c
  SITE (8528): n equals a,t,g, or c
  SITE (8529): n equals a,t,g, or c
  SITE (8530): n equals a,t,g, or c
  SITE (8531): n equals a,t,g, or c
  SITE (8532): n equals a,t,g, or c
  SITE (8533): n equals a,t,g, or c
  SITE (8534): n equals a,t,g, or c
  SITE (8535): n equals a,t,g, or c
  SITE (8536): n equals a,t,g, or c
  SITE (8537): n equals a,t,g, or c
  SITE (8538): n equals a,t,g, or c
  SITE (8539): n equals a,t,g, or c
  SITE (8540): n equals a,t,g, or c
  SITE (8541): n equals a,t,g, or c
  SITE (8542): n equals a,t,g, or c
  SITE (8543): n equals a,t,g, or c
  SITE (8544): n equals a,t,g, or c
  SITE (8545): n equals a,t,g, or c
  SITE (8546): n equals a,t,g, or c
  SITE (8547): n equals a,t,g, or c
  SITE (8548): n equals a,t,g, or c
  SITE (8549): n equals a,t,g, or c
  SITE (8550): n equals a,t,g, or c
  SITE (8551): n equals a,t,g, or c
  SITE (8552): n equals a,t,g, or c
  SITE (8553): n equals a,t,g, or c
  SITE (8554): n equals a,t,g, or c
  SITE (8555): n equals a,t,g, or c
  SITE (8556): n equals a,t,g, or c
  SITE (8557): n equals a,t,g, or c
  SITE (8558): n equals a,t,g, or c
  SITE (8559): n equals a,t,g, or c
  SITE (8560): n equals a,t,g, or c
  SITE (8561): n equals a,t,g, or c
  SITE (8562): n equals a,t,g, or c
  SITE (8563): n equals a,t,g, or c
  SITE (8564): n equals a,t,g, or c
  SITE (8565): n equals a,t,g, or c
  SITE (8566): n equals a,t,g, or c
  SITE (8567): n equals a,t,g, or c
  SITE (8568): n equals a,t,g, or c
  SITE (8569): n equals a,t,g, or c
  SITE (8570): n equals a,t,g, or c
  SITE (8571): n equals a,t,g, or c
  SITE (8572): n equals a,t,g, or c
  SITE (8573): n equals a,t,g, or c
  SITE (8574): n equals a,t,g, or c
  SITE (8575): n equals a,t,g, or c
  SITE (8576): n equals a,t,g, or c
  SITE (8577): n equals a,t,g, or c
  SITE (8578): n equals a,t,g, or c
  SITE (8579): n equals a,t,g, or c
  SITE (8580): n equals a,t,g, or c
  SITE (8581): n equals a,t,g, or c
  SITE (8582): n equals a,t,g, or c
  SITE (8583): n equals a,t,g, or c
  SITE (8584): n equals a,t,g, or c
  SITE (8585): n equals a,t,g, or c
  SITE (8586): n equals a,t,g, or c
  SITE (8587): n equals a,t,g, or c
  SITE (8588): n equals a,t,g, or c
  SITE (8589): n equals a,t,g, or c
  SITE (8590): n equals a,t,g, or c
  SITE (8591): n equals a,t,g, or c
  SITE (8592): n equals a,t,g, or c
  SITE (8593): n equals a,t,g, or c
  SITE (8594): n equals a,t,g, or c
  SITE (8595): n equals a,t,g, or c
  SITE (8596): n equals a,t,g, or c
  SITE (8597): n equals a,t,g, or c
  SITE (8598): n equals a,t,g, or c
  SITE (8599): n equals a,t,g, or c
  SITE (8600): n equals a,t,g, or c
  SITE (8601): n equals a,t,g, or c
  SITE (8602): n equals a,t,g, or c
  SITE (8603): n equals a,t,g, or c
  SITE (8604): n equals a,t,g, or c
  SITE (8605): n equals a,t,g, or c
  SITE (8606): n equals a,t,g, or c
  SITE (8607): n equals a,t,g, or c
  SITE (8608): n equals a,t,g, or c
  SITE (8609): n equals a,t,g, or c
  SITE (8610): n equals a,t,g, or c
  SITE (8611): n equals a,t,g, or c
  SITE (8612): n equals a,t,g, or c
  SITE (8613): n equals a,t,g, or c
  SITE (8614): n equals a,t,g, or c
  SITE (8615): n equals a,t,g, or c
  SITE (8616): n equals a,t,g, or c
  SITE (8617): n equals a,t,g, or c
  SITE (8618): n equals a,t,g, or c
  SITE (8619): n equals a,t,g, or c
  SITE (8620): n equals a,t,g, or c
  SITE (8621): n equals a,t,g, or c
  SITE (8622): n equals a,t,g, or c
  SITE (8623): n equals a,t,g, or c
  SITE (8624): n equals a,t,g, or c
  SITE (8625): n equals a,t,g, or c
  SITE (8626): n equals a,t,g, or c
  SITE (8627): n equals a,t,g, or c
  SITE (8628): n equals a,t,g, or c
  SITE (8629): n equals a,t,g, or c
  SITE (8630): n equals a,t,g, or c
  SITE (8631): n equals a,t,g, or c
  SITE (8632): n equals a,t,g, or c
  SITE (8633): n equals a,t,g, or c
  SITE (8634): n equals a,t,g, or c
  SITE (8635): n equals a,t,g, or c
  SITE (8636): n equals a,t,g, or c
  SITE (8637): n equals a,t,g, or c
  SITE (8638): n equals a,t,g, or c
  SITE (8639): n equals a,t,g, or c
  SITE (8640): n equals a,t,g, or c
  SITE (8641): n equals a,t,g, or c
  SITE (8642): n equals a,t,g, or c
  SITE (8643): n equals a,t,g, or c
  SITE (8644): n equals a,t,g, or c
  SITE (8645): n equals a,t,g, or c
  SITE (8646): n equals a,t,g, or c
  SITE (8647): n equals a,t,g, or c
  SITE (8648): n equals a,t,g, or c
  SITE (8649): n equals a,t,g, or c
  SITE (8650): n equals a,t,g, or c
  SITE (8651): n equals a,t,g, or c
  SITE (8652): n equals a,t,g, or c
  SITE (8653): n equals a,t,g, or c
  SITE (8654): n equals a,t,g, or c
  SITE (8655): n equals a,t,g, or c
  SITE (8656): n equals a,t,g, or c
  SITE (8657): n equals a,t,g, or c
  SITE (8658): n equals a,t,g, or c
  SITE (8659): n equals a,t,g, or c
  SITE (8660): n equals a,t,g, or c
  SITE (8661): n equals a,t,g, or c
  SITE (8662): n equals a,t,g, or c
  SITE (8663): n equals a,t,g, or c
  SITE (8664): n equals a,t,g, or c
  SITE (8665): n equals a,t,g, or c
  SITE (8666): n equals a,t,g, or c
  SITE (8667): n equals a,t,g, or c
  SITE (8668): n equals a,t,g, or c
  SITE (8669): n equals a,t,g, or c
  SITE (8670): n equals a,t,g, or c
  SITE (8671): n equals a,t,g, or c
  SITE (8672): n equals a,t,g, or c
  SITE (8673): n equals a,t,g, or c
  SITE (8674): n equals a,t,g, or c
  SITE (8675): n equals a,t,g, or c
  SITE (8676): n equals a,t,g, or c
  SITE (8677): n equals a,t,g, or c
  SITE (8678): n equals a,t,g, or c
  SITE (8679): n equals a,t,g, or c
  SITE (8680): n equals a,t,g, or c
  SITE (8681): n equals a,t,g, or c
  SITE (8682): n equals a,t,g, or c
  SITE (8683): n equals a,t,g, or c
  SITE (8684): n equals a,t,g, or c
  SITE (8685): n equals a,t,g, or c
  SITE (8686): n equals a,t,g, or c
  SITE (8687): n equals a,t,g, or c
  SITE (8688): n equals a,t,g, or c
  SITE (8689): n equals a,t,g, or c
  SITE (8690): n equals a,t,g, or c
  SITE (8691): n equals a,t,g, or c
  SITE (8692): n equals a,t,g, or c
  SITE (8693): n equals a,t,g, or c
  SITE (8694): n equals a,t,g, or c
  SITE (8695): n equals a,t,g, or c
  SITE (8696): n equals a,t,g, or c
  SITE (8697): n equals a,t,g, or c
  SITE (8698): n equals a,t,g, or c
  SITE (8699): n equals a,t,g, or c
  SITE (8700): n equals a,t,g, or c
  SITE (8701): n equals a,t,g, or c
  SITE (8702): n equals a,t,g, or c
  SITE (8703): n equals a,t,g, or c
  SITE (8704): n equals a,t,g, or c
  SITE (8705): n equals a,t,g, or c
  SITE (8706): n equals a,t,g, or c
  SITE (8707): n equals a,t,g, or c
  SITE (8708): n equals a,t,g, or c
  SITE (8709): n equals a,t,g, or c
  SITE (8710): n equals a,t,g, or c
  SITE (8711): n equals a,t,g, or c
  SITE (8712): n equals a,t,g, or c
  SITE (8713): n equals a,t,g, or c
  SITE (8714): n equals a,t,g, or c
  SITE (8715): n equals a,t,g, or c
  SITE (8716): n equals a,t,g, or c
  SITE (8717): n equals a,t,g, or c
  SITE (8718): n equals a,t,g, or c
  SITE (8719): n equals a,t,g, or c
  SITE (8720): n equals a,t,g, or c
  SITE (8721): n equals a,t,g, or c
  SITE (8722): n equals a,t,g, or c
  SITE (8723): n equals a,t,g, or c
  SITE (8724): n equals a,t,g, or c
  SITE (8725): n equals a,t,g, or c
  SITE (8726): n equals a,t,g, or c
  SITE (8727): n equals a,t,g, or c
  SITE (8728): n equals a,t,g, or c
  SITE (8729): n equals a,t,g, or c
  SITE (8730): n equals a,t,g, or c
  SITE (8731): n equals a,t,g, or c
  SITE (8732): n equals a,t,g, or c
  SITE (8733): n equals a,t,g, or c
  SITE (8734): n equals a,t,g, or c
  SITE (8735): n equals a,t,g, or c
  SITE (8736): n equals a,t,g, or c
  SITE (8737): n equals a,t,g, or c
  SITE (8738): n equals a,t,g, or c
  SITE (8739): n equals a,t,g, or c
  SITE (8740): n equals a,t,g, or c
  SITE (8741): n equals a,t,g, or c
  SITE (8742): n equals a,t,g, or c
  SITE (8743): n equals a,t,g, or c
  SITE (8744): n equals a,t,g, or c
  SITE (8745): n equals a,t,g, or c
  SITE (8746): n equals a,t,g, or c
  SITE (8747): n equals a,t,g, or c
  SITE (8748): n equals a,t,g, or c
  SITE (8749): n equals a,t,g, or c
  SITE (8750): n equals a,t,g, or c
  SITE (8751): n equals a,t,g, or c
  SITE (8752): n equals a,t,g, or c
  SITE (8753): n equals a,t,g, or c
  SITE (8754): n equals a,t,g, or c
  SITE (8755): n equals a,t,g, or c
  SITE (8756): n equals a,t,g, or c
  SITE (8757): n equals a,t,g, or c
  SITE (8758): n equals a,t,g, or c
  SITE (8759): n equals a,t,g, or c
  SITE (8760): n equals a,t,g, or c
  SITE (8761): n equals a,t,g, or c
  SITE (8762): n equals a,t,g, or c
  SITE (8763): n equals a,t,g, or c
  SITE (8764): n equals a,t,g, or c
  SITE (8765): n equals a,t,g, or c
  SITE (8766): n equals a,t,g, or c
  SITE (8767): n equals a,t,g, or c
  SITE (8768): n equals a,t,g, or c
  SITE (8769): n equals a,t,g, or c
  SITE (8770): n equals a,t,g, or c
  SITE (8771): n equals a,t,g, or c
  SITE (8772): n equals a,t,g, or c
  SITE (8773): n equals a,t,g, or c
  SITE (8774): n equals a,t,g, or c
  SITE (8775): n equals a,t,g, or c
  SITE (8776): n equals a,t,g, or c
  SITE (8777): n equals a,t,g, or c
  SITE (8778): n equals a,t,g, or c
  SITE (8779): n equals a,t,g, or c
  SITE (8780): n equals a,t,g, or c
  SITE (8781): n equals a,t,g, or c
  SITE (8782): n equals a,t,g, or c
  SITE (8783): n equals a,t,g, or c
  SITE (8784): n equals a,t,g, or c
  SITE (8785): n equals a,t,g, or c
  SITE (8786): n equals a,t,g, or c
  SITE (8787): n equals a,t,g, or c
  SITE (8788): n equals a,t,g, or c
  SITE (8789): n equals a,t,g, or c
  SITE (8790): n equals a,t,g, or c
  SITE (8791): n equals a,t,g, or c
  SITE (8792): n equals a,t,g, or c
  SITE (8793): n equals a,t,g, or c
  SITE (8794): n equals a,t,g, or c
  SITE (8795): n equals a,t,g, or c
  SITE (8796): n equals a,t,g, or c
  SITE (8797): n equals a,t,g, or c
  SITE (8798): n equals a,t,g, or c
  SITE (8799): n equals a,t,g, or c
  SITE (8800): n equals a,t,g, or c
  SITE (8801): n equals a,t,g, or c
  SITE (8802): n equals a,t,g, or c
  SITE (8803): n equals a,t,g, or c
  SITE (8804): n equals a,t,g, or c
  SITE (8805): n equals a,t,g, or c
  SITE (8806): n equals a,t,g, or c
  SITE (8807): n equals a,t,g, or c
  SITE (8808): n equals a,t,g, or c
  SITE (8809): n equals a,t,g, or c
  SITE (8810): n equals a,t,g, or c
  SITE (8811): n equals a,t,g, or c
  SITE (8812): n equals a,t,g, or c
  SITE (8813): n equals a,t,g, or c
  SITE (8814): n equals a,t,g, or c
  SITE (8815): n equals a,t,g, or c
  SITE (8816): n equals a,t,g, or c
  SITE (8817): n equals a,t,g, or c
  SITE (8818): n equals a,t,g, or c
  SITE (8819): n equals a,t,g, or c
  SITE (8820): n equals a,t,g, or c
  SITE (8821): n equals a,t,g, or c
  SITE (8822): n equals a,t,g, or c
  SITE (8823): n equals a,t,g, or c
  SITE (8824): n equals a,t,g, or c
  SITE (8825): n equals a,t,g, or c
  SITE (8826): n equals a,t,g, or c
  SITE (8827): n equals a,t,g, or c
  SITE (8828): n equals a,t,g, or c
  SITE (8829): n equals a,t,g, or c
  SITE (8830): n equals a,t,g, or c
  SITE (8831): n equals a,t,g, or c
  SITE (8832): n equals a,t,g, or c
  SITE (8833): n equals a,t,g, or c
  SITE (8834): n equals a,t,g, or c
  SITE (8835): n equals a,t,g, or c
  SITE (8836): n equals a,t,g, or c
  SITE (8837): n equals a,t,g, or c
  SITE (8838): n equals a,t,g, or c
  SITE (8839): n equals a,t,g, or c
  SITE (8840): n equals a,t,g, or c
  SITE (8841): n equals a,t,g, or c
  SITE (8842): n equals a,t,g, or c
  SITE (8843): n equals a,t,g, or c
  SITE (8844): n equals a,t,g, or c
  SITE (8845): n equals a,t,g, or c
  SITE (8846): n equals a,t,g, or c
  SITE (8847): n equals a,t,g, or c
  SITE (8848): n equals a,t,g, or c
  SITE (8849): n equals a,t,g, or c
  SITE (8850): n equals a,t,g, or c
  SITE (8851): n equals a,t,g, or c
  SITE (8852): n equals a,t,g, or c
  SITE (8853): n equals a,t,g, or c
  SITE (8854): n equals a,t,g, or c
  SITE (8855): n equals a,t,g, or c
  SITE (8856): n equals a,t,g, or c
  SITE (8857): n equals a,t,g, or c
  SITE (8858): n equals a,t,g, or c
  SITE (8859): n equals a,t,g, or c
  SITE (8860): n equals a,t,g, or c
  SITE (8861): n equals a,t,g, or c
  SITE (8862): n equals a,t,g, or c
  SITE (8863): n equals a,t,g, or c
  SITE (8864): n equals a,t,g, or c
  SITE (8865): n equals a,t,g, or c
  SITE (8866): n equals a,t,g, or c
  SITE (8867): n equals a,t,g, or c
  SITE (8868): n equals a,t,g, or c
  SITE (8869): n equals a,t,g, or c
  SITE (8870): n equals a,t,g, or c
  SITE (8871): n equals a,t,g, or c
  SITE (8872): n equals a,t,g, or c
  SITE (8873): n equals a,t,g, or c
  SITE (8874): n equals a,t,g, or c
  SITE (8875): n equals a,t,g, or c
  SITE (8876): n equals a,t,g, or c
  SITE (8877): n equals a,t,g, or c
  SITE (8878): n equals a,t,g, or c
  SITE (8879): n equals a,t,g, or c
  SITE (8880): n equals a,t,g, or c
  SITE (8881): n equals a,t,g, or c
  SITE (8882): n equals a,t,g, or c
  SITE (8883): n equals a,t,g, or c
  SITE (8884): n equals a,t,g, or c
  SITE (8885): n equals a,t,g, or c
  SITE (8886): n equals a,t,g, or c
  SITE (8887): n equals a,t,g, or c
  SITE (8888): n equals a,t,g, or c
  SITE (8889): n equals a,t,g, or c
  SITE (8890): n equals a,t,g, or c
  SITE (8891): n equals a,t,g, or c
  SITE (8892): n equals a,t,g, or c
  SITE (8893): n equals a,t,g, or c
  SITE (8894): n equals a,t,g, or c
  SITE (8895): n equals a,t,g, or c
  SITE (8896): n equals a,t,g, or c
  SITE (8897): n equals a,t,g, or c
  SITE (8898): n equals a,t,g, or c
  SITE (8899): n equals a,t,g, or c
  SITE (8900): n equals a,t,g, or c
  SITE (8901): n equals a,t,g, or c
  SITE (8902): n equals a,t,g, or c
  SITE (8903): n equals a,t,g, or c
  SITE (8904): n equals a,t,g, or c
  SITE (8905): n equals a,t,g, or c
  SITE (8906): n equals a,t,g, or c
  SITE (8907): n equals a,t,g, or c
  SITE (8908): n equals a,t,g, or c
  SITE (8909): n equals a,t,g, or c
  SITE (8910): n equals a,t,g, or c
  SITE (8911): n equals a,t,g, or c
  SITE (8912): n equals a,t,g, or c
  SITE (8913): n equals a,t,g, or c
  SITE (8914): n equals a,t,g, or c
  SITE (8915): n equals a,t,g, or c
  SITE (8916): n equals a,t,g, or c
  SITE (8917): n equals a,t,g, or c
  SITE (8918): n equals a,t,g, or c
  SITE (8919): n equals a,t,g, or c
  SITE (8920): n equals a,t,g, or c
  SITE (8921): n equals a,t,g, or c
  SITE (8922): n equals a,t,g, or c
  SITE (8923): n equals a,t,g, or c
  SITE (8924): n equals a,t,g, or c
  SITE (8925): n equals a,t,g, or c
  SITE (8926): n equals a,t,g, or c
  SITE (8927): n equals a,t,g, or c
  SITE (8928): n equals a,t,g, or c
  SITE (8929): n equals a,t,g, or c
  SITE (8930): n equals a,t,g, or c
  SITE (8931): n equals a,t,g, or c
  SITE (8932): n equals a,t,g, or c
  SITE (8933): n equals a,t,g, or c
  SITE (8934): n equals a,t,g, or c
  SITE (8935): n equals a,t,g, or c
  SITE (8936): n equals a,t,g, or c
  SITE (8937): n equals a,t,g, or c
  SITE (8938): n equals a,t,g, or c
  SITE (8939): n equals a,t,g, or c
  SITE (8940): n equals a,t,g, or c
  SITE (8941): n equals a,t,g, or c
  SITE (8942): n equals a,t,g, or c
  SITE (8943): n equals a,t,g, or c
  SITE (8944): n equals a,t,g, or c
  SITE (8945): n equals a,t,g, or c
  SITE (8946): n equals a,t,g, or c
  SITE (8947): n equals a,t,g, or c
  SITE (8948): n equals a,t,g, or c
  SITE (8949): n equals a,t,g, or c
  SITE (8950): n equals a,t,g, or c
  SITE (8951): n equals a,t,g, or c
  SITE (8952): n equals a,t,g, or c
  SITE (8953): n equals a,t,g, or c
  SITE (8954): n equals a,t,g, or c
  SITE (8955): n equals a,t,g, or c
  SITE (8956): n equals a,t,g, or c
  SITE (8957): n equals a,t,g, or c
  SITE (8958): n equals a,t,g, or c
  SITE (8959): n equals a,t,g, or c
  SITE (8960): n equals a,t,g, or c
  SITE (8961): n equals a,t,g, or c
  SITE (8962): n equals a,t,g, or c
  SITE (8963): n equals a,t,g, or c
  SITE (8964): n equals a,t,g, or c
  SITE (8965): n equals a,t,g, or c
  SITE (8966): n equals a,t,g, or c
  SITE (8967): n equals a,t,g, or c
  SITE (8968): n equals a,t,g, or c
  SITE (8969): n equals a,t,g, or c
  SITE (8970): n equals a,t,g, or c
  SITE (8971): n equals a,t,g, or c
  SITE (8972): n equals a,t,g, or c
  SITE (8973): n equals a,t,g, or c
  SITE (8974): n equals a,t,g, or c
  SITE (8975): n equals a,t,g, or c
  SITE (8976): n equals a,t,g, or c
  SITE (8977): n equals a,t,g, or c
  SITE (8978): n equals a,t,g, or c
  SITE (8979): n equals a,t,g, or c
  SITE (8980): n equals a,t,g, or c
  SITE (8981): n equals a,t,g, or c
  SITE (8982): n equals a,t,g, or c
  SITE (8983): n equals a,t,g, or c
  SITE (8984): n equals a,t,g, or c
  SITE (8985): n equals a,t,g, or c
  SITE (8986): n equals a,t,g, or c
  SITE (8987): n equals a,t,g, or c
  SITE (8988): n equals a,t,g, or c
  SITE (8989): n equals a,t,g, or c
  SITE (8990): n equals a,t,g, or c
  SITE (8991): n equals a,t,g, or c
  SITE (8992): n equals a,t,g, or c
  SITE (8993): n equals a,t,g, or c
  SITE (8994): n equals a,t,g, or c
  SITE (8995): n equals a,t,g, or c
  SITE (8996): n equals a,t,g, or c
  SITE (8997): n equals a,t,g, or c
  SITE (8998): n equals a,t,g, or c
  SITE (8999): n equals a,t,g, or c
  SITE (9000): n equals a,t,g, or c
  SITE (9001): n equals a,t,g, or c
  SITE (9002): n equals a,t,g, or c
  SITE (9003): n equals a,t,g, or c
  SITE (9004): n equals a,t,g, or c
  SITE (9005): n equals a,t,g, or c
  SITE (9006): n equals a,t,g, or c
  SITE (9007): n equals a,t,g, or c
  SITE (9008): n equals a,t,g, or c
  SITE (9009): n equals a,t,g, or c
  SITE (9010): n equals a,t,g, or c
  SITE (9011): n equals a,t,g, or c
  SITE (9012): n equals a,t,g, or c
  SITE (9013): n equals a,t,g, or c
  SITE (9014): n equals a,t,g, or c
  SITE (9015): n equals a,t,g, or c
  SITE (9016): n equals a,t,g, or c
  SITE (9017): n equals a,t,g, or c
  SITE (9018): n equals a,t,g, or c
  SITE (9019): n equals a,t,g, or c
  SITE (9020): n equals a,t,g, or c
  SITE (9021): n equals a,t,g, or c
  SITE (9022): n equals a,t,g, or c
  SITE (9023): n equals a,t,g, or c
  SITE (9024): n equals a,t,g, or c
  SITE (9025): n equals a,t,g, or c
  SITE (9026): n equals a,t,g, or c
  SITE (9027): n equals a,t,g, or c
  SITE (9028): n equals a,t,g, or c
  SITE (9029): n equals a,t,g, or c
  SITE (9030): n equals a,t,g, or c
  SITE (9031): n equals a,t,g, or c
  SITE (9032): n equals a,t,g, or c
  SITE (9033): n equals a,t,g, or c
  SITE (9034): n equals a,t,g, or c
  SITE (9035): n equals a,t,g, or c
  SITE (9036): n equals a,t,g, or c
  SITE (9037): n equals a,t,g, or c
  SITE (9038): n equals a,t,g, or c
  SITE (9039): n equals a,t,g, or c
  SITE (9040): n equals a,t,g, or c
  SITE (9041): n equals a,t,g, or c
  SITE (9042): n equals a,t,g, or c
  SITE (9043): n equals a,t,g, or c
  SITE (9044): n equals a,t,g, or c
  SITE (9045): n equals a,t,g, or c
  SITE (9046): n equals a,t,g, or c
  SITE (9047): n equals a,t,g, or c
  SITE (9048): n equals a,t,g, or c
  SITE (9049): n equals a,t,g, or c
  SITE (9050): n equals a,t,g, or c
  SITE (9051): n equals a,t,g, or c
  SITE (9052): n equals a,t,g, or c
  SITE (9053): n equals a,t,g, or c
  SITE (9054): n equals a,t,g, or c
  SITE (9055): n equals a,t,g, or c
  SITE (9056): n equals a,t,g, or c
  SITE (9057): n equals a,t,g, or c
  SITE (9058): n equals a,t,g, or c
  SITE (9059): n equals a,t,g, or c
  SITE (9060): n equals a,t,g, or c
  SITE (9061): n equals a,t,g, or c
  SITE (9062): n equals a,t,g, or c
  SITE (9063): n equals a,t,g, or c
  SITE (9064): n equals a,t,g, or c
  SITE (9065): n equals a,t,g, or c
  SITE (9066): n equals a,t,g, or c
  SITE (9067): n equals a,t,g, or c
  SITE (9068): n equals a,t,g, or c
  SITE (9069): n equals a,t,g, or c
  SITE (9070): n equals a,t,g, or c
  SITE (9071): n equals a,t,g, or c
  SITE (9072): n equals a,t,g, or c
  SITE (9073): n equals a,t,g, or c
  SITE (9074): n equals a,t,g, or c
  SITE (9075): n equals a,t,g, or c
  SITE (9076): n equals a,t,g, or c
  SITE (9077): n equals a,t,g, or c
  SITE (9078): n equals a,t,g, or c
  SITE (9079): n equals a,t,g, or c
  SITE (9080): n equals a,t,g, or c
  SITE (9081): n equals a,t,g, or c
  SITE (9082): n equals a,t,g, or c
  SITE (9083): n equals a,t,g, or c
  SITE (9084): n equals a,t,g, or c
  SITE (9085): n equals a,t,g, or c
  SITE (9086): n equals a,t,g, or c
  SITE (9087): n equals a,t,g, or c
  SITE (9088): n equals a,t,g, or c
  SITE (9089): n equals a,t,g, or c
  SITE (9090): n equals a,t,g, or c
  SITE (9091): n equals a,t,g, or c
  SITE (9092): n equals a,t,g, or c
  SITE (9093): n equals a,t,g, or c
  SITE (9094): n equals a,t,g, or c
  SITE (9095): n equals a,t,g, or c
  SITE (9096): n equals a,t,g, or c
  SITE (9097): n equals a,t,g, or c
  SITE (9098): n equals a,t,g, or c
  SITE (9099): n equals a,t,g, or c
  SITE (9100): n equals a,t,g, or c
  SITE (9101): n equals a,t,g, or c
  SITE (9102): n equals a,t,g, or c
  SITE (9103): n equals a,t,g, or c
  SITE (9104): n equals a,t,g, or c
  SITE (9105): n equals a,t,g, or c
  SITE (9106): n equals a,t,g, or c
  SITE (9107): n equals a,t,g, or c
  SITE (9108): n equals a,t,g, or c
  SITE (9109): n equals a,t,g, or c
  SITE (9110): n equals a,t,g, or c
  SITE (9111): n equals a,t,g, or c
  SITE (9112): n equals a,t,g, or c
  SITE (9113): n equals a,t,g, or c
  SITE (9114): n equals a,t,g, or c
  SITE (9115): n equals a,t,g, or c
  SITE (9116): n equals a,t,g, or c
  SITE (9117): n equals a,t,g, or c
  SITE (9118): n equals a,t,g, or c
  SITE (9119): n equals a,t,g, or c
  SITE (9120): n equals a,t,g, or c
  SITE (9121): n equals a,t,g, or c
  SITE (9122): n equals a,t,g, or c
  SITE (9123): n equals a,t,g, or c
  SITE (9124): n equals a,t,g, or c
  SITE (9125): n equals a,t,g, or c
  SITE (9126): n equals a,t,g, or c
  SITE (9127): n equals a,t,g, or c
  SITE (9128): n equals a,t,g, or c
  SITE (9129): n equals a,t,g, or c
  SITE (9130): n equals a,t,g, or c
  SITE (9131): n equals a,t,g, or c
  SITE (9132): n equals a,t,g, or c
  SITE (9133): n equals a,t,g, or c
  SITE (9134): n equals a,t,g, or c
  SITE (9135): n equals a,t,g, or c
  SITE (9136): n equals a,t,g, or c
  SITE (9137): n equals a,t,g, or c
  SITE (9138): n equals a,t,g, or c
  SITE (9139): n equals a,t,g, or c
  SITE (9140): n equals a,t,g, or c
  SITE (9141): n equals a,t,g, or c
  SITE (9142): n equals a,t,g, or c
  SITE (9143): n equals a,t,g, or c
  SITE (9144): n equals a,t,g, or c
  SITE (9145): n equals a,t,g, or c
  SITE (9146): n equals a,t,g, or c
  SITE (9147): n equals a,t,g, or c
  SITE (9148): n equals a,t,g, or c
  SITE (9149): n equals a,t,g, or c
  SITE (9150): n equals a,t,g, or c
  SITE (9151): n equals a,t,g, or c
  SITE (9152): n equals a,t,g, or c
  SITE (9153): n equals a,t,g, or c
  SITE (9154): n equals a,t,g, or c
  SITE (9155): n equals a,t,g, or c
  SITE (9156): n equals a,t,g, or c
  SITE (9157): n equals a,t,g, or c
  SITE (9158): n equals a,t,g, or c
  SITE (9159): n equals a,t,g, or c
  SITE (9160): n equals a,t,g, or c
  SITE (9161): n equals a,t,g, or c
  SITE (9162): n equals a,t,g, or c
  SITE (9163): n equals a,t,g, or c
  SITE (9164): n equals a,t,g, or c
  SITE (9165): n equals a,t,g, or c
  SITE (9166): n equals a,t,g, or c
  SITE (9167): n equals a,t,g, or c
  SITE (9168): n equals a,t,g, or c
  SITE (9169): n equals a,t,g, or c
  SITE (9170): n equals a,t,g, or c
  SITE (9171): n equals a,t,g, or c
  SITE (9172): n equals a,t,g, or c
  SITE (9173): n equals a,t,g, or c
  SITE (9174): n equals a,t,g, or c
  SITE (9175): n equals a,t,g, or c
  SITE (9176): n equals a,t,g, or c
  SITE (9177): n equals a,t,g, or c
  SITE (9178): n equals a,t,g, or c
  SITE (9179): n equals a,t,g, or c
  SITE (9180): n equals a,t,g, or c
  SITE (9181): n equals a,t,g, or c
  SITE (9182): n equals a,t,g, or c
  SITE (9183): n equals a,t,g, or c
  SITE (9184): n equals a,t,g, or c
  SITE (9185): n equals a,t,g, or c
  SITE (9186): n equals a,t,g, or c
  SITE (9187): n equals a,t,g, or c
  SITE (9188): n equals a,t,g, or c
  SITE (9189): n equals a,t,g, or c
  SITE (9190): n equals a,t,g, or c
  SITE (9191): n equals a,t,g, or c
  SITE (9192): n equals a,t,g, or c
  SITE (9193): n equals a,t,g, or c
  SITE (9194): n equals a,t,g, or c
  SITE (9195): n equals a,t,g, or c
  SITE (9196): n equals a,t,g, or c
  SITE (9197): n equals a,t,g, or c
  SITE (9198): n equals a,t,g, or c
  SITE (9199): n equals a,t,g, or c
  SITE (9200): n equals a,t,g, or c
  SITE (9201): n equals a,t,g, or c
  SITE (9202): n equals a,t,g, or c
  SITE (9203): n equals a,t,g, or c
  SITE (9204): n equals a,t,g, or c
  SITE (9205): n equals a,t,g, or c
  SITE (9206): n equals a,t,g, or c
  SITE (9207): n equals a,t,g, or c
  SITE (9208): n equals a,t,g, or c
  SITE (9209): n equals a,t,g, or c
  SITE (9210): n equals a,t,g, or c
  SITE (9211): n equals a,t,g, or c
  SITE (9212): n equals a,t,g, or c
  SITE (9213): n equals a,t,g, or c
  SITE (9214): n equals a,t,g, or c
  SITE (9215): n equals a,t,g, or c
  SITE (9216): n equals a,t,g, or c
  SITE (9217): n equals a,t,g, or c
  SITE (9218): n equals a,t,g, or c
  SITE (9219): n equals a,t,g, or c
  SITE (9220): n equals a,t,g, or c
  SITE (9221): n equals a,t,g, or c
  SITE (9222): n equals a,t,g, or c
  SITE (9223): n equals a,t,g, or c
  SITE (9224): n equals a,t,g, or c
  SITE (9225): n equals a,t,g, or c
  SITE (9226): n equals a,t,g, or c
  SITE (9227): n equals a,t,g, or c
  SITE (9228): n equals a,t,g, or c
  SITE (9229): n equals a,t,g, or c
  SITE (9230): n equals a,t,g, or c
  SITE (9231): n equals a,t,g, or c
  SITE (9232): n equals a,t,g, or c
  SITE (9233): n equals a,t,g, or c
  SITE (9234): n equals a,t,g, or c
  SITE (9235): n equals a,t,g, or c
  SITE (9236): n equals a,t,g, or c
  SITE (9237): n equals a,t,g, or c
  SITE (9238): n equals a,t,g, or c
  SITE (9239): n equals a,t,g, or c
  SITE (9240): n equals a,t,g, or c
  SITE (9241): n equals a,t,g, or c
  SITE (9242): n equals a,t,g, or c
  SITE (9243): n equals a,t,g, or c
  SITE (9244): n equals a,t,g, or c
  SITE (9245): n equals a,t,g, or c
  SITE (9246): n equals a,t,g, or c
  SITE (9247): n equals a,t,g, or c
  SITE (9248): n equals a,t,g, or c
  SITE (9249): n equals a,t,g, or c
  SITE (9250): n equals a,t,g, or c
  SITE (9251): n equals a,t,g, or c
  SITE (9252): n equals a,t,g, or c
  SITE (9253): n equals a,t,g, or c
  SITE (9254): n equals a,t,g, or c
  SITE (9255): n equals a,t,g, or c
  SITE (9256): n equals a,t,g, or c
  SITE (9257): n equals a,t,g, or c
  SITE (9258): n equals a,t,g, or c
  SITE (9259): n equals a,t,g, or c
  SITE (9260): n equals a,t,g, or c
  SITE (9261): n equals a,t,g, or c
  SITE (9262): n equals a,t,g, or c
  SITE (9263): n equals a,t,g, or c
  SITE (9264): n equals a,t,g, or c
  SITE (9265): n equals a,t,g, or c
  SITE (9266): n equals a,t,g, or c
  SITE (9267): n equals a,t,g, or c
  SITE (9268): n equals a,t,g, or c
  SITE (9269): n equals a,t,g, or c
  SITE (9270): n equals a,t,g, or c
  SITE (9271): n equals a,t,g, or c
  SITE (9272): n equals a,t,g, or c
  SITE (9273): n equals a,t,g, or c
  SITE (9274): n equals a,t,g, or c
  SITE (9275): n equals a,t,g, or c
  SITE (9276): n equals a,t,g, or c
  SITE (9277): n equals a,t,g, or c
  SITE (9278): n equals a,t,g, or c
  SITE (9279): n equals a,t,g, or c
  SITE (9280): n equals a,t,g, or c
  SITE (9281): n equals a,t,g, or c
  SITE (9282): n equals a,t,g, or c
  SITE (9283): n equals a,t,g, or c
  SITE (9284): n equals a,t,g, or c
  SITE (9285): n equals a,t,g, or c
  SITE (9286): n equals a,t,g, or c
  SITE (9287): n equals a,t,g, or c
  SITE (9288): n equals a,t,g, or c
  SITE (9289): n equals a,t,g, or c
  SITE (9290): n equals a,t,g, or c
  SITE (9291): n equals a,t,g, or c
  SITE (9292): n equals a,t,g, or c
  SITE (9293): n equals a,t,g, or c
  SITE (9294): n equals a,t,g, or c
  SITE (9295): n equals a,t,g, or c
  SITE (9296): n equals a,t,g, or c
  SITE (9297): n equals a,t,g, or c
  SITE (9298): n equals a,t,g, or c
  SITE (9299): n equals a,t,g, or c
  SITE (9300): n equals a,t,g, or c
  SITE (9301): n equals a,t,g, or c
  SITE (9302): n equals a,t,g, or c
  SITE (9303): n equals a,t,g, or c
  SITE (9304): n equals a,t,g, or c
  SITE (9305): n equals a,t,g, or c
  SITE (9306): n equals a,t,g, or c
  SITE (9307): n equals a,t,g, or c
  SITE (9308): n equals a,t,g, or c
  SITE (9309): n equals a,t,g, or c
  SITE (9310): n equals a,t,g, or c
  SITE (9311): n equals a,t,g, or c
  SITE (9312): n equals a,t,g, or c
  SITE (9313): n equals a,t,g, or c
  SITE (9314): n equals a,t,g, or c
  SITE (9315): n equals a,t,g, or c
  SITE (9316): n equals a,t,g, or c
  SITE (9317): n equals a,t,g, or c
  SITE (9318): n equals a,t,g, or c
  SITE (9319): n equals a,t,g, or c
  SITE (9320): n equals a,t,g, or c
  SITE (9321): n equals a,t,g, or c
  SITE (9322): n equals a,t,g, or c
  SITE (9323): n equals a,t,g, or c
  SITE (9324): n equals a,t,g, or c
  SITE (9325): n equals a,t,g, or c
  SITE (9326): n equals a,t,g, or c
  SITE (9327): n equals a,t,g, or c
  SITE (9328): n equals a,t,g, or c
  SITE (9329): n equals a,t,g, or c
  SITE (9330): n equals a,t,g, or c
  SITE (9331): n equals a,t,g, or c
  SITE (9332): n equals a,t,g, or c
  SITE (9333): n equals a,t,g, or c
  SITE (9334): n equals a,t,g, or c
  SITE (9335): n equals a,t,g, or c
  SITE (9336): n equals a,t,g, or c
  SITE (9337): n equals a,t,g, or c
  SITE (9338): n equals a,t,g, or c
  SITE (9339): n equals a,t,g, or c
  SITE (9340): n equals a,t,g, or c
  SITE (9341): n equals a,t,g, or c
  SITE (9342): n equals a,t,g, or c
  SITE (9343): n equals a,t,g, or c
  SITE (9344): n equals a,t,g, or c
  SITE (9345): n equals a,t,g, or c
  SITE (9346): n equals a,t,g, or c
  SITE (9347): n equals a,t,g, or c
  SITE (9348): n equals a,t,g, or c
  SITE (9349): n equals a,t,g, or c
  SITE (9350): n equals a,t,g, or c
  SITE (9351): n equals a,t,g, or c
  SITE (9352): n equals a,t,g, or c
  SITE (9353): n equals a,t,g, or c
  SITE (9354): n equals a,t,g, or c
  SITE (9355): n equals a,t,g, or c
  SITE (9356): n equals a,t,g, or c
  SITE (9357): n equals a,t,g, or c
  SITE (9358): n equals a,t,g, or c
  SITE (9359): n equals a,t,g, or c
  SITE (9360): n equals a,t,g, or c
  SITE (9361): n equals a,t,g, or c
  SITE (9362): n equals a,t,g, or c
  SITE (9363): n equals a,t,g, or c
  SITE (9364): n equals a,t,g, or c
  SITE (9365): n equals a,t,g, or c
  SITE (9366): n equals a,t,g, or c
  SITE (9367): n equals a,t,g, or c
  SITE (9368): n equals a,t,g, or c
  SITE (9369): n equals a,t,g, or c
  SITE (9370): n equals a,t,g, or c
  SITE (9371): n equals a,t,g, or c
  SITE (9372): n equals a,t,g, or c
  SITE (9373): n equals a,t,g, or c
  SITE (9374): n equals a,t,g, or c
  SITE (9375): n equals a,t,g, or c
  SITE (9376): n equals a,t,g, or c
  SITE (9377): n equals a,t,g, or c
  SITE (9378): n equals a,t,g, or c
  SITE (9379): n equals a,t,g, or c
  SITE (9380): n equals a,t,g, or c
  SITE (9381): n equals a,t,g, or c
  SITE (9382): n equals a,t,g, or c
  SITE (9383): n equals a,t,g, or c
  SITE (9384): n equals a,t,g, or c
  SITE (9385): n equals a,t,g, or c
  SITE (9386): n equals a,t,g, or c
  SITE (9387): n equals a,t,g, or c
  SITE (9388): n equals a,t,g, or c
  SITE (9389): n equals a,t,g, or c
  SITE (9390): n equals a,t,g, or c
  SITE (9391): n equals a,t,g, or c
  SITE (9392): n equals a,t,g, or c
  SITE (9393): n equals a,t,g, or c
  SITE (9394): n equals a,t,g, or c
  SITE (9395): n equals a,t,g, or c
  SITE (9396): n equals a,t,g, or c
  SITE (9397): n equals a,t,g, or c
  SITE (9398): n equals a,t,g, or c
  SITE (9399): n equals a,t,g, or c
  SITE (9400): n equals a,t,g, or c
  SITE (9401): n equals a,t,g, or c
  SITE (9402): n equals a,t,g, or c
  SITE (9403): n equals a,t,g, or c
  SITE (9404): n equals a,t,g, or c
  SITE (9405): n equals a,t,g, or c
  SITE (9406): n equals a,t,g, or c
  SITE (9407): n equals a,t,g, or c
  SITE (9408): n equals a,t,g, or c
  SITE (9409): n equals a,t,g, or c
  SITE (9410): n equals a,t,g, or c
  SITE (9411): n equals a,t,g, or c
  SITE (9412): n equals a,t,g, or c
  SITE (9413): n equals a,t,g, or c
  SITE (9414): n equals a,t,g, or c
  SITE (9415): n equals a,t,g, or c
  SITE (9416): n equals a,t,g, or c

SEQ ID NO: 8697 - DNA, 1524 bp, Homo sapiens
gcaaaattgccttcaaaggctaagtctcttgtattctgcccttactgagagtctgtactctcctaaggttaattggcttatcatattctgcttttgtgctccctagtttaccatgatgcttggggtttttgcccctacgcttttcactttgtcttcctgtaatttattacaaccaacccttgtgtttttttttttttaacagttttggatctgcattaattttttagtccccagaggaacactatgttcccaaacattatgttctgcactctcatgctcatatcactttgtgtagtgccagacacctcctgggatctcaagaaatgttgtttctttttaaaagatgggtgattactctaggaggctcataaaagatctttctcagttgagttactttcactgtttatgtatcccaagtggcttaggtcaaaatattggttaatagaaagactccaagtctttggagaagctttactagtgtctcctcatctctgtaaaagcaaagatgagtattgaatggtcttacaggagtgttggagagaaatgatgaaaagcattagaaatgagaaggcctttgttgaaaatatgaaatgccagagtgaagacagtatcattattcccaagcaggcctcagtgtaagcggagctctctccaccaattgaagctgttcatcactacaaagaatggctgtcctgcaggatcctttctgctgctggctcctactgcagagaatagaaacttctttctaaatactgtatccaaaatgtttcctcttctctcaacttctcagctctatccaggacacttcactgctttcctccaaggcaaacttgaaccttcctctaaattccttccctgaaggctgttttgaggcagagggataggaccatggacagaggcttagcctaccaatcactcacacagcaggaaagtcaattctcttcctaccaggaatccctgggagagggtgtttacatgaatagactcttctttaactataggtcacttttcccttctctaacttcctttggagtgatgctgtgtcttctagaaacactgactccttccagcaactctctgctccttagacatataagaaatactcattcttgcaaatgcagttcttaaaatatttcaaaacatcttcattataaaatatttcaggcaaacagaaaactatgaaaaatagtttaacaaacatctatgtgtaaaacagctaccttagctgggcgcagtggctcacgcctgtaatcccagcactttgggaggccgaggagggtggatcacctgaggttgggagttcgagaccagcctgaccaacatggagaaaccccatctctactaaaaatacaaaattagccgggcatgatggtgcatgcctgtaatcccagctactcctgaggctgaggcaggagaattgctggaacccgggaggcggaggttgcggtgagccgagatcgcaccattgtactccagcctgggcaacaagagcaaaactccgtctcaaaaaaaaaaaacaaaaaa

SEQ ID NO: 8698 - DNA, 1524 bp, Homo sapiens; identical to SEQ ID NO: 8697

SEQ ID NO: 8699 - DNA, 102 bp, Homo sapiens; identical to SEQ ID NO: 6279

SEQ ID NO: 8700 - DNA, 5775 bp, Homo sapiens; identical to SEQ ID NO: 7562

SEQ ID NO: 8701 - DNA, 738 bp, Homo sapiens; identical to SEQ ID NO: 7563

SEQ ID NO: 8702 - DNA, 156 bp, Homo sapiens
ctgcctcagcctcccgagtagctgggattacaggcatgcagcaccacgcccggctaattttgtatttttagtagagacggggtttctccatgttggtcaggctggtctcaaactccctacctcaggtgatccgcctgcctcgacctcccaaagtgt

SEQ ID NO: 8703 - DNA, 217 bp, Homo sapiens
  SITE (198): n equals a,t,g, or c
ttttttttttttttttttgggtggagcttcgctcttgttgcccaggctggagtgcaatggcgcgatcccggctcactgcaacctctacctcccgggttcaagcagttctcctgcctcagcctcccgagtagctgggattacaggcatgcaccaccatgcccggctaattttgtatttttagtagagacggggtttctnccatgttggtcaggctggt

SEQ ID NO: 8704 - DNA, 3104 bp, Homo sapiens
ggcgtaatggtgtgatatatgcttaccacaacctctggctcccggttcaagcgattctcctgtctcagcctcccaagtatctgggattacaggcatgcaccaccatgcctggctaattttgtatttttagtagagacggggtttcttcatgttggtcaggctggtatcaaactcccgacctcaggtgatccgcctgccttggcctccaaagtgttgggattataggcgtgagccactgcgcccgctatccacatccttctagagtcagaatggtagggtccgttgacttcagcttttgattttgcaggatggccctgtgtcctcctctgccccattccctggttcattaaccagtttgaagtgtatgtagattgttgccccgtctttcccagttcacatgtgtgagatgcctgggtgctgcttcagaaatcaagatgatctcctttaatttgcatgaaactacaccatgctgcgttccccaggcagacagttctgctttgacacaccaaagaatcctgtaggctagcagagccgccagcacaaaccaagggcgctgggtgtcgagactcagaggggtcagctgtgtccctcggcatcagcgtctaccaaggtgctgctaggtacagagccagccagtgttgggcagcaggctcacagcctcaatagggagaaaagacaaaggcctcaaaatgacaggcagcctgacagaggaaggagtctgacacctcagcttgaggcgtctttggaattcctagctcatctcagaattatatcttagagtgataatatgggtggtagccagtggccaaacagcaagaactaagagtggcccttgcaaaaaaaggttgggaaagctgggcccatattgcctgtaaacccttgagcctgatgctcatacagctgtcccttgttttagccaggtcttgacagaagggttaccagcactgtcactgctctacagaatgctctccccgtgcctctctgttgatttataacagttgggtaaccagatagcaatatagtggcaattgagtagccatatagtaatacaggggcagttggttaaacatatagcaatatcacataatgatatgtttaatttaacctcagttttttaaaccagaatgcttctaccataaaagaattgtgatttcagttgtacttccatcaaggaatatgtgggaagatacacatattgtcaaaatggttgggatgggatagttacaaaggacacttttgtatgttgtatgggatcacttgcctgatagtataaggaacattgtatgaaaagatgaaaagatacttcatttttagaaactgatcagagatgtcactggtctttaagtgatgtcttgaaaatccagtatgtatttgcccaaaagttttagcctacatctagctagcttacacttagcagccaaaccatcattgtgtaggttctgttttggaggaagctcatgggggatctgtgtatttcttaggtttctccctgttctccaatgttttatccatttcgtagcttttttactgtctccagaaagtagtgtgggacctgcacttaggggaataccagaatcatagcgtggttctgccttcttgatgagtgattgtgaaaaacacctgcataagggtgctaattggttgtgtattttttcatttatttgaaatcaaactgagaacacctcttttcggtttacagcataacatggcttgaagtaaaaggcagtatccaagtccttcacctggtcttgccctgtctactttctgatcattctgatggtctgatgtggctgttgatgtggaactgcagaagagttcagagaagagtatgcaacaaagccataggaaaacacacaggagcttttccctccccttcaggtccccgccctctttccaagctggacaattttttattaagttgtttattccctgccttaaaactgaaacaggaaattttctggtagaaggagggtcatttagtcacgaacactgaagtgggtcaaaattctattctgggtcaaatccttgaattcaaacagatgtccataatcagtactgatggaatagagcaagtttttctatgtaagacaaataaatcaaacatcatgtgcatctcctcataagggtctgcaagggtctgatggtttaaagttcctaacagatctggttgcagcatctgccggagcttgcaccccatcatcggacggtcatcttcctgctgcagaagttaggtaacataagacttagatttcttcctgttctagcaatctgcaagaccaccaggcttaactttttagctgccagaagacaaacccccttttctgtttcggcaatttgtcctggcacgtgttttggacttcctccgatttacacgaaaagctctgatattcattggagtactttattttttttcctcagttttgtttcttttctcatgtaaaaacaaacaaaaaggtcaacaaaaaaaaattgaggtttttcttgtttctatctagttcatgctttctttgcggtgtttgaacagtagtctgttaacttagtaggtggtacctggaaaggtattttaagtatagtgactgtttaataaatacttaattggatgatggaggaggagaaattgttttcttcccaggattctctttgggggtcattttgtgtgacagatatattttagacatttggagaaacagtttcagatcctgccaggatatttttgtaaaaaaggaaaatggaagattccaataaactagaaacagtacgtatctaagatgctgacacagaagctaatgtgacttttcagcttatcaagaggatggccaataaaacttaaaggtgtggttagatgttttctcacttttgtgacattaatttatcactgagtctcattcaaccaagtaatctaaaatactgtgcaaattctagcagtatgtcttcgataacttggatgttaggatagccaatatgtacaaaaaattaaatcaagtattttgtcctatgtataacacaaattaattttacacagagaaagatgtttctaggcaagtgaaattctggtaattcatactatttctttgtatgaacaaataaaatatattttgccaaca

SEQ ID NO: 8705 - DNA, 226 bp, Homo sapiens
ttttttcctgagatggagttttgctcttgtcgcccaggctggagtgcaatggcgcaatctcggctcaccgcaacctccgcctcctgggttcaagcgattctcctgcctcagcctcccgagtagctgggattacaggcatgcaccaccatgcctggctaattttgtatttttagtagagacggggtttctccatgttggtcaggctggtcttgaactccgacctctg

SEQ ID NO: 8706 - DNA, 119 bp, Homo sapiens
ctgcctcagcctcttaagtagctgggattacaggcatgtgccaccatgcctggctaattttgtatttttagtagagatggggtttctccatgttggtcaggctggtctcaaactcttga

SEQ ID NO: 8707 - DNA, 707 bp, Homo sapiens
tttgcttgcgtttctcagggacctgatgcccagaaccctggacgggcagatcaccatggagaagacgcccagttacttcgtcacgcgggaggcccctgcgcgcatctcggccatgtccaaggacaccaagctcatcgtggtggtgcgggacccggtgaccagggccatctcggactacacgcagacgctgtccaagcggcccgacatccccaccttcgagagcttgacgttcaaaaacaggacagcgggcctcatcgacacgtcgtggagcgccatccagatcggcatctacgccaagcacctggagcactggctgcgccacttccccatccgccagatgctcttcgtgagcggcgagcggctcatcagcgacccggccggggagctgggccgcgtgcaagacttcctgggcctcaagaggatcatcacggacaagcacttctacttcaacaagaccaagggcttcccctgcctgaagaaggcggagggcagcagccggccccattgcctgggcaagaccaagggcaggacccatcctgagatcgaccgcgaggtggtgcgcaggctgcgcgagttctaccggcctttcaacctcaagttctaccagatgaccgggcacgactttggctgggattgagcagacccgggctatgtaccttacccacgtggcttatctattgacagagattatatgtatgtaaaatgta

SEQ ID NO: 8708 - DNA, 5142 bp, Homo sapiens
aaaggctgtggttttccaagcccaaccagggaggttgagatcgtctcacaagaagaggaggatgtaacccattcagtacaggagccttcagactgtgacgaagatgacactgtgacagacattgcccagcatggcctggagatggtggagccctgggaggaaccccagtgggtgacgagtccccttcactctcccaccctgaaagacgcgcacaaggcccaggtacagggccttcagggtcaccagttggagaagaggctttcccacaggcccagccttcgccagagccattctctagatagcaaacccacggttaaaagccagtggactctcgaggttccctcctccagcagctgtgctaatcttgaaacagagaggaattctgaccctcttcagccccaggcacccaggagagagattactggatgggatgagaaagccctgaggtccttcagagagttctctggcctgaaaggggcagaggctcctcccaaccagaagggaccaagtggtgtgcaacccaacccagcagaaaccagccccatcagcctagcagagggaaaggagctagggacacacctggggcacagcagtccacagattaggcaaggtggtgttcctgggccagagagcagcaaggagagttcacccagcgtgcaggacagcacttcgcctggagagcaccccgcaaagttacagctaaagagcacagagtgtgggcccccaaaagggaaaaacaggccttcttccctcaacttggaccctgccattcccattgctgacctcttctggtttgagaatgtggcctcatttagttcacctggaatgcaggtctctgagccaggagacccaaaggtcacatggatgacctcatcttactgtaaagcagacccctggagggtttactcccaggacccccaggacctggacattgttgctcatgcactgacaggccgccgtaactcagctcctgtgagtgtgtcagctgtgagaacctccttcatggtcaaaatgtgccaggccagggcggtcccagtcatccctcccaagattcagtacacccagatcccacagcccctgccctctcagagctcaggggagaatggggttcagcctctggagaggagccaggagggacccagctcaaccagtgggaccactcagaaacctgccaaagatgattctccctcctccctggaaagctcaaaggaagaaaaaccaaagcaagatcccggagccattaagtcctcaccagtggatgccactgcaccctgcatgtgcgagggacctaccctttctccagaaccaggctcgtctaacctgctctccacccaggatgcagtagtgcaatgcagaaagcgcatgtcagagacagagccatctggggacaaccttctttcttcaaaactagagcgaccatctgggggttctaagcctttccacaggtcaaggccaggaagacctcagagcctaatcttattcagtcctcctttccccattatggaccacctgcccccttcatccacagtgacagattccaaggtcctgctgtcccctatcagaagtcccacccagacagtttcccctggccttctttgtggagagttggcagaaaacacatgggtcacaccagaaggggttacacttaggaataaaatgaccatccctaagaatggccagagactagagacctcaaccagctgtttttaccagcctcagcggagatcagtaattctggatggaagaagtgggaggcaaatagaatgatttcggttcacctgctggtgtctgaaaaaaaccgtgattcatctggaagttattacagggccagcttgccatattccaggcacacgttatcaagtttgggcctattgtggcctctgacttctctttcttcagccttttgaccacttattaattagtccatttgctagaagagtggtcaagggaaaaacgagagatgaaatttagttaagtctatgtgagcaagtgagagaaggttaggtaaggggagaggatggaatgcttgcctccaatgaactttggagcttgtatgtgagtcagattgctcccctattgctattatctattactcttgagagctggctgtcctttgaaagaaagaagtaatgttctttgaaagaaagaaaaatctcttgctgtgtcaaacctcaaaatgttgctattggggttagaaggcctcctctttatgctttttaatgctctttcaaacgtgttcttttagaccagttttctaataagctttgtaaaatgtactatccaaattagaagcggatttggaaatgcaaactaacgtgcacttagatatccaagtgggtgagcttagccactcttacccatgctctttccctggaatccctggagacctgtccaagatgatttccatataccagcatagaaaatcagaatcaagagcaaactctgagactggcacaatccaagaagatttcctggctctggcttttagtaatttgggactccaactgccactgtactggactgtaatttataaatccagtagctacgcagggtggaggctgggctgaggattaccataatgaaatgtactaaatcttcatttaggtatgcaattgtgaagtgaaggcatctgctttctttacagtatcagagtccaagaacaggatgtcaccatagataaaagcctcatacaaaggcagaactacactccaaatttaatgtgtttaaattggtggggcaccagcagaaaatattctagctcagctttactcttcttccacactaggctgggccagcaatacaggagaggatgaagggaggagctccaggaggcgagggaagagccctagcagggcggccatcacaaccactcactgagagttgcccttcttaaaaatgtattttattttagccagtgggtcccttcctttctcctttcctctctactgctcaagaacagatttgaggccaggtgcggtgcctcacatctgtaatcccaacactttgggaggctgagatgggtggattgcttgagcccaggagttcaagaccagcctgggcaacacagcgagaccccatctcttaaaaaataacagacttgaggaacccctctcccttccataattcccctcatccaccgcccactccaggcactcactcaaacttgctcttcaactctgtatacaagcagaagcaataaaccaatctgattttcttttcaattatttataactttcaatggttctttcctttccagctggcgagagaaaggagaactaatatacctgctggcagatttttggtgctgcccaaaaaaggacttcacagggcatctcttctcaggttcaagcctggctgaattctgcccagaagctcagtcattgcagaaatttctctaagggctgatagtacctctgggtaggcgtcacaaccaaggctggttctgggcttagtgggggctgagatgaagttacctcctccaatgagaaattgggagctgatgccctgcaacagatatatattcctctctctctctgtctctctatctctctcctccctctccctccctccctccccgccaataagccttacaaacagttttgaaatcttgttctgtaccttttaagccagtgtctgtggcgagggtgactggcaagtcagctgatgagttctgccttctgagagcactgagtgagcaaggcctttcatcagtgttttggccttctcattgggtgaggaagacattgaaccaacagccaacgagatatgaacctgtaagaaaaaagtcctagaatatagtatttttccccaggccagcaaagtgaagaaatacagtggtgacagatgagaaaggccatgttcaagagatctgaaaagtacattcctgccttatcagaaaatgtgtcagacaggttttatgtcagcctcagtgctcctgcggtgtcgacgctctgataaggaccatgttccagttagaatgcgagggagggaaagagctgcactttgcttcaccatcagaactctgagccaaataatgaatatgtaaactattttatgattattttaaatgtttgtttggtaacatttataagatctatttttatttggggatagactgagaagccaccatttacatattaacaagtgacttcagttctaagggttgagatgcctgtgtggatttataaaatggttgcaagatcttttagactctgacatttatagcatcaccttcaggaacacagttctggggatgtcatcatgagacacactgacagctgtggagatagtccctactctcagctttccttgctagtcaagtccaaaaggccttagaagctgactcaccttctcagccagagtcctgctgctcaagtgtggacctccactttgactctcacccagcctgccagccatcacaaaggctttcataaacttcctgtggtctgggctagcctggcactgatgaaattccattctaaagaaagaaaactcatattcctcccccccacaaattgttcccccaaatgctctgggattacctatttcaccactcatttgagtctccgaaaaatgaactccctgagaatggctggatgggaatcagatagtctgcttccattcaggagagggacagaacaggagctgctgtgtttaggaggatttacctggtgccctagaaagggctatgcaatcaaattctcaagggctccttcaaatcagctatcagtcctcaaaatgggggttgctgatgttaaatgatggatttgcagtgaaacgcatgcatgtactgacgttttctttcagcattagtggttgcttaagaaaatagtaacctatattttctgctacacttggaatatgaagaaatctgaacaagaaccccattaagacacctaacctaatctaaaccctaaaattcaaaatattgtccaagtcaaaagtctagactctgaggacattaaaaatgtaaatatcatcatccttagcaaatatttattgggagcttagtaatagtgcactgggtaccttagcactcccaaatcattcaagagtctagtgaaaaagggggagggatggcagcaaataaaacacccccataaacaaccaggagcaaggttgagaaccattaagttgccaaac

SEQ ID NO: 8709 - DNA, 1123 bp, Homo sapiens
gagacactcgggtatttgagaactttgcttgatttagaaaactggaaagtggcaactaggctagaatagtggcaactaggttcggaggtttcgtgtggtcataattggtttggtgaagtgtgagatctctgcaaatgagccaggtaagatcagtattccatagtgcttgaaaaggggattttagagacttctgtcatcacaaagcagattaactcctagttaatgatgaagcagtaggcccaagataaactgttcaattcaagataaattgttcttgtcagtgtttggcatatgataatcacatttggctaaaattggatgggacagtcatttgtctacacaggccttccattcctgcatgaagagatactggggagcatacaattattttgtccagtattagagtgggagaagttctcagtaagtccagtcccaccaggatttatttgggccacattctaccacggccagtccaatctgatgaccacatgaattggggttaagtgttgctaagactatgattttagacatgtctggcaggaaggtcagctcaaaatgtggcatgacaaagaatatgtgctctactaccaaaacctttcctagcaaaacaaggccagaagagggagcaagcatctttccaagcatggagaggagggggcaatggtggaagggtgattgcctgaaatcagtgccagtacagatagcataaaattggggccaccacagattggctggctactgtgtagatcatttagtaatcttgaggtacattaataatgcagagattacttttctgtgagggtaagggggacgtagctaaatataagaagcttacaaggtccatagccatgtattttactggataaatcacaatgctttgcaataacttaatgtcatagtactttctggcttataattctgcaaagtaaagcactttttcaaaggagtctattggaaagccacatgatttcagctgtgttttaagctctacaaatacgtttccaaagacataatcaagatgtaattctattcattacaaatataaatattaaaactatccatagagacatttaagtaattaaaacagatttttatgctttaaaaataaatactctaataaatg

SEQ ID NO: 8710 - DNA, 27382 bp, Homo sapiens; identical to SEQ ID NO: 5964

SEQ ID NO: 8711 - DNA, 88 bp, Homo sapiens; identical to SEQ ID NO: 5965

SEQ ID NO: 8712 - DNA, 2208 bp, Homo sapiens
cagttgtatgcttcctgttcctcatagcttgccttggtggggatgtctttgttggagttgattctgagctgctgtgattaggagaccctgaaatacagtggtttaagcaagatggaagcttgtttctaattagtctagattgagatggcccagagctggtagggcagctctgcgtttcttcatacgcaccttccaattctgggtacacagcggctgctccagcgcccaccctcctgtgtgcatccaagcctgggggaagcagaaatagacaagagggcacacccactttttgctaaaggcatgagccagaattggcaggctcacctctgctggcctctcattggctgggactcagtcacatggccacaagcagctgctagggaacctgggaagtgtagtcttcagcggggccgccatgtgcctggcctcaccttgggagttatcttattgatggaggagaagagaatggatatgggggaccagtagcatctctgggagagggggagggagcagcaataactcagtcgtcggatccagctctcattgtcagagtttccggaacagcttgctcctgtttccctcactgtgcagcccagggctgggggcagtgaggagcttgcagctctgtgggaaggggaaacaccccctcccctcggcccctcagacgctacccaatgatgccggtttgcagagttggcctgtggaatggctcatgtttgtgcgtgtgtgtgtgtatatttatgggcatgggtgcatgcttggtgtgtatttgtacatgtctgtattgctgtgtccctgtaaatacatgcttgtgtatggatggaagaggccaggcccaggcctggcctcttcctcgggcctgtggccacacctcctgcagctccccaaaatgactgaggcagaaagcccttggggagcctagaaagcaaagctaaaggggatgcagggtctgtctgtctgtctgtctttcagtctgaggaatgagaatcctgacctgagggctgtgcagctgagagcccactacctccccagcccctctcggccccagccgcatcatcccacctgtcccctcccccccacctccagtggggctttctccagatgtcttatggttgggggtttcctgatgggccaggagaggagggcatcttcttgcgacagcactgtctgggttaagtgcccagtgagggcatggtgtggggagctggcctcagaggagccgctggtgggcaagcgtgaagtgggctgaggggctctgagccactttgctcccatctaggggactgccccccatggaactcctttgaagtcacagcagccttcctttctgtttgctcttggggctgagaggtggctcaaacactcggggtccctatggctctgggtcaatctaggccaggctgcaccccatggacagggagtctcagggctcctgatcatgcccaggccctggcctggggcctccctccttggcagctttcccacccccacgcccctggcatcctcagttgctatgggatgcccctccagggcaccagctcagggctaagcgaaggaagataggagcagctcagagctgccaggctctgccttcctcacagacctggtggggcaggtcctgttcacagcagcaggagtgaaggcctggccatcggtggagagggcagctgtcagagggctgggggccagggcacaggattgaagagtttcacatatcatcacagcatacactgggaatttggtgggggcagaagaacccagggccactccctcaatatgaagggaaaccaagctgaatgtgaccaccggcacactgctgccatgtcccatgtccacctttctccccgggaataactggccctgagacccctagacccaaggaggcctgtccatgccaagcatccgggaagcatggctggccttatccacccatgggtcacgtcggttcccaggggcagcatgggagatctttgggggcaacagggagagtctgggtggggagacgggacttgtccaagcagaaggcaggaccctgggaaatgcataatgtaaggacatcaataatagtattattttttttgtaagggaaaatcaatatgtacattctgaaatcattttctctgtaaatggttggatttcatttcacccttaaagggatgcttaaaggagaagataatattaataataaaaacagctacaaagtctgaa

SEQ ID NO: 8713 - DNA, 419 bp, Homo sapiens
ccagggctctgtaagtagatgcatttgggtccaggaggaagcgtggacacctcgtagggaagagatgaaaaagccacatcctaccaagaggaggtgctgagggatgctttgcagtgtagtcagaagtgctgggccagatggagacagaactccaccccctgccgcaaaggacaggacctggctgccctgggatgctggtgcctgagtctgtctctgtgcacccctcaggctgtcgtgagccaacacaggggcctggagaaccctgaggagctttccttttggttctaaacccggcgttgacgttccttctccctttcacattgctgtcttgtggactgtgcactcagtccttgcaaggccaagagtccagttgtaggtgtggccttgagggggaagtggggaggagaagactgacatga

SEQ ID NO: 8714 - DNA, 1905 bp, Homo sapiens
atggaaatatggttatgagaaatggaaaatgctagatggaaaacctcaaatacctttacaggttaaaaatatctttactaaattttcccatgaaaacattttgtgataaaatgacaagggactaaaatgaagatcattgatacaatagagttactttccttgttacaatgcaattgtcttataagtcattattcattttaaggaaaatcaaaaaaattagatcttactaaaaatgtagcatttgattttaagtagcaagatgcaattttgtgttccctttttctttgttacattaacataatatagtagatagagggtttattgtatagacatacacaaaaaaatagtattcttaggccaaattcacacatatctcctcactaagtagttcaattagataatttctggaaaaacatgtttttgacattaattgctatccaaaactatattttaaagcagtcttattggaggtgtccttaacatgatgtaactataaatttgatgcagaaaggttttacatgctgtggttaaatagctttagaagacatttttaagtcaccaccagcctttattcttagaaaacaatttattctaaatgatgatgcatatagaaaaccagtgtattcttttatttcttttaatactggtggcaaaataggacgtgtctggaaaaccataaggctacttgggatactgtcccattagcattgctgtttccatgacaaaccctattttcagatggtttgatttgcctattttttttttaaaccagctataaattggggtcaatttcccccctcacagtgtacttaatttagcttttggagtaaatatataagtagtatgaaagacttctgaagctcttctttctaaaaaagcagttttccacttaagctttgtggggacagagagtcatatttttaatttcagagccagccagtgtcaaacacgtgcaaaagagccgggccggattttttcagcttgtcctatggtagtcacttgtcagcctgagtttactggcctggtccttttgtctccactgtaagtactgaagccttctggtgtagttgtatcaccttaatgtccagcatttaactaggaaaggagactacaatgaagagttggtggccaattaagaaaaataatagactacatcataaatcatttcaggacttgagtggccgcagatcactgtccctgatagcatgtttcaaccttggtatacattttttttaagatgcatatttactgtgtgtgcttttgctttctaatccatctattgactattggccacaatttatataatgcacatgcaattaattgaaacctgtgtcatggcattggatatctctgattcatttcttattataatagtctgtgtaactggggcctgagagattagaagcaaaatgtagtcgtacgtatgtctagaggtggacgctggtgatattgtcattgaatactttgcagaatacactaatgtcaaaggcttgcaggattaatgtgtaggaaccaacataagacatggaatatatataagaattatctagttacatgactaaaaaggaattgcaatactatcttaaattgaaggcttttatttcaatgtccttacatttaaaatgggatcttacaagggaagtaccaaaaaagtaaagtttattttgatgactctcaagatatatatgtttgttttgaatgttggcagatgccaatagcccttaacatttgaaaaatggtacttgaacatcaattatgtctcagagttcccttaaactttttgggcttaaatatttttattcattttggtcatacctttgacaatggatatgttaaactttaacaattatagtgacaaaacagcttgcttagaacctggaaattaaaacacaatttctagagtaa

SEQ ID NO: 8715 - DNA, 2827 bp, Homo sapiens
tttatcggcacgtcctttctgctggccggctttgtgtcgctcttccgcatccgcaccatcatgaagcacgatggcaccaagaccgagaagctggagaagctcatggtgcgcattggcgtcttcagcgtgctgtacactgtgccagccaccatcgtcatcgcctgctacttctacgagcaggccttccgggaccagtgggaacgcagctgggtggcccagagctgcaagagctacgctatcccctgccctcacctccaggcgggcggaggcgccccgccgcacccgcccatgagcccggacttcacggtcttcatgattaagtaccttatgacgctgatcgtgggcatcacgtcgggcttctggatctggtccggcaagaccctcaactcctggaggaagttctacacgaggctcaccaacagcaaacaaggggagactacagtctgagacccggggctcagcccatgcccaggcctcggccggggcgcagcgatcccccaaagccagcgccgtggagttcgtgccaatcctgacatctcgaggtttcctcactagacaactctctttcgcaggctcctttgaacaactcagctcctgcaaaagcttccgtccctgaggcaaaaggacacgagggcccgactgccagagggaggatggacagacctcttgccctcacactctggtaccaggactgttcgcttttatgattgtaaatagcctgtgtaagatttttgtaagtatatttgtatttaaatgacgaccgatcacgcgtttttctttttcaaaagtttttaattatttagggcggtttaaccatttgaggcttttccttcttgcccttttcggagtattgcaaaggagctaaaactggtgtgcaaccgcacagcgctcctggtcgtcctcgcgcgcctctccctaccacgggtgctcgggacggctgggcgccagctccggggcgagttcagcactgcggggtgcgactagggctgcgctgccagggtcacttcccgcctcctccttttgccccctccccctccttctgtcccctccctttctttcctggcttgaggtaggggctcttaaggtacagaactccacaaaccttccaaatctggaggagggcccccatacattacaattcctcccttgctcggcggtggattgcgaaggcccgtcccttcgacttcctgaagctggatttttaactgtccagaactttcctccaacttcatgggggcccacgggtgtgggcgctggcagtctcagcctccctccacggtcaccttcaacgcccagacactcccttctcccaccttagttggttacagggtgagtgagataaccaatgccaaactttttgaagtctaatttttgaggggtgagctcatttcattctctagtgtctaaaacctggtatgggtttggccagcgtcatggaaagatgtggttactgagatttgggaagaagcatgaagctttgtgtgggttggaagagactgaagatatgggttataaaatgttaattctaattgcatacggatgcctggcaaccttgcctttgagaatgagacagcctgcgcttagattttaccggtctgtaaaatggaaatgttgaggtcacctggaaagctttgttaaggagttgatgtttgctttccttaacaagacagcaaaacgtaaacagaaattgaaaacttgaaggatatttcagtgtcatggacttcctcaaaatgaagtgctattttcttatttttaatcaaataactagacatatatcagaaactttaaaatgtaaaagttgtacactttcaacattttattacgattattattcagcagcacattctgaggggggaacaattcacaccaccaataataacctggtaagatttcaggaggtaaagaaggtggaataattgacggggagatagcgcctgaaataaacaaaatatgggcatgcatgctaaagggaaaatgtgtgcaggtctactgcattaaatcctgtgtgctcctcttttggatttacagaaatgtgtcaaatgtaaatctttcaaagccatttaaaaatattcactttagttctctgtgaagaagaggagaaaagcaatcctcctgattgtattgttttaaactttaagaatttatcaaaatgccggtacttaggacctaaatttatctatgtctgtcatacgctaaaatgatattggtctttgaatttggtatacatttattctgttcactatcacaaaatcatctatatttatagaggaatagaagtttatatatatataataccatatttttaatttcacaaataaaaaattcaaagttttgtacaaaattatatggattttgtgcctgaaaataatagagcttgagctgtctgaactattttacattttatggtgtctcatagccaatcccacagtgtaaaaattcaggaattcaatgaaaaaagtctacccttaaaccctcagatcagtctttccaaagaattactctgtttgcattgttgtgattgacatttgtgaagtcccaagaaaagatctgttttcatgacagtagaaaatagaagtttgcaaattatttctttactcaaagaggattaaaagagaactctaattttaatattaaagctttcttttctttcagggaataaatttacatgactttttatattatggaggtttatttttaaatcatcacctttctcatattttttagaggtattgtcttatctcttccataatcttggatattacaaaaccctaaataggcaatcaataaatggttaactggctatgtgttcataaacattttaaacagc

SEQ ID NO: 8716 - DNA, 738 bp, Homo sapiens
gtcataattgctgccataattcctgtttgtctatctctctctcccctaggctcagaattccttgccaacagtggctgtgtctgatatgtctttgaatcttcagtatcgaactcagtgcttggcatatttgatgttcataaaatgtctgttaaaagaataaatgaatccaggactcatgtttctaataagtatagaaattgctctcttaccccacataagtcttgcatatccttggtcattggcaatactagataaggatatgctatttaagtagcctaaacttaaacaatgataaagctacattactgcatgtttactgaatgtcaaacagacttctaagtgctttgtgtttactaactcatttaattctcacaaatttataaccatttggtaggagaggaaaccaaggcatggagaggttaagtattttgctcaaggccacacagctagtaaatggtggaactgggatttaaactccaacaatctaacttcagagcaatacagccttagtaaagcagtctcacatccatcatctgactcaattaatgtatcacaagatagtaatacctacgtatttattataatgaaagaaatcaagagccaaataaatcaagttgttagctatagtctccaaagaagggatacccaagatgcaacccttccagccacttcctgcagccatgcttggttcctgtatatgcctaaagacccctcatttaaaaaaaaaaaaaaaaaagg

SEQ ID NO: 8717 - DNA, 49642 bp, Homo sapiens
ggaagagctgccggaagtaggcggtggaggtggtagcggagctgacggcagctgccagggaaaccgaggcgcgggacgcaaggccagcagacaggccggccagagggtcatctgcgtccggcacccaggaggctcgtggtccgcctttgcctgggctgagggtctctggccccgcagcctctcttggaggcgggcctgtccctaagcccgccaaggggcgccgcgccgaggggctgcggagtgggggacggacgcccccgacccgggaaggggcgtccggcggggccggaggagagggctctccccgctcaggaggtgcccctgggcgggggaccgggagtcctcaaccccggactgaggcaggggtctctgggggcgaggagggcgcgtcgccctctgcccccgccggcaccctggccatgacaggcaagtcggtgaaggacgtggatcggtaccaggctgtcctggccaacctgctgctggaggaggataacaagttttgtgcagattgccagtctaaaggtagcgcatcccacctggcgggccaggggtccagccgcgccggggtggtgggggtgggctgcgtgaagaggcggtttctgaagcttaggccgcccaactcggcttataagtggtaacgcgtgctgcgcttgcagtgagcctactgggctttctgcagctgggggattggtatgggtagagcttgcgagggcgagtctgtgtgtgtcggggagggtggaggtgatggtgcgggtggaagttgcctggcgtgttcaggtgagaatgtctgtatttgagggctctgaatgagttctgggccggctgtccagagagagctcccagcatgtcacttgcaaagctggggatgaactgcattgcgtgcgtgcgtgcgtgcgtgtgtgtgtgtgtgtgtgtgtgtgtgtgagagagagagagagagaatgacgaggaggaggaggagggaagtgagatggcggaaaggaaaactgcttaaatgatttttaaaggtggtgatttttgcttcctgctatttggttagcaactcctgtcattttgcagccttgctaagatctgacaagagtgcttaggtgactttattcttctggatgtgtgcagtgggaaactgccttatgcagtgacacagtgcggatttctaggcagtgtagccctggcttgtagagtgcgttggaggcctatgtatgagtggtggcagaaactagccgattatgcctgtagtgcaggatccgtttaatcagtggagagagaaagatgaattcgatgaattcattgcttccatggcgattacacttctaaaggtgaaatatgatcattgtaaattggcagaaccatttagtctttgttttctgtgccctagaagattcatgatttgatacaattaaaagtcagtacaataggaaatcttggttattagtgaaatgttggcacttgacatttatacaagcttctatgaatctttttttcctgtattttctaattcttttggcatataattggaggattgggaaaattattttccctttggttgggtcgaaatggatagttatattttgggggcgacaatttacttttgttcataatgcagtggatttgccatggttgtttgccgtacagcgtagtgggcatatactataaaacaaagattcagttatattcgtatttatctattttgagaaaggaaggacatatttaattgatgctttcacttaattaccttttatttttgaagaataaggttataaaaggagaacaggggagggatacatagacacctagtaatgtattttagtgacctctaccaacagataaatggaatgtgccattaggaaaacaaattcctagacttctttcctgaatttttgcattagcaataattcattttaaaaagtattttagaatcaatttatgttgagtaggttagcttcttgattcttgttacatcttctgttaggtctattggaagatttggtttattttaggagtgtatcttggctttattcaaattcccttatgtcctcatttgacagatcttgagtcacagtgaagcaacccactggagtgagcattgctgcatttggagagtcagatgccattttggtgactagaacccccccccccatttctcatattacccttatacttactcatattccaataaaatacagcacatggaagagagaggctgattcactacttcttcctccaaatttccattgctttttatttattttattttttatttttattttttgagacagtttcgctttgtcgcccaggctggagtgcaatggtgcaatctcggctcactgcaacctctgcctcccgggttcaagtgattctcctgcctcagcctcccgagtacctgggattacaggcgcccgccaccatgcccagctgatttttgtatttttagtagagacagggtttcaccatgttggccaggctggtcttgaactcctgacctcaggtgatccacccgcctcagccttccaaagtgctgggattacaggtgtgagccaccatgcccagcccgaaatttccgttgctttttattaataagcttactggggatcaggttatgaaatatcagttaattcttaatgagaactagtaactgctggcttgtaaactttattaactactgttgatggtagaatcctggatcctcaatttcttttcagaagttcgttttacattttaccaggtggcttcagggacttggtcattgtattaaaaatgagatgacaatgggtcagtcatctttagattatgacaaataggcatttgttgaggcctctgtttatccaatttatgaattacctatcccattccacccctccaagccctctcactctttttcccctgctgttttctaattttggttgtcataatgatcatttggacaactatcagattgttgaaggaaaagacgtttggatcaataaattgttacctgttagcgctgataaaaaatacatttcattggaggaggaatttaaaaagtgttggctaaaatgagaattgggtttcagtttatttacctgtattcctgtgtcctttcctaaaaaattggaagttaactgtacaggatatggtgagtgattgctcatctattaatatccagttagatgatgtggcatagactatcgacctatgagcaggtatttttgcaatgttccaaaatataactctttggcaatgacttttatttttaaattcttatacttatttaggaacatttattagttgactttcaaggtatgtgatttaaacttcggaatagaggctgggtgtggtggctcaaacctgtaatcccagcactttgagaggccaaggagggaggatcacttgagtccaggagttcaagaccagcctgggcaacatagtgtgaccttgtctctacaaatagttaaaaaattagctgggtgtggtgttgtgcatctgtggtcccagctactcaggaggctgaggcaggaggatcacctgggcaactgagcccaggaggtcgaagctgcagtgggccatgattgagtgccactgcgctgcagcctgggtcagagagcaagaccctgtctctaaaacaaaacacaacaaataaacatcagaatagagaacaagcttgtgttctttttacttcgtacaagttttgttgatcctggggtttttaactgtcctgggcacgagtcttaccagtttctgggaccactaaaccattccagtaatttcagtgtgggaaaggaaactgctttggggctgcctatttaagaaatgctatgattctctctaggctcaagatgtgatttcttcattacccaaagccctggggttaatgtgacttttagggtgaacttttggactaacttaggtagtgatagaacagaggacaaaactactgaaaattccagatatgtcaatggtaactctggctgattgaggctgggttccatttttgggtatgggtcatacttcctttgtacttggggtcatactggtccaagttttaacttctagctcagcagttccagattttatcagtgtgtcaggaataattgctaagccaccccgtcagagactgtgttttaaactggacactatcttatttaccatgaaaggatctacagttgtcctttggtatccaggggggattggttccaggaaccttctggggtactaaaatccacagatgctcaagtccctgatataaatgttgtagtgcttgcatataacttatacacatcctcccttatactttaaatcatctctagattacttataatatctaatacaatgttaatgctatgccagtagttgttactctgtataatttagggaataatgagaaggaaaaaagtctgcacatgttctgtacagatgcaaccattcattttttactgaatattttctttcctttttattttttttagagacggggtcttgctctgccacccaggctggagtgcagtggtgcgattatagctcactgtagcctcagactcctgggctcaagctgtcctcccacttagcctcccaaagtgctgggactacaggcgtgtgccacggggcccagccattttttcgaatattttcaatctgcagttgtttgaatccacagatgcagaacccatttctaatggagggctgactatacctttctgatgacctaaatatttgtgtccactattgggacactcctttcttagtgtcaaggtttgtgagaaattgagggctgtttgatgggcaaagatttatttatttatttactggcttatctacaattgagacagggtctcactatgtttctcaggctagttctaactcctgggctgaagcagtcctcccatctcagcctcccagagtgctgggattacaggtgtgacacaccatacccggcagagcaaagagttaagagtacaagacatttgatcatcttgaggagtatttacttcagactgaaacaccacatgaaattctagagtccaacagaaagtgtaataattttttgcttttcccttcttctgctacatcctatctctgaaatgtttcaccccacccaaccactgcctctgttccaactcctatatttttaaatctacatttaaatgtactttttgaaaaaggtagcactttcatgtagttcaaaatccaaaaggtccaaaggggaatatgtacggtataaaatcattctgctgtccctcatctctgagccaccattttcactccgtggaagtaacaattgttggcaatttcttttcttttcttttctttttttttttttttgagacagagtttcgctcttgttgcccaggctggcgtgcgatggcaagatcttggttcactgcaacctctccctcctgggttcaagtgattctcctgcctcagcctctcgagtagctgggcgcccaccaccacgcccagctaatatttgtatttttagtagagatggggtttcaccatgttggtcaggctggcctcgaactcctggcctcgggtgatccaccaacctcagcctcccaaagtgcttggattacaggtgtgagccaccacacctagcccattgtcggcaatttcttacgtgacttttaagagataatgtatgcatagacaaacaattacatttaaatatattcctttgcagtgcttttatgcaaatggtagcatattacccacagctcttgacatctgtatttttcaatcaacagaacatggagagcatacactttccatgcacattgaggagtgctttgttctttgaaggtattttctaaggctgtgaccaagttatcttgactaagtagaaagctattcttaaatgatttggaagacactgttgtctctcttttttttttttttttttttttttgaggcggagtcttgctatgtacagtggtgcagtcttggctcactgcaaactccccctcccgggttcaagttctcctgcctcagcctcctgagtagcagggattacaggcacctgactaatttttatatttttagcagagagaaggtttcaccatgttgtccaggctggtctggaactcctgacctcaagtgatctgcccaccttggcctcccaaaatgctgggattacaggcatgagccaccatgcccagcagacactgctctctttgaaggcatcttagaaagtgtcctaggcccatagacacatataagcctactgttaagatggcagagaggcagagtaatggaagagtctgtagacttggtattggaacagccagttaaattcctttactttgcttattgcagcttggtgacctgattccacataccacctaactttctcagtttagttttcctagtttgaaaaatgaaagtgccttgtaaactaatgtgttacacaaatgtctgcattatttacttttaccattgctaatcataaattttttaatcttgattttattagttttacttttgactttattcccttttaagatagtctggttactgggagccacagttagaatgactcacccagtaattccctagtctttaagccaaaaccatttcctatatatggagttctggcatttttgcaaatgtgctttatggtacccttgaggatggtctctggatgtttcccgatttcaaacttgtatgaaagattagaccagggaatttctttgtgtagaaattttctcatagttgtcttaagttttaactcatgtacattaatctttagctttgctttacatttgttttctgttgatagccaagtcattgcttgttaaatattccttagaaatgaactttcctatcaatttaaaattattttagctgtatctgtggcactttttttttttctcttttgagatggagtctcgctctgttgcccaggctggagtgcagtggtgtggtcttggctcactgcaacctccacttcccgggttcaagccattctcctgcctcagcctcccgagtggctgggattagagacgcctgccaccacacctggctaatattttgtatttttagtagagaggggtttcatcatgttggccaggctggtctcgaactcctgacctcaggtgatcgcccaccttagcctcccaaagtgctgggattataggtgtgagccgccgcacccagcctgtggtaccttttaaaaagtaaaaaattcaatggcgtgaaacaacagaaggagttctgcttccatttctagttgttaaacgcctttctctagccaagatcacatatatttctggttttttatagctagtgcactataactctgacagtcatggttagattgatagttttactgaaagtaatttatcaaaatccccattagattgtcttttaatgtcaacatattaaacctgttccctgagagatactttcctatttgttctccttgccctttaaatatcatttggtgccagtgagatgaagaatagaaaatgtatatcttttaggggaacttcgcaagcctgagatcccccactacatatagtcattcagaaaatgtttcttaagcacttactacctactttttctcagacattgtaccgggacatatagattaaaagaaagagtctttagtctcaaggattttacagtctaatggggaagcagatgtgtacaaatataaatgatgcaatacagaaattattgtggcatggtatacagggagaaatgaaagcattgaagaaggcaaagaagtcttcctcgggaagtcatggcttcaaagagaaaagtaggctgtgtcttaaaggataagtatgactttgccaagctaatttagggaactttgtattctaggaagagggaacagaatgtgcaaagcctcgaaggtgcactgttttgtgtgtgtgtgtgtgcgtgtggggattctttagtatattttgactgcatgttgaggagtgatgaggagtagagtttgacaggtagtcaggatactgtaaggttaaaacctgagctctgtggttgacttgcttcgtggcattgagattttgaatatgcactgtgctttagacttcctgttgtgtaagaagcccatagtattgtaggtccacctgctattcacatggggttataaatattgcaggcatgaaacgcttcctgatcgctgaatagtaagaaaggtctgagcatggtgccgattaaattctccattgaaatgtacctttgtgggtacattaaattattttagcataagtctagtgaagtgccagcagtagatactatgttatttctggagctcttgatgttgatttttgaggctgaacatgctcttagcctcaagcaggtcatatttggaatacctgatgtgtgctcctggttgctcagtgcttaggatgcataaacaggtagctgcagtctcatctctcagtatatatacttttcagcaaatcttttttttctagataaattggaaaactaccttttttctgcatttttcatctgatgtcattatggtatgtaggtggcagctttcttgggcacagttgtctatataactgttcatcacatgagtcattgtctgtttctgttcttctgcctgaaaattccatcttggaaatcgtgtcatgcaatcggtgactgcgacattctacttgttatgtacactgccactggctttgtatgttatgttgatggactctacctgtgctacagtgaagggataaagtgacttattaaattgagtcagactcagttcctccaaatggtatttcctgtaaaaatgatgccaagcaagattctgcataaaacatgcatatgctttacactgtaagcatacagtgcctaccttttgttattgtgtctgcttaaatccttaccacagttgtactcctgtttgatcaagtggccagtttaactagatactagctttgaagaagttctgtattggcccctggaatgtgacagttcataccacattgaaaaggtaagaaccaagtctttgtagagtagaacaccttaaagttaatccacttttaccaaattcctctattgttaaagcaacagtcctatattggctaatttttaaaatcataatgtgccacactttacacatccctagaatgtaagctagggggcaggggcctatgcctgttttgttcactgtagtgttcccagcacctagaacagtgcttggcacagaccaggctctcagtaaatatttgtttgaatgcatgaattgattttatcatctgtaaatgttttgtttcatattagaagagaccttttctaggttatctgaataattgttttaattcttaggaaagctattaattttctgaaaaataagttttaaaatatgtttggaaggccctatgtcagtcaaggaccagtcagaggaacagaagccactgttggtcttataagcagagggaatttaaaatagggagtaggttacaaggctgctagaagagccaagaagctgaacaggggctggtgaggcacccattcgattagcaatgcctgggaactactatgcctgcaaggaaaatagtgcactggtgtcaccaagggctggaagtccgagtggtctggtgtgagcggaagcatggaaagaggagcagtctggtggcagctggaagtaggccgagtgagagagcgtattaccctggctgctccctgctcctgcctcttatcctcctcagtgcctcccattgatggaacttatcctgaaatcagttggcaaagggagcctgggagatgtagttccctgtgatcaagcggagcaagggagggatcccagcgcaaacaggcaaagacacaaaggcactgaattctccaagatgtaatttctttccccttatagtatttgaattattttggacaagagaacggaagggttttccggcagatataacattgcgtgcttctaaaggatcttgactgttgctgaaacaattattagtcccaggaagtaatgtaacaactcagtcatagtttatatacttagggggtatgactaggcaaattggctcctgtattgaatatgtatttgactgttggctgctgccaggagcaacttatcgtttggttactcagaaaataagttcccaccctgtcaattctgggaagtcttaggtatggtgtatccacattgagtatatctacaactggacagcttgagttagtcacacagaagccatacacagaaaatgttgaggattgcagcgttaaaacatggtacagctcactcttttttttttctttcgtttttctggagacagagtcttgctctgttgcccaggctggagtgctttgatgcgatctcagctcactgcctcctctggctcccgggttcaagtgattctcatgcctcagccttccaagtagctgggattataggtgtgtacctccatgcccagctaattatttgtatttttagtagacacagggtctcaccacattggccaggctggtctcaaactcctggcctcaagtgagctacctaccctccttggcctcccaaagtgctgggattgcagatgtgagccaccaaggccgggcctcagctcagtgttttctttacagttaaggtaactgcagtgtggctgttttatcttgtgctgcatgttagtttaactagtcttattgatttgtttgttttaccccacaacttcagataagtttgcactgggtgagggaggcaagatcactgggtctgttttcttctaccctgacctgaaaaaaatattttgtcttgtaaggaatgttgctgctgctccatttaagggcagagctttccaagttgtggctacttgttttctacgtgattataaaagtgtctaatgagttatatgagacaagttcagccctttctagaagtgctttttttgtcaatcaggtcacctgcatttgggcccttgctatattaatggaattggtggaactaggccagcagagttttcagtgcagtgtgagtatgtttgcttttaggctgttacttcccacagaggccacagataaaggactctcgttgtttgagtgaagttaccaactgtaacaattgcataggtttccttgtttctttcttttctccaaaaaactcatttcctcttggcaggtgttactataattcacaggtgtaatgaaaatgtaatttgggatttgaaaaagcatatcagactgcttcccagagtaccagttcttttcagctggtccatttcaacttaagaggtccatctatgcatttttgaagcttcatatttaataaatataatatttcactgctgtgtttgactattccgtttcccacactttctccttccctaccccactcttctggatcctgtgtttccccacaggctttgtgaatgccggtccactgatggctgaactgcaggtctctccccagtggaaagccccagagatgagccagatctgcctcagctgtggccatccgtcagcgtaaggttgctctggtggtcgtcttcagtttgtccagctcttccccttatcccccatcctccctcatgtgtggctgaagcttgccctggaatcccacctttgtagcatgtcactcggtagtagtagaattttattattgttgctttttttcattttcaattaatgttaagtgattctctgacaaattttgttgaccatagccctcttttcccctcagttcatagatttcctataggaattctggtttgcttttaaatacatatagaatacagtttatttaagttctggatttcataagcttacttggaaaatacttttttaaaaaaaacatttcaggtcaaagcttccaaaaagaaatttcttaatctgaaacaatgagaactgggttcctcaggcctcatgtcatttcccctcacccacaaatcaaatgtgtaatgctctcattttatgatgtattgaaacagtgaagcaaatgcgagagggagagagacctactctcagctgtagctgataagtgtgtcctagcatggtgatttgagcaaatagagcaccttttcttttccttttcttcaaatagccatgctgtcttttgcagcagttgctggtgacggaataccataaatccccaggcctctaccacagagcttacatctttagatgtgggtttacatgttaatcctacaatgttatttcacctcagtggtctgaagtgcgcacacagtacattttgttctttaacttcctcttttcttgtctaactggaagtccccaaatgtgtggatttagaaatgagttctctagtgtttctagttttgagttaaggaagttttgtcttgatattgtttaggtggttgtttttgttctgtgccttcaaaaataatttcttacagaattttctgtgtgaactggtgacatcatatgctgtagtgtaaagcttgtagagaagggggcattggtgtctttttgttgttgttgacactttatcactccttataactgacacaaaccctgagaagagaaacaggaaggaaactccctgttcttaccatgatgcttttgttcaaaatagctgaaaacagcagagctgacggaaaccaatttgagtgtgacagctgatttgagaaagaatgaattaagagattcaggctcttctgctatgttgaaatcatttttactgaaagattagctgtttggaacagggattgactttgtctctctgaaagtaggcatgaagagttcggttagaggaaccgttacagatggaggagaaacttgaggaaaggtctttcctgtagtgtgactacagtattaacattcccagattatatgaaagagaaaggaagcttcattaaatgaaacattggaatcaggaagactccggcttggctccctgagcattctaacttgttctgagcctagtctcgacagaagtagcctgacacaagtggctcagatcaagggtccatattacgggcagagtaaaaataggtcccagtttcattagacttctcatacatttaaggaaaaaaagatttgttgccataggaacagaccagttgttttctgtcttgtgggattttaggagctggggagataggaggatccctgtgcttataatctaaacatcagtaaatgctggttttttttaaaacaacaacaactttatcttttatgattctgaaacctatccacgataaaaatcattggaaagtatgaaaaatataatgatgctgaaggtatttttcataattcttttttttttttttttttggagacaaggtctctcgctccgtcgcccaagctggagtacagtggcacgatctcagctcactgcagcctctatcaggcttaagcagttcttctgtctcagccttcatagtagctgggactacaggtgcacaccaccacgtccagctaatttttgtatttttagtacagacagggttttgccatgttgcccaggctagtctcgaactcctgagctcacatcatctgcctgcctcggcctgccggagtgccaggattacaggcatcaaccaccatgcccggccttatttttcataattcttatcacccatttacttgagcttataccataatgattttatatcattcttttttgcttaacatttattataagcttatttcatgacattaaaaacgtgtaaatacctttattgtatcccagcattggaatatgtcattattatctcttgcccaattgttaatatttgaattttcaattttttaacaatacaaataaggaagtataaatttttgtgttgttgttagagtgatgggttatttatgtgttcagatttgagtagtcaagtgggccctctaatttaaaaagttaccaaggggattctctgggttgagcccacgtagagatggctttgctatgggcattatcattctgaactgcttcattgcagtagatgtctgctgaggcaaggaatggggaattcgggagaaccctggtttccccataagggacctaaggaacataagggacataaggaacagctttatgggtcataccacagcaagatgggccggcactttcacattgagaggtgacagcgtgctggcagccctcacagccctcgctcgctctcggtgcctcctcggccttggcacccactctggccgcacttgaggagcccttcagcccactgctgcactgtgggagccccttcctgggctggccgaggccggagctggctccctcggcttgcggggaggtgtggagggagccagctccgggaaccggggctgtgtgccgcacttgtgggccagctggagttccgggtgggcatgggcttggcgggccccgcacttggagcagccggccagccctgctggccctgggcaatgaggggcttagcacctgggccagcggctgcagagggtgtgctgggtcccccagcagtgccggcccaccggcgctgcgctggatttctcaccgggccttagctgccttcccacggggcagggctcgggacctgcagcccgccatgcctgagcctccccccacctctgtgggctcctgtgcagcctgagcctccccaacgagaccgccccctgctccacggcacccggtcccatcaaccacccaagggctgaggtgtgtgggcgcacagcgcgggactggcgggcagctccacctgcagccccagtgcgagatccactggatgaagccagctgggctcctgagtctggtggggccttggagaacctttatgtctagctcagggattgtaaatacaccagtcggcactctgtatctagctcaaggtttgtaaacacaccaatcagcaccctgtgtctagctcagggtttgtgaatgcaccaatcgacactctgtatctagctactctggtggggacttggagaacctttgtgtggacactctgtatctagctactcttggtggggatttggagaacctttgtgtccacactctgtatctagctaatctggtggggatgtggagaacctttgtgtctagctcagggattgtaaacgcaccaatcagcaccctgtcaaaacagaccgctccgctctaccaatcagcaggatgtgattggatggggccagataagagaataaaagcaggctgcccgagccagcagtggcagcctgttcgggtcctcttccacagtgtggaaactttgttcttttgctctttgcaataaatcttactgctactcactctttgggtccacactgcctttatgagctgcaacactcaccgcgaaggtctgcagcttcactcctgaagccagcgagaccacgaacccaccgggaggaacgaacaattccagacgcgctgccttaagagctttaacactcaccgcgagggtccacagcttcactcctgagccagcgagaccacgaaccccaccagaaggaagaaactccgaacacatccgaacatcagaaggaacaaactccggacacgccgcctttaagaactgtaacactcactgcgagggtccacggcttcattcttgaagtcagtgaaaccaagaacccaccaattccggacacaacattatatacctgatgtgcggaaatacccttgcgccattgactagcatcttatgttgttcatacagtcctcattcacttaaacttagtcctctaaggaggtggattagaggtcctacattagtagaaaggaggtaacagctactgcattattattttttttttgaagaagggccctcagactggagatgaggacagggactgtgttttcatgtctatctgcatacttaatgcacggtgtctggcacatagtgtctatgtccctattatgagcagcattattctgttaatgtgtgttcaggtcatatgctttgttttgttttttgatagtcttcctcatactgttagcccagatagctgaagatctgtgacaccaggaagctgagcaggtgaatctcatggttgctttgtggtaattgcttctttgtgccatttcatttctgtgcttctgccacctgtgctgctttggaagctggagctagacatgaagcgaatcctctgccctctcagtaggaggttttggtgtgacacatcatcctggggaaaaatgtagcatgaagtgtgaaacaggaggctgaaatagcagtcctttagcccttttgtgggatgggagtaaatatttagacgtggttctcaggtgctgtagaatttaataaccttgcagcagttttagaaactccttgtgcccactggaacaggttcgtttaaagaatcttacttgggctcttttgaaattgtgatgcccccacctccacccactcccctcccccgcccacccccagacctgccctgagttcatctgcctaatgttccctttgcaggatctttgtactcacatggctggtatctttgccccacccccttatgccatatattttgacctcattgtgttctattctgaaacgcctgggttttgaaacatcgtggtgaatgttttctttttcaaagggcaaatctccatcttttgctctcctcccttaagccagggctgttttgatgactgatattctgcacaccactggactaaccaaccatctgtactttgatcccagaattcattttgattctgctgtttgtttagaactgaaagctttctagcttgtttggatgtggttgtgattcagtgaaactggcactgattttccatctgtttgccattggttgggacttctccaatgtgttaggaaagctgctgtgctgagttgcgaagagaaattcacatgtccatggtcttgcacaagggctcatttgctcacttagaaggttttatgtagagcctctgcctgggtgaaagacatgagcttccctggaaacaattgaaaaacatcttctgcctggccactcagtcttgagctctagtaggttacactgtttttcccttctgggcttctttttgaggaaggggagtgtggatgggaagaaatcttcacaatcagtctcagattcccagcagcagagagtgaattgtatgttgtaataataaaaaaaagaatacctaaagaacaagatatcaatttagtgaccattattgagcatttactatgtataacacacatttgggtgtgtaaaggtgattctaatttcagtccagctgatcctttcttctgtgaacttgggcaaatgacttgacctctctaggccttagtttctccaactgtgcttagactagatcattcctaaggtttgttacaattttagaattttgtactctaaacgtgtatctgtttgttacagaacaagagaggcttttccacaaaattgacatattcttatgtctcacttcaaactaaatggcttaaaaatggttcctctagagcaggatttctcaacctcagactattgacattttgggtgattccttgttgtgggcactgtccagggcattttagaatgtttaggagccagcattcctgtcctctgcccactagatgccagtagctcttccctacccctctgcccgttgtgacaaccaaaaatgtctctagacatcagcattgccccttgaggggaaatcgtttctgttgggagccattggtctagaggaacaaagatgggactatttgaatatgggctgtttttaatatcagttttcatgttattccactattgcttattacctgtttaatcagtaagcatgcattaagtgtatactatacacagatgaatgccgacgcttgattatgagggactttaatgaccatgtcaagttttcaaatgttgagtccacctggccaactttgaaatgattgcccagctgttagcgcagcagtccctacacgcctacacccaccagcctgctattagccttggtcagggtaatgattgaaatgtatgaaagcattcactcacaaaggctatcagatagcaacctaggaaggccctgggattgtgagttatggatcgggactgggtcttgtgcatccagaatctagtattatgatagttatcccttcagcttcctaggggaaaaaaattcctcgtcaaagtggtggggtgaggaatctatcctagggatggaggatgaagagcaatctcattggacaatgaccatatcaccctttttagtagcttcttctaaacataggccctttccctcccgcagtgggcaggctcactttgcagctttagttttttgttttgttttgttttgtttttgtttttaaatatatgagtagatactggttgttgcaaagaggaagttaaactgaagtaacctaaaaatgtaaagaactgaatgtccccaggagatgaagacagtaacttgagaaccaagtttgcttatattacctgaagtgaggtcactaggaaattggtttaattatagtatcaagttttgaaatatcaggtccacctggctgactttgaaatgatttgcccagctattagctcagcagtccctccctgcacaccaactccacccagcctattgttagccattgaagtggtgattgaaatgcattagattgcccaagaaatctaatctttggacttgctacatttgctataaaatatcagtttaggtttaataactttgaatttgctcccagtacccccagattttctcatctgttttaaattcacattctgcacttggtcgggtgcagaatggtgcttctcgctgattggggtagagtgtgttctgtgagcatctttgctgggatgctctgggattccaaagccatgattcagacacttaagcctgtgtcagtccctatccttaggtcctggcaggctccgtgttccattccagctgagcctttgctggagtaattacccacatggagtcttcaagccaaacaattgtttgtactgagatagtctcactgtttggctcctaatgaaataatctctttcctgccctcaatgaaagcagctattttttgtgtcctccctcccctattcagagaagccatgtctcatccaccactcttccagcttattcataaatgctttaagcagggtctttgtgtaaaggaaattggctggagctgaaatatcataggctaaccaggagacaaggagcattaaggacacccttttccttgactttctatttagggtatttaaattacctttctgtgattttctgtaataagcaatctaaaacttaaatccacataagcaaaatagtcatactaggtttttaaaaagtatactaaattaggccgggctcagtggctcatgcctgtaatcgcagcacgttgggaggccgaggcaggtgcatcactaggtcaggagatcgagaccatcctgactaacatggtgaaaccccgctgtctctactaaagacacaaaaaattagccaggcgtggtggcatgcacctgtagtcccaggtattcgggaagctgaggcaggggaatagcttgaacccgggaggcggaggttgcagtgagccaagatcacaccactgcactccagcctgggtgacagagcgtgaatccatctcaaaaaaaaaaaaagtatactaaattagtataattttattgttgttgttacctaaaggagctctcaaaaataaaagctggccaggcgtggtagcacatgcctgtagtcccagctactcaagaagctgaggtgggaggattgcttgagcataggagattgaggctgcactgcactctagcttgggcaacaaagcaacaaaccctatcttagaagaacaaacaaaaaacccaacaacagaacaaccacaaatgagtgagtgcagcaggagaggcagcagagcgccgtgggagttggaataggaaggagaaaaggcttcatggggaaagtgggcagagcaagatttgcacaaaaagatgttttgcaaatagaggaaataggccctgtaaagctatttgtgagagactgtaagttgatcaacaaagtgtaagtagttcttctaacttttttttttttttttttttttgtgacagagtcttgctctgtcgcccaggctggagtacagtggctcaatcttggctcactgcaacctccacctcccaggttcaagcgattcccctgcctcagcctcctgaatagttagtattacaggcgtgagccacaatgcctggctaatttttgtatttttagtagagatggggtttcagcatgttggccaggctggtcttgaacccctgacctcaggtgatccaccggccttagcatcccaaagtgctgggattaaggcgtgaggcaccgcgcccggccacttctaacctttttaaggagtatttgcgtgaacagaatcaatgagtttcttcaaattaacttctgacaataatctaaatggtctccattttctgattcacccttttttccaattccaagttgccattatccatgtaattggctctaaagagagcaaggaaatctatcttctccaggagtttcagtcatagatttttagctggctctctttatcatttgcaactgagttcattcatatgcttgttttcaagaattttttcctttagttccagaactctttgcttccatcctatggtttcttgggaggacagttctaagctttcttaagataagtgtttcaatcacaccatctaccatttccctcagaagttgttctcctcttatgcggtgtgtttaggtgtttggggcgccaatcactagggattggaaggattttgatgaatcttcaagtaaccatgtcttgaaggttagccatcatcagttcactccatgaaatgaaaacttacggggatccacttttgctcttttttgaagaagtctattgtcctcaaaggaagaggtggacctgttcagatttttaagttttatcttattcagtgtttgtagcatcaagggactggcctctaacggaagcaactgggggcttcattggcttatgcaatcagtctcatctcactgactttacaaggttcttcaatactggcagaaaatctcttggctagctctttctccctccttaaaatatgttggctctttactataaaaacaatcatagcagcacataccagaatctcctagggaaacccccaaagacttgggccttgtctcagctctcagacactaccaccaagagcactgcatagctttcccaggaccaactggaaagaattcttttttacgacgatgtaattgacaatgaaaattgtatatgtttacagtatacaatgtggtgttttgatatatgtgtacattgatttttgtggcagtcaggaggtcctctagttggaacagagactcaccacacccaagagtccctctgtctgtatcccatccccaaatcagaaaaaggcctgtgcgtctctgtgggtagtattcactctctcagattcctctgtgagtcaggaacatgacaagtggcatctatatacacagttttaagaggaagtgatgtcactcttggtgtatagaagtgagaagaggagtaatgagaattaaagacccagatcacaggagaatttaagccatacttagaagtttggagttcagttgatggtggggggtccagtgacatagctttgaatggggtgatgacattatcaggacatatgttggcagaatgtccttttcaaagccaacaaagtccaaactaggatctcattctttccctcctgaagtcacctggggaattgaattgataataatgatacaggatgactgattgatagttctttattcccagaaacatcacctaagtatacactagttaccttccactgctgggagagacaacaaggaagagtcacagtaagtccctacctgttaataataaaccaatggccaggcccagtggctcatgcctgtaatcccagtactttgggaggccaaggtgggaagatcacttgagcccaagagttcaaaaccagcctgggcaacatagcaagacctcacctctacaaaataataataataataataataaaacagggcagtaagattaatgtggagccaaatttacctttccagagtagtttaatgaatttttgagatacagttactatcttttagaagagatatgtttgagataatctggttaaggtatattgacttgtctaaagtcacacaggaaattagtgctgtaatttagataattcgtatctttagctgtgtagataagaagggccagttaaataacatgagaaagatgaagaatgcctccttcctttctcctagtagacctcagtctgctttcctgttgatttctttgtgttacaggctttaatgttttttgagaaaagccattttaagttaactgctgaattagttttagacatagattgactaatcatttcattagtgagtacttagcagtgttctacctcccttaacctcctttttccggttacctggtaggaagataatgttgctttgcttcatctccattggtaatcacagcagtctgtctaattgctatgtctgttctatcattgagctcctggattaaattggttcagcgggcttgtattttggttgagtatataagtggctgctttcttctgctagaatctccaaacctccatctttatctttcatactttgatatattatataagtatggggggagtaaaaagcagcaccaggatatcaaaatggtaggaagagagattaatgggactccgtataaggaaggcctctctaatagtgggtgccgtctaatagacaaaccaactaccttttgaaatggtacgtaactgactcagcattggacaagccaggtgatcacccctagaaggagggtgcattcagtgagaggctggacctaagaggatttctaaagtcctttccacctctgattttctaattttaaatttcttggtgtaggatttacctttattctctaaccagtctcagacatgttttaattttctttgtctcagacatttttaagcttaacttatgctcttttttcaacagtacaaatgtggacagtgtttctttttgacaaacggaaacaacattcttgcaagatggcccagatggaaagggacttgtcttgcaagtgttctgaaagcagaggttgattgcataagcctttattttggtctcatggttccttaaaatgtttgtacttacagaagttcaaagttactgtttattgttattttggaataaggaacttgatgaactctcttttgtgtggatgaaaacatagaggtaaacatacctctcagcagccctacacaatttttccaagatcccactggtgtttctgtgtattcttccttttcagtgaatcagagaatggagggatataatgagtggaactgaggtaactggcactagatttgttcttaaaacaaatactgctgctttttttactttgacttccaaattttgggtcagagttaatgacaagttatgtcacgtagaattaatctcttataaaatctgagtttgttgatttaggtttttccttatatgtatgttgcatttaaccagttttcagtgcctggtataggctccatgaaccaaatttgattccgtgttttaggttcctcaagacctaacatcttcatagattgtttgtttcattttacgttttcagaaccattgaacggtaagcaggaagggacctaaaaattactgcaaatcatctactgtagtagtaggactgtagtagtagaaagaactgtagggctcattgttcacccaattcaccacatggggatcatttctctaccatccctgagaactgattaccaaacctctgtttgaacactgcactaactgagattttacaatttctggatatgctgcattggtttttacacaaccttaattgttagaaaatttttctctagagtgtgctaaaatcaacttctactccttggtgccagttctgcttttgaagcctttccaaagtaacctaatccgttttctgtgttacagctatcctttaaggcatttgaaaacttctcccttcattttgcaaaacaggaaaaatatatacatttatgttgcttattgacgaattcatttaacacacatttattgtgtaccatcttctgtttgctagcattgtgtcaagtgtttgtgataaatgatgaaggaacatggtcattgccttccagagctcatagtctatttaggacaagagagacctgtaagcaactcgaacaagatattaagtattagaagaacaaagcataccctgggctattagcaatagagaaagttagggtttattccattggagggcatcacagatgaactggatttttaagtttgtcaagcagggaatgagggagaaagccattccaggtagaaagaatggtgtagtcaaagagatttgagtgtgctgcatatttcacaattatgacttcctcagcatgtgtaaagtacaaggctctcaacagactttatatattatgttaaggagtttcaacttaccctgcagccagtaaggagccctggatgcttacgttgttttgtttttacgatatctgtactggtttttcccattgcaaaattaatagaaagctcattgcaaacaattcagagaggatatatagagaagaaaatagatgtttcattatcccattatcccgatatagtaataatttacatatagtcttctagattttttttctgtgcatacgcgtacatttatttatttatttattttttgacaaggtctcactctgttccctaggatgaagtgccatggtgcaatcatagctcattgcagcctttgaatccttgggctcaagcagtactcccgctcagcctcccaagtagctaggactacagaggcatatcaccacaccgagctcatttattcatattttaaaaaaaatggaattgtttcatgtgtactcttttaatactggatttttaaaattactatatcatggagatacttttatatgaaatagaggctccaaaatttttccccgttaaatggtgataccataattccttaatgtaacctattaatgtttctaattttcataaagatgtaataatgaacattcttaacgtatttctttgtgtacttgacctgttttttccctgatgaattcttacaagtggggtcaaaggatttacttagttcttttgtttttttgagatagggtgtcaatatgttgcccaggctggcctcaaactcctgggctcaagtgatcctccaacctcagcctcctgaatagctgggactacagacatgtgccactgcacctagaatacttagttttaattaatctttaagcaaatgttgcttccctgctatgttcaaggaaccatgctatgccgtgagtatatgatagtgaatgttacaggtctggtgacagctcttgtggcacacatagttaagcgggaaagacatcttaaacaatcaaataattagatagtaacaaaatatggtatgatttagaaaaagtaaagggtggccaggcacagtggctcactcctgtaatctcagtgctttgggaggccaaagtaggaaaatcacttgaggccaggagttcaagaccagcctgagcaacatagtgagaccctgtctcttttttatttcattgatttatttttatttttatttttttcagacagagccttgctctgttgcccaggctggagtgcagtggtgggatctcggcccactgcaacctccgcctcctgggctcacgtgattctcctgccttagcctcccaagtagctgggactacaggcatgtgccactacgtgtggctatttttttttttttttttttttgtatttttagtagagatggggtttcaccatgttggccaggcttgtctcaaactcctgacctcaggtcatctgtccacctctgcctcccaaagtgttgggattacaggcgtgagccaccgtgcctggcccatttcttttttttttcttttctttctttctcttttttttttttcctgactcttaacaccactcaatgacccatctttacaaaaataaaaaattcagctgagcgtggtggctcatgcatctagtcccagctacttgggagactgaggtgggaggattgcctgagcctgacagcccaaggctgctgtgagctatgatcgcaccactgcactccagcctgggtgagagagtaagaccctgtctcaaaaaaaaaaaaagaaaagaaaagaaagagtgaaaaaaagagtaaagggtaaatgaaagttcataacctttaaaaaaaaagtccttatcttttagagatatatgctgaagtatatacagatgaaatggtatgatatttaggatttgcttcagaataatccaggttggagttgaggggcagtgggtgggagtatagctgaaacaaaattggctaggagttgataattgctgaagctcatggttaattatgctctgctttcgtttgtttgaaattttctgtaaggtaaaaaccaaaagaaagggtagaagagatgttacagtcgggtttagactggggagccaaggaaagactcctttgaggaagaaacatttcagctgagacccttgtgatgtataggagttggccaggctgcaagtggcatttggcagttagggaaagagtttttttaggcagcaggagcagcatgtacaaagtccagcaagccctgaggaaggaacatgttggtcccttgaggaaatgaaagaaggctgctaccataggaattgagaggctgcggaaggaggcatgggctagacctttaagaccttggaaactatgttaaggattttgttatttaatccaatagtaatagaagaattttaagcagcacaatgtggctttgcttctttaagagctcaagttggctgtttggtggagaatggttttggtttgggctcaagggagaagagaatgtaaaagtggagagagagctattaggaggttattgcagtggtccgaaagagtctggtggctttagattacagaaatagtgatacagatggagagaagagatactgatttgacagatatttttgtcttggtgatgtgggggctgaaggagagaggtttcatgatgcataattttctgactgacgcaatggaatggatggaggtgtagttgactaagatgaagaaaaaaggaagagattttgtagcaagagattgagagcttagtttggaatatgctattcagaaaatgtgcaccaatttacatatttacctttgtgtatgagactacatggaaggtttatatttagaggtgtgatctgtacagatttgtgttttagaaagattattctggtggtgggattctggagactaattgcttgttagtctgtgagctttttgaattgaggaatctcatccttattttctctgcctttgtatccccagtacttagcaggcaaattgcttggcacataggtacacaataaataatgttaagagaaccaatgctggttgggcgcggtggctcacacctgtaatcccagcactctgggaggccgagaagggcggatcactaggtcaggagatcgagaccatcctggctaccaaggtgaaaccccgtctctactaaaaatacaaaaacaaaattagccgggcgtgatcgcgggcgcctgtagtctcagctactcgggaggctgaggcaggagaatggcgtgaactcgggaggcggaacttgcagtgagccgagatcgcgccactgcactccagcctgggtgacagagcgagattccgtctcaaaacaaacaaacacacacaaaaaagaacgaatgcttataggtgagacatgaggtctaggtagaaatggatagattctggaaaagtttccaagatagattccacaggatttggatggaagatgggaaagttctctcccttcgcgtagcctgcccgttgaactttttgacaggtccgttatgccagcaggtctaaatataggtagccatcaatttatcaatgttttttcctcctcaatatttatttgtttggaactccatagattagaactcaatgatataattattataatattagtagtagcttgaagtcctccatcacgctagttccccttttctgtctgctgagttgtcaatcccagagcccctctaatcctggcagctttggtggtgggggaagtttcagcagcaagaggaatttgcagcagtagttactccgtatgtagaagctgtccagatgttgaatataagttggatattacgtatatgcttttcattttacaaatggagacataagccctagagaaacttgtcaaaatacatgcaacaggtccgtgtaaacccagatttttccgatactgaactggtacttaggacagttgatttcttgactgatcaaccaaatccatctccatctacttttttcattttccctgatcccttattgcagagtgattctatgttagttttagtattgcttgatgctgcccacgcctgctcttaggctcctgttgaatatgtgcacttatgtgtgaccttgttcttgtgttgtgccgatcactaccagtttacatcacttgtctatcctctttgctttcaaaattgtttggcatattgcctctcagcatttcttttcattttaaatttcaaaatggcatcttttatatttttttccttgattgccatgaccaatgtgtattaaacaattggtttatctctttttattgatacataatagatgtacatgttttcagggtacaagtgatattttgatacattcacataatgtgtaataaccaaatcatgataatgctatatccgtcaccttagacatttatcttttctttatgctgggaatatttgaattattctcttctacctattttgagatatatggtagattattatttactatagtcactgtactgatttattgaacactagatcttatttcttctaactgtatttttgtatttttgttttttttttgagacaaggtctcgctgtcatctaggctggagtgcagtggtgtgatctcggctcattgcaacctctgactcctggattcaagcaattctcctgcctcagcctccccagtagctgggattacaggcacgtgccaccatgcctggctaattttttgtatttttagtagagatggggtttcaccgtgttggccaggctgactaactgtatttttgtacccattaatcaacctcatttcttcctccatccgcctacccttcctggcttctagaacaccgatttactctctcttcatgagatccactattttttaactcactaacatttgcagcaacatggatggaattggaggtcattatgttaagtgaaacaattggtttcacttgcatttttgcaagtttaccagattaaagtaggctggccttatagcagcaataccaggtactgtggaatccaagtacccaccacttaggttgacagccttgggccttctttctttgcctgtgtagtgggggcatatgcaagcacaagggcagggtgggggtgtgtagcagagaaagggaacaggtgagggtttaaaaagtgcattttcaagaaatattttaagagaaataaaggaagctgcttaaattttcatgttgcctagaagactttgaaattgggtctagggtaaatttcttctctctgtattcagttcattttggttctgatattttaggaccagaactcatattcctttttaaaaaagaagcactctggctgagcgcggtggctcacgcctgtaatcccaggcctttgagaggccaaggcgggtacatcaccagaggtctggagtttgagaccagcctggccaacaaggcgaaaccccgtctctactaaaatacaaaaattagtggggtgtggtagcacgcgcctatagtcccagctactcgggaagctgaggcacgagagttgcttgcacctaggagacggaggttgcagtgagccaaaatcacgccgctgcactccagcctggacgacagagcgagactctgtctcaaaaaaataaaataaaaagaagcactccgtggtgttgcatagagtgttggtatatattacatatatgaatgagttaactggcccttatcaggaagatggatgggaagtgggttctggaaaccttattctataccacatccttatatatagtcctcagttattgtccctctgtgttctagggcactgtgaggtgaatgctattgtacacgttttatagatgaggaaactaaggctcaggaaatgtaagtatctctcagaaggtcacacaggtaatcactgaaggagctgtgctcaaacctaagtcctacaactggcagagtgtggttgctcccacctgtaatcccagtgctttgggaggctgaggcgagaggattccttgaggccaggagttcacaaccagcctaagcaacatagggagaccttgtctttaaaaaaattaaaaaattagctgggcatggtgttgcatgcctgtagtcccagctacatgggaggctgaggtgggagaatcgcttgaggcgaggagtttgaggttacagtgaaccatgatcttgcctctgcattccagcctgggcaacagagtgagagaccctgtctgtaaagaataaaatgaaataaaagtaactacaccatttccccatgttttcagccatataagtaacatttgtctcttttatttttcttttctctaatttcagaatattttatggaacatgtagttattcactaataaatctagtggctcaaaactaaaagagattgagtatctgggatataactatcactatattcactgggaaaaggtttcacaagggatgtcaggtagggatttggtggggagaagaggctgttctttggcttttcatgaaaatacagttgcctgtatttctgtactgaggccttgtcagtggcttcagagtcaccccaaggctccaagtcttagccttgcattcctcagaagcaaaaagactttaagtacgctggagtgggagctgtgacagtggcttagatgattgggaattgccttttcccatcttaaggccaggaagcaaacagtgtaacatttcacagctgacttttaatttttaatgaatgtgtttggcttctgactttgttagcaaacaaatacatcttaacttgtcttatgagttctagactctggaatctagagcaaaggaaaagtgctttaagaaacatgaaatattaacttggtgccattttaaatcttatataacttagatcttattggagttcctttatgaaaactgtaacctaaaatggatataccacatgttaagaaaccccatttacatcagtttagggttttcattttgtgtttgacgtgacactctcccacatgaaacaagtgtgcgaatcatttttgtgtttattagatacatggcggaccaactatgtaaatccatctaggaatgtgaagggactaaatatctttttagaaggtaaatcggagcttgtgatagcaataaggtattgggataaaatttcaggcggagagcaccacctggtggtaataaggagaatgtgagccttctgttgcagtatttgcgatagtaaataagtgatatctttgtcaaaaaattacattcttatttgtaataatcatgaattcaaatttctaaaactaattttctgccacacaattctagcattccttcattaaaactgctgtcaaaaccttcaggctggccaggcacaatggctcacacctgtaatcccagcacttcgggaggccaaagtgggagaattgtttgaggacaggagttcaagaccagcctgggcaacatagtgagacctagtctctacagtaaataaaaatattagccaggcagggtggcacacgcctatagtcccagctactccagaggctgaggcaggaggatcgcttgagcccaggaagacgaggctgcagtgagctatgatcgtgccacagcactccctgtccgggtgacagcgagactgcctctaaaaataaaaattaaaaaattaaaaacctgctagctaaccaaataattgtctgtgtcctaaagaactgaagtcttgtgctcgttgtcgttccaagcgtaggccctgtttatctctgtagaaaatcagtgtcttttcacctctttattgcatcctctaatttttatatcacacttattttatgtggtaaatttctgccaagtgggataatggagaaggaagtatttctgattttttagtaagtttttggcaggtttcatataagtcatttttctttcctgggtaaaaattatgaagaggagtatgataatttttcagagtgattattaggatgagtaacactggcaggggatgggagattctgtaacagttttgaattaaaattcatatttgagatttcttttttgttgctataagcatctttattatttggcaatcttgaaacaagatacttcagtagttgagtaaagtaggaacatcagcctaaggggaaaagatcctattaagttaatgcgaatgcatattttataggcctggggttggggggaagataaacacagtttcaattacaggttgagccatggacaagcatgccatatctatcttttttcctggtaggaaaaccgaatacaggccaccactaaaaagtggtgaatacaggcccatcaccactaaaacgtctcttgggagaggactgtttatgtaaggtgctcggccaaatagaatatgacatggctttgcactcctgggatttttcttaatataagtaacagtcttataacatctgcgtttcaacactcatattagcagacactgtaaaaaaattgtaccatgcacaaatgcccacttattatataattctttttatattaaatgcccagaattggcaatccatagagataaaaagtagattcatagttgccaggggctgggaggaagagctgggagaaaatgggtagtgcctgctaatgggtttgtgatttcttttggactaatgaaaatgttctggaattagatagtagtaatcattgcacaactgtgtgaatatattaaaaaccactgtattgtacacttaaatttaaactaaagaaaagctgacacatggaggaatgagcagagtcaataaacaggtggttatggtaaaaattatttcacttatgttctagcagaaatgtctgataatctaatattgtagtttaggccttgaatgttgtaatttgtactttattgccctgttcctgactttcacagggccgcgatgggcctcttggaacattggtgtgttcatctgcattcgatgtgctggaatccacaggaatctgggggtgcacatatccagggtaaagtcagttaacctcgaccagtggactcaagaacagattcaggtacttagcccaagagtgagtcagctgcttccatatatctatgtaaaaggaattccagatgaatttcagtcaaacctggcacaaaggtgaagataaaggaaaatttagttgttaaacacttaacatcagattcttgtaccctaacagaaatttttattctttctatttaagatacaagttattctacctatattttacctccttaaaaacagaaatagtctacggtctaggattccatgggcccacgaaagtattaagagggatctttgggtgattttctaagactcttagcatttgcaggtctaaaatttatagtttcaaatattcacttttggtcgggcacggtggctcatgcctgtaatcccagcactttgtaaggccgaggtgggtggatctcttgagtctaggagttcaagaccagcctgggcaacagagtgagacacctgtctctacaaaataaagaattaaaaaattagctgggcctggtggtacgtacctgtaatcccagcagtttgggaagctgaggtgggaggattgcttgagcccagaagttgaagctgcggttagtcatgatcatgccattgcactctagcctgagcaatagagtgagaccctgtctcaaaaaaataaataaataaaaattcactttttaaaaaaacctccaaatcatagacttatgggaaaattttattactaaaatgcatacatgaatcttttttttaagacagagaaaatattttaatggtacataatattaaaatgtatccatttttgtaaactcatcatttctgatatttttagacacatacaaatgtggaattagataacatttaaaatttcaaaaattttaaataaatttaaacataattaaccttaaaagtatattaaataggacaatgtgtatattagatttattgttatcatctttaaaaagctgtaacagctggaatgcatacatgaatcttgcatgctgttagcttggtgggcttggagtgagactcctaagttaatgagtctggctggcctaagagctgtaccttgatatagcttcattattttttattctcttcctacattgaaacgctttaatttcaattttttctttcttgggagtaaaagggaagccccccgccccccaaatccagttgctaaagttggtaatggaaatcagaggttacgcttaaccagaaaatggctttagaaattgctttagattgtatttatagatgtattaaaggtctaaaaaggtgagttacatttttcagttacacttcactctgttttatgaaggaaattatatgccatggagatagtcgggaatttggagatttaaaaagctcttgggatttatccctcacaagtgttaaggagtctacttaaaagcctaatgggaaacacatttattggaattgattaatagtataaactcagaatgataacactgatcattgcctgccaagtagacattttaattggtagctgtgtatctaagagtttcaaatgagatcttgatttattactgaattgaatgtatcttggtacacaaatatttcagtaaaaggaacctatggagtgggggaaagacagcttggggcaaatgattgggaaatcctagtaaggtagagggaatcatgaattggaaatcagaatacacaagtttaaatgttggttctgacactctctaggttggttcttcaattgtacagtagtggaattgggtgagaagtttttcagttctttcttgatctgacgttccatgtttctacattctctttggtcacagtgcatgcaagagatgggaaatggaaaggcaaaccgactttatgaagcctatcttcctgagacctttcggcgacctcagatagacccgtatcttttctggagcaacttagaaggctgagtggtattttgatgcttggggagagtcagacaagactccagtcctgtaatgtgactgggtcatctctatgtggattagtcagtgtccttgcttgtcctctgtcctgcaatcaaggtgcacaaaaagcacatgtatttgtgaatgtcggaattgtcatacggtgtcacttgaagaagactcactctggaattaagactgcagtgatttcactgtgaattcttctataaagttacatctccactagtttattttggatctctgaaactattgtttgattaaaaagagtagttcattgtgctctgttaaccctggcagtcagcaaaattgccattcatttttatcatctttttatgtcttgggtgaaagaattaactgttgtttaccagtttgtcaataaccaataactttcttccaccatctgttcaacagagcatagcacctaggacacaaaaccaaatcccttaaaggcagtgcttctcaaaatgtagtttgtagatcatcttgttaaggttcttttttttttaatgggttcaggtggaacctgttaaatgcagatttggggccttgcagaagacccactggtcagaatttggcagtggggcacaagagtttatgtttttaaggggcacttacgtgcctttgtttgaggcctattgacctaagtgctttaaaatagacatttgactgctttacctatattctagaacagccacatacagcctctaatgtcagtttgaaggttaattccacttgctgctatcatcacgctgaagggaaagcataggaagtaatgattccctgctttaactgtgaaagaggcattttaaggttttggtcagagaaattgcatatgaagaggcaggagccatgtggggaaaccaggcaagagggaaggaggagaacaatgctccgtggaacacaattgatcttttatcttcttgctgtttgagaggcttgttggattcatccttaataagctttttgcagagctgttgaaggatttattcgagacaaatatgagaagaagaaatacatggaccgaagtctggacatcaatgcctttagggttggttatacatctttcaagttttgtccacaataagtaatgtgcttattaaatcaggccagagaacacgttgaagaactgctaccaaaacactccaaaaccatcttttaaaaaatgcaaaagtagaccaggtgtggtggctcatcccctaatcccatcactttgggaggctgaggtgggaggatcacttgaacctagaagtttaagaccagcctgggcaacaaagaaagacccccatctctacaaaaaatttaaaaattagccaggcatggtggtatacatgcctgtaataaccagctacttgggaggctgaggtcggaggattacgtgagccagggaggttgaggctgcagtgagctgtgattgcaccacttcattccagtctaggcaacggagtttgaccctgtctcaatataaatttttaagcaaaagtaaaaagtgccagttactgagtcaagaccatgaggcagaaacaaacttctgcctatcggtgaattcttgccttaatctgtagttagaaggtgttagtgatgattcccagttttgaattatttcttgggatggacatgttgcatatactagatcaaataaaacagtatatgtgtatatgtactacagctatatctatctacatagatatatacacacatatatacttttttcctgtaaatgaaatcaacaaaagtaggtgtaattaaatcaccagagtttccttcagtttgaccaatgtatatttccagcattacctgctgataaccagtgtgttggactgattgccaatgggacccttgtttctgagaagggtttcagagggagactggctaccagttgccaagaacacattccatcctaggcatgtttagaatctgcaatacagtatatgataactaggacaaatataacacacagggggacagacagcatgatttctgaaagaggaaaatatgcctaactaatgacagctaatggagaaccaatagatatgactatttatacctttaaataacctttgacaagattctacagaaaattctcttaggaataattggctatttatctagtcacagaagtattgagagtaagggattctccacttccagcgcaggtcctacctatctatcatctattctagttatgtaataatgatataatagccagtgaaatcactgtttgcactgagctccaagcccttctgggtaattaaaagttaagctaattggaatccacttcaggctgatcttatgaagctgtgtgaaaggggcattaactggtaggtgaatttcaacacaggcaagtaagtgtaatacatatagttaggtaaaaatgattccttctcaactgtgtatgaaggactcttaccttgcagttatccagaaaagggacttgtcaatatcatatctgtgccaagaaagaacccagtgtgcagctacagcttgcatggcatcatcaaaaacagtttagaacccaagcatacacatttcgttttatttgtagaaaactgtggtctgtctgcccagctctgttcattgtgcctaaagatatgaactcagatgaggtcagaaaagggtatctgagataattcagatgacgaaggagtagagttgctatttgtacacagctattgtggaaacagcagctctgccctcagggtattcatgatttcattgctggtatactgtacccatgaaagcaagcccggttaccggatgtttctcttaggaaggaaataacctcccatttaccaaaaagctatttcagaatttgttatttaatgtacttagatttttttcatattttgtgaagatttttatgccaataattagtatttgctaagtgaagacgtttaatatcaaatgaaaagaaactggctttgttaaaaactattctttttataatggacagataaaacatttttaacttaaatgaaatgtcgtgttaaagacatacactttgtatgagaaaaacagctgcatgtattgattataaaattattttagagaaaatgaaaattaaagtgaaatatccatacatactctcactatctttgctaataattatcttcttggtgtgttcccctttttttctaaatagtttctttttggaggcataattataatacagttatgtagacttctcgtgccttcattccacttaacatatatttctgtgttgcttatatagtgtttataatttttaattgttgcatcatctttcagtgagtagctaaatcactgaaagtaataatttatttaccatttcccttctgtggcataaatgttatttaattttttttagcataaataattctggggtgaacttggtgcatttaacctttttcatattttggactattttcgtaagatacattacaagatatggtatcatctaggtcaaaggatttcaacatttgtctcttcctagttttgccaatatactttccagaatttgtaccattttactctctcttctcagcattgtataagagtactggtttcacttcatccctcccaccattatagaaagatctttctccctgcataaagtgcattttaaattgcattttttatcactggcaagaccaaacatgtttttcatatgtatgctatactctgtattcttaaggttactttgtggttttgttttacatttagatgtttatttgattttaaaacttaatttttgttcttctaatctgtaaacttgaaattaaggtttattttctgactgttaaaaaaatgaatattgagaggacctatgattgaatttatgatatcacaaaggacataagctgagtaagatgaacttattcactagtatactgatatgaggggagacctctcaaagcatgggcaaattaaatttggggcacaggtgggcagcatactggtaaaatgttttagcgtctgtacatagcctcgactgcaaatgtcaacagtcatgagtgggttaggagggcgggcgcctaaggtgtttggaagacgcctcgtacagcattgaggccaatgtggaagaggtcaactctcatgctccacaccaagacaccgccccccaagcttgtcagacacttacgtcagaatcaatagggattggaggtgtccttttcggacacttggaattatgatttatccaactattagtcaccttgggccctgtgttctttgtcttgttaaatcattatagaaagaaaaagatgacaagtggaaaagagggagcgaaccagttccagaaaaaaaattggaacctgttgtttttgagaaggtgaaaatggtaagttgggaagtatttgcactgtatggacagcctcaggtatgtgtatatttgtgaaagggaaagtaggaggtctcgtggtgagtaccattgcaccatcacagctggggctaaagggttctgcatctggattggactgcctgctatcatttctgctctctcgttaccagttgctgcctaaatctgctctgtaagggcttcgctttggggccagatgagaactcaggaaatgcatctgttccatctaagcaagaggcacattccaagccagaatgccaaggctgagggacaccatctgagcagatgctatttccacattagtccttctcttgttagaccttctgtatcccattttctgatttcaatgaagaacagtccagaagtgaggccatattagtccattttaagtgatcccttcttatgttcttgctttgtcatgttgaaacagacacccttctttttccacaggacatattgtggctgtagtagtagaatctctaacataaaaacttggaatcttgggagagaggactttacttactattgcttaaggaagagtcttttatcatcgttctgaatcacattgtctgtggacacaatcactagtgatactggcagagtgaattaggtaatctttaaaccaacctcccttttggtgttaaagtaaaaggttttctaaccactgggagatttgttggctcttggctcttgtaccatcagatacctacctttattcttggcttttcctgggaccaaaaactgctgcttctgttggatcccctgttctgtggttgtcttggtttcagaaagatctgtctctttaggacaccagacaatcacaggcgatatctttgtttttcattttaggtttggtttatgcacttctgcctcctgacttgattctttcacctaatacttcctgagttttgtttctttggtaactctctttgaataacagcagccctacccacaagaacaccgtggctttacagtggagatgggaaaagagttcaaaaccacctgcttatttcttgctataacatattttcaccttagccacagaaaaaagaagacccacagctacctcggaaaagctccccgaaatccacagcgcctgtcatggatttgttgggccttggtaagagttggacttttcagcttccatgttcttacaaattttgataaattctcagtgaccctggaagataggtagagatggggttctccagttttgtcttcattgccaagactgttctctcacattcttcctgatctgttttacatctgagcagttgctctaaggaagtgtttactgtgacacttttcagagcgacagtgtggtgtagtggttaagagcatggcctttggagccagtgtcgctctgtgttacttactgtctgtgtgaccatgggtagtttacttaacctctgaatgttgctttcataatccgtgcagtgagaatgagtctctacttcaaaggtgttgttggaaggattaaatgagataatgcctctaaagctcttagccccatgcctggcacatactgagccctccataaatgttagcagttttgctaaacagcacctttgagcctcatgtcaattccctgtactccactccctgcccccattcctttcatttttcagatgcaacctgtttctgagatggcctgtggtcatttttctccaaacctttgaaatcctgaactagtgattctgccctttcagaaagaaagcctgttgtctgcctttcacagcactgatggttgcactttgtttccatccgcttctgctgattgaggttattggctacttaggcttctaatttctgtacctttccttgctctctgaaaatgaaccctcctccataccttgcccttcaaatagccagaagggagccagccagccccccactgtggtgctgaaatacccttcaggcctgggcgtctgctgccctgtgcctgatagctgggctacaggcttccccagagcactctgggaatgtggggtgaagcctcttttgagaagccccgtccatgctagatggttccagaagtctagatttctaggtccatgagcttatgggccacctttgctttttgtctagaatagaaggaaggcatgggcttaataagcagtgctgcatcttaacttcgatctctctttctagatgctcctgtggcctgctccattgcaaatagtaagaccagcaataccctagagaaggatttagatctgttggcctctgttccatccccttcttcttccggttccagaaaggtgagtcttgtgggctcctcaggattaaagaacattctgaaatgggtgattttgatatcttaatcatggaaccacgtcatgcttccttggtggagttggactttggttttcttgattcttcattcttcccttaacattgtgtcatttctgtcacagtctaagattgctgttcatgcctttttttctcctgctcaaaaagggtgggccatttgagttgcttctctggaaagtgtgtgatactgtgaaggctgatacttgaggctagctcctcggcctgagttactgccagaaaattgtaggtaggaaagacttgaaacctttaatggctaccattcgtgaaacgcctgctatgtctcaggcacagtgtgaggtggtttttgtatatcattttgtatatttcattaataatttcactccttcaccacaaacctgcaaagtggaaattttacagatgtggagacattagtttgtaaaagttatgtgactagcctgtggttatactagtaaatggctacactggggtctaaactcagttccctctgctgcatcatttgtgggttgttttgtttgtttgttcctaccaaatcacatgttttggtgaaaggaaagaattgtaacagagcttaattatcaggtgtgttcagatagttgaatggtaaaaatgttaggaagctattaacttgagccatgaattcttattgcagatgttaggagcagcagagagggaagggagacccttaaagagacccccatgagaaccatttcaattctccccccgccctctttgccctaaggttgtaggttccatgccaactgcagggagtgccggctctgttcctgaaaatctgaacctgtttccggagccagggagcaaatcagaagaaataggcaagaaacagctctctaaagactccattctttcactgtatggatcccagacgcctcaaatgcctactcaaggtagatttcatgggtgtcatggccatgtgccaggtagagacatgagggcttccatgcaggaattatttattgtgacagaggacagttgctttgggggccaggatgtcatacaccaaacaaacctgaacatgaccaacgtatcagcagatggaaattaatgtaactcagagtcatacttctgtggagtctggggtcacaattcggtgaagtctagctcaaggtctggatctggaccctaaagggaaaatggctcggtcagcagcccattggtaagctatagcaggcctcgtagggactctaactactttgctgtgtaaagagcattgtgagtagagtaatcctgagaaattccagctggaaagggttagccagggagagttcgggctgactttatgtttttccctctttaaccaacctgtatgtgtgttttcttggcagcaatgttcatggctcccgctcagatggcatatcccacagcctaccccagcttccccggggttacacctcctaacagcataatggggagcatgatgcctccaccagtaggcatggttgctcagccaggagcttctgggatggttgcccccatggccatgcctgcaggctatatgggtggcatgcaggcatcaatgatgggtgtgccgaatggaatgatgaccacccagcaggctggctacatggcaggcatggcagctatgccccagactgtgtatggggtccagccagctcagcagctgcaatggaaccttactcaggtaagctaccccattttacttgcagcaagagttttgagccttcctcaagtttttctcggtttgtacctctccactatcctttgaatcctttccatgtagatgagataatgtaagagacattgttaggtttgctttttttttttttttttttcctagaaggtctgtctaaagtcagactttctgaggagttctgggctcctgtagaataagcccaactgcctaaatctgaatctctccacacattctcaaaagcaaaaacaaacacacaaagaaaccctgtacaaacaatgaatgcagatattctcacaacaatctcatttggtagacagaatactgcaaggttcaaatggcatggcaatgggcatataaacaccaaatccagcggagccagcatcacagaggagactgtaaaaagagaagatggagcaggggcctagcaataataccacagataaagtaaccccccagaaggagaaggacctaccctcatcaaagacatactgagaacaggtctgagatgtggtagattagaactctgtttacttggaggatcaaaaataagagacttcagatatataggagtataggtagtaaccttgggaaagcattgcttctcggggagatgggcatggcctaaaaggaggaggtaccctttagaggactggtggtgaaggaaagaaagacacgagaaatgggaatgagaatcacaaaatcaaatatacaccttcttccctcttccaaaataaccacttcactaataaaagatggtgctcttaatctaagaaatttagtaagcctccccaaaccttcacacctattattgctgattgagaaaaaataagaccttacaaaaatgaaccaaacatggaagctgacatttgtacacaactactacaggaagaaaatagaaaatgaaaatcaaaacatttcacgtaatgaatattctccctcaaaaaacagtcatgaagcagaagaaaattgttacacaatctaccaatctgaattaaatgtccttaaacatttgcagataagacaaaacaccttaaatcagaaattcaaaaacttaaagccaaaatggataaaaaactgcatgctgtgaaatgaaagtttactaaactcagaaaagaaattgaagaaaaagccaaaattttcgtataaagactcaattacaagttagctaaagaacaatagattgagctgaaaatatattcggcattgaggaaaggcatgaaacagctaagagaatgaaaactaaatatagaaagtagtaaaaagaattagatggaaattaatatggaagttaggcaaagaaaacttacatatatttggagatgcccaaagaaataaagacaaaataaataaaatatgggacagtattaatgtgtttaacaccagaaaacattctagaaataaaagacttggatataatatggaaagagcccactgtgtgtctgggaaaattgacccagaacagtcaactttaaaacatatcccagcaaatctacagactttaaagaacattcaaaatgtttaggggtccaaccttttccatacctcctacccacaaaaatctgttacttagaacaaacaaaaaatacccaggttgacatcagacttcctagcagcaaaatacaaaaagaataacaaggagagtagtattttaaagacactcaagtgtatgcaagacacaacaagtattttacaaccaagccagccaagctatccttcaggtatcaaggctgtaaaaaataaatatgcaagaactcagagaatatcacacttacaagactttcctggggaatctaacagaagataagcttcatccacctaagagatgactggggtcattttcatttttggcaaaagaactgatggtgagaattgaatgtttaattgagaatctaagactaaaacaaaggtggtgacaagcgttgcagaatatacattatattctgacaaacaaatacaactgaaaatgaaggaggagggagaaaagttgaataataaatattgtatgggaaagaagtagaaatcgaaggatgcaataagctgacaaaccaaatcacggaagcttgaataaggaaaaaggagaccaaggacattgctaaaaagtattactatgaaggtaatcactagaacaaacacgtgaaatgttctgaataccaagataattttcttcctttcttttttttttttttttttgagacaaagtctcactctgtcacccaggctggaatgcagtggcacaatctcggctcactgcaacctccgcctcctgggttcaagtgattcttctgcgtcagcctcccgagtagctgggattacaggcacccgccaccacacccggttaattttttttgtattttttagtagagacggggtttcaccatgttggccaggctagtctcaaactcctgacctcaggtgatccacccaccttggcctcccaaagtgctgggattacaggcatgagccactgcgcccagctgagaatttttaaaaacagactacaaagtgcagcaaatacaataaacacagtaaaaatctaatatgatggagttgagaccaaacataccagtcataccagtaggcaactcttctatcaaaagaaaatgatgttcaaattggctaacaaagcaacactagttttgcactaggtacaaagaaatacaaagtgatttaatgtgaaaaccaagagacaggcaaaggaaccccagagaggtggtatggtgcatgtgtactgcacatgtgcatgtatagctatctttatcagggttatacttatttataagaagtacttttatgtttttgtttctctgtggtccagaataatttatgtagctctggtctttgaaggttttgtggaattcccatgtgaagtttgtgggcactattgctttttttgtagcaaatctttgatacttttctctgtttcttctatggaagtcaattttggaaaactgtatttacctagattttccatttcgccaaggttttcaaatttatcaaaagttatgcctagcagtctcattaatttttttcaaagaaccaggatttcgatttattggtgctacatttttccgttttctacctcaatttccgtaggctttctatgggtttactttgttattttctagctttcatagtggagattttaattcacttattttcattgtttcgtttttatttatataagtaatggaatgctataagtctgatgggaatatgtcagagggacgcatgagccaacttccagtggctctgactggccaaatgtgagacaatttgaacatcaaaaagagtaacaacagtaatggattatgacacactgaatggaaaaaacaaaacaaaaccatgagtccacggtgatattttttaaaaaccaggtgtggaatggagggaggaaaagccttctttacagaagaatgacagtagttgtaaaaagagcaaaggattgacacatttgcaaagaaatgcccttcagattatttattaattataatgaaagaaatatagtcactacctcagccaagtgatcaaacataaaattactgacagaggaacaaagtaatgtcatatgcttcctgatattttgtactaagaaagacatgtgtcacctccatagaatcttgccaaaaatattgaacctcgatccaattatgagaaaacatgagatgaatccaaattgaggggtatgctacaaaataactgtcctgggttcttaaaaatgtcagtgtcaggaagaaatggaaggaagtgttagggaaactggtctagcttaaaggagactacagagatctgaaaatgaaatgccatgtacattagaatatggtgttaatgttaaaattcttgagcgtgttcattgttttgtggttctgttaaagtgttcattcttatgaggtgcctcctgacttaggaatgaaatgtcgtgatagctgcagcttttttttttttttaatctgcaacttttgatactcatcaaaaaaatgtaagtttttttatagggagggagagaaaatatggcaaatgttaacagttggtgaatttaaggaagaagatacatgggttttattgtactattgtttcaacttttatgtcagtttgaaatttactttaaaagttggtacaagaaaataatagtttctcctaaagaaaaataacttatatagaaaatttactaggcttaggaaattcaaggcatttttctccataaagtatttttctgttcactgctaggggccagtctttccatcagattcatgaaggacccccgccccatcctgccccaggccttattccactgactgttttctcccagctccttcccttcttatacactgaagacacattagtcttcccccgcccccgccccgccaccgcctttgttcattctgaacagtccagttcctttttttcccccttgtgcaaacgagcaagcctgctcaagcgctttccctgacactgacagtaatagctgtgctgaagatgaggcgggagcactggggagggggctttcctttcagcttttaggattggccaggcaagttaacaataggccccttctatttaggatgagggactggaaaggaaaaagagaggaactcatgctgattttctgtcgactagatccagatgccaggatgccttctttccctccctgagctttagtctccgtcagcattgcactcccaaaaggtcattcacgtacgtggccttgaaatgatctgactgctaaggtccagggtttactgtccataacagagtttccctttgtctcattctccccatcctggcagagaaagggactctcaccctgccttttgcactaattggcggaatgcccacagcctggtctgaaagtctcctctctccctttcagatgacccagcagatggctgggatgaacttctatggagccaatggcatgatgaactatggacagtcaatgagtggcggaaatggacaggcagcaaatcagactctcagtcctcagatgtggaaataaaaacaaaacacctgtatggctgccattctcttcagccctcgctctcccctttccacagcctccacccctgacccccatcctcttttcctacctctctgtttggtttagaaattgctcaataagtcatttggggtttggcatcctgcccagccacttcccaaacatgaagacctctctgttgctttatgttgtacatgccccatagccatcccaacgtcctccccagtcctctcctggcaccagcaccttagaagttgttggcagaaggcacttaaactgtgggagaagtgtgcacacctttgagtcccttccctcaaggttaaagctcctgtcagactctcagaagggtctgtgggtgttgtatattaggcaaacaggggaaagcttagaggtccttctatatgtgttaataagctgtttctaagtgtttaaatttgaaaagcatcatgttctcatgatttatgggaatgaagcaagtactgaaatcaaattaaatactccctgggtcctgggtcagtttgaccctagccctggggtgaggcaagccccctcctatgaggatgagcaaaaatactactctcttcgccctgagttgctttctggatctggggcttcaggacttgctgcttcagtcagcctttattagcaccaaagactttatgaagatcccacacacagacacacatcccttcccgcctcccccctgccttcagtaggatctggctccgtggctggaggaccaacccctatagtgggaatgcagagcttaacgtgtactgcttgtgtgtgtgcgtgagtgtgtgtgtgtgtatgagtgtgtgttccgcctcccaccctctccccatctgctctgggtatttttgtttttgtttagttttaggtttacaacagagaggaattaatttatcagcagcctaaaactgttgtgtttttcttatggtttaaaaaacgccatgtcattgataactccctttctcccttcccttctcccggtctgctgatcactctttcatgcctgtgtatccagggtgctctgtttccccaccgttcccaggtgtacgaggcagagggccgggacagctttcctctcagtcattgttcaccccacttgaaaattcagacaagaaaactttgcttaaaagatttcatgtgtgggaaccacagttcctggctgcctttctcctgtgtatgtgtaaattccttaataaatattgcagggaaggactgtttgcttggccatta

SEQ ID NO: 8718 - DNA, 969 bp, Homo sapiens
gacaggtctgagcatggtgccgattaaattctccattgaaatgtacctttgtgggtacattaaattattttagcataagtctagtgaagtgccagcagtagatactatgttatttctggagctcttgatgttgatttttgaggctgaacatgctcttagcctcaagcaggtcatatttggaatacctgatgtgtgctcctggttgctcagtgcttaggatgcataaacaggtagctgcagtctcatctctcagtatatatacttttcagcaaatcttttttttctagataaattggaaaactaccttttttctgcatttttcatctgatgtcattatggtatgtaggtggcagctttcttgggcacagttgtctatataactgttcatcacatgagtcattgtctgtttctgttcttctgcctgaaaattccatcttggaaatcgtgtcatgcaatcggtgactgcgacattctacttgttatgtacactgccactggctttgtatgttatgttgatggactctacctgtgctacagtgaagggataaagtgacttattaaattgagtcagactcagttcctccaaatggtatttcctgtaaaaatgatgccaagcaagattctgcataaaacatgcatatgctttacactgtaagcatacagtgcctaccttttgttattgtgtctgcttaaatccttaccacagttgtactcctgtttgatcaagtggccagtttaactagatactagctttgaagaagttctgtattggcccctggaatgtgacagttcataccacattgaaaaggtaagaaccaagtctttgtagagtagaacaccttaaagttaatccacttttaccaaattcctctattgttaaagcaacagtcctatattggctaatttttaaaatcataatgtgccacactttacacatccctagaatgtaagctagggggcaggggccta

SEQ ID NO: 8719 - DNA, 365 bp, Homo sapiens
ggaagcagatgtgtacaaatataaatgatgcaatacagaaattattgtggcatggtatacagggagaaatgaaagcattgaagaaggcaaagaagtcttcctcgggaagtcatggcttcaaagagaaaagtaggctgtgtcttaaaggataagtatgactttgccaagctaatttagggaactttgtattctaggaagagggaacagaatgtgcaaagcctcgaaggtgcactgttttgtgtgtgtgtgtgtgcgtgtggggattctttagtatattttgactgcatgttgaggagtgatgaggagtagagtttgacaggtagtcaggatactgtaaggttaaaacctgagctctgtggttgact

SEQ ID NO: 8720 - DNA, 208 bp, Homo sapiens
ctaggcaaattggctcctgtattgaatatgtatttgactgttggctgctgccaggagcaacttatcgtttggttactcagaaaataagttcccaccctgtcaattctgggaagtcttaggtatggtgtatccacattgagtatatctacaactggacagcttgagttagtcacacagaagccatacacagaaaatgttgaggattgca

SEQ ID NO: 8721 - DNA, 8473 bp, Homo sapiens
gctctacctcccgcggccgggactaccctcagagccgcgaccgccgcggcgtgcgtcccgggcctgcaaaactgtttccaaactgcccgggccggaggcgggcgcgcggggcccggggagatggctggggtctggggggccgagggtgtgtgtggacgctgggagccgcggggggaggccggcgtcgactcagaggagttgcaatcgaggtatctgcgctccggcttcctcctgcggcccgcgaccccctccccggagctgagctggggaagggagaccagggttcaccacgttagcattcgcattcctgggaggatgcagccctcgcctggacctgggcgatagacgccttcttctgtttttatttttggaggggagcgccctgtaattgtcctgaacacatgcttcccccccttcctccagccacccgcggaggagagagtcccccttttttgcatttatcttttccttcccctttctttattaaaggtccgggagtggcggcggccaatcagcgcgcggcttccattttgtgagttcaactccgaggctcccgggcttcgcgaggacgcgtttgcagccccctctgccgctcctctctggcggccgaggcgcaggagccgcctcgccggggctcggagctggtgtagctcatattggggctcttttcggggtttgtaatttggccgtgggtaggtaattggctggagcagggcggcagggcgcggcagccaatcagcgcgcggcttctatagggcttgagttattagacgctgatctcaaaacatccttcatcagacacgaaggagaggccaacagatgagggaagccatttttctgcaatggaattaaatggccaagtgggtttttcctttgttgcaaatggggaatgtttttcctttgactctaccatccagttcaggacgtctcagtgtgtttaacatttgtcaacaggcccaaggactcacagttggaagactggagaagactttttaaaaagatctggatttttccttatgacttggaatccatctttgtcttgtataactaggtcatagcacaccattcatgtcagcagttaacagttttgaattccaaaaaaacctaagtaaatgacatattttttttcctctttttgttctatgggtgggtggggggagcttggagctgtcttaatctgtattctcttgactgaacaataaatttttaaatatatctagtttcctctattaaacacttaaacctggccatcttattaactccttctctctttttaacaaggtaatgttttaaatgtatatagctttaggactagcgaaatggcagcaacaaaaaattgtgagcagttgttactcttttagtttttaaaaaaccttttacattgtaagtacccaatccattctgtcctgacgcagtacagttttgatgttaatgttgctgagatgtccttaattttccgaaccttcatctgcatgtatgtctttgtctctcttgtctaatataagccagttaagatgcttgagacgatcttgctttataaagctaaggttctagctttatgcttttgaaaatgtttacagcactaaatgctagtcagctttcttccccgtagcttgtacactttctttgaaaatcgatctatttgaagaaaaacagccctgtttttctcgtctttggtgttgggggttggggggagctggtgggtgagggaaaggaagaccttttctttgtgtagagagactaaagccgtcacaggaaactagattaaaactggaaaacaagtcctagctggttccagcaaacaccaacgttaagtggggggtattttctatggtggttgggcggctggtgcgtcttgtgccttttgtttgatttgactgtattttcgccttttgtctcttaatgacgatcacaccattgctatatccagagcagtaaacagtcctcagcgaagccgcctttttgcctacccaaccctggaaagtttgcagaagtggaaggagcagaacgtgagggtgtaacttacaaaaaggtaataagaacaaagacaccaccataacccccaaatttcccaactaaatcaaaaaatatatatgtttttacaataacgtctccaaaaccaccgcccagcttgatcttctagactccatggcaccgggctgagcgggtaagtaagaaagataaaaagtgccttttgccccttcgaggaaacccttttgcaggccaagcaagggctgcaagtgtttgggagctgagaggagaaggaggattctggagcattgtatttggcagccggagcgggcagtgggcggggggttgggacacgaagggctcttcggacccctgtgcctcttctgccccaagggcgagaagacgggcttcgcagcgaccctcgggggtccatggagccgcctgccttcgccccctcgctcttcccaggtctgaacctggatggggagaagaaattgaagtgctttggagacgggggggcttaaaacactagggagcctcatcgcccagccttgggcccactttcctttcgatcgtgaggattccgcaccccgaagccggcttctcggggctccggggcgcgcctgcgctggcaacgcgaaggaggacaaaaggccggcgtccatgttggcaccatgacgcagcatctccgcccgcagcccggagctgctgtcctcccggccgcgctcgctcctcctcccaaacaccagttttctttacaggcttcgagcccgtcgcggctgggccgggctggtctggcaggcgggcccagccgggcagggctgctttgctaatggcggcggctctctttccttccttcctcctttcctccgtccccccggtcgtggggagcccggagcaggaggcgggcccgcggccaggtcgggccccgagagcccgcggggcgcagcgctggcgaccgggtgtcgggggccgtttcgggggccgtgggcctcgggggcgtcgcgcgccgcgcctcccgcgctcgcctcagccgggcgcggcggcctgatgggcgccatttcgcgcgctgcccgtggctggggcggtggcggccgccgcgcgccgggcgggaggagcggcaggggtagggggctgggcgacccggcggcccacgcgggcaccaggaggcctcgccccggaccgcttccctctttcgtctttgtcctgcgcgggcgcccgcagccgagggccacggggtcggcggggcttcgaggccgccccgggtcccaccggctcctccggaagccgcggaccggcctggccctgaccccaggccgccccccgctgcccacccagctctgggcgcccaggtccgacctcccagtcgccctctgagagccgagtcagcgcggggcggggggtcgccccctttgtcctcactcagggcgggaggccctcggggtggccgcagacgccccgttgggcagccctccagcccagctctccaggcaggaggtgggggaagcctgggaaagcggagggggggccccgggatcccccgaggcgcggggctcccggcgaagcctcagatctccggcccttcccggggagggtgcgggcggggcgggcctttggaaatgcagatgagccgccgcccgggccggggttgaaccttctgactcagccacccccggccgcccgggccgctgggggaggggcggcgtctggggtgctccctttcagccccggagcccgtctgctgtgtattcggccggtcacatctctctcccccaacgccctgatccgccctccaccttcctctcctccaggttctgggccggagaaggggcgacgttcgggcaccccccgaatggacaatctttccttctgtcaacggcaggggcaggcctagtttgactctgacagtcctcccactaaggtaggtgtgagtacttgcccagaccgtgagggagatttggggggctctggcctgcagcccagggagggccgaaccccaaacacgccgggctggttctgcgggcccggcccaccccacccccccccccccagctgcgagcgcgtagggccgcctgctgggccgccggggccatccatccccgtctgtcagcttctgttgtcaggcatttggggcgtgtaagtctctgccgaatatagcagcatacgagaggatccacttgcaagtatttcccagttgtgtgttcttcggcggggggagggccctgggtgccgcctacttctgaaagacacaggtcactgtcagaaagcccaactgtgctgtggccttccctccagccgcccccgtggggcatgtggggtgacagtgtgagccgtcctctgatgtctggctgctagagaggcaaagaacagagacccgaggttccggccacctttctctatgaaagggccttccttgacgcttctccaccttcctgggattgttttcttctccagtccccgaatgggcaggcctgtatataagccttgtttctagaaccagacaaagctggatttgaaacctggcgagccattgaacagctatggccttgcgtaagcggtatagcctccaagcctatttctccatctccgaaaacagggctagatcagtggttcttagtctggaaccggcatcagaatcacaccggaaggggggctcactgaaaatggaccaccgggcctggtgcccaagtgtctgattcagtgggttggtccttaggactggcatttctaacaagttcccaggtgaggtgaggctgatgctgtggtctgggaacacattttgagactccagcccctagcctggtaacacctggggttttgacgcagaagtgccacgttccacgcttggcacatagtaattgatttcattctaacgctagccgacttcatgtattgaatagtttcccatctcagtgtctaagaagctccacagctggagatggcggcccttggtctcggagcccccctccttgtgatttctgctttgtgattgctttgatgaaccatttgggtccaggtgctcctgatcacaccacctcccctatttgggacttgtgccccactcccgctgtgagggctacaccgagctttgggggcctgttcggattaacaaggagatcttgctaaaggtatcttggtgctaagttaagggagatagttcgccatgggctaggatctctcagtgctggtgaccttgggtgagtgtctccctgtaaagtgataaggatgcctgctggaaagggtggtgggaggattaagtgcgttaaagaggccctcctcccaagcttttagttggcctccattgtgatcgtggttattgctgggagtggctgcagggggtgggggctgggctgcctcagagcttccccccgcaccagcccacctgctgaagcacgtgtccctgcctcagggcaaaggggaatctggcgctccctgggaaggcggccaacgcggttctcctctggagtggttgagtccagctgcaggcctttccccatccacaggggctgttccatgatggggtcaagatttgggtcacccacccatggtccggggagaagtgactccccaaggtcacaaggccaccaccaatagagccaggatggggttccaggtggcttgacttggcagccagcgcctgtgcccatggcaccccctcaccccagctgtctgggttattttgggcttcctcccgtgccagctgtctgctggcatccctgcccgggactgtctggttggaagtaactggcgtggtgctgttggctcctcctgtgagggccagggctgggtcttcaatccccgatgagccgtgctgggtccagctcctttgctgggagggaagagtgttcctgcccagactccccgctgcccaagtacagcaagagggcgaaagcacctgataaaaattgaggttcacattgttaatatcccaaaagcctcctccttctatactccctgaaacctgttttaaatttggctctgccattgaaccccgttgctctcacgttaccctctgccgcccgagggtgtggcgcctccctttagagtcttcgttgctctccgggtggggtctttactccccacctgctttggataattaagtaattgatgtacgtctccctcccagctgcaccctggagggctccagccagtttctcccctccctggatccaatcagtgagctgttgggtgctcagctgtggtctggatgtggttctcggcacggtgtcgggacccacctggctggactgtacccctctctctctgctttggtccctcttctttctttgtccccccaccatcacctcttggggcagggagggtgaggcagtttgtcctcctgctgctgttcctgctggtccctcgagggcgccccgcccaccggtcacccagcgaacgcggggcggggccgctgctggcgctgggccccagggcttgcagagagagggccacgccagcggaagggccggccaggaggtggcaggacttgccttactactgagtcgccggcatccccgcctcttccggcctctccgcccggagccctagcgtggaacatgacctttcggaccctctgggtggagacacagcctctgcctgggctgtgcagtgaggtggcaccaccatctcaggtcgtctggcccagtgcatctgtagctggcatgtgacttccagcaagctcctgcccctgagcgctgggaggagcaggtccagcaataatttttttttttttttttttgagacagagtttcgctcttgttgcccaggcaatggtgtgatctgggctcaccgcaacctccgcctccagggttcaagcgattctcctgcctcagcctccgagtagctgggattacaggcatgtgccaccacgcccggataattttgtatttttagtagagacagggtttctccatgttggtcaggctggtctcaaactgacctcaggtgatccgcccacctcggcctcccaaagtgctgggattacaggcatgagccaccgcgcctggccggacaataatgttttgagctgttgctgagtctggcttttgtgacgggaacttttagcactcaaggagtggccttgtctctggcctgtccccgagtgctcatgggcagccaaggcctggggactgctcaggcagggtagatgtatttgccaggccagctcccgtccctgggacctcagggagtagcttcatccctgaaggctgagtgtcttctgcctcatgtgggtggcccctctgcagggttctcaggcatccagggaagtgggtgccacagcgttgcctccagcctcactggggctggctggactttgctctgacaacacagcagtggctgggcccctgcaactctccagggctcagtttccctgttggccgcactatggcataggcccctgtgtggacaccgatgagctgaccccacaaatgccacccggccgctcccccaggcttcagtggcctaacagctgttgtgtcaggaaccagcttaaagaatctttcttgctttctcaaactctccaggaattcctggtgactggaagggggagtgactcaggccctcaacctctagcaggtaagggagctacctcctgggtgggcatgcccagttcctcagtgggcccagcgcggcccagcctccgaggaagctctgagcagctggcttggctccgaggtatttttagctacagatccagcccccctccatcaccacaacagtcgagtccaaatcaaacgcgctccaggcaggtggggctggggttctgccagcctcctggccagcaggggtgggtgggcagactggggccagtatcagctgttctgcctggacccaggccgggctgggaaggcacacttgtgcttatttcccgcctccacttctgtgcaagcttgtgctgtcataagcagagatcacagccccatttcttggatggagaaagtggacactgaggtctgaggcttttgaggacagtcaggagccctcctatgggctccagtgatgcactcaccagcttctggtcctcttcttccacctcttagagtgccttggctccctcctgtcgtcctggggaacctcggccccagccctgcctccccagccagtcacagctcctccctggtcaccctgagggagctcagggcccggctggtagctgggttgctctgcttctgtcccccactcctgtggagcctggcaggcaactccatgatctgaccccggttaccttgacagccctgcctggcctcccctctcatggcccagccaccccagaacctgaagaggttttctagctgccgtgcatttgccaggctgggttacccaccctactttccctgcctgccctccagtgctgccaggcctagtgtgccagccagcgctcagccttcagtaaagggttcccctgcttccaacctccattgcactgcttcccctaagactgtgacctcctggaaggctggagcacaactgcctctcaataaacgtgttgcaaaaaaggaat

SEQ ID NO: 8722 - DNA, 438 bp, Homo sapiens
gatcccactctcggccatgctctcgtgcctgtctgccgtggaccggctccaggggggggtccctctgccaccctgtcgactcatctgggtggtgcagagggcagtcagcccgcccagggtgaggagtaagaggaggggtgggggttacgggtaattcagccagcagccctgatagcactgcctacagtaagtgctcaacaaataagctgttttgatcaggggatgggagagttggggggattcctgggatgaaggacatgtggctgctggcaaggaaacgcattttcttacatttcttggtgggtgtggggttatcagtctccaaagctccaggagagggaccaagttgacttcaactagagctactccaacctgcccctccctgacgacgtcttgcgtggttcacgcctctggctcctgccggaaggaggcggccgc

SEQ ID NO: 8723 - DNA, 6195 bp, Homo sapiens
gtgttttctgcatcccctttttattctgtaagttccacctgttatattggctttcctagccccattgcttccgcatcttagctagtcatgctaaatgcttgaagggggaaagggagatacaagatagacaaaaccagtcccagacagatggacagacacggtggtacctcatccatcttctctgaggtcggggttctgtctccaaccaggtccaaggccacctcagctgtctggctcagaagcccagcagggtccggggggcctggctcaggtggaggccgaggcccaaggcccaggtcgagctcctcgtcctcgtcggagtctgggaggggtgttgggctgatatcctccaggccggtgctggaggggcgtgacgaggggggcgtggggccccggaagcctggctgggagttggtgccaaagggggccagtggggagagctgggaggaggaggaggagatggggctgccctccatctgcagctcggtgtccgagtccggctccctcaggaagagcagcttggtgcgctgctccttcagcagcatctcgatgcgcgagtccaggctgtcgtggggtttctctggccctgcaggggacgactccagcgtgggcgtgccagggctgtcacagggctcaggactccagccgaaggtgggccggccgcccagctccatgctgttggtgtcggggggcggcgggccgggtggcgtgcctggcttctccttggccagaggctcagcaggtggcaggggtgggggcgccggtgccctccggaactccccactgtcgcgggccccaaaagcggctgtggcggtgggctcttccgggggtggagggaagtgggccactggggtctgatacggagagaaagcagacttgaatccaggagcaggggttgcttgggcgggtggtggagtgtgggcaaatgtggctgaatcctgtggttgagccttgaacgggggaccgctgctgcccccagtgccgccgactgctccgaacgggaggtccgaggaaccccggaaagcggctgtggccccggccaccgcagtgaccgcgggagaattgtgtacataatgatgttcgtggcggcggttgtaggcgtccgtgaacttgctctcgtggcgccgggccttgaaggtcactgcagggtcctggctgaagaggtatgagggtgtgggctggcggctggagtagctggagtcctgtgagaaaggggtgcccaggcgcggtgtgagcggggtgccctgtccataggagttgggtgtgtccaggcggcagctggaataagctgtgtcctgggagaagggtgtcccaccgctattgggggtgacagaggaggagccggagccacagcctgcagacaggcctccatccttgaggcgcttcagggcatctgacagctaaggagagacagagatgtcagaccactgggggaaaacatgcaatggaacagggctattttcccttctcactctggctgctgggaagctcagagccaaactgctctagaactgcagcataaggaatggaagtgggggagattgaggaggagtgtcaggatggtactaactttttctctaatcttaggggtagccaaatatgttcagggaaccttgagggtcattcctaattccagaggaggcagagaaaaaagaagactgtaacatcttggtttaggctgggattttctttctgcctcaggctgtcagaaatcaaagaccttccaggcaggattatgaccaagaactacaatcttgtgcacgagaggatggccaagggctttgtcctcctagtcacccagtgctttaggatttaaagtgataaacagaggccaggcgtggtggctcatgactgtaaccccagcactttgggaagccgaggcaggtggatcacttgaggtcaggagttcaagaccagcctggacaacatggtgaaaccccacctctactaaccaaaaatataaaaattagccaggtgtggtggcgtgtgcctgtaatcccagctactcaggaggctgaggcaagagaatcacttgagcccaggaggtggagcttgcagtgagctgagatcgcaccactgcactccagcctggggacagactgagactctgtctcaaaaaaataaataaaacaaaaaaaaagtgatgaacaggccagtggcagctagtcagcctgatgccagggaggagctggcatgagactcgccccacgcgagagttgtccctgtgtcctggaaggcagtggtttggaaggagtcagccttgctctggaaggcagggcatgaactctggtttctgggtttaggggtagtggcatgcccaggacaccagacactaaggaccccggaaacagcaatgtttggcatcaacgtggaaaagcgggccagggcaggctctgggtctgtgggaatcacagcctgtgctggggaggggagaagccacaggaaacagaaccaatcccatggagccctactgcaggagcacttgggaaaatggggctctaggccctgctcccaattgtggggggcgtggccaggcttcacaccctcctaggccttggtctccaaagctggagtgaggtgggggtaggctgggggtcccataagagagttggtgaggctttccagaggtggggggcacatcaaagagctggcgatggggcagactgacggccataaacccacctgcagggtctcattcacgattggagagacagcgtccagctcgcccactgggagggtctggggggtgtatcggccagtgaccaacagttcatagaaccgcattcgggtttcccctgtagatgggcaggaaagggggaactcagtgaggttccaggatggggcagcccccacaaggattccaacctgtgtggcaccctggtgggtcccttgtgcccgagaccccagtcctagggaggctgtgtggccctgagttcccacccctctgcacctcgctcagggtccccacctcttcaacaaagctgctgagctgcaccatttttctgatcctgagatccagaagctcatgtctcctggggctgagactcccccaaacccaaacccagaggtgccacccgcgacgcccagcccccccccacccctgcattacctgggccatggcacccacagagccaggtcttcccctttctgctcaatacccaggggcttgcagtaagaggaagggaagcccgtgacacagaagccagagtttgttaaatatctggggccaggtgagcagcagagtttgcaacacgctctagtagcacattactgtgaactccacaggccctgaccaggctgagggccccagggtggcctggggactaccttgggcttgaaccctccacccctcagcagaaggaggcttttatagaccagggcccaggggttatcgatatttatagagcctcagaggcagctgcttacatatgcaaaaaagacacgttcctggagctacactttactggtctctttcttgaaatacaaacttagttggcagtctctgagggcttttgtgttttttttcttttcttttcttttctttttttttttttttttacagaattgaaattttgttgagacctggctgctccttaaaatgtgggcacgtgataggaaaggggttaccatgttcaattcaattatcagggagaaatcgtgctgcagccacccaaggtcctcactgcccccccaacccccagagactgagaagctagggaaaggggtgggagggactgtggactggacagaaaaagagggctgtgccctgagaggaggaacagaaccgggcacaggctcggcaagtgtgcgtggaataactgccaccaccccccggcaccggcttagagctcggtcaatacattttaatcattaaacgcaaaaaaagaaaagttctgattttcctgccttgggtttggtgtgtcccagttgtccctgaacgccatgctcacaaaattcctggaagctgcacttttgccctcccaggcagggtttcccaggggaccccggtgggctagggaccgaatgacatctccccacaagctggctggccctcaaagcactcggcaccttcttttataggtgggagcttccctaaagaggcctcaggcacactttggggaatgccctcgagtcctccaagccccttggtcctgcaggggcctccgaagacccacagggtgggaggtatggcctccccagccagctccagagagcacctagctgattccagagcaggggaggtgctgcggtctctttaagagagaggagggaagacacagtgtcaacccttgagcacccagagccgcctgcctggctcttccctcttcccggctctgctcttccccggcggctctgtcgagaaccttatcaatgaaacaacactcctggccccagattggctgccacttccagaggggaaggggcagcaaggaggtggggggacaccctggatccttagaggactctcttttcagttttcagaccttctcttgatgtatttcaaggcatcctagtggcacttcctcagtcccccacaagtaaacaaactctgtctcctcccctaacacaggcaacactggggactgtctaaacccaagccaccagggctcagagagggggcccgcgggggtgtcagcggtggggaagcctccgggtggtccctaggggtgcggtggccaaggaccggcacatttggtaaattacagactgtctcctagcaacagacaacacatttagctccacgcgactctaccctcaggagggggctaagaaataaggttgtggggggggatcccaaggaagagtgagggggggtcctccccacgctgcaggaagggtggggagggaaagggtcgggctgacaggtctccccacgctcctcccctgccaggctcacctttggtgtccagctccacgtggataatgttgcccatgacggaagtgctgtgcaagtgctgaacggcatccttggctccccggaccgtggcaaagaccaccttggcgatgcccaggtgcttcttggtcttggggttgtacaaaatctccacctcctccacctccccatacttcttgcacatgtccctcaggaagttttcacggatgttatcattcagcttggcaaatgtcacctgcttcggaggcaccgggcccacgtagaactcatcgatctggcaggggccgagggggaagggagtttgaagaacgtttaaacctaagggaaaacacaacatcccccccgccccgcccgcaactcgcccacccgttgaaaacaataaagggtaaaaaaactaaaaattaaaaaaaaaaaaaaaattttttttggaaaaaaaaaatgcacgcgggcgggcccgggaagcggaggattaaatcgtttggaacgtggaagtcctctgggttcggaaggaaaggggaaaaagaaacagtttctctttccccacccccctttctggccttctcttcctgctgccgggtcaggggcgacccctcaggcttaagaagttgtcctgtagtgggctagcgagaggggagagtctcggagccgagccccccgcggggcgtgcaggacactgtatctgcgccgtgattacagtttcacccagtgttattttgttttcagtagctgagaggggacaccctctcgccagcgctctacccctccccgccaaaacttccctggccccggacggcgggaactgggaatccggctgggctcggtcaggactggcgttattttcgaactcggggaggtgggggagggacggcggggcagtggggaggggtcctaccttgaatttgggcaccgacagctccagctccttgtttttggtccagatcccgacgacccggggatcttcgacaatttccaccgggcggttgctggacatctgtggggagaaattggggggccgggatgagagaactggtccccctccccatgggcagacccctttctcgaggcacttgtcaaactccagggctggggccccgtctgacagttggccgggggatcgggcggggggtccctggccgctaggcgcgtctccccggacacgacgcggggcacggctgggggggcgcgccggctactcaccgccaggctgaaatgctgcccatcgtagcggtacagtttatgatgcccctttttcagagccgggtcaatcatcaacttgtaacttctccaatggtggttcctcc

SEQ ID NO: 8724 - DNA, 4217 bp, Homo sapiens
gtggacactatatagcctactgccgaaacaatctaaataatctctggtatgaatttgatgatcagagtgtcactgaagtttcagaatctactgtacaaaatgcagaagcttacgttcttttctataggtaatggaaataagtgtagatgcgaaaggacatctctcacattttgggcttatcagtgacttctaagacattctaatggattgctgagtcaagattaggaattgttttcctcctatttcattacagtaaaatacagtgaaaggctgtatatgtagaatgattctttgttcagaaaatgctaaatcatttacttgaagagcaaagggatatattttgttttagaaagattaattttagtgccgggcacagtggctcaggcctgtaatcccagcactttgggaggccaaggcgggtggatcacgaggtcaggagttcaagaccagcctggccaagatggtgaaaccctgtctctactaaaaatacaaaaattagtcaggtgtggtggcaggtgcctgtaatcccagctactggggaggctgaggcaggagaatcgcttgaacccggcgggtgggggttgcagtgagcctagattgcgccactgcactccagcctcggcaacagagtgagacgccatctgaaaaaaaaagaaaaagaaagattaggtttaatttaaaaattaggcattgatggtctgaattaagtaccaaattttctcccaaagtagctaataatgaaagtattactataaaaatatttgtttttttttagcatcttataaaagaagatgctagcttctgaaacagaagcagattaattatttagcttgatcttattaacaaacatttgaatgcttactgtgttccagtagttatgtggatacctgtaggtaagatacagtttcatccctatgagtatataatgtatttggtggataatacaaagtatatttctcttgaaattcccaagacctaataaagatagtgttaatatgtgtgttaagtctaataagaagaaaaatccatctactagtaatgtagtaaaatgcatattgaatttaactaatcattgtccttaataggaagagcagcgaagaggcacaaaaagagaggagaaggatatcaaatttattgaacataatggaaccaagcctccttcagttttatatttctcgacagtggcttaataaatttaagacctttgccgaacctggccctatttcaaataatgactttctttgtattcatggaggtaagaactcctgtaatgcaaaccggtagtagaagtttgctgtaaaataatttgcaaattaggagagccaagaattttcctctcccacttatttcccatttccccacctgcattcaaacttaatgtgttttaattccatatggtttcagaaattcacccttcctttttaattgtaggtaatctctagcttctttattgaacatatatttactgagtacatgctttctaaactttttgctagtgcctaaggacactaaaaatcctttttcttctgtgaaagctctaatttcatagtagagtaagatacataaacagctgtttacattacagtgagctcctctattatacatcatttttcctacctgaggcattcctgtgctggtgattttatctatcgactatattggtggttcttaaccccattgtctaaatgaatagctggcttttttcccaagtatggaaatgtatctgggatttaagaaaaaaaagcctcataattaaatataactttggcccttgtgagattggctgtgttaatgtttatttctacaataaataggacctttgtgtgatgccaattaaacttcaaggttgaagatgggatattcatggtaattatgtttgtagtgaaaccagaagggatagggatacctgtattggacatagaaattttaaggtgtatgttcatcttgaggaaacacaatcaccaaaaatgctttataattaccgttcttgggagagagagtgtaagaataatgattgagctgggtgcagtggctcacacctgtaatctcattgtctcaggaggctgaggcaggaggactccttgagccctagagtttgaggttgcagtgagccatggtcatgctgctgcactccagcctgggtgacagagtgagaccttgactcaaaaaaatggccagacacaatggctcatgcctctaagctcagcactttgggaggccaaagcaggaggatcacttgaggtcatgagtttgagaccagcctgggcaacataatgagagcctgtttctacaaaaaaaaaaaaaaaaaaaagaaaagttagctgggtgtgttgaagcatgcctgtagtcccagctactcaggacgctggggtgggaggatgccttgagcccaggaattttgaggctgctgtgagccatgatcatgccactgcactctctggactgggtgacagaacaagacccttccacttaaaaaaacaatgatgattgatctgtcatttagttactgttaaaaaaaaaatgagtttaatgtttgaaaggaatataattaaaagcatgaaacagatatgtttatatatttttttaggtgttcctccaagaaaagctggttatattgaagacctggttttgatgctgcctcagaacatttgggataacctatatagcaggtttgttttttaaatcagaccatacagtgttgtgaaagtcggttaaactggttaaaaggggtttggattatttcagagatgctccttgtgctatgtgtttattcttttcccttacttattcattctaaagtgtgagtaggaagactttgtagctactgtggcatagtctagataattaattttaattttttctaattatctatctgtgaaggtatgctgtggtaatttaagtaccttgtttaaaatactttgcatatccccacactaaaattttacatatgtatatactcacacaattgagtatcttactcttaaattgtaaatttttttttctttttttttgagacaaggtcttgctccatcaaccaggctggagtgcagtggcacgatcttggcttactgcagcgtcgacctcctaggctccagtggtcctctcacttcagcctgcctagtagctgggatcacaggcgtgcatcaccatgtctggctaattttggggtgttttttgtagagatggggttttgccatgttgcctgggctgatcttgaactcctgggctgatcttgaactcctgggctcaagccatgtggctgctttggcctcccaaagtccaaagtattgggattacaggcatgcatcactgggcctggccttaacatcgtaaactttaaaattttaagatggagtctcgctctgtcgcccagtcgggagtgcagtggtgcaatctcagctcactgcaacctctgcctcccagtttcaagcgattttgtgcctcaccctcccaagtacctgggattacaggcacacatcaccatgcctggctaatgtttatatttttaatagagacggggtttcaccacattggccaggttggtctcgcaactcctgacctttattttaaaacattttccaccacagttttcctactaattatgttttctttaattaaatattaaaaataattcatacattgaatgcttcttacttgagaggccaggggaggccttcatctgatgaaaacttgactatgactgtgatgtgtaactaagatttatatgttgtatgatactttttgaaaccacttcttttagtttgttgttggctctaacattttggagcagaaataagggaaagttgaaatatagataaagcaggttaagcaataaactgataaagtcactgaccttaataaacataataacaagtccttatatgatttttgatttttatattactttgagaattttattaagaggatttatttttactgggtatttggccactgacttaaatgttagaaacaaacttcctagaacattaattcttaaatttttcatgctttaggtatggtggaggaccagctgtcaaccatctgtacatttgtcatacttgccaaattgaggcggagaaaattgaaaaaagaagaaaaactgaattggaaatttttattcgggtaaaaaagtgatgcttttcaaattgatctaggataaagatgaagacctgacaattatcagagttatatgatattaataaaatgattagatgaaa

SEQ ID NO: 8725 - DNA, 580 bp, Homo sapiens
tcataaaatcaaaagcatgaacaaccaggttttatgggcaaggactagtacccttccaattattgacgtagcaagaagtctctgcagtactgttgtcagtaacataactccaactatttaagacaattgaaaatttggatcacttgagagacacgtttattcataaatctactgagacactattatggggaggagtaatactgcaagaaaaaaattgggattcttttagtaaaagcagtggagaagatattgagcagatcaaaataagatgtccagtatgttttgtattattcatttcctgcacatgtgtagacacacacacacacctgcttttcctcattgattcagggctttttttgtgcccttgcctaaagtaaagtaaattttacataaaaaagatgcaggtatagatttatttattttacatgggcttcatttgcttcttgaatctaaggaagcaaactttagttgaatattaaaaatagttttttccatcaatgcttaaataatggctaatgactgtgtctgtcaggatttgattaatagtagctattctaagtattttgaatagaatcagaat

SEQ ID NO: 8726 - DNA, 204 bp, Homo sapiens
tccaattactcaggaggctgaggcaagaggatagcttgagcccagaaatttgaggctgcagtgagctgtgatcccttcactgaacgccagcttgggcaacagagcaagactgtgtctattaaaaaataaaaaaatttaaaaaattacatgttctgtcgtcaggtgatgaaggaatggtggcaagcgtgcaaactgaaaaaaaaa

SEQ ID NO: 8727 - DNA, 1288 bp, Homo sapiens
attaaatggttattctagctcctcttaacaatgaaagtgatcactctctggaaccattggaaataggtcattatatcatatgaaatgtattcttgaattctaatgactattattttaaaagtgctcttcattcagatgacaactcagttaaaatatttttcaacaatgatgaattattttgcattaattattttttctgtttggttattggtttaacactctggagatgagcaaagaaaaaatatttaagtctgcctttcggaaaaaccattgtactctcagtgtcttccatcatttcttacctacaaatgttgttttgtttaaggaagggttcttgacatttgccgtgtaaggttatagaataaataaagagtttatttacctacggtagtggtgatttagtttatttttaattcttactgtctattataggtgtaactcattgattttagttacaagtttttaatttaaagtttctatccccaaaactattgccctcgaaagtatcaaattactataaaatatgaaaccttaaatactttgacacttatgtaaactagggtaacatcattttcattacgtatgggaaagtacatatctaaatatatttttgaccaaatatatttgtcaaaatttttaggccagtttattttgtcccaatatttgagcaaagttgagtggatattaagagtgggtttcctcaaattatgaggaacaaaggcataatgcctggcacaaaggagaccctgagtgaatcacattgctttttaaaaatttgttttgatcacttaagaaaaaataagtcatgtttttggtatatgtctcaatgtaagaaataaaactttatacaaatatttgaatttactcacagctaattaggtttttaaaaagcgttaaaatttgtgacatgtatttctatcaaattgtatacacactcattttttaatttaaggaatcaaggatttatagatacagttttgttatgcatattgaacctatgaacaatagctacatttctaagtatcttttgtgaagttagttgttttaatgatactaaagatatggcacttgggcttgtctttaagaatccctccagttatgcatatttttatttataaatagacatttttctctggcaacagcttttattattctctcagaggttcacagccttccaaaatttaagaaccactgtttttttttttgttttttgttttttgtttttgagacggagttttgctcttgttgcccaggctggagtgcagtggcgcgatctctgctcactgca

SEQ ID NO: 8728 - DNA, 1288 bp, Homo sapiens; identical to SEQ ID NO: 8727

SEQ ID NO: 8729 - DNA, 194 bp, Homo sapiens
ccaggttcacgccattctcctgcctcagcctcgcgagtagctgggactacaggcgcccgccaccgcgcccggctaatttttttttgtatttttagtagagacagggtttcaccatgttagccaggatggtctcgatctcctgacttcgtggtctgcccgcctcggcctcccaaagtgctgggattacaggcgtg

SEQ ID NO: 8730 - DNA, 501 bp, Homo sapiens
aaattgggtaaagtattataaacagtagtaggaaaaaaatatactacatgagggatcattgcagtagagaaaaacactttttagttatcttctgcccataatgtacccataaagtgtacccataatgacagaacaatttgggcaaatgtgcttgtactccaggagtcctgaaggcatagttcaatgtgaccctttgagaaatctatgattctttgcagtcttcatttttatcttaagaattcatgcagattttgcatctgctactccataatgtttattttagtataaaaatatttaaatttttaaaattaacatcacttatccccactgctgtataccttgatttggaaagtaaggtggtatgcacaatcacattgaattcatagtaagtgctgagcagattggtatcttatgtttgtcgaatgtttgagttgcacacacaaattaggcttctagaacctatacaggaaaatcatcacttggtcttggacattaaaaaaa

SEQ ID NO: 8731 - DNA, 501 bp, Homo sapiens; identical to SEQ ID NO: 8730

SEQ ID NO: 8732 - DNA, 194 bp, Homo sapiens; identical to SEQ ID NO: 8729

SEQ ID NO: 8733 - DNA, 164 bp, Homo sapiens
ccacctgagtaaagagaagtcggccgggcgcggtggctcacgcctgtaatcccagtactttgggaggccgaggcggcagatcacgaggtcaggagatcgagaccatcgtggctaacacagtgaaaccccgtctctactaaaaatacaaaaaaaaaaaaaaaaaa

SEQ ID NO: 8734 - DNA, 105 bp, Homo sapiens
tgggaggccgaggcaggcgaatcaccaggtcaggagatcgagaccatcctggctaacacagtgaaaccctgtctctactaaaaaaaaaaaaacaaaacaaaaaaa

SEQ ID NO: 8735 - DNA, 148 bp, Homo sapiens
gccaggcgcggtggctcacgcctgtaatcccagcactttgggaggccaaggcgggcagatcacgaggtcaggagatcgagaccatcctggctaacacggtgaaaccccgtctctactaaaaaatacaaaaaaaaaaaaaaaaaaaata

SEQ ID NO: 8736 - DNA, 119 bp, Homo sapiens
cctgtaatccccgcacttggggaggccaaggcgggtggatcacgaggtcaggagatcgagaccatcctggctaacacggtgaaaccccgtctctactaaaaaaaaatataaaaaattag

SEQ ID NO: 8737 - DNA, 142 bp, Homo sapiens
catagtaaatgattccatttttttatttatgacttcatgactaccattaagaaaatataacctgttgggaaactgtttctgccttgatgatgttgtacagacaagagataaacagtgaggaatatgcttagatgtattggga

SEQ ID NO: 8738 - DNA, 131 bp, Homo sapiens
ttttttttttgagatggagtctcgctctgtcgtccaggctggagtgcggtggcgcgatcttggctcactgcaagctccacctcctgggttcccgccattctcctgcctcagcctcccaagtagctgggact

SEQ ID NO: 8739 - DNA, 39969 bp, Homo sapiens
caaccttcagaacaagctagaggttttaaatcaacgctggcaaaatgttttggaaaaaacagaacaaaggaagcagcagctggatggtgccttgcgccaggtgagtaagagaataaattctgaaagtttttatagcattcaagaccaaaatagcatggaattcttttattagttcacagactcctgtttaatttttataccttaaggagaggagtaaaaataagtgaaataaagaacagaacagcagaagagaacacagctttctagttcttagcataatactcttatctactagagctctcctgatgaagaaaggcaaatctaatggtacctggctgttcttaagaatgcatagagaggcttagcaggctgggattgtttgaagcttatttcctgcttgaaactgacagtgtttatggccccaacttaaaactgcctattacttcaggccaaagggttccatggcgaaattgaggatttgcagcagtggctgactgacacggagcgtcatctgttggcatctaaaccgctgggaggtttaccggaaacagccaaggagcagcttaatgtccatatggtaagcaaagtatttcctacagctttagcctcagaataacaaactgaccatgttatatgggccctggcgatacataaatcgtgggagaaggctttaaagatatagtttatggcagaaatcactgtgtatacatgttagaaacacaccatttattgattaaaattttaaagtcagaacccattctttatttctttctttttttaattttattattattatactttaagttttagggtacatgtgcacaatgtgcaggttagttacatatgtatacatgtgccatgctggtgtcctgcacccattaactcgtcatttagcattaggtgtatctcctaatgctatctgtcccccctcccctgaccccacaacagtccccagagtgtgatgttccccttcctgtgtccatgtgttctcattgttcagttcccacctatgagtgagaatatgcagtgtttgggtttttgttcttgcgatagtttactgagaatgatgatttccaatttcatccatgtccctacaaaggacatgaactcatcattttttatggctgcatagtattccatggtgtatatgtgccacattttcttaatccagtctatcattgttggacatttgggttggttccaagtctttgctattgtgaacagtgccacaaaggttagtgtgtcagtatgttttagaattctagacactttttagacacaaaccttcccccacaaaataagcctgtatgggtggtggtaatataacacagtgtaaattattaaattattgtgccttgaagtgtaaagaaaaacctccaaaataatcagaatgacttaaaattattgttataagcatgattgtctcatttggtttcatggaaggttagaaaatatactcttgttccgttaaaaaaaaaaaacttccttgtttgttttaatggtgatagagctttatcttcaacttcatacttacaccaaatacagacacaaagaggaggcttctgtttaactgtccagtctggagtgttgtacctgtgcgctgttcctacctagatcatgtgacacagttggctcctaagaaagatgaggaaaaaatgatgagacttgaaatgtgggctttctttcatagaaatggggactgtgaaattaaatttaggctactttggatttattgacattttaaattcatattccattgtaattcagcactagaagttctgagaggaaacagtgtttcagattttgaaagagtcccctaattttttacttttgtgaatttacatcagaaattttttaaaatattcaaatactgatgattattatcttgggagataaaagtagaagtacttagaaatttggcaaaagaaatagatcagtgtacatcaatatctacactctttaatagagatataatgttgttgtaagatcttaataaaactgctcttatttggaaataattttgaatttagtgatttgaggagggcgtaaccatcatgtagatgttgtaaagaaataaaacagattatgacagtaggtagcatcatatttatttcacaatcaccatcagtagtttaagtaagtcctactaattcggtgtagaattttctagaaatctttatggtatacttattgttttagaaagttatgtatgtggtttttgttgttgtcgttattggtttttagtgccacaggagacctatttgtttcactggaaaagtaatagactaaacttgtaagtgcttatcttcctttttgaaaaaaaacctgagaaacttccagatagctccttactttcctggaaagtacttgcacagctttgacagtgtccattaattataagtttaatgaactcatgaacagatagatgcttgggattattttctaataatataaatatttttaaaatgttaacttagaagaatataagaacttgaaagcaaagaacctacctttaagaatactttacttttagaaaatattccatttcagcgaactgagtttgggcggggtatttaaaatgaatcttttgtaaccctatataataaatcatagaaatctgtttaaataagtttaaatttgtgatttaaagcattctaaagagttgttgatatttgtaatatcatttcaataaagttcttttgattttgttgtgctagaaatgaagaaaagtacaaaacttacaatattagtttcctgagtttttagctatatctgaaagttttgctttaggatttaaagcttttagtagatgatattgtaaatatatttatatagggctttttttaaagcttaagaaataaatttttgaggtgatgaaaatgttctggagttagtggtgattacaaaaccttgtgaatataattttaaaaacactgaattgtatacttataatagtgtattttatattatatgagttatattgcaagttttaaaacgtataaagttgaaaatgtgagacataaaatatataatctttcagtgagaactatgatttaacccacattatagttgaataaataaaatagaactagtcttaattttttaaatgagaagtaactgttgttttgttggtcttaaactttgaatttgtttaagcaatattttatgtcctgtatagaagatacatacaacattctagttagaagctttagaaatgttctaaatgagaataatattcatagtaccacaagtttgattcttataattctgaataatcaacttaaatatattactgtgctggttatttactttctatccattgcatgttttctgagtgcagaattaaatcgtaccaatgaaatactacattcattgtatcatagtacaaggagggatctacgagagcctctcattttacagaggaaggaattgaggctcagagagatgaaattacttgcccaaactcacagaactaattagttactgtacagtgaaagctttcttgacagcatttaaactgttgcttcaaatcttagcatgccagaatgggctgataatgataacaccattttttagatttcccagtagacagggtatgactgtaggtttaattgttgtttcaatgtagtgaaaagtataaatgcgtcaaggttgccctgagagagcaaacagagatgaatatatgatgaggagcttgggactgatgacctagaaaaatagaactcttaaattttactttcttaaagtgatataacttgagggtatctcaatttaggaagtctgtgctgcctttgaagctaaagaagaaacatataagagtctgatgcagaaaggccagcagatgcttgcaagatgcccaaaatctgcagagacaaatattgaccaagacataaataacttgaaagaaaaatgggaatcggtggaaaccaaactcaatgaaaggaaagtatgtgctttgattaatataatagaatcagtgttttagttgtttcatgtcttggacttggccttatttctgagtagagctatcaggagtagaactttcaatgatttatgtttaaacattttttgtatatatttggagatttcatggggtagttgaaaataatattctgttttaacatgagaacatatttaaaggggtgggatatattcaaaaatagataaatatatagatcaaatgttacttagttatatttttaaatgttaagaactactcaaattctgggtcattaaataattaattctattttaatctaattaaacaaaagactatatatatgggtgagggagagagggaaagcaagagagtgagatgattgtgtatattcttttaagtacttacatttaaaaattcatgagaatggattaaaatgtatattaaattatgaatatgtctttgttacttttttaaaaccgcaaaactgacaatctaagaaatctcaatattgcatgaaaaaaacaataggcaagaaatacaagattatatgccatcactgatggagcataaagtatgtatttcataatattttgagtccccaaattaattgtatgaatgtcaacttttctttttacagattatatttagtaattgtgttctttggttaatttccaaaaaacatgctttagcgtatattaatttttttttagttacagtgagatgctgcttactaggcttaaagggttttggtttgccagtattttagtgaggcccattacatttataagatatttagttaatatattaatagatatgcataaataaagtggggataggaaaggaatctgccagagaatatttaaactgaaacaaacaaaataaccaaggcccttaaacatcacatactaaacaatctgtccttgcagactaaactggaagaggctctcaacttggcaatggagttccacaattctctccaagacttcatcaactggcttactcaggctgaacagaccctaaatgtagcttctcggccaagtctcatcttggacacagtcttatttcaaattgacgaacacaaggtatgtagtgagtcaaatagataggattctcttttcagacaccaggcttttttttttttttttgagactgagtctcactcctctgtcgtccaggactgtggtggtgtgatcttggcttacttcaacctctgcctcccggttcaagcgattcttgtgcctcagcctccccacaggtagctaggattataggtgcccaccagcatgcctggctaatttttgtatttttagtagagatggggtttcagcatgtttgccaggctagtcttgaactcctgacctcaagtgatccacccacctcagcctccaaaagtgctgatcacaggcgtgagccactgcacccggctgacagcaggcctttttaaagtcaaaagcatgcatttggtatttcgaaagctttcgtttgtcctttaaaataatttcaggtttatgacaccagaagcatttttaagattgatctgattttcatttgtttctacttatttcctttttttctgggaaaggtttttgccaatgaagtaaattctcatcgtgagcagataatagagctggacaaaactggaacccacctaaaatattttagtcagaaacaagatgttgttctaatcaagaatctacttatcagtgtacaaagtcgatgggaaaaagtggttcaacggttggtagagagaggaagatctttggatgatgcaaggaagagagccaagcaggtaataaccctttagaaaaattctctgaacttgtcaataaaccacttcttgctgttgaaatatatgttatggatgtacttttatcacaggctgtattaggcataacaatcatggcatggtgccatggtggttctttcctaaaagggctgtggcctcagtttggatgctgacatcactttttgacctggcagcaatttcagcccctggggactaatcttaagaagactgattatagcttgacttcatagacaggctattatcattgaggcccagaaagaagctcagaatttttttttattgggtttgttttctttttctttgtccttttgacctctgttctcataatcagagtgagacatcatacttcattgtattgctaccttttgtttagttcctaagccagactttcttcacaagctatcagtgctgagagccagacatgtagccctcccgacagctttctgaaggggcatattctctgtctgagttggtcggcactccccacctctttgaacacttgttgacagaccttcatttcttctctaatattttgagcagataatagagctccatctcactttgaaattaatttttttgaatcttttggggccactttaaaattttaatctagagattttcacaaatttcacagagaactctcctctccttactccctttacctgttgttaacattccattctagactaaacacaaagaggtaaagttatgcatctctgtgtgtctttgtactccatggaagagagaggtgtacctacctcgcttgacaaatatatatatttttaaacatttgatttttactagaaatttagtgtaatattgtaggaggattttacaattactttttgcctcagtcagctgcaattttctagccttagtgttgtaccccattgttttgaggagttaagctcagttgggtgatgcaaaaagatgtcacgggagtcaggtgtttcaatgtttaatgctaacagtacaaatgtttgaaggcttgagaaatgacaaattgcattgttatagcattacacaccatagaccccattttgaatgggaggtgtgaaatgttcagtgttacaaatgagtcactgggatatactccatctctaatgtttctttaagacagtattaattctcagcctgacagttttctctccacattatgtggtgcaataacatgtgtagtgccggcatttcttgagttatgaacatcagtttataaatgtttcttggatatcagtagccagttgctcatctttttcctcctttctcgatttaatcaattttattttctcattttgtctaattaactttataaatatttgctactgtttttagtgcaaatgtatagcatttcctctatttatatggcttaaaaatagttttgaaagcagaaccagcctcagaacttgtgcgtttgtatcattgaccttaccatccaactgttatagcctgtattatttggagtcaaactacctaacaccttgactagctgtttctactatttatttcttcttcttctaatatctcagtttttggctcagatattgatcatacttctctgactttcacaattcatgtgtctattctagtttccatttttccatgttttaattgattaaagttgtgagagggatatgaaggtttgtaatgagatgatctccagagagcccttacagttttgtgagtctgtgtccttactctgctcttattgttaaatatcttgttgttatttcattattcatgtgctttggtatacaatagatttaattttgattactaaattttttgttaggtatctgttcacttaagcttattgtgacaaataatttataaccaatttcacaattgtatcagaaaatagtacctgctggttcttgatgacaaaccgaaaagaaactgtgctcaaaatcaaatatatatagtaccagaatgtttgcaaggttatagatgccaaagagaataacattgtgttagaacccaaatattgtggctgctcagtcatataaaaccaatatgtgaggcacaggcattgatttgaggatattgatagcagcaataaagatgttgaactatctttgcattaaataggaatgcaatggcctcttttttgtttttgctactttaaaaaatcaatttacaagctttatacttacccctccccatttttgttcctctttcttaacatagggattaaattccctagaagtaaacccagatctgtcaacagacagcagtaaacaacagcaacaacaaaaatacaaaacattttctgagagtttatgttaattattgaacaagaagaaagtataaggaagaagttctttctgtagcttcctaacttttttctaggctcttttagagctgatatgttgaatgaattaaaacaaagtgacagtggggcacagccacaaatgctaagcattatcaagactttttttgtaatttgctgatgaaagcattacttttttcttcttcagtggaaattttgaaataataattttcaggattttcatcactattaatctctgtcttaaaactgtgctagatctcaagtataatatgcttgaaaaattttcagacaaaggtgtgaatttctttctagttccatgaagcttggagtaaacttatggagtggctagaagagtcagaaaagtctttggattctgaactggaaatcgcaaatgatccagacaaaataaaaacacaacttgcacaacataaggtgggtccataattaagaagagcatattgtctcattatatagttcaagatcactttaaaatccttacttcatcacgtgtttattcatcactaaagaaaaaatgtaggtccagtgtgaacctgtattaaatttaaaagctattgctcttcatgttgcttatgttgcaatatcttcactcttcagtgaccatttcactaatgattcccaggttaattgttaaaaagaaaaacatacaaaataaaaatggaaatcctctacaatctaaaacatataaaggatttgtagtggttttaaacattggcatttcagtttttcatgatagctgtcttttcctgtactttctttgacagacaaaatagcaccttgaaggtaattctgtagtaaaaagtaatagatattttgcggtatggattcttttaaacaatagagtgagaaaaattggatgcttgtacctaaattgtaaattaatattttattgtgtttgtgcacgtataaaattccacccaacctcaaaggtacccaaagacatgtttatatagactagaaaagcatgtagaaacattgttttttaaatattttctaccttttctatgcctatcatattttatatcttccacatgacattcaaagagcattccctcccaccctccccagctcttttgaatttggatttttatgtaattctatttataaagttgaccccaccagccatcaggatgaggatgtgggtaaaaggagagtgattcttgcaaagggttttacaattttaggcacgtacatataaattatcgcttgaaacataatttttaaaggctggaaaaattggggtgatataaaatttgtcatcatcaggaggaaatcctggccatcatcttcacataggttggctgcttgcatcagtgggtctaaccttaggaggtcatgattagagggatgggaggaaacatattgagcatctgttccctggccagatgagggctaatgaatggcttgctctgctggcaccctttgcctgtgagctgccacattcaatattgggagcacagtgacagtgaacagcaccttccttccttcccctctgatggcgaaatgagagcttccttctcaaaacagaatgctttatttgaacttgaatgtggatgttgtatcgtgtagtcttatgaaagtatattacatattaaagttagagagtcctataaataagaatatctacctttttaaagtctctatttggcaacagtgacctgtattcaaccataacattttttgtatatctgctttgtgaagaaaatctctgtcaataccatgattctataacactggcattctgtttagcataatatgaaaaaaaatttatggataactgtagaaataatgtgattgtaattgtgttgtctattacttagaaatttccagatgtagttgcctattacccatgacaaattaaataatttagtcatattaaaacactttaaagtatgtagcttttaaaggccgtaaaaacttcttaggtaattataaccttgagattattttagaaaagtgtacatttgcatagcattttactatctagggtaattttaatttgctacaaggattgagaatcactgtattaatgtttccattatattttgtgagtttgtaagcttcccattaagttgacctttctttgttctcattcctgctattgtatattcagtaacagttatctcattctttctactcttcctattgaatatttataaacatctactaggtgtaagatgataatgagaggcctacaaagacaatgtccctgctctataaaagcttatgattgagttgtgtagaaagactatacagatgctcctcaacttacgatgggtttttatccccataaaccctctgtaagttgaaaatacggtaaataaaaaatgcatttaatacacctaacattagcttacaataggacaagatcatctaacccaaaacctgtttctataataaagtgttgaatatcttaggtactttattgaataggtgactgaagtatggtttctactgaatccctatggctttcgtaccatggtaaagtcaaaaaatcctaagtcaagtcattataagtcagaaagcatctataattcatctccatttattagggatgcctctgttaatgcctcttacctgtttattagtcccaagaagaaattcgcatttttttcttgttaaatatttaggagtttcagaaatcactcggagccaagcattctgtctacgacaccaccaacaggactggacgttctctgaaggagaaaacctccctggctgatgacaacctgaaactggatgacatgctgagtgaactcagagacaaatgggataccatatgtggaaaatctgtggaaaggtaaaatgttctttaagacagtttggttactctgtagacctctttcaaatacacagtaatggtgctttgcggggacatttcgggaaccttaaatatttcctttgcctgaggaacttctgcttgtcctaagtatcccacacacatagcacttgcattgagaagtctttgctgttcattaatttttaactactcattacaataaaaagtgatatcattgtccaagcttctgccatctcagacttgactacacccactgcttctgactcgtcttcccatgtccacttttatcacttctttgacttaatttctacataactactggatagtcttttaaaaatgtaaatggaatcttgtcattcccctccttcacaccctttggtgacttactactgggcatgcattgaaacacaggcttcttaatgtgacgtgcaaggtaccactgatctggccccagcatttctttccaactccatctacccctttctgatctccctctttctcattacatttccatgaaaacccaagacatatttcaaaaattttaagtatttaattgagtacaatagtagtagagttcaaatatattgtacatgtttccaaattttcccgctgatccttaatcttaatgatttttgtcagtatcaagattaaatagattatattcagttctggggaactcacagtaagtttttgtcatgttagttttgaaaaaatcctttttttttttttttttttttttttgagacggagtctcgctctgtcacccaggctggagtgcagtggcgggatctcggctcactgcgagctctgcctcccgggttcacgccattctcctgcctcagcctcccaagcagctgggaccacaggcgtccgccactacgcccggctaattttttgtatttttagtagagacggggtttcaccgttttagccgggatggtctcgatctcctgacctcgtgatccgcccgcctcggcctcccaaagtgctgggattacaggcgtgagccactgcgcctggcccttgaaaaaatcttaaattcctcagccacagcatgttacataccttttccagtgttgtatgcatggttttatttacaagatttttgaaaagacaaaaaaataaagtcctgacaaacggatcaatgaatgctaggggtttgaaggcgggggcagggcgtgtctataaagagacagcacgaggaagatttttgggatggttgaactgttctggatcttgattgtggtgatgattacgtgaatctatacatgtgttaaaatgtatagaagtgtataccaaaaaatgtcaagtttactgcctgataatctaaaacaaaattttaaaaatatttaaacagtttaaaaggcttatttttatgaagaaacatgaagggtccatggtttccaaaggtgggaattttcctggaacagatgccatgtatttaaggaataagaaagaaagtttagaaaagttttgtctttttcctaagaagagcaaagaaacaacaatgaataccaacatactgctcttccccttgagtaccactcaaccttcatcaattaattttagatgttcagatatatgagtgacgttttttgttgcaaggatcaatttttctacctttttccctagacaaaacaaattggaggaagccctgttattttctggacaattcacagatgccctacaggctctcattgattggttatatagagttgaaccccagctggcagaagaccagcctgttcatggagacattgatttggtgatgaatctgatcgataatcacaaggtattgttatctgggacattttattttatcttgtttgattattctgagtgtacaggaaatgtaaaccatttaaattagccttttaaaatcagaagactatagatcatactacataacagtctttattgttgaaatatgtgtccgtttgagcagaacctggaagcaaactttaaaagtgatggggaagtattatttagtgtcagtgaaatacttttgcttttaattaccagatctaaaacctttttagaacttggaaagtgatttcattctctggtgctttaaaacagatttcaagaatgttttactatctttagttatgcacttaaacaattatgtaataaaatttaaaatcattcattcagtgacctgacactaagtcattgcataagtatgtagatttgtgacatgacccatggtggtcatgaccaactgcttttaaaaataccgaaccaaaactgttttaaccttgccccttgaattatagcagtttatgagtcagcagcttatgctataagggatttgattattatttacttcgagaaaactggcttccttgaaatctcctgatatgcatgtaaaactgtcatgtcatgtaaatcaaaggtaatattcaaggtgtccaactaagtgtaaggtccaaaataatgaccaaatgatataaagcaacttagccttggaaacaatatgaagcatagtactaatgtagaatagttgtattggagttgactttatataaaaatgtcttacatcactctacttaaattcatcttgtatttcttctctctagtatctgagttcagaaaacttattccatttataatgttctctttatattggttatgctattttgatcttaccattctttttaaaagtcttattacatatttatttttccttttttctttctattctatcattatacccataagagagtttgttacacctgaaaagtgaaacaaactaaattaaaataaaataaaagaataaataaagaacattggtcaagtctacaaaagttaaaaatttaaaaatcacatggctttgcttatattgaaataaatgttttgtgtatggttaatacaaacttctctatttcctggcatttattcaatgagtaatgaatagcgtaatgttactttttacataaatgccatttctgtaaactcactgtctaaatatttactactctaggtaattgccagatcttttatatattaaaggtcatcaagaatgaattaatcatttagcattagtaatacaactggaaggctcaagaagttcaagtatgtaaaaatgctttggaaagtcttctgaaaactattggactagtcctatcataaatgggatatttagatactgtaccatttgcatgtgtgcttgtgtgtgtgtgaatgtgtgtattggtgtatacgtgtgtgtttgtgtctttctgcaggcacatctcattttaactgttagagttgaatcagtcaaataatcacttttgtgataggctcacttttgtgaatgatctgagtatcagaatagaaacctatagatatggccaaatggtaatattcatttatgatgatttttttaaaaacacattaattttattgtgacagaatgttggttattaatgtttgaaagatctagttgcatacacagactcttggatcaaaaataaagagctctgggctcacttcttagatcagtctgtggccaaaataaatgaatttaattcctggcacatcagtttgtcaaaattaggcaggaaaaaaaaaaaaaaaaaaaaaaaaaaaaaagcaaacccagaagcttttcctctaaggtgaaagacaaggatttaagcctctaaaatttgacattatgagttagtacctaagatattatgaaagaccaaggagtgttataggaataaaagaccatctgccaacttcctatggaattccctgccattatctctaagacatccgtggtacacacatcaagattgcttagtcctctgttaggttcttagatacatctcttagagtagtgccaaagccagcatccacttgacattcacactagtgatttgagagaaattgggacaccatattaaagaatcattaagaaaaggaatttgttgcattgttttatgaaattgaaataatgaaggctggctgccattatttaaatccaatatgtcattttaaaataagataatcttatcttgttttctcatgagaatgtgacaggactgaacaaatttatacaagactcttcttgatggtgctcaaataggagcagtgtgtcatttatcttctgaagatgctgccagaaatatggttattaaactgtaggtcttagatatctttacatgatgttatgtgcacatatatatctcaaacagtatgtgttgctgttttggttttgtaattaaaattaatttttcaaaatatggtcttcttaggccttccaaaaagagttggggaagaggaccagcagtgtgcaggccctgaagcgctcagcccgagaactcatagaaggcagtcgggatgactcctcctgggtcaaggtccagatgcaggaattaagcacacgctgggagaccgtgtgtgcactttctatatcaaagcaaacacggttagaagcagccctgcgtcaggtaaaaaccatgtaaatgagagctgggtgtaatgggaaaagtattgaaacctcaacaagaactattctagtaaaaaattgtgaggccctcgtgtctcaatcaggacagtctgaagaaggaaattctaatagcaacattgccttgatccttctcccaccctccctcatgaatttaaattactgctagagggaggcattctaatcttcacatacaagtgctgcgtgagtaatgtctcagcttggaagtatgatggactgccattcatctaaaatcaagttgttaaagtggtaaatttttcttcatataggctttttttttaatatattaagtgttttcttgtaaaatatgtgtatctctatcttcttaatgggagtaatgaagcaattaaatttaaaactttttttttttcattgaagggatgaatccactatacagttttgtaaattgtgctaacaggcatatttgggaattttgtttggggtgtgtgtgtgtgtgaactcttaggcagaggaattccactcggtggtacatgccctcttggagtggctggctgaggcggagcaaaccctgcgtttccatggtgtcctcccagatgatgaggatgctctccggactctcattgatcagcataaagtgagtaatatataaatgctatgtaaagctaaattagaaaatcaaagcagggaaaatagactcgggattacaaatatcaactgcatgaatattttccttcctgagaaatacttaaacacctgatacatttgagagtgtacttctgtccacattgcttacatatgtatgtccccatgcacccacacacatgtatgtgtacctgtcttttgatgtttccttttcagggaaggtagttactctgtttcctatctcaaggaagcatattgatttatctaggctttttggcttttgaccaaaattggtcaagattgttgcagttatcatgtggatttcaaaaataaaacctctttaacgagcagtttggcatttataaaattatacccgtaggattgtaaattagtaattttgccctttgtaaacaagacacacaggtaatttaataactcatctttgaatctatttttaagcctctgctgcttctgtttttaatcaagagccttttaaatcctttttagaagaaacctatagtatacattaaaaactttaaaaatgaatttcataagccaatattctattgaataactaaccaagtctaaatctggctattgagttttcaaatcaagatctttcctgcggcaatgcatgaaacttgccaaaacccttcagagagtaatccaaatatctcttaacaaatgttttttaacctttgactcaaaaagtcaagaatttgaaatggtaacgctcaatgtagtgttgatgtcagcatttcctattaactttaaaggatcttttaaacaccagtaaataattttgtcttttgaagtcaggctggaaatacatcattaattctagtgtagcatggattacatcatgtgtggagacttgttatgttaattaacaccctctatcaaagatgggttgctgaatctatagcgatgaaatattgccatgtcatttaaaaagtggtacaagcttgcatagcattttctggaagaatgaaatgctatatattatatacaccgtttaaatttgaagctagaatataagaagaagacagttacatcaaatgtattataaatttttgagtcagttcaatattttgaaaatgtagtttatattatattactgtgggcttaccatcagccagcattgagttccattaacatacttaggtttgggtctcagagtagcaataaatatttgctggacaccacttaaagcccattgtgcatatctaacaccctacagaaaggagcctatttgtggtatcaccactctcacaccaggaccaggaaacctccagaaggcacgtatccagagcaggggtagtggtttttacaacaaattatttttaaatagcataaaattacctgtaattttataaaacatttcttaataatattttgcagtaacactattcattcttttccatctcctctgcttcccttcatacattcaccattcaccattcaaagaaaaacagaatatttaatttcttaacaccagaactggagacttcttagcatatccagtttctaaaaatggcaagctttcccacatgagaacaaaccagtaaggtaaggttcagactaggttggaagggcatagaattcagtggaatgttgacagtccagtccaccaaattctaggtataaccttggctcctctaggtgtagaagtgattgaaagtacattatttgtatcagctgttctccaggggaaacacagatgttagattaacctatttttttctcttccttataatgttggagttttaaatttttttcatttaggaggatcctgtattgggaaaatgataatttaagttatgatatttaaaaagtaggtgttatcagagtgtgctgtcaattgaacgttgactccattatagtaaacttgtaaataaaaggtctaaaaagcatttattcagtaaatcacaactcttttgaaccaactaccgggaacacaaaaatgaataaaacacagtcttttaatcttgtggaccgaacagtctaacatagcaaaatgccagagtaggaggtatgtcacagagctgcttcacagaggttaaagacaaaaggccacttaaattagaataaaacatataaacatatcatataaatttaaattcagagagtacatgtacacgtttgctatatgagtatattgagtaatagtagggactggacttgttttataccagtcatccaaatgttaaacacggtacccaataggtaatgtttcaactctcaggcccctgtgatcctccgtgctttttggagtcttcagtgtctattatttccatctttatgtccatgtgcgcccattgtttggctcccatttatacatgagaacgtgtgatatttgattttctgtttgagttacttcacttagggtaatgccttccagctctatgcatgttgctgcaaagtacatgatttcattcttttttatggctgcatagtattccatggtatatatgtaccacatttttttttaatccaatcaactgttgatggacacttatattggttctatgactttggtattgtgaatagtgctggaatgaacatatgagtgctgttgtctttttgatataatgatttcttttcctttgggtagataccgagtagtggaattgctgggtcaaatggtagttctaattttagttttttgaaatattttcatactgtttttcataggcatcgaactaatttatattcccaccaacagtgtataagcacgcccttttctcagcatccacatcatttgttgttttttcactttttagtaatagtcatcctgacttgtgtaatatgatatctcagggtggctttaatttgtgtatctctgataattagtgatgttgagcatttttcatgtgtttgttggctgcttgtatgcttgtatttcttcttttgagaaatgtctgttcatgtgtttttcccagttttcaatggagttgtttgttgttttcttgttgagttgtttgagttccttgcagattctggatattagtcttttttcagaggcatgatttgcaaatattttctcccattctgtaggttaactgtttactctgttgattctatcttttgttgtgcagaagcttttttatttaattaagtcccatttgtctatatttgtttttgtcacatttgcttttgggatctttgtcataaattctttgcctaggccgatgtccagaagagtttttttaggttttcttgtatagtaaaacacctatatttcaaagtgaacacccctgttcacatagtgtgagtagcatgggcatcatcgatctctgcggcctctggcactcattgtgtaatcaagtaatcgctcttggtgcaggggtccagagagactggggtgtttgcagatctctaacattctatatgagattttggaagcgtgtcacatttttaagggcaaagattctcattttgtaatcacattttcagagttctatgatctgtcttatctatggatatagttctgatggtagaaagtacaattaagtatgtgagacatttgtaaaacatttatttgaaagatcatccttgaggatgtcaaggctttgttcattccgcttgctggcagagactggctagaactgccagaacagaggagagtggctcttactggcattttaaagggacagttctcacatgggctgacctgctgtcaggctcactcttccaacctccccttcactttttactgcatagacactttgggccctctctcccatacccccaaacatttatctttccttacccaggcttctctctactttgtacttttttattcatgctgccatatttcctggcatagttaatgctattttaaatattaacctccttaccttatttgttagaacttatttttggtcaatcagtattgtttctatctctagcaatactgtctctcccaatgctattctccattaataacataattatatctaaatttgggagagttatttttttgtataatacagtttttgaagcatgaaatatcctataaagttggccctctgtatccagatattcaaaaataaaatggttaaaaatattcaaaaataaaatggatggttgcatctgtactgaagatatacatacttttttccttgtcattattacctaaacaatacagtataacaactatttacaacaatttacattgtattaggtattattagtaatctagagatgatatgaagcatatggggaggatgtacttaggtcatatgcaaatactacatcattttatatcagggacttgagcatcattggattttattatgcacggtatcctggaaccaactccccttggattccaagggatgactgtacttgtattttgaagtacatgttagaaagtactttgttttctattttgtccccttttcctccccaattagtagatgattttcactgtgaataaaccaattgaagtttttgtttatttgtttaattctggcagtcaaacaaatgccaccagagttttgttttcagccaatgccaacagttaattgaagtctttgtttctgctgtaggaattcatgaagaaactggaagaaaagagagctgaactaaataaagccaccactatgggcgacaccgttttggctatctgccaccccgactccatcactaccattaagcactggataacaatcatccgggcgaggtttgaggaggtcagtgtgtctcagataatcttcagagtagcaatagctttgagagttgaggggtgtgggaaatttcaggaattaagatgcacttatggccatgggaaaatgagacctctacatagaaaacgttcttttaaatacgcttcttgtatgcattacaatctctgcaattcacttttctttaaaagctcaaagaaattttgcagctatgtccctggaaaattagaaggcaaatatttagtacactgtataacattttggcctccttccacattgtttctgttgaataatccagcagttggatggtgtttcggagcagtatatactggtggagtgaattggtatacataaagtgaattaattctgtatttaatatcttagcttttttttttctttcttttgacggagtctcgatttattgcccaggctggagtgcagtagctggatctcggctcactgcaacctctgcctcctaggttcaagcagttcctctgcctcagcctcccgagtagctgggattacaggcgcgtgccaccatgcccagctaatttttttgtatttttagtagagatggtttcaccaggttggtcaggctgatcttgaactgacctcgtgatccgcccacctcggcctcccaaagtgctgggattacaggcgtgagccaccacgccctgccagtatcttagctttttacatttctactctgtgccacatggagtaagcttacctgatccttcagagaatgcatatttgaactcaaattagaaagcaaaaggaagcctgagtgattgacatgcatctttaaattctgaagatgatgaacatcatcgtgggctctcatgtcctcctcaagccagatcttgatgccactaatggaatctaaaaagaccagaagcattatgggtctagctcaggatgatcctaattttcatttaaaatttatttattttacatcactgcaattattttactaagttggaggaaattcagagaaatttctgtttctctgacaggtgctggcctgggcaaagcaacatcagcagagattagcaagtgctctggctgggcttattgccaaacaggaattgttggaagctttgctggcttggttgcaatgggctgaaactacacttactgataaggataaagaagtcatcccccaggagatcgaagaggtgaaagcactcattgcagaacaccaggtaaaataaatataatcctaactcctgttaaccattatctcagatattttctttctttcactgctgtacttctcaaaacattgctttgttctcgttattttcacttcttcagactcctcagctccttacaactgtgtttccaactctgcaactgccctaaaacctctctttacaggaaccctctgtgacctttgcaaaactttccttctttgtcctctgtggggttacactcgtggtattgtctcacgttcactcctgccctcccttttgccttctaaatgtcagctctccttactccttaggtgttatcctcagctctctatttctctcactctgttccctcttttggtgatctcacccacctccacctccctggcttcagtgggtacaaggtacccacattaaggtatccacattaaatgtggatgcattatgttcacattgcattaatcaaacaaggtttgattgctctgcatttttatgtctgtgaagatgactgtcatcacttgaaatacatcatatgaaaaagggaacgtgttgtctttcttaggaaaagcagccttcctatatatccttcttgttttaaactcaaatgatgggtgtcacactcactttgatttacttgattgctcacagtttgtttaatatgcatttacaaagagaaatattaagtgttagctcagttggttaagcaattaatgttgccattattttgtgtgtgtgtgtgtgtgtgtgtgtgtgtgtgtgtgtgtgttttaaaagcctaataagacatcaatgtctataatggctctaagtgtaccaggtcatgtttcctgtgatcagaggtattagagttcttcagtgtgacaaatattccagaaaggtgttacttcacttttcccttttgtctgggtctccttttccccatcacttttcacagtctctgcctttccacagcctttgctgcatattccaaatagagggatacctagtaaataataataataagcccaaggagatgagataagcagtggcaagatagttaaaccttttaaatacaatggtagtatactttaacccaaatagtttttaccacccttggaatagcctatttatgaatattttgatatgtccacattaaatgtggatgtattatgtcataatatatcaaagagccatcttttttttttttttttttttttttttgagaggcagggtctcactctgttgcccaggctggaatgcaatggcacagtcgtggctcactgcagcctcaagctcctaggctcaagtgatcctcccacctcagcctcctgtgtagctgggactacaggcacatgccacctggcctaatttttgaattttttgtagagacagggtttcactatgttgcctaatcaaagccatcttaaatatttcaaatatgtaggtgaaatgtgccacagaaaagttcttggaaacatcccagctacctagtttgtttgtagacagatgcttactaaagattcttctgaggagcttggaaacttgagtttggttgatgcacagacaggttattttattcacatgacttctcccatgtgtccatgcaggttattccactaaaacaaattatttttattttcaatttactctctttacaagcattaacattttatttatttatttatttatttttgagacggagcagagtctcactctgttgcctaggctggagtgcagtggcacaatctcggctcactgcaacctctgcctcccaggttcaagcgattctcctgcctcagcctcccaagtagctgggactacaggcgtgcaccaccatgcctggttaatttttgtaattttagtagaaatggggtttcaccatattggtcaggctggtctcaaactcctgacctcaggtgatccacctgccttggcctcccaaagtgctgggattacaggcatgagccactgcacctggccacattttatattctttagaaattagtaaatgcctgcagtatgatggtttagattttttttaccctaaagataaagcatatgatttattcttcttcagaaataataacatggttcttttatccttctgcttttagttcatttctaaagacggttttctgtagtaactcttatttgattgacatcatttctttcatttcagaccttcatggaggaaatgaccagaaaacagcctgatgttgataaagtaacgaagacctataagaggagagctgctgatccttcctcattacaatcccatattccagtcttggataagggacgagcaggaagtaagcagtgatcaatttctttaaaatgtcaataaataagggagctaattttcttttattttgaattatttgaaatttgggggcaattggtgattttacatgagcacttgatatcatgaaatactttctagaaggaatacgtgtgctcaagtattgtagaaacttatttaaaaataaagaaaaaatatacccaggtttctatacgtaactttattgtcttgaagtgtatctttcatattagctagaagaaaattgaaaaaatttacagtaagaatggaaatcatcacaccctttgcattgtctcatttgtcttccattatatatataacattaaagctgaacataacaaaaatgaccatgacgtggataatcttcatgacttagttgttcattggtgaccagcaatctcatagcttttgcccatgttcatgtgacttcaggctctatatacttcttgagctactttaacaacatgacatgacattgaaaacaatcatagttagcttggagaagatttaaaaagaaacacaatttgtgttatatgttttatgcgtttctgaatagaaatgcattttgcgtattacttaattttttaattaaaaagaaatgatgtcggagctattgtaattacttactacacaaggagacaaggtaaactattaagagccctatagccagactccttggctgtctccaacacttaccaaactgagaaacataaccctggacaagttacttaaactcattctgaacctcagtttcctcatctgtagaagggtataattataacttcattggactgcagtgagaattaaatgagctagtacatacaaaatgcttaacctacttccaggcatatagttaaatgctcaagtatttgttgtactataaatcctagctgggacacttaacattctatatgaccctaggctagtaatgtttctaggccgtatttagccatttagtaagatgagaaaaatttgttaaggtcattgttttgtgaagttgttgagacttgtggaaaacagccagaaagcaggaggaaagtttagtaaggcagtaaacttgggtttgagactatgcacaggaaacatgcaatctcagtggaaaatggatgtgggcgaaggctggggtcccatacacatgctgccatattttattggcatttgtgaagtgtcttgctttgactcttgtgactgcccagtgcctgctgccctcatctgctctccctttctgccttattctctaggaaggacagctgggtttgatgtaagtcattgtaaggtagtctcactggcctgggagatttcctttaacaaagtggaggatcacagcatgcttcgttgtcattgaaatggcatgaattttaagctggaagatgttttaagcataattcattgagagaggtttccagtatttaaatgcccctgtccagagatatttctttaaattgcatgaacagtgtgtgatccttaataaggaaaacagatttgggccttgacattatacatcatctaaattaggatacttttacttgcgtaaacacgtaattaagttgatgcagtcttagctagaagcaaaaaaggtcaagccttaacacatttcagcaccctggaaactgccatcctaaccgaagttataccttcacaggaaaacgctttccagcatcaagcttgtatccctctgggtcacagacacaaattgaaaccaaaaatcctagggtaaacttactggtgagcaaatggcagcaagtctggctcctggcgttggaaagaaggaggaaactcaatgatgccttggacagactagaggaggtttggaaattcataccctcaacaccacattgtcatttgccctcattcctcataacacattgccattgccaaaatcttggtattttttaacttttctgataataagcaaactcttgctatttgagtacatttttaaatttccaaaataaataccacaagtatgtgtgattttgtgaaatattgatatatgggatttggatttagggaatcaatgaagtaaaaaaaatgattatgttttaacaatcagaagctgattccttaagaataaaatctaacttgacataatgtttgctggtgatgctgcctggaaaatataatcttttatatttcagatcttttgattgtgtgtatttgattacctaagatttcaagttttagattctgcaattgggaaatttttagaagccctggggagttaagagagtggctaatagtgcagagggagagagattgaagggttaggtaagtgctgttgatctggacctgctatcccagtgagcatgactagtggtggtacttagagccggaccacctttatgactttggcattaatcagaaatttacagcttaagtttttaggaattttatttgtaaagaaaaatcagtgacagcaatggaatacattttaaaggcaaaatgtttctaagtcccctttgcaagatcatacctctttttgaaatgggaaggatatgtgtactacctagagaatcatttcaaaagttattcatatagtatagtctacaattttagtacagcattaactcaatcaaaatactttttgtccttttagctgagggaatttgctaactttgattttgatatctggcgcaaaaaatacatgcgatggatgaatcacaagaaatctcgagtgatggacttcttcaggagaattgataaagaccaggatgggaaaataacgcggcaggaatttattgatggaattctttcctcaagtaagttccaagacagatgactatgactgatacaatttttaaaggaaataagcacattttaaaagtgtgggtctggtaaacttgtgttacaataaagcattgtcttataagttgcctaggaagtcacgacccttaaaaaaatgtttttttggtaaaatttgtggctctggagtcaggaacactcactaactgtgtaatcacagatatgttgttccctccactgaggctgagaacttgttagaataataaagttaataatatatgattcttaaggtgttttctgtgtgtgtgtgtgtgtgtgtgtgtgtgtgtgtgtgtgtgtgttgcctggcatatgtgtaataggaagtcaataaattcaagtccctttttcattctaattcacattctgatctaactttgtcattagtaggaaattagaactctataaaacttcttaagatacttatcacctttttgtttgatggcccaatcatttgtatgtgatttccctgacagatgttactagatgtcattcttaaggtaaatttcatataatttattctttgactagcaattgacccatataaaattgccagtgttaaacattttcaacctaaaaaaacagcattttatatgattcacctaaatagtaattaaagataaattaagattatatataactcttcatttgctgtgatgtaaatcagttttttaaaaaaggattttaatatatttgatcactgatgatttaaccagctacactgagattgaaatgtgcaattgagaatgtcttgagaaagaactaacaagtcactacttaccattgttttcaaaattttagagtttccaaccagtcgcttggagatgagcgcagttgcagacatctttgacagagatggcgatggatatattgactactatgaatttgtagcagcccttcacccaaataaagatgcatataaacctatcacagatgccgacaaaatcgaagatgaggtactcattatcttcccattgcgtacaacactgatagtatgttctgccacgatatcatgcacaattcatacaaccattttattttcactctaattgttgtgtcaaagttttaaggattgtactatgtaatattgacattaaagtaaatatttcatcattgtttttggcaggtgacaaggcaggtagctaagtgtaaatgtgcaaagcgatttcaagttgagcagattggtgataataaatacagggtaagttttcaaagtaatgttgtagttcctttaaaggacataaattgaaatctgtatacaatttgatctccattgttttccaggagtcttatttatttacttttttacctcatgtcaaaatttaatggtatatgaaactcttacatttaacattttaatttgtataacggcagcctgcattttgcatattaggaaatatctttgacatctacatcatgcacattacctttaaagaaaaattcacaagaaaatactcaaatctcatatatttaggttgcttcatattattttatattttgttatgattagaggtaagttttcagatttcaaacaagaaagctactctaatccagaaccacaaagttaaaaatatggactcattttaataaatatgaaaagagaggataatgtcttctccacttgtgcagtaatttttgcttttattcaaaatctcaattaactcggttcactctcttcaaaacagaagaacagtgtgacttcattactctttctctatttttttttttctcttttggaacatctcttatatgtagtagctagataagaaatgtgctgagtttccccaatacagtgtgctacttctaaatgaaatattatttttatttttatacttaaaaaaataatcatcaatgtattcaaaattttaacttaaatttgaaatcctaagattttcaaaaatatgtgtacagaaaatagtctgattatttggtttgaaattgggacaactgggtgcctgcacatctctaaactagatactacatccagaagcacagagtgtgagtatgtgtgtatgttctagagtcatacagaaagtttcctgttgaactaattgtgtctttcttccatttttcatttttatcagttcttcctgggaaatcaggtataaaccagtggaatgtattctcaagttcctgatgatttttttttaactttaattcatagtcattaaagcttgccatggccaatctttcccatgctgtctccctagctactacattgttggttggcgtggtgtttctgtaaacgctataagggtccttgatccaggattcctttttgccttgtgtctctcagatgaggagattacttttaagcaaaccagataatgaattgtagcttggcttgctacaatgttacgaatgcaatttttaattcccattttttataatatgagcatatattttatgctagtactcattggaacacaaatttgattctccacacatctctgtgttaggctcattggtgtttaactgtttaggacatacggtctacagtagctgagaaggatcagcctcaggcagtgacacaggaagacagagagccaagaggtctccttggcactcagccacaagtaacaagttctctccaaagaagctatttgccatttgttcaaaatcaccaattttggggcttggcatctctgagtagaaatgttaactcagtaggctttaagtaatattccttttgaggaaagttatcgctataatatatgcagaatcttaaagtcacattttatgccatcttgatcgaatatttatattattggcacttaagtcaatataaaatgtttatgttgacatttaagtcagtataacctgtgtagtggcactacatcatgatcagaattttgaaactaaggagatactctgttttgatttaaacatgttcatgaagcttttattttattttattttattttactttggaaagaaccatgctatctatagtatctgaccatattacattagatatgactctgccactccattttaaagccatattacatctcaagcttcaaattatctattacctttatttattgcaagcaaataatttatttaaaatagaaatagttacttggaatagatttttaaaacttccattagttatactataatactgaaatgttacttttccattcttgctattttcggagtcagcaaatgggagagcatcttttatttgcagagagaatgagagaaatacctcaaaaggttttactcactgaaagcacagtcagcaacattagtctattttctcttgtcttgtgatttggttactgggaatatttagagaaattctgaagatgatgttagttgtctggagaatgcctaattaaaacagaaaattatttgtattcattacacttgaaatatcatctctataaggaacttttagttatttccttataacttttgttttgagtataatcttgaaccaaaatcatctagtcccattatctggttccttaagggtaattttctttaaatcccctcctttccctttgcttattagcggcaccaatttttttctaacaaaataaatttacacttttatttttaaattttaattaacatttcaggaagaattataggaaagtttaagtctcaatgtttaaggaaaaaagatttagaaatagtggtttttaaaagtttgatggaaaaacacatgagttcctgctggtgcattttacatgctttctaggtccttctgagttttaggatcctgagggatttggttggtattgtttttgggttttcttcttgaaactcagtattaaaacactgaaaagtagcagatttttttctacctagagttttctgtttatccatcatgagcccaaataaagtcacaattgtatgttacctgctttacaaagaagccatttatgtttaattgactgttcattttgctttcttgtctgctgggatgacaaccgtgaaattcagtctggtagtttttatgagttggacatgaacctattagaaatgatttaaagtataaaatcatttctcacaggctttcaaaacataaacctgtgatcagaaacctggaatctagaaatttattcaggacttgcagaatttgtagcatatctacattattggagatctattgaaagggcaagaaaaagatgattgcctgttagtatcaacagttatggtacagacaactatgagagaaaccttttagatttggcagctgtatcattaataatgtgtcattggctattctaatattacagtaatctaaaatggcatattaatccagcctttaacaaattggtttaccagatcattagggatgcagaaattttagttgactgtgaaatttatatgagtcatactcatttactttattctttttaagtgaaaactgcccttacagaaaagaaaatgagtttataaagatttctcacagagttcagtggaaaacggttttactgtaagagagagtttaatgaagaagaatcaaagcttattaaatttttcttagaatcattttattttggataagccctgggcaagtgggccagtgcttactttcatggctatgtttaattcctagaaacattttaaaattactgccttactaatattgtttctgtcataagaaagaaaaataatttttagaccaaagctttggtagtatacttgataacctttgtaatcttttttttttcaaactgtttcctttgggctaaatcagcatgcagccgtctaacacaaatcattacaaacccccttttctgagattttactaatcgctatgaactaagcaagaaattaaagtcggttgctttagctactgcaaattgcacatcatcctgtagtttagaattattattgacaactagaggttctttctttcttcactgaacagtttggagactcccagcaactgcgactggtccggatcctgcggagtactgtgatggttcgtgttggaggtggatggatggcacttgatgagttcttagtgaaaaatgatccttgcaggggtaaggagatgcttatcatgataacatcatgaaagtatttcaattttatattatatccagcaccaaaacatactgggcataattttggtcatttattccaatagtgaatgtttcacattggtctgtcagcctaaagttcccaaagaacctgtggcagtcatgtaaaccatattcttctcatttttttctttcttttttttttttttttttactttttctggataaatatggtgggcgggaaatactagaatccattttctttaggagacttttacatctacgattttccaaacaattataccaaccaaggaaaggattttgtctgttatgacatagcaaagtaagagaaaagaaaattgaggtgatgaagaccgaaaatactggataataaaagtttaaaggtcaaagtttttatgaaatgaagagcaggtgaggaaagccataattaaaaaatttttaaataataatccaatgctaacttgactctttgaagttgcagattagaacattaaaaatataaacatataatactatagctctctacatatcttccagcccaagtcctaagttagcttttaatttttctgttttgagatccttctgtcaatttttaagttctcaaccaatttacgttacacgtggtcatttgattgcaatttctaattaggtaccaattactcagtaggcccatttttcttcccccccaagaaaaaaacaataaaattgttataattttcttttacctgtgagctcactgtaatcctttttagcaaacaacaaatgttcacgtcagtgctgtctccttcagctaccaagtgggatcccaggtttcctcctgtagggcctcttggttttggtgatggtgtcaccatctggtacacatagacatatcagtcatcaggcttctccaccaaggccaccatggattgttatacatgttatacagtagccctgctctctcctggccaaagacacacctgcgagagaagtaaaacaagaacaaaagctcctgtttgttttatattttgaaaataatgtagcctaaggtaaaatgcaactccatttatgaagaaatcagaatacatagtgttctgttgggttgcttaggaaggttagcatggctgtggcacagtcttccaaatacatttttcttattgagccaatcccttgagtgcttcttttcctgatgcaacttttcttctaaaatgtgtgctaaaggccagatgtgagcaccctttgcatattcaactactgtactttgtttcttcttctgctaacagtattctttaatgtgattggtatcctgtgtcattttttctagttcatcatcatgggagtaaaatgttacgttcggaatcaaactcttcaattactactactcagcctactataggttggcaacctctctctttgcctctcccctctttccttttctctttcctacttttccattcttgcttcagtcatttgttttaaaataacatgcttcatccatcgcgtatggcttaactcatatccagctgagctggtgcttccaaatttaaattctgaaaatttgatgactttggttgtgttacacatgcaggtgttataagtgatcaaacacatgctaacacgttgctcaccgggttcttgtggagtgttctccgtgtgcgtatgtgtttgtatgagtgctgcatcactgactacctcacagatccttgggtctggtgtttgttattgcatgttggtaaaacagtttttcaaggcataaaataaaaatactagctgcctcatttaagtgaaaaatccagaagtttatatgttgtcatcatgactaacaagccatcaatcattgtgtgtaattatattctttaatttatccccatgttgaaatactggcattctctttacctcaatagtacatgcaaaagacacagtccctgccttactggtctgtcttctcagtgtgatgagagggtaatgaaaccatgtgggcatctgtagctggtggattaatgatattttagcatgagctttccattttcatgctgacactttctttaatagtggttattcttgctggtgtctagtgttagaataagcacactttattttttcctccccgaactcacctgtatccaaaaggaatgcattgtaaaggaatgcatttaactttttgttatgctgagttggagttggcatggcaaaaagatgttcttgaaattctcaacgtgatctctggtgccaggtggccgttcttcccattaacgattgagcgcctcttcttttccgtcttttctttgtgtgcattgttgtgtgtgtataacccagccaaaggaaggacaaacatggaactgcgtgagaagttcattttagcagatggtgccagccagggtatggctgctttccgaccccgaggccgaagatcccggccatcatcacgaggcgcttcacccaacagatccacttctgtgtccagtcaggctgcgcaggcggcctccccacaggtccctgccaccaccacacccaaggtaagactcaggatgaagacttttcctccacctttgcaatcaatgtcccaagtagacttttgaatgttctatttagggccctagaatttgtaggaccagctatctccatttgtgcaccttctcatactgtgggaaatacaggaatttttttttgaatgtatgcttttgcctagtggcccacatagagatgatctatttaggaagcctttgtgatcttccagattgatttttctttttaaagcttcattcatttttttggtgtgtatgatttgccattggatcttttcacttattttaaattattattcttactgtgaaatgtgactctttgctatgaatatctctttctgtggctttgttttttttatctgctatccttttcatttgatttgccattgttccatacagattctccatcctttaacacgcaattatggtaaaccatggttgacaaacagcaaaatgtcaactccttgtaaagcagcagagtgctcagactttcccgtgccatctgcagaggtattgtaaggccccagagtccagtcttaacattctcctttaactgaagctatcactcactaacatcgttgcaccactccctaaatatatgtactttgctaaccctatgtctttttatacacttctataagataagtatcaaccgagcagttcttggaagatgtgagagtaaggggttaacagaaaagatagtctgcagctctttaaacagtgtcaatttgacccagtcactcctgcagactacctcctttttgttctcattcgtacttagttccactgttatctcttgggagagtaacatagagtaggttatagccagacttaagtaaaatttcttttaaagctactaaatatactagatataatatgggcaagaagtgcaacacattcccttcaaatgggagtaaaaggcagtatgatttgcaagagcatcactgaaaagaatgtttactgaatgttcactgtgggcatggtccttctggatgtctgttacatttatacctgccccaaaactttgggcaggtgtgacataagctctcagtatcagtgcaggggggtcagaggggtaggcttaggtatgcagaaagttatttgtcattttcaacaggtaataaatgtatgggttttttttaaagattttaataactaatttaagcatgctctaactttttaatacggcatgatatatggggagaagatatttaggtgatataaaatttgccaagatgaactcatgtatcaggtcatttacattcaattgaaaatcagctgtatatctttttaagaaatttcactgtgaaacaacagacataggtacaaaataatcagatattttattagaatcccaataattagtggggaaaaatccctaaataccttttcttgaaattgaagaaggtatttcaccttaatgataaaggacgtaacttaaaggccaggatcctcaaataaaagtaatataataacttttaaaagccctcttatgcttttcaaaacactttcttgtctgttacttaatcctcacattaataataagtgacaggcagagaaaaaatgtgttaccttcatgactccatggcaatctcattgctgagaagtgggagaattggaacaaaaacaacccattctttagcgtttcctcatttcttcctcctcattttcccaagcccctcatttccaccccttcccaccaactgggtgatgttagtattatatattacctctagagatgtctgtcaattattatggatctattatagcaaaaacagagaaaggttcaaacaacctcaagggacatattaacatttgctttaaatattgaaggctatgatgctgtgttcaaaattttttttaagtggaaactctctcaaagtctaagtagttattttgactagtgcaaaactgtgtttcatttcaaataacgtgatgaaacaaaaaaccaaaaaacaacatgtttctatgggagggactgtgaaataaaatcaaaacaatcaaggcattctgagaagaatgattttggtctttcacggttatgaattctgccaccttgagtggtatgtttcataatttgtggcttctcactccctcgtgttgttgagattctgtttaagttaggaatttagctagatcagcattgtcagatcttgggcaaatcatgtgcctcctcaggctcttgatttttcacattttcaaggttatgattaggtgagtgtgaggattaattgtggttatgtgtgtaaaagtattttgaaaacttgaacattctatgtatacaaatcacatatagatactacacttaagtgtatgtatagtatacacatatgtagataaatgactattaatattaataagagtaactcatgtatcagatgattataacattttaagctaataaagggaaaatcagttgtttaaaaatatacatgtaatttgtttcaatgcatttcctccaaatagttctctggctgtgttttcattgaggaatattatattacattccctatgttcctcaagatacttgtttattttttttaactttgggagaattttttaaatgttgtgatctggaaaaagtgcaatgattgtataataaaatctcatacttatgattgttttagacattctctacaaactcatataaagattgtaaaaaaaaaacttctccaaatgttgcctatgtattttgtctgtaaagactgtagaagtgatagagccaggaagtgaagtgatgtggtagcaagttatttaaaaatcactttttttctttttgcagttaagtttatttaaatgatgtctgtatccattatttatttacttatcattctgtgtctgtctctgcctggctccataaaagcaatggaggcagcagaatatccagacacagtttttctctgctccatgccccctctatgcatgcagtcaccatctttttagcaatacaccattaactctggaatattcactgacagtctgaaagatactaacatactcaccatttatttctccttgccatcacttttatgctcagttttgggggtctccattttgttttctcttcaaccatgaattcatattgtttagaaagtttctttgaattctgagagagaatgagaaattagaagagaaaatcaagtgagaaccccatgccttatttaattgaagagtttctcccccttcacctcctaaagaggaatagtagagagtttccacccatatgtaaagaagtggtgtcagtggaatatcatggtacaggagcaatattttgaaatgtcttgttgctggttaaatacagggaacgccaatacaaggaagcaagcttcgacttccaggatatttatcagggaaaggcttccactctggggaggacagtggcttgataacaactgcagctgccagagtccgaacacagtttgctggtgagtgtggtgcctttcttttttcaatggcttttgcagcatggtcatctgaggattaaagtcccttttcctcctcattggggaagaaattacaaattgaccctgaggtagtcttaaaatgatatgtagccccagtcctccaaaagttggggataaagtgagtcatgggtgcaagtgtctaaaagtgtccaagaaagatgaaagaattactgtacaacagaggaaaatatacagtggtattctaccccttcaagctgaaagattttggctcttctgccagctcagcgattgcacagggccctgttttggggtggttggaagaacccagccacactgagcctcacaccagtgtagctcacattgcttcgcaaaataatgaacctactaatctctgggttctgagctcagcaagcaagaagcctctttaaagtttccaatctcatctgttgaattcctacattcttggagttacctattcttgggcaagacttaaacctgtcttgtttgttctatgtttgcatcacacgcatccctggaggcataatttaaactttagaaagcacaatcttaaaggataggtatattccttatgtctgtttgcaataaatggaatcctgttttaagtaggggaagccgaaacttaccttgtagttggaaatctagccttttctatattatgtctacttagagtaagcctgcatacccttgtgtaatagagaaaggctgtgaatccacaactgttttctgagtgcctactacacaccaggaaaaaaagttaagattaaaggtggcatcgggtttcaaaaattagttgcagatggacccaataataagggtgagctgtctctaccttctttcctcagattccaagaagactcccagccgaccaggaagtcgagctggaagcaaagctggcagcagggccagcagccgccgaggcagtgatgcatcagactttgacatttcagaaatccagtccgtgtgctcagatgtggaaactgtcccccagacacacagacctacaccccgagcaggttctcggccatccacagcgaagccttcaaaaatccccacgccccagaggaaatcacctgccagcaaattggacaagtcctcaaagagatagtgcaattggttctaccaaggcccttccttgagcatttattatttaagtttgaacgatgtaaaatatggtgtagaaattcttgtgaaatattgcaagaggcgagtttaaaattctgcagatggccttatttgtgtatttgtctttttattttatctgtataattttttttgtcagatattctggggttaaagtcacatcatatgtgaggaggaaaagtttaacatgaactaacatttctgcactgtaacgtgccgggcacacactaaactcagttactgtacctacaggtaagtctacatcctctctgacagccacagcactacatcaatccctgacgttagggatacctcatgacattttcctgtttttatggaaactctgagaagctgaatgatacatgcaggggatattttttgagatgatttaaatgtaaaccaaaagatggaagacaaaaagacaaacacacccacacgcagtctttgcagtatctgacagagaactcacaggaagttacttcaagcacttgccagtactatgatattcaagtaccttgcagcatttctctgccattgctttcaatgaggccagaggcatcctggatattagacctattatactgtaagaatataagtataaagtgcgttcatatacatgtgaggttttcttttgcttgagtggacagtagcacctgtatcattgaactcattttgtatcagagcaattttgcttgcagaaagctatgaaataaaacacgtcccttaactgcattgctatggaattaattttttttccccagggaaaactagtgtatttttttatgagcaatatcaatttggagtgaccaaaagatacttaaaaatgggtttattttgatttctcatctgaaataatcatgttctggtattatatctatctatatttaataaatatatacattttaatttattatgtgtactcacatactatagaaagatattagtatgcatttaataaaacatattcacttgaatatatggaa

SEQ ID NO: 8740 - DNA, 38771 bp, Homo sapiens; identical to SEQ ID NO: 7561
  SITE (7892): n equals a,t,g, or c
  SITE (7893): n equals a,t,g, or c
  SITE (7894): n equals a,t,g, or c
  SITE (7895): n equals a,t,g, or c
  SITE (7896): n equals a,t,g, or c
  SITE (7897): n equals a,t,g, or c
  SITE (7898): n equals a,t,g, or c
  SITE (7899): n equals a,t,g, or c
  SITE (7900): n equals a,t,g, or c
  SITE (7901): n equals a,t,g, or c
  SITE (7902): n equals a,t,g, or c
  SITE (7903): n equals a,t,g, or c
  SITE (7904): n equals a,t,g, or c
  SITE (7905): n equals a,t,g, or c
  SITE (7906): n equals a,t,g, or c
  SITE (7907): n equals a,t,g, or c
  SITE (7908): n equals a,t,g, or c
  SITE (7909): n equals a,t,g, or c
  SITE (7910): n equals a,t,g, or c
  SITE (7911): n equals a,t,g, or c
  SITE (7912): n equals a,t,g, or c
  SITE (7913): n equals a,t,g, or c
  SITE (7914): n equals a,t,g, or c
  SITE (7915): n equals a,t,g, or c
  SITE (7916): n equals a,t,g, or c
  SITE (7917): n equals a,t,g, or c
  SITE (7918): n equals a,t,g, or c
  SITE (7919): n equals a,t,g, or c
  SITE (7920): n equals a,t,g, or c
  SITE (7921): n equals a,t,g, or c
  SITE (7922): n equals a,t,g, or c
  SITE (7923): n equals a,t,g, or c
  SITE (7924): n equals a,t,g, or c
  SITE (7925): n equals a,t,g, or c
  SITE (7926): n equals a,t,g, or c
  SITE (7927): n equals a,t,g, or c
  SITE (7928): n equals a,t,g, or c
  SITE (7929): n equals a,t,g, or c
  SITE (7930): n equals a,t,g, or c
  SITE (7931): n equals a,t,g, or c
  SITE (7932): n equals a,t,g, or c
  SITE (7933): n equals a,t,g, or c
  SITE (7934): n equals a,t,g, or c
  SITE (7935): n equals a,t,g, or c
  SITE (7936): n equals a,t,g, or c
  SITE (7937): n equals a,t,g, or c
  SITE (7938): n equals a,t,g, or c
  SITE (7939): n equals a,t,g, or c
  SITE (7940): n equals a,t,g, or c
  SITE (7941): n equals a,t,g, or c
  SITE (7942): n equals a,t,g, or c
  SITE (7943): n equals a,t,g, or c
  SITE (7944): n equals a,t,g, or c
  SITE (7945): n equals a,t,g, or c
  SITE (7946): n equals a,t,g, or c
  SITE (7947): n equals a,t,g, or c
  SITE (7948): n equals a,t,g, or c
  SITE (7949): n equals a,t,g, or c
  SITE (7950): n equals a,t,g, or c
  SITE (7951): n equals a,t,g, or c
  SITE (7952): n equals a,t,g, or c
  SITE (7953): n equals a,t,g, or c
  SITE (7954): n equals a,t,g, or c
  SITE (7955): n equals a,t,g, or c
  SITE (7956): n equals a,t,g, or c
  SITE (7957): n equals a,t,g, or c
  SITE (7958): n equals a,t,g, or c
  SITE (7959): n equals a,t,g, or c
  SITE (7960): n equals a,t,g, or c
  SITE (7961): n equals a,t,g, or c
  SITE (7962): n equals a,t,g, or c
  SITE (7963): n equals a,t,g, or c
  SITE (7964): n equals a,t,g, or c
  SITE (7965): n equals a,t,g, or c
  SITE (7966): n equals a,t,g, or c
  SITE (7967): n equals a,t,g, or c
  SITE (7968): n equals a,t,g, or c
  SITE (7969): n equals a,t,g, or c
  SITE (7970): n equals a,t,g, or c
  SITE (7971): n equals a,t,g, or c
  SITE (7972): n equals a,t,g, or c
  SITE (7973): n equals a,t,g, or c
  SITE (7974): n equals a,t,g, or c
  SITE (7975): n equals a,t,g, or c
  SITE (7976): n equals a,t,g, or c
  SITE (7977): n equals a,t,g, or c
  SITE (7978): n equals a,t,g, or c
  SITE (7979): n equals a,t,g, or c
  SITE (7980): n equals a,t,g, or c
  SITE (7981): n equals a,t,g, or c
  SITE (7982): n equals a,t,g, or c
  SITE (7983): n equals a,t,g, or c
  SITE (7984): n equals a,t,g, or c
  SITE (7985): n equals a,t,g, or c
  SITE (7986): n equals a,t,g, or c
  SITE (7987): n equals a,t,g, or c
  SITE (7988): n equals a,t,g, or c
  SITE (7989): n equals a,t,g, or c
  SITE (7990): n equals a,t,g, or c
  SITE (7991): n equals a,t,g, or c
  SITE (7992): n equals a,t,g, or c
  SITE (7993): n equals a,t,g, or c
  SITE (7994): n equals a,t,g, or c
  SITE (7995): n equals a,t,g, or c
  SITE (7996): n equals a,t,g, or c
  SITE (7997): n equals a,t,g, or c
  SITE (7998): n equals a,t,g, or c
  SITE (7999): n equals a,t,g, or c
  SITE (8000): n equals a,t,g, or c
  SITE (8001): n equals a,t,g, or c
  SITE (8002): n equals a,t,g, or c
  SITE (8003): n equals a,t,g, or c
  SITE (8004): n equals a,t,g, or c
  SITE (8005): n equals a,t,g, or c
  SITE (8006): n equals a,t,g, or c
  SITE (8007): n equals a,t,g, or c
  SITE (8008): n equals a,t,g, or c
  SITE (8009): n equals a,t,g, or c
  SITE (8010): n equals a,t,g, or c
  SITE (8011): n equals a,t,g, or c
  SITE (8012): n equals a,t,g, or c
  SITE (8013): n equals a,t,g, or c
  SITE (8014): n equals a,t,g, or c
  SITE (8015): n equals a,t,g, or c
  SITE (8016): n equals a,t,g, or c
  SITE (8017): n equals a,t,g, or c
  SITE (8018): n equals a,t,g, or c
  SITE (8019): n equals a,t,g, or c
  SITE (8020): n equals a,t,g, or c
  SITE (8021): n equals a,t,g, or c
  SITE (8022): n equals a,t,g, or c
  SITE (8023): n equals a,t,g, or c
  SITE (8024): n equals a,t,g, or c
  SITE (8025): n equals a,t,g, or c
  SITE (8026): n equals a,t,g, or c
  SITE (8027): n equals a,t,g, or c
  SITE (8028): n equals a,t,g, or c
  SITE (8029): n equals a,t,g, or c
  SITE (8030): n equals a,t,g, or c
  SITE (8031): n equals a,t,g, or c
  SITE (8032): n equals a,t,g, or c
  SITE (8033): n equals a,t,g, or c
  SITE (8034): n equals a,t,g, or c
  SITE (8035): n equals a,t,g, or c
  SITE (8036): n equals a,t,g, or c
  SITE (8037): n equals a,t,g, or c
  SITE (8038): n equals a,t,g, or c
  SITE (8039): n equals a,t,g, or c
  SITE (8040): n equals a,t,g, or c
  SITE (8041): n equals a,t,g, or c
  SITE (8042): n equals a,t,g, or c
  SITE (8043): n equals a,t,g, or c
  SITE (8044): n equals a,t,g, or c
  SITE (8045): n equals a,t,g, or c
  SITE (8046): n equals a,t,g, or c
  SITE (8047): n equals a,t,g, or c
  SITE (8048): n equals a,t,g, or c
  SITE (8049): n equals a,t,g, or c
  SITE (8050): n equals a,t,g, or c
  SITE (8051): n equals a,t,g, or c
  SITE (8052): n equals a,t,g, or c
  SITE (8053): n equals a,t,g, or c
  SITE (8054): n equals a,t,g, or c
  SITE (8055): n equals a,t,g, or c
  SITE (8056): n equals a,t,g, or c
  SITE (8057): n equals a,t,g, or c
  SITE (8058): n equals a,t,g, or c
  SITE (8059): n equals a,t,g, or c
  SITE (8060): n equals a,t,g, or c
  SITE (8061): n equals a,t,g, or c
  SITE (8062): n equals a,t,g, or c
  SITE (8063): n equals a,t,g, or c
  SITE (8064): n equals a,t,g, or c
  SITE (8065): n equals a,t,g, or c
  SITE (8066): n equals a,t,g, or c
  SITE (8067): n equals a,t,g, or c
  SITE (8068): n equals a,t,g, or c
  SITE (8069): n equals a,t,g, or c
  SITE (8070): n equals a,t,g, or c
  SITE (8071): n equals a,t,g, or c
  SITE (8072): n equals a,t,g, or c
  SITE (8073): n equals a,t,g, or c
  SITE (8074): n equals a,t,g, or c
  SITE (8075): n equals a,t,g, or c
  SITE (8076): n equals a,t,g, or c
  SITE (8077): n equals a,t,g, or c
  SITE (8078): n equals a,t,g, or c
  SITE (8079): n equals a,t,g, or c
  SITE (8080): n equals a,t,g, or c
  SITE (8081): n equals a,t,g, or c
  SITE (8082): n equals a,t,g, or c
  SITE (8083): n equals a,t,g, or c
  SITE (8084): n equals a,t,g, or c
  SITE (8085): n equals a,t,g, or c
  SITE (8086): n equals a,t,g, or c
  SITE (8087): n equals a,t,g, or c
  SITE (8088): n equals a,t,g, or c
  SITE (8089): n equals a,t,g, or c
  SITE (8090): n equals a,t,g, or c
  SITE (8091): n equals a,t,g, or c
  SITE (8092): n equals a,t,g, or c
  SITE (8093): n equals a,t,g, or c
  SITE (8094): n equals a,t,g, or c
  SITE (8095): n equals a,t,g, or c
  SITE (8096): n equals a,t,g, or c
  SITE (8097): n equals a,t,g, or c
  SITE (8098): n equals a,t,g, or c
  SITE (8099): n equals a,t,g, or c
  SITE (8100): n equals a,t,g, or c
  SITE (8101): n equals a,t,g, or c
  SITE (8102): n equals a,t,g, or c
  SITE (8103): n equals a,t,g, or c
  SITE (8104): n equals a,t,g, or c
  SITE (8105): n equals a,t,g, or c
  SITE (8106): n equals a,t,g, or c
  SITE (8107): n equals a,t,g, or c
  SITE (8108): n equals a,t,g, or c
  SITE (8109): n equals a,t,g, or c
  SITE (8110): n equals a,t,g, or c
  SITE (8111): n equals a,t,g, or c
  SITE (8112): n equals a,t,g, or c
  SITE (8113): n equals a,t,g, or c
  SITE (8114): n equals a,t,g, or c
  SITE (8115): n equals a,t,g, or c
  SITE (8116): n equals a,t,g, or c
  SITE (8117): n equals a,t,g, or c
  SITE (8118): n equals a,t,g, or c
  SITE (8119): n equals a,t,g, or c
  SITE (8120): n equals a,t,g, or c
  SITE (8121): n equals a,t,g, or c
  SITE (8122): n equals a,t,g, or c
  SITE (8123): n equals a,t,g, or c
  SITE (8124): n equals a,t,g, or c
  SITE (8125): n equals a,t,g, or c
  SITE (8126): n equals a,t,g, or c
  SITE (8127): n equals a,t,g, or c
  SITE (8128): n equals a,t,g, or c
  SITE (8129): n equals a,t,g, or c
  SITE (8130): n equals a,t,g, or c
  SITE (8131): n equals a,t,g, or c
  SITE (8132): n equals a,t,g, or c
  SITE (8133): n equals a,t,g, or c
  SITE (8134): n equals a,t,g, or c
  SITE (8135): n equals a,t,g, or c
  SITE (8136): n equals a,t,g, or c
  SITE (8137): n equals a,t,g, or c
  SITE (8138): n equals a,t,g, or c
  SITE (8139): n equals a,t,g, or c
  SITE (8140): n equals a,t,g, or c
  SITE (8141): n equals a,t,g, or c
  SITE (8142): n equals a,t,g, or c
  SITE (8143): n equals a,t,g, or c
  SITE (8144): n equals a,t,g, or c
  SITE (8145): n equals a,t,g, or c
  SITE (8146): n equals a,t,g, or c
  SITE (8147): n equals a,t,g, or c
  SITE (8148): n equals a,t,g, or c
  SITE (8149): n equals a,t,g, or c
  SITE (8150): n equals a,t,g, or c
  SITE (8151): n equals a,t,g, or c
  SITE (8152): n equals a,t,g, or c
  SITE (8153): n equals a,t,g, or c
  SITE (8154): n equals a,t,g, or c
  SITE (8155): n equals a,t,g, or c
  SITE (8156): n equals a,t,g, or c
  SITE (8157): n equals a,t,g, or c
  SITE (8158): n equals a,t,g, or c
  SITE (8159): n equals a,t,g, or c
  SITE (8160): n equals a,t,g, or c
  SITE (8161): n equals a,t,g, or c
  SITE (8162): n equals a,t,g, or c
  SITE (8163): n equals a,t,g, or c
  SITE (8164): n equals a,t,g, or c
  SITE (8165): n equals a,t,g, or c
  SITE (8166): n equals a,t,g, or c
  SITE (8167): n equals a,t,g, or c
  SITE (8168): n equals a,t,g, or c
  SITE (8169): n equals a,t,g, or c
  SITE (8170): n equals a,t,g, or c
  SITE (8171): n equals a,t,g, or c
  SITE (8172): n equals a,t,g, or c
  SITE (8173): n equals a,t,g, or c
  SITE (8174): n equals a,t,g, or c
  SITE (8175): n equals a,t,g, or c
  SITE (8176): n equals a,t,g, or c
  SITE (8177): n equals a,t,g, or c
  SITE (8178): n equals a,t,g, or c
  SITE (8179): n equals a,t,g, or c
  SITE (8180): n equals a,t,g, or c
  SITE (8181): n equals a,t,g, or c
  SITE (8182): n equals a,t,g, or c
  SITE (8183): n equals a,t,g, or c
  SITE (8184): n equals a,t,g, or c
  SITE (8185): n equals a,t,g, or c
  SITE (8186): n equals a,t,g, or c
  SITE (8187): n equals a,t,g, or c
  SITE (8188): n equals a,t,g, or c
  SITE (8189): n equals a,t,g, or c
  SITE (8190): n equals a,t,g, or c
  SITE (8191): n equals a,t,g, or c
  SITE (8192): n equals a,t,g, or c
  SITE (8193): n equals a,t,g, or c
  SITE (8194): n equals a,t,g, or c
  SITE (8195): n equals a,t,g, or c
  SITE (8196): n equals a,t,g, or c
  SITE (8197): n equals a,t,g, or c
  SITE (8198): n equals a,t,g, or c
  SITE (8199): n equals a,t,g, or c
  SITE (8200): n equals a,t,g, or c
  SITE (8201): n equals a,t,g, or c
  SITE (8202): n equals a,t,g, or c
  SITE (8203): n equals a,t,g, or c
  SITE (8204): n equals a,t,g, or c
  SITE (8205): n equals a,t,g, or c
  SITE (8206): n equals a,t,g, or c
  SITE (8207): n equals a,t,g, or c
  SITE (8208): n equals a,t,g, or c
  SITE (8209): n equals a,t,g, or c
  SITE (8210): n equals a,t,g, or c
  SITE (8211): n equals a,t,g, or c
  SITE (8212): n equals a,t,g, or c
  SITE (8213): n equals a,t,g, or c
  SITE (8214): n equals a,t,g, or c
  SITE (8215): n equals a,t,g, or c
  SITE (8216): n equals a,t,g, or c
  SITE (8217): n equals a,t,g, or c
  SITE (8218): n equals a,t,g, or c
  SITE (8219): n equals a,t,g, or c
  SITE (8220): n equals a,t,g, or c
  SITE (8221): n equals a,t,g, or c
  SITE (8222): n equals a,t,g, or c
  SITE (8223): n equals a,t,g, or c
  SITE (8224): n equals a,t,g, or c
  SITE (8225): n equals a,t,g, or c
  SITE (8226): n equals a,t,g, or c
  SITE (8227): n equals a,t,g, or c
  SITE (8228): n equals a,t,g, or c
  SITE (8229): n equals a,t,g, or c
  SITE (8230): n equals a,t,g, or c
  SITE (8231): n equals a,t,g, or c
  SITE (8232): n equals a,t,g, or c
  SITE (8233): n equals a,t,g, or c
  SITE (8234): n equals a,t,g, or c
  SITE (8235): n equals a,t,g, or c
  SITE (8236): n equals a,t,g, or c
  SITE (8237): n equals a,t,g, or c
  SITE (8238): n equals a,t,g, or c
  SITE (8239): n equals a,t,g, or c
  SITE (8240): n equals a,t,g, or c
  SITE (8241): n equals a,t,g, or c
  SITE (8242): n equals a,t,g, or c
  SITE (8243): n equals a,t,g, or c
  SITE (8244): n equals a,t,g, or c
  SITE (8245): n equals a,t,g, or c
  SITE (8246): n equals a,t,g, or c
  SITE (8247): n equals a,t,g, or c
  SITE (8248): n equals a,t,g, or c
  SITE (8249): n equals a,t,g, or c
  SITE (8250): n equals a,t,g, or c
  SITE (8251): n equals a,t,g, or c
  SITE (8252): n equals a,t,g, or c
  SITE (8253): n equals a,t,g, or c
  SITE (8254): n equals a,t,g, or c
  SITE (8255): n equals a,t,g, or c
  SITE (8256): n equals a,t,g, or c
  SITE (8257): n equals a,t,g, or c
  SITE (8258): n equals a,t,g, or c
  SITE (8259): n equals a,t,g, or c
  SITE (8260): n equals a,t,g, or c
  SITE (8261): n equals a,t,g, or c
  SITE (8262): n equals a,t,g, or c
  SITE (8263): n equals a,t,g, or c
  SITE (8264): n equals a,t,g, or c
  SITE (8265): n equals a,t,g, or c
  SITE (8266): n equals a,t,g, or c
  SITE (8267): n equals a,t,g, or c
  SITE (8268): n equals a,t,g, or c
  SITE (8269): n equals a,t,g, or c
  SITE (8270): n equals a,t,g, or c
  SITE (8271): n equals a,t,g, or c
  SITE (8272): n equals a,t,g, or c
  SITE (8273): n equals a,t,g, or c
  SITE (8274): n equals a,t,g, or c
  SITE (8275): n equals a,t,g, or c
  SITE (8276): n equals a,t,g, or c
  SITE (8277): n equals a,t,g, or c
  SITE (8278): n equals a,t,g, or c
  SITE (8279): n equals a,t,g, or c
  SITE (8280): n equals a,t,g, or c
  SITE (8281): n equals a,t,g, or c
  SITE (8282): n equals a,t,g, or c
  SITE (8283): n equals a,t,g, or c
  SITE (8284): n equals a,t,g, or c
  SITE (8285): n equals a,t,g, or c
  SITE (8286): n equals a,t,g, or c
  SITE (8287): n equals a,t,g, or c
  SITE (8288): n equals a,t,g, or c
  SITE (8289): n equals a,t,g, or c
  SITE (8290): n equals a,t,g, or c
  SITE (8291): n equals a,t,g, or c
  SITE (8292): n equals a,t,g, or c
  SITE (8293): n equals a,t,g, or c
  SITE (8294): n equals a,t,g, or c
  SITE (8295): n equals a,t,g, or c
  SITE (8296): n equals a,t,g, or c
  SITE (8297): n equals a,t,g, or c
  SITE (8298): n equals a,t,g, or c
  SITE (8299): n equals a,t,g, or c
  SITE (8300): n equals a,t,g, or c
  SITE (8301): n equals a,t,g, or c
  SITE (8302): n equals a,t,g, or c
  SITE (8303): n equals a,t,g, or c
  SITE (8304): n equals a,t,g, or c
  SITE (8305): n equals a,t,g, or c
  SITE (8306): n equals a,t,g, or c
  SITE (8307): n equals a,t,g, or c
  SITE (8308): n equals a,t,g, or c
  SITE (8309): n equals a,t,g, or c
  SITE (8310): n equals a,t,g, or c
  SITE (8311): n equals a,t,g, or c
  SITE (8312): n equals a,t,g, or c
  SITE (8313): n equals a,t,g, or c
  SITE (8314): n equals a,t,g, or c
  SITE (8315): n equals a,t,g, or c
  SITE (8316): n equals a,t,g, or c
  SITE (8317): n equals a,t,g, or c
  SITE (8318): n equals a,t,g, or c
  SITE (8319): n equals a,t,g, or c
  SITE (8320): n equals a,t,g, or c
  SITE (8321): n equals a,t,g, or c
  SITE (8322): n equals a,t,g, or c
  SITE (8323): n equals a,t,g, or c
  SITE (8324): n equals a,t,g, or c
  SITE (8325): n equals a,t,g, or c
  SITE (8326): n equals a,t,g, or c
  SITE (8327): n equals a,t,g, or c
  SITE (8328): n equals a,t,g, or c
  SITE (8329): n equals a,t,g, or c
  SITE (8330): n equals a,t,g, or c
  SITE (8331): n equals a,t,g, or c
  SITE (8332): n equals a,t,g, or c
  SITE (8333): n equals a,t,g, or c
  SITE (8334): n equals a,t,g, or c
  SITE (8335): n equals a,t,g, or c
  SITE (8336): n equals a,t,g, or c
  SITE (8337): n equals a,t,g, or c
  SITE (8338): n equals a,t,g, or c
  SITE (8339): n equals a,t,g, or c
  SITE (8340): n equals a,t,g, or c
  SITE (8341): n equals a,t,g, or c
  SITE (8342): n equals a,t,g, or c
  SITE (8343): n equals a,t,g, or c
  SITE (8344): n equals a,t,g, or c
  SITE (8345): n equals a,t,g, or c
  SITE (8346): n equals a,t,g, or c
  SITE (8347): n equals a,t,g, or c
  SITE (8348): n equals a,t,g, or c
  SITE (8349): n equals a,t,g, or c
  SITE (8350): n equals a,t,g, or c
  SITE (8351): n equals a,t,g, or c
  SITE (8352): n equals a,t,g, or c
  SITE (8353): n equals a,t,g, or c
  SITE (8354): n equals a,t,g, or c
  SITE (8355): n equals a,t,g, or c
  SITE (8356): n equals a,t,g, or c
  SITE (8357): n equals a,t,g, or c
  SITE (8358): n equals a,t,g, or c
  SITE (8359): n equals a,t,g, or c
  SITE (8360): n equals a,t,g, or c
  SITE (8361): n equals a,t,g, or c
  SITE (8362): n equals a,t,g, or c
  SITE (8363): n equals a,t,g, or c
  SITE (8364): n equals a,t,g, or c
  SITE (8365): n equals a,t,g, or c
  SITE (8366): n equals a,t,g, or c
  SITE (8367): n equals a,t,g, or c
  SITE (8368): n equals a,t,g, or c
  SITE (8369): n equals a,t,g, or c
  SITE (8370): n equals a,t,g, or c
  SITE (8371): n equals a,t,g, or c
  SITE (8372): n equals a,t,g, or c
  SITE (8373): n equals a,t,g, or c
  SITE (8374): n equals a,t,g, or c
  SITE (8375): n equals a,t,g, or c
  SITE (8376): n equals a,t,g, or c
  SITE (8377): n equals a,t,g, or c
  SITE (8378): n equals a,t,g, or c
  SITE (8379): n equals a,t,g, or c
  SITE (8380): n equals a,t,g, or c
  SITE (8381): n equals a,t,g, or c
  SITE (8382): n equals a,t,g, or c
  SITE (8383): n equals a,t,g, or c
  SITE (8384): n equals a,t,g, or c
  SITE (8385): n equals a,t,g, or c
  SITE (8386): n equals a,t,g, or c
  SITE (8387): n equals a,t,g, or c
  SITE (8388): n equals a,t,g, or c
  SITE (8389): n equals a,t,g, or c
  SITE (8390): n equals a,t,g, or c
  SITE (8391): n equals a,t,g, or c
  SITE (8392): n equals a,t,g, or c
  SITE (8393): n equals a,t,g, or c
  SITE (8394): n equals a,t,g, or c
  SITE (8395): n equals a,t,g, or c
  SITE (8396): n equals a,t,g, or c
  SITE (8397): n equals a,t,g, or c
  SITE (8398): n equals a,t,g, or c
  SITE (8399): n equals a,t,g, or c
  SITE (8400): n equals a,t,g, or c
  SITE (8401): n equals a,t,g, or c
  SITE (8402): n equals a,t,g, or c
  SITE (8403): n equals a,t,g, or c
  SITE (8404): n equals a,t,g, or c
  SITE (8405): n equals a,t,g, or c
  SITE (8406): n equals a,t,g, or c
  SITE (8407): n equals a,t,g, or c
  SITE (8408): n equals a,t,g, or c
  SITE (8409): n equals a,t,g, or c
  SITE (8410): n equals a,t,g, or c
  SITE (8411): n equals a,t,g, or c
  SITE (8412): n equals a,t,g, or c
  SITE (8413): n equals a,t,g, or c
  SITE (8414): n equals a,t,g, or c
  SITE (8415): n equals a,t,g, or c
  SITE (8416): n equals a,t,g, or c
  SITE (8417): n equals a,t,g, or c
  SITE (8418): n equals a,t,g, or c
  SITE (8419): n equals a,t,g, or c
  SITE (8420): n equals a,t,g, or c
  SITE (8421): n equals a,t,g, or c
  SITE (8422): n equals a,t,g, or c
  SITE (8423): n equals a,t,g, or c
  SITE (8424): n equals a,t,g, or c
  SITE (8425): n equals a,t,g, or c
  SITE (8426): n equals a,t,g, or c
  SITE (8427): n equals a,t,g, or c
  SITE (8428): n equals a,t,g, or c
  SITE (8429): n equals a,t,g, or c
  SITE (8430): n equals a,t,g, or c
  SITE (8431): n equals a,t,g, or c
  SITE (8432): n equals a,t,g, or c
  SITE (8433): n equals a,t,g, or c
  SITE (8434): n equals a,t,g, or c
  SITE (8435): n equals a,t,g, or c
  SITE (8436): n equals a,t,g, or c
  SITE (8437): n equals a,t,g, or c
  SITE (8438): n equals a,t,g, or c
  SITE (8439): n equals a,t,g, or c
  SITE (8440): n equals a,t,g, or c
  SITE (8441): n equals a,t,g, or c
  SITE (8442): n equals a,t,g, or c
  SITE (8443): n equals a,t,g, or c
  SITE (8444): n equals a,t,g, or c
  SITE (8445): n equals a,t,g, or c
  SITE (8446): n equals a,t,g, or c
  SITE (8447): n equals a,t,g, or c
  SITE (8448): n equals a,t,g, or c
  SITE (8449): n equals a,t,g, or c
  SITE (8450): n equals a,t,g, or c
  SITE (8451): n equals a,t,g, or c
  SITE (8452): n equals a,t,g, or c
  SITE (8453): n equals a,t,g, or c
  SITE (8454): n equals a,t,g, or c
  SITE (8455): n equals a,t,g, or c
  SITE (8456): n equals a,t,g, or c
  SITE (8457): n equals a,t,g, or c
  SITE (8458): n equals a,t,g, or c
  SITE (8459): n equals a,t,g, or c
  SITE (8460): n equals a,t,g, or c
  SITE (8461): n equals a,t,g, or c
  SITE (8462): n equals a,t,g, or c
  SITE (8463): n equals a,t,g, or c
  SITE (8464): n equals a,t,g, or c
  SITE (8465): n equals a,t,g, or c
  SITE (8466): n equals a,t,g, or c
  SITE (8467): n equals a,t,g, or c
  SITE (8468): n equals a,t,g, or c
  SITE (8469): n equals a,t,g, or c
  SITE (8470): n equals a,t,g, or c
  SITE (8471): n equals a,t,g, or c
  SITE (8472): n equals a,t,g, or c
  SITE (8473): n equals a,t,g, or c
  SITE (8474): n equals a,t,g, or c
  SITE (8475): n equals a,t,g, or c
  SITE (8476): n equals a,t,g, or c
  SITE (8477): n equals a,t,g, or c
  SITE (8478): n equals a,t,g, or c
  SITE (8479): n equals a,t,g, or c
  SITE (8480): n equals a,t,g, or c
  SITE (8481): n equals a,t,g, or c
  SITE (8482): n equals a,t,g, or c
  SITE (8483): n equals a,t,g, or c
  SITE (8484): n equals a,t,g, or c
  SITE (8485): n equals a,t,g, or c
  SITE (8486): n equals a,t,g, or c
  SITE (8487): n equals a,t,g, or c
  SITE (8488): n equals a,t,g, or c
  SITE (8489): n equals a,t,g, or c
  SITE (8490): n equals a,t,g, or c
  SITE (8491): n equals a,t,g, or c
  SITE (8492): n equals a,t,g, or c
  SITE (8493): n equals a,t,g, or c
  SITE (8494): n equals a,t,g, or c
  SITE (8495): n equals a,t,g, or c
  SITE (8496): n equals a,t,g, or c
  SITE (8497): n equals a,t,g, or c
  SITE (8498): n equals a,t,g, or c
  SITE (8499): n equals a,t,g, or c
  SITE (8500): n equals a,t,g, or c
  SITE (8501): n equals a,t,g, or c
  SITE (8502): n equals a,t,g, or c
  SITE (8503): n equals a,t,g, or c
  SITE (8504): n equals a,t,g, or c
  SITE (8505): n equals a,t,g, or c
  SITE (8506): n equals a,t,g, or c
  SITE (8507): n equals a,t,g, or c
  SITE (8508): n equals a,t,g, or c
  SITE (8509): n equals a,t,g, or c
  SITE (8510): n equals a,t,g, or c
  SITE (8511): n equals a,t,g, or c
  SITE (8512): n equals a,t,g, or c
  SITE (8513): n equals a,t,g, or c
  SITE (8514): n equals a,t,g, or c
  SITE (8515): n equals a,t,g, or c
  SITE (8516): n equals a,t,g, or c
  SITE (8517): n equals a,t,g, or c
  SITE (8518): n equals a,t,g, or c
  SITE (8519): n equals a,t,g, or c
  SITE (8520): n equals a,t,g, or c
  SITE (8521): n equals a,t,g, or c
  SITE (8522): n equals a,t,g, or c
  SITE (8523): n equals a,t,g, or c
  SITE (8524): n equals a,t,g, or c
  SITE (8525): n equals a,t,g, or c
  SITE (8526): n equals a,t,g, or c
  SITE (8527): n equals a,t,g, or c
  SITE (8528): n equals a,t,g, or c
  SITE (8529): n equals a,t,g, or c
  SITE (8530): n equals a,t,g, or c
  SITE (8531): n equals a,t,g, or c
  SITE (8532): n equals a,t,g, or c
  SITE (8533): n equals a,t,g, or c
  SITE (8534): n equals a,t,g, or c
  SITE (8535): n equals a,t,g, or c
  SITE (8536): n equals a,t,g, or c
  SITE (8537): n equals a,t,g, or c
  SITE (8538): n equals a,t,g, or c
  SITE (8539): n equals a,t,g, or c
  SITE (8540): n equals a,t,g, or c
  SITE (8541): n equals a,t,g, or c
  SITE (8542): n equals a,t,g, or c
  SITE (8543): n equals a,t,g, or c
  SITE (8544): n equals a,t,g, or c
  SITE (8545): n equals a,t,g, or c
  SITE (8546): n equals a,t,g, or c
  SITE (8547): n equals a,t,g, or c
  SITE (8548): n equals a,t,g, or c
  SITE (8549): n equals a,t,g, or c
  SITE (8550): n equals a,t,g, or c
  SITE (8551): n equals a,t,g, or c
  SITE (8552): n equals a,t,g, or c
  SITE (8553): n equals a,t,g, or c
  SITE (8554): n equals a,t,g, or c
  SITE (8555): n equals a,t,g, or c
  SITE (8556): n equals a,t,g, or c
  SITE (8557): n equals a,t,g, or c
  SITE (8558): n equals a,t,g, or c
  SITE (8559): n equals a,t,g, or c
  SITE (8560): n equals a,t,g, or c
  SITE (8561): n equals a,t,g, or c
  SITE (8562): n equals a,t,g, or c
  SITE (8563): n equals a,t,g, or c
  SITE (8564): n equals a,t,g, or c
  SITE (8565): n equals a,t,g, or c
  SITE (8566): n equals a,t,g, or c
  SITE (8567): n equals a,t,g, or c
  SITE (8568): n equals a,t,g, or c
  SITE (8569): n equals a,t,g, or c
  SITE (8570): n equals a,t,g, or c
  SITE (8571): n equals a,t,g, or c
  SITE (8572): n equals a,t,g, or c
  SITE (8573): n equals a,t,g, or c
  SITE (8574): n equals a,t,g, or c
  SITE (8575): n equals a,t,g, or c
  SITE (8576): n equals a,t,g, or c
  SITE (8577): n equals a,t,g, or c
  SITE (8578): n equals a,t,g, or c
  SITE (8579): n equals a,t,g, or c
  SITE (8580): n equals a,t,g, or c
  SITE (8581): n equals a,t,g, or c
  SITE (8582): n equals a,t,g, or c
  SITE (8583): n equals a,t,g, or c
  SITE (8584): n equals a,t,g, or c
  SITE (8585): n equals a,t,g, or c
  SITE (8586): n equals a,t,g, or c
  SITE (8587): n equals a,t,g, or c
  SITE (8588): n equals a,t,g, or c
  SITE (8589): n equals a,t,g, or c
  SITE (8590): n equals a,t,g, or c
  SITE (8591): n equals a,t,g, or c
  SITE (8592): n equals a,t,g, or c
  SITE (8593): n equals a,t,g, or c
  SITE (8594): n equals a,t,g, or c
  SITE (8595): n equals a,t,g, or c
  SITE (8596): n equals a,t,g, or c
  SITE (8597): n equals a,t,g, or c
  SITE (8598): n equals a,t,g, or c
  SITE (8599): n equals a,t,g, or c
  SITE (8600): n equals a,t,g, or c
  SITE (8601): n equals a,t,g, or c
  SITE (8602): n equals a,t,g, or c
  SITE (8603): n equals a,t,g, or c
  SITE (8604): n equals a,t,g, or c
  SITE (8605): n equals a,t,g, or c
  SITE (8606): n equals a,t,g, or c
  SITE (8607): n equals a,t,g, or c
  SITE (8608): n equals a,t,g, or c
  SITE (8609): n equals a,t,g, or c
  SITE (8610): n equals a,t,g, or c
  SITE (8611): n equals a,t,g, or c
  SITE (8612): n equals a,t,g, or c
  SITE (8613): n equals a,t,g, or c
  SITE (8614): n equals a,t,g, or c
  SITE (8615): n equals a,t,g, or c
  SITE (8616): n equals a,t,g, or c
  SITE (8617): n equals a,t,g, or c
  SITE (8618): n equals a,t,g, or c
  SITE (8619): n equals a,t,g, or c
  SITE (8620): n equals a,t,g, or c
  SITE (8621): n equals a,t,g, or c
  SITE (8622): n equals a,t,g, or c
  SITE (8623): n equals a,t,g, or c
  SITE (8624): n equals a,t,g, or c
  SITE (8625): n equals a,t,g, or c
  SITE (8626): n equals a,t,g, or c
  SITE (8627): n equals a,t,g, or c
  SITE (8628): n equals a,t,g, or c
  SITE (8629): n equals a,t,g, or c
  SITE (8630): n equals a,t,g, or c
  SITE (8631): n equals a,t,g, or c
  SITE (8632): n equals a,t,g, or c
  SITE (8633): n equals a,t,g, or c
  SITE (8634): n equals a,t,g, or c
  SITE (8635): n equals a,t,g, or c
  SITE (8636): n equals a,t,g, or c
  SITE (8637): n equals a,t,g, or c
  SITE (8638): n equals a,t,g, or c
  SITE (8639): n equals a,t,g, or c
  SITE (8640): n equals a,t,g, or c
  SITE (8641): n equals a,t,g, or c
  SITE (8642): n equals a,t,g, or c
  SITE (8643): n equals a,t,g, or c
  SITE (8644): n equals a,t,g, or c
  SITE (8645): n equals a,t,g, or c
  SITE (8646): n equals a,t,g, or c
  SITE (8647): n equals a,t,g, or c
  SITE (8648): n equals a,t,g, or c
  SITE (8649): n equals a,t,g, or c
  SITE (8650): n equals a,t,g, or c
  SITE (8651): n equals a,t,g, or c
  SITE (8652): n equals a,t,g, or c
  SITE (8653): n equals a,t,g, or c
  SITE (8654): n equals a,t,g, or c
  SITE (8655): n equals a,t,g, or c
  SITE (8656): n equals a,t,g, or c
  SITE (8657): n equals a,t,g, or c
  SITE (8658): n equals a,t,g, or c
  SITE (8659): n equals a,t,g, or c
  SITE (8660): n equals a,t,g, or c
  SITE (8661): n equals a,t,g, or c
  SITE (8662): n equals a,t,g, or c
  SITE (8663): n equals a,t,g, or c
  SITE (8664): n equals a,t,g, or c
  SITE (8665): n equals a,t,g, or c
  SITE (8666): n equals a,t,g, or c
  SITE (8667): n equals a,t,g, or c
  SITE (8668): n equals a,t,g, or c
  SITE (8669): n equals a,t,g, or c
  SITE (8670): n equals a,t,g, or c
  SITE (8671): n equals a,t,g, or c
  SITE (8672): n equals a,t,g, or c
  SITE (8673): n equals a,t,g, or c
  SITE (8674): n equals a,t,g, or c
  SITE (8675): n equals a,t,g, or c
  SITE (8676): n equals a,t,g, or c
  SITE (8677): n equals a,t,g, or c
  SITE (8678): n equals a,t,g, or c
  SITE (8679): n equals a,t,g, or c
  SITE (8680): n equals a,t,g, or c
  SITE (8681): n equals a,t,g, or c
  SITE (8682): n equals a,t,g, or c
  SITE (8683): n equals a,t,g, or c
  SITE (8684): n equals a,t,g, or c
  SITE (8685): n equals a,t,g, or c
  SITE (8686): n equals a,t,g, or c
  SITE (8687): n equals a,t,g, or c
  SITE (8688): n equals a,t,g, or c
  SITE (8689): n equals a,t,g, or c
  SITE (8690): n equals a,t,g, or c
  SITE (8691): n equals a,t,g, or c
  SITE (8692): n equals a,t,g, or c
  SITE (8693): n equals a,t,g, or c
  SITE (8694): n equals a,t,g, or c
  SITE (8695): n equals a,t,g, or c
  SITE (8696): n equals a,t,g, or c
  SITE (8697): n equals a,t,g, or c
  SITE (8698): n equals a,t,g, or c
  SITE (8699): n equals a,t,g, or c
  SITE (8700): n equals a,t,g, or c
  SITE (8701): n equals a,t,g, or c
  SITE (8702): n equals a,t,g, or c
  SITE (8703): n equals a,t,g, or c
  SITE (8704): n equals a,t,g, or c
  SITE (8705): n equals a,t,g, or c
  SITE (8706): n equals a,t,g, or c
  SITE (8707): n equals a,t,g, or c
  SITE (8708): n equals a,t,g, or c
  SITE (8709): n equals a,t,g, or c
  SITE (8710): n equals a,t,g, or c
  SITE (8711): n equals a,t,g, or c
  SITE (8712): n equals a,t,g, or c
  SITE (8713): n equals a,t,g, or c
  SITE (8714): n equals a,t,g, or c
  SITE (8715): n equals a,t,g, or c
  SITE (8716): n equals a,t,g, or c
  SITE (8717): n equals a,t,g, or c
  SITE (8718): n equals a,t,g, or c
  SITE (8719): n equals a,t,g, or c
  SITE (8720): n equals a,t,g, or c
  SITE (8721): n equals a,t,g, or c
  SITE (8722): n equals a,t,g, or c
  SITE (8723): n equals a,t,g, or c
  SITE (8724): n equals a,t,g, or c
  SITE (8725): n equals a,t,g, or c
  SITE (8726): n equals a,t,g, or c
  SITE (8727): n equals a,t,g, or c
  SITE (8728): n equals a,t,g, or c
  SITE (8729): n equals a,t,g, or c
  SITE (8730): n equals a,t,g, or c
  SITE (8731): n equals a,t,g, or c
  SITE (8732): n equals a,t,g, or c
  SITE (8733): n equals a,t,g, or c
  SITE (8734): n equals a,t,g, or c
  SITE (8735): n equals a,t,g, or c
  SITE (8736): n equals a,t,g, or c
  SITE (8737): n equals a,t,g, or c
  SITE (8738): n equals a,t,g, or c
  SITE (8739): n equals a,t,g, or c
  SITE (8740): n equals a,t,g, or c
  SITE (8741): n equals a,t,g, or c
  SITE (8742): n equals a,t,g, or c
  SITE (8743): n equals a,t,g, or c
  SITE (8744): n equals a,t,g, or c
  SITE (8745): n equals a,t,g, or c
  SITE (8746): n equals a,t,g, or c
  SITE (8747): n equals a,t,g, or c
  SITE (8748): n equals a,t,g, or c
  SITE (8749): n equals a,t,g, or c
  SITE (8750): n equals a,t,g, or c
  SITE (8751): n equals a,t,g, or c
  SITE (8752): n equals a,t,g, or c
  SITE (8753): n equals a,t,g, or c
  SITE (8754): n equals a,t,g, or c
  SITE (8755): n equals a,t,g, or c
  SITE (8756): n equals a,t,g, or c
  SITE (8757): n equals a,t,g, or c
  SITE (8758): n equals a,t,g, or c
  SITE (8759): n equals a,t,g, or c
  SITE (8760): n equals a,t,g, or c
  SITE (8761): n equals a,t,g, or c
  SITE (8762): n equals a,t,g, or c
  SITE (8763): n equals a,t,g, or c
  SITE (8764): n equals a,t,g, or c
  SITE (8765): n equals a,t,g, or c
  SITE (8766): n equals a,t,g, or c
  SITE (8767): n equals a,t,g, or c
  SITE (8768): n equals a,t,g, or c
  SITE (8769): n equals a,t,g, or c
  SITE (8770): n equals a,t,g, or c
  SITE (8771): n equals a,t,g, or c
  SITE (8772): n equals a,t,g, or c
  SITE (8773): n equals a,t,g, or c
  SITE (8774): n equals a,t,g, or c
  SITE (8775): n equals a,t,g, or c
  SITE (8776): n equals a,t,g, or c
  SITE (8777): n equals a,t,g, or c
  SITE (8778): n equals a,t,g, or c
  SITE (8779): n equals a,t,g, or c
  SITE (8780): n equals a,t,g, or c
  SITE (8781): n equals a,t,g, or c
  SITE (8782): n equals a,t,g, or c
  SITE (8783): n equals a,t,g, or c
  SITE (8784): n equals a,t,g, or c
  SITE (8785): n equals a,t,g, or c
  SITE (8786): n equals a,t,g, or c
  SITE (8787): n equals a,t,g, or c
  SITE (8788): n equals a,t,g, or c
  SITE (8789): n equals a,t,g, or c
  SITE (8790): n equals a,t,g, or c
  SITE (8791): n equals a,t,g, or c
  SITE (8792): n equals a,t,g, or c
  SITE (8793): n equals a,t,g, or c
  SITE (8794): n equals a,t,g, or c
  SITE (8795): n equals a,t,g, or c
  SITE (8796): n equals a,t,g, or c
  SITE (8797): n equals a,t,g, or c
  SITE (8798): n equals a,t,g, or c
  SITE (8799): n equals a,t,g, or c
  SITE (8800): n equals a,t,g, or c
  SITE (8801): n equals a,t,g, or c
  SITE (8802): n equals a,t,g, or c
  SITE (8803): n equals a,t,g, or c
  SITE (8804): n equals a,t,g, or c
  SITE (8805): n equals a,t,g, or c
  SITE (8806): n equals a,t,g, or c
  SITE (8807): n equals a,t,g, or c
  SITE (8808): n equals a,t,g, or c
  SITE (8809): n equals a,t,g, or c
  SITE (8810): n equals a,t,g, or c
  SITE (8811): n equals a,t,g, or c
  SITE (8812): n equals a,t,g, or c
  SITE (8813): n equals a,t,g, or c
  SITE (8814): n equals a,t,g, or c
  SITE (8815): n equals a,t,g, or c
  SITE (8816): n equals a,t,g, or c
  SITE (8817): n equals a,t,g, or c
  SITE (8818): n equals a,t,g, or c
  SITE (8819): n equals a,t,g, or c
  SITE (8820): n equals a,t,g, or c
  SITE (8821): n equals a,t,g, or c
  SITE (8822): n equals a,t,g, or c
  SITE (8823): n equals a,t,g, or c
  SITE (8824): n equals a,t,g, or c
  SITE (8825): n equals a,t,g, or c
  SITE (8826): n equals a,t,g, or c
  SITE (8827): n equals a,t,g, or c
  SITE (8828): n equals a,t,g, or c
  SITE (8829): n equals a,t,g, or c
  SITE (8830): n equals a,t,g, or c
  SITE (8831): n equals a,t,g, or c
  SITE (8832): n equals a,t,g, or c
  SITE (8833): n equals a,t,g, or c
  SITE (8834): n equals a,t,g, or c
  SITE (8835): n equals a,t,g, or c
  SITE (8836): n equals a,t,g, or c
  SITE (8837): n equals a,t,g, or c
  SITE (8838): n equals a,t,g, or c
  SITE (8839): n equals a,t,g, or c
  SITE (8840): n equals a,t,g, or c
  SITE (8841): n equals a,t,g, or c
  SITE (8842): n equals a,t,g, or c
  SITE (8843): n equals a,t,g, or c
  SITE (8844): n equals a,t,g, or c
  SITE (8845): n equals a,t,g, or c
  SITE (8846): n equals a,t,g, or c
  SITE (8847): n equals a,t,g, or c
  SITE (8848): n equals a,t,g, or c
  SITE (8849): n equals a,t,g, or c
  SITE (8850): n equals a,t,g, or c
  SITE (8851): n equals a,t,g, or c
  SITE (8852): n equals a,t,g, or c
  SITE (8853): n equals a,t,g, or c
  SITE (8854): n equals a,t,g, or c
  SITE (8855): n equals a,t,g, or c
  SITE (8856): n equals a,t,g, or c
  SITE (8857): n equals a,t,g, or c
  SITE (8858): n equals a,t,g, or c
  SITE (8859): n equals a,t,g, or c
  SITE (8860): n equals a,t,g, or c
  SITE (8861): n equals a,t,g, or c
  SITE (8862): n equals a,t,g, or c
  SITE (8863): n equals a,t,g, or c
  SITE (8864): n equals a,t,g, or c
  SITE (8865): n equals a,t,g, or c
  SITE (8866): n equals a,t,g, or c
  SITE (8867): n equals a,t,g, or c
  SITE (8868): n equals a,t,g, or c
  SITE (8869): n equals a,t,g, or c
  SITE (8870): n equals a,t,g, or c
  SITE (8871): n equals a,t,g, or c
  SITE (8872): n equals a,t,g, or c
  SITE (8873): n equals a,t,g, or c
  SITE (8874): n equals a,t,g, or c
  SITE (8875): n equals a,t,g, or c
  SITE (8876): n equals a,t,g, or c
  SITE (8877): n equals a,t,g, or c
  SITE (8878): n equals a,t,g, or c
  SITE (8879): n equals a,t,g, or c
  SITE (8880): n equals a,t,g, or c
  SITE (8881): n equals a,t,g, or c
  SITE (8882): n equals a,t,g, or c
  SITE (8883): n equals a,t,g, or c
  SITE (8884): n equals a,t,g, or c
  SITE (8885): n equals a,t,g, or c
  SITE (8886): n equals a,t,g, or c
  SITE (8887): n equals a,t,g, or c
  SITE (8888): n equals a,t,g, or c
  SITE (8889): n equals a,t,g, or c
  SITE (8890): n equals a,t,g, or c
  SITE (8891): n equals a,t,g, or c
  SITE (8892): n equals a,t,g, or c
  SITE (8893): n equals a,t,g, or c
  SITE (8894): n equals a,t,g, or c
  SITE (8895): n equals a,t,g, or c
  SITE (8896): n equals a,t,g, or c
  SITE (8897): n equals a,t,g, or c
  SITE (8898): n equals a,t,g, or c
  SITE (8899): n equals a,t,g, or c
  SITE (8900): n equals a,t,g, or c
  SITE (8901): n equals a,t,g, or c
  SITE (8902): n equals a,t,g, or c
  SITE (8903): n equals a,t,g, or c
  SITE (8904): n equals a,t,g, or c
  SITE (8905): n equals a,t,g, or c
  SITE (8906): n equals a,t,g, or c
  SITE (8907): n equals a,t,g, or c
  SITE (8908): n equals a,t,g, or c
  SITE (8909): n equals a,t,g, or c
  SITE (8910): n equals a,t,g, or c
  SITE (8911): n equals a,t,g, or c
  SITE (8912): n equals a,t,g, or c
  SITE (8913): n equals a,t,g, or c
  SITE (8914): n equals a,t,g, or c
  SITE (8915): n equals a,t,g, or c
  SITE (8916): n equals a,t,g, or c
  SITE (8917): n equals a,t,g, or c
  SITE (8918): n equals a,t,g, or c
  SITE (8919): n equals a,t,g, or c
  SITE (8920): n equals a,t,g, or c
  SITE (8921): n equals a,t,g, or c
  SITE (8922): n equals a,t,g, or c
  SITE (8923): n equals a,t,g, or c
  SITE (8924): n equals a,t,g, or c
  SITE (8925): n equals a,t,g, or c
  SITE (8926): n equals a,t,g, or c
  SITE (8927): n equals a,t,g, or c
  SITE (8928): n equals a,t,g, or c
  SITE (8929): n equals a,t,g, or c
  SITE (8930): n equals a,t,g, or c
  SITE (8931): n equals a,t,g, or c
  SITE (8932): n equals a,t,g, or c
  SITE (8933): n equals a,t,g, or c
  SITE (8934): n equals a,t,g, or c
  SITE (8935): n equals a,t,g, or c
  SITE (8936): n equals a,t,g, or c
  SITE (8937): n equals a,t,g, or c
  SITE (8938): n equals a,t,g, or c
  SITE (8939): n equals a,t,g, or c
  SITE (8940): n equals a,t,g, or c
  SITE (8941): n equals a,t,g, or c
  SITE (8942): n equals a,t,g, or c
  SITE (8943): n equals a,t,g, or c
  SITE (8944): n equals a,t,g, or c
  SITE (8945): n equals a,t,g, or c
  SITE (8946): n equals a,t,g, or c
  SITE (8947): n equals a,t,g, or c
  SITE (8948): n equals a,t,g, or c
  SITE (8949): n equals a,t,g, or c
  SITE (8950): n equals a,t,g, or c
  SITE (8951): n equals a,t,g, or c
  SITE (8952): n equals a,t,g, or c
  SITE (8953): n equals a,t,g, or c
  SITE (8954): n equals a,t,g, or c
  SITE (8955): n equals a,t,g, or c
  SITE (8956): n equals a,t,g, or c
  SITE (8957): n equals a,t,g, or c
  SITE (8958): n equals a,t,g, or c
  SITE (8959): n equals a,t,g, or c
  SITE (8960): n equals a,t,g, or c
  SITE (8961): n equals a,t,g, or c
  SITE (8962): n equals a,t,g, or c
  SITE (8963): n equals a,t,g, or c
  SITE (8964): n equals a,t,g, or c
  SITE (8965): n equals a,t,g, or c
  SITE (8966): n equals a,t,g, or c
  SITE (8967): n equals a,t,g, or c
  SITE (8968): n equals a,t,g, or c
  SITE (8969): n equals a,t,g, or c
  SITE (8970): n equals a,t,g, or c
  SITE (8971): n equals a,t,g, or c
  SITE (8972): n equals a,t,g, or c
  SITE (8973): n equals a,t,g, or c
  SITE (8974): n equals a,t,g, or c
  SITE (8975): n equals a,t,g, or c
  SITE (8976): n equals a,t,g, or c
  SITE (8977): n equals a,t,g, or c
  SITE (8978): n equals a,t,g, or c
  SITE (8979): n equals a,t,g, or c
  SITE (8980): n equals a,t,g, or c
  SITE (8981): n equals a,t,g, or c
  SITE (8982): n equals a,t,g, or c
  SITE (8983): n equals a,t,g, or c
  SITE (8984): n equals a,t,g, or c
  SITE (8985): n equals a,t,g, or c
  SITE (8986): n equals a,t,g, or c
  SITE (8987): n equals a,t,g, or c
  SITE (8988): n equals a,t,g, or c
  SITE (8989): n equals a,t,g, or c
  SITE (8990): n equals a,t,g, or c
  SITE (8991): n equals a,t,g, or c
  SITE (8992): n equals a,t,g, or c
  SITE (8993): n equals a,t,g, or c
  SITE (8994): n equals a,t,g, or c
  SITE (8995): n equals a,t,g, or c
  SITE (8996): n equals a,t,g, or c
  SITE (8997): n equals a,t,g, or c
  SITE (8998): n equals a,t,g, or c
  SITE (8999): n equals a,t,g, or c
  SITE (9000): n equals a,t,g, or c
  SITE (9001): n equals a,t,g, or c
  SITE (9002): n equals a,t,g, or c
  SITE (9003): n equals a,t,g, or c
  SITE (9004): n equals a,t,g, or c
  SITE (9005): n equals a,t,g, or c
  SITE (9006): n equals a,t,g, or c
  SITE (9007): n equals a,t,g, or c
  SITE (9008): n equals a,t,g, or c
  SITE (9009): n equals a,t,g, or c
  SITE (9010): n equals a,t,g, or c
  SITE (9011): n equals a,t,g, or c
  SITE (9012): n equals a,t,g, or c
  SITE (9013): n equals a,t,g, or c
  SITE (9014): n equals a,t,g, or c
  SITE (9015): n equals a,t,g, or c
  SITE (9016): n equals a,t,g, or c
  SITE (9017): n equals a,t,g, or c
  SITE (9018): n equals a,t,g, or c
  SITE (9019): n equals a,t,g, or c
  SITE (9020): n equals a,t,g, or c
  SITE (9021): n equals a,t,g, or c
  SITE (9022): n equals a,t,g, or c
  SITE (9023): n equals a,t,g, or c
  SITE (9024): n equals a,t,g, or c
  SITE (9025): n equals a,t,g, or c
  SITE (9026): n equals a,t,g, or c
  SITE (9027): n equals a,t,g, or c
  SITE (9028): n equals a,t,g, or c
  SITE (9029): n equals a,t,g, or c
  SITE (9030): n equals a,t,g, or c
  SITE (9031): n equals a,t,g, or c
  SITE (9032): n equals a,t,g, or c
  SITE (9033): n equals a,t,g, or c
  SITE (9034): n equals a,t,g, or c
  SITE (9035): n equals a,t,g, or c
  SITE (9036): n equals a,t,g, or c
  SITE (9037): n equals a,t,g, or c
  SITE (9038): n equals a,t,g, or c
  SITE (9039): n equals a,t,g, or c
  SITE (9040): n equals a,t,g, or c
  SITE (9041): n equals a,t,g, or c
  SITE (9042): n equals a,t,g, or c
  SITE (9043): n equals a,t,g, or c
  SITE (9044): n equals a,t,g, or c
  SITE (9045): n equals a,t,g, or c
  SITE (9046): n equals a,t,g, or c
  SITE (9047): n equals a,t,g, or c
  SITE (9048): n equals a,t,g, or c
  SITE (9049): n equals a,t,g, or c
  SITE (9050): n equals a,t,g, or c
  SITE (9051): n equals a,t,g, or c
  SITE (9052): n equals a,t,g, or c
  SITE (9053): n equals a,t,g, or c
  SITE (9054): n equals a,t,g, or c
  SITE (9055): n equals a,t,g, or c
  SITE (9056): n equals a,t,g, or c
  SITE (9057): n equals a,t,g, or c
  SITE (9058): n equals a,t,g, or c
  SITE (9059): n equals a,t,g, or c
  SITE (9060): n equals a,t,g, or c
  SITE (9061): n equals a,t,g, or c
  SITE (9062): n equals a,t,g, or c
  SITE (9063): n equals a,t,g, or c
  SITE (9064): n equals a,t,g, or c
  SITE (9065): n equals a,t,g, or c
  SITE (9066): n equals a,t,g, or c
  SITE (9067): n equals a,t,g, or c
  SITE (9068): n equals a,t,g, or c
  SITE (9069): n equals a,t,g, or c
  SITE (9070): n equals a,t,g, or c
  SITE (9071): n equals a,t,g, or c
  SITE (9072): n equals a,t,g, or c
  SITE (9073): n equals a,t,g, or c
  SITE (9074): n equals a,t,g, or c
  SITE (9075): n equals a,t,g, or c
  SITE (9076): n equals a,t,g, or c
  SITE (9077): n equals a,t,g, or c
  SITE (9078): n equals a,t,g, or c
  SITE (9079): n equals a,t,g, or c
  SITE (9080): n equals a,t,g, or c
  SITE (9081): n equals a,t,g, or c
  SITE (9082): n equals a,t,g, or c
  SITE (9083): n equals a,t,g, or c
  SITE (9084): n equals a,t,g, or c
  SITE (9085): n equals a,t,g, or c
  SITE (9086): n equals a,t,g, or c
  SITE (9087): n equals a,t,g, or c
  SITE (9088): n equals a,t,g, or c
  SITE (9089): n equals a,t,g, or c
  SITE (9090): n equals a,t,g, or c
  SITE (9091): n equals a,t,g, or c
  SITE (9092): n equals a,t,g, or c
  SITE (9093): n equals a,t,g, or c
  SITE (9094): n equals a,t,g, or c
  SITE (9095): n equals a,t,g, or c
  SITE (9096): n equals a,t,g, or c
  SITE (9097): n equals a,t,g, or c
  SITE (9098): n equals a,t,g, or c
  SITE (9099): n equals a,t,g, or c
  SITE (9100): n equals a,t,g, or c
  SITE (9101): n equals a,t,g, or c
  SITE (9102): n equals a,t,g, or c
  SITE (9103): n equals a,t,g, or c
  SITE (9104): n equals a,t,g, or c
  SITE (9105): n equals a,t,g, or c
  SITE (9106): n equals a,t,g, or c
  SITE (9107): n equals a,t,g, or c
  SITE (9108): n equals a,t,g, or c
  SITE (9109): n equals a,t,g, or c
  SITE (9110): n equals a,t,g, or c
  SITE (9111): n equals a,t,g, or c
  SITE (9112): n equals a,t,g, or c
  SITE (9113): n equals a,t,g, or c
  SITE (9114): n equals a,t,g, or c
  SITE (9115): n equals a,t,g, or c
  SITE (9116): n equals a,t,g, or c
  SITE (9117): n equals a,t,g, or c
  SITE (9118): n equals a,t,g, or c
  SITE (9119): n equals a,t,g, or c
  SITE (9120): n equals a,t,g, or c
  SITE (9121): n equals a,t,g, or c
  SITE (9122): n equals a,t,g, or c
  SITE (9123): n equals a,t,g, or c
  SITE (9124): n equals a,t,g, or c
  SITE (9125): n equals a,t,g, or c
  SITE (9126): n equals a,t,g, or c
  SITE (9127): n equals a,t,g, or c
  SITE (9128): n equals a,t,g, or c
  SITE (9129): n equals a,t,g, or c
  SITE (9130): n equals a,t,g, or c
  SITE (9131): n equals a,t,g, or c
  SITE (9132): n equals a,t,g, or c
  SITE (9133): n equals a,t,g, or c
  SITE (9134): n equals a,t,g, or c
  SITE (9135): n equals a,t,g, or c
  SITE (9136): n equals a,t,g, or c
  SITE (9137): n equals a,t,g, or c
  SITE (9138): n equals a,t,g, or c
  SITE (9139): n equals a,t,g, or c
  SITE (9140): n equals a,t,g, or c
  SITE (9141): n equals a,t,g, or c
  SITE (9142): n equals a,t,g, or c
  SITE (9143): n equals a,t,g, or c
  SITE (9144): n equals a,t,g, or c
  SITE (9145): n equals a,t,g, or c
  SITE (9146): n equals a,t,g, or c
  SITE (9147): n equals a,t,g, or c
  SITE (9148): n equals a,t,g, or c
  SITE (9149): n equals a,t,g, or c
  SITE (9150): n equals a,t,g, or c
  SITE (9151): n equals a,t,g, or c
  SITE (9152): n equals a,t,g, or c
  SITE (9153): n equals a,t,g, or c
  SITE (9154): n equals a,t,g, or c
  SITE (9155): n equals a,t,g, or c
  SITE (9156): n equals a,t,g, or c
  SITE (9157): n equals a,t,g, or c
  SITE (9158): n equals a,t,g, or c
  SITE (9159): n equals a,t,g, or c
  SITE (9160): n equals a,t,g, or c
  SITE (9161): n equals a,t,g, or c
  SITE (9162): n equals a,t,g, or c
  SITE (9163): n equals a,t,g, or c
  SITE (9164): n equals a,t,g, or c
  SITE (9165): n equals a,t,g, or c
  SITE (9166): n equals a,t,g, or c
  SITE (9167): n equals a,t,g, or c
  SITE (9168): n equals a,t,g, or c
  SITE (9169): n equals a,t,g, or c
  SITE (9170): n equals a,t,g, or c
  SITE (9171): n equals a,t,g, or c
  SITE (9172): n equals a,t,g, or c
  SITE (9173): n equals a,t,g, or c
  SITE (9174): n equals a,t,g, or c
  SITE (9175): n equals a,t,g, or c
  SITE (9176): n equals a,t,g, or c
  SITE (9177): n equals a,t,g, or c
  SITE (9178): n equals a,t,g, or c
  SITE (9179): n equals a,t,g, or c
  SITE (9180): n equals a,t,g, or c
  SITE (9181): n equals a,t,g, or c
  SITE (9182): n equals a,t,g, or c
  SITE (9183): n equals a,t,g, or c
  SITE (9184): n equals a,t,g, or c
  SITE (9185): n equals a,t,g, or c
  SITE (9186): n equals a,t,g, or c
  SITE (9187): n equals a,t,g, or c
  SITE (9188): n equals a,t,g, or c
  SITE (9189): n equals a,t,g, or c
  SITE (9190): n equals a,t,g, or c
  SITE (9191): n equals a,t,g, or c
  SITE (9192): n equals a,t,g, or c
  SITE (9193): n equals a,t,g, or c
  SITE (9194): n equals a,t,g, or c
  SITE (9195): n equals a,t,g, or c
  SITE (9196): n equals a,t,g, or c
  SITE (9197): n equals a,t,g, or c
  SITE (9198): n equals a,t,g, or c
  SITE (9199): n equals a,t,g, or c
  SITE (9200): n equals a,t,g, or c
  SITE (9201): n equals a,t,g, or c
  SITE (9202): n equals a,t,g, or c
  SITE (9203): n equals a,t,g, or c
  SITE (9204): n equals a,t,g, or c
  SITE (9205): n equals a,t,g, or c
  SITE (9206): n equals a,t,g, or c
  SITE (9207): n equals a,t,g, or c
  SITE (9208): n equals a,t,g, or c
  SITE (9209): n equals a,t,g, or c
  SITE (9210): n equals a,t,g, or c
  SITE (9211): n equals a,t,g, or c
  SITE (9212): n equals a,t,g, or c
  SITE (9213): n equals a,t,g, or c
  SITE (9214): n equals a,t,g, or c
  SITE (9215): n equals a,t,g, or c
  SITE (9216): n equals a,t,g, or c
  SITE (9217): n equals a,t,g, or c
  SITE (9218): n equals a,t,g, or c
  SITE (9219): n equals a,t,g, or c
  SITE (9220): n equals a,t,g, or c
  SITE (9221): n equals a,t,g, or c
  SITE (9222): n equals a,t,g, or c
  SITE (9223): n equals a,t,g, or c
  SITE (9224): n equals a,t,g, or c
  SITE (9225): n equals a,t,g, or c
  SITE (9226): n equals a,t,g, or c
  SITE (9227): n equals a,t,g, or c
  SITE (9228): n equals a,t,g, or c
  SITE (9229): n equals a,t,g, or c
  SITE (9230): n equals a,t,g, or c
  SITE (9231): n equals a,t,g, or c
  SITE (9232): n equals a,t,g, or c
  SITE (9233): n equals a,t,g, or c
  SITE (9234): n equals a,t,g, or c
  SITE (9235): n equals a,t,g, or c
  SITE (9236): n equals a,t,g, or c
  SITE (9237): n equals a,t,g, or c
  SITE (9238): n equals a,t,g, or c
  SITE (9239): n equals a,t,g, or c
  SITE (9240): n equals a,t,g, or c
  SITE (9241): n equals a,t,g, or c
  SITE (9242): n equals a,t,g, or c
  SITE (9243): n equals a,t,g, or c
  SITE (9244): n equals a,t,g, or c
  SITE (9245): n equals a,t,g, or c
  SITE (9246): n equals a,t,g, or c
  SITE (9247): n equals a,t,g, or c
  SITE (9248): n equals a,t,g, or c
  SITE (9249): n equals a,t,g, or c
  SITE (9250): n equals a,t,g, or c
  SITE (9251): n equals a,t,g, or c
  SITE (9252): n equals a,t,g, or c
  SITE (9253): n equals a,t,g, or c
  SITE (9254): n equals a,t,g, or c
  SITE (9255): n equals a,t,g, or c
  SITE (9256): n equals a,t,g, or c
  SITE (9257): n equals a,t,g, or c
  SITE (9258): n equals a,t,g, or c
  SITE (9259): n equals a,t,g, or c
  SITE (9260): n equals a,t,g, or c
  SITE (9261): n equals a,t,g, or c
  SITE (9262): n equals a,t,g, or c
  SITE (9263): n equals a,t,g, or c
  SITE (9264): n equals a,t,g, or c
  SITE (9265): n equals a,t,g, or c
  SITE (9266): n equals a,t,g, or c
  SITE (9267): n equals a,t,g, or c
  SITE (9268): n equals a,t,g, or c
  SITE (9269): n equals a,t,g, or c
  SITE (9270): n equals a,t,g, or c
  SITE (9271): n equals a,t,g, or c
  SITE (9272): n equals a,t,g, or c
  SITE (9273): n equals a,t,g, or c
  SITE (9274): n equals a,t,g, or c
  SITE (9275): n equals a,t,g, or c
  SITE (9276): n equals a,t,g, or c
  SITE (9277): n equals a,t,g, or c
  SITE (9278): n equals a,t,g, or c
  SITE (9279): n equals a,t,g, or c
  SITE (9280): n equals a,t,g, or c
  SITE (9281): n equals a,t,g, or c
  SITE (9282): n equals a,t,g, or c
  SITE (9283): n equals a,t,g, or c
  SITE (9284): n equals a,t,g, or c
  SITE (9285): n equals a,t,g, or c
  SITE (9286): n equals a,t,g, or c
  SITE (9287): n equals a,t,g, or c
  SITE (9288): n equals a,t,g, or c
  SITE (9289): n equals a,t,g, or c
  SITE (9290): n equals a,t,g, or c
  SITE (9291): n equals a,t,g, or c
  SITE (9292): n equals a,t,g, or c
  SITE (9293): n equals a,t,g, or c
  SITE (9294): n equals a,t,g, or c
  SITE (9295): n equals a,t,g, or c
  SITE (9296): n equals a,t,g, or c
  SITE (9297): n equals a,t,g, or c
  SITE (9298): n equals a,t,g, or c
  SITE (9299): n equals a,t,g, or c
  SITE (9300): n equals a,t,g, or c
  SITE (9301): n equals a,t,g, or c
  SITE (9302): n equals a,t,g, or c
  SITE (9303): n equals a,t,g, or c
  SITE (9304): n equals a,t,g, or c
  SITE (9305): n equals a,t,g, or c
  SITE (9306): n equals a,t,g, or c
  SITE (9307): n equals a,t,g, or c
  SITE (9308): n equals a,t,g, or c
  SITE (9309): n equals a,t,g, or c
  SITE (9310): n equals a,t,g, or c
  SITE (9311): n equals a,t,g, or c
  SITE (9312): n equals a,t,g, or c
  SITE (9313): n equals a,t,g, or c
  SITE (9314): n equals a,t,g, or c
  SITE (9315): n equals a,t,g, or c
  SITE (9316): n equals a,t,g, or c
  SITE (9317): n equals a,t,g, or c
  SITE (9318): n equals a,t,g, or c
  SITE (9319): n equals a,t,g, or c
  SITE (9320): n equals a,t,g, or c
  SITE (9321): n equals a,t,g, or c
  SITE (9322): n equals a,t,g, or c
  SITE (9323): n equals a,t,g, or c
  SITE (9324): n equals a,t,g, or c
  SITE (9325): n equals a,t,g, or c
  SITE (9326): n equals a,t,g, or c
  SITE (9327): n equals a,t,g, or c
  SITE (9328): n equals a,t,g, or c
  SITE (9329): n equals a,t,g, or c
  SITE (9330): n equals a,t,g, or c
  SITE (9331): n equals a,t,g, or c
  SITE (9332): n equals a,t,g, or c
  SITE (9333): n equals a,t,g, or c
  SITE (9334): n equals a,t,g, or c
  SITE (9335): n equals a,t,g, or c
  SITE (9336): n equals a,t,g, or c
  SITE (9337): n equals a,t,g, or c
  SITE (9338): n equals a,t,g, or c
  SITE (9339): n equals a,t,g, or c
  SITE (9340): n equals a,t,g, or c
  SITE (9341): n equals a,t,g, or c
  SITE (9342): n equals a,t,g, or c
  SITE (9343): n equals a,t,g, or c
  SITE (9344): n equals a,t,g, or c
  SITE (9345): n equals a,t,g, or c
  SITE (9346): n equals a,t,g, or c
  SITE (9347): n equals a,t,g, or c
  SITE (9348): n equals a,t,g, or c
  SITE (9349): n equals a,t,g, or c
  SITE (9350): n equals a,t,g, or c
  SITE (9351): n equals a,t,g, or c
  SITE (9352): n equals a,t,g, or c
  SITE (9353): n equals a,t,g, or c
  SITE (9354): n equals a,t,g, or c
  SITE (9355): n equals a,t,g, or c
  SITE (9356): n equals a,t,g, or c
  SITE (9357): n equals a,t,g, or c
  SITE (9358): n equals a,t,g, or c
  SITE (9359): n equals a,t,g, or c
  SITE (9360): n equals a,t,g, or c
  SITE (9361): n equals a,t,g, or c
  SITE (9362): n equals a,t,g, or c
  SITE (9363): n equals a,t,g, or c
  SITE (9364): n equals a,t,g, or c
  SITE (9365): n equals a,t,g, or c
  SITE (9366): n equals a,t,g, or c
  SITE (9367): n equals a,t,g, or c
  SITE (9368): n equals a,t,g, or c
  SITE (9369): n equals a,t,g, or c
  SITE (9370): n equals a,t,g, or c
  SITE (9371): n equals a,t,g, or c
  SITE (9372): n equals a,t,g, or c
  SITE (9373): n equals a,t,g, or c
  SITE (9374): n equals a,t,g, or c
  SITE (9375): n equals a,t,g, or c
  SITE (9376): n equals a,t,g, or c
  SITE (9377): n equals a,t,g, or c
  SITE (9378): n equals a,t,g, or c
  SITE (9379): n equals a,t,g, or c
  SITE (9380): n equals a,t,g, or c
  SITE (9381): n equals a,t,g, or c
  SITE (9382): n equals a,t,g, or c
  SITE (9383): n equals a,t,g, or c
  SITE (9384): n equals a,t,g, or c
  SITE (9385): n equals a,t,g, or c
  SITE (9386): n equals a,t,g, or c
  SITE (9387): n equals a,t,g, or c
  SITE (9388): n equals a,t,g, or c
  SITE (9389): n equals a,t,g, or c
  SITE (9390): n equals a,t,g, or c
  SITE (9391): n equals a,t,g, or c
  SITE (9392): n equals a,t,g, or c
  SITE (9393): n equals a,t,g, or c
  SITE (9394): n equals a,t,g, or c
  SITE (9395): n equals a,t,g, or c
  SITE (9396): n equals a,t,g, or c
  SITE (9397): n equals a,t,g, or c
  SITE (9398): n equals a,t,g, or c
  SITE (9399): n equals a,t,g, or c
  SITE (9400): n equals a,t,g, or c
  SITE (9401): n equals a,t,g, or c
  SITE (9402): n equals a,t,g, or c
  SITE (9403): n equals a,t,g, or c
  SITE (9404): n equals a,t,g, or c
  SITE (9405): n equals a,t,g, or c
  SITE (9406): n equals a,t,g, or c
  SITE (9407): n equals a,t,g, or c
  SITE (9408): n equals a,t,g, or c
  SITE (9409): n equals a,t,g, or c
  SITE (9410): n equals a,t,g, or c
  SITE (9411): n equals a,t,g, or c
  SITE (9412): n equals a,t,g, or c
  SITE (9413): n equals a,t,g, or c
  SITE (9414): n equals a,t,g, or c
  SITE (9415): n equals a,t,g, or c
  SITE (9416): n equals a,t,g, or c

SEQ ID NO: 8741 - DNA, 127 bp, Homo sapiens; identical to SEQ ID NO: 5440

SEQ ID NO: 8742 - DNA, 1578 bp, Homo sapiens
  SITE (48): n equals a,t,g, or c
  SITE (83): n equals a,t,g, or c
  SITE (155): n equals a,t,g, or c
  SITE (158): n equals a,t,g, or c
  SITE (168): n equals a,t,g, or c
  SITE (183): n equals a,t,g, or c
  SITE (199): n equals a,t,g, or c
  SITE (211): n equals a,t,g, or c
  SITE (212): n equals a,t,g, or c
  SITE (220): n equals a,t,g, or c
  SITE (360): n equals a,t,g, or c
  SITE (439): n equals a,t,g, or c
  SITE (645): n equals a,t,g, or c
  SITE (713): n equals a,t,g, or c
  SITE (776): n equals a,t,g, or c
  SITE (915): n equals a,t,g, or c
  SITE (929): n equals a,t,g, or c
  SITE (934): n equals a,t,g, or c
  SITE (940): n equals a,t,g, or c
  SITE (947): n equals a,t,g, or c
  SITE (954): n equals a,t,g, or c
  SITE (1420): n equals a,t,g, or c
  SITE (1455): n equals a,t,g, or c
  SITE (1489): n equals a,t,g, or c
tgctatattgccccgctggtctcaaactcaatggactcaagcaatccntcccacctcagcatcccaaagtgttgggattacanggcatgagccactatgcctggcctagtaaaatatttttatactaagtagagagagtagattcgtggaaaacntcnttaaactcanccaggtactgcaatngaaacttctagcattnggtgattagcanntactaatnatgtactgggcaaatttataatcgttagtaatttgcaatggagtcttttcattctgatattaaaagtattttacaaacactaaactttcaaaatctctcttataataggtattgttaaattaattccatatttcatatgnaaaaaacaaaagctgagggaggcaaagttacttacctaagaccacacagtatttaactgatggaacctgagtagttccnaaatttccgttactcaactctaacccgcatataaaataaaatcagtgtaatgctaagaaatactattgtacctccaagaataaacttgacaataaaaatattgtcatggcagtttaaagaaatgtctttattaaaatgaggattccaaggtaaaatcctctaagtataaacatatttatataagatatttatatttaagaagatangtaatttcattcaatattttgtttttaatatcatgatcattaagttacatagattctcttctggtaangcaaagtgcaaaaaaagccaaaattgttatagactgtgattcaaatactctttcatatagccnagggtgataaactacttatttattgaacttgactgtttaaatataaaaatgattgtcctaatggagaaagcccctaaaaagcaagtagctccttttgcataaaagacttttacattattttggattttagtgaacagtngtttttttctattngtaantttctngattagnatatcancattatttatgaattgtttgttatggtaggagtatagtatcttttggaagaatttatcttagtatatattaaccaatgagtcaattaagattagccaatttcaatattatccttaagcagtattaccattgtaatgctagaatagacatatcccagaccattaaaaacctgacaattctttatccaaaaaaaacaagcaggcaaaatatttacaaaactattaaaagattggggagctaaagtagtggcaaatgcattactctgaaaatcctcacacatcctctgaaaaccaataaagatgaacaaataagactacacataaccaggctgggcacagtgactcacacctgtaatcccagcactttgggaggctgaggcaagtgaatcacctgaagtcaggagttcaagaccagcatgaccaatatggtgaaatcctgtccctacaaaaatacaacaattagccgangtgtggtggcacgcacctgtagtcgcagctacttngggaggctgaggcatggagagtcacttgaacccngggaggtggaggttgcagtgagccgagatggcgccactgcactccagcctgggtgacagagcaagactccgtctcagaacaaaacaaaa

SEQ ID NO: 8743 - DNA, 1554 bp, Homo sapiens
tgctatattgccccgctggtctcaaactcaatggactcaagcaatcctcccacctcagcatcccaaagtgttgggattacaggcatgagccactatgcctggcctagtaaaatatttttatactaagtagagagagtagattcgtggaaaactcttaaactcaccaggtactgcaatgaaacttctagcattggtgattagcatactaatatgtactgggcaaatttataatcgttagtaatttgcaatggagtcttttcattctgatattaaaagtattttacaaacactaaactttcaaaatctctcttataataggtattgttaaattaattccatatttcatatgaaaaaacaaaagctgagggaggcaaagttacttacctaagaccacacagtatttaactgatggaacctgagtagttccaaatttccgttactcaactctaacccgcatataaaataaaatcagtgtaatgctaagaaatactattgtacctccaagaataaacttgacaataaaaatattgtcatggcagtttaaagaaatgtctttattaaaatgaggattccaaggtaaaatcctctaagtataaacatatttatataagatatttatatttaagaagatagtaatttcattcaatattttgtttttaatatcatgatcattaagttacatagattctcttctggtaagcaaagtgcaaaaaaagccaaaattgttatagactgtgattcaaatactctttcatatagccagggtgataaactacttatttattgaacttgactgtttaaatataaaaatgattgtcctaatggagaaagcccctaaaaagcaagtagctccttttgcataaaagacttttacattattttggattttagtgaacagtgtttttttctattgtaatttctgattagatatcacattatttatgaattgtttgttatggtaggagtatagtatcttttggaagaatttatcttagtatatattaaccaatgagtcaattaagattagccaatttcaatattatccttaagcagtattaccattgtaatgctagaatagacatatcccagaccattaaaaacctgacaattctttatccaaaaaaaacaagcaggcaaaatatttacaaaactattaaaagattggggagctaaagtagtggcaaatgcattactctgaaaatcctcacacatcctctgaaaaccaataaagatgaacaaataagactacacataaccaggctgggcacagtgactcacacctgtaatcccagcactttgggaggctgaggcaagtgaatcacctgaagtcaggagttcaagaccagcatgaccaatatggtgaaatcctgtccctacaaaaatacaacaattagccgagtgtggtggcacgcacctgtagtcgcagctacttgggaggctgaggcatggagagtcacttgaacccgggaggtggaggttgcagtgagccgagatggcgccactgcactccagcctgggtgacagagcaagactccgtctcagaacaaaacaaaa

SEQ ID NO: 8744 - DNA, 5775 bp, Homo sapiens; identical to SEQ ID NO: 7562

SEQ ID NO: 8745 - DNA, 738 bp, Homo sapiens; identical to SEQ ID NO: 7563

SEQ ID NO: 8746 - DNA, 579 bp, Homo sapiens
  SITE (456): n equals a,t,g, or c
  SITE (493): n equals a,t,g, or c
aaaagtgagaaaacatatcagtttttatacatctatacatgttggatggatgcctgcactaatataaggaagcagtcttatagataattcagtaatcacttaagtttgatatattagtatatagacttggctactgtgacagaggcttataaaggtagaaatatatttatatttacttgaaaagtctgtgtaaactatcttgagattaaatggaggctgcaaaatcactgtgtcccagggctcctttgtcttgctctgctcttcttctatgcagtttctgtattgtgggcgaggatggttaccattgtgtctgctaataagaagaaaaagagaagggcattctctttacctttaagaggagtttgtgtatatcactttcactcagatccctctggctctttgtcacgtcacaaccagttgcaaaggaggctgggaaggtgagtgactctgacctangcagccatatgttgcacttatttttattactgcatangaaggagagaacagattctggggagatagccagctatctgtcacattaagggttgagtcagatttattttcattaaaaaaaaaaaa

SEQ ID NO: 8747 - DNA, 1021 bp, Homo sapiens
aatttttaaaatgtgagaaaacatatcagtttttatacatctatacatgttgtatgtatgcctgcactaatataaggaagcagtcttatagataattcagtaatcacttaagtttgatatattagtatatagacttggctactgtgacagaggcttataaaggtagaaatatatttatatttacttgaaaagtctgtgtaaactatcttgagattaaatggaggctgcaaaatcactgtgtcccagggctcctttgtcttgctctgctcttcttctatgcagtttctgtattgtgggcgaggatggttaccattgtgtctgctaataagaagaaaaagagaagggcattctctttacctttaagaggagtttgtgtatatcactttcactcagatccctctggctctttgtcacgtcacaaccagttgcaaaggaggctgggaagtgagtgactctgacctaggcagccatatgttgcacttaatttttattactgcataagaaggagagaacagattctggggagatagccagctatctgtcacattaaggtttgagtcagatttattttcattaaaaaaaaaaaaatggcctcaggcctgtaatcccagcaggctggcaggctgaggctggtggatcacgaagtcaggacatcgagaccatcctggctcacacggtgaaaccctgtctctacatacaaaaaaaattagccgtgcgaggtggtgggcccctgtagtcccggctactcgggaggctgaggcaggagaatggcgggaacctgggaggcatagcttgcagtgagctgagatggcaccactgcactccagcctgggtgagagcgagactctctctcaaaaaaaaaaaaaaaaaaaaaagccgttgattatttaaacagttaacttttttgttgttgttctggaatgagtcttggttactgtatagtatgtattaaaaataaccattagcaatctaggcatagtggtatgtgcacagtcccatctcatgtaattaaaaaaaaaaa

SEQ ID NO: 8748 - DNA, 682 bp, Homo sapiens
gaaatagtagtactttaaaaattaacatggtttagaagatatgttttatagatacaaaatggtagttatacagaggtatatctgaagaggtctttgaatgtacttagacaagaaatagattttgttttattaataagagatgaagtagtttctgcttagatcaaaactatacttttcaaggatgaaagcaaatacaaaacttcttcagaataacaaatagcaaatttgttaaaggttctggtattaatcatgggtttcatctcaccaaatgatctggaggccggttgatatttgtatttctaatgctgatatttttaaggtataatttctcacggttagaaacataggttagaaatgttaatatccaagttaatgtaactggcatcctccaaataacagagtgctttggatcagaagtaatttgtgaaatctagcttttttcttttacctgttttcagaacaagttcctttgagtgcttctcttggcttacaagtgaagtttcattttagattgaatgggttctgttacaaagtcaggggaagaggtattactgaatttgtgagaatattttaagttgggaattactctttttatacaaaagacgatgatgattaggttcagaagcttgcctattataacctgctttgactcatagttgaagttccatattattcaaaaaag

SEQ ID NO: 8749 - DNA, 297 bp, Homo sapiens
ttgttcttttttccttttttttttttttgagacagagtctcgctctgttgcccaggctggagtgcagtggcgcaatcttggctcactgcaagctctgcctcctgggttcacgccattctcctgcctcagcctccgagtagctgggattacaggcgccggctgccacgcctggctaattttttgtatttttagtagagacggggtttcatcatgttagccaggatggtctcaatctcctgacctcgtgatccgcctgcctcggcctcccaaagtgctgggattacaggcgtgagcaac

SEQ ID NO: 8750 - DNA, 1064 bp, Homo sapiens
cagtcactttagtaaaataagtacattatattacatgtcattataatattgtgttatcacataaactgagcataccacaatccatattctacggactgtcttctcctttttccactgattacatgtgagtggttcttagataacacaccctaaagacaaagaaagaaaggaagagaaacagaattaacaagagagggaaaagagtgtcagtttcctttgctatgactattaaatgactcagtgaattttcttagggtaaagttactgccattcaaaattatagtaaattggtaatattttacagtcatatattttttgtttcagctgagtatattttgtttcagcttaagtatgggcacatatctcccacacttttttagatcagatatgacacataaaaaagatggctttggttttttaaaaactcttacaattagcaactaatggcagtgtgaacatataattggttttataggtaaatcaatttgtcgacttacaaacttttaagacttcatttgttattcataactacattttgctgaggaaaaaaatacttgtttatgtcaaaaaggggagaatttccattaagttcatactctccatgatgagaaagcacaccccgaaataagacattaaatgttagaatgtattacttttcctggttagaaaagaacttggctttgggagtggaccctatgcgtatcatggtgtggcaatgccattttgtttccaaagataacatttgtagatgtacagatgtcctgaactttattaaaccacagctgtggttatcacatatttattcaaaagatattacagctatcaaagcagtatgtcagcaaagtccttagtagtttgcttaaattgccctttcattttactgtatctgtaagtattcaaccaatgtctttaaaagcctgagtaaaaaaaaaaaaaaaaaaagaaaacacaaataagcaaacacgaagcattatttacatggaagcattcagaaatcatgaatagcattatcacaaatgagttatgacattttataggttcacaaaaacgagagagagaaaaaa

SEQ ID NO: 8751 - DNA, 1005 bp, Homo sapiens
gaacaaacaaaaaaatctctctaacgtttgattctgccttatccttcattggagaaagggatgaaggctgccacgtattagccgtgatttcttaacttctctacctttaatttcctcatctatgagatgatgttgaacctgtctacatcataagtagttaaggatgaaatgaatgggtatatgaacattgtgttggggtacgtagtagatactcagcaaatgtgtcttcccagtgatgtcacatttcctctacttctgcttggcatgtgtctcgttcccctgagcccagctcatgtcactgtgacgtgagagggcaggtgaagtgttagttgttcccactccgtcgtgccctttcacagttgttagtctgatgctaaagacttaagatttatttcttcattgttgttgttgtttttgtagagatgagggtttcactatgttgcccaggctggtcttgaactcctggcttcaagtgacactcctgcgtcagcctcctaagtagttgggattataggcatgtgctaccacatctggctaattgtatacattttttgtagcaatgtggtcttgctatgttccccaggctggtttcaaactcctgaggtttcaaagtcctcccatcttggcttcacaaagtgctgggattatgggtgtgagccaccatgcccagcctagattttatttttaaagtaagaatttatagacagccgagcgctgttgttgacgcctgtaatctcagcactttgggaggctgaggtgggtggattacctgaggtcaggggttcgagaccagcctggccaacatggtgaaaccctgtctctactaaaactacaaaaattagccaggcgtggtggtaggcgcctgtgatcctagctacttgggaggctgaggcaggagaatcgcttgaacctgagaggtggaggttgcagtgagccgagatgacgccactgcgctccagcctgggcgacagagcgagaccctgtctcaaagaaaaaaaaaaagaa

SEQ ID NO: 8752 - DNA, 1009 bp, Homo sapiens
gaacaaacaaaaaaatctctctaacgttttattctgccttatcctcaattggagaaagggatgaaggctgccacgtattagctgtgatttcttaacttctctacctttaatttcctcatctatgagatgatgttgaacctgtctacatcataagtagttaaggatgaaatgaatgggtatatgaacattgtgttggggacgtagtagatactcagcaaatgtgtcttcccagtgatgtcacatttcctctacttctgcttggtatgtgtctcgttcccctgagcccagctcatgtcactgtgacgtgagagggcaggtgaagtgttagttgttcccactccatcatgccctttcacagttgttagtctgatgctaaagacttaagatttatttcttcattgttgttgttgttgtttttgtagagatgagggtttcactatgttgcccaggctggtcttgaactcctggcttcaagtgatgctcctgcgtcaccttcctaagtagttgggattataggcatgtgctaccacatctggctaattgtatacatttttttgtagcaatgtggtcttgctatgttccccaggctggtttcaaactcctgaggtttcaaagtcctcccatcttggcctcacagagtgctgggattatgagtgtgagccaccatgcccagcctagattttatttttaaagtaagaatttatagacagccgagcactgtcgtcacgcctgtaatctcagcactttgggaggctgaggtgggtggattacctgaggtcaggggttcgagaccagcctggccaacatggtgaaaccctgtctctactaaaactacaaaaattagccaggcgtggtggtaggcgcctgtgatcctagctacttgggaggctgaggcaggagaatggcttgaacctgagaggtggaggttgcagtgagctgagatgacgccactgtgctccagcctgggcgacagagcgagaccctgtctcaaagaaaaaaaaaaaaaaag

SEQ ID NO: 8753 - DNA, 298 bp, Homo sapiens
aaaaaaaaaaaatcgcaaaatacatctcataatgttttaagaaagcttataaatttgtgttgggccagtgggctgtgggttggacaagcttgttgtagatggttagaaagattttattcagggctatttgaagatgaacagcatgataggatttattatggttgagattccaagtgaaactccagtgtaaatttgcttctctgctgtatagactaagtggtgttggggcttaaggatggcagcctggtctgtgggtgtggagatcagcatgagtggggcccctaggaatccaggaaat

SEQ ID NO: 8754 - DNA, 298 bp, Homo sapiens
aaaaaaaaaaaatcgcaaaataaatctcataatgttttaagaaagcttacaaatttgtgttgggccagtgggctgtgggttggacaagcttgttgtagatggttagagagattttattcagggctatttgaagatgaacagcatgataggatttattatggttgagattccaagtgaaactccagtgtaaatttgcttctctgctgtatagactaagtggtgttggggcttaaggatggcagcctggtctgtgggtgtggagatcagcatgactggggcccctaggaatccaggaaat

SEQ ID NO: 8755 - DNA, 19586 bp, Homo sapiens
ggaggagcacaggccttggaaaggaaagcagctgagatccagaggagtggaaggctcccccttgactaaagctgtaagtagttaccttgggctgcaaacattattttttctttgcttccttgctcactgaaaataaacaagtggcattattggtggattgctgtgacattctcatattgatcaataagacataaacttttctatttttaatctatcttttttttttttaagtctgcgatttccatgatattttcttaccataccctttcaaacgcatgtctctccaactgcctacataaatcaacgagtgacttggatccagttcctgtggatttatttctgtggtgacagtcatcccgactttaccaaaagcttttaattcagtcaagagaatttttaattttttaaaaggaccggctggtgaatgcaagaaacttttggcagggttaatagactggcatagtgggtggacctatgagattaatattgttaatattttattttaaggaagcaggagctgtcggaaagtaggggaggatgctactaactcaaagggacttctgcaacttcaaccctaagtttctgagacaggaaaacagacatgttggttgaaccatgtgaaattacttttgctaggtcaaaaacagtgatgattggcaatttcatgttgcacaagcatttccatctagcagtgctttcagagaatccaaggctgtgatatatcattaccttctcagatttgctctggtttcagctgtgttcattagctatctgaagcattgaacacccatccaactctaaagctggaagattacctcatctgaatgagacctggccccaaaagatggttaaagttcaagctggttcttttcaaggcaaccttgccttttacagggcctgactcagtctcactaaagccatatgtaatactccaatggtgtagagacagaaacgtttttctttgccattaagtactttttttggatacagtattgtacttttttggtatacagtattaagaggaacagttttaacactggagcctggcttttctgcctattgttgcttcttattcttattttgacgtgtcacccttgctgcctgtgagaatgtcattgataataatacatgatatttcccattctttgtttctcagttcacttgtcattttgcattcaggagaagggacagaacaggaagtccagtagccagtgtcagagcctggagcagctcctctccttcctggggttgagttccttggttttcttgtttcacctttgctaccccactgcagtttttctaccacgctgggtttagcacgaatcaggagttgatgcccaggtaccctgtcaaccccatttcattccagcagttcttcagcacggtcatccaaatagactagaatttgaattgaacaacagtagttctgtgggcctaacaatgaaataatattaagcagtcaggatattatattactaaatagtcactcacttttgttaattattgtcatctgcgttgtagtcttacagaggactttcacatatctttaggagatagagcaggtatgattacctaaacttttagatgagaaatagaggtccaaagaagtggtgcaaagcagaaactacacccctatgcttactcttgagaaagtgggaaaaaaatgaggtttttaaaattaaagacctaaaacctagtccaattgaacattattctaacagatgatcagattcacaattagaaacaaatatttgagctattactgtttttcgtttatttgcttgttttttatttttgagacagagtctcactctgtcacgcaggctggagtgcaatggtgctatctcggctcactgcaacctcctcctcctgggttcaagcaattctcccgcctcagcctcctgagtagctgggattacaggcgtctgccaccatgcccagctagtttttgtatttttagtagagactggctttcactatgtcggccaggctgggctcgaactcctgacctcaaataattcgcccgcctcggcctcccaaagtgcagggattacaaccatgagtcactgcgcccaccccaatactgttttttttttttttatggtgactctttgaccaaataatttttaattgattttaactttttacccctttagctaagttcattaatcccaaaatggcaaattaggaagtaggctcttttagcaacgaattacaattaatcaatgttccctgtggcaaaataaccttactttattttataattcagttaaactaaaaattttaatctttacctgatcaatcatctttatgaaaagtcaactattgaaactgtatgtcctgaatttggttttttacttctgaagatttaaaacaatatcaatgacctctacagcaaatattttcttcacatctcagggattttcctatatttaaattgctccttcatttactaacttctaattcttttttgcaattacctttgttactcaaattctcagtttcaatgagacaatttttagatgcttcaaataaaaaaacaaaggagggaatttagtcatcttgattttatatcagaagtgattttccctttccctgttagccaaacaaaaaatccaaaactctgatcaacatcatttctatcttttacagccaaggacagagaaaaacatccagatttgggaacacaataacagatatgattgtccccacttctactgccaaaattataaaactgttaactcctcctcatcagcttacctgactacttaaaagcaaaagagttaattaagtattactaattggtgatactagatcaatgaaggtaggtcatggcccaaattgtacttatggagatggaagagcttaattgtttttattaggcatcaactgcatcagaaatttcattagcacttagcaaatttgcctatggtcttcttaaggtgatcattttgaattgggttctttaaaagacatgaatgactggctgcagtgactgacacctataatctcagcactttcagaagccaaggtgggtggattgcttgagctcgggagtttgaaacaagcctgggcaacatggtgaaacttcctctctacaaaaaataacaaaaattagcctgacatgttggtgcgtacctggtgttccagctactagcgaggctgaggtggaaggatcacttgagcctgggaggtggaggctgaagtgagccatgatcataccactgcactccagcctgagcaatagagcaagactctgtctcaaaacaaaaaaacaaaaaacaaaaaaaccccaaaagacacgagtgttcagacactcagttgcagacattaaaagagagcacagacacatgtgctgttttaggtataaaggaaagactctggaatcaggaatgagaagcgaacatcctgctctgtcgctctagctctctatgcctcagattcctatcctgtaataagtgggcatttgggttacatgatttctaaactctaacagcactcataatctattatataccaatcacctatgctaatttactaattatacactagatagtatggttatatactaacagtctattatacaatctgctaaaaattcataaaaatatctatccctttacattttccacaaaagggcttgaccatttttcctgaattatttttagttttctgctctatagagataagaaaagttattcctttaatagaaacttctattcaaagcagaaaatatgagcagatcttatttatagcccctaggccccattcttaacaaaacatttatctcagtaagaaggaaagcacagaataaactttgtttaatcgtacctactcttctatgctgtctaaaagcatttccgtgacttttaccaaagggctggataaaaataaaacaaatcctttatttggcaggattgggcctggggaagggagaatatgaatgtcctaagaaggcatctgagatcacatcctgtatttgttgttattattgtttttttttttttttttttttttgagacggagtttcgctctgtcgcccagcctggagcgcaatggtgtgatctcagctcactgcagcctctgcctcctgggttccagcgattctcctgcctcagcctcccgagtagctgggattacaggcgcccaccaccacgaccagctactttttgtgtttttggtagagatggggggttccactatgttggccaggctggtcttgaactcctgacctcaggtgatctgcctgcctcggcctcccaaagtgctaggattacaggcatgagccactgcacctggcctgttagcattgtttttaaactcattgttgttatttgctgctaacaaaaatgtaagttacatcttctccttattacaacacagatgatctttatcaccaatcctggactcttccccttccctggcatcttcctccaaagcagggggtggggagggaggaaaaagaaggaggagaaggagtaggaggagaaggagaagtagggggaggatggggagggaagggtgaaagagagaaagaaggaaagaagcggagtatcctgaggcctggggcccctgagctgagattcctcctctggcctaggtgcctcggggtattgttgctgtaggcactaactatacagcagtgaacaaaccagacacaaaatcctgcttttctggagcacatgttttcagtccttaatagcaataagtaagtcagagtgtagatttgggtaaattttgttatcaatattgtcctgtgttacattttcttagtagtaagtatttaatattttcccccccgtctaaaaataaacacaatgtaagtgactcaacagaaccaaaaaaattgttgtcaatttttaaatttaataaatgagatatttgttgggatgtgatttttttacacgagagttagttatgagtttctattaacaaaagctggaattgttctatatttgaattcgggtgtcttttggaaattcaatattaaatcttagtactaatagtacatgctgttcaatccctgtaatactttctgattgtcttaaatggactgcaacttttctttctttaaaagtggtcagatatattgcgttcttaagattataaagtaggccaagtgcagtggctcacgcctgtaatcccagcactttgagaggctgaggtggatggatcacaagatcaggagtttgagaccagcctggccaatattgtgaaaccccatctctactaaaaatacaaaaattagctggacgtggtggcgcgcacctgtagtcctagctgtttcagagactgaagaaggacaatcgcttgaacctgggaggtggaagttgtagtgagctgagcttgcgccactgcattccagcctgggtgacagagcaaactccgcctcaaaaaaaaaaaaaaaaaaaaaaaagaagaagaagaagaagaagaagaagaagaagaagaagaaaaatgatgataaagtaaaaggccagtaactggcagccacatgttatgcaaacattctcccctctgtaaatactacatgaatgttatttttgctttcagaaatcactaaaccttggccatggtcacttcctcttttccaatctctgtggcagtttttgccctaataaccctgcaggttggtactcaggacagttttatagctgcagtgtatgaacatgctgtcattttgccaaataaaacagaaacaccagtttctcaggaggatgccttgaatctcatgaacgagaatatagacattctggagacagcgatcaagcaggcagctgagcaggtattctcttatttctgttaatcataatgtacacgaggggcatgggagctggtggaagacgagagagctgaattgtctgtgttgtacatggaaaaatcatttttattttgcttgttttgaacagggtgctcgaatcattgtgactccagaagatgcactttatggatggaaatttaccagggaaactgttttcccttatctggaggatatcccagaccctcaggtgaactggattccgtgtcaagacccccacaggtattttaactatcttagtcttttgtgcaaaagtaactctctaaaatgcgcacgttcaccaaagcaaaatgattgctcttgaattaccatatatgtggtatatgttatggttatatttatctcaacatttgtcagattttaaaaaattgtacttagatactatttaacaatcttttgtgattgaaaatctttattaaattttgagaaaatgtgtaaatagggtattcctgcaagaaaaactaagggaagagatctcatagatacaagtagtaacttaatttctgaagtagacagtggattgtgttaggaatacattccaaagcctctgctgaagggacaccctttcaatgttatagagtctctccattccagagttgcttcttaggcagaaagacttcaccatgtattttcaagtgaatcataagaccttatgctttgaaactgcattttcctaggctcacaaatctaattttcctgggaaaaggttatctagaaaccttctaatatatattaaaaatctgggtcctactgtcatcctggaggtgtcaacgtggcagttgcatggacaagtctggcatgaaaagacaaaattatatctggagatagaaaatcaaatgtcagcatatagatggtgttaaacaccatgatgagttcacctgtggagtgagttagagaagagtttaggtataaggcttgagcactaggaaattctagtgtttagactcggaagaaaacgaggaatcagcagaagagtcgaagaagagcaaccaataaataggaaaatgagagggtgggtccaatagagaagtgaggtgtttccagaaggaggtgtaattaactgtgccaactgctgttgaaaagttaagatgagatcaggtaaaatgtgggggtcactgctggcattagtaagagtttgggtgatagagatacaagttggagtgctctgaaagggaatgggagaggaggaactggcaacagcaagagggactgatcttttgaggagttttgctttaagagagagatgaggattaaagcaatatttggaagggcatgtttggaaaggtcaaaagaggttttaattttattttttaaagatgggaggtactagaggatatttcattgctgatgggatgtttcagtagagaggagacccttgatgaggcaggagaccgaataatgaatttctggagcaatagataccgtgtgggaagcattcatcaagtgtataatcatctgtggcttttaaagtatgatatttttaggcatagtttttgtattaacttaagttccacttaagtggttacagttgctatcgtttccatataaagtgactaaaatatttttttaaaattgaaatttcttaattataatttggtttagatttggtcacacaccagtacaagcaagactcagctgcctggccaaggacaactctatctatgtcttggcaaatttgggggacaaaaagccatgtaattcccgtgactccacatgtcctcctaatggctactttcaatacaataccaatgtggtgtataatacagaaggaaaactcgtggcacgttaccataaggtaagagagagtgacggacgtgtaaaatggagcgtgttgtgagtggtcaatgctgggtttaggagtttgaatttcattccctatatgatacaatattactagagggtttttttgttttgttttgttttttgttttttgaaagtgggcaataaagaaaatgacacttttggctgggcgtggaggcttatgcctgtaagcccagcactttgggaggctgaggcaggtggatcacttgaggccaggaatttgagaccagtctggccaacattgtgaaaccccgtctctactaaaaaatacaaaaattagcggggcgtgatggcacatgcctgtagtcccagctatgtgggagctgaagcaggagacttgcttgaacccaggaggtggaggctgcagtgagccgagattgtgtcactgcactccagcctgggtgacagagggagactctcaaaaaaaaaaaaagaaaaaaaagaaaaagaaaaaagaaaatgacacgttgtaaaaaactactcagaaaaacatgtaggcagagaactgttaaaaaaaaaaaaaagtagcatgatggtccaggattgagataaactttttgcacatataaaacaaataattttaacataaaaaaagatactaaggtgactataatctgggcactgtttcaataattttatatttttttagagacagggtctcactgttgcccaggctggagtgcagtggagccatcatggctcactgttaacctcaaactcctgggctctagtgatcctcctgcctcagcctcccaagtagctgagactgtaggcatgtgccaccatgctaatttttaaatatttttttggaaacagagtctcactacattgcccaggctgtctttgaactcttcacctcaagcagtcctcccaccttggcctcccaaaatgctgagattagaggcatgagccactgagcacagccataatctaaatactatttaatattgaaatggtagaaagatgtttcaaaattgtatgaatcagctttgcataagttaatttgctatcaaaccacaaaataccttattttctacaccagctaatttaattaccatcttatagatttaagatcaaaccataaaatgtttactttaaattctgaattgaaaaaaggaatcaaataacctttaagtcataattttatactaaactaggtagagaaagaagcctggccttttaaatggatatgtgtgatgtacaggcagtatgaatgtcccttctccacacccagatattttgtaagcatcttaaactgtagcctcagaatctttggagtggagaaattatctcctggcagtctcagttaaaatataaatattaattaagaggagggatgttaaaccaatggttttcaaatgatttcgatcatggacccctattggaaaaaatcgttaacataagtcctcaatatatgtatttttgtgtgtgtatttataaagtgcaacaatttcaaaatgctttcttcataattttgtggattttgacagcttcttttcatatatatcactgcatttcactttcttcttaaaatgtgtctcatagtaaaaatagaaaggtcagtgcttccattttcttgcttgggagattgtttgcattatttgtattatctttcaatgcagtttatttgcagtaatcatttgaagctattctgccattctgtaaatatgcaggatggcacagtgcactgaatgtggacaaactagcaaggaacctgcagtcaccctgtctaagttgaaaggctctcactcttccctgagggtacctcagggaccgtttgtaacccatgacctctgacatatgtgaacctaatgagaatacctttgtcgatcaattcctttttttttttttttttttttttttttaggcagagtctggctctgtcatcccggctggagtgcaatggcacgatctcagctcactgcaacctctgactcccaggttcaacccattctcctgcctcagcctcctgagtagctgggattacaggtgcataccaccacacccggctaatttttggattttttagtagagatggggtttctccatgttggccaggctggtcttgagctcctggcctcaagttatctgcctgccttggcctcccaaagtgcttggattacaggcatgagccaccttgcctggcctgtcaattcttaaaatagtagtaaagcccaatttcttttctattttttagatattttttctacactgcagaccattttattaactgttgattccatttattatattagactaagtttttttttagtttacctagaaggaatcgggaaattaaatacatttctatggtaattttgaaaggtgggcaagagtcactgagattactttggatgggacactaaagagagagatgacatctctcacctgacttacaggtatttattatgcatctattaatattacgtttctaggcaccaaggattcaaagaagaataatgcatgttttttaacttttaagaagcttatagggccaggtgctgtggttcattcctgtaatcccagcactttgggaggcccaggtgggtggatcatgaggtcaggagattgagatcatcctggctgacacggtgaaaccccgactctactaaaaatacgaaaaaattagccgggcatagtggcacgtgcctgtaatcccagctactcgcttgaactcaggaggtggagattgcagtgagccgaaatcatgccactgcactccagcctgggtgatagagcgaggctccgtctcagaaaaataaaattaaattaaatttaaaaaaagcttacggactttggggtttatgggggggtatttggctcttaactgagagagagggaaagagagagaagggagagagaggagatgagagatgctatggacgtatgttacatattcctccacattttccttagaaatttacttccaattgccagatttatccgcttcctaggagattccctgcagttgaccatagccaaatctgttaccaacttagagggtttttatgagtcatttcttcaacaaataaggttttactggttttctcctatccatttgttgtagtaccacctgtactctgagcctcagtttaatgtccctgaaaagccggagttggtgactttcaacaccgcatttggaaggtttggcattttcacgtgctttgatatattcttctatgatcctggtgttaccctggtgaaagatttccatgtggacaccatactgtttcccacagcttggatgaacgttttgccccttttgacagctattgaattccattcagcttgggcaatgggaatgggagttaatcttcttgtggccaacacacatcatgtcagcctaaatatgacaggtaattcatgaccaggttaggtttcatcttatatttttaagtgcagagaaatgaatgcctcagttatgacttgtattaattttttgcttattggaaattcttactgtgtttgtcatagtttcacaatagaaaaaaaaagctagcacttgattataagctatggttatactaagacctttatgtgtattattcatttaattattacaataattatatgagatagatagtgtcatcccaattttgcagatgagaaaattgacatacagagagtgcaagtaatttgccaaatgctacccagctactactttcctcagtggccatggaagcctctatatcttgccctttgtctcctcctatggctgcatggcatatcctcgtgacatggctgctgtcttcctctagagcaattaatgagaggggacaagagagaaaaggaaagaagccacattgctatttatgactagttacccaccatcacttctgccatgttctattcattggaagtgagtcactaagtccagcccctcttcaaggggaaaggaattagatcctcccaccagaaagaagaattttaaggaatttttggatatatttgaaaaccaccacaatgaggaataggggagaatttttattccctttccccacctttcaggaactcctgactacaaagatttttgtagttggtttaattttccataatgctaataaataatgctattatatttaaggtttaattgaaatgagaccaaggaatgtttattttaatctcttccattagagaatagaagtagttaggtgttcagtgcaattagaagcatgtatcctctctcatcgtgactaatatggtggcgtgatcacatgcccaattctgatggggaaattggcagttttggtttttttgtgtgtggtgttgtttttagaagacttgtctttcattcacaggaagtggtatttatgcaccaaatggtcccaaagtgtatcattatgacatgaagacagagttgggaaaacttctcctttcagaggtggattcacatcccctatcctcgcttgcctacccaacagctgttaattggaatgcctacgccaccaccatcaaaccatttccagtacagaaaaacactttcaggggatttatttccagggatgggttcaacttcacagaactttttgaaaatgcaggaaaccttacagtctgtcaaaaggagctttgctgtcatttaagctacagaatgttacaaaaagaagagaatgaagtatacgttctaggagcttttacaggattacatggccgaaggagaagagagtactggcaggtaatttcagttcaaatgaaagggcattcaagtgaaaggtaaattccaggttaactttttatatttgttccagaaaaccaggtgcttttccttggcttgactccatgcattgatggcaacacacacacacacaacacacacacacacacgtgcatttatgcacgtacatacactgggataaaatatttacaatgggaattaagtataatcttattgcttgctttaagcatatttaaaaaattattaacctaaccatgatgagtttcgatttgactaataaaccagcctactgtggagaacatcaagaagacttccttaagtgggtttgccaacatatctaaattataaacagtcttattttcacttgcaaaactaacagtaaatagagatactacttttattttagtttctcttctaatcagatgtcccgggttttgtatagctttctttttcttttcttttctttttcttttttttttttttgagacaatttcactctgtcaccctggctagagtgcagtagcatgatctcggctcactacaacctctgcctcccaggttcaagcgattctcatgcctcagcctcctgagtagctgggactacaggcatgtgccaccacacctggaaaaatatatatatatatatacacatatacaaaatatttttagtagagacagggtttcaccatgttggccaggctggtctccaactcctcacctctgctgatccgactgcctcggcctcccaaattgctgggataacatgtgtgaaccaccacacctggccttgtattgctttcaaatgacaaattttaaagatgaaactttttatagaatgttggctctgaatttgtattttcctattatactccatgtcccactgccttcttctaaagaaaaggattgggaagagaggtgagattaaagggtggaaaaaattttaatatcctttcagcttcagtactcttcagtactattgttgcccaaagatctccacttcattgagctcgatgccatcatctgacataccaaactaatggtttaactctaattctaaactgacttctttctcttaatccgcttgttatttaggaagtgggttgattctcaagtcactggccatttttaataaagcagttaattataagacacatgatccaaatcccttttcagagaaagataatgtttgcttcgctgtagttaaaaactaaggcaacatttctggtatgagtaacttcaatgtaaggcattgcgttttatctgcgtttgttccacataggtctgcacactgctgaagtgcaaaactactaatttgacaacttgtggacggccagtagaaactgcttctacaagatttgaaatgttctccctcagtggcacatttggaacagagtatgtttttcctgaagtgctacttaccgaaattcatctgtcacctggaaaatttgaggtaagaggacttttataagagtattttcattttatatgttctctgaagtcaagtaaaacaagctatagccactctgccagttaacttctgctgtgtaacaaatttcctcaaaaccatttctttagccctggttctgtgggttggcaatttgaacttggggtaggtaggctgtttttctggtctgagataggctcagttgacgttggctgggctcattgtgtctgccattggctagtgggttgattaggactgaccagtttgtgattgccttgtcctggacagctgggattattaaggccatctctccccgtggtctctcatctttcagcaaacctgagcttgttcacatgttagctgaatgagtccaggagcatcaagagaaaaacaaatctttgcaagttctttgcaaatctctgcttgcaccgtgtttgcaaatgttgcatcaacacaggaagttacatgagcagtggtgattcaaatggtagagaaatgaagaactcagacctctcaatgggaagagctataaaatcacacggcaaaaggacatgggtcaaggaggggaaaatattgtgatcattttttcaatttataacaactaattataaaatgatgatacttcattggaagaacataataaagaacatacctagaactgtgagtctgagataccattcattgaagaatgtttgtttatagatttttaatttccttttgtcactagtgaagacaaacagaaaatcagatgtttatttcacatttttttttaaacagagtcttgctctgtcacccaggttagagtgcagtggcatgatcatagctcactgaagcctcaaactcctgggctcaagcaatcctcctgcctcagcctcctgagtagctaggatttaaaggcatgtgccactgcacccagcatttgttcataaattacagtggctgtagctaattaattcacaaattaagctggcttcaaattagaattatgactctgcaggcttatatctgctaatatacaacacttgcacacatgcacatacacgcatacatacacatattccagtggtttgaatattaatgtcttctctgaattgtggcaaacagtggcagggtttcagtaactagggtgaaatcattgcatattctataaaatagggtccaagttaattcaatcaaggcatcaagtaaggaagtctttaaaattgcagattgcttatggtcatgtatctgtatctgctgtgttatcagagtggaatatatcatacttataaaaatgcttaattctatgaaaccaacaatttaacatacagtgtaaccttaaggccataaaatccaaagatcaggaatgctttgctgccatagaacctgtttaggcagaatctcatgagcaaattgaggctggaataaaagctgaagtgccaactacagaaaatcatgattaaatctacagcaaggagtctggggctaaaatccagtagctaaaaggtggctggactgacataaatatctatctgagatcacttcaaggaagtgagagagagaaatcagggtcaccaaggtaaacttaggaggacatagggtctagccatattgatgcattatattctgtaagcctgaagatttaaactgagcacacaatctaattttctcgtactactttgccactttttccatgtcttgtactcatagaaatctatctctttgaggaattgtcccatagtaggactgaacatttacctgatgaaactacttcatccatgggagaaggacaaaaaaatgctagagttttccaaactaggttaaaggtccaaagccagaaataccatttcactcttactctgaaccacataagtgtttgaaggtggatggtgatagtgcatgaagagttggagaacgtaaataatttattccattactacttcctttctttgttttaaaaatttcatcccaaatgtcttcaggcagttaagaagagttagagaatgatacaagagaatacatgtttaaatgcttaactccatagtatttgtacatctcaactcttaaacatttttttaaattatttttaattattattattatttgagatggcgtctcgctgtgttgcccagactggagtgcagtggtgcaatctcagctcactgcaaactctgcctcttgggttcaagcgattctcctgcctcagcctcataagtagctgggactacaggtgcatgccaccacgcccagctactttttgtatttttggtggagatggggtttcaccatattggccaggctggtctcgaactcctaacatctagtgatctgccacctcgacctcccaaagttctggaattacaggcatgagccaccatgcctggccttgtttttaatttttgtgggtacatagtaggtgtatatatttatgggttacaggagatattttgatacagacatgcaatgtgtaataatcacattagggtaaatatggtatcagtaggtctcaacttttaatgattctgtgaacttgtcatgctgtatcccatctctggttccttcttagatggaaggaaggagggaagggggcatagcacctaccgtttaaattgggcacctgtaatcattatttggatcttgtcttacctgctccagaccatttgcagaagaaggaaatgagatatagattgtattacaccaaaaaagatatgaaagagccatgtgacagctggcagggagggtctttggaattgtagtcccttggagggagcatcatgatgagggtgaggcaggtctttattttgtaagtgtagattctctgtggcatgactttcactgaagttcatcaggttctaaggaacagatactaatcaaatttgcaagatagataagcgagaacaccaacttgttattttaaaaaataggttcccttagctgggaacaatgaactgtatgtcaaggagactcttcattggcaaatcctctcaaaagtacaaatgatagatcagtttgttttgtgagtgcagaattaaaacaaaaggagttgggcattcttggaaaagatttccaagaacccacagaagcctgaggcaatgtgattcttctctttagggctggtgatctgaagaccatgtaggatcaaggtgcccactttcctcaaaaagagccaaaaaaaagtccaataacccattcttggtttttttagtgcttcttttctctagagaccttgcagggcatggcccttctgtgaatatgttgtttctagaaacagcagtcataatattgaagatgacaaatgttttacatcagtcatgctcattatggcttcttgagtagcttctcagttctgttgatggatgcacactctctccatagatatttacacgttatcttagaggatcactattgcagagatttcaacacacttgttgtgtatcctcaacccccaccaccactttagttttatgttaaaagggtggtgttactcaccatgcccacaaatgtggaaacatcttgctttagcaccttaggcaactctggtgtattgtcagaagcactggcagagtctgttctctgtaactaactagttagataaccttgggaaagtcacttaacctctgaatttcctactcatagaagagaatattttcctcactgatttggtgaggatcaaatatgataatgcatgtgaagacactttgtgaatggtgaagtacaatcattatcttctaggatatttagtcattttctcctcccagttgtaaagcatctgttttcctaattttcaatttcttctccactccaactaatttcccaattttcaatttcttctccattccaactccatttccacaactaatgggttcattttcttttattcttgttctgtttattgactgtctatgcatgtttccttctgttcttgttcaattgctttgtacatattcctctcttatgaaaactccactgtggcttcaggctagatctagtcattaatgcctttcacagtctgatctccaccttcctctgatcatattccttcttctcttcttcactaatcttcagcgctagccagtggtgtgatgtaactttaaacaattccttctctgaggtagaaaacaaaaagccctgacttatggaatttgccagttttcattgtgtcaatattcccgccatgatcccaccagcttcaagaatggatctgttggcagagtttgatagctcacgcctgtaatcccagcactttgggaggctgagttgggaggaccatttgaggccaggagttcgagaacagcctgggcaacatggtgaagccctgtctctactaaaaatacaaaaattagctgggcttggtggcacgcccctgtaatcccagctactggggagcttgaggcaggagaatcacttgaacccagcaggcggaggttgcagtgagccaagatcatgccactgcactccagcctgggtgacagagcgagactccatctcaaaaaagggggaaaaaaagaatggctgtgtttaacagccagctgtccaatttcctggaaatttaacaatctgttctcatgagcctgtgcaccactagctccagcacaccactggttttaaccaatctagaatgagaactcacattgccttgatctgtcacacacacttctgtctcagaatgagcctttgctggttcaatgtccacttcccacaatgtcttccaccatacagcccttgaaagaaattcctaacagcttgagtttttggcagcttgtgtcccactccgtgaaacagaccagttcagttttttttttctcagacctcctagcacttacctgttctcttctctgatacactgataaactgatttctctctttatgtttagaatccgctccatttcaccattagctctttagcttcttgagggaaggatgtgatgtataactctctggttcctgattgtcttgcacataatcgaactcaatgaattgctgctgctgattttgactttccattaatggttacatttgattgttgaaactaaaatcttgggccctcttgaattgctctagtcttcattatgtagtaaatggctgtcccctgcctggcctacttgctgcatcctcctaaatcagaaatgatttgactatacattatatctaggatggtttcaaaatgattaatttgcttttaacttctatgttaagaaagctgactgtacttttcccaccttttctttaggtgctgaaagatgggcgtttggtaaacaagaatggatcatctgggcctatactaacagtgtcactctttgggaggtggtacacaaaggactcactttacagctcatgtgggaccagcaattcagcaataacttacctgctaatattcatattattaatgatcatagctttgcaaaatattgtaatgttatagggcgtctctttatcactcagcttctgcatcatatgcttggctgaatgtgtttatcggcttcccaagtttactaagaaactttgaagggctatttcagtagtatagaccagtgagtcctaaatattttttctcatcaataattattttttaagtattatgataatgttgtccatttttttggctactctgaaatgttgcagtgtggaacaatggaaagagcctgggtgtttgggtcagataaatgaagatcaaactccagctccagcctcatttgcttgagactttgtgtgtatgggggacttgtatgtatgggagtgaggagtttcagggccattgcaaacatagctgtgcccttgaagagaatagtaatgatgggaatttagaggtttatgactgaattccctttgacattaaagactatttgaattca

SEQ ID NO: 8756 - DNA, 513 bp, Homo sapiens
ggagtttcgccatgttggccaggctggtctcgaactcctgaccaggtgatccacccactttggcctcccgatgtgctgggattacaggcatgagccaccatgcctggcttctttttccttttcataaagtatgggacatttaaaatttgccaagttttgcttgaggaagttagatgttgtgcagtggttttgcagcatgtattttggctcttgggcaatgacgtttcatttgcagaagtttagatgttgattgaaaatcaacagctgacgttaaacaaactggtttgagtaagatacaagcaaggagctcctttcacagaaagggacagttctgattcaagcttggagctctcagctgtacctcagtttgttaaaaataaaaacaaaaaacgaaagcaccaagtgccaaggaaattaaagagcacttaatgctctactgtaaaattgcctgcaccacattttaacccatctccaccgtggtttctcacatacattttattttatcaaacaacc

SEQ ID NO: 8757 - DNA, 857 bp, Homo sapiens
ggtttatcaaaaaatgtcatgaatgtttctatatttcttgttggtttatttctcattattgagttatatattgctggaagtttaacaacttctcttgaattccaacaggaagcatttgctaggtaggcatttggtacctaatggataatctttcatgatggataaatctgccacatcagtctctcttgactttgaaaattaaaatctgggcactttgggaatttctgctgtcttaattggctggcctgtcctgtgaacagccgtcttctctaaatggtataataactgcatttcagcgctgtctcattgtgagtctttttgaaagcttttaaaatgatgttgtgtgatccaaatttaaattaatagttaagcagtgtgttctaccaccaatgcaaataactcaactgaatgacaattggatcctgcttcactcagtttgcgcataaatggttgaggaaaactacatcataggtgacccccgttggtggtagccaaatttcatagtctactgtgtgaaccatcatgatttcagaagcactaaaatatagaaacatacattcttggccaggcacagtggcccatgcctgtaattccaacactttgggaggccgaggtgggcagatcacttgaggccaagagtttgagactagcctgtccaacatggtgaaaccccatctctactaaaaatacaaaaattacccaggtttgggggtgcatgcctgtaatccgagctacttaggaggctgaggcatgagaattgcttgaacgccggaggcagaggttacagtgagccgagatcgcaccactgcactccagcctgggtgacagagccaccctgtctcaaaaaaaaaaaaaaa

SEQ ID NO: 8758 - DNA, 857 bp, Homo sapiens; identical to SEQ ID NO: 8757

SEQ ID NO: 8759 - DNA, 857 bp, Homo sapiens
ggtttatcaaaaaatgtcatgaatgtttctatatttcttgttggtttatttctcattattgagttatatattgctggaagtttaacaacttctcttgaattccaacaggaagcatttgctaggtaggcatttggtacctaatggataatctttcatgatggataaatctgccacatcagtctctcttgactttgaaaattaaaatctgggcactttgggaatttctgctgtcttaattggctggcctgtcctgtgaacagccgtcttctctaaatggtataataactgcatttcagcgctgtctcattgtgagtctttttgaaagcttttaaaatgatgttgtgtgatccaaatttaaattaatagttaagcagtgtgttctaccaccaatgcaaataactcaactgaatgacaattggatcctgcttcactcagtttgcgcataaatggttgaggaaaaccacatcataggtgacccccgttggtggtagccaaatttcatagtctactgtgtgaaccatcatgatttcagaagcactaaaatatagaaacatacattcttggccaggcacagtggcccatgcctgtaattccaacactttgggaggccgaggtgggcagatcacttgaggccaagagtttgagactagcctgtccaacatggtgaaaccccatctctactaaaaatacaaaaattacccaggtttgggggtgcatgcctgtaatccgagctacttaggaggctgaggcatgagaattgcttgaacgccggaggcagaggttacagtgagccgagatcgcaccactgcactccagcctgggtgacagagccaccctgtctcaaaaaaaaaaaaaaa

SEQ ID NO: 8760 - DNA, 453 bp, Homo sapiens
ccgccgtgcctggccttcccttgctttttctttgtgtggatttgagtacatgtcagatgtgctgtgtgtgtctaagtgtgtgttccacctgtgtttttccttcacacaatcccaggccctgatatgttgtctatatggcttattttctggagcagacaggaacagtgtaatgaaagagatcagacttgcgtttaaatcccatccggccatggatgtcctgtgtgatcttgggcatgtcattcgaactcctgaccacaagctcctcatctaagaaaagagtgatattatctacccccacatggtttctatgagatttagaccagataatatatcagcagtacacaggagagataatattttttttcctttgcatagtctttccctgctactgcttttcattctgctcttctcccttcttccccttctctgttttttgtttgtttgttttgtttt

SEQ ID NO: 8761 - DNA, 117 bp, Homo sapiens
tagtagagatggggtttcaccatgttggccaagatggtctccatctcctgacctcatgatccgccctcctcggcctcccaaagtgctgggattacaggcgtgagccactgtgcccgg

SEQ ID NO: 8762 - DNA, 117 bp, Homo sapiens; identical to SEQ ID NO: 8761

SEQ ID NO: 8763 - DNA, 453 bp, Homo sapiens
ccaccgtgcctggccttcccttgctttttctttgtgtggatttgagtacatgtcagatgagctgtgtgtgtctaagtgtgtgttccacctgtgttttgacttcacacaatcccaggccctgatatgttgtctatatggcttattttctggagcagacaggaacagtgtaatgaaagagatcagacttgcgtttaaatcccatccggccacggatgtcctgtgtgatcttgggcatgtcattcgaactcctgaccacaagctcctcatctaagaaaagagtgatattatctacccccacatggtttctatgagatttagaccagataatatatcagcagtacacaggagagataatattttttttcctttgcatagtctttccctgctactgcttttcattctgctcttctcccttcttccccttctctgttttttgtttgtttgttttgtttt

SEQ ID NO: 8764 - DNA, 2932 bp, Homo sapiens
ccccggctcccgcccgctcccagccgggcccctcagcggtcggcgggacggctcccggctgcagtctgcccgcccgccccgcgcgggggccgagtcgcgaagcgcgcctgcgacccggcgtccgggcgcgctggagaggacgcgaggagccatgaggcgccagcctgcgaaggtggcggcgctgctgctcgggctgctcttggagtgcacagaagccaaaaagcattgctggtatttcgaaggactctatccaacctattatatatgccgctcctacgaggactgctgtggctccaggtgctgtgtgcgggccctctccatacagtggctgtggtacttctggttccttctgatgatgggcgtgcttttctgctgcggagccggcttcttcatccggaggcgcatgtaccccccgccgctgatcgaggagccagccttcaatgtgtcctacaccaggcagcccccaaatcccggcccaggagcccagcagccggggccaccctattacaccgacccaggaggaccggggatgaaccctgtcgggaattccatggcaatggctttccaggtcccacccaactcaccccaggggagtgtggcctgcccgccccctccagcctactgcaacacgcctccgcccccgtacgaacaggtagtgaaggccaagtagtggggtgcccacgtgcaagaggagagacaggagagggcctttccctggcctttctgtcttcgttgatgttcacttccaggaacggtctcgtgggctgctaagggcagttcctctgatatcctcacagcaagcacagctctctttcaggctttccatggagtacaatatatgaactcacactttgtctcctctgttgcttctgtttctgacgcagtctgtgctctcacatggtagtgtggtgacagtccccgagggctgacgtccttacggtggcgtgaccagatctacaggagagagactgagaggaagaaggcagtgctggaggtgcaggtggcatgtagaggggccaggccgagcatcccaggcaagcatccttctgcccgggtattaataggaagccccacgccgggcggctcagccgatgaagcagcagccgactgagctgagcccagcaggtcatctgctccagcctgtcctctcgtcagccttcctcttccagaagctgttggagagacattcaggagagagcaagccccttgtcatgtttctgtctctgttcatatcctaaagatagacttctcctgcaccgccagggaagggtagcacgtgcagctctcaccgcaggatggggcctagaatcaggcttgccttggaggcctgacagtgatctgacatccactaagcaaatttatttaaattcatgggaaatcacttcctgccccaaactgagacattgcattttgtgagctcttggtctgatttggagaaaggactgttacccattttttggtgtgtttatggaagtgcatgtagagcatcctgccctttgaaatcagactgggtgtgtgtcttccctggacatcactgcctctccaggtcattctcaggcccgggggtctccttccctcaggcagctccagtggtgggttctgaagggtgctttcaaaacagggggcacatctggctgggaagtcacatggactcttccagggagagagaccagctgaggcgtctctctctgaggttgtgttgggtctaagcgggtgtgtgctgggctccaaggaggaggagcttgctgggaaaagacaggagaagtactgactcaactgcactgaccatgttgtcataattagaataaagaagaagtggttggaaatgcacattcctggataggaatcacagctcaccccaggatctcacaggtagtctcctgagtagttgacggctagcggggagctagttccgccgcatagttatagtgttgatgtgtgaacgctgacctgtcctgtgtgctaagagctatgcagcttagctgaggcgcctagattactagatgtgctgtatcacggggaatgaggtgggggtgcttattttttaatgaactaatcagagactcttgagaaattgttactcattgaactggagcatcaagacatctcatggaaatggatacggagtgatttggtgtccatgcttttcactctgaggacatttaatcggagaacctcctggggaattttgtgggagacacttgggaacaaaacagacaccctgggaatgcagttgcaagcacagatgctgccaccagtgtctctgaccaccctggtgtgactgctgactgccagcgtggtacctcccatgctgcaggcctccatctaaatgagacaacaaagcacaatgttcactgtttacaaccaagacaactgcgtgggtccaaacactcctcttcctccaggtcatttgttttgcatttttaatgtctttattttttgtaatgaaaaagcacactaagctgcccctggaatcgggtgcagctgaataggcacccaaaagtccgtgactaaatttcgtttgtctttttgatagcaaataatgttaagagacagtgatggctagggctcaacaattttgtattcccatgtttgtgtgagacagagtttgttttcccttgaacttggttagaattgtgctactgtgaacgctgatcctgcatatggaagtcccacttcggtgacatttcctggccattcttgtttccattgtgtggatggtgggttgtgcccacttcctggagtgagacagctcctggtgtgtagaattcccggagcgtctgtggttcagagtaaacttgaagcagatctctgcatgcttttcctctgcaacaattggctcatttctcttttttgttctcttttgataggatcctgtttcctatgtgtgcaaaataaaaataaatttgggcaaaaaaaaaaaaaaattaag

SEQ ID NO: 8765 - DNA, 333 bp, Homo sapiens
atctaaaatcaaaagttgaaattataaaaaataaaaaaataaaatcaacaatgtatatttctctcacacagccatcacgatgatgtatttggaataatatatgcataaggatgttcattgcagtgttgtctgcaaggacaaagtgaaaacaatctgaataaccaacaatatgacacagagtaagtaattattggtacgtctgtacaatgcctcatgcaatcaccactgacagcatgggaaagagagacatctattatgaaaagaccactaagacatatgattacatgataagtgcaaggttcatgaataaatagtatgtatactagtatagca

SEQ ID NO: 8766 - DNA, 6594 bp, Homo sapiens
gttctcatgtagcatgtcccattaatgttgcttgaagggtgagtttatgtgccttctgttttacaacattgggtaggcagcaatagattattttctgtttatggagaaagcatgctttgtagagccttaaaaacacacgtgttaatagctaaaactttaggtacgtgagggaaacaaatcttctaacatgttgcttaatgttagttaattgttttttgtcttccttaggctgacattttggatgtcaatcagatatttaaagatttggccatgatgatccatgaccagggtgatctgattggtatgtattattgatacctttaacctcaaggtgagttgatagtatttggcatgcatctgtaatcccagctactcagaaggctgaggctgaagcaccatctaggagtttgaagccaacctgggcaacataatgagaatttgtctcttaaaaaagaaagaaagaaagaaaaaggagttaggctaggcgtggtggctcaggccctgtaatcccagcactttgggaagcccaagcggcgagatcatgaggtcaggagatggagaccatcctggctcacacggtgaaacccgtctctactaaaaatacaaaaaattagctaggcctggtggcacgcacctgtagtcccagctactcgggaggctgaggcaggagaatcccttgaacccaggaggtggaggttgcagtgagccgagattgcgccactgtattccagcctgggtgaaagaaatggcttcgtctcaattaaaaaaaaaaaaaaaaatggagttagtcatatcagctatagagttaaagtatgtttaggaatgccgttttaaaaattaccaaatttatttttcgtagcaatttttttatgttatcaaatgtagaagttaaatgaggcctcatgaatactcagtcccattgacttctttgtacatctttgtttagagaaatagctctcagcttcccagcttttatctcaacaaacttgcaaaattatggggttagtaaccctttttttttttttgagacggagttttgctgttgttgcccaggctggagtgcgatggtgcgatcttggctcaccacaacctccgcctcctgggttcaaacaattctgctgcctcagcctcccgagtagctgggattacaagcatgtgccaccacgcccgctaattttgtagttttagtagagacggggtttctccatgttggtcaggctggtcttgaactctcgacctcaggtgatctgcccgccttggcctcccaggtggtgggattacaggcgtgagccaccacgcctggccagtaactctttttttaaagctttctatgtggaaataatttcgagtttattaaaagttgcaaaaataggctgggcatggttgctcacgcttgtaatcccagcactttgggaggctgaggtgggaggatcacttgaagccaggagttcaagactagcctaggcaacatagtaagaccctgtctttaccaaaaaattagccaggcatagtaacatgcacctgtagtcctagctactcaggaggctgaggtgggaagatcacttgaacccaggagttggaggctacggtgaactattattgtaccactgcactccagtctaggtgacagagtgagatcccgtctcttaaaaaaaaaaaaaaaaaaaaaggtagcaaaaataaaaatattataaggaccttctttataccctttacccagatttacctcttgttaacattctaccccatttgctttattatgtattctttctctctttctctatgtgtatctacataattttttatgaatcatttatgggtaagttaaatacttcatagcccccaaaaattcattgttttttctccaaagaatagggctagtctcttaccaaggtagtaactcgatttcatggctggatagtttggatagtggtagtgaaaccaggacatgtaacatcagaaatctgttcaatttgcagtcttaaaacatctgagtgtgttaaaacatcctctgtccttccttttgcagatagcatagaagccaatgtggaaagctcagaggtgcacgtcgaaagagccactgaacagttacagcgagctgcttactatcaggtaaaagcgggtaccaaagaaagtcactctgtgttgcagactttttaggccatcagagtacattgacatattgagaacagctacagcctttgcttaggtttaagctaaaggaaagtagtcataattgcagtcccagttccatttttattattttcctttgcagatagatctacaaaaaataatcacaccttgaataaacttatcagaaggctagtaactgcaaagctaaccctatacactaatatgatacctaaatctgctatgaggctgttttatatcccgaacagctgaatgtatttcaattaggatagtaagaagtacagttaaagtagaagacttcatagattctttatgttgagtgttgccatagaggatggacatagaatcaacttcgactgctatttatatatgaataaataaggataatcattctggaactgttcctgtaaagtgaaatccttctacatgttagttgaaactctggtttttttacttatccaagtctttatctcagtgtacaaataatgtgaatgaagtctttctcacttcccttcaatttggtgttgcatggctttttagaaataaatagcatttcatgtccttcgcccactttttgatggggttgtttgtttttttcttgtaaatttgtttgagttcattgtagattctggatgttagccctttgtcagatgagcaggttgcgaaaatcttctcccattttataggttgcctgttcactctgatggtagtttcttttgctgtgcagaagctctttagtttaattagatcccatttgtcagttttggcttttgttgccattgcttttggtgttttagacatgaagtccttgcccatcctatgtcctgaatggtaatcagtgtggcgattcctcagggatctagaactagaaataccatttgacccagccatcccattactgggtatatacccaaaggactataaatcatgctgctataaagacacatgcacacgtatgtttattgcggcattattcacaatagcaaagacttggaaccaacccaaatgtccaacagtgatagactggattaagaaaatgtggcacatatacaccatggaatactatgcagccataaaaaacgatgagttcgtgtcctttgtagggacatggatgaaattggaaatcatcattctcagtaaactattgcaagaacaaaaaaccaaacactgcatattctcactcataggtgggaattgaacaatgagaacacatggacacaggaaggggaacatcacactctggggactgttgtggggtggggggagggatagcattgggagatatacctaatgctagatgacgagttagtgggtgcagcacaccagcatggcacatgtatacatatgtaactaacctgcacattgtgcacatgtaccctaaaacttaacgtataattaaaaaaaaaaaaaagaagaaatagcatttcagttgttttccgtgttcctgggatagctgtattttacctgggagtgctcgtaaagaaattcgtatttaataatagtgtttcctttaaaaactaggtgattaatttagtgtccaacagtaaaggaataattaagtaaattatatacatccactcattgttgcatatgggaattaagagatgtttctgaagagtttaaacagaaaaatgtttatactaaacattaagtgaggaaaaacatcaaacatcatacaatgtgatccagttatgtcaaataatatacatagataacaaatcagaaagaaatacaaaaatgttgacggtattatctatgggtgatttttttttctccctccgcttgctgtattttttttttacaatgaacataacagttttatacgtattataaaatgttattaaaatacacatgcacaaataacttattttattgcaaataatgcctggcagcacaggtatagttcctttgcaaaattgtatgtggggacttggaattaaaactttgaaacctatactactcggctgggtgcggtggcccacgcctgtaatcccagccctttgggaagccgaggcaggtagatcacttgaggtcaggagttcgagatcagcctggccaacactggtgaaaccccgtctctactaaaaatacaaaaactagctgggcatagtggcacacgcctgtaattccagctgctcaggaggctgagacattagaatcacttgaacctggaaggtggaggtttcagttagccaagatcgcaccacggcactccagcctgggtgacggagtgagactctgtctcaagaaaaaaaaaaacaccaaacaaacaaaaaatacttgcactactacctagtgctgctgacttaagatttctgggaaagtctgtgcataattttgcatggatagagttaatctttaattacaaggaggcagatttatgaagcattcttagagtcttacacatacaaattttacttgtttcatgagtatcttgtttacatatttctttcctcagaaaaaatctcgcaagaagatgtgtatcctggtgcttgtcctgtcagtgattattctaatcttgggacttattatctggctagtttataaaacgaagtgattgcctccgatcgttctcccgctgagctgttttcaagggcaagtgcttgttgaagtcttgccagaacaaactgatcacaagaagacagcatatatcagaacgtcctgtaatcatttagttagaaactaactactaactagtctttggaattcgtgacctatggagacagtaattatcaatttattgattctattgatttctcaaattaggaattaacttatgtggattttgcttcctcttgtattctgattgcccttcatcccaagtgtttactgaaaattccattctagatattcttgttttgacaaatgacactacagtctcgtaatattgtcttttatgtatatacaaaatttacctttttactagcatctgagatagagttactttctggtacccagtatattggagtctgtcagaaactctataataggccaccagtttttattatttaacattgttatttgaatttctaagaagcctattctctatctattttgaaagattttggcactatatttaattggaaggtaaaatattgtacatgtgatccagagtaaatgagaagtctctatctgagctggtcagttactggagtacatgttactaatctgggtttaaagtttacttcattatctgctagtgtcatccacagcagttcatcctcatccacactaagccatcctgttagcttttaaaggaagttaatttaattaacattaatatactctatgggctccctctcccacctgtctgcatagaaaggcagaattagacatagcatgctttggaaaagcaaataggaattgttgggaatgatttaatcttgttgttgttgttgttgttgttcacttgtggttctacattcctggtgaatgatgaatgttgctgtcaaagggctgccccctaccttataagggttgctgggcatttgaaggcaggaagatttttaaagatagattgaggttggtttaaaattattcctgtaaaccaacaataaagcaaagaagaggttcatttttgtaaataacactggtttcaaatagtgatgttagacttaacctaatttataaacaagagattaatatctccatgcatagttttagacaaaaaaagatgtttcaataaaattactgtcttgtaatataaatgttgtccacttcccttttccacaggcctagaacagttaaagggaacataatttgtttaggctcccacataaatgtgaatctggccaacaactttggttcatcctttagtgaattagaggatttggctaccctgagtatatttatattcatttcttctgttctccttctgttattatacttaatcttctaaactaaactaatgtgaacagtagggaagcaagggcccaaatgcataagtttctttgcactgttgcacttacttaatacaaataaatgttttttaaagcttttgtagtatgtttttatgagttaacatcctaatgtggtaggtattaggtaatgtgctgtcatgagaaaaattgagacttccaagaaaactggacaccaggtgagggttggtttggagacggaataggtgtagctgcctttccttgaaaaacagtgtgtagagatggctgagtgcaatggctcacacttgtaatcccaacactttggaaggctgaggcgggaggatcagtatatcggtacgtctgagcccaagagttcaagatcagcctgggcagtatagcaagaccccatctccattttttttttaatgattttttaatttaaaaaaagaacaacaggatagagctgttggggtggcacagtggcccaaagagcagcttcagagataattccttggttctatgatccctgtttaactccaaattacagtcggacttggatacatca

SEQ ID NO: 8767 - DNA, 3148 bp, Homo sapiens
gatcctcaatgtcacgctggtgccctacggaaacgcacaggtgtgtgggcgctggggaaactgaggcacgtgggcaggggagcaggggacccagcctaccagcaggctctcaccctgctgccttgcaggaacaaaatgtcagtggcaggtgggagttcaagtgccagcatggagaagaggagtgcaaattcaacaaggtggaggtgagcggccccagggccccacactggggtgggggaaaactgtcccacgtacaggaggcaaatacgaggatgccagctctgtcttctgcctcgtgtgctcccatttaatcacatctttattccctatctcctgggtgggtactggtgattattacgagagggtgtcagggtaccctaggccctcttcatgccctctcctgccccctctccaaaccccaggcctgcgtgttggatgaacttgacatggagctagccttcctgaccattgtctgcatggaagagtttgaggacatggagagaagtctgccactagtgagtgacgcccctcactccacccaaggagggggacatgggtggtaaccttccctgcatccaggcagacccaaattcaagtcctagccctgaccactgctgtctgtgcagcccaggaaaacaactacccttctttattttatttatttttttattttttcttgagacagagtctcgctctgtcgcccaggctggaatgcagtggcgcaatcccagctcactgcaacctccacctccagggttcaagtgattctccagcctcagcctcctgagtagctgggattacagttgtgtgccaccatgcccagctaatttttgtgtttttagtagagacagggtttcaccatgttggtcaggcttgtcttgaactcctgaccttgtgatccgcctgccttggcctcccaaagtgctgggattacaggcgtgagccaccgcacccagccctttttttttttttttttttttttttttttttgagacagggttttgctctgtcgcccaggctggagtgcagtggtgcaatcttggctgactgcaaccactgtctcctcagtttaagtgatcctcctgcctcagcttccccagtagctgggactacaggtgtgcaccaccatgcccggctaatttttgtatttttagtagagacagtgttcaccatgttggccaggctggtctcaaactcctgacctcaagttatccgcctgtcccagcctcccaaaggattacaggtgtaagccaccacgcccggccccagcctcccctcttgaagcctccatctctgaatcaggggaatgaatgcaggtctcttaggagcatgagtgatcacagaggacttactggaggaggcatttctgagctgggcatggaaggatgagcaggaatgtgcagagacacagatgatgggatgtggagatgataggacagaccccacctacttccccgggggattgtgaagaatgactcccagagaagtgactcattggctccaatcatttattcattcatcaaacatccgggtcacccaagaggcctcacctagtgacaccctagtcctgcagggttagatcagggctgagagagtggcaaggagagggcactgaggagacactgtggaaggaggatgaagggtgttcctggcagagggatcagcctgtgtggaggtcctgagtaaagtgagatactatgggggtcagaggcagtgggtctggtcttagggatgaaaccaagggagctaggaggcaggagcagcccaagccctgccttaggggcctccactcaagcatgtattgagcacctgctgtttgtgggctttgtcgcatcactgtgaagccaactgtaccctcttctcagtgacgaaacaggcttggctcagggctggtgggcgggaccgttgagataacggggaggaagctgaggcaaccccctgctccccacccacccagtgcctgcagctctacgccccagggctgtcgccagacactatcatggagtgtgcaatgggggaccgcggcatgcagctcatgcacgccaacgcccagcggacagatgctctccagccaccacacgagtatgtgccctgggtcaccgtcaatggggtaagaatctttttagccctcagcttgacactcatagtcccatggagtcagggatggacaagacagagggaccagagataaaggaacccaggcggaggttgcagtgagctgagatcatgccactgcactccagcctgggcaacaagagcaaaacttgatagctttgcatagggaaagagggcattgatgctggggttttgaaaggtgagtaggagtccatcaggcaaaaaaagtatgtattaattcgaagtattaaacatccctagccacccccattgggaaagatgtgccactgatttgcgaggcgggaggcgggggccagacttgggaatatgtgcagccctttctgggctggaaccagggtgcatgggttggggtagctgctgggaatatgcgacccctgtcttgctttgtgcagaaacccttggaagatcagacccagctccttacccttgtctgccagttgtaccaggtaagctgggaggggagcagtgggattcaggtggtgggggtagggtctccttccaggaccccaactcatggccttcacctccagggcaagaagccggatgtctgcccttcctcaaccagctccctcaggagtgtttgcttcaagtgatggccggtgagctgcggagagctcatggaaggcgagtgggaacccggctgcctgcctttttttctgatccagaccctcggcacctgctacttaccaactggaaaattttatgcatcccatgaagcccagatacacaaaattccaccccatgatcaagaatcctgctccactaagaatggtgctaaagtaaaactagtttaataagcccttctggatggtgtaattaatttgataagtcagccattcccccttccccaggcctggcaaaacccgctctctactaaaaatacaaaaattagccaggcgcggtggcgggcgcctgtaatcccagctacttgggaggctgaggcaggagaattgcttgaacccggcaggcagaggttgcagtgagccgaaatcgcgccactgtgctccagcct

SEQ ID NO: 8768 - DNA, 432 bp, Homo sapiens
tttttttttttttttttttttttttttgagacggagtttcgctcttgttgcccaggctgaagggaaacgcgtgatctcggttcaccacaacctctgcctcttcagttcaagcgattctcctgcctcagcctcctgagtagctgggattacagacacatgccaccacgcccagctaattttgtgtttttagtagagacagggttcttccatgttggtcaggctagtctcgaactcctgacctcatgatccatctgtctcggcctcccaaagtgctgggattacaggcgaaagccaccacacccagccaagactctgccttttaaaagaaaaagaagggaaagaacatgttcagtgttgtattttttcctactgatggactggtcaaatcatagatgtatatattcttccttcgaggaagtgaggcttaattcc

SEQ ID NO: 8769 - DNA, 12301 bp, Homo sapiens; identical to SEQ ID NO: 7182

SEQ ID NO: 8770 - DNA, 33296 bp, Homo sapiens; identical to SEQ ID NO: 7180

SEQ ID NO: 8771 - DNA, 8899 bp, Homo sapiens
tggagatcaacggggagaaggtgaagctgcagatctgggacacagcggggcaggagcgcttccgcaccatcacctccacgtgagtccacacgcccactcccacccaacccgcgccactgacctgtggacacagttgagcgaccggtgcctggtcatggtggaaatgtcactggtgggtccctgaggctgtcgggaagtgagcctgttgttggctgtagtaggtggcgtttggctgcacccttcctggtcctgaagatgtgaggggggtgctgtgggggagtcgctgagcaccctggctggagtctggccggacagtggccatgttctatctccttggagagtcagccgaccctccggcccactgtgccgtcaccttacagagagagcagaatagcatttgcctcgctagggggttgcgaagtgccttgcccacccaggacttagtcgctgacaattcctcttggtaggtgtcagttatggcagctggagttggcctgtgcaggctcccgtcacctgcactgatgccttggaagtgacgctgtctagagacgaacacggtgcatgtcagcaggcccttccctacccttaaagctgttcctgggaaatccggccgcccaccggttgcccacctttgtggctgagctgcaggccggggggaagctgggctcctgcgcagatgggcagtgtccttcggagcggctcctggttattgggttgttagtggagcaggttttaggaaagagcagggtctgaaggggccgatttggagctgttgggctgtgtgtccttaggcaagttgccgaagctctctgcgctcgtttcctggagggcctgcctctgggattggcttccatgtggagggtgccaggtgctctgctgcaggcgtcaacgtgcgtgccggggtgtggtgtctggcagctctgtgtgcttggtgctgctgtcatcccatttgacagagggcgccctggaggggtccctcccagcggccaagcctgtgctccacacagtggcctgtgcagagtgaggggcggctgtctggctccacgggcacctccttggctctctcgagcagctcctctggaagtgacctcaggaaggcgaatgaggaagtcccagccagcggcccccttccttcccacagcatgaaagcccggcactccccaggctggctgcccctgcccccgggcccctcggcatctcccgagggtgggaagtgtggggtgcagcgcccccatggatggctgggagtatgggggagagcagggctgctggagagggacaggtgtgctgggcgagcagctcctggggctggagccaaggcggagggcttgtcactgggttcaccctatgctgagcacatttgtgctgtggcccgtgatgcccggaatccctgggagctcccagtcccggggtcgccctggtgtggtgctgtgtggtgaccgttgatgagccctgtgagcgagggctctgtggcctgcatgtcttggcagctgccagtgagaatctgcggaggacactggggcagggctggcatcagtgctttgggcagcctggggctgcaggcccaggcgaggcaagccctcatgccgttggctggtctgggcgctgacctcatgaatccttgctctgggttggtcctgtcgctaggatttcagctgctttattttggttaatcccggtagagagacctgtgactatctccattttatggacaggaaaacaggcccagggaggatgaagcctcctaactcagtggggcagaggttgggggcactcagggttggccctgagtctgccgaggccctgcatcgactgggcaggtggcgcccctgccttcctgccccgtcctgtgccttaaaaccaggcggaggttcagggtggcagaggttcagaggcccgtggccatgaggaatgaactcctgggcagggcagtggggcctggggggtccgaggctctttcagcaggaggagccacagcccctccctgccatcatgcagtcagctgctttctgggctgggcagagcgggaagaaggtgaactggttcctccattccgtggggaggcggggaggagtcactcagcttcctgggagcaacatgggtttttccccaggggcttgggaaggggcggcctgtgggcagcggctgggcccctgctgccgtcccacgtgtctggggaagcagacaggtggctccatcttagagtcccgctctggccctcatgaggcaggaggcccagcagggcgccctgaggggccactggaagtctcgacgccctttgatggtcactggcaaagaaggaaggagttttggggaggtgaggagttttcaggaatagggcagtcaggatgcagtagcgtgacttttttccgatgcagggcgttcagagagaaactgaaactgcatcctgttagcctggcgagaaaaagccttgtggtcaccccttctcgggttcttgctctcagaagctgaggtttgccggccctgagaggtgcgggtgggatggaggtgaggggagaagtgacaaggaaggcaaggccctggcgttgggcctgggagtcagccctgggcgccaggacttccagctggccgctgcactcagcctcacgtccttgctggtcacatggccatcctgaggtctgctggatcaggtggctgcagacattaataaggtaatggataccaagcccccagctctgtgcctggcctagagcagagtccctgtgagtgaaggtgattcctggtggccatgggaaacgtcggtgctccggttcctcctagccagagctctgagcccctgacttcatccccagacaaattctctgctctcagataaagcccctttcctgggccccggatgaggcagaggcgcccagggagccgcgggggctgtgcgccggggccatggctgcaggcgtttcttggcatctctgatcatcttcagcaaaggagagtctgcagagccatccgctccttgggcttcctctgctggcaggggacagtcgcctgttcctgtggctccggcgcgccctcgctctggaaggcgtctgacacaccatgccatgtgctgacccggcgctctcagcagcagctgccaaggccagagctagttcttgggcccagtgccaagagagcttgatcgtcacagctaccccgaagccaaggagcgacgctgccctggaagcaaagctgtgggcagaatgaagccctgggaagagatcccagcggtcgtgttgaggatggagcaaggatggggcaggggcggtggcaggggcaggttgggctttgtcccagggctgggcaggagctctggctctgcagcatcagggaagatgctcagggctgcccctaagctgcctgttggtttccttccaccacctctgtctgggaccacagattgtccttgaaggcacattgatgatgctgaagaacgcatactgactgtttactgctcccccgccttggggtaatgcttagctcctttcttcctcatgaccaccccagttaaggactagccacctgtgtgctataactgttgaagctgcaaggtgtggcagggtgaatgcaggcaccttcccaagggccagcctttcagagatggagccagggttggtctttgtccttagatcgggcctcagatgtgaagcattggccagagagctgatgggcaggtggacaggaatggagctgcagccacaagtcagcctggctgccccattcttgctcagcctgcgctgacttgggctgttcctgaactggggcttgggctgtccccatgaacctcatgggggtggaggtaattagggctggggcaggtggcagccagaaagccgggaggaagcggcctgtccactcatggtttgtctgtgtgctgtcctgaggagccctggggtggaggtccctgcggctttggggagaggggacagagggacagctctggctgattgcacagtgtggggcggggctgccgcctggcctccggctcttcgacagctctcggggaagcggaggctgtggtccccctcctcctccggggattgatgtcgtcctgtgccactgggatgaatggggacatggggtctggagaggagagttgggcctccccttccttctggccttcctggctggccctgggctctgcatgtttggggtgatggctttgctgggcgccctctccccagccatccctggatgcttgtgtggcttccatgcttttcctgccacctgcacagatgagccaagagtagcaggaagggaggtgcctacctgccccaggggaggggcacagactttgccagggcgtcatgatggtgtggcttcttggaaaggttctctaaaacaggtttgaggagcaaatatttttttgaatgttcaaagacagtgataacatgatgtcaaatacaaaaactgcctgatttcccaaaataaagcaagaacttcaaagatgtttcaagcctgcagcagactctgaacagcaggaggtgactcctcagacctgctctgctgcccaggggctggccctcccgccctgttggtgccccgggcgggcagggggagtcagtgctgccgcagtagcctctcctgctggcctgttgtggctcgggggcatctgccgaggctgagtgagagcccaggctccagggccaccctcaccttttccgggtcagtgtcctgacgtgggcaggtgggtcccggcaagggggtgactcctgtcggggttgacatgctgccgcacactctggccctgcaggtattatcgggggacccacggggtcattgtggtttacgacgtcaccagtgccgagtcctttgtcaacgtcaagcggtggcttcacgaaatcaaccagaactgtgatgatgtgtgccgaatattaggtgaggctgcactcagggccgggtcggggttgggtgggagagaggcagccggctgcgcccctcagggctgcgctgactctgccttcgtttgaagtgggtaataagaatgacgaccctgagcggaaggtggtggagacggaagatgcctacaaattcgccgggcagatgggcatccagttgttcgagaccagcgccaaggagaatgtcaacgtggaagaggtgaggccctgggccactgtggctctgccacacacccgtggccgccttctccatgctgctggcctgcttgaggcatctaaatgaccaacagaaaatgtcatagtaactgccatttattgagtgcctactatgtgccaggccctttaacgatcttagttcatagttcaacagtcctctgaggtaggtacaattatacccacatttcaaatagggaaactgaggctccaagtgttgaagtaactcaaggaccaccacctggctagtaagagactgagtaaacctctgtcccacaccaaagccaagcacagtttccactccagtcctctgcctcattggccgccttgtgctgtgtggagcccagaggcctgtggaagtcgaggatcccactgcttcagggcacaggggccacacagcagcgggcacaggctcctttgtaagtcaggctggtgtcctgatgctggcccatccacctgggcctgtgggcaaggctggtatgaccttgggcggtgacttcacctctctgggccccacatgccatgaagtggcgtggagcaggcagaccccgggtcacctatgtccgtgaacagcaggggcactttcatctgtcatgtcataagattccagctgggccgggcgcgccggctcacgcctgtaatctcagtgctttgggaggccgaggcgggcggatcacgaggtcaggagatcgagaccatcctggctaacatggtggaaccctgtctctactaaaaatacaaaaaaattagccgggcgtggtggtgggcgcctgtagtcccagctactcgggaggctgaggcaggagaatggtgtgaaccagggaggcagagtttgcagtgagctgagatcacgccactgcactccagcctgggcgacagagcgagactccatctcacaaaaaaaaaaaaaaaaaaaagattccagctgaaggaaaggggttggtctctctaaaagaaggactggaaaacccctgtgagattgacttccccaagtccacacagctcatgggcctctgatggtgttccttttttcagacttatttatttgttgagtcagggtctaactctgtcatccaggctggagtgcagtggtgtgttcacagcccactgtagtctcgatctcctgggctcaagtaatcctcccaccttagcttctcaagtagctgggactacaggtgtgcaccaccactcccggctaatttttgtgttttttgtagaggtggggttttagcaatgttgttcctttttgacctttaaataaaataattcaccacctccttctagaataggctttgaagacatacataccaaaaatgcacaggtagaaagagctgggccccggaaggcggggaggcagccgtgcaggccagcaggggcctcctggccaggtctgaggcgggcccttcctctttcctctccacagatgttcaactgcatcacggagctggtcctccgagcaaagaaagacaacctggcaaaacagcagcagcaacaacagaacgatgtggtgaagctcacgaagaacagtaaacgaaagaaacgctgctgctaatggcacccagtccactgcagagactgcactgcggtccctcccccagcccgaggcccacggaggttcctcgggggacagtctcagtttcgtgccgttatttaaagaattctctccatgtttttgtatcgggaggtgccatcggcacttcctcccccgccctcctcgagtgccaagaaggtgttggaccagcccgcccttccctactggtgccccctcctccccggccaaggcgcctggacctggcgaggacgctgcccgccgagcggactgattcgcagagtctgtacatagtgtatattgctctacccggccgcacaccacgtcctgctctggcttttgccttcttgatgccagcctgctgcaacagaccctccccgcgcccctccccagcccatcttactgcaagcagcgtcctgaggagacagcggcacgttctagctgcgtctgcggccagcccgtgccagtggagtgggctccgcgttgctcattctctccgacaggttgtcagcctctgtccccgctgcacagggtcttgccccttctccggggcctgtgccagctcccttccctccccgttgtcctgtccccacagccattctgggagctggggaacctggtctcaaggcaggccctgcagttccacagaggtggcaggtcttgccctttggccaacagatttcttgtcctgccttctagatgcctctgagctccaaacccagggcagccatggcttctcatttacaccaacaggtttcagttccaacagaaaggtcggggtaggttcgtgcagagatggggctggcaggggggctatgggaggattattttaacagatcaagaaaatgaagccaaatcaagtgaattaaattcctcacaattattttctttccctgaggtttgattggcacagcagcaaaagttgaggccaccccacttgtgtccactgtttttagaaaaaaatgaatggcttcctgccattgtggggctggactcttgggctttcttggtgggagcggagaaggggcctcccacccttgtccgagttgcctcccactggaggtcaggagtctacactgcagcctcgggcactgtggggagtgcatgcctggggcctctgggtggggaccatggacaggccctggtcactgtcctaacctttgtcaggacaaaggtagcaagaggatttcctggcgggtgggaaggaatggctggggcggccagttttgacacgccccagtgccctggagaacaaccagggtcatctgcacttgatgactgctccccgacccccagcccggacacctcattcccctcccactacagggatcaagtgacctgggaagaaccgagtttaacaccaggatgtgtttccttagatttcctttcctaggcgatttccagggagagccctgattggacaatcacatcacagatcacactgcagtttccatgttagcactgtggatgggtttttaatcaataaaaactgggggtttcttctcaccgactctccacttgcccaaactgccaaaagctggtgattctgggacaggccttcactttggagccacgggatggggtgggggagccccatgggcctgggaaggagggtgctgtggagggggctgcagggctgaccagcaggcagcctcatctggtcgggggcgggggcggcaggagcagaagcggggtctccgtccttgggactgtcctggttggccacgggccctgaggatgcacggtgcctggggctcctgtgccggtgggcggggggcatgctggcctctgagcgatcaggcgaggccagcgagggtgtgcttgcaaattcaagcaataagaggggggttcctgggggcttccagcccaggctagaagcccccatggcttctggcagctggacatcagccccaggtattggggtgattttggtcatgacagtgtgcctgtcccactgttacacgcatgaatgggggttatggggtgggggtggggactcagggctggaccgacgtcctagtggacctgatgtgaaattcctgtcaaacaaacaccacttttcaatggtttgctaggagtatttctgtattgaaagtttctaattatgctttttaaaaaaatactaaaaataaaggttcaagctgccaaattttcttccagggtctgtttgctctccctccagagatgtgctgagtggccgtggcttcttcccacccaccgtgtcctgctcttccctgttctt

SEQ ID NO: 8772 - DNA, 3516 bp, Homo sapiens
ctctgtagaaattcattttattcttattcagactattttcaaaagaagcagtggtgtgctgtttttctaaaaatatgcctttatagatttttatatatgtatattataaaatccatacatgtatttacatgattgctacatacaaaattacagcactgtggtatgtacacatctacaggtacattcttgccgcgcatccctgctgtgctttccccacgtgagggagggagggagactgaatcggttgtgagcagctgagggctggccgggccgcggagcctctgagttggggcctgggtggaggaggaggggcggctgcagaggcaggagcagcagccactgcaggcttctgcaggcaggcaggcagcatctggaggcttccggcagcctccccctcccctccaccccgtggtgcctgtgctgccctcaaggtggggtggctgaccacagacccctctggtgccattcagtggcctggacttgtttggctaggccaagaaattatgtatgtatgtgaggggtggaggagggagctgtgggaggaggagaccccgtccaaccccagccctgagcaggggaaagggctggatggctaaagcctgcagatgactggtgataacactctgcctggccaggccctgctaaggggcagagactgaaggctgggagggagagcagtggcgacagggggacagggccttcttcctccctggggctcgggtggcctcagctgagcttgggtaagccccggctcttagaccctgcggccagaggcttggcctcctgccagctgaggtgcatgcatgcgggggaggggctgccatctctcctttgaccctgggccaggggctggggaaggaatggaggctcaggcctggcccgctgcccccacaggtctaggcccctggggctcaggcctcctgaggcatgcagagaagggcctccattccttctgttccccatttgctaaaatcaaggaggcagcagtgcctgggggtgggctgcgatctgttgggtgtgagctgcaaagcccaacaccaaggggcccctctgggaggtggcctaaccctgctcaagcacgtggtcctggagaagcccaggcgtgggcttggccaggcggtgggccaagggaagccttcagtggccaaggcaggcccccacctctaggtctccatccccaccgacgaaagggagcaggccctcccggacccatggggccctagcatgaggggcagggcagctgctgaggtgcaagctgcaggggaggccttgcctgcaccgcctttccagctgcctccagtccacccatctttggtggcctgactcctcccaacttaaattttcctgaagaatgagaagagtcgtttgccttcagcgatgctgggctcatccccccgcccagcgctgtggcccctgcagagggcagcagccggctggctccgttctttcaggtgcgtgtccatcagctgccggtcaatgaccctgtgcatgtcatcctgcagaggggaggggacagtggccaggactgagtagctgctctcacctaaccctggggctggacagggaggtgggaacatcagacagatgagagatgagaatgtgatgagtgagaggctgcagccgggactgccctgaccaagaaagcggtgagcgtgggcaagacaccaggcgcacgcaggagccgtatggcacctccagcctcctcaggcttgggctgggttctcctcaacagtgttactcctgctgggccgccacagtcctcagctgatggctcgggtggtctctccctgcagtctccacactagcactccacctgctctgaccaggcctcacggctctgcctcctgtgtcctgtgggcctggctggtgcctccggtttggcttgccacccccagccccggcaggccctagggccacctcagcttaacagctccccagcccaatggcctggcctcaggggctcctcctgccttttcctttccaattattccagcctgagctactgatgcccaggcaccaacggcagcctcacgtggcaaggatgccctgggtgctgccctagaccctgctgctgaggctcccatctgcggcagaggccaggggcctcacggtcttcaggggctgtcctgcaccaaatcaggcccatttctttcagcttcctcactggggtaggaccgtcccccaactcgaattcgttcatgtggtccagaaaatgccttcctccccacagcccgccccaccatgttttacagaacagcagcctttcccatagagaagcctgtggacagggcagctccactcccttcccattttggtggctagattctgactctgggtaagactccatttgacaaaagttctgccactaacaaagtttgaaaactcctgctttagaaatatgagcagcctgtgtaattagcatcatcagtaaatgtaacatgtgtctgctcgattccttcatgacttgaacctggcaggctctgcggcatcctggtaagaccccaagcttttctggctaaacccctgagtgagtcagcctgtggtgtccgagcacaggacaggtgaggcctgtgttcagggcaggctccctgtggccagggcagatgacctctttggttccgagcagccactgacgagatgagggcatgaagttgggctggctgggcccctccatctgagcagcttgtccactcctcctccctcccacccatgggtgtcattctaatatctctgcaggtttcagcatgaaacaaaggggccttcctgagtcatcgtggggtagcagtgagtgtggacccctcacgcgctctggctcagggcctgctctccagcctccctattctctcaaccctgtctttcagactcagctcattcctggtcttctccttgcccttgtcttcttcccttctcttccatccccttttccacttgcccctcagagctggcactgtgccaggtatttgccaacacacggtccctccttataagggtctagtatatgatccttggcacagtgccctgcacttacgacgtgctcagtaaaatctacgctaaatccaatgtaggaatgctaaagggtctttcaaaaaccaacctttcaaagctgccaatgttttgtttggcacactgaaaacttcatttttttaactttaagcaatcaggtctgtccaggtcgccctttagagtttcccagacacacgctgctcatcattccaggcctgctggtccctcagtggatggaacagccatctatgagaagacggcaccagccgttagcactgggccacacactgctgaagagctcactggacgcgactgtgatggaggagggagctgggacttgagggcatgtcacactgcacagagatgacgccaggctccagcacacagaacacagtgggccatgaggggaggcggcggggcagcacagcaatggcagggcgagacggtggatgggatgtagggctcaggctcacctcaaaggcaggaggggtgtacaactaaagctgttgatac

SEQ ID NO: 8773 - DNA, 84 bp, Homo sapiens
taatcccagcactttgggaggctgaggcaggcggatcacttgaggtcaggagtttgagaccagcctgggcaacatggtgaaacc

SEQ ID NO: 8774 - DNA, 5780 bp, Homo sapiens
gccgcggtcgaggatcctggaggtttgtccccgccgccccgacgcttccgcccggtccgtcggcacgtcggccctgcctcccggaccaccctgcggggcgcaccagcgatctggggtgcggggctcggcctccctgcgctcctggctgacggtgtgaccttgggcaagtctggcctgctgggccttagtttccctctctgcagcagggacttgggggtggtgaacttaatgagccgtatactcccacccagcgctcacttcctgaggctttgtgactttctgggagggatggggacgtggaaggggccttaaagcagtcccccctcgtcactgccccccacaggtcttaaccatgaacttctctggaggagggaggcaggaagcagcagggtccaggggtagaagggctcccagaccccgagaacaggtgcgcgcctcctccccaccccctcccaccagtccaggctccctgggagttgctggggggcggagctgaagggtcctactattcctggagaccactggcactcctttctctctgggctctctctgcagtgggtcattgagggttcaggatgggcagtagggcagggtcaccatggagactaggggccaccgctgggttctttcaggaccgagacgtgcagctgtccaaggctctgtcctatgccctgcgccatggggccttgaagctggggcttcccatgggagctggtaagtaggggccttggaggctggggcttgagcccagagagaaacgtgagcctgtctgcgactcctccctgatggctgcctccaccgctccctgaggaaggcacagagtgcacttcctccccatgcacagaggagagcaaggcctagagcccctgtcatgtccacagcagactgaggagagttcttgtctgggccaggcctggtgaccgccccctccagccaagcagccagatcagcacttaccccgagggcgagccctggagggtacggtgcagctggtggtgtgagtgtgcactccgggccagcgctatgctgggcactcacctccctgcccctccgtgaggcagatcctctttttatgtaagttgaaaaaactgcggcccagaaaggggagactttctaaaggtcccacagaggatgcccaagcgatctccaagcccagactttgtttcggttgcctgtggctccctgttaaccctggcccagtccagagcaaggttagctcctgagcaccctgcctgcccacagatggcttcgtgcccctgggcaccctcctgcagttgccccagttccgcggcttctctgctgaagatgtgcagcgcgtggtggacaccaataggaagcagcggttcgccctgcagctgggggatcccagcactggccttctcatccgggccaaccagggccattccctgcaggtcggggtgaggggacaagtgcgagacgagatgggagggacccctgcctgcgaagggggtctcactgctacccgttcaaccaggtacctaagttggagctgatgcccctggagacaccgcaggccctgcccccgatgctagtccatggtacattctggaagcactggccatccatcctactcaaaggcctgtcctgccagggaaggacgcacattcacctggccccaggactgcctggagaccccggtatcatcagtggtcagtgccctcccctccacctagctactcccacccactctgtcctcccaggtccccttcaaaggttacaacacttgtctggggccaccccatgtccggcatggagcagcacccctgcatcccccagcccaggaccccagtctgcctaggttgctgactgcactccaggtgcccaggcctcagctccagctgtctctgcaggcatgcggtcccattgtgaaatagctgtgttcatcgatggacccctggctctggcaggtgagtctggacaaagcaggagctgcccttgccttcggggagggcatgagtcacatctctggctctgtcagcagatggaatacccttcttccgctctgccaatggggtgattctgactccagggaatactgatggcttcctccttcccaagtacttcaaggaggccctgcagctacgccctacccgtgagaaccaccaccccagcccctattccttgttcctgaaagctgtgcccttctgccctcacctctctcctagcttccaaccctagactgacttaggtgtccctttctctaaccaactcttgtctttatcaggaaagcccctttccttggctggtgatgaagagacagagtgtcagagtagccccaagcacagctccagagaaaggaggaggatccaacaataaaatattaatttataaaaaagaaattttaaaaagtaacaagaaagaactcgtttgaaaccatgtttcatcatcctgtagctacatctggtcttccttgtgtgctgggggactgcagataggtcaggggtatcagcctcagccactcagacaaggaaagggggcaccacatgagctcagggacccccacccccatccctggcctgggtgatggtacagcgtctggccctgccaggtccttggcctgcacaaagtcagtgacagcaggtgaaatgcccagctgggtgcctgcctggagcgggtgtggggcagtgagcccctgtgggtgtgggcttgggagtggctgtgacagggtggtgagcagggcaggggcaatcagacagccctcagaaggcctcatggcccccggtgagctgcaggaagaggtcttcatccagctcctccccacgggcccgctcccgcgtcgacaggaaaatgtagcccccgatatactcgtgtacaattcggcagctggcagacacgcagctgaaggccacattgatgtgttcatcaaactcgatggccacctgaagggcagacagaggggcaaatggtgggtgggataagggagcagcccctgccccaccctggctggatccagctccggcctgcacctgtcccccatccatataccctgggtctgggcccacctgccggatgtcccagttgacattccactggcgcatgttgctgaaacgccaggtcttgaccacgtcgcccacgggccaagtcgatgcggatcagtcggttgttgggcgatgcccaggatctcgtctttcctgctgcccttgaaccctggcccccagggagagagagtgagccagggctccaccctgcatggccagagcccgcccagacaatgtggcgccgtgctggagagccagcccttcccgactgcagctcaccagctgtgtaaccctgagcaagccatttgggttccctgggcctcaagttcctcatctggtaaatgggggttaattgataaaatccccacaacagcatttagcagcatcgggcaaacaggccaagcctttaaatggtaactttttttggtttttgttaccatcctcatcaactgctgtctccctcccttctttgcagtcttgggaaacaactaatcaaaggggcccactccccataacagcatccaccgctagccctgtcttgcggaccggcgaacccaggcccagacagtgaactgtccacagcagagctggagcaagaactggttcttctgctctcctgacctgaaatctcttttttttttttttttttttttgagacggagtgtcgctttgttgccaggctggagtacagtggctcgatctcggctcactgcaacctccgcctcccgggttcaagtgattctcctgtctcagcctcccgagtacatgggattacaggtacgtgccaccacttgtggctgatttttgtgtttttagtagagacggggtttcaccatgttggtcaggctggtctcgaactcctgacctcatgatctgcctgccttggcctcccaaagtgctgggattacaggcatgagccatcgcgcaggctcttttatttatttatttatttatttatttatttatttatttatttgagactgagtctcactcgttcgcacccaggctggagtgcagtggcacaatctcggctcactgcaacctccacctcccgagttcaagacattctcctgcctcagcctcccgagtagctgggattataggcgcctgccaccacactcggctaatttttgtatttttagtagatacagggtttcaccatgttggtcaggctggtctcacactcctgacctcaaataatctgcccgcctcggtctcccaaagtgcaaggattacagacgtgaaccaccgtgccccgcctatttgttttttgttttgttttgttttttggaggcagagtttcgctctgtcacccagcgtggagtgcagtggcatggtctcagttcactgcaacctctgcctcctgggttcaagggattctcctgcctcagtctcctgagtagctgggactacaggtgcgtgccaccacacctggctaatttttgtatttttagtagagacagggtttcactatgttggccaggctgctcttgaactcctgacctcgtgatctgcccgcctcggcctcccaaagtgctgagattacaggtgtgagccaccatgcttggcccagcctatttatttttgagacagagtctcgctttgtcacccaggctggagtgcagtagtgtgatcacggctcactgcagtcttgacctcccaggctcaagagatcctcccacctcagcctcctgagtagctggactacaggtgaccaccaccatgcccaggtaattttttacaattttttgtagagacgagggactttctgtgttgcccaggctggtctcaaactcctgggttcaagtgatcctcctatctctgcctcccaaagtgctgagattacaggcatgagccccagtacctggcgtgagctttgtctcttatgtttgttgtggagggacagcatgaggggcacacatggggccctcagtaaggcctgcttacaaagaacaagggaagggagtctttggggtgcctgtccagaacctactcttgggatgtgggcacacagcagccgggtggcaggtgagggcagagacggtgctgggcagggggctgggccaggggccatacctgaccatgacataggagatgccgaagtcgggcagggactgccaggcctggatgaagcgcagctgggcctctgccagcgacaactgggccacattctggtgggcttccaggatccgtggggtgagctgcgggaccatactggtgacgggctgccaggcactattcccctcctccagagtcaccgagcccccacctccccatcagggtgacagcatgtgagcctgggaaggggcagtgcccacgtggggccgccaaggtgcagatctgcactgcgccaggctgcaaggtggacatgggcacctggaccgtgactcctcccaaagggtgggtaccagccgcacaatctcagggacacagtgggagaagcccagtgagtacgtagctttcctgaggaaggctctgtggagacccaggggtcagaggtctctgggtaaacactatgctcattcccaccctgacgccttctggtacctgcttggccttgaactttcgctggaaacggggggcaacgaggccgtaggggttgaggccctcggcagaggcatcagggccgtgggggtggttgcccgggcccccactgcccgtgcgctgcaggctgaggaaggccaggatggcctgcacctcgctggtgtagctgctgtcggccatggtgcggcctttggaggccaggcggcagccagccatccagcgggcatactgctgctc

SEQ ID NO: 8775 - DNA, 8018 bp, Homo sapiens
cgagctctgcgaatcactttattgcgcgcgtttcggggagcgggccgtccagggaaggaagcaaagcgggaacgcactgcaggccccatccaggtgagcccctcaggggccggcgccccggggcacgatctcggggccttgggttggctcggatggtggcggctgccgctgccctagccgttgtcgctcctgctgaaggatgcctctgttggccctggaggagagggcacctgggtggttgggatagggatcccgaagtgtggttcctggacagggagcagggagcagaatagagcagggacagacctggcccgtgcccgggcttcgttgtagaaggctgtgatgatccgatccttttcatccatgaagttaaggtgcatctgcttcaccttcctgcaatgggtcacaattaaccctgggaatccaattcctgctgtccctgaagtcctgcccccttccaccccactctaggggcctcacagctttttacccttacacagggttaggaacctcagtctaacccttcctgtgatagatagggagggctcagagtggccctggcttgtctagggtccaatggcatccgaagtccctggtcactttgaggtgtgacagcagctgtggacatgggggtgctcctcccagaagactagaaagggtatgcgtctaactccatcactgaactaggcaggctgctagcagtgggcactggcctttaggtatctgctatagaaaatcggctttgtggccaggcgcggtagctctcacctgtaatcccagtactttgggaggctgaggcgggtggatcacctgaggtcaggagtttgagaccagcctggccaatatggtgaaaccccatctctactaaaaatacaaaacaactagccgggtgtggtggtggacgcctgtagtcccagctactcgggaggctgagacagaagaattgcttgaacctgggaggcacaagtggggttgcagtgagccgagattgcgccactgcactgcagcctgggcgacagagtgagactccatctcgcagaaaaaaaaaagaaaataagagaatagagagaatcagctccgtggcacgcgtgagagtggcagggagatgcctactgccaaatgaatgagctgtgctgcatttgctgcttgtgcttgattttgtttggctcaatcccttcctggcagccagcatgaaagatttacattcgaaatatgaaaaactgtaaatgacaacgttagctcttggtgcagcgctgcctttaataagtaaggagaggctccagagaccaacttcaagcagctcttagcttgagagacacaagagtacgggccacgaggtgctgtggaggactggctgaccacactggaattcacccaccctcctgccctctgcccatcaccccgggggagaacaggcatcacctgaaggcaatgtagtgcaggcccatgcccgccagcatgaggaggaggcagtaccccagcacttgtttgttttgtttgtgttgctgctgcctcaactggggcccctgtggcctcacgctgtgaaactgggaccagtactgtgcgttggggggtgtccaggagctgctgggaggcagaggaagggacattgtggaaatgagactacccaagagacctgggggtggggcaagctgagggcaggattactgtacctgtgtgtttggtgggcagacttgtcatggactgtggttcgtggagactttgggggactacctgagcggagctggtcatcatagctgcggcggctctgctcacggctgagcacacggtatgcctcgctcagctccacaaagcggctgtgcaggcttgggttcccagggtcccggtctgggtgcagctggggtggggcaggactccccttatctccctttgcctgtccctccccaggacccatgctgatgacatccacccaccagggctccagtcatacccagaggccctgcctggtcagtgaccctcactcaggcctgcccactcctcagaaggccagagagcatggactcctgcttcctcctgtgttcaagccctccccacctgccagccccctgcattcaccatatgccctggtccaggtttctcaagagcaggcaggcaggtcaagaaaaccaagccccagcccatcagacaggacccctggcctcctgcccacagcctttcccttaccattgagcacctgccactcccctatgagggctgaaaaaatgtggcacccgccagagatgctggtctactcctgggaatttgaagcacacccccactggctcaaagttccctgctccccttccccacttcaggggtacgggtacctctttggacttggagaagaaagctcgtttaacttcctcagtgctggcaccaggatgcacccccaacagttcataataagtactgggtctggacctgtggacagagtcccaaaccttgcaggggctgaaggaacccagaagctagctctgccctgccttctgggccacacccttcaactcagccaccaggagctgacagggctgaaacaggtcccaggacagatctgtctccagatcagcaccccctttggagtgtttcaggcatagtgcaggtcaggatttctcaaagtggagtccaaaaacttgttggaaaaaactgattcctggacaggcgcggtggctcacgcctgtaatccagcattttgggaggccgaggagggcggatcacctgaggtcgggagttcaagaccagcctgactaacatggagaaaccctgtctctcctaaaaatacaaaattagccgggcgtggtggtgcatgcccgtaatcccagctactcgggaggctgaggcaggagaatcgcttgaacccgggaggcggaggttgtggtgagccgagattgctccattgcactccagcctgggcaacgagcgaaactccatctcaaaaaaaaaaaaaaaaaaaggaaaaagagaaagaaactgattcctgacccccacccaattgattcctccagttcagaatctccagagcagagcccaggaatctggattttgtacccgacacctccccatctcccaccccccacagagggttatgcacagtgatacagcgatgcttggaaaccactagagctgtggtaagagcgttgggtttgacctggactcaaacttcctcctctgccgcttaaatcggtgtatgaccttgggggtcttctctatctctgatcctcagcagggaaggcgagggttacctgagacaaacctgggagcctcctgacacggagtagagaccacaactaactcagcacgtagggcaaacagaaacccattgaacaaccgggccggccccccgcgcccaactcaccgctgcccggcggccgctccgaggagccgggagggagggttgcggggccacagccggcacaggcgcaggggcagtaagggcggcatggcggcgggcgggcagctgggaaaggaggctaccaagagcgcattggaccaggatggggctagacttcaagcacccgggggcagagggaaggggcctggcccgttgttctgcaaaggaagactgaagcaggcccggagagggggcggttcttgcccaggaccagacccgcgtgtccttggacctgccccttcctctgacccgggcatccgcagcccttcccagcgctggcttcggggtctggccacccagccagggaccccaagaccccgttcccacccagggaacttggggacgggagaaggaggggccacaaccaggccccgcccccgctgctcacagacccgcggccgtcgccatttcctgcgtctattcaggccccgccctcacattctcattggcgtggatgccaagaccacgtccacctgtcaggaaaaaaaaaaaatcggtggagaccccgcccctacatgtctattggcctttggtgcctccggtcccccagcctgcggactcgctggacaggcgcgggcgcccacctggggagcgggcgggacagagcccgctctctgcggctttgtgacgttttcggcccggccaccgtgtctccgttccgctgttgctcccctctgcagcgaggtatatcttacggagctgcttccgccccggagcctctctggagccagcaaagaaagggaggcacagttcttatcccctgcttgcagagggggacacaggctgggcgggtttttttttttttttttcccaagtcacttgtcctgccttacacactcagggcccattgctcctctctgttacagaaatagcagatgccaacggaatccaagaataaagtcgtttattattttcagagcggcgggagtagggctggggaccctagggccgctccagtgggacttccctgaacccggttgtagaggatgatggcgcctttggccgaggggcagagttcagcccacatctccgtctcgggcaatctccgcacgttctgtggggagacaacgagacccaggcattcaagcttgccacttctcctgccagggctgtgcccagaattcctgagcctcagagacctctgcactgtccttagggaggcatgttaaggggctgaacatgtccctggacctttcccttgcactgagggcaaatcttgtgactctggagggaattgtgacccagccaacacctcccctacaagatatgcattgccaggcctctgcaggccccagccctggcctccaagcaagatggtttgtcactctgcacctgtgtctccacaaagaagattcctgtagactcgtgggcctcgggtcccccactcaggtagtgcttcctcacctgctcagaagtcaggctgcacctggacaagaacacaagggtggcttagtgggtgaccagcccctgcggggtacctgtggagccacagctgcctcagcccactcctcaccacccaccttcccaagacccaggatcatgtacccgagcctactcactggacatagaactcggcactggctcggccagcactggtctcatttcgggcgatgcccaacagcaggggctggctcagggtgagcagcggcaggttcacctgcggtggagggtggggtggggggaggtcccacctatcaatgccactgcccacatccctgcccgtctcaatgaaaaaccgcctgttacctgtgtacagcattttatagcttgtagatcaaggacccagcattacagaatgtcagatgatgggcatgtttgttttacaggtacaccaaaaccagagagattgaacacgttgcccaaggtcacccaagagaagtcaatttagtgactgggactcccacttactcctttttctttttttctttttttgagatggagtctcgctctgtcgcccaggctggagtacagtggcacgatctcagctcactgcaacctctgcctcccaggttaaagtgattctcctgcctcagcctcctgagtagctgggattacaggtgcacgccacaacgcctggctaattttttgtatttttagtagagatggggtttctccatgttggccaggctggtctcgaactcctgacctcaggtgatccgctggccttggcctcccaaagtgctgggattacaggtgtgagccaccacaccctgccacacttactcctttttcttttttttgagacggagtctcgctttgtcgcccaggctgaagtgcagtggcgcgatttcggctcactgcaacctccgcctcccgggttcacgccattctcctgcctcagcctcctgagtagctgggactacaggtgcccgccaccacgcccggctaacttttggtatttttagtaaagtcagggtttcaccgtgttagccaggatggtcttgatctcctgaccttgtgatctgcccacctcagcctcccaaagtgctgggattacaggcatgagccacggcgcccggccacttactcctttttcaacagacttggggagtaggcaagatatttatcattgtttccattgaaaagaagaatccttggcggggcaaggcatgagaatcacttgaacccaggaggcggagaatgcagtgagccgatatgccaccactgcaatagcctgggcaacagagcaagactctgtgtcaaaaagagaaaaggagaacagaagaagaatccggcctggtgcagtggctcacacctgtaatcccagcacttttggaggctgaggcaggcagatcacgaggtcaggagatcaagaccatcctggctaacaaggtgaaaccccatctctactaaaaatacaaaaaaaattagccaggcatggtggcggatgcctgtagtcccagctactcaggaggctgaggtaggagaatggcgtgaacccgggaggtggagcttgcagtgagcagagatcgtgccactgcattccagcctgggcaacagagcgagactctgtctaaaaaaaaaaaaagaaagaaaaaagaaaagaagaagaatccaaggcagagggtactgacggctagaattccactccaagtatgtatagctgcaaagccaacttcttccctcattgctggccagatgcctgcaggcctcctgccagcccagacctgtagaattctggcaagtcctaccccctcccttcatgtctaccaccctgtccaggtcaacctcactcacctcatcacagatctcctgaaggacactggaaaagagttcatgtaccaccagctgcccagcgaggtcctggtgctgggggctgccaccagggcacagggcctgtgagaggtcaggctcagcccctgctccccacctcttccccctgccccatctcaggaccagcaagcctatacctgctggccttgagggtctgatgtggcacagtgtaagagagttagtgatcctgagtctggtgtcctttccctgacagacaaccagaggtccagcttcaaaggagatacacagggggcaggggtggagtagggcatcttcttcctgtgcccaatctttcctcccgtgttttctagtttctcacaggactggggcaggggtcagtggggaggcaggtggactgccctgagcaaacttccagagaaataccaggccaattttccctttaagggatggggaaaccaaagctgggaggattgggagggtggagagctgcagctcccttgagctgtctgggtctttgtgcccagcctggaatctcacctgaggctcagggtgcccaccaggtacgtccaccagcccaggggcctcagccacctgccgggagcggcgcaggaagacaaggaagtcatcggctgtggctagtgcagcgcccacccccagtgggtccgccagataggcctgcgtgtcaccccagtcggtggcaccctgctgtcgcagccaggcagctgagctggaccagttggtgcccaggaagtctcggtaggaagtaaggcccaggcgcaggagcagctgtggcccccgagagccaataggcgccagggtggctgagtgcaggcggaacttgggggcgtcgaagagccagggttgggcctttagccgggtctcccagatggcagtgatggcctcgtccccacctggcagtgggcgacggtcatgggcggggctcagctcggcctgtatctgctcctggggcaggcccccgccagggcactgcagcagcaaggtcacctcaggatccatggtctgaacggggcagctctgggggaggatacggccaggcctgtcatccaggggggccactaccactcctgggctgcgcagctagccccctctgtcgcagacctcctgagggtatccgcagcgcttctccacccccctgaccactccttgggcagtaaaacgtgccatcttccccgcaggagccccgagtcccgcagggtatccaggacgcccgggcatccctaccatccagaggtcttgggttcaggcgccccaaatgcccatgtcccccaaacccaggggtctgcctccgacccggggcgcgcggggacccctttccagggcccggaagctccagcctccagcgggcgctcaccagccgccgggtccctcaggctcc

SEQ ID NO: 8776 - DNA, 1308 bp, Homo sapiens
gctcccacttataagggagaacatatgatatttggttgtccattactgagttacttcacttagaataatggtctccagctccatccaggttgctgcaaatgccattatttcattccttttatggctgagtaatattccatggtagaatgttacttttgtttatctacttgttggttgatgggcatttaggttggttccatattttcgcaattgcaaattgtgctgctataaacatgcatgtgcaagtgtccttttcaaataatgacttctttttattaacaccctgtagttaataacctgaattctttatagcttgcattctgaaacatttttctcgaactatccgccttctggcctgttccagtcattctggctttcatcttgatttgtttttcttaaaactttctccagcttccctctgcatctgtgattcgtgctctgcttcttgtttgtggctttggatcaataatgctacagatccagtctaattaatcatggatcaaaagctaaagcatccttcccccagatggtttattattaataccacccagaaaaataatttataatttaattctctacctcatagagtttgggatccttggtagaatgtgttcccttccccttttcttcttcgctatttcctcctcttcctctccatcaaaagtggctttatctccacctttgcagctgacagcaaccctcccatgctccgttgatgaagccctcctttcttaacccctcgtccatatggctctccctccaccctgctccatctcctgtgatctcaaggcctcggagaaatgatctcaaggcctcggagaaatgaaaagtgacctttggtatttgagacaaccaatagcaaaatatagctcccacttccaacagcccatattggtgggggagggatttgcttcatacgtggtctgtgttgggccattctccttctccatgttttctctgttcttacagcaccatctttttgcctcatttctttgctctactctattcctcccccatcatcgtctggtgactcacactgtaatcctagcactttcggaggatcacctaaagtcaggagtttgaggccagcctggccaacatggcaaaaccccgtctctactaaaaatacaaaaattagctgggcgtggtaatgggcgcctgtaatcccagctactcaggaggttggggtgggagaatcacgtgaacctgggaccgggaggctgcagtgagccaagatggtgccactgcactccagcctgggcaacagagcgagactccgtctcaaaaaacaaaacaaaaccaaaaaaa

SEQ ID NO: 8777 - DNA, 1308 bp, Homo sapiens; identical to SEQ ID NO: 8776

SEQ ID NO: 8778 - DNA, 39062 bp, Homo sapiens
ccaagatatagtattagatctggtcacatattcagagctctggctttagccttctttgggccatctcattggctgacccactgagctgcagggaagacccagcaggcactgggaggggctgtgggcacagcagcacgactcccacacaccaggggtggtgggccacagcctgtgtccagactgactcacttacagtggcaaaactaaaacgtggtccttactagagagtagaaatcatgagtctgaagcagggactccagattgggaatataagttgtctgttttgctcttgtaaagacggatatatctgtgacatgctaaccccagagaccactgcctttgtgtccacctttgctctctaggtgatctttacggagccataggctctccagtgagactgactcgcaccgtagtggtagggaagcagaaggacttagtccagcgaatactttatgtcctgacctactttctccgttgctctgagctacaagagaaccagctgacctggagtggcaatcatggtgaaggtgaccaagttttaaatgggagcaagatcataacagccttggagaaaggagaggtggaggagtctgagtatgtggtcattacggtgaggaacgagcccgctcttgtaccccccatcctaccaccaacagcagcagaaagacacaacccctggccgacagggtttcctgagtgcccagagggcactgacagtagagacctgggtcttaaacctgacaaagaagctaacaggaggccagagcagggttctgaggcttgcagcgcagggtgcctggggccagcatcagacgcttcctggaaacctcagaatgcattttgtggggatgagaaaaataaagaggcaccgcaagatggctcttcaagacttcccagctgtgaagttttgggggcaggaatgaagatggaccagcaagctgtctgtgagctgttgaaagtggagatgcctacaagactgccagaccggtcagtggcctggccttgccctgacagacatctccgggagaaaccttccttagaaaaggtcactttccagattggaagctttgcatctccagagtctgactttgaaagccgcatgaaaaaaatggaggaacgggtgaaggcctgtggcccctccttggaggccagtgaggctgctgatgtggctcaggacccgcaggtttctaggagcccttttaaacctggctttcaggagaatgtttgctgtcctcagaatcggctttcagagggggatgaaggcgagtctgacaagggttttgcagaggacagaggcagcagaaacgacatggcagcagatattgctgggcagctcagccacgctgctgacttgggcacagcctcccacggtgcaggaggaacgggagggaggaggctggaggccactagaggtttgtatgtgaaggctgcggaaggacctgtgctggagcctgttgcccccaggtgtgtccagcggggccctggcctcgtggctggtgcgaatatcccctgtggggatgacaacaagaaggccaacttcaggactgaaggagacattccccgaaatgaaagctcagatagcgccctgggagacagtgacgacgaagcctgcgcttcagccatgctagatctgggtcacggtggtgacaggactggagggtccttggaagtggagctgcctctgccaaggtaactccagcaggctgggaagtagagggaactgggttcaaatcccactttcctggcctgacacctgtgatgttgttagccactactattgtctgctttacacacagtatctttttttccacaaagtactagaagtattattaattctatacaaacggtttcccacctgtccttcttccaaggatggtcactggcttagcaccactgagctcactgggacaggtggccagtggttgtctttgcagctatcgtgatcctttggggaagcctaagggatgtggtggagattggggagggaatagggagtttaattttctgtcaactgcagagaaggtccgtggctggcagcagatgccttgcttcagaggtggtggattacactcgccgtgtggcctctctcctgccgatcagagcagcgtgaggtggttgggaaacaacacctctttcttaacactccatcaggttgattatttggtctgtaatgactgaaagcagtaattagaaatttcttctgttcttccgcactgtcgtgggcaccactctgtgcagatatgtcagattcctaaagccaggcttttggcaagagcccttcctgaaacattttctttggtcagtattttgacacagactgcctggtggatgtccaatatgaggtacaaaaacaaactcataactagccatggatagtttttttttcttccagccttccactttaaaaaactcccttttctcccacctgtgatccacttacttgagggttggtgacatggaccaccctgaatctattttatttacctgtatcattggagtgcttgtaccaattataatgaaagaaaaaagtacatttttagctgtgcattttaatgggccacatgttgttttaggtctcagagcatcagcacccagaatgtaaggaactttggccgctcacttctggcgggctactgccccacatacatgcctgatcttgtgcttcatgggaccggcagtgatgagaagctgaagcagtgcctggtggccgaccttgtccacacagtccatgtaagtgatcccagtgtggagcctctggctgctgacagtgtgtcagtcaaggtcttggctgacaacaggtgtttagactgaagagagactagttaaggggttgtttatggagatgtgggcagggttatgggaaccagctagggctagtgaggcacctggggcctagcagcagctggaagctagaaagcacacctgggcctgacagagtaaggggagggtgcgtgacatcagagccctggagaacctaagccaggacgaggggcggcctggctgcaggagcagtgaggagggggtgacttcctgccatccctcctcccattctctggtctctttctggtgcctctcattggctgagcccggctgaaagccagagagcaggggcacagctgatgcagacacacagccttgtggtgcatagaggtcagcctcctggggcccagaacagaacacagaagggcaaggagctgctctgggggtggtgggttagcagataggctgggcaaatggaataaacagcacagatggtgacaattatatgccgtcacggtgaggaccgaagaggtgtcacatgtggtttgttttttatctgatgcttaaacaagttcctaaaagtaatttattttaactgatttgtcattaagttcactttgatggctgcatgaggatgactgtataaagattaataagtctcactgaaaaaattgcctcgtggctgctattaagtgcttttctgctatctgcagggcaacaggaactaagcagttaaggaaactgtcaatctgatgggcctgtttttaactgagctgttattgggcagatgtgcaaaaatagacattttgtattagaaacattttgtatcttgtgcaatagggaaagtcctcatcgcattaagaaaatcagaatttggcctgttacctacctccttggccaacaagtatttttttttttgaggtggaacaaaaggcattgcatgttatctttggccttgagcatctcctctgtgaagactaaacatcaggcacaggctaaacaggctaagtatatttatgtgaagtgggaaaaaaactcagtagtgaagcagatgtcaacataacctccctcaatggggagggctaagagatgaggatagggccatcagaagctggggaaagccagcccagtgtacacgtgtgtggccaaacgttcctaaccccacccctgctttgtggtcacatgccacccctcaccaggatactcctgggatgaaactatgaagttgcttttgtccctataatatcataattatttaatatcataatttctctttatagttatgaacaccatatagtcatttatcatttcatgagtccatgcatcaatgacccctgtaagaaaaatgccctcattgtataatgctaagttgtccaaaacgatgtctgatgctttggcaatttcacaggctgtatttatgtgtgtttagtaactgcctataacattaaggcaccttttctgtccgctcctattgtttatattcacacatgccaaactgtgagttgtttttttttttctgctctgctatcattttgatttctaacaatattggtgttggttattggaccttccttccatgaagcccagtgagctgcttctgacagaggtaccaagagactacaggggaactaatgggattgtcctcagtgacatcagttttaccagctggggactttgtttgaatgccctggatttactcactgaccactctggaaatgcaatctattgattgataaccctccttgaacttatctgtaaaaccattcatgaaatattttatgtttccataggctggcaagttctcatttttgtgtgttagattttcatggtgaccctctggctctataattcttttatttgaaaaaacacaaccatgtttactctgtcattactcttcaagctttttcgtatttcattttcccttccttttagaaggagtgttttcacactgtagcttttctcatttctttatgcaatcaccctgagagatcgaaagttattaagcataataacctatattgtgtcaaattgtgggtacatccaaagtgcagccatgcgtgggtgttaataggaaattccaaagggttcataaaaatatcttcagaagtttaatacattcagaatatatccaattagcattagtggatttctaatttcacttgacacattcatcataatgaattttgcttttgaagtagtgttctgtttaaactggcgctctggtctatggtagtgttttttttttttttttttaaaaacaggcttactttcaacatccatttacaaacatttgttgaaaaatattttaggagtatttgtttaaacattattccgaatttactgctccataaagcctagtgaatatttaaattcttgaatatgttgccagaaaaagaagcagagatccaaaaacaagtatatgaccagagttagagctgaaataatagcttgttgaagaagagaaaattgtaataaattgctttatcaaacttgctttcaaaacctgttttttaagttgggcacagtggctcacgcctgtaatcccagcactttgagaggccaaggtgggtagatcacgtgagctcaggagttcaagaccagcttgggcaacatagcaagacttcatctcaaaaataaaatagcgttaaaaaaaaaaaaagaaaaaacacacctattttttgaacattaatttcagtgctcatgctagatttcagcaggctttggtactcataattctttttagagaaggatttttaactgtttaaaagcaattgattccagttattgatctcttttctagacctgtgcacaatttggatttaataatctgtcttatgtaaattaaatgtggtggttttttttgttttgtttttgtttttgtttttgttttttttgaggtgggatcttcctgtattgcccaggctggacttgaactgggctcatgtgatcctgcctcattctcccaagtagacaggattataggcacaggccactgtacctggctctaaatgtacacttttataactgctagtttggagtttttctctcattgagagattgctttgtaatgcttccaatgttaagaatttttttgtacttttcttatcctagtctcttatgaaagaaagatatagtaactacttcatcaattttcatttttattactgactttcacatatcaagattcagaagttctttaaatatttaaacacgtattcttgtttagtccatatactacctcttttctgtcatttgaactctctctgcctcctaatatataggttatacagctgccttaaattagtgtaaagtaatacggattcagtttttttcttgccacatcttgtgcattctatcctctgtgttccttttgactttaaatggaaagagagcaggcgtatgcgccagcagcattatatgcctgtgactcctgagtagccttttccctctcctttttcctcttgtgtctggcctgtgaatacagctgactgtatacagggttactgttggggttattgtggggcagtgtaaggtgatgaagatctcactgacttagtgttgatggcttgagtttgagtcctggtattacctctcgtttgttgataatcttaggtaaataaactggcattgctaagccccagaaaaatgtatttagtggaacagatgaaatatgattcagtggttaggaagttaacttctgaagacagacaaacctaagtttgaatcatggttcaccccttagtggctttgtggccttgggcaagtttctttaattttcttatctatactgtgaacagtacttacatcataggtttggtctgaagattctgtgagataatgcatatcaagtggttagcactttgccaggcacattgttaagtgcccaataaatgtgggccaaatgtgatagctcacccctgtaatgccagagctttgggaggatcctttgagatcaccctgggcaatatagcaaaatcccatctctagcaaaaaaaaaaaaaaaaaaaaaaatagctaggcatggtggcacatgcctgtagtcccagctactcaggagactgaggcagaaggcttgcttaagccagatgttcaatgcttcagtgagctgtgatcattgccactgcactccagcctgggtaacagagcaagacctcatctcagtaaataataataataatatatgtaaaagtgctttgtaaatgatacagcaatatatcatgtttttaatatgggagagcagaatgacaaccattattttcgtaaaaatgaaaattactgtcagagataagaaagctgtatatgggccaggcacggtggctcatgcctgtgatcccagcactttgggaggccgaggtgggctgattgcctgagctcaggagtttgcgaccagcctggggaacacagtgaaaccccgtctctactaaaatacaaaaaaaaaaaaagttgccaggtgtggcagcgggtgcctgtagtcccagctacttgggaggctgaggcaggagaattgcttgaactcgggaggcagagaggttgcagtgcgctgagatcatgccactgcactccagcctgagcaatagagcgagactgtctcaaaaaaaaaaaaaaaagaaaagaaagagaaaagaaagctatatgcgtatgtacttaaagttctcctaactagtcaatggccttgtcaatcccaggggactactgttgggaatgattgaacagaacctgtacacacattcattgagtgctaaaagcattcacttttgctttgcccaggagcagactggacagctctaactctgcagggcagggtcatcaagaccaaaattaacactacgttttgatgttttttaaaaaacaactatgctccagggcttcaagcattttacagaataatttataagatgaagtaaccattggatacagcagcctcttccatttaattttaagcgtagcaacagattgactccagaaatatcatgcaggaatcagtagcacagataaagagctttgctaaaagcctggctgtgatatatatatatatatatatatatatatatatatatatatatatatatatatgctcatgaatacctaattagtccatgcagtgcaatcaacctgtaggactataaaagaacagcaagtcccttcaaatggtaaatcattacttaagtaacacagataacattaaatacctcaggtcagcaacaaccttaaaatcaataggatacaaagaaaacatctatgtaggacaaatccactattttggaacatctctcgttgttttcttttccccatgtttggataataaacatggcagtgcctcaggcctctagcactgtcttctatagccacagccctcaatacaacactacctatgtccactggcctatggagcacttttaaaactacatattttgacctatacatgggttttgattaccagtttttttaatgatatagaactaaaatcatcacacattaggcttcttattgattagtgaaacctttgtattatgtgtgtgtgtatttatacacatgtgcacacatgtcacacttgtatgcatatggcatgtcatgccaggttatgtcatataagcgtgtatgccaggtcatgatgttaaaatgtatttcttatcatggattgtggttaaaaaaaatactgatctctgggtatccccaactccaatctgaaatcattgtgattctctcgccttctcaatgtgactagtctttttaaagttccttttgatcttcccaaatggcatccctgtgtccactttacccacttccaccgccttgtgcagtgctgcaagaggactttctaaagcatgagacaatcatttactcttttgcttgaatagcttcctattttctaagagactaaactgtaaactccatagctggaattgccccttttatgtccttcaaatatacacacatacccctgtatctcctcttatgccccagtaacactgtttgccattctttaaatagtccacctttcctcacacctctctgcctatcagattatgctttctttgcctaggacactattgaacaaacttttttacatttttgaagacccatttcatatgttgcctcttcttcaaaatcattccaggccccatatccctgttctgttccagatgtgttcctctactagggcttcaggtgccttgaagcagaaagcagggactttattttccttatattcccagcaccttgcctggtgcctggcacatagaaagtgctcactaacgttagttgactcttccccataaaactggggttagagtcatgtgtgtctattactttagtgtggccctttcttctgaagtaaagagagatgggagatgatctttctttaaagaaacttaaaggggaagagtaagatgtttagacatgcctgcagctctgtgtgttcattgtcgttacctaaaggaaaataaaagcttattataggtctcttgggcttcatgtctcttgcatcgtgtcagagttagacacatgtctaattttgatgtttttcccaaaatgttttactacctacaagatatttgaacatctgtgccattctctgcaaaaaagctaccaaccctctctcattttattttggagttccatatctcatcatgtaacttgattctgataccctttctgaccttgagcacctcttctcaacttccgactgaattttactcagcaagtggccagcctgaaagtgcagccattccagaagttatgtacggtatcttcaaggccacggattgaatttgggccctaatcaggtgagcacaggcacagatacacagaagatcagacattttcccggaacccctccagaccatcttgccacactttgaaccctttcttctttccctctacccctaagtcttcatactgtcttcatgtatacctaccaggatcccttagcaatgtcccaaggtccaaaatgattaattttcctcttcctcttgtttaccttagtacaactcttaagcctttagtgactgacattaaacctgtttccaagagaaaaatttctgataagcaaatgcttttagagttatgataaggccatatgtgattgttaccccttctggtattttcatgtgttaaaaatatgtttgatgcactagaaatctccagtggtggcacttcaggtggtcgagataactcgtgtcacctgatggggcagagatgcttttgggttagagtggggagagtcacacctgagagatttatcagttgaaaaatacttatcaggtatcttttatgtgcttggtactgtgtttatagcagtagtcaaaatctgaagtagaattagcaggggcgtggtggctgtgtgcccagggtcccagctactcaggaggctgaggtgggagaatgatttgagctctggaggtcgaagctgcagtaagctatgatggagccactgcactccagcctgggtgaaagagtgagaccccgtctcctcccccaccccccctcacccaccgaccagccaaaaaaaagatctgaggtaggaggattccagcaacatgtactaaactggtgtggatggcatgcctcccctctaaaactatatagtgatggataaaatatcaccatcctcactgctgccccattgttataattcctgtcatgaaaaaaaatggaaatccttttgtgccagagataaatggaaatctaaaccaaagcagtaagcatgagctggtcctccaggatttcagtcttgatacaggtcctaggaattgggtgctgagttctcagattcacccgaggatgaaagactgtggtcttgtgtgcatgtaaggcttgagacctggaatcaagccccttacctaaagtctggagcttcaaagaactattcttccatgaaaaggagactagaaatcaccagacataagcagtgaagcagcaaagaaacaggctggaaacaggttagggaaaataaagtcacccatgagaaatcaaaaccccctgtctgtgctatttgtgggtttcaggtccagatttattctacccgagtgatttgcgaatccctacccaagaaataaacataaaaccagaagcatagaaacctttaggactctggcagaaggaagcacactactttagacacttctacaaccacaagcttatgagacgcatataggaaaatgaaacatagctccagtaagataggcccacgttcagaaattacaaacatatgtgggaaaccaggaaatcatcatgagtggagggcaagcgcatacaagcaggagaatcagcactcctccagttggcaataactattaaagtagccatgtttaaagtgtttacggtgataaaaagaaggaattggaaccttaaaaaaaagagaggataatgtgataaatgatcatttagattcatgtaagaactaaaaacaacttctaaaattgaaaaatagtccctgaaattaaaactccaggtataggttaaagaacagagcagattaaatacagctaaagataattagaatttgaaatggaggctacttaagaaattatgtttttgagctctgagacaaaaagacatgaaaaatatcaaagagcaagtaaaagatgtggtggccagagtgaagagactttatagcatatgcagaaagagaatagagaaaatgagggaaagtaatattcaaagaaagaatggctggcatttttcaggttaagtaagcacactgactcccaagtagggagaatattaacaaattcacacttaacaactggacatcaaagataaagaaaactcttagaagtagctagagagaagaagacatggcatctgtcctcagggagtttgcgatctaacaggaaatagaaataagtcagcagtgaaaatagtgtggtcaagtgtgtggcagcaggaggccagggtgctgagaacgtgcgcacaaggcggctgtggtgaggactcagctagggtcagtagcagagtgaggatgagaagcagggaagagtgcagggcatagtatggctttttcagggaactgaagcccctttcgctgatgaccccttcagcatatctcagagctggctttgccaccaacaggaggtctgtctgtcccctctttcagtaaaactgctgtcaggaatgtctactcaacatgggatctaattaaagagcttctgcatggcaaaagaaactaccatcagagtgaacaggcaacctacagaatgggagaaaatttttgcaatctacccatctgacaaagggctaatatccaaatctacaaagaacttaaacagatttacaagaaaaaagctaacaaccccatcaaaaagtgggcaaaggatatgaacagacacttcacaaaagaagacatttatgcagccaacagacacatgaaaaaatgctcaccatcactggccatcagagaaatgcaaatcaaaactacagtgagataccatctcacaccagttagaatggcaataattaaaaagtcaggaaacaacaggtgctggagaggatgtggagaaataggaacacttttacactgttggtgggactgtaaactagttcaaccattgtggaagacagtgtggcgattcctcaaggatctagaactagaaataccatttgacccagccatcgcattactgggcatatacccaaaggattataaatcatgctgctataaagacacatgcacacgtatgtttattgtggcactattcacaatagcaaagacttggaaccaacccaaatgcccatcaataatagactggattaagaaaatgtggcacatatacactacggaatacaatgcagccataaaaaatgatgagttcatgtcctttgtagggacatggatgaagctggaaaccatcattctcagcaaactatcgcaaggacagaaaaccaaacaccgcatgctcactcataggtgggaattgaacaatgagaacacatggacacaggagggggagcatcacacactgggacctgtggtggagtggggggagtggggagggatagcattaggagatatacctaatgtaaatgacgagttaatgggtgcagcacaccgacatggcacatgtatacatatgtaacaaacctgcacgttgtgcacatgtaccttagaacttaaagtataataataataaaaaaaattctagctgactttatatattggaggagatggtttaagaataatgagtgataaccagatttcttttctctggatggatttgagactgaaggggttttttggtttgtttttatttttttaaaaactggtctacaattcacacacctctgcagtccttttagtggctctcagtcatcctagtggggtgtgttggccaaggacgaccttgtatggtctgaatcttcagttccaaggctatggaggatgcagttatataggtgggtcttctcctctaaggaggcagaggaataccaaaggggatctgaggacctttaagagtagtgctgagaaggtgactgtcatcacattcatcatgggctctttgcatgactgactaaaggcctttcttacagctacataaaagctaatattaagtcatggtgctgtaacataaggagaattattgtggaaaggtattttgtcatgtagcatcctcttattaaagtacagtttaataaatgtattaaacttaccagaattatataaaatgaataacacatgggagttcaaatgaagccaaagactctccctctccctctccgtctccctccacggtctccctctccctctctttccacggtctccctctccctctctttccacggtctccctctccctctctttccacgttctccctctccctctctttccacggtctccctccctctctctttccaccgtctcgtctccctctccctctctttccacggtctccctctccctctctttccacggtctccctctccctctctctctctttccacggtctccctctccctctctttccacggtctccctctccctctctttccacggtctccctctccctctctttccacggtctccctctgatgctgagccgaagctggactgtactgctgccatctccgctcactgcaagctccctgcctgattctcctgcctcagcctgccaagtgcctgtgattgcaggcgcgtgccgccacgcctgactggttttcgtatttttttggtggagacggggtttcactgtgttggccgggctggtctccagctcctaaccgcgagtgatctgccagcctcggcctcctgaggtgctgggattgcagacggagtctcgttcactcagtgctcaatgttgcccaggctggagtgcagtggcgtgatctcggctcgctacaacctccacctcccagccgcctgccttggcctcccaaagtgccgagattgcagcctctgcctggccgccaccccgtctgggaagtgaggagcgtctctgcctggccgcccatcgtctgggatgtgaggagcccctctgcctggctgcccagtctgggaagtgaggagcgcctcttcccggccgccatccagtctaggaagtgaggagtgtctctgcccagtctctgcccggccgcccattgtctgagatgtggggagtgcctctgccccaccgcaaccctgtctgggaggtgaggagcgtctctgcctggccgccccgtctgagaaatgaggagcccctctgcccggcagccgccccatctgagaagtgaggagcccctccgcccagcagccgccccgtctgagaagtgaggagcccctccgcccggcagccgccccgtctgagaagtgaggagcccctccgcctggcagccaccccgtctgggaagtgaggagcgtctccgcccggcagctgccccatctgggagggaggtgaggggcagcccccgtccggccagccgccccgtccgggagggaggtggggggcgcctccgcccggccaccaccccgtccgggaggtggggggtgcctctgcctggccgccccttctggggagtgaggagcccctctgcctggccgccaccccgtctgggaggtgtacccaacagctcattgagaacgggccatgatgacgatggcggttttgtcgaatagaaaagggggaaatgcggagaaaagatagagaaatcagattgttgctgtggctgtgtagaaagaagtagatataggagactccattttgttctgtactaagaaaaattcttctgccttgggatgctgttgatctatgaccttacccccaaccgggtgctctctgaaacatgtgctgtgtccactcagggttaaatggattaagggcggtgcaagatgtgctttgttaaacagatgcttgaaggcagcatgctccttaagagtcatcaccactccctaatctcaagtacccagggacacaaatactgcggaaggccgcagggtcttctgcctaggaaaaccagagacctttgttcacttgtttatctgctgaccttccctccactattgtcctatgaccctgccaaatccccctctgtgagaaacacccaagaatgatcaattaaaaaaaaaaaagcaaagaaaaatttatatattactcatttattaataaatcagaaactacaagaagctatcacccaaaaaaaataaaataaataaataaaatcaagctaacacacacacaaaaaaaatgaagccaaagaatcatgtgttttattatccagaatatctcagagaaaaacatagagagaagtgcttccaattacctgaatcataagttgcctgttccctttgtgtgtgtgtgtgttttttgttttttttgtttttttgagacggagtctggctctgtcgtccaggctggagtgcagtggcgcagtctcggctcactgcaagctccgcctcctgggttcacgccattctcctgcctcagcctcccgagtagctgggactacaggcgcccgccactatgcccggctaattttttgtatttttagtagagacggggtttcaccgtgttagccaggatggtctcgatctcctgaccttgtgatccgcccacctcagcctcccaaaagcctgggattacaggcgtgagccaccgcgcccagcctccctttgtgttttaaagaggcttcccagtggcttatccctgatagttaaacccacactgttataactattgtgcagattttagatctggttatgaatacagaagtcttcacactcctgctctctgtaatacacatgtgggctgagacatctctgaagattgataaagggtcagtgtcaagcagcataaagatggggaacttgtagcaacatgcatgatagaagtggctgtgttttctcctaatgacaataaattcagaccatcattcacacttcttgcactcttgtcttctaagggatttccttggattttatagtagagggcttgggagactcattgggctaaaagtcggaaacacttgtgagttcctagactttatttcttacatgccaagatacttaataagctcttttttttttttttttttgtcctgagtgttcctatctgtagagcagtactgtgttcctgccccccttcaggagaaatggcatgatgaattaataagtagttatgggaagcatatatgcaagaacggcatttcctcactcttcattgggttaaaaatagataatcacgtgaaatactagtcatttaaatgtggtacatagaaaagaaatatattaattatggtgcattggaggtataatattgccagaaaataagaaatgcacagatgacttaataggaactgggttgcatccaaaaataaactgttcaccacagctagaatgtattagatattttgcacatgcccagcactgtgttatgttcctttcaaaggctgcagaagaaaaagaaatgtgatttatctccttgagttacttataaaatcactgagtagacaaacatgtgaaatcaagaacaagttaagacagtgtgtgatgaagtgccaaaatgaatggtgtggacagcaagtattctcagaggtcaaaggaagagcagtgcagtgcatgtgggaaggtttccagggcgagggatggactcacgccaggtccttgagggattgtggacttgagatggggtggcagggaaggcattctgggcacaacctgaggtaagagcaggaatctttttggcctggagaaggaggctgtactagtcccactttcacacaactgtaaagtactgcccaagactgggtaatttataaaggaaagaggtttaattgactcacagttctgcagggctggggaggcctcaggaaacttacaatcatggcggaaggtgaaggagaagcaagtaccttcttcacaaggcaacaggagagagagcaagcgtatgcgaggaagtaccacactttaaaaccgtcagctctcggccagccacagaggctcatgtctgtaatcccagcactttgggaggccgaggcaggcggatcacttgaggccaggagtttgcgaccagcctggccaacatggcaaaaccctacctctgctaaaaaaaaaaaaaaaaaaaatacaaaaattagctgggcatggtggtgtgtgcctgtaggcccagctactcgggaggctgaggcacgagaatcacttgagcctgggaagcagaggttgcagtgagccgagattgtgccactgcactccagcctgggcaacagagtgagattctgtctcaaaaaaaataaaaaaatcagctctcgtgagaactcactatcacgagaatagcatgggggaaattgccccatgatccaaactcctcctacctgtccccttcctcgacatgggattataattggagatgagatttgggtggggacacagagccaaaccatatcaggggtcttattgggaactgaatatgtacagattgggtgggcccaggctgtgaagagctgtaagtgtggaagaaagaacagttttaacttaatggtttgggtgatgtgtgctagcgtagattttagagttggtgaaggaaatgatcatgtggtattttaagaagtttgaggttttaggtaaagtacataaactagggcagtgttgtccacagttgcactatttgtgagctcctgagtctgaggtttcaggggacatggtcaatacagagagagggtggttcaggacagcaggacgaacatttgagcacctaatgtgttgggttctatgctacacgtttcaacacatttttctcacagaaaacttgtgctttaaatggcatttaagcctcacagaagctctgaactaagtactatcccattttacagacatagcaactgaggcccagattgagttgctgaggttccacagctggtaagtgacggtggttgtattcaagcccaatctgacttcagagcccttgctgtcatcttattgttgccctttgttgaattatcagaaccacagctcttgcgattctctaaaccttgtagacaatttcttgttcgtggaagtttaagttaagcagaagtcatgtgtatatgaatcaaggcagcatattttgtgtgtgcggcaatctgacctaaaaccttgaaattggaatgtcctaggcatttaacactcccaggaaatggacccatccttagaggctacaaattaaccaggctgatcctgttgattcaacaagctgtaatagcaaagaaaactcaataatcttctaaagatttataaaacaaggtatttcatttgttactctatcttgaaaaatcttcacaggaaagtagtttgggtaaacaagatattgacaaggtagaaatgaataaatgattgtttctaacttctcatatgagtgcagcaaggggaaaatgataatggcatatggcctctacctcctttctttctggagactggctgtccaccttaacaattgtctgcagctccttactcacctcccatgttcttctatccgcaagtccctgtcagaagtttccgagttacccaattaagtttctgtgggaggcatgtaacctgctgttagtggtctggagagggtggcaggaaggtgccgggctggcagctctgcattgataccctggctgccgttggacactcagtgtggtgtgggcactcaggagggtggcgatagggcagtgcttttctcagctgatggaggaagtacaaacatatcgcagatccattctaataggagaatttgataaattatttggacaggaaacgtatttcaaaattgattctccttagcttgagagaaaagagggtaattgatgtcagcatccataaggtttgtaaagtttctcaaacaggcatcttaagtggaatgactatatttaatattagtgtttctctcagattttcatttggaactctgaaatgaggacctgattaatctgagacaataatggtttgcaggagaacttttaaaaaaggtaactatacaacgtaggctttttggtttgtttttctagagatatttagtcaaggtaacaaaaccctttgggaaaaaagatgttagcattaagaagagaaattttaccaagtaatcttactaaactgacaggtatccatagcatatctcccttttccttaaggtgtatgggaggccaaagtgaggctcaccatggttcagttgtcagcgttggggtacaggcatgccccaccttcctattccttttctttagttcccatgcccaaactccaagtcctaagaagagcagatagtggattaggcttttcataggtgtttaaatcagtcaatcttaggttcgtattttttagaatacttaatttcttaaaagtattgctacatgtatgttactgcaaataagtgtatgtatgaaacctgctatgcatgtgaacttgataaaattgtgaacttaaaaaacttacttgacagatttcactatttactaacttctactattaaggtatggctagtaagaaatagtattataaagaagcatacatataattcagtgtttgtttattgtggttctatagatgcctaaaaaatagtcttcccagccaggcacggtggctcacgcctgtaatcccagcactttgggaggccgaggtgggtggatcacttgaggtcaagaattcgagaccagcctggccaacatggtgaaaccccgtctctactaaaaatacaaaaaattagctgggtgtggtggtgggtgcctgtaatcccagctacccggagggtgaggcaggagaattgcttgagctcaggaggcggaggttgtagagagccgagaatgcactactgcactccagcctgggtgacaaagtgagactctgtctcaaaaaaaaaaaaaaaaaaaaaaaacccaagaggaatgttaaattgaattccagggcatagtgtgcaggtatgtatttctgtgacaaatccaaacatagttttctagatcttagagttctttaaattctgaaaacttagagattgactgataagccagatcataatatgtttacactgcccagtctctaatggggttgagtttcctttggaaagatgatcagaaatctccagtcaccagaactttagcttcaactctctgaccctgtgcaagttcaggcctgatcagggatggccagcagtggccccggtggcccttgaattgtaactaaaagtagttgatgatatttttatctctttccagcattcatttcttttcttgaatatttagacttccctctagtttgttcttcctttaaaaggtgtttattctttagtaaataagtaagtagctactaagtgatatagttagatggaggcaattggattgattcagggaattgtgtgttatgtatttagtagcctgagaatatgtaattcttggagttttttctcttttgaaaaggttctgctggttcttttctgttcctggggcctgcatgcataaaagtcagcgatccatgctgtaaggaacacaagatgctcatcgactcttgtcatttgcttgtgcttaatctgtctcattttcattcagcaagtaacatttttcaaatgccagctcctgtgctagaggctaaggatgcagagagaagattcagccccactttcaaggaatggactcccgcaaattcttgtcagtttgtctcaatctgtgtactcattgttctttcgtctttactcaggtctctacctcagattctgcctctttgctccagtgatttaaaaatgacttgtgagcctataatcccaacattttcagaggtcaaggcaggcagatcacttgaggccaggagttagagacaagcctggccaacacagcaaaaccctgtctctaacaaaagtacaaaaattaggtgggtgtgatggtgcacacctgtattccagctacccaggagacatgagaatcgcttgaacgcaggagccatgtgttgcagtgagctgagattgcaccacatcactcctgggcaacagaacaagactgtctcaaaaaaaaaaaaaaaaagtaagaaactttggaggccaaatgtagtggctcacacctataatcccagttctttgggaggcagaggtgggaggagcacttggggccaggagtttgagaccagcctgggcaacatagcaagaccccatctctacaaaaacgttttttttaattagccaggtgtggtggcacatgtctgtagtccagctacttgggaggctgaggcaggaggatcacttgagctcaggagcttgaggttactatgaactgtgatcagacttctgcactccagcctgggcaaaagcaagaccctgtctctaaaaaataaataaatacaaagacttgtgctgatttttcatgttagtatttttagttttacatttctcttgcatgcttacttttaaaataattgagccaacctctctgtccctttttgttattgcatgtaaatctacagccttctgatataacctaagcttgcagaatcttccatccatcaccttcctagtatgcctcttggcccttattccagcagttagttgcttaaaacaaagcactttgtgttggtagtggtactatataacttatagtctatgcactgttggggattgacacactcttcccttccctaccactgcagtgggaagatcatttagaagactaagttcgatttgaacctagggtccaaattacctattgcaaatcaatcctcctcctccccttgccctttgcaaaagctagaattcactgtgaaaggtgacaggcatacgttcaactcattgtctctatgttgacatatggtcagtatgagagaaaggtctctaatatagatctgtcccgtggcatgaccagcatgttgtggatttctgacaaatgcaaagcagtgaaggagtttgagctcaaaatacaaatatttgaagtgttcaaatttcctttttttttttttccataaggaccagactcattgatggcaagtcgtcatcatcttgatataaatttataacacaggatgaacaagaccttggaggagcttgtaaagagaagtcactgaagccttgtatctttagttgtccgttttggagactgtatatatgcatgtgtaagaagcgtaggggtgaaagggtcatgaaaacctttggttgaaaatggtgatggggtcattatgtgtgtaagaaaatctttgtacttttcagttaacaattctacaaaatgagaactgtcttgggaaactgggctttatgaattcaaaaatatactttatcaaattctttatctctcatgtttaaaattatttgaacagacaaataaatgttgaacatcagactttgcctgattgctgttcctttcaatgggaaaaatataaatcctgataatagggtttatatctttttaaacccttatatttttataaaccctgataatagggaaaaatataaaccctattaccagggtttttcctactatttttcctactattcccccttggataatagtaggaaaaaatgttggtccgcacgaagttttcattcatctcaccactctctttcccatttgtgagaaggaatacaaagctgcacaggacagagtccaagactagggagtcagatcacctgttaaaattacagtattgcatcatgcatctttgatttgtatttgcagccttcccactacttggattaagtcgtaaaaattacaggtaaccatggtccagtggcaaagctgtatatctctttgggttctttgttgcaattagcaactcttgttaacttaaacaggagggactttagtgaaggaatattaggaatgtatagaattgatgagaagtcaaaagaattagggttcaaataggcaacaaggcaattctggagttccaggaaccatggactacttgaaggtgtttgtactaagtcccaccaggccttgtactaattgctgtctgggcaggaatatgctggtgccaaccatttttggtcttctgtgctggtactaacaaggaattcccagggaaggagcatccagctggcatagcttgggccatacaaacacactgtgatagaggaaggatggacccgattgcagtctcaccgggccttgtctaagaaagatcattcttcaaaggaaaattcggatggatttattggaggaagttatttaagcagccaaaagaatcaagcagtcaccccaggatagtagaaaggagtaaggacggaagcagccagtactaattttccttggtaaatgagggttagaagaatgtgcatatgtgcattggctttgaggcaggtctctctgtctctggctctctctatcctccccctcccccacccatccctcccaagcagttacactttgatttgttttgagaaattaggtctttaaaaaagtccttgtgactgcttcagtgtttaccctatttaccctatggcataatttaccagttgttaaatctgctctatccataactgcctggctgtcaagaattttacatttaaatgtatttatcagtagtgaaactttgaccttttggactcacctggataaataaacccatccctttgtgtttctttttcagcatccagtcctggatgagccaatagctgaagctgtctgtattatcgcagacacggataaatggagtgtgcaggtagctacaagtcagaggaaagtgacggacaacatgaaactaggccaggatgtcctggtctctagtcaggtgtccagtttgcttcagtccattttacagctctataagcttcacctccctgctgattttgtaagtactggttcttatatcaccaaagaaatctagttttaaaatgcttttaacgacattttgattataaaatcacaaattcaaaagtactgttttaatataattggagattagcataactaaaactagaacatgcagcataaaactcgcaacaggatagatttcagtagtaatagctcttccgtgaaacaaataacaaggagcggcactggaattttttggaatgaggtatatggtgcagtaaataaggaatgggtggagagatcaagcataaaaggaaactgtaaatcatccactggagaactcatgagttctccttttattagattgatattttaataagtaggccagtttctgaagggattgtagttccttttattaagcaaacattttcacaaaggtgttaaggataaaatagaatatcatttgtgtaaacatttccaacatttccagctttaaagtactatacacatgtaagattatatcaattgttgctttttttttttttttttttttgacagagtctcactctggagtgagtagtgcagtggcatgatctctgctcactgcaacctccgcctcctgggctcaagtgatcctcccacctcagcctcttgagtagttggactagaggcatgtgccaccatgccagctaatttttgtattttttgtagagatgggttttgccatgttgctcagtctggtctcgagttcctgggctcaagcaatccgcttctttccaaatgggattttaaaatcactttcgtaacaatactttaaatacaaacaacagacagagcctatacactcttagaaaagtatcagtagctccccccagccactggaattaacatgcatgacaaaatcttctcagtatctgcgtatgtgcagagaaattgaaagaatgagaaaatacatttagagagggagggggaaaggtttcaaaagaagaaaagcttttccagtggtgatgaacacttaaaaagagagagagaagcttaagggcatatggcatatagctgggtagagcttggatgggctgacctcagagacaggtgtgtgaggaaagagtctgctttctctgctgttccctcctgtctgcacagcgctgttctctgcagcacagccccaaaccaaaacatctgttatctgcttcctggcctccaaaaatgatgcaaacctgtttacccaacaaagcaggaagtttttaaatattaattacctacgctaattgctaatgtaatggtcattgtcctgggtttttatgaccaaatctatacttgtacccattcctcaaaaagagtctagacttttatgactttgaagaaggtgctctgaaataccgtctggttgttatcaaagtcgggacagtgtggcaaggcaggaagaccactgagcgtagctgggttatggtctaggctttgccgttggttagttgtgtaacaatggacaatcccgagtctctccgaacctcagctttcttagttgtaaaagaaagatagtacctgttcaacaagggtgctgtgagaatcttctgaaaattagggatataactgctttttactgctaaagcaccatgccaatattataaaatactttaaaagccatatatgttagctttagagccccataacctggggtcaaatccaagttctgctacttcctaaccatgtactctttcaaagccttaatttccttatctgcaaagctggggaaataatagaacctatctcctatggttatgaaattatattagagaatgaatgtaaagcacttggaatagtgttagatgttataagcactcagtaaacagctactattagtatgatagtcaataacaattagtttcatgaaacaatattaatggttgcaaagactgacaacaccttttttccaaactgtttatttgggctttaagctgaagcgtactcttgcaagacatctgtcctggggcaatatgagaagcacttgtggattattatgatcttattttttgttatacagtagtaggcagtttctccttctaaaagcaggttgagttatgctgatttagaggttaatgtttccttttctgtaagagaagtaatgtatattagacttcatagtttacttcataagtatttgccaaacttttatatttcattctataatacatacgtcttgtcacagttgatatcttggttatcaaagcaataaattgttatagttaattctttttacttcctttggacagaagtgtgttcaagcacttactagtgtgaatgacttatttaacctgacaaaaccaagatcaaagaaaattttatctgcagtttaaaattctccttaaaaaaaatcacttgaatgaaacctgtgattaaatggcttttagaaccttcaatacaaaaagagaaggtagctatttgaaattttagaagttaaaaattggagaaatccatctcaggaataaaatcccagaaagaggagtttaaaaagcccccagcatggttcaatggaataatcaagtcttttaaaaaatgttttcttttttttttttttttttgagacagagtttcattttgtcacccaggttatagtgcagtagtatgatgttggctcactgcagccttgacctcctaggctcaagcaatcctcccacctcagcctcctgattagctaggactacaggtgtgtgggccactatgcccaggtaattttttaatttttgtagagacagaggctcactatgttgcctaggttggtcttgaactcctgggctcaagtgatcctcccacctcagcctcccaaagtgctaggattacatgcgtgagccactatgactggctaaaagttgtctaaatgctttgatttcacgtctagtatatatttcatatagaccacagttcttatttccacactgcatcatacagttttcatataggctgtgaacactgtaattactttttccaaacagaaagggttcaatgtaatatgaatattatttttaatattttgtgactcttactaaaaattttctatttcactccataaggaactgaaagctaataaagatccttttaccaccttgtttacttggaggagcatttccatgagaattggtgaaatcctccttactttattactcttagtcacttagcagttgtgtttcatccacctgacacaatgtatttaagattttaaaccaatgaaaaactgaaaagattgcatctctgatagatattttttccatgtcgttgatcagcccagatggtcaagatcaacattttcaaatgcatctgttaatctttttaccttgaaaataacaggcctaatggtctagaagaaaattaggtatgatggaattacccttgccaaagccatcaggtgtcttactgaagatgctcgggtatctgcctgccaaatgcaaaagcatttgcctctggtgaaagacacagatggttgctattctctaaaaaaatgaagctgaacactattccaagggtaaagatgtcctgaaaataattgccttttctttattgttattaaagacctagttaaaatacattcttgaaagcaaaagaaaaaaaagttgtgggggaggttcaaaatgacctgttcccgtcagtctcctctggaaatgtactgggccagaataatctgagctattgggggaaaaaaacaaaaaccatactgtttactaaattatttataacaaaaatgcaatttgctatgtggttacgtgtaaattcacattctcaatattgtttagctataaaaattatatcaagaagttcttaatatgggaaaggattattataaagttttttaaaggcaagaaacacttttggaatgatttcaactatgaaaaaaatacttgtttaaaaagactagaataatacatatgtaaatcttaatagttagcaaaagtaaactttgttttacaagaacctattcttatacctggtagtggtagggtttgagatggcttgtgattttttaagtgtatttgaaactgatgagataaaagctgtgtagttagaaatgaattaagaaaattctgactcttaaaatattggcagagatttgacttctagccctcattgtgaatgttcttggctttgcagtgcatcatgcatcttgaagatagactacaggagatgtaccttaaaagtaaaatgctatctgaatatctccggggacacacacgagtccatgtgaaagaattaggtgtcgtactggggtgagttctgtgaagtgccgtcacttgtccctttgataggtatccctagcattgtacccactaacgtgtttagcctgtgtcaccctaaacctcaggccctggtaacctatcaaagtatgtggagtccatcagatacgtgcctctgcaactccccaatgaacagcatgttccgttatctgatactgggtttcacacctacaatcaatcgcaggactttaggctggtcgtgctttgttgctcttctctgtggattatcttatgcttgaaaagaaaatttaatcccacactgcccgtttctagtaactgaataagatgctgaagtcacaagctgtgggacatgcagcagcagcttgtgtttacatttcacttcctggaggaggagtaggttggcacattccacctggtggcaggaaaggcccttctaggcttgaggagcctgcctgcgtgtctgtggggggacagtgctttccttcctttattataagcccaccaaagaggagacttgtatgttactaaaaatgcctatcatcctccagagggtatttgctataacttctctaggggaagtaattcttacttctgttttactgtcagcttgatttttcaaaagagaacaaaaagacattgtacatttggggaactgcccccgcttatccatgatgatgattcccctcacttgggagaagaaaatatttataatgtcgacgtttaaattatctaagcctcctaagagactggggcctttgtgttttgcttagatttctcatctttcacacccaaaatgtgacgcctgtgttgttcggctcttggcatttcctgtcatagattattcttacatactttatttacaaagtatttcccccttatgaggtgtttgcttttgcagttaacttgcaacatgtctctttgtcgttttttttttttgcttttgtttatatctctctaccagcctcatacttcaatcctgccttattagtttttttttttattattatacttttaagttctgggatacatgtgcaaaacgtgcaggtctgttacataggtatacacgtgccatggtggtttgctgcacccatcaacccgtcatctacattaggtacttctcctaatgctatcccacccccagccccccacccgccaaataggccccggtgtgtgatgttccccttcctgtgtgtgttgtcattgttcaactcccacgtatgagggagcacatgcggtgtttggttttctgttcctgtgttagtttgatgagaatgatggtttccagcctcatccgtgtccctgcagaggacatgaactcatcctttttatggttgcatagtattccatggtgtatatgtgccacattttctttatccagtctatcattgatgggcatttcggttggttccaagtctttgctattgtgaatactgcttcagtaaacatacatgtgcgtgtgtctttatagtagaatgatttataatcctttgggtatatacccagtaatgggatggctgggtcagatggtatttctagttctagatccttgaggaatcgccacactgttttccacagtgattgaactaatttagactcccatcaacagtgtaaaagtgttcctatttctccacatcctctcaagcatttgttttttcctgactttttagtgattgccgttctaactggtgtgagatggtatctcattgtggttttgatttgcatttctctgatgaccagtgatgatgagctttttttcatatgtttgttggctgcataaatgtcttcttttgagaagtgtctgttcatatccttcacccactttttgatggggttgtttttttcttgtaaatttgtttaagttctttgtagattctggatattagccctttatcagatgggaagatggcaaaaattttctcccattctgtaagttgcctgctcactctgatgatagtttattttgctgtgaagaaactctttagtttaattagatcccatttgtcaattttggcttttgttaccattgcttttggtgttttagtcatgaagtctttgcccatgcctatgcctgaatggtattgcctaggttttcttctagggtttttatggttttaggtcttacatttaagtctttaatccatcttgagttaatttttgtaaaaggtgtaatgaagggttccagtttcagttttctgcatatggctagccagttttcccaacaccatttattaaatagggaatcctttccccactgcttgtttttgtcaggtttgtcaaagatcagatggttgtagatgtgtggtggtatttctgaggcctctgttctgttccattggtctgtatatctgttttggtaccaataccgtgctgttttggttaccgtagccttgttgtatagtttgaaggcaggtagcatgatgcctccagctttgttctttttgcttaggattgccttggctatgcaggctcttttttggttccatatgaaatttaaaatagttttttccagttctgtgaagaacatccatgggagcttgatggggatagcattgcatctataaattactttggggagtatggccattttcacaatattgattcttcctatccatgagcatggaatgttcttccatttatttgtgtcctctcttatttccttgagcagtggtttgcagttctccttgaagaggtccttcacatctcttgtaagttatattactaggtattttattctctttgtagcaattgtgaataggagttcacttgtgatttggctctctgtctgttattggtgtataggaacgcatgtgatttttgcacattgattttgtatcctgagactttgctgaagttgcttatcagcttaaggagattttgggctgaaatgttggggttttccaaatatacaatcatgtcatctgcaaacagagacaatttgacttcctctcttcctatttgaatacgctttatttctttctcttgcatgattgtcctggccagaacttccaatactatgttgaatagttgaataggagtggtgagagagagcatccttgtcttgtgctggtttccaaagggaattcttccagtttttgcccattcagtatgatattggctgtgggtttgtcagaaatagctcttattattttgggatacgttccctcaatacctagtttattgagagtttatagcttgaagtggtgttgagttttgtcgaaggccttttctgcatctattgagatgagataatcatctggtttttgtcactggttttgtttatgcgatggattacctttattgatttgtgtatgttgaaccagtcttgcatcccagggatgaagccagctggatcgtggtggataagctttttgatgtgctgctggattcagtttgccagtgttttattgaggatttttgcattgatgttcatcagggatattggcctgacattttctttttttgttgggtctctgccaggttttgctttcaggatgatgctggcctggcctcataaaatgagttaggcagaagtccctctttttctattgtttggaatagtttcagaaggaatggtaccagctcctgtacactctggtagaatttggctgtgaatccatctggtcctggacattttttggttggtaggctattaattactgcctcaatttcagaacttgttatcagtctattcagggatttgacttcttcctagtttagacttgggagggtgtatgtgcccaggaatttatccatttcttctagattttctagtttatttgagtagaggtgtttatagtattctctgatgttagtttgtatttctgtgggatcagtggtgatctcccctttatcattttttgttgcatctatttgaatattctcttctttcttctttattagtctggctagtggtctattttgttgatcttttcaaaaaaccagctcctggattcattgattttttgaagggttttttgtgtctctatctcgttcagttctgctctgatcttagttatttcttgtcttctgctagcttttgaatttgtttgctcttgcttctctagttcttttaattgtgatgttagggtgtcgattttagatctttcctgctttctcttgtgggcatttagtgctataaatttccctctaaacactgctttaaatgtgtcctaaagattcgggtacactgtgtcattgttctcattggtttcaaagaacttttatttctgccttcatttcgttatgtacccagtagtcattcaggagcaggttgtacagtttccatgtagttgtgtggttttgagtgagtttcttaatcctgagttctaatttgattgcactgtggtctgagagactgttatgatttccattcttttgcatttgccgaggagtgttttacttccaattttgtggtcaattttagaataagtgtgatgaggtgctgagaagaatgtacattctgttgatttggggtggagagttctgtagatgtctattaggtctgcttggtccagagctgagttcaagtcctgaataccctgttaattttctgtctcgttgatctaatattgacagtggggtgttaaagtctcccattattattgtgtgggagcctaagtctctttgtagctctttaagaacttgctttatgaatctgggtccttctgtattggttgcatgtagatttaggatagttagctcttctggttgcattgatccctttaccattatgtaatgcccttctttgtctctttgatctttgttggtttaaagtctgttttatcaggactaggactacaacccctactttttttcactttccatttgcttgtagatcttcctccatctctttattttgagtctgtgtatgtgtttgcacgtgagatgtgtctcctgaatacagcacaatcatgggtcttgactctttatccagtttgccagtctgtgtcttttaattggggcatttagcccgtatttgatttaaggttaatattgttatatgtgaatgtgatcctgtcattatgatgctagttggtttttttgcccgttagttgatgcagtttcttcatagtgttgatggtctttacaatttggtatgtttttgcagtggctggtaccgctttttcctttccatgtagtgcttccttcaggagctcttgtaaggcaggcctggtggtgacagaatctctcagcatttgcttgtctgtaaaggattttatttctcctttgcttgtgaagcttagtttggctggatatgaaattctgggttgaaattttttttttttttttttttttgagacagagtcttgctctgttgcccaggctggagtgcagtggcgtgatcttagctcactgcaacctccgcccctccaggtttaagcaattctctgcctcagcgtccagagtagctgggattacaggcgtgtgccacgaaaattcttttaagaatgttgaatattggcccccactctcttctggcttgtagggtttctgcagagatctgctgttagtctgatgggcttccctttgtgggtaacctgacctctctctggctgcccttaacatttttttccttcatttcaacctccgtgaatctgaccattatgtgtcttggggttgctcttctcgaggagtatctttgtggtgttctctgtatttcctgaatttgaatgttggcctgccttgctaggttggggacattctcctggataataacctgaagtgtgttttccaacttggttccattctccctgtcactttcaggtataccaatcaaacgtagatttggtcttttcacatagtctcatatttcttggaggctttgttcgtttgttttcattttttctgtaatcttgtcttcacgctttatttcattaagttgatcttcaatctctgatagcctttcttctgcttgattgatccagctattgatacttgtgtatgcttcatgaagttctcgtgctgtgtttttcagctccatcaggtcatttatgttcttctctaagctagttattctagttagcaattcacctaaccttttttcaaggttcttagcttccttgcattgggttagaacatgcttctttagctcagaggagtttgttattacccaccttctgaagcctacttctgtcaattcatcaaactcaattctccatccagttttgttcccttgctggtgaggagctgtgatcctttggaggagagagcattctggttttttgaattttcagcctttttgcccaggtttctccccatcttcatggatttatctacctttggtcttttacgttggtgaccttcggatggggtctctgagtggacgtcctttttgttgatgttgatgtggctgttttctgcttgttaattttccttctaacaggcctgtctgctgcaggtctgctgtggtttgttggaggtccactacagaccctgtttgcctgggtatcaccagcggaggctgtagaacagcaaagattgctgcctgttccttcctctggaagcttcgtcccagaggggcacccaccagattccagccagagctctcctgtatgaggttctgtcggcccctactgggaggtgtctcccagtcaggatacacaggggtcagggatccacttgaggaggcagtctgacccttagcagagctcaaacgctgtgtgggggatccactgctgtcttcagagttatcaggcagggatgtttaagtctgctgaagctgtgcctacagccgccccttcccccaggtgctctgtcccaaagagatgggggttttatctataaacccctaactggggctgctgcctttttttcagagatgccctgcccagagaggaggaatctagagaggcagtctggccccagtggccttgctgagagctgcagtgggctccgcccagtttgaacttccaggcagctttgtttacactgtgaggctaaaccgcttactcaagtctcagcaatggtggatgcccctcccccaaccaacctcaaacgtcccaggtcgacctcagactgctgtgctggcagtgagaatttcaagccagtggatcttagcttgctggctctgtgggcatgggacccactgagccagaccactcggctccctggcttcagccccctttccaggggagtgaaccgttctgtctcgctagcattccgggtgccactgaggtatggaaaaaaaactcttgcagctagctcagtgtctgcccaaatggccgcccagttttgtgcttgaaacccagggccctgattgtgtacacaccaaagggaatctcctggtctgtgggtcatgaagaccatgggaaaagtgcagtatccagactgcagtgcagatattgagttcctcacggcttcccttgggtaggggaaacaattccctgaacccttgcacttcccgagtaaggcaacaccccaccctccttctacttgccctctgtgggctgcacccagtgtccagccactcccaatgagatgagccgggtacatcagttggaaatacagaaatcacccaccttctgcgtcgatcttgctgggagctgcagaccagagctgttcctattcggccgtcttgccttattagattttccattgccaaatgtgtgccttacatttcaagggctttaccccatccttgacccttacaggtgtgcatcaacacgtgtaatcataagcttttattcccctttgcactcatctctaggtcctcttagtgcattattagtggactcatgttcatccttcctttatccccttcctcccgtagtcagggccagtagcactaaaagtactagagaacttctgtgcactctgaaatcagatctgtatgtagcattactggagaaggactagaaaaccccatgaggtaatgccagatactgttttatttttactttgaggaattcaagggtaaggattaggacatagtccacaaactgaaacagttcaatttttttttttcatgacacctggcatcatttttagccagtgcccatactgtatccacctctgctgtaagagaggcagccaaagctgtgtccatttgaaaccatgatgtctcttaacccagtaccttttagtgtcactttgctctcagaatcttgtggcttaaatgctcagtgaggatcccagtataaactttgaacaaattcccaatgttttttaagaaattgctaccatcatcgtttttctaagaccaatttgaacttaggtgaaaaatcagtatgcatttagaagtgttgactggaagaatgagtttataatggagaataccttaaagtatgatacaatgaagttatatagggaatacaggaaagttagaaagtctggtgacccctgccaagggaaaaagagctttatgtccacacacaggcacaacacacttcctgtatttctctccctttgcctccctggtcagtgtccactggaatattttattaaaagagtaagtttattatccttccatctgttttgctttttcattagttttaaatgataatctatcaaacttagtacctagaaataatactttctcataaaaagaaataatactttctcataaaaccatgctcttttaaagtaatattcttttcttttctcaatattcaggattgaatccaacgacctgcctctgttgactgctattgccagtactcattctccttatgtggctcaaatactcttataagctaaagctcaggacagttcttccttggaagaaaaaaatcaaattctcaactgaaggagaaaggaataagctctctgtgatgtcaaaagcatgagaagagcaaacagaaacagtcattccacctttttgttttgtgtttttgctgtcaagctgatgcttcattgaagacttaggtttacttgacataatagcatttgtgattgtcgtgaacactttaggccatttgttacccatgaatcaacaaagaaactgacctttttggtaggaggaaacataagcactaaacactaagctgttgcaacagattgccttgtgctgtttgggcagaataaagacaagtgacttgagcggggtggtcagcagtgtacataatattccagtaggaaactgcttccaagtttaagcatgagctccccaaactggagaaaacatattttgctattctgagacaacaatcagaatacagactttggattccaggtcacagtttgctttttagacaaggtaaagcaaagaaagccacattgtgccatcttcagctccagtggctttagcagtgactgtttgacataaaacatgtaagaattgcttgttgggaagagtgctttagggacccactgttttcattacttcttggagtttaccttgtttcagatgcagccatgggtaggtcagagatggattgttggtgcaataaacccaagaatcaatgtagcctcttaatcccatcaagatgtagtttgtagcagcaaagtgtacagtctgaaaccgtatgttttatccttatattttagagctttcagcagcctttttaagagaggccacttaccaaagttatttctataagctcaagagtgtttcggttggtaagttcttccagctgaagccactttttccttatagttaatacaaatgactatttttactttaaaaggcacagctgtcctggtgggaaatgaaacctgcagcagttcaggatgactaatgaaagcaattagcttgaacatttagaaaaaattcatatatgatctaaatttttatattatcatttctgtgccttctaattcctgcatccttttcaaaacatctttccagacattaacttacacattgtataaaaccgaccaaaatgatttcctaaagttcatgcaaaaaaaaaaaaaaaacaacctaattttctgttaatataaaagaaacttcagtttactgaccgtgaaacagactatgtactgacatccagggtaaagtaaaagacttttaaatattggtcattaaaggacaggagctaagctagcaaagcaaaacatctttagcactttgcagatctcaagcagttaaccaggctctgattcccttccactgttttatgaattaattccagttcttttcatgtatctttgaacctaagattatgaagtaatttccctattagggactagaatgacttcagttttttcatttgataaaaatcagaactgctacctttcccttttttaatgatgcaaaatgtagatgagtgcattaagttttgtaagatctttatcattttatgtcattcattgaaaattgaaatgttcattctttttaatgttttcctatttccttttgcctagcatttgactttggtgttttaagttctgtagttccatgacatcattgtttgctgttgtgttacagagagagaaggaacctcacctgtggctcagctcaccccacatccgtttctcattacgtgtaaataaactgtcagagctgatgttacagcttttacagtttaaagcattcccctcgtctctagttccttttttcttgtttacatgttttgggcactttccctcattcaccaccttccagggtttcatagaaaataacttgttacaaaatcagttcaattctaatgtggacatagtggcatgttcataattagacccatataggggacactgagctttaaatcgttgattctaaactctatacattaaaaaaattcagcccaggcccctcaaagcctgagaaaatttaatttgctcttaatttaatgttccaaaactcactcttggaaaaatgcctgttggaaaactacaggtgggtcacatgtgggggctgtctccgtgacactcaggattccagtcagaacctaatcctcatatctattgcctacaaaaatagaccaagaatgttgctgctcttttataatcctttaaatatttaccattcaagttttcttt

SEQ ID NO: 8779 - DNA, 326 bp, Homo sapiens; identical to SEQ ID NO: 8033

SEQ ID NO: 8780 - DNA, 321 bp, Homo sapiens; identical to SEQ ID NO: 8034

SEQ ID NO: 8781 - DNA, 318 bp, Homo sapiens; identical to SEQ ID NO: 8035

SEQ ID NO: 8782 - DNA, 270 bp, Homo sapiens; identical to SEQ ID NO: 8036

SEQ ID NO: 8783 - DNA, 1165 bp, Homo sapiens
gacacagggagcctgaaagattctcacctcatgtctggggagcagcgcttcaaagaaactgaagttaggggcttcccagctctcctcttcagctcagtatcctctttacaccacagacacacttttttttttctgacaaggcacagctctggctgaagcttcatttaccctcaaaacctctgctggtcaggatgaccaggtaaataattttctgaagaagacagcaaagcaaaagtgtgctagagacactgaatcctgttgccaaagaaccacaccagtgaggctgccacacacgaaggaaggaggtctctgaagcaagatgtgccgtgtgtcccctaaacagtagcttttgttttgcctcgtatgcaagaccaatgctatcaagttgaaagagactttttggcagaacttcagacatcaaagaggatggatgctgtgactatctgtggtgccaagaagggggatgaaaatgaatgcagatgtattcacttcaatagatgacagtgtccttggtttccaggagttctgtgttcaacacttgtatttacaatgctcaggcaaggaggccatgccatcaacctaatgtcattacagcaggcaggtggaaaatgagtttaaagcaatcgctttgtgccttgtttgttctctcactaattcaatctaatctcaagccccaaacagatcttccaccagttctgttctcagggggcttcagcccctagaaacacctaccttgaattcaagctgtgttgggacaaccaaaaagaaggaaaggttaaaaggaagaaaacaagggaaagaattggggagaaggagattaaggaagaaaagcaggaggccgggcgcggtggctcacgcctgtaatcccagcactttgggaggccgaggcgggtggatcatgaggtcaggagatcgagaccatcctggctaacaaggtgaaaccccgtctctactaaaaatacaaaaaattagccgggcgcggtggcgggcgcctgtagtcccagctactcgggaggctgaggcaggagaatggcgtgaacccgggaagcggagcttgcagtgagccgagattgcgccactgcagtccgcagtccggcctgggtgacagagcgagactccgtctcaaaaaaaaaaaaaaaaaaaaaaaaaaagaaaagcaggaaag

SEQ ID NO: 8784 - DNA, 248 bp, Homo sapiens; identical to SEQ ID NO: 8037

SEQ ID NO: 8785 - DNA, 57 bp, Homo sapiens
tgcactccagcctgggggacagagcgagactccgtctcaaaaaaaaaaaaaaaaaga

SEQ ID NO: 8786 - DNA, 1165 bp, Homo sapiens
gacacagggagcctgaaagattctcacctcatgtctggggagcagcgcttcaaagaaactgaagttaggggcttcccagctctcctcttcagctcagtatcctctttacaccacagacacacttttttttttctgacaaggcacagctctggctgaagcttcatttaccctcaaaacctctgctggtcaggatgaccaggtaaataattttctgaagaagacagcaaagcaaaagtgtgctagagacactgaatcctgttgccaaagaaccacaccagtgaggctgccacacacgaaggaaggaggtctctgaagcaagatgtgccgtgtgtcccctaaacagtagcttttgttttgcctcgtatgcaagaccaatgctatcaagttgaaagagactttttggcagaacttcagacatcaaagaggatggatgctgtgactatctgtggtgccaagaagggggatgaaaatgaatgcagatgtattcacttcaatagatgacagtgtccttggtttccaggagttctgtgttcaacacttgtatttacaatgctcaggcaaggaggccatgccatcaacctaatgtcattacagcaggcaggtggaaaatgagtttaaagcaatcgctttgtgccttgtttgttctctcactaattcaatctaatctcaagccccaaacagatcttccaccagttctgttctcagggggcttcagcccctagaaacacctaccttgaattcaagctgtgttgggacaaccaaaaagaaggaaaggttaaaaggaagaaaacaagggaaagaattggggagaaggagattaaggaagaaaagcaggaggccgggcgcggtggctcacgcctgtaatcccagcactttgggaggccgaggcgggtggatcatgaggtcaggagatcgagaccatcctggctaacaaggtgaaaccccgtctctactaaaaatacaaaaaattagccgggcgcggtggcgggcgcctgtagtcccagctactcgggaggctgaggcaggagaatggcgtgaacccgggaagcggagcttgcagtgagccgagattgcgccactgcagtccgcagtccggcctgggtgacagagcgagactccgtctcaaaaaaaaaaaaaaaaaaaaaaaaaaggaaaagcaggaaag

SEQ ID NO: 8787 - DNA, 284 bp, Homo sapiens; identical to SEQ ID NO: 8038

SEQ ID NO: 8788 - DNA, 296 bp, Homo sapiens; identical to SEQ ID NO: 8040

SEQ ID NO: 8789 - DNA, 195 bp, Homo sapiens
aacaaggtgaaaccccgtctctactaaaaatacaaaaattagccgggcgcggtggcgggcgcctgtagtcccagctactcgggaggctgaggcaggagaatggcgtgaacccgggaagcggagcttgcagtgagccgagattgcgccactgcagtccgcagttcggcctgggtgacagggcaagactccgtctca

SEQ ID NO: 8790 - DNA, 1165 bp, Homo sapiens; identical to SEQ ID NO: 8786

SEQ ID NO: 8791 - DNA, 295 bp, Homo sapiens; identical to SEQ ID NO: 8041

SEQ ID NO: 8792 - DNA, 1752 bp, Homo sapiens
gacgatgaagaaatagcgttttatttctttacaaatttatagccaagacaataaatcactccatagaaaaatttaaaacaagatacattcttgtgaccttcataacagatggagtagttagtacaatagtgaaaactgcctgctgggatgtcaggttgcagcattttgtcaggcttgaatgaaaaagaaagtccaacattagtaatggaatgggcaactgacaaaggtgccttgcccttagactcaaattgtttttgtgaataaccaagagagatgaggttagtgcagtgccgggtcttccctaagcttagctacctttgcaaagtacatgatataattcattgtgggttgttttgttcatttggggatttatttggcttcaagactacacaattatatctttgccttgactacttcaagctagatccagataatcacgtccaatcttcttacagatgctgttgtgtgacaatggctgtaaacacatgtcattaactgtctccttaaactctcacagtgatacttcttgggtcccacatcttccaaagaagtccagcatacacacacactcacccacccacaacctgtcccacatccccagaaaagagaaagagtgaaagatgcttcacaaaatcggcctcagcctggtgttcaagttgcctcgctcaatatgcctgtgcagtcagacctgcaggaagaaacagctcatttttaaactactgtatatgaaagtttttgcctggagatacatcacagataggcagatcactaaaaagaagagtggattgaatcagagtgaagtcttcagttaactgtttgtttattgcctgtgaggtccaggacagtttcctttattctctcttccattctcatctttgaaggtaaaatttcatttctttccccttcctatgtcctaagatgccctgaagacacatgagaaaatgtggctgattccccagggatggaagccagcaaaaatgcacagaagggagatgggaacattctcaagggtccttatattgagaaagaaaatgaatggattagtggtgctgtggtgatgaactatctgccctaaaactcctgccaagatcagccagctgttctctggctaggctgggtctcaggggtgtgagtgggtcttggccagctgagttgaaccatttctcacctcttgatagtcatgcagcctacatctgtctgatggaaccctctccctgtgtgcttcccatttaagagaggcacaatttgacccatgttatggaagaaaacagctagagcgttctacaggaaaagtgctataataggtcctaataactattcacactgtgttattactatgtgctatctagttctagtttcacaagcagtagaataatttcctacctctaagatgcactgagcattgacaaacaggaaagaataacacagctgggaaaatgctgacctagaaatgctactgtttcatgacacatacaaaatcaatcctcattttttattctaagtatttcagcgactagtagactttcagaactggaatttactcatcaaatgttctatccatatatgccatattagctttagctgagcttaccagttttctgaaaatgctctactatggcatgaagctaagcattccagaagcaagagcagtgattagaatagttccagggccagaggataagtttgaagatgaaatataagatatttcatgaattgtgacatatataaaatgatatcctgggtgtatatatg

SEQ ID NO: 8793 - DNA, 196 bp, Homo sapiens
aagaaaacaaaagcctgccaaatggttataacctacaagttggttgaatagaagccaccaacccaataaaacatttgccatggaaacatattaaaggaaaaagcaagccttctccatctcccatcctacacacatgcaaacacacacacacacacacacacacacacacacacacacacacatacacacaaattgg

SEQ ID NO: 8794 - DNA, 196 bp, Homo sapiens; identical to SEQ ID NO: 8793

SEQ ID NO: 8795 - DNA, 1752 bp, Homo sapiens; identical to SEQ ID NO: 8792

SEQ ID NO: 8796 - DNA, 196 bp, Homo sapiens; identical to SEQ ID NO: 8793

SEQ ID NO: 8797 - DNA, 2383 bp, Homo sapiens
ctaaacccacagctttaagttcttccctaaaagaagcattgcagctaacccttgaactcacagttttaaaatacagtatttctcttctccacatctccatgccttcgcatcaatgcttgtttttcctggtgaacactatagataatctcctgtttgaaatgtgggacagggtgtttcatggcagtggagctaagtttctcctctttatagtgaactggtgacccaaatgtccctgtcatttatagtgaactgatgacccaaatgactccctgtcagtagagtcccatgtggcccatgcttcacacaagcagaaatgaacgcactgtttttaaggctagattatcagttctagaatgattacttcaaagatgggagctacctcctcagatattcacactatgaaatggaggtgcttgatgtgtttcacactggcttgtttgacagtcttctatcttactgttaattcagcagtattttattgtgaaagaaaaccccagtgtttgagctcactcaggaattggggagagagatggaccaccactgtggtgcatttcttaagtgttctgggagaatgtcatacttttccttcccagagtaaaagaaacctttgggagatcctgagggagactgtttctccccaagtatgatgatgtctagtcaagtctaagaataccactggacatgttctatggacatttgggattgcagttgctattctgatttgattggtcctcagtcaaatggatcactttgaaggaaagctttggttgtcaccgttatataccactgagataaagtgttagcaaagtatggttcaaattaacttatgacatgaccaagagcttttctcttccaaaagatgaattgtattgtaaatagtttctcaaaatatttttaactggatcatgagcatggggagagaaagtttctcagctgctaagaatttccccactgtttacttctttcacttatggtggtattgcatttaagattacaaaatttaaggttttatttgtatctattacccaaaccattaaattgtctttaatttcattgttgtcttggaggtccagtgcatacagggctgatgggggaaaactccctctagccagtcagcactctaacccaggattaaaccatcccatcaagtagtatgtgaagtcaagtcttcgtactcttgcagaccagacattgaaatggattcattcatatagatttctataaatcctataagtgaaaagatagacaactgtccgcagttgcttttaaaaaaggtcactataataagtactatatagtacagtattaatttatagcaggaaatcgtatcttgtaaactgtatataaaacactgttttatggtgcaatcatttgtcaaacttttgtctgtttcattgtttttagagtgtgtgcattcttctcatacctaagaatatcactgtaaaatctgctgaaaactatttttaggttttatttgcacaagactgaattagtttgacatttttggaagctcctattgaacatacccaaacatctgtaaacatgaaaaatcttcaatttattaaaagcaaacatttcagtatgattctttccaaaggtaatccatgttctatgttgttaatgtgtgtatgtaatttttctgactcttccacctcttataaacctattttctgtttcatttgttttgtttttgaaggatggctcttttttctttttaatgttctagatgaccaaaacactattggtttttacccttttgcctaaagctttgatatccccacttgatgttctgtgaattcactgtttaatctattaagtgaaataataaatagtcctggtgacaaacaatctgttgatttagaggaaaggccctgaaaaatacagtattggaaactaactttgcatatgctgttagctattattttgcatcatgggcttcatgggaagaacatgttgcatttattttgtctttattaaaagactactagccacaagttactctgattatagtaactgttttatcaacccacttcatctttaaaaaattaaatttacattcacaattcaaaacagtaagctgtctttcagaaaatttttgaaggataaaaacatgaaggaaaaaagtggcccgtgtaggtaggattccctacacaggacttttagttgtatcacctcaagagattttgaagtttgtgatcaaggtctgtatattatcccaaactttattaagaattgttttctaattggttataacatttttcaattaatagtttcaaaacaaattgttaatacaactgtataaaatgaacataattttcctcacttgtatttttgttattgagcaagtttatcaaaataaattgtctactaaagaaactaaaaa

SEQ ID NO: 8798 - DNA, 537 bp, Homo sapiens
cttatatttatataaatatatataatatatatattttgctgatgcagtatacagtgtgtatatatgtgtgtgtgtgtgtgtgtgtatgtgtgtgtaaatttatatacacacacatgcaaacagttcctggaagagaattctgaatgctttgctagcaaaacactgtggtgtgcaaacctagaacccaatagaaaaaaaagccatttatctgaaggctgcatagtggagagagtcttcagtttacctcattctttgtagcagcccttgattttaacaggtttttgtaataggtacagataatcccatacctttctaggtgcgattttaagttaagctaaaaattatttgtagggttaatttatttgtatatgatagtagaaggtaagatcatgtcaaaccttataatttggggaatctgacactatttaaattattggcaactgttgtctgttgtacagagattctttttctactggctcagtctgttacattaataatgcattttatatgttcaggcacactttacataaatacaaa

SEQ ID NO: 8799 - DNA, 4586 bp, Homo sapiens
aaaaacaccaagactagaggactctgggttccttttatgcaaagtcaactcttctgggtcacagttacccagcaacaaaaataaaggtagttatttataaatggtattaaagatagaaagcacaatgtatattttttaagagttttggttcttttcccaggagaagaaaacactgtgggttggtattttcaagcacattcaagggttttacaaatcagccccagttccagtcacacacaatctaagaccacccaagataacatttcaagaagagatttttcacaagactataaaatttcagtgctggatgaaatgtcaaagagcatgtccagtgttttcactttccaggtgaggaaatcgaggcctcagacttttccaaagtcactcaactagatatcagcagagcactcgtctttgacatgtgggccttggacttaagaccaacattcatattctctagccattgaaccagtcttccttcaactggtctccattcactctgatccatccaaatcaattctgccaagatactcataacacaaaagaaagcatattatttccatgttcacatttctgtcattcccattgtctacagaatgaaatccaaactcctttagcatagctttgacaagctttcgtgatctggcttcaagctctctgttcagtcatttcccacctctctctctcgtcacttcttactgacaaccagcctgttctccattctagattcactacaacctgctccctgccccggttgtgtctgtaccacctcctctcagttttaaagtcctcccatatttgaaatatatctaatcttttgtgctttgtgtctctttttcttatgcttctgtaacagaacttgctaaacaggcatagactgcctggattaaatctcaattccaccattccagttgtgtgacccttagtaaatcatgtaacttacgtgagccttggttttttcatctgtagaatgggactaataatattacccacttaatggggctattgttggtttaaaggagataaagttccaagcacatagtaagcattcaaatgttagttgctgatattgtcattagtaagtgcttttgtataactatataaactcttgaatgcaaagagtatggcttcctcattgtgtactcactagaaacctggcacagtgctttacacactgaattatgaaaattaaagttggggctaggtgataaagaaaaattatgaaaccatatttcctggagatttgaaagacagagtcatcaatctgccaggtttgtttcagtgaacttcctcctgaaggcagaggcttgcctaaatcagcctttataaggatggttactttattaataagtatttggctatataatatatcagttccattgatctccttagaatttccccatggactccagatcctttactactgaactcacagggctgtaacactgttactgtacagagaggaccaggacgatgccagcaccccgtttatcctgagtgaactctccggaggcctcttcaagcttgtgggttctctgctgtcttgaagccatccatccatttgataggttttgcaaagacttggtcctgccaagatggttttaatcatttctgctaaaaggaatggactcgaggatttgatctcattttagatgcagttgtcctcacttggccattttacagcactttagtaaatatggccagtgtatttggtcactattaaatcaatccccattcattatctgtcagggcaactcagtgaactaaatactatgttctgacctctggcactctttctcatgttgtttaaatatttaatattgtctaaggcaattcaagtattttcttaaataaaaaatatgaaaactcactcttttccattcctttgttttctatgacaaatgcaaagaagttgaagaaccaaaatcctttccattttccataataaattgctctttaaaaactgacatatctaagaaggcttttgactacctcatcttctaaatgttttactaagataggtagtaagcagcaaaatgaacttatttggtgcagtcccacccttacatgcaccactccaatactttacctaatttctgccttcagggttatcagtaactttttcctgccttatgtgctattgtggagaaagaaattatgaccttgagccgggacacaaattttctttttacaataacatgtatctgtagatttttttaaaaaacacaaaaataatataggaaacaaaaagttccctcctccacaatccaccttccagagataaccattgttaacagtttattgggtattttaacagacattttactgatcagtttaacaaaagcaagatattatctatacctgccactgctttttttttttgagacagggtcttgctctgtcacccagactggagtaagtgcaatggcacaatcctcagcctcaaattcctgggctcaagcgattcacccacctcagcctcccaagtagctgggactacaggtgcatgccaccacggcctgctaattaaaaaaaaaatttttttttatagagatgggggtctcagtatgttgaccagggtcgtctcccagtctcctcctgccttggcctcccaaagtgctgggagccaccatgcatgccctgtggctttcttttttgacttaatttgtgatgtagatttttctgtgtcagtaaatatagagcttcctcattttaaatgcatagtattccatttgatacatatcaaatatgtgtcttcccattttgatgtacatgaggttgcttccagatttttgttattgcagataatgctgctgtgaacttaggccttggataacaaaaacttctcaaatgtcataataacctgacattctaactgaagcgtatcaactattaaaggaattcctattttcaaaagcactgtggttaaataatagtggcattctctacgtttagagaaggaaactaacagtaaattcatgtgttatgtgctttcccatatgtcatcttaatcctctacctgtgaagtacagggtggtgttttatagactacaaaaccaaggatcaaaaggctgaacaccttactccaggttctgtaactagcaactggtgaatctgggtttcacagccaggctccctgacttcagatctaggactcctgctgtcctgcattgccagtgtggctgatctaaagggaataaaaataacttgtcccgcttgcatgattccttggctcaaacatgagcagctaaatctatggtttgcttcttctggatgtggaatgcaaacaaccataaaaggtggtccctatttagaaacactttccactttgttgagagaaaaaaaaaaaaaagtaagaaaaacctcccacttattaagttgtttgtgtcaaatcttccatcattcccctctcattgttgagctttctctttgtaatcattgttcactggtttttgggtttggtttggtttttggctgctcactgcagcctcgacctcctgggccaccatcttcccacctcagcttcccaagtagctgggaccacaggcacgcaccaccatttctggctaattttaaaattttttgtagagatggggtctcactttgttgcccagactggtcctgaactcctggcctcaagcagtcctccagcctcgacctccaaagtgctgggattacaggcatgagccaccatgccccagcctgttggtattttatagtgccgacttccttgatggatgaagctagatgagggcattgattttactggggccctttcaggattccagcacccagggaaattttcccaaaccagctgctcctcacccctactcccaaagcacttaaaactcaactggatcccttctactggactggtaggaatttactggttattggagtactctaagttgtgcagaggttcgtggttcaaacatttggaagtccctcaccccaccccaccccccgccaccacccactagttgatcatctgtctacatgttactgctgagacatcagttgtcccaggctaaatgaggcagtagttttactgtgttcgtctcacacttggggaatgacaaactttggtgagctaggaactcctgtgtctggactcttccctgaatgcaccaaggacccactttctcttagatattgccatcttaccaaagtattgccaccaaacatggaacaagtttctactccctctgatttttagatctctgattttttttttaatctgtctgggagaatatcatctcccctttggctttcctgagaggcatgtttgcctaataccatggtccctttggtttcaaaaaaaaaggctctttctttttggaaaatcgttcctttcctaccttcgggccatgtggtttcatggggccaatttcacgttctggcttcagagctcgacagaagccagacttggacagagtcatggtgacagattcagaaattagcatggcatgtgactagcctgggactttgctggaatagagttgctaagttgtaaggaaaagtttggtactgctggcagccacacctgaagagcctcctgatcaagccatcctagaagaaaggaagct

SEQ ID NO: 8800 - DNA, 576 bp, Homo sapiens
agatccacttcccataggctcatcacctggcaatccccaattctctgtcacggtagttctgcctttttaaaatatcatatacataaatttacattatctggtcttttgtacctggcttatttcacatagaataaatgttttgaagtttatgttgtgtgtatcaatggtttgtttcattttgttgttgagtattctactgtatgaatataccaaaatttgtgtgtctgttcaccgattgattgacatttgggttattacaactttaaagctactataaataaacctgctaaaaatgtttacataagagcttttgcattggtatagattgtcatttctctggagtgaatatctaagaggagaatttctaggttatatgataagtataaccatattgttaagcattctagttgatgtgtagagaaagacaggatcgaaagcaattaaaatgaaagaatatttcaaaagataaaagagaatatagaataacatggttataaaagccagtggaagagtgattaagggatggaaactggagtttcaatgttagaacttcagaaattgaaaaaaaaataaaaa

SEQ ID NO: 8801 - DNA, 576 bp, Homo sapiens; identical to SEQ ID NO: 8800

SEQ ID NO: 8802 - DNA, 576 bp, Homo sapiens; identical to SEQ ID NO: 8800

SEQ ID NO: 8803 - DNA, 1413 bp, Homo sapiens
tactcatacaaattcttagtatatggtgcgtatactgtcaatggtagttatcatcatcatcattattaatgggagcccattatgtgtgctgtcttatttcatcttcacaatattcacatgaaataagcattatctgtactttatgaataagaaaactgaggctcaaagacataaatgtcttaatcaagtcacccatctattatcagaaagaacggggatttgaaaatgcatcttcctagagacaaaacttgtttccattatgccacagattttactatgtaccacggctttaaaaataataactcttaggaggacttatttataaaagactcctggtattgcaggaggaaagtaaatatattttcatgactctgcatctaactctgggttctttccttaattccattgtgtgtgtgtgtgtgtgtgtgtttttttttaaaggaaaaatacccatagattttctcttgcctcagtgcaacattgcagatgatccctagtgatgacctttcccaaagttacattgtagaattcattggctaataccggctgataccaccgcatgaggtgcataattaagtgatgtggtggcaagaccagattcattatcgtagacggtcatgtgccctgccatgacattttggtcagggacagactgcatatacagtggtgtgcccataagattataatggagctcagctaaaaattcctattcttggtgacatcatagccgtcataacaccgtagtgcaacacattactttttctatgtttaggtaagtttctatacacaaatacttaccactgttttgccgttgcctaacatattcagtacagtagcatactgtacaggtttgcaacaggctataccacaccgcctaggtatgtagtaggctgtaccatctaggttcgtgtaagtaaattgtatgatgtttacacaatgagaaaatgttccatttcccagttcatatcctccttcttaagcaatgcatgagtatctcttctgttcttatgctttcctcttccaggaaatagatataagttgtgtcctagcaacaattttttgcttcacataatatctaaagatatctaaataaattaagattcactaatgactctagtggcttttaatgccatgagatattcctactagttctttctgtcattggtttattttcattatgtagattagaaatgaataaaaattacttccttattttacactaatactaataaatgcctctgatttttagagaactgtaatagatatatgatgtgttactctctttgactatttgtataattttgttttttaaagatacatctagattaaaaactactgttgtaagctgttgaaatcttccatatggccaaaattctgtcactgcctatagaaattccaaaagaagaaaaataa

SEQ ID NO: 8804 - DNA, 1414 bp, Homo sapiens
  SITE (1413): n equals a,t,g, or c
tactcatacaaattcttagtatatggtgcgtatactgtcaatggtagttatcatcatcatcattattaatgggagcccattatgtgtgctgtcttatttcatcttcacaatattcacatgaaataagcattatctgtactttatgaataagaaaactgaggctcaaagacataaatgtcttaatcaagtcacccatctattatcagaaagaacggggatttgaaaatgcatcttcctagagacaaaacttgtttccattatgccacagattttactatgtaccacggctttaaaaataataactcttaggaggacttatttataaaagactcctggtattgcaggaggaaagtaaatatattttcatgactctgcatctaactctgggttctttccttaattccattgtgtgtgtgtgtgtgtgtgtgtttttttttaaaggaaaaatacccatagattttctcttgcctcagtgcaacattgcagatgatccctagtgatgacctttcccaaagttacattgtagaattcattggctaataccggctgataccaccgcatgaggtgcataattaagtgatgtggtggcaagaccagattcattatcgtagacggtcatgtgccctgccatgacattttggtcagggacagactgcatatacagtggtgtgcccataagattataatggagctcagctaaaaattcctattcttggtgacatcatagccgtcataacaccgtagtgcaacacattactttttctatgtttaggtaagtttctatacacaaatacttaccactgttttgccgttgcctaacatattcagtacagtagcatactgtacaggtttgcaacaggctataccacaccgcctaggtatgtagtaggctgtaccatctaggttcgtgtaagtaaattgtatgatgtttacacaatgagaaaatgttccatttcccagttcatatcctccttcttaagcaatgcatgagtatctcttctgttcttatgctttcctcttccaggaaatagatataagttgtgtcctagcaacaattttttgcttcacataatatctaaagatatctaaataaattaagattcactaatgactctagtggcttttaatgccatgagatattcctactagttctttctgtcattggattattttcattatgtacattagaaatgaataaaaattacttccttattttacactaatactaataaatgcctctgattttttagagaactgtaacagatatatgatgtgttactctctttgactatttgcataattactgtttttaaagatacatctagattaaaaactactgttgtaagctgttgaaatcttccatatggccaaaattctgtcactgcctatagaaattccaaaagaagaaaaatna

SEQ ID NO: 8805 - DNA, 1413 bp, Homo sapiens; identical to SEQ ID NO: 8803

SEQ ID NO: 8806 - DNA, 729 bp, Homo sapiens
ctggaaccaacaagaaaaccttaatatggaactgcaatgatgggaatttggggcattgaaagaagttgggttggcaacattgcttgggtgatttccttgctaacattgtactgtaaggtgtgagggcctttgcattagactctgactgggctctgtaaacctgagcctcattcttagaacctcttgagccccttgatgttgcccagtcaagtccatagtgactgtaggggctgaacttcaagggccacttttgcttatagccatcacctgagagcacctccagaatcaaatggccttgggaagtacttgccccagagagagttttaaaaattattctgtcaatctgactcaattccttgtagatagttcatttccaggcatgtattttcttggagtttgttaaaaacaatggaaaaatcttatcttaaaagtacctcttgggccgggtgcggtggctcacgtctataatcccagcactttggaaggctgaggtgggcaaatcacctgaggtcaggagtgtaagaccagtctgaccaacgtggtgaaaccctgtctctacaaaaatacaaaaattaaccaggcatgatggcaggtgcctgtaatcccagctacttgggaggctgagatgggagaattgtttgaacctgctgcattccagcctgggcaacagagtgggactcaaaaaaaaaaaaaaaaaaaaaaaaacctccctaaaaatgcaactcaaag

SEQ ID NO: 8807 - DNA, 732 bp, Homo sapiens
ctggaaccaacaagaaaaccttaatatggaactgcaatgatgggaatttggggcattgaaagaagttgggttggcaacattgcttgggtgatttccttgctaacattgtactgtaaggtgtgagggcctttgcattagactctgactgggctctgtaaacctgagcctcattcttagaacctcttgagccccttgatgttgcccagtcaagtccatagtgactgtaggggctgaacttcaagggccacttttgcttatagccatcacctgagagcacctccagaatcaaaatggccttgggaagtacttgccccagagagagttttaaaaattattctgtcaatctgactcaattccttgtagatagttcatttccaggcatgtattttcttggagtttgttaaaaacaatggaaaaatcttatcttaaaagtacctcttgggccgggtgcggtggctcacgtctataatcccagcactttggaaggctgaggtgggcaaatcacctgaggtcaggagtgtaagaccagtctgaccaacgtggtgaaaccctgtctctacaaaaatacaaaaattaaccaggcatgatggcaggtgcctgtaatcccagctacttgggaggctgagatgggagaattgtttgaacctgctgcattccagcctgggcaacagagtgggactcaaaaaaaaaaaaaaaaaaaaaaaaaaacctccctaaaaatgcaactcaaag

SEQ ID NO: 8808 - DNA, 730 bp, Homo sapiens
ctggaaccaacaagaaaaccttaatatggaactgcaatgatgggaatttggggcattgaaagaagttgggttggcaacattgcttgggtgatttccttgctaacattgtactgtaaggtgtgagggcctttgcattagactgactgggctctgtaaacctgagcctcattcttagaacctcttgagccccttgatgttgcccagtcaagtccatagtgactgtaggggctgaacttcaagggccacttttgcttatagccatcacctgagagcacctccagaatcaaaatggccttgggaagtacttgccccagagagagttttaaaaattattctgtcaatctgactcaattccttgtagatagttcatttccaggcatgtattttcttggagtttgttaaaaacaatggaaaaatcttatcttaaaagtacctcttgggccgggtgcggtggctcacgtctataatcccagcactttggaaggctgaggtgggcaaatcacctgaggtcaggagtgtaagaccagtctgaccaacgtggtgaaaccctgtctctacaaaaatacaaaaattaaccaggcatgatggcaggtgcctgtaatcccagctacttgggaggctgagatgggagaattgtttgaacctgctgcattccagcctgggcaacagagtgggactccaaaaaaaaaaaaaaaaaaaaaaaaaccctccctaaaaatgcaactcaaag

SEQ ID NO: 8809 - DNA, 459 bp, Homo sapiens
tgggtcagacagaggactttattattcacagtggtaacagtagtcatgatatcagcatttgttttttgcaccagttcttcaagccctgattctcacagagcgacttgcagaaggccagttgtgcacacacagtgggttgcattgcaggaaaggaaccctgaatataaggtacccgaatctcttatactggactgcaagcatgcctgctttttgttcttaagggagatgctgtctctgtcttccaagtctgtaagcatacctgccctttgctctggaggaagacactattctctaagtctattcactataaaaatatccttgtaatgatagtccagaacaaagatagtcattgcctctgcttaaatcatgtacagaattgcaagagacccacggagaattatctaccaacaatatgcatcatagaaatttagaaaacagaagaaaagtcactacagtcct

SEQ ID NO: 8810 - DNA, 1025 bp, Homo sapiens
gtgaatccccagcctgaggtcgtgcttaagtgccacctgctcaagagagaaggcttcctgcccgcgcccatgatgtaagtccccccagatgctttccaccatcctgtcctttgtctgtaattgcgcttgtcgcttgaacagaatcctaattgtgctgattacatgtttaattttggtctcccctgtaagacaggcatgctttttggaggcagggactgaatgtcattcacatctgtgctcctagggtctaatacatgatggtgcattgtaagtattcagtatataacttgttgaataaatggatcgggtttagcattttcccccattggacctggattgacctggaaattggtggactgaacctgcaagtagagattaaaggacctaacaactgtagagtggctggtgaaggtagatataagtgcagtaagggagggagtcgttgatgttgttttggttcgtagtgcagaataaagctacttatggaaatatacgactcctactcttagtttctgctttgatgtggttactgctgttgtttagcgtaagcatataaacaaatcactggcttagtgggttaatttttcttctcttttgttaaacagctgagtttttgctgttttcaaagttagccaaaaattccattttcatgtttaaatgatttagaaaaatcatttttctttaaaaaataacagtacataaaaagaaaacattctcggctgggcgcggtggctcacgcctgtaacccagcactttgggaggctgagacaggcagttcacctgaggtcaggagtttgagaccagcctgaccaacatggagaaactccgtctctactaaaaacacaaaaattttagccgggcgttgtgccacgttcctgtaatcccagctactcgggaggctgaggcaggagaatcgcttgaacccgggaggcagaggttgcagtgagccgagatcgtgtcattgcactccagcctgggcaacaagagcgaaactccatctcaaaaaataaaaaataaataaaaaa

SEQ ID NO: 8811 - DNA, 459 bp, Homo sapiens; identical to SEQ ID NO: 8809

SEQ ID NO: 8812 - DNA, 1024 bp, Homo sapiens
gtgaatccccagctgaggtcgtgcttaagtgccacctgctcaagagagaaggcttcctgcccgcgcccatgatgtaagtccccccagatgctttccaccatcctgtcctttgtctgtaattgcgcttgtcgcttgaacagaatcctaattgtgctgattacatgtttaattttggtctcccctgtaagacaggcatgctttttggaggcagggactgaatgtcattcacatctgtgctcctagggtctaatacatgatggtgcattgtaagtattcagtatataacttgttgaataaatggatcgggtttagcattttcccccattggacctggattgacctggaaattggtggactgaacctgcaagtagagattaaaggacctaacaactgtagagtggctggtgaaggtagatataagtgcagtaagggagggagtcgttgatgttgttttggttcgtagtgcagaataaagctacttatggaaatatacgactcctactcttagtttctgctttgatgtggttactgctgttgtttagcgtaagcatataaacaaatcactggcttagtgggttaatttttcttctcttttgttaaacagctgagtttttgctgttttcaaagttagccaaaaattccattttcatgtttaaatgatttagaaaaatcatttttctttaaaaaataacagtacataaaaagaaaacattctcggctgggcgcggtggctcacgcctgtaacccagcactttgggaggctgagacaggcagttcacctgaggtcaggagtttgagaccagcctgaccaacatggagaaactccgtctctactaaaaacacaaaaattttagccgggcgttgtgccacgttcctgtaatcccagctactcgggaggctgaggcaggagaatcgcttgaacccgggaggcagaggttgcagtgagccgagatcgtgtcattgcactccagcctgggcaacaagagcgaaactccatctcaaaaaataaaaaataaataaaaaa

SEQ ID NO: 8813 - DNA, 459 bp, Homo sapiens; identical to SEQ ID NO: 8809

SEQ ID NO: 8814 - DNA, 1025 bp, Homo sapiens
gtgaatccccagcctgaggtcgtgcttaagtgccacctgctcaagagagaaggcttcctgcccgcgcccatgatgtaagtccccccagatgctttccaccatcctgtcctttgtctgtaattgcgcttgtcgcttgaacagaatcctaattgtgctgattacatgtttaattttggtctcccctgtaagacaggcatgctttttggaggcagggactgaatgtcattcacatctgtgctcctagggtctaatacatgatggtgcattgtaagtattcagtatataacttgttgaataaatggatcgggtttagcattttcccccattggacctggattgacctggaaattggtggactgaacctgcaagtagagattaaaggacctaacaactatagagtggctggtgaaggtagatataagtgcagtaagggagggagtcgttgatgttgttttggttcgtagtgcagaataaagctacttatggaaatatacgactcctactcttagtttctgctttgatgtggttactgctgttgtttagcgtaagcatataaacaaatcactggcttagtgggttaatttttcttctcttttgttaaacagctgagtttttgctgttttcaaagttagccaaaaattccattttcatgtttaaatgatttagaaaaatcatttttctttaaaaaataacagtacataaaaagaaaacattctcggctgggcgcggtggctcacgcctgtaacccagcactttgggaggctgagacaggcagttcacctgaggtcaggagtttgagaccagcctgaccaacatggagaaactccgtctctactaaaaacacaaaaattttagccgggcgttgtgccacgttcctgtaatcccagctactcgggaggctgaggcaggagaatcgcttgaacccgggaggcagaggttgcagtgagccgagatcgtgtcattgcactccagcctgggcaacaagagcgaaactccatctcaaaaaataaaaaataaataaaaaa

SEQ ID NO: 8815 - DNA, 5507 bp, Homo sapiens
ccatacatgatctatgactcgtacgccatgtacctctgtgaatggtgccgaaccagagaccagaaccgtgcgccctccctcactcttcgaaacttcctaagtcgaaaccgcctcatgatcacacatcatgcggtcattctctttgtccttgtgccagtcgcacaggtatggccttccaggacagcagaccagcagctgggttgagctgggtgtctttttttttttttttttctgagacagtctcactctgccgccccagctggagtgcagtggtgtgatctcagctcactgcaacctccgcctcccgggttcaagcgattctcctgcctcagcctcctgagtagctgggattgcaggtgcccaccaccacgcccggctaatgtttgtatttttagtagagatggggttttgccatgttggccaggctgatttcaaactcctgaactcaagtgatccgcccgcctcggcctcccaaagttctgggattacaggcatgagccactgcgcccggcctgagctggatgtcttgaccgttacttaggagtcgggattgcccctcttttctttgccactcataggcacccattctccttgtgcctgctgcttcagagccacctcccccaggtgaatagtggaggaacaccattacacatgaaacgttcatgatcctccttaccaacatcaacatcaacatactttttcttttttgagacagggtttcactctgtcaccccgggtggagtgcagttgttggatcacagctcactgtagcctcaaactactggcctcaagtgatcctcctgcctctgcttcccaggaagctgggaacacaggcacacactacaacgtccagctaattcctgtaatttttgtagagtttctccatgttgcccaggctggtctcaaactcttggactcaagtgatcctcctgcctaggcctcccaaagtgctgggattacaggcgcgagccactgcacccggccccaacattctttttaacaaacccccagcgctctgtgattccctagcgtttgtcagaggttctatccttagttcaatacaagataaaaacaatataaaatacaaatataatacaaagcaacataacagtgccagagagcactgtgtggattattcttaggtcacaaaacacagattctcaaagcaaatagcctcctactttctccccagatccatttccccataaaagcccacccaacaaagaaaagcaatgggaaagctgaggggaaattcctcactcttgagtgcctggccaggggaaggcatgcgtttttttttttaattattcatttatttagttattcatttttttgagatggcgttttgctcttgttgcccaggctggagtgcaatggctcactgcaacctctgcctcccgggttcaagtgattctcctgcctcagccttccaagcagctgggtttacagatgcacgccaccatgcctggctaatttttatatttttattagagacggggtttcaccatattggtcaggctgatttcaaactcctgacctcaggtgatccacctgcctcagcctcccaaagtgctgggattacaggcgtgagccactgctcttggccggcatgtagttttattttattttttaaataaagagatgggggtctccttatgaggcccaggctgatcttgaactcctgggctcaagggatcctcccgtctcagcctcccaaagtgctgggattataggcgtgagccaccgcgccctgccaggcatgtgatttaaaagttcatagcttgctaaatattagaagctattagtcttatgctgtagatgaagaaactggggctctaagagtattcttatatctctcagtggtactaagtggcagagctgatattttaccatgcttactgctttcttgaaaaaagaggccgggcgaggtggctcatgcctgtaatcccagtcagaagttcgagaccagcctggccaacatggtgaaaccccatctctactaaaaatacaaaaattagccgggtgtgatgctgtacatctgtagttccaggtactcaggagcctgaggcaggagagtcatttgaacccgggaggcagaggttgcagtgagctgagatcacgccattgctctccagcctgggcaacaagaacaaaactccgtctcaaaaaataaaaataaaataaataaataagggtaacgtgcattaaattctttaagaagtgtctgggacctaccatctaggaaccagaacatctagggtgctttgagaccctaacatctagcacagggcctggcacattttgttgaaccaaacaggctgagtgtcttggcatgactaagttcgatacacaaaagtaggcttgcagcctgtcttccggctgtcatcaaaattcagagcttggtgtgggacgccgtcatcctgtctgaatttgcctctggatcctagggcttggaccatcaaagtgctgttgccacggaagcagcggtacagtagtctgcgcttgcctattgagcgtcctttgcccgtcacagttacccttttcagtagccctcgttggaattttccttctggtggtttcttaacctccacttacttccccttttcgtttcgtcatccgcagaggctccggggagaccttggggacttctttgtcggctgcatcttcacggcagaactgagcactccgtttgtgtcgctgggcagggttctgattcaggcatgtatgaatgaaatgacagagagtgtgagggttctgattcaggcatgtatgaatgaaatgacagagagagtgagggttctgattcaggcatgtatgaatgaatggcagagagagtgaaggttctgattcaggcatgtatgaatgaatggcagagagagtgagggttctgattcaggcatgcatgaatgaaatggcagaaagagtgtgggagggagtggattctgcttttccttcggagatggtgggtgtggagaaatccctagtgccaggagagtgggatgagagatccttcaacagccttaaaggtcagctggtcatctcagccagtgggggtgaaattgtaggtttgatctaagtttgatagtttgatacagctcattctattttttccctggttacacacatactttaatccacggttcctgtactcctgtcagctgggtggcctgggtcaaattcaaaatcactattggagaaaatgaggttatttgcacatctcaatatgatagtgttcaagaatgtcttctccaagtgttagaaaactagacaaacgtctgggcgccagggaatctgacagccaaggtcttgatgagcacctgcacctgtgtggcatttactgtggtgggacttgggcccgtcgctccctgatgcccagcttcttggtgaccttacctttttccttcctcttctattgcagctaaagcagcagcacacccttctgtacaaggtgaatggaatcctcacgctggccaccttcctttcctgccggatccttctcttccccttcatgtactggtcctatggccgccagcagggactaagcctgctccaagtacccttcagcatcccattctactgcaacgtggccaatgccttcctcgtagctcctcagatctactggttctgtctgctgtgcaggaaggcagtccggctctttgacactccccaagccaaaaaggatggctaaatgctcctgggagtcaggcgcagcctcacaccagctgcctcctccactcagcattccatggaccaaattgtgccctgggtagcctcagactttgggtattgataagccgatggatttgagtttttctaaagaatattcatattacctccttcttctaacttgccctatttgcaaaagcacttttgtagtaacaactattgggtcctgtcagacctccacggacagcaaagtggttttaatgcaagcccaaggatccttcttaaggtcttatctcaagagctctgggaggtggaagcatggggtgggatcggtggaccagggtggtaagtgtctgcacatctgcctgtccctgtatcagcggctacccaccttccaaaccactcaggacagtacccgtggcactgggcccgcagaagcaagggatgacttggttcttggaagtaatgtcgtcttgtgacattggcctgggacaatcattgtgggtaggtagttattgatcgtttactagataacccattggttctttgcctcatcctctcatccatgggtcagagttgaattcttatgtctatagacttccaatcagaagtctcactggtggggctgggggtgggggcaggcaggaggcatggatgggaacctgagtaggtagtgtggccaagagatcagcacaacctttgcaggctgacttgctaagtctgacagtgacaaacttgtgagcttactgcagtcagtcacagaggctgttctttttcacacaccccttcatgcccggctttccccatatccacatgcagagggcgagctcataaaactacagggaagcgtgaaatgatggctttggtagctgtttactgggtaaccccactgtgacactgtccttttcatgtgatgtggaaacctacttctgtcctccaaaccatgaaatgtgtcatctagactgcagagtacttgagtgctttgcctcccgatatgccagagcttgtggtccaaagcccattcctgtgtgtccgtcctgccatttagccacagaaggctgcggagtgaggcggcagctagcctggccagtggctgtcccgtggaccgacacctgcgcccccttctgcaagcaggattttctggtgccaacactcattcatcattcccgatcaactaggatgaatttaagactgtgctaccatgtgttctcaagtggtagtttaaaaagtggatttttaaagtgcctttcaattgtctgtgaacgtctaaaggactgatttgtctcattttgactgttgagtctttaatgggtgccatttaaaaaacaaaatgctattttttaattgtcttttttttttaactatcagtgtatctttaaaagtcaccttacggtgattaaattgcactaacattcccaacttattctcatttgtgaaatacatcaatatcagtgtcctgtaagaatcatcctgtgacctagctcgactggctgccgtgtgctgtggctcaaggtctgtgtccatgtaactagcagaggggtgtgtgtgtgaatgctttcagcctccagaaaggtctagctcacacctcactcaaacctatttttgtggttcatggtctcagtaatacattgaaggttcccagagttcaagcgtagtggtcacacgtaacttgagaccgtttcttctcttcataagtgaatcttactaggaattgggagagtggaagaccgattattggtcagggagccaagcctactttacctgaggagaacctgagtaatgccccattgtgaaggagggtgtggatatggagggagtgatgggacatattttttccccct

SEQ ID NO: 8816 - DNA, 10785 bp, Homo sapiens
caggcacgcggcgccagcgaggcggccggacccgcagccccgatgctgctgacgctggccgggggcgcgctcttcttcccggggctcttcgcgctctgcacctgggcgctgcgccgctcccagcccggatggagccgcaccgactgcgtgatgatcagcaccaggtaccggcgccgccgagacgccccccgaggcccggggcgctgcccaccgcaccccacccggccgcggggcccagggcggaaaaggggggcggcaggaagcccgggggctgctccctccgcgtcccggcggcccgagtttccgaagcccctccgcgtcctcccctggcgggagcggggccggggcgggcgggaatggccgatgagcctccggagcccgctccccacatctgcctgcggctggggagagtcaggccgaagggccgggccgggctccctgcggtcctcggaccggactgagcgcgcgcgctgttctctccgcccgcgctaggctggtttcctcggtgcacgccgtgctggccaccggctcggggatcgtcatcattcgctcctgcgacgacgtgatcaccggcaggtaagagcccgggccggggccttgttgcaaatgtcacatttcagtagctcgcaggctctggctctcgcagcacacgcgctcagaaagctgactaatgggaaaagctggcaccacaatgggctccttcttcctctccggagtcttcgggcacccccagcttaggagaaagtccacggaaatgagggaggacgacagagtcggagtctgatttcaggtggtgtgagccagggatccaggtccttcatggaagagataagcgtggaagcatttacgactgggagtgtggcttgattcttgcagttggcttcactgggttctcactctggagcatcactggctaacagacgtccagtgtggttagcagagccccctccatggaaaggaaccaacccaccacccccttccacgcaaacgccgctcttgcttttcctgcagatttgctaaaggtgattgagaggttcccagcgcttagaacacggacttgtacgtctatcagaggtcagtccagaggcaggtcaggaaatgtgcacctatctgcagttccagtgaaacaaatcataaattaagaccagaatagtcgactttgtacagtagttagacctggacaatggtggtgcttttattatttcaagccttttttttccccaccggtcttgctggaatcacactcactttctcccaagttgaaggaccacagtcggatgtgcaggaagttgaacggcctttccaggccctgctctcctgtgggctctgccaagtcctgcttctcacctgctgagactgaactgcgaggggcctgagcaagctgtccgtctcactctagcctgcggtcttacctgggatcaatcctgctgtcatgatttttgtgcttttcttctgcctttttaaaaacaaaactggctattggcgatgaataagtagatgctacgatagatcaagtgacatcgattgtagacaccaaaggttaatattggtgtggctgggtacaatttttcttcttcttcttcttcttttttttttaaagacagggtctcactatgttgcccaggctggtcttgaactcctgggctcaagtcatttttctgcctcaccctcacaaagtgctgggattacaggcatgagccaccacacccagcaaattttttactttttttttttcctgtcgagacctcaggctgaggtgcagtggcataatgacagctgactgtagtcttgaactccagggttcaagccacccgtcttccttagcctcccaagcttggactacaggcacacactactacacctggctaacttttttttgttgttgttggtagagacaggggtctccctgcgttgcccaggctggtcttgaactcctgggctccaacgatcctcctgcctgggcctcccaaagtgttgggattataggcgtgagccactgcacccagccaaaaaaggcctttcagggttcatatactatatactgaatatttttctattatatgccttctcattttatgccttcacatagaatgcgattagatagaaggagttaaaaatccccccaaattataggcagaaggtggtatggggccaaggatttagtcagattcttaaaggattcagacactaaaatgacaaagtcacagctccaggtggttttctcaatttaagtacttaattcagatagtacgttgttgttttagacagggtctggctctgtcacccacgctggtctgaactcctgggctcaagccattctcccactcaggcctcccaaagtgcagggatcataggtgtgagccaccgtgcccagcctgtatagtaccttttaacatttaaaaggactccccctccccgccgcctttctttttattgagatggagtctcactctgtcactcagactggagtgcagtggtgaggtctcggctcactgcaacctccacctcccaggttcaagtgattctcctgcctcagcctcctgagtagctgaggttacaggcatgtgtcaccacgtctggctaatttttgtatatttagtaaagccatgttggccaggctggtcttgaactcctgacctcaggtgatccatccgcctcggcctcccaaaatgctgggattacaggcatgagccaccgtgcccggccgactttcccacatttaattatttaatcttcactgcagttttgacaggtaagacagacaaggattatcatcttcattttacaaagaaagttaaatcacaggctagtgatagtgaagattataatccagatctcttgctaataaatcttcagaggattctactcatgagtcacaatttcagatctcttctctgaattggtgaaaacatgaaaaccctaggttcccttcaaggggagaggccagttatatttcagctaaattttagtagctgtttataggtattttacttgaaattgcttgaagaaagcacctgagaccatagatgggcattggaataagtatggcatctttttggccaaaagaaacctagctaggtcgggtgcggtggctcctgcctgtaatcccaacactttgggaggccgaggtgggcggatcacttgaggtcaggagcttgagaccagtctggccaacatggtgaaacccccatcgctacttaaaaagaaaaaaaaaaagaaaatagccggacgtggcggcaggtacctgtaatcccagctactcgggaggctgcggcaggagaatcgtttgaacccacgagtcagaggttgcagtgagctgagatcgcgccactacatccagcctgggcgacagagcaagattttgtctcaaaaaccaaaaccaaaaaaaaaaaaaaaaaaaaggaacctggctaatgaattcacctacaagtgtgttatacttgccattacttgcttgccttatttgtttattcattatttacgccgtggtaagtgtggagttgctcaagagcacaaattcagatggcgcctccgtagactgtatttccagtgttgcagttcagcggactggctgcgtccgaaatcagagacaaagttaatacagatttcagggccctcggcttacaatttagaatctctggggactggagcgcttaacaagcactgcaggtgattctgatgttcaggtagtttgagaaccataaaacgaaatggttttctacctaatacgtggatgcgcatcaaacgtttgctgaccatgtgaatggaatcctcaaatagtacatgatttcaatttagatgtttcttcacagaaaacatctgtggaatgcttatcactgggaaccacattgtatgaattgtagaggcttcccttctaatctgctctaggacggtgatcaactatgatttccattcagcaaatactgattcagcccctttggataagtaaatgggaaaactgtcttttgacctagcctctctcctggtacctaaccgctgtaatgtggcccttgagctccaggctcatttccagacctgcttttttttgttgtgttttgtgtgttttttgagacggagtctcactcttttgcccaggctggagtgcagtggcgcgatctcggctcactgcaacctctgcctcccagattcaatcgattctcctgcctcagcctcccaagtagctgggagtacaggtgcacaccaccatgcccagctaatttttgtatttttagtagaaacggggtttcacaatgttgataaggcgagtatcgaactgctgaccttgtgattcacctgccttggcctcccaaagtgctgggattacaggtgtgagccaccacgcccagcctccagacctgtttttcttaatggaattgagattatctctagaattgctttttgggtttttttgtttttgttttttttagatggaatctcactctgtcgcccaggctggagtgcagtggcgcaatatcggctcactgcaacctccgcctcccgggttcaagtgattctcctgcctcagcctcccaagtagctgggactacaggtgtgcgccaccacatctgactaatttttgtatttttagtagagacggggtttcgccatgttggccaggctgatcttgaactcctgacctcaagtgatccacccgcctcagcctcccaaagtgctgagattacaggtgtgagccaccgaacccggccagctctagaattgtaaagaaaatggccagggttgcctcccagaaactccatagagtggggttgcatgcagacaagagaaaactcacaggttccaggatttaagttagtaaaacccccaactgttgagcagctaaggagttaaactagaaatgttggatttgtgatttgggacactttccaaaccagcttcttggtggggccgttgaatcatttgtatatctatctatatcaaaatcagttttatcacaaaatgccagaacatctactacaaattagtagctaagtcaggcaagtagtgacagcaagctgcttcaacaggcagggctgagtgaatgcctgctttttgcctttgacactcacgaattggccctgaaactgagagcaagtggtctactctccctgtttatcagtttcaacatctttattgtaaagtatttggaataataatagctgatcaagcaccaagcttggctgtgagccttcataatggatatccacaatgatttcacgggccattcatatgctttctttcaggcactggcttgcccgggaatatgtgtggtttctgattccatacatgatctatgactcgtacgccatgtacctctgtgaatggtgccgaaccagagaccagaaccgtgcgccctccctcactcttcgaaacttcctaagtcgaaaccgcctcatgatcacacatcatgcggtcattctctttgtccttgtgccagtcgcacaggtatggccttccaggacagcagaccagcagctgggttgagctgggtgtctttttttttttttttttctgagacagtctcactctgccgccccagctggagtgcagtggtgtgatctcagctcactgcaacctccgcctcccgggttcaagcgattctcctgcctcagcctcctgagtagctgggattgcaggtgcccaccaccacgcccggctaatgtttgtatttttagtagagatggggttttgccatgttggccaggctgatttcaaactcctgaactcaagtgatccgcccgcctcggcctcccaaagttctgggattacaggcatgagccactgcgcccggcctgagctggatgtcttgaccgttacttaggagtcgggattgcccctcttttctttgccactcataggcacccattctccttgtgcctgctgcttcagagccacctcccccaggtgaatagtggaggaacaccattacacatgaaacgttcatgatcctccttaccaacatcaacatcaacatactttttcttttttgagacagggtttcactctgtcaccccgggtggagtgcagttgttggatcacagctcactgtagcctcaaactactggcctcaagtgatcctcctgcctctgcttcccaggaagctgggaacacaggcacacactacaacgtccagctaattcctgtaatttttgtagagtttctccatgttgcccaggctggtctcaaactcttggactcaagtgatcctcctgcctaggcctcccaaagtgctgggattacaggcgcgagccactgcacccggccccaacattctttttaacaaacccccagcgctctgtgattccctagcgtttgtcagaggttctatccttagttcaatacaagataaaaacaatataaaatacaaatataatacaaagcaacataacagtgccagagagcactgtgtggattattcttaggtcacaaaacacagattctcaaagcaaatagcctcctactttctccccagatccatttccccataaaagcccacccaacaaagaaaagcaatgggaaagctgaggggaaattcctcactcttgagtgcctggccaggggaaggcatgcgtttttttttttaattattcatttatttagttattcatttttttgagatggcgttttgctcttgttgcccaggctggagtgcaatggctcactgcaacctctgcctcccgggttcaagtgattctcctgcctcagccttccaagcagctgggtttacagatgcacgccaccatgcctggctaatttttatatttttattagagacggggttttgccatattggccaggctgatctcaaactcctgacctcaggtgatccacctgcctcagcctcccaaagtgctgggattacaggcgtgagccactgctcttggccggcatgtagttttattttattttttaaataaagagatgggggtctccttatgaggcccaggctgatcttgaactcctgggctcaagggatcctcccgtctcagcctcccaaagtgctgggattataggcgtgagccaccgcgccctgccaggcatgtgatttaaaagttcatagcttgctaaatattagaagctattagtcttatgctgtagatgaagaaactggggctctaagagtattcttatatctctcagtggtactaagtggcagagctgatattttaccatgcttactgctttcttgaaaaaagaggccgggcgaggtggctcatgcctgtaatcccagtcagaagttcgagaccagcctggccaacatggtgaaaccccatctctactaaaaatacaaaaattagccgggtgtgatgctgtacatctgtagttccaggtactcaggagcctgaggcaggagagtcatttgaacccgggaggcagaggttgcagtgagctgagatcacgccattgctctccagcctgggcaacaagaacaaaactccgtctcaaaaaataaaaataaaataaataaataagggtaacgtgcattaaattctttaagaagtgtctgggacctaccatctaggaaccagaacatctagggtgctttgagaccctaacatctagcacagggcctggcacattttgttgaaccaaacaggctgagtgtcttggcatgactaagttcgatacacaaaagtaggcttgcagccttccttccggctgtcatcaaaattcagagcttggtgtgggacgccgtcatcctgtctgaatttgcctctggatcctagggcttggaccatcaaagtgctgttgccacggaagcagcggtacagtagtctgcgcttgcctattgagcgtcctttgcccgtcacagttacccttttcagtagccctcgttggaattttccttctggtggtttcttaacctccacttacttccccttttcgtttcgtcatccgcagaggctccggggagaccttggggacttctttgtcggctgcatcttcacggcagaactgagcactccgtttgtgtcgctgggcagggttctgattcaggcatgtatgaatgaaatgacagagagtgtgagggttctgattcaggcatgtatgaatgaaatgacagagagagtgagggttctgattcaggcatgtatgaatgaatggcagagagagtgaaggttctgattcaggcatgtatgaatgaatggcagagagagtgagggttctgattcaggcatgcatgaatgaaatggcagaaagagtgtgggagggagtggattctgcttttccttcggagatggtgggtgtggagaaatccctagtgccaggagagtgggatgagagatccttcaacagccttaaaggtcagctggtcatctcagccagtgggggtgaaattgtaggtttgatctaagtttgatagtttgatacagctcattctattttttccctggttacacacatactttaatccacggttcctgtactcctgtcagctgggtggcctgggtcaaattcaaaatcactattggagaaaatgaggttatttgcacatctcaatatgatagtgttcaagaatgtcttctccaagtgttagaaaactagacaaacgtctgggcgccagggaatctgacagccaaggtcttgatgagcacctgcacctgtgtggcatttactgtggtgggacttgggcccgtcgctccctgatgcccagcttcttggtgaccttacctttttccttcctcttctattgcagctaaagcagcagcacacccttctgtacaaggtgaatggaatcctcacgctggccaccttcctttcctgccggatccttctcttccccttcatgtactggtcctatggccgccagcagggactaagcctgctccaagtacccttcagcatcccattctactgcaacgtggccaatgccttcctcgtagctcctcagatctactggttctgtctgctgtgcaggaaggcagtccggctctttgacactccccaagccaaaaaggatggctaaatgctcctgggagtcaggcgcagcctcacaccagctgcctcctccactcagcattccatggaccaaattgtgccctgggtagcctcagactttgggtattgataagccgatggatttgagtttttctaaagaatattcatattacctccttcttctaacttgccctatttgcaaaagcacttttgtagtaacaactattgggtcctgtcagacctccacggacagcaaagtggttttaatgcaagcccaaggatccttcttaaggtcttatctcaagagctctgggaggtggaagcatggggtgggatcggtggaccagggtggtaagtgtctgcacatctgcctgtccctgtatcagcggctacccaccttccaaaccactcaggacagtacccgtggcactgggcccgcagaagcaagggatgacttggttcttggaagtaatgtcgtcttgtgacattggcctgggacaatcattgtgggtaggtagttattgatcgtttactagataacccattggttctttgcctcatcctctcatccatgggtcagagttgaattcttatgtctatagacttccaatcagaagtctcactggtggggctgggggtgggggcaggcaggaggcatggatgggaacctgagtaggtagtgtggccaagagatcagcacaacctttgcaggctgacttgctaagtctgacagtgacaaacttgtgagcttactgcagtcagtcacagaggctgttctttttcacacaccccttcatgcccggctttccccatatccacatgcagagggcgagctcataaaactacagggaagcgtgaaatgatggctttggtagctgtttactgggtaaccccactgtgacactgtccttttcatgtgatgtggaaacctacttctgtcctccaaaccatgaaatgtgtcatctagactgcagagtacttgagtgctttgcctcccgatatgccagagcttgtggtccaaagcccattcctgtgtgtccgtcctgccatttagccacagaaggctgcggagtgaggcggcagctagcctggccagtggctgtcccgtggaccgacacctgcgcccccttctgcaagcaggattttctggtgccaacactcattcatcattcccgatcaactaggatgaatttaagactgtgctaccatgtgttctcaagtggtagtttaaaaagtggatttttaaagtgcctttcaattgtctgtgaacgtctaaaggactgatttgtctcattttgactgttgagtctttaatgggtgccatttaaaaaacaaaatgctattttttaattgtcttttttttttaactatcagtgtatctttaaaagtcacccttacggtgattaaattgcactaacattcccaacttattctcatttgtgaaatacatcaatatcagtgtcctgtaagaatcatcctgtgacctagctcgactggctgccgtgtgctgtggctcaaggtctgtgtccatgtaactagcagaggggtgtgtgtgtgaatgctttcagcctccagaaaggtctagctcacacctcactcaaacctatttttgtggttcatggtctcagtaatacattgaaggttcccagagttcaagcgtagtggtcacacgtaacttgagaccgtttcttctcttcataagtgaatcttactaggaattgggagagtggaagaccgattattggtcagggagccaagcctactttacctgaggagaacctgagtaatgccccattgtgaaggagggtgtggatatggagggagtgatgggacatattttttccccct

SEQ ID NO: 8817 - DNA, 299 bp, Homo sapiens
gtagagacaggttatctctgttgcccaggctggtctcaaactcctggcctcaagtgatcctcctgcctcagcctcccaaagcactgggattattacaggtgtgagccaccatgcctagcccactctcaattttttttttttttgttttagacagggtctcactctgtcaccaaggctggagtgcagtggtctgatctcagcttactgcagcctctacctcccaggatcaagtgagcctcctgctttagaaccctgagtagctgggactacagctgtgtgtcaccacacctagctaattt

SEQ ID NO: 8818 - DNA, 102 bp, Homo sapiens
aggctggagtgcagtggcgcaatatcggctcactgcaacctccgcctcccgggttcaagtgattctcctgcctcagcctcccaagtagctgggactacaggt

SEQ ID NO: 8819 - DNA, 299 bp, Homo sapiens; identical to SEQ ID NO: 8817

SEQ ID NO: 8820 - DNA, 52691 bp, Homo sapiens
aactttcttttcctagattttccatggtctggtaaagttaaagatattctgcaaaatgtctttaaactggaaaagttcagaccacttcagcttgaaactattaacgtaacaatggctggaaaggaggtatttcttgttatgcctacaggaggtggaaagagcttatgttaccagttaccagcattatgttcagatggtatgtactaaaaaaattaattttgagttgaagaagtgctttgtcatcatacctttttaattcttttaaaaaataatttataatcatacatatataaaaatcaagtgcatttttgtttgatttcttctatattaatagaaatttaaagtttcacttaaaggaggaattttatttattttttattttagattcaggggtatatgtgcaggtttgttacatgggtatattgtgtgatgctgagatttggacttctaatgatccatcgtccaagtagtaaacatagtacctgctaggtagtttttcagcccttgccctcctctctccctaaaggaggagttttaaaaacttctgagattaatccttttatctggttcctgaaacataaatttaaaaacatattgtactgaacattcaaaatcctctcttctagcttttcgaaaccctatctaaattattgttaaccatattcaccctacagtgctatagaacacttgaacagaagatacaaggggcaaaaaaacccaaaaatgttgtaggagaagcagctctggaagaagaatcagtagacctgaattctagtcccagatctttactgagtgtctgccatggtgctaggcactgggagacacagtagtgagcaaaatgggcgtggtcttagttttcacagaactcatagtgtagagtagcactttctcagactttagtgtacataagaatcacctgagaatttgattatgtgcagattctgattttatgtgagaccaaagatcctgcatttctaacaagttcgctagtgctactgatattactgattgggtagtagcaagggatcagcaagctttttcttgaaagggtagatagtaaataatataggcttgtggtccatatggtctccttggcagctcttcaaccctgccattgtagcacaaaagcagccacagataatgtgtaaacacatgggtgtagctgtgttccattaaaataacttacaaaaataggcaaccagcccttactttgttgatccctggtttagagaatacaggtaattgcaagcaattgcaataagaattttgggataaaggttttaatagggaattaagtctgtacaaagatctggtctaggggctgtcagggaaagctgttctgaggaagtggcatttaagctaaagtttaaagggtgagtaggcagaagggacagggaaggaagagtgttcattcagaaaagcaatacttgagatccaaaagcaagagagaacattcacattatgatgtattcagtaacctggaggaatttctatgtggcagtcagtggtaagacatgtggaaagagtcttatttttaaaacttttccttattttagcaagaagccattgaagagttttacacaggtaagagactcattatttcatggtttagaaggataattctagcagttagatgaattccagatacatctggaagatagattcaatgggacttggtatttattgcttggggggaaaggagaaagaagagtcaagaatgatactcaaattttaggcttggacaagtggtgaggttcttcactgaaatggggtacattggcgaaagaactcttgggaatggagaggggaaagatgatgaatttatttgggacatgttgaatttacgatgcctttaagacatccaggtggaattgtcctatgagtaggaggatgtttgtgtctaaagcctggtgttagaggtctgagttgggggttgttagtgtggagatggccactgaagccattggaatgaatttcagagcagcataagaagaaaagaaggcctagaacagaaaccagaacaccaagagtttagggataaacagagaaaaagggcttgcagacaaggctgagaaagagtagcaacatataggataaccaggattgtatgatgttattagaaggctagggaagggtgtgtttgaatgagggagtagttaatagtgatgtctgttagcaaaatgtcaaatacgtaaggatgtaagtttcaatgagtttaatgacaaaggactcatctatgaccttagctagagcaattttattgaaatggttgggtggagaccaaatagcaatggtttgaagcaggtaggaattgaggaagtggaactggtgagtatgggattctctttggaaaagaatgactatgaagggaagaagagagtgggccataaatgagatgttatcttagtctattccagctgctgtaacagaatactttatatcagttaattaacaaacaacagaagtttactgcttgcagttctggaggctgggaagtccaagatcaagatgctaatagatttcggtgtctagagagggggtgtttctcatagatggcaccttcttgctacaccctcacatggcggcaaagaaagggcactcccttcaactttttgtaaaatggcattaatcccacttatgaaagcagagccctcattacttaatcacttctgtggggataccaactttcagaccatagtgggtgttttccaagatgagagggacttgaccatgtttaaatgtaatgagtaggtgctagtaaggaaaagtgaaaataataggagagagaataattgactgggaaaaatccctaataaggtcttaatttgattatgttttttaaacatgtctgctctttgccaaaggttgttttaagaaacaaactacagaaacgtaaagccatatataattttaactgtagaatagcttttgtactttaaacagtttcaattataaggaagggggcatattactataacttcattcagacagtaaactgttcactgatttctactcagcataaatgaatctcgtacaaaaagtaaaagaatgcttatgcaactatcatgtttaattatacacactactgtataattaaaaatctggtttttttggaaagctttatagtgatttttccctgatgaaactgtttagtgtttgaactgatatatgttgtcttactgaaattaccaatagtgattatttaaaacgatagcaaattaaacatttgaaatgataaaaatctgtctttatttttataaggatagagttctgtttagttgtatgtttatttggcttctacttaccttgtttggtcatttattcatatctaattaatgagagtaagaagtaagctttactaaagctgcattaaaaattaatctgaattgatggccagtgcccacaagttaagaaggtgaatgggccgggcgtggtagctcatgcctgtaatcctagcactttgggaggccaaggtgggcagattgcctgagctcaggagtttgagaccagcctgggcaacacagtgaaaccctgtccctactaaaatacaaaagaaattagccaggcatggcagcaggtgcctgtagtcccagctactcgggaggctgaggcaggagaattgcttgaacccgggaggcagaggttgcaatgagccaacatcgcaccactgcactctagcctgggcaagagagtgagactccatctctaaaaaaaaaaaaaaaaaaaaaaaaaaaaaacgtgaatggtttgcatctgattctgagggtggtgtaaagtttaaggtagatttttttttttttctcttttaggttttacactcgtcatttgcccattgatctctcttatggaagaccaattaatggttttaaaacaattaggaatttcagcaaccatgttaaatgcttctagttctaaggtatgtttcagtggcttttttttttttaatgtaaactattcactgaaataggagctttacctgcagttgagttgcttataaaattataaactgttaactatttatatcaggagttacaaactactgctcttggccagttctggcccactgtctatttttgtatgtcccatgagttaagaatggtttttatatttttaaatggctaaaaaaaatctaaaaagaatattttgtgaaatgggaaaattatttgcaattcaagtttcagtatccataaataaagttttattgaaacaccaccatgctcatttgttgacatgttgtctatggctgcttttacagtataatggcacagtggagtagttgtgatagagaccttatagcccataaaacctaatatttttgtctgatactttacaggaaacatttgctgacctgttttgtattatccattctaaaatagtaagggagaattgctaattatgcagtgtaattaaatatgaaatatgaattattaagaagttaccctatacctgtggaatttcttgtatttaggaatggactgtcttaccctcatctgtagaataaagcatttcccagctattcttttttaaaaagcatattactgaaatcttcaaaaggagagagaatagcataaaaactgccatgtagccatttcccccttcaacagttatcaacatacggctaatctttttttttaatctgtatacctccagttttccctacccctttcctcttagtttatttattcagaacaaattccagacatcatattttaattgtaaattcttcagtacgtatctctaactttaaagaaaagtgctgtgccatcatcacatctaagaagtttaatcaattctttagaattataaaaaaaattcagatttctatctcatttttatgttttttttaaaaaaaaatatagcccagataatattcatgcattgtattgtatttggttgatatacccataggttctctttatatcttttatatttcccatgcaaattctttgttgaagaaactgggttaactgtcctgtatctttctacattttcctgattgcgtccttgtggtgttctttctttctctctttcttttcttttctttctttttctttttttttttttcagttctggggtccatatgcaggatgtgcaggtttgttacataggtaactggatccttttagttagatctaaaagcctgattgtatttggaatttttctttaacttttttttttttttttgcaagagtatacttactgtggtatcactcaagtggtacatagtacctggttatctttttgtgatgctaagcgtcagtgggttcaagtgatgtctgcctgatctctggttatcagtttttcatctaatggttttagcagccactgagtggcaccgtgagagccatgatttcattagggaggtgcaaaatggtgatatctaattctgtcactctttcttcatgtattagttatactttttctacaaaaataaactttttcctcattaactctgcatgatgaaaatgcttgatttttttttccctttctttatgagttttcagaaagagttggttttctagcattctccaaaggtggtcaacaagatttttaaggttttctttccccaagtatcactataaacttacaagctttgacgtataatatgattcacctttggaatcatatatatatatatatcaatatgtatatatgtaatgctgaaatagtcctgtccttgggcagtgagagcctctttaagttggttcctgaatcctttctcttaaccccattgcttctgttccttgctttcttttgcagtaagataatccatgttcattttatgcatttcctgcccagacctagagtcagccatacctctaagaagccctggttcctttagtttacccatatatttttgttttatttaaactccatgtcattctattataactgctccttcctccaacaaaatcaatctgtggagaaaactgccttctaataatgtactttcttaaaattgaaaaagaacataatagtaatagaaagtaatttagaaagttgcagataattacaagttcatgatatatccctactcttgaaagttggagagagaaaaaaagaacatctgtatcctagaatatatctaggagttaacaaactgcttctttgctgggatgatgaaagtagtttgactgtctctttctatctcattcactggcatgtttttatacttttttggtcctctttagattagaaggaaaaaaaatgacatctaatatgctaagtattgtatagaattgtatgagtactaagaatctaataactgttaccttttaagatttattattattatcttaatttaatgagtgatactttgtgaaaccccatggtctttatatttaaataaagagattaaaagatttgatggtatcatttgagaagttaataaataataaattttgttcacatacataaagggattataaatataatgttaaaattaataaaacccacctttataaccataacaattgcatctagctcacattttagaatatattatgaacaatttaggattatgccttcatagaataaatgctcttcattggagtatctgtttgtgttcttttttgtcaagtgagttttttttagtcatcaacaatgtagacgttagtaaataactagaatgctatttacacagctgccatgatgtttcgtactgagacatggtttcagttttaatgaactaaacatctgctcctagaagagccaaaggctattattgctttggagaaatgaacgttttcatttaccacctagtatttcagtctgctagcttagttttactatcattgtgtctatttttttcttttaataggagcatgttaaatgggttcatgctgaaatggtaaataaaaactccgagttaaagctgatttatgtgactccagagaaaattgcaaaaagcaaaatgtttatgtcaagactagagaaagcctatgaagcaaggagatttactcgaattgctgtggatgaagttcactgctgtagtcagtggggacatgatttcagacctggtatgtatgttttatctagaaaactttttgatgtcatagaccgtgtccttactcagcttggcatgatggaaatctctgcttctattaaaatcatcctcaagtagttacacattgaatatccgttatccagaatgttcggaaccaaaagggttttaaattttggatttttttggatttgggatgatcaacctgtattacttattttatcttgcctcattatgaggaggactgagaggcagaatgtttagtttcattccccactgtagtctgtagtttaattgcccttgtcaattatggacaaatatggacacatatgtttactagccaatagtggacatctttgtggcatttatgacatctaggtattccttcacatttgttgaagaatttgcatctgtttcaaagttgtcatctttagtcatcattctgagggtcttttcagcacccacatacaactcctcagcatgaaactttgatgagatatttttagtgacctttttcttcaccccaccacctaatcctacagtcatagcctaaagtaagttactcagaattgttatatgcaaaaaaatcttaaattcaaaaatccgactccctggcttcaacctgttttccttctgaagcttttcacacattaggatttgctggatccctcttttaatccctgcttatttatccaggctcctgtccctacatagcaatcactctgtttcccgtccagacactgtgctgttgccccttacttctgttatatttgccctggactgcctggccattctgccagtctgcttcaggcgttgtgcctgagatgctggattcatctagactttggctttccccattcctgctgcttggctactaaacattgtcaaaaaaacaaaaattgcataactccattcagcttttcattatcctcagccgtccttatacttgtccctatttcaactcctttatacatttcttccaacaaatgtctcctatcattaactttctattcaggccctaacttgtacttagcagatgctttctgcttcacagaaaatagatgccatcaggtatgaacagctcctctttctactttcaaacattagtaatcttttttttttttcttttgttaaggcagaaaagaccactgctttataaggctaaccatgaccactcccgtttcatcctttcctgccttcttaagatcttgcactgccaaattcctcactccttcaccttcaggctcttttgtcctctccctaaaaacagaaactaaaacacccttctgaccttttaatgttactgtcctctttctgttctttctgtcaccatcagacttctcagcttaccatctccatttttcacctttaacccattctgaactcattgaatcatgcttctgccaccaccatactactgaaacaggtcatcggtgacccacccccagatgagaccacttcatcaagtggtctcatcttcattcctcttcccacttcacttcagtaacattttatatattcacctctcaccttgccacattctactcccttggttactgtacagcagtgctgttcagtgtcttcccttccattctcacctccttcgctcttcctgtcttctttttaaatattagtgttccctagggttctgacctcagtctttaccctttcttacgtttctccagggatagtgagcttgtagcccgaagactgcattctctacctacagaattattatgggcattgtttttatttatttatatattttaaatagatttaaatgccttaaacgggatgtatacgcctttctattaagggcccctcttttcttaaccagatagcgccacatagttgttacctggtggccactgaagttacctgatttgtgactcttgccctattttcaacctaaatggtttgatcccttatgattatcacccttgcttaagtattaccatgacttatgttgtctctgtggatctgctgccaaagtgtaaaacattattcccatatctaattagctaactgctaaactttaaatttatactcctaattgtttatcagaaatgtgtatctaaattagcatgaccaaaactaaattcccccaaaagaactgctctttttcttctcaactgggaatattttccccataactctactcgacattctaaccaaaaactttttgttttcttcgcctttcctttctccgttctcctctctactcccaagcaatttccccttcagtcttctctgtcttaaaaaatcatccactcactcacatgtttgctgaagccaaaattttagcagttatctttatcatttaggttccagtcaggagacagttatttgaacagagagaattttttagaaagaattgtgaactaggtaaaaagtagctaaatagataactgaaaaagtaaaaagaaaacgaagatatcatggagttaaaaactggaagaagcaacaaccacctgtagggctgggagaacaggaagaaaagattggaacaaataagacttagaaacttaatgaagagggcttgtggaactgagctccctggtgctggagtctcttggtagaggcagaggtggggtacgtctgtgataaagctggttctccaaaggctgagaaaagtgccaactgtatttagttgctcttaaggaaagaagtgctgctgcagggatgagaagccttgcaggggtgacagtcacaggaacacaagcaagcccacaggaagcagttagggaggaagcagccatggtgtcttccatccagggccagcaggcaaagctgatgcgtagtgtgcagagtccttggtgcagcatcccaaagcacagtatagaagggtggggttagagatgacaaaaaaaaaatggatgacacaccgtccttgatttaccctccctttgcagatccagtccaccactaagtgttgtcagctctgcctctagaatgaatctcaagtttgtctactctctgtgcacctacgtcttacatacagttgagctcccttccactggtctactgcagcagcttcctaagtagtctttgattccgttcttacactttttgttcattctccacagagcaaccagtgatattttctaaatacacatcaaatcatgttacttccctacctaaactacccagtagctactgtgtacttagaataaaacccagcgttcttaactggggcccatagggtaatatgtgatctgcccccatctgtctacctgatttcctactcttcctctcttcttaagccccagcatactgggcttatcattatgagcacttaccactctctaatggcatatttattggtttactctttgtattgtcttgtttctttgcttgaattatagacacatttgcatagcatttttgtcttgttcatcactttatcttcagtgcctagggaaatgcttggcacacaattaaaaaggtgttcaacatttatctattgatgaatgggtaaatccagcactgtctccctcttccctgccacctccatatcccagtagtcactaggacctgtaggttcatgtatgtctctttactctttttgatttatcctgaatgtcatgtctcattttatattctgtattatttgttttctggtctgttactgccatcttttaactggttttccttcagtgttttgtctattccagtctgtattttgcactgtcaccaaaagatgatttatgaagcataggtctttaaaaattacatgatgggctcggtgcggtggctcacgcctgtaatcccagcactttgggaggccgaggcgggcggatcacctgaggtcaggaattcaagaccagcctggccaacgtggtgaaaccccgtctctactaaaaatataaaaattagccaggtgtggcggtgtatgcctgtaatcccagctactcgaaaggctaaggcgggagaatggcgtgaacccgggaggtggagcttgcagtgagccaagatcgtgtcactgcactccaacctgggtgacagagtgagactccatctcaaaaaaaaaaaaaaaaaaaattacatgatgattcctcatttcctgtaggataaagtctcagcttagaatcaactggttgaattgttcatagcttttcttaaacctgccttgtacataacagtgtcagtcagggttcaggcagagaagcagagtcacgatgaatgttatgggataacggttttactgtaggaagtagatcttgaacaattgtgggaggaactggggaagtgcaggtctgaagaggggagttggaggattagagaaaagtaatggattgatacctaagcactggtgcaggaggacgaggcggagcttgtagggaaatctgcagctggcatgtacagtggcaaaggggacccctaaagggaagctcgtggaaaggtctctggtaagctacttcctgtgagtagctatcgcctctgtgggtctgctgttgattggcaggacctgcagttgggaggaacagctgaatgaggaatggaaaagaactaggatgacctagaactggctgagcacttctgcatctgtccatcatcctctctgcgtgtaaagaccttgaaggagtgatgttagctggttcacttctgccaccaaatcttgcacaagtccctcttttgggtcagctctaacttggaacaggaaagagattctgggagatgtaattcacagcttaatggattggacagtaaatccatccaccacaagactctgtgacttagccccagtgaactgcttgctgttatctgaacatactaatttcatgtcagtgtatttgcagtgtatatgctgtttcctctgcgtgatgttcgtctcttcctagtgaacttctgctcattctcttaagacacaactcaagtattatctccttgaaatcttcacttcccaagcagctgctctgtcctctttgttttcatagtagtcctctacttagcatgtaagcaatttctaccacatttttttcagtttcctccaaatagtttaagtgacaatttatctagtgatgtagatgcttataacaagtttgagcctagaatggtttccgagaaataggttatatacaaagcagtgccgcccttaccaagatttttttggtctgatgacactaggtggtagcaggggtttgtctgatggcctgttttatcttttgttagttgtaataaattaaaacactgtggctatacccactgtctcttgagtccaccgtgaccaagagtaatgtctgaaataaacgtaataaagcctgcccatcaaagaggctaacacagaactgcaaatttactgctatagatggctgtggaaacaaaatcatagtagtcatcgattatctgcataatgttaaaagatataatttactctaactcttaaaggatagaaaaagggccactttgtttgttttttcagattataaggcacttggtatcttaaagcggcagttccctaacgcatcactaattgggctgactgcaactgcaacaaatcacgttttgacggatgctcagaaaattttgtgcattgaaaagtgttttacttttacagcttcttttaataggccaaatctatattatgaggtatgtaatttttatgtcaattccttacttttgtgaagaattacgcagaggggatctgcctttttattatgtttatttacatgagcagttaagtacttacaaaaatttttaacattaggaggtaattataagtagattctgtgattagggcttcattcatgtatcttttgctacataaacctttgttagattaaatggaagacacctgctaggtgatactttttataaaacatatgagtaagtcatatatctttgttaaatttctgtatgttcttttttgtataaagatggagagaaaggatggagtgatactaaggaccctaataacatctctgttcaaattaattactaagtgatagaagtattcatatgccattaaagatttgccaattctatttgaattttatttgataaacttgaaaatcaaataacctaacagctgtcttttctttctttctaaacccttttaagaatagatttaatatttttctgagttttcattaaagagttatttatgttacggtttgtttttataaaagtagcatcgcaaaataaaaaagtctgcatccttgcaagttattcactgctcatgtgcttgctcttctctggtaaattaaaaaaataaagatcaagaagagtctgggaggaggaacagatgagtcagatgggttgaatcctgtgagtaagtgaaagagtaataggaaaaaaaacactatggtcatgaaagaactgcatcctgaaagttgtacatagacagccacttggatggtactcattcatttactttttaataagttaagttttttttaggttcggcagaagccctcaaacactgaagattttattgaggatattgtaaagctcattaatgggagatacaaagggcaatcaggtaatgtaaaaacaaaccaactttggagacagagataactttcaaaaagtgacttcatatcatattgataattatactgataactgaataacaccaaaaaaaattaatgtatagcagaagatacttgaaaatacgtgataaaattaattcacttgatcttagaaattgggtgtgacatttgcttatgccatagattatgagtcgtcaaattgcctgatttatttttgcttatttacacttgctttagaatagacctgatgacttaatgttaattatcaacagcacatatttagtatgtatccactgtgtacaaaatagtggattaagcaactgatattctaaagggatagaaaatatactcccttacagtaaaggacacgttaaagcaataaataaatccagtagtacatactgaatagattaagcacagatcgagttgtgagtatatatacatggttttctgggtttaatgactaagcaaatgttactgaagcaaagaatttgtgtgaaagtagcattttaaactgttctatagattttcaggaggtagtcctgggtaaaaggagttctagggtcaaatgaatttgagaaaggttgcaggtatttattctgcctggatgttcacagggtgtatcagcaaactagaagctctgaccatccctgaaaataaagagagacacccatttaactttgttgaatgcaatgttctccaaattaatttgcatgcaaattaatctaaattaacccaaaattaatctggagaacactgcattcatagcacatttgttagcatcttacagacatcagtttgagaaatactgtttagtgggagataaagttaaagagagaaaagagataacaggaacaaaaactgatggctcaggctcatttctgctttaaaggaagctggtgctcaaatctggaattataccaaaatgtcaatatatgcacaaggccttgaaatttttcataattctttttttccttctgtgcattgtattaatcaatgtcctgaatgtgtgtgttgaaaaccatcttccaggaatatgccatatctatctaacaaatgcacatattttactgcaggaatcatatattgtttttctcagaaagactctgaacaagttacggttagtttgcagaatctgggaattcatgcaggtgcttaccatgccaatttggagccagaagataagaccacagttcatagaaaatggtcagccaatgaaattcaggttaggtctatatcttccatagaagcctaatttacctttaaaatatttaaacttgatttaattaactgataaaatgttaaaatatttcaggtagtagtggcaactgttgcatttggtatgggaattgataagccagatgtgaggtttgttatccatcattcaatgagtaaatccatggaaaattattaccaagagagtggacgtgcaggtatgtaggactcaaatccagaagtaaatttttagaaagcttttccaaaaaatacatgataaatgcttaataagtctgtatgttttatctttattggatagtatttttagaacaatgtatttttagcagtttgacacttacttgcatatggagaaatttttacttatgttctgttatctgaattgtttctttttatgtgtgttaagataatttgatgttcatctttgcctcctgaatttttaattagtgatttcaaatctataacttaactggattatagacacattttttaacttagtagagctgattattgatgtctctttagagttttttttaatttgagggtacccattacaaattaacttccacatctctaaaatttctagatgtagtataaaacattgcctgctaattttaccatatgtcatttttgcatattttgaatttgtaaatgtaattctgcaatctcaaggtttctcacaccacaggtcgagatgacatgaaagcagactgtattttgtactacggctttggagatatattcagaataagttcaatggtggtgatggaaaatgtgggacagcagaagctttatgagatggtatcatactgtcaaaacataagcaagtaagccacatacctttttataacttttatcaattaaagcaaatatgaaagtatatgacatcgtttttaagttcttactaaatacattggtggaacaccaaagtgcagatccataaaagcagatgttggagggtaggaaccagcacatcaacctgtatgatctgccttagttcaagaaaagatgccctatctttgagataatcctccaaaactacttttttaattgaaggtttttgagacacattgatagcaacttgaaggctttttttctctggcactgctgtacagttacatgatttaataattttgaaaaggtctatggttaagataggcattttgagagtcaagctcagtaacgtgccaccttgccagctcatgtgtcaatgaaataccaagtttctccttaagaagtaagtttaaatctacttagggtggctttagactagatagcttcctgaaagctttctgtcatagttatctttgtgcttttattgcctatcacataagaagtgctcagaaatgtcgaggtggtaaatagcagccagacagtgatagaaatgttctttctttccaatagatactacaataatctagttaaaagaaatgagaaaatgaaaatgtcttccaaaggccagtagagtctcatgaagcatattttaaggtttcaactcaaatattgctactttattaaaatataagaaactattttactgtcaagaatattctcctaatagttgcaaaacattgaatttaaaaatggaactcagacaattttttaaacagtgtttatcaagaatatgtggggaaaaaagtcctatgtcgggggcacaatggccccccaaagatgttcacgtcctaattcctaacctgtatgttacctcacatggcaaaaggaaagtagcattgcacatggaattaagactgttcattagctgaccttaaaatagggagattattttagattgtgtgatgtgagaagaacctgacactctgattttgatccagtgaaacccatagtacacttctaaatctaaaccacagaaatgtaagaataaatgtgtttaaagccactaagtttatggtaatattatggcagttataggaagctaatacagtatataactatgtaagctgaaatagagattcttaaaactttattatatcctttaataatttgtatctttaaatgtgtttgcagatgtcgtcgtgtgttgatggctcaacattttgatgaagtatggaactcagaagcatgtaacaaaatgtgcgataactgctgtaaagacagtggtgagtttgttgttttgtaaacctttataggctaatacagtcataatgcctagtgacagagatacgttctgagaaatgcatcactaggtgattttgtcattgtgcaaacatcaaagtgtacttacataaacctagatggtatagtctcctaggtgatatgttatagcctattgatcctaggctaccaatctgtacagcgtgttactgtactgcatactgcaggcagctgtaacacatggttaagtatttgtgtatctaaacatagagtaagtacagtaaaaatatggtattataacctgggtgacagcgagactccgtctcaaaaaaaaatatatggtattatataatctcttgggaccactggcatatacgtggtccatcaccgaccaaaatattatgtggcacaaaactgtatatacagctgggacatgagagaagtattagacttccaaatggatttaaaagattaaagtgtgaatcagattttccagaattaaaactatcaacatgaagttttgaaacaaaggtgaataaaaggaaaagtcttatgtgtatgcacacattttatattgctatactgaggatgtgaaatttttaataaatgaaggaaaatatttgaatttttctgaatagaaatgctattctataagaaaagggaaaccatgtgataatctctaatactttatagtcactaattgaaaagaaaatttagtgcaaaatagagactatagagaatcacttttgatccagttaatggctagtcatcggagatttacttaaaattcttttaaatgtagatcagcaggatttgttttctgagcattggtcacaaccctgctgatcaaaacaggatctggtcaaaacaagatatagcaaagaaactggcccaaacaagttagaactagaaaatataatgtatttgcatgatgtaagacactcccactagcaccatgacagtttacaaatgccgtgacaatgcccgaaaattacatggttctaggaactccctaaccttttctagaagattcatgaataatcttccccttatttagcatataactaaggagcagctataaataccgctagtgagcaatgtacagtgccactctgcctttggggtagccctgctctgtctatggagccgccattttcctatactctattgctaataaacttgctttgctttcactttactctgttggcttgctctcagattgtttcttgcatgaaactgggaaccctcctgggctgagtcccaattttcggatttgcctgcagcattttggcactatattttaactttttttcatccgtgtgttgtatttcaagatctggactagccagtacctcatggtaagaccttactgagttctgatgccttgttaggtggaagccactgtatttttaactttgcagacagagaaatttatgagtttattagactatcttataaaataacaagagtgttatatataaatcagagtactggtctcttaataattgggttatcagttgaggacattcttgttgctaaatcagagttcactcaggagcctatactagaacagacagggtctcctataaaacacacctcttagtaacttagtaatcatgtctggcagacactttctgatttctagagtatatggcagggcttctgataaccaatttttttttatatatatcactgtaaaccccacaatgcttacagagaccataacttggtctagtgacagagacttgaggaatagcctagtcttaattcagaatacatttaaaaatcaatgtttagggtggctcacattgataaccagctttaaaccagtttaactacttaagatagcctatctttgccctcatttctaaatcctaattacctgctaccatatttgttttattacagcatttgaaagaaagaacataacagagtactgcagagatctaatcaagatcctgaagcaggcagaggaactgaatgaaaaactcactccattgaaactgattgattcttggatgggaaagggtgcagcaaaactgagagtagcaggtgttgtggctcccacacttcctcgtgaagatctggagaagattattgcacactttctaatacagcagtatcttaagtatgtacaaactcattcattattctttcaggttgtctttatggtttttttttaaaaattgcaacagaataaacggttttgcagttattttgtgtgaacttttaaatgctatagaaagtaatttacctaaaacactcaaactttaatcactataaataaaaaaaagtaacgaaaatattttctttaaaggctttatttgcattcttgtaaattttattatttcaagtcaatgtgttaagaattactgcgcatatagttatttcttttataaatttgttttccgtgattccttcaaaagctttcttattgttggcctttattttctgcagagaagactacagttttacagcttatgctaccatttcgtatttgaaaataggacctaaagctaatcttctgaacaatgaggcacatgctattactatgcaagtgacaaagtccacgcagaactctttcagggtaaatggctattaattttcagttttatatattttaaaaagtatattaaagcctatgggatgcttttctgtcatattcccctaggtccagttgaacatgagaaaagtcagttttctgattagatttctgggtatggaagagagaaaatatagttttctgtaaagatgtaagtgaaagaatttagactggccttttaacataaactaggggtttccagtttcttggaatgggaggactccgtttgaatatctaattttgttatgcactctgctcttatttggttgtgattactaatagttgagaagtctgtttctgctgttccagtggttagaaaccactgttttaaaccaaatactatcaagtctgcaaaagcatgtcaagtcaagtgccattgtgtctaaggacatttgaggtctttagaacttctctcacaacgtagccccttttattcaaaatagagctcatatttgaatagaaatttgtagataaaaaactagacccctgtatacttaaaaagccaactgatacagaaagaatattttgaaatatttaatctcatgagaaaactgaatagctggatttttaccaaggtgcttgctttgttttttttttttttttgtaggctgaatcgtctcaaacttgtcattctgaacaaggtgataaaaagatggaggaaaaaaattcaggcaacttccagaagaaggctgcaaacatgcttcagcaatctggttctaagaatacaggagctaagaaaagaaaaatcgatgatgcctgatatgaatgttactaaattttctaattaaagatggtttatgcatgtatatgccattatttttgtagttagacaatagtttttaaaagaatttcatagatattttatatgtatggatctatattttcagagcttatctctgaagatctaaacttttgagaatgtttgaaaattagagatcatgaattatataattttccagtataaaacaagggaaaaatttttatgtaaaaccctttaaatgtaaaatatttgagaataagttcatacaatcgtcttaagttttttatgcctttatatacttagctatattttttcttttgacataactatctttttgaaagcaatattatactgacagaggctcactgagtgatactttaagttaaatatgtagatcaaggatgtccaatcttttggcttccctgagccacattggaagaagaattgtcttgggccgcacataaaatatgctaacactgatgatagctgatgagcttaaaaaaaaaattgcaagaaaaatctcatgttttaagaaagtttacaaaaaatgtaaaatatttgagaataagttcatgtaattgtcttaagttttttatgcctttatatacttagctatattttttcttttgacataaccatctttttgaaagcaatattatactgacagaggttcactgagtgatactttaagttaaatatgtagatcagggatgtccaatcttttggcttccctgagccacattggaagaagaattgtcttgggccgcacataaaatatgctaacactgacgatagctgatgagcttaaaaaaaaaaaaattgcaagaaaaatctcatgttttaagaaagtttacagatttgtgttgggctgcattcaaagctgttctgggctgcattagacccgtgggctagagttggacaagcttgtagatgatttcaggttataaaaccagaagtacaattcaacaaaaaaggagtaagtcatcaatataaatattagcaaacgagatattgctacatctctatttaaagtaaaatacaaccgattttaaagttcctgaaaccatagccatattttgacatttcacaaagaatggttctagtctactagagtacatttggctaagtagataacttacctaaatttgctccaaagctaaatcacaagtaaacatatttatgtttaaaacacagaaataaataacttaagatttttatctaagcggtcagtgttgtattggaaagatatatctataaataaactttgaactgatttcaaacttagaatttatgtttttatatttttccactaatatcattatcacttctgtaattttcagtgtggtcatcattaactcaatacagtcattcattttattgacttgtgatttttctggtgtcatttggaactttatatgattcctgaagaaattccatttttagtcaaaataatcttctatatcaatatttggatctagcagatcttctccatatgatgaaagattcatttggtttaagattaggttttcaaatgtttcttctaaatcggtttcaccaattaagacagctcccatcattcgtccattttgcatgacgactttgatgtattctcgtcctttggtacatctcagcattaattcatgatctgaacctaagccctgtgcattgtattttcccagcagtacaacctatatttagagataaaaaggttattgtcatgagtatcataaagaaaatgtaatgggtagttattttgtgtcaagtttgaatagccgcagaaaacttatgccacaaaatttcataactaaaaatgttattggggagagtcccaaagaaaatgtttcaacagcatgcgttaattctacagatgacactatcacacactctacactgacattaaaaaattctggtgaatatagtcaaatgttaatgtttaatattttaacactaaaaatatctagtgaatataggtaggtgattctaccaatctatatgaacattaaaactatacagtaaatatataaatatgtaggatgtggatacattaaaccatgtggagtcgtggtttaaagatttggcaaggaactgaattagagctttcatggaaaagtttcttaatttccctgaggcttttgaatatgtttctccttctctgtaaattagggaaaaaaaaaaacccaaaacaacctttgtcaatgtgaagaggactgaataagataatagatacaggaaagctcttggtttatttttgagtacaacagcagttagttcccctcacaaagaaaggatgaatcacaagtaaaagttaaaaatgcaccaacaagtaacagatctagagagaaatttttttccctcttaactaaaatagaatagtggtaaggtggataattatcagatgattagggattaagactagcaataataccaggtattggtttgtaagaaatgaaaaatgtcatttttttgtagatgattaaaactatgtacgtttttattcaagcaagaaaatcacatgatttatcatagtcataagactaacaagcagagaaggcattaatatgcttaactatcttaccttatagttaaaaaattttgtcacatgagcaaacagttcaaagctgaaatccatgtcaatagagtctcctgaactcgctgcagccatgcactttgctgcataccatcccatctgtctagcctgggtccacagcctcatctgaaatgatgaaaaaatgttacacaatgtcatttttcatgatcattatctgaaaaatgttaaccttgtaaattcacttaaaggagttcaatgtttgacagtctttctgtcatctttgccacagaagcagtcaccaatggataactaatcagactgatttttggtatttgttaattctatctaaattactgcctctaaaattaaaagatgataccaatcacacctgttttagtagcatttctattaaatattatgaaactatattaagctataccaggtgagaaaaatgttttaattaaccagtcccttcttcaaaaatttgtcatcaccattaacagagatgtcaaattatcactgaagaatttgttctattttccagcaaccttcatttttatgcactacttaaggtctgctgtgctgttaacctcagtggttagacagactcttggtgcctcaccaagacaacataaatatctcagcaactgattctgggaagtcatttaaattgttttgcatgaccgtattaattcatctattgtatttttattttatttctatgaagttttgagactccctggtataaaagaacacggcctttgacaaaattcaacaacccttcatgctaaaaactctcaataaggtattgatgggacgtatctcaaaataataagatctatgacaaacccacagccaatatcatactgaatgaacaaaaactggaagcattccctttgaaaactggcataagacagggatgccctctctcaccactcctattcaacatagtgttggaagttctggccagggcaatcaggcaggagaagggaataaagggcattcaattaggaaaagaggaagtcaaattgtccctgtttgcagatgacatgattgtatatctagaaaaccccatcagctcagcccaaaatcttaagctgataagcaacttcagcaaagtctcaggatacaaaatcaatgtgcaaaaatcacaagcattcttatacaccaacaacagacaaacagagccaaatcatgagtgaattcccattcacaattgcttcaaagagaataaaatacctaggaatccaacttacaagggatgtgaaggacctcttcaaggagaactacaaaccactgctcaatgaaataaaagaggatacaaacaaatggaagaacattccatgctcatgggtaggaagaatcaatatcgtgaaaatggccatactgcccaaggtaatttatagattcaatgccatccccatcaagctaccaatgactttcttcacagaattggaaaaaactactttaaagttcatatggaaccaaaaaagagcccgcatcgccaagtcaatcctaagccaaaagaacaaagctggaggcatcacgctacctgacttcaaactgtactacaaggctacagtaaccaaaacagcatggtactggtaccaaaacagagatatagaccaatcgagcagaacagaaccctcagaaataatgcctcatatctacaactatctgatctttcacaaacctgacaaaaagaagaaatggggaagggattccctatttaataaatggtgctgggaaaactggctagccatatgtagaaagctgaaacgggatcccttccttacaccttatacaaaaattaattcaagatggattaaagacttacatgttagacctaaaaccataaaaaccctagaagaaaacctaggcaataccattcaggacataggcatgggcaaggacttcatgtctaaaacaccaaaagcaatggcaacaaaagtcaaaattaacaaatgggatctaattacactaaagagcttctgcacagtaaaagaaaccaccatcagagtgaacaggcaacctacagaatgggagaaaatttttgcaacctactcgtccgacaaatggctaatatccagaatctacaatgaactcaaacaaatttacaaaaaaaaaacaaccccatcaaaaagtcggcgaaggatatgaacagacacttctcaaaagaagatatttatgcagccaaaagacaaatgaaaaaatgctcatcatcactggccatcagagaaatgcaaatcaaaaccacagtgagataccatctcacaccagttagaatggcaatcattaaaaagtcaggaaacaacatgtgctggagaggatgtggagaaataggaacacttttacactgttggtgggactgtaaactagttcaaccattgtggaagttggtgtggcgattcctcagggatctagaactagaaataccatttgactcagccatcccagtactgcgtatatacccaaaggattataaatcatgctgctataaagacacatgcacacgtatgtttatagcggcactattcacaatagcaaagacttggaaccaacccaaatgtccaacaatgatagactggattaagaaaatgtggcacatatacaccatggaatactatgcagccataaaaaatgatgagttcatgtcctttgtagggacatggatgaagctggaaaccattattctcagcaaactattgcaaggacaaaaaaccaaacaccacatgttctcactcataggtgggaactgaacaatgagaacacatggacacaggaaggggaacatcacacaccggggactcttgtggggtgggggtgcagcacaccaacatggcacatgtatacatatgtaacaaacttgcacgttgtgtacatgtatcctaaaacttaaatataataataaaaaaaaaaaacactgaccttgggagtcacagtggattttaatatcaacagatctacatatatatttaacttttctgggcctcggttcatttacctgaaacgtaaacataacactacctactctgtaactattgagagaattaaacaggttagcgtataataagcacttggtttccttctacctccctgtatgtgcatatgtacttaatgctgtcttttgtttgcagaaataatatcataatcatagacatgagttttaagcatttctagcagaagtgatagatttttttttttcaatctcctctgtaaacaaggtattatagatttgatgaagtgaaaggcagtttatggctgggggtcagaataaactgagcacagtaacaactagagaacagctaatacaagtggccggaaaatttgcatcttgaactgcataaattagtatccttattgcttgtgtaagccaagaaatggggcctataaggtgcactcaaaacaaggccatctgtttattttcggattttttcccctctttcagattataacacattaagatataatttaccctagagaattaaaaatgttaaaaaaaaaaaaacccataaactccaactctaagaatttgtgatagtcttgccacagaaatgacatagaatgaggcaggttagaaacaaaaaggctggaaccattcttactgatgtctctactgtctgtaagaacacaaaatgatggtgctgcctcttgaaatacttttagctcttctcctacttcacactgcataatctgaatgaataatgtccctaactgtggagctggtctttaacaaagataaatgttgcctggttcctttatttcaaacatctacctaggtctctacccctctgcacacctctggtcactgtctttatcttcctctagtatttttgttccaccgttaggaggaggtaggtaaagctgtgagggtaggaaaaagtctagatccagttgggacttgttaaggctcaggaaaggtgtttactacaggaatttttttttttttttttgagacagagttttgctcttgttgcccaggctggggtgcagtggtgcgatctcagctcactgcaacctccgcctcccaggttcaagggattcttgtgcctcagcctcctgaatagctgggattacagacgcacaccatcatgctcagctaattttttgtatttttagtaaagacggggtttcatcatgttgttcaggctggtctcaaactcctaacttcagatgatacacctgcctctcaccctcccaaagtgctgggattacaggcgtgagccactgcgcccagaacattttttagtaatgattaccacagggacagaataggatcataaaggaatagaatgcttttctatataatttacaatcttagtagtttttttaatctaaagttgtgctgtccaacatcgtagccacatatatttaaagttaatgagaagtaagtaaaaataattcagttcctcagtcacattaaccacatttcaagtgctcatgtgacatactgctggctacctgactagatggtgaggaattaaacatttccatcatcacagaaagttctcctggacagtgctgataagcaggtaagaatgaaaaacaaagtaatagcccataatttcttttaaagtaaaagatgtctcagtctaccattataatgataacttaccaaacagggaaatattctagttttttttttaaatatatataacaactgtgctagcttcctacttaagcagaaaagttggaaaaccagaagttggatttgttggtaacaaccgctttattttcagacagaatctctgatgaaaacatataattatatatgctagcttacctgctgccagactgggctcagctgccaggatgtagtacagatgtcaccggcagcatagatatcaggaagggatgtgtgcatatgatcatccactttcaggccaccatcttctcctagatcaaactaaacaacattcctcataagcgttaagtgttaagaaaaatgaaacgactttttccattttaaagtaaaagaacaaattaaattgttacactttgcatgctcatctttaatgagaaaatgaaaaatatcagcaaagtttagacacctgagctgaatttccatggatcaaattccaactaagactgatccataaaactgtcagaatttcaacatgaaaagtatccaataaccatgtgactaccttatccataactacaagaatattctttttttttttttgtaagcttcaagtgctgaaaagcaaaaaatacaagatggtttctctaaaagaatcatttttgagaagtcacgggaggtgtcagtctcttaccaacatttagataaataaattgtacattataaaccattactgatgacgcttatgcaaggatataactatgtaaggattttaagcagtaaaaaatactgtaaatcaagacaatgttttaaccaaactgtttccaaccatgttaagttacagttgtacactaaaataataattattcatgtttgagaattagagatcttcacaaaaatacttcaaatatattcacagctggacaaaaaaatttcaccttacactgttaccatggagaaaaggttctacatttggtgtaactcctgtagcactgacaatgaaatcgcagccatatatcttttcattggtcaattccacatagacaggccacatctctttaagaaaaaaaaaccaaaaaaacagactttatttgtaaatggaaccatcaccacagcagtgtatgtgactacaatgactagaaacaaagaaagaaaaagaaaggcaagagataactttgtaacacactccttagcaattattatgaggcatatttgctaaagcaattttaatgcaattagcatcatctcgtttgggtataattttaaaaccatggcattttaaatgtttttccttcaaatttggacacataaattttgacaaagtacatttaaattatttctaaattatttctctaaaaatcttttgtaatactttacactccacttaagtgtttagttcaactaggtgtcttccctcactactcatattcaaattcccctttcctatggaaaaattcaaagaattcagaacagtagaatatttcatatgctagttaactgagtgtatttcttcaaatcatggcaattctcagaggagttgtggaactggagttaggagagctgcatcttagtcccaaaaatatacattttcaatctgatttgggtgaaatcatgtcacctttaagagctctaggtttttgtcttattttgatttataatatattctgattgttggtcaaaacactcagctctatgtaagatgtaatgccctatacgatttaatttactagaaaacaacagacagtgaaatgaagtgagttaatgttattaaattatggttttatttttacttttcatgtttaaattttatatggaaatacgaagttatttttaatagaacacagcaggattaaattgttttccttttaattaagtggttatatatattttttcttatttcattacttgcctgtatcagctgtaactgacttatggtctcttggaaaagtgaaggactttttcttcaaaattctaaactcatcctgaaggtagattttctttacttcacacatagtttcaaggtgaatcttatgagaaaactaaaattaagaaaatactggttagcataatacttacagaaagaataacccgggttactaatgatgaagaaaaaacgtatacttgtagaaatgtatagaaaacataattcttataatataaatgaaaccacattgggtgccctaaaataagtctctctatgcacatgaaaggagtgaacaaaaattcattcagtaacttaagagatctggtagctgcattagcagatagcatcgagggaatgctttttagcctaggcctcattgataattacaaatgcattttttaaaaattacagtagttgttgggcacagtggctcacgcctgtaatcccagcactctgggaggccgaggcgcaggtggatcacctgaggtcaggagttcaagactagcctggcctatatggtgaaaccctgtctctactaaaattaaaaaattagccaggcctggtggtgtgcgcctgtagtcccagctactcgggaggctgaggcaggagactcgcttgaacccgggaggcagaggttgcagcgagccaagatcataccacagcactccagcttgggtgacagagcgagactctgtctcaaaaaaaataaataaataaaataaataaataaataaataaataaaaatttaaaaaatgacaacagttatggactataaaattttcttcaggtcagttctgacttactgtcgtatccctgaacattaataaagtcccacgtaggtagtaaatactcaataaatgcttattgaattaaactgttgaagttctcaggttaaaaatataatattaggatctgaaggtgcaagaagaagggactttgtgtaatttccatcacaaaaattagatacaccgtgcagccagctcccctcctacctactgaaagccaaaaaccaatgctctaaagaaatcacacaaagtaacgaaggactgcatgcatgcttcttacagcatttagatttcacagccctttaacaactattaaaaaatcaaaatatctaacaaaatgaggaaaagcaaatcatctccttatccaattagggtattaagtgtgtatttccaatccatctaataacttttgtaagtttactgcatgcatctgaagtgacctttgagaaaagattaatttaaaataggacaggagtattcactgtagtctgggtatagaaagctctatccctgatctgaggatataggaaaaaacaaactcagtttctcctactatagtctcacaacacagaatacttctgtgaccaaatgtgtgtggggtgttttctacacactaagcaagcaattaattctgcacaggacaccatctggctgtcctctaattcaattcagttctgatgttattatctacctggagatagcatcaggtcccacatgttgagggatcaatctcacaagactgtcttccacttccaataccaattgcatgccccgggtgttttaccagttggtctgactaaccaaccataaatcaaggggctcccacgagcccctttcttaggttcaattaatttattagaatatctcacagaatttggggaaacactttacttacatttactggtttattatcaaggatgtcacgaagaaacagatgaagaaatacataaggcaaagcatataagaaggggcatgaagcttctatgccctctccagatagaccaccctctagcaacttccacatgttcagctatccagaagctctccaaacccagtccttttgggttttcatggaaactgtgttatgtaggtgactgattaaattactggctgctagtgattggcttaaccttcaacctctttcccttcctgtaggttggaaagtctaaactctaatcatgtcttggtctttcctgtgaccagtccccattctgaagccacctaggggctaaccagtcaactcgttagcatacaaaaggacacatcactttggagatgccaaaaattttaggagttgtgtgccagaaaactgcagacacaacattttattgtgcttcactactgttttgcagatagtgtgttttttacaaattgaaggtttgtgacaaacccacatcaagcaagtcttatcagtgccatttttccaatagcatgtgctcactttgtgtctctgtcacattttggtaattcttgcaatatttcagttttcatcattattagatcttttatggtgatctgtgattagtaatctttgatgtactactgtaattgtcttggggtgtcatgaaccacacccatctaacacagtgaacttaatcgataaatgttctgtgttctgactgctccatcaaccagctgttgtcctatgtctctccctctccttgggcctccttattcccggagacacaagaatattgaaaccagggcaatcagttactctgtagtggcctctaagtgttcaagtgaaagtaaggatcacacatctctcactttaaatcaaaaggtagcaatgattattagggttattgaggaaggcacatggaaagccaggcctcttgccctgaacagatggccaaattgtgaatgcaaaggaaacattcttgaagtaaatctaaagtggtattccaatgaacacatgaatgatgagaaagcgaaacagtcttcttgctgacatggagaaagttttagtggtgtggagagaagatcaaatcagccacaacattcccttaggccaaagcctaacccagagtaagcccctaactgttttcaattctgtaaaggctgagagaagtgaggaagctgcagaagaaaaggctgaagctagtagaggttggttcatgatgtttaagtaaagaagccatctctacaacaaaaatatacaattgataactgatgaatgtggctacactaaacagtagattttcagtgtacatgaaacagccttccagtggaaaaagatgctatctaggaccttcacaactatagaggagaagtcaatgcctggcttcaaaggacaggcagactctcctgttaggggataatgtaactggtgacttgaagttgaagccaatgcctatttaccactgtgaaagttctagggcccttaagaactatactacatctaccctgcctgtcctctgtaaatggaacaacaaagcctggatgacagcattatatggtttgggcctggttctccacccaaatctcatatcaaattgtaatccccaatgttggaggtacggcctggtgggaggtgactggatcatggggacagtttctaatagtttagcaccatccttagtgctgttttcatgttagagttctcatgagatctggttgtttaaaggtgtgtggcaccagcccccttctctctcttcctcttgctctggccatgtaagaagtgcataattccccttcccccgtgattgaaagtttcctgaggcctccccagtcatgcttcctgtacagcccgtgggaccatgagccaattaaacctcttttctttataaatattacctactctcaggtatttctttatatactgtgagaatggagtaatacacagcacatctgtttacatagtttactgaatatttgaagcccaccattgagacctactgctcagaaaaaaaaaaaaaaagattcatttcaaaatactacactcattgacaaggcatttggtcacccaagaactcagacagagatgcacaaggagatgaatgttgttttcatgcctgctaatacaatatccattctgcagcccatggatccaggagtaattcttactttcaagtcttattaaagaaatgcatttcataaggctatagctgccacagatagtgatgcatctgatggatctgggaaaagtacattgaaaaccttctggaaagaattcaccattctagatgttattaagaacattcatgattcaagggagtaagtcaaaatatcaacattaacaaaagcttgaaagaagtttactccaaccttcatggatgactttgagggattcaagatttcaatggagaaaggcagatatggtggaaataacaaaagaactgtaattagaaatgaatcctgaagatgagactacattgctgcaatctcatgataaaatttgaaaagatgagttgttgtttctcatggatgagcaaagaacgtagttatctgagatggagtttacttctggtgaggatgctgtgagtattgctgaaatgatgaaggatttaaaatattacatatacttggtaaagcagtagcagagtttgagagaattgacttttgaaagaacttctactctgggcaaaatgctataaaacagcttcgcacgctacagagaagtctttcacgagaggaagagtcaattgatggggcaaacttgttattttaagaaattgccacagccacccaaaccttcagcaagcaccaccctgatgagtcatcagccaccaataccgaggcaaaactttccaccaaaaaaagattatgatttgctgaaggctcagatgattgttagcatattaagcaataaagtatctttaaattaacgttatgtgcattgtatttttagacacaatgctaatgcacatttaatagactgcagtatgttataaacataacttttgcaggcactgggaaactgaaaaattcgtgtggctcactttattgtggtatatcatttcctgtgatggtctgggactgaacctgcaatactccaaggtatgactgtatatatattacagtatcacacctcaagagttaaaacgtaggctgagatccagtcttcgatgctttgacattcagttttctttggtggccaaatggaccaactgcattggaggtcttttcctaacactatggattttaagtaaagtgacctaacagttcgttgactatatatttattaccagtctttaataaatggttcaagaatttaaaattacatttagacatgaccaattagtatatgaaaagatacctcttttgttcctttaagattcaagccttcatgccaatctggtcccaatgcacttcctacattatctgctttagatttgcttctagcttcctttttccttcctaaagagatgaaattaaataatataaaaattaccagatagagaaatatgttagtgttctgaagttttttatttaggcaatgtaatgattcatatatatacatacattacagcatgactaacctatgttatctatattaatcattttagtcattaatatttttctgatgtagagttacaaaacagataatctttcagttgtgtgttgagtataaacacactcaacttacgttttggatgttacacggttaactggaagggtaagaaaattagccttcaaatttttataattttatatatttttagcacctccaaaatgtacaaaactcttgtttaattttataatctaaaagtttttcaaagctatcaaacttaaaaaaatatgaagtttgtattagtttttcaactcactgcattttttacaaaacttcttcaggtattgccaaaatgtagtatctgtttgcaaagatgcagatgggctgagttattcaatttattttaaatttcttgttttaattatatatatatatataaaatacatacatatatataaaatagaaaatctgaaaacttcatgtaaagatatataaatatccatattactatttccaaaatttattttattaaattttcttgtagcccttttctatatggttttaaaaaagttttgtatgagaattaatgagctaggtgctacacttaccttcagttgtatatctggttcttttatgtgcaattttagcctctgatttttcagcaatgagctttgaagtcaagaattcagctgctcctgcatcgaagaaagtattccctatagctttatctttaatggcccaaatcacttcacagccttcaatttcatacctaaaaacaatgttaaagttactaagagtgatttcaaaagtctaagtaaaaaatctttgcatttgcaaataatgatctcctgaagcaaaagtagggaatacatttttaaggctaactgggaaagattgattataaagaggaatattaacgttctttacagatgttaagaattaaaaattgaatagtaaaagaatctgaagcagtttacagaaagaacctttaagtgacaaatacatgtactgaatatcaagtaaaatttcattacagtgtacatcattagaaaatgttcaatttctacaatacacttattatatgaatggcccccaggggtaagcagtgctttttaaaaaatctggttatagtgtaatcaagtaatggatggatggcacatagctataatattgagaatcagtcacttatttggtaacaactttttatatcttcaaagcacattacggaaagggatagaaaatggaaagaatcagagttataagctaaaaatcttaaggatcaagatcaaggatcaaggatcttagaggaaggaaagaatgaaaatggtatatataagccaccttctattactatttaccactaatgtaaggtaatgggcatgtgatattttattctaggtttagatgctaagaagtggttttcctaacaatattcctttcacaaagtccctgaagtccattataattaaggtgatcacataatttatcacctaacctgggatactatctgctactaataatcatttttggtacaactggtggaaatggagacaatcccagacaaacaagatatatggccatcctaactataataggattttatctaaacttgcgatactaataaaatactgtaaaaagttaaggtattaatttttcacatttctttacggtacaaagtattgtcatctttatttcacagactgatataacataggttacacgacttttcaagactaatcaataaacagattacgaaaaaaggtttagtacatctgaatccaggtcacttgatattcatacttttcaacatatggtgataaggaactccttgctttacctaataagtcttcgtttttccagctcttctatgtcagtaaacatagaagattattgggtgaacattctattttatgttactctggtcatatagcattactgaccagcggaaagtggaatacacacaaatttggtaataaagtttgtatttcaatttacatacaggcatacagttatcatgtaatgctttctttttgaaaaactgggaatttctctatattaccatttttaaatttaaagtaatattacactataacacctatcagtgcacttcagcatactgatgactgactagcagacaaagttattacaagtaaccacaagaaacttcagtacttgctctacctcctaggacaccttctaatcctcttttcctgacttgaactatgttctcagcaagatgcacagtttgacgattatcatcacacagaggggaaatactgctttcattttgaaaatgactctacagaagcagacaatgagatattacggttttgtgaagttatgaaaaacagtatctgtttgaaaaggaaaggattaacttacacttagaaaggagaaaacagataataactgaaataaatgtataatgaagaacattagtattagtttcactgaaacacagtgtagaaagggtatgggtatgccaagtttcacgagagacaaagacctaatcacgcagcagacctcaagtcagagaataacattatgtgggtccatttttaattaccaaagaagagcttactaaatacaaaactatgagttttatccaattatacagtcttcaatctccaacttaaagaaaatgatgaataggattaaatgtaagactctgaacatttttgaacataaaatttttaaatgtaaataacaattataataatagtaagtgatactttggtgagagctgatagagaaaatctggcatgtatatactatacacaaggatttgaagccccatttacaataaatctatacctcttccctcttggcccacattttggttttgaccctttctctgtatttctccatataatgccacaaacttcataataacaataatgactgttacccatagtactcaggcaatttaagaactcttacaggcttccactgggtgagatcatccgctaaaagaggggcaaaaacctagtctgagagttggattgaatgcaagtgagcaaagatatggctttggcagagtccttattttgattcaaatttgtcctctttgtggtttgactcaactttatggcctgaaaaagatccagactatttcatgtcaatcatctgctagaggataaaatcatgaagtgaatcaatcttctgcaggacacagcaggatatttctcaatggtttttgaacttgtaatatcgtcttaagatgaaaattaattaatgtgttcacatttcccaagctaccaaaaaaagagctgcaagaaccacatatcctaaaacaggagtcacaaacattttgggtgacactggccagacaggtaacataaatgagtgtagcaggatttatcatataagcaataaaaagtggtgagggctatcactagaaatctcaaaaggtgtaaatatttgaattatttttaaacataaaatatacttataaaacacatttatgggccaaatttggccaatcaccttgagacctaaagcattcccaaaacatatatattttataataaaatttctacaattacggattccacaagagctaaaaaaatatggtggatttttccccttgaaaacatatgaaaattatatttatctttgattttcagaataaaaaacattttccagtctgccaacaaatcacaagaatcacaaagcaattgtttaatttaaaaacaaattatttttaaacaatttaaatgttatcatatttaaaaatatatacttacactaactcaagtgcaataccaccgttccctatgatcattattcttttagctttagtaagctgtttctgaaattcctatgttaaaaagaaaataatgaggtagtattttgtaatagtgggcaataatctgaaatatgaggcttcgataatattctaaaaatgtaaatattttattgaatttgtaaaggaaaaaaatgaatctcactttcccactgtatcagggtacatcctctcaattaatataacaaaagtccccctttatgctttatcccaagctgcctttatagcaatgcctctcctgattttcctttccttttaggtcattacatttacagtacttcagaatttcggcaggaggcactattaacttaccacattcccaattatttgaccaaatcaattattctttcttttcacctagactctcagtttccctagagttactcaacacttaaaacttctaggaatgagaagctcagcagcatagtggttaagagcacagactctggaagcactggctctagcaattactaactgaatgactttgggcaagttgcttaccctatctgcatctcaggtccttcaactataaatggaaataagggactatatatcctaatgtttctgtaaggattatgtgagatgacacagacaaagctggtaggagtagcacgcacccaataatgtcaaacttctactaaaaaaaaaaatgttattaacattctaagacagatacattgatgcctccaccccccagaaaaaaaagatcacaatgagcttagagaagccagtggtaaatgtaaatgacagttaaagggtgcagcacaccaacatggcacatgtatacatatgtaacaaacctgcacttggtgcacatgtaccctagaacttaaagtataataaatatagatatattaaaaaaaaaagagagagagaagccagtggtaattctttgggcactttcagaagtatagaatagtcccactgcttcagaatgacatctggccctcctactaaatttatattaaatttatctccaaacttataatattcactgaagctgacatctttaaaattctccaagaaaaaaacaactgaagtttatttcagtttgtccttcattgaggatattgcaatttaagaaacatctgcaagagcactggacctagaggtgaaaagcacaagtttaaattgtgtatctgatagacttaacagctaaattagtatagatacatacttaatctcttgacctcagtttcctatttgtaaattgggagtaataatcgtcacacaggattatcatgaggattcaatgagttcatgtatgtagaggaccgagctaaaacagttatgagctcaatctctgataatatgaacttaaattgtttataagaagataatcaagttcctttaattttctctcaattcctaattattaagagaataggctgaaagaaaacattattaaattttcagaatataaattatattaatgcaaaatcatcatgtcatgagacagaacaacgaacttgaggttagacatagtattgtgaaaccaggaagagcttcttggcaataagggttaataagccctgaattaaattaaattaccaaaaggaatttgtataatgctccaaaaacagatgtttcaccttattgggatagtttatctagggcagaacaataagccaagtgaccttttctgttctatgattctatcatgattttgtaccacaaagatcttttgaattttttttgctggagaataagatcagtacattttgaatacgcttcacctttttggaaaaaattgttatattatttaggttgcaaatcacatattccccaagtagagtaatgaatgtgtgtgtaatataagttgttaatattcagcacagtcattatatctgggttatctcacgctgataacacatcagcatgaacttaaaaacatagtgtcaactaaaaatataaaattggcaggaataggctgggcacggtggctcacgcctgtaatcccagcactctgggaggcctaggtgggcggtcacgaggtcaggagatcgagaccatcctggctaacatggtgaaaccctgtctctactaaaaatacaaaaaaaaaaaaaaaaaatcagccaggcgtggtggcaggcacctgtagtcccagcttctcgggaggctgaggcaggagaatggcgtgaaactgggaggcggagcttgcagtgagccgagactgcgccactgcactccagcctgggcaacagagcgagactccgtttcaaaaaaaaaaaaaaaaagaaagaaaattggcaggaataaaacataaccactctgtggtttactggtcatgaaacaaaaatttcccttctgcccttacagtttaggaattgtaagtggaacactttaattcaaatgtagaaaattcttttattttccttctcacgatccaaccttaaaatgttacctgagcactgtctgtatcacggattcctaatacataaggatttccttcacatatcaactttggtttagctccagcacacagacagagtttcttatatacgtgctgattgccatcttctgttacaatgcactgtaaatacatcaaacaatgaaagaaaagggagacacataatcaacatggatacaacttcactttaaactaaaaattcaataaggcaaaagcaaaacataatatattaaggttgcctcttggtggcactcagttctttgttatagcaattacaaaactaagcatgagaatacatgtactaatccagttattcttaaatcattttaagctcatgaaccattttgagatctcctgaaaactagtctttctcccctggcataaaaaggtacattcacacaaagttttgtattaaacttcagggaatcccatgttggttgaaaaggtatgttgaccccacgttaaaaacaaaacttcaagaaatttttaaatttaagcattctcattatacctgtgacaggccttgatgaagatttctgatctcaagggaagttactgtaagaagacctagtaattctaaccatatcctaccttcatatctattatgagtacagaaaagcagtgagtggaacaagaggttatggtatgtcttcttaatctaaaaagactagaagtgcttaaaaaaaatagtacttatattcttaagtacaaataatgactttacgagcaaaccaaatgcttttggggtatattttagtataagtaaaaaatatgataatctttaatcctagcatgtattggctttaaatttatattaattaataacataaatgggtctaaaactacatatcagagatatattgcttttgttctttaatactgaatgaaaaaccacatataaatagtagcctttagaaaacatttaaacataaatgcatgctactatgagagatgctcaactttgttcgaatgatttaggggttaatgtttgtgccaagtgtttgacttacaaaccttgttaaactgtatcatagcacttaacatccaatgagacatttataactcaaattaattcttcagttccataacaaatacataaaaccagtaatccagcatagcataatccatgtagaaattttatacaagtcttcttttaaataatctggttagaatttcaactgacaagaacaaaagttaattataggcactgacaaaactttaaaaataatttgcatttagctgctgtaaaaacaaatagcacaaacaaacacaaaaactctttccattagctactgctaaatttttggcaagagacgtgaaagtaaaacatactatctctaattcactaaaaaatgtaaaggacacttctccagacggaagtgagccacacactctgcgtcctcgcctcactaggaaactactgaagttcctggggaagcacagtagcatttcataagaacaaaatggatggggaagagaaaacctatggtggctgtgaaggccctgatgccaggtatgtgaaattgatatcatctgatggccatgaatttactgtaaaaagagaacatgcattaacatcagacatgataaaagccatgttgagtggcccagctcagtttgctgagaatgaaaccaatgaggtcaattttagagagataccttcacacgtgctatcaaaagtacgcatgtgttttttttttttttagatggagtctcgctctgtcgcccaggctggagtgcagcggcgtgatctcagctcactgcaatctcccgggttcatgtcattctcctgcctcagcctcccaagtagctgggactacaggcgcccgcccccacgcctggctaatttttttttgtatttttagtagagacgggatttcaccgtgttagccaggacggtctcgacctcctgacctcgtgatccacccgccaaggcctcccaaagtgctgggattacaggtgtgagccaccgcgcctggcagtatgcatgtattttacatacaaagttcgctacactaacagctccactgagttcccgaattcccaactgcacctgaaatagcactagaactgctgatggctgccaacttcctagattgttaaataaaagaaattataataaactgttaaaaaaacaaaaatgtaaaggacaatggataagagaaggcagacatgcactgcatgtgggatatttttcaaatggtaacgggaagcactctgattcattcaaatgccctaacacataaattccctgacaatccatttagcatattttgagagcccacctcaatttacaaataaattgacaaatatattacttggaatatgtaataccactataagtattagaaacttatctggtttggggattcagattttttattttttcctgataaaattcagtacttttttctctcaaattacttgtgtttcaaatgtggtatatatgtgttttatccctaaaggagataaaacacatctctaatttatgagctagaactcataaattagaactgcttatagaaacaactacaaatctacttctcatcttacctgaagctcatctgaggatactgtaaatcatctaacaacatcctttcctgagactgccttcttcattctcatgtaaagggttattgagtcctgccaaatttatagcagaaatctcactcaaatctgggatattttttacaactacattgtccctgtctcagttcagaccttacatcatttttcaaatcaattttttaaaaattattattatcctttttgagacagggtctcactctgttgcccaggctggagtgcagtggcgcaatcacagctaactgcagccttgaactcccaggctcaggtgatcttcccacctcagtcaccaaagtagctgggactacaagtgcacgccaccatgcctgattaactttttgtatattttttgtagatatggggttttgctatgttgcccaggctagagtcgaacttctaggctaaagccatccgtctgccttggcctcacaaagtgctggggattataggcatgagcctgtacataatttcctgactcttcacataatttttgactatcataaccaccttctagtttggttggctactagccacttgttcatgctcaacactcctatcagatgtatcttccttaaaaaaaaaaaaaaatctattttatcattgatgccccagctcttaaaatcaccttacaatttctcccaaatataaaacaaactcaacttctctcttttttttgagaaggagtctcgctctgtcgcccaggctggagtgcagtggtgcgatctgggctcactgcaagctccgcctcccgggttcacgccattctcctgcctcaagtctcccgagtagctgggactaacaggtgcacgccaccacacccggctaattttttgtatttttagtagagacagggtttcaccatgttagccaggatggtctcaatctcctgacctcatgatccgcctgcctcagcctcccaaagtgctgggattacaggcgtgagccaacgcaccggcccaaactcaacttcttatagtgtgacattaaaaacccttcaggttctcacttacttatcttctagccttgattgccaatctcctttacttaaccacaccctaatccctttgacatctctattcttcatatttcttttcctttctttgggtctttgaacattcaatctccccttcctggaatgcctctttccacctggggaactcttaatttcactcatctgttaatacccccctcattttactctctctgtaaagtcttccttaagccctgatatcagagctttgatagtatttcagtgactgtgttttttatatgtcaatataattatagtatgcatgttcatattccctttgacactgacagttcctaggagccaacacctcgtattaaccctactgcatcccagcacctaatgcagtatccagaacacagtggacactttataaacattaatgtaatttgaaatgtgaagactaaaatcccaaatctaattatataattccaataaacttacaaaaactgtattttttctaataatactggaaatcaatgtcactaaactttacatgttaaaaacttaaatggtggtggtagtagagctggagtgaaaagaggcaggcaaaacttcatcaagattcaacaatggaaaatgttattaagaaaacaattatcttacgtgttcttcactcttcagttgctttacgccagattctataaccttaatgttgggaaagcgttttcctaacatggtacttgattgttcttcaacatcgaattcttccaatattttagaaatctgtatagatccaagagattaaaaatgtatatttttaaagtattttctttcaagaatcttaaataataaaaatactttgcttttacacactattttgtgtttataaaacaaacaagttagccaactgcactatatagagtggaaagaggactagactcagcatttagagacttaaatatttgcttggccgctcctgggcaagtcaggtgctacaagccatagtttcctggctaataaaatgagagctgacctgtaaaatgaggggtaacaccacttacatttctacagtttagccaaacagcttatttatttccttatccttcaagctttctctatttactagcagaccttatggtcatctagtctttgcactcttctttcctgttctataaaaccatcagtattctagactcactttcctttctgtccagctaaagttcaattgtgaatcatttcaccttttccctaaatcctttacttccttgctctcttatcctaaactgttaacctgaaaaccctcaaccctataaactatctgcttgctctagtcctaagcccagtttgctgcagaaagaccacacagccttacagattgatattcaacctcagctgctccttaaaaactgcatggaaatcttactgcatggccctgacagttctcaaaccttttggtctcatgacccctttacagtcttacaaattatgtaagaacctacttctagggttatttaaggatcatagaatagatctgaaacctttagaaggccacttgatgcatggtaagcacttaataaatgtgaattattagcagtaatcttttttctcctttaaaaattatacaagtcatgaatcatgctctttgtaacactaaacaaacaatacataatacagagtaaatgttaaagtctctatcactcttcatatctcatccttaatccctcaggataagcactagtgactttttggtgttatgttctatacttttaatctccttatcttatgtgcctagcacattggttaatatataatataggtactcaataaatcataaagataatgccatttcctactgctgtacacagaatagctgatatttgtatatttgttattggcacatttaagttcacaaccctgtgaagtaagcaaggaaagtattaacctaatactacaggtgaagcagcttacagagatcttccaaggctacccgaccagtaaataagaggcctagaaaccaagctttttccttctgttgtatataacttacaaaaccggcaaaaactgaattcaagtctcacaactcttggattattatactgaattaggtcttctggaaagatacttatgagacccagctatacatccttctcttatgtatacagtcttagcttgtcattaaatatgtacttttaccttttaaagattaatagctataatttttcctctatttctcccaaactccataactctttggctatacctaagtactaagctatcatatgtatctctatttaggttataaagggacaacatggtatatgccactaaactacccttggtcttatgggtttacaacatgagaaaattatattccattatcaggatattaccagagacatcgtattaaatgaagggctatggtagtagtcttcactgaagggtgggaagaaagatcagaatgtacgtttttcgacattttagaaattttattttgcataggctttataacatttataattgtagttctgtagctcatacacataacttattagtatacatatattgggatgtcagggcaaaactttttaacagttgagctacaggaaaaaaaaagtttggagatgacttttctatgatactattacccaactgttcttagactcctactataatgtgaatataaattaatggaatacaaagtattctgagacactaattatctataagtataaacttggcttggaagcacttttctgatgtgtaaacacacacacacacccctacccatattgataataaatatcatgtatatttgtacccattttagatttgcagagcatctttcctgaaaattttttattggaaactttctcaaaagtaattctaagtggaaggaaaatggagaaaaagaatagaagattaaaaatttagtatcattctgggagcttctggtattctatctgaataattctcaactcgagcttttttaaaataactctcaaaagaatatttgtaattttaaacaattaaaacactccagaatacatggaggtattgtcatcaagatggctaagtaggagataccagccttcattcccccattaaaaaaaacaaatatagacaaatcttcacaagccaaaatagcccaaagagggctcaacggcccattaaacaatctgcagcaacacagtggagcatgaaaatggagaataaccacataaaagaatcaataatgaccctggcatacctgagaaactaggagatagctaggagcaaagaaaggcagaggctatcagtatcagccacatggtggggaccactgtggtaaatggtggcctgcactgcagaggaaactggcatcccttgctactgtgaggggaccaacaaccattcctgccagggaaccctagagtgggagacatggcggcatatcttgtctccacaaagaagtggccaatgtcaagatgctttggcaaaggagtcactttgtcctcaaccctgtgagtgttccaaccccagggccatggtcactctgagaatgcctacacctcagacccaggttctacggcccatactgggcccacctacatctcagacaccagagccatcaccatagtaagctagtttgcactttggggcctgcaaccaatcctcactgcacatgtctgcaatctaggcactggctcagctgccattgaaagctaggccctgccctgacactgaagctgctgtaactctgagcacacatgtgttcccattcttggtttccctggctgcctcacaagcatcctcacctcatattctattaccaatatagcagtacgggtacctgcaccctaggcaccaatatcattacagtcccagatcccagaactttaattcctccgtgtatgcctgtgttttgggcctcagctctatctgctccataggcaccacttatcagacaccagcgctgctgccactgaacccagaaggcagactcagtgccaacagggatcccctaagccacaacttcctttgtgggagaagaaaagattgggaggctattagcagccattgacattgaaaaccccaacaaccctcactaccactgcagacatccagagttggatgctgaggatccctgcaatcttcaacaacaattaactcagctgacggagctgcacagactacaaagtgggcaccctcactggtgccagaactgctacatcccatctagcaagcagccctccccataggggaaggtctttccacagcaaaactagcccatacttctgaaaacagcaagtgtgtcatcaaatgtgcaaacatcaacataaggcagtaagaaacatgataaaccaagaagatatgccaccaaaagaacacaaatgtcagaactgcctaagaattcaaaataattgtttaaagaagctgaaggaacttcaagaagttacaaacaattcaattaaatcagaaaaacaataagcaaccaaaacaaaaaatttaaaaagttatttaaaaactaaagcagaaattctgacgatgaaagatgcaatgaatgaaacaaaaaaaaatgcaacagactatgtcaacaagagaactgatcacacagaagaaaacatctgtgaatctgaagacagattatttgaaaatatacagtcagaagggaagaagaagaaaaaagaatgaaaaagaacatagaagtagggaattaaaggatggcatcaaatgagcaaatctttgaattataggcgttatagaaggagacaagaaagacaaaggagtagaacatgtatttaaagaaataacaacagaaaactttccaggctgggcgcggtggctcacacctgtaatcccagcaatttgggaggccgaggtggatggatcacgaggtcaggagttccagaccagcctggccaatatggtgaaaccccgtctctactaaaaaatacaaaaaattagctgggcatggttgcgggcgcctgtagtcctagctacttgggaggctgaggcaggagaatggcgtgaacccaggaggcggagcttgcagtgagccaagatcgtgccactgcactccagtctgggcaacagggtgagactccatctcaaaaaaaagcaatcaattcaccataatcaagtgggatttattcagggatgcaaagatggcttaaaatatgcaaatcggtaaatgtgatataccacattaacagaacaaaggacaaaaatcatgaccatctctacagatatagaaaaaatattcaacaaaattaaacgtcttttcataataaaaacccaacaattaggtatggaaggaaagtaccacaacaaaaaaatggtcatatacaagcctatagctaataatatattgaatggagaaaagctgaaagcttttccaagatcaagaacaacacaaggatgcccactctcacaacttctattcaacacagtactaaagtcctagctagagcaattaaattaggtgacagaaagaaataaaaggcatccaaattggaaagattttaaatagcttgacttagccattccacaatgtatacatgtatcaaaacatcatgttgtacagcatataactgtacttgtcaatttttaagaaagaaaaaaatacacaattaccctaactgctatgcaagttattgcaattttttcaaattaatattaacaagttatacaaaggttcttacctgcttgaaatttgtaactgctttaataacaggagaagctgttaccaagagaatatcttccgatggaaagtgagtagccaacttatttttaaaaagagagaaaaaaaattaggacaaattactttaagtactggtatatatggtttggggttgagaataatgcaattttaataatgtaattaatctagaaaattaaaaacccactgttcctcatctaaaggtctccattatccttggtcttgatggggcaatggtgaataatattaaactctgatactgagaaaataatatttacagtaaacactaacaaagaactcctgaacaagaaaagtgatataaagaaatatcctttatttacttcaactattttttataccaatttagagttataatgcagaggatgagaataaactatcttcctaattaccagttaaaccaacttctatttatcttaaaataatatttcatttgtcttcaatgggatgaaattaaagcaaaccctcaatattaaacacttagaatattggtctaactttccccaggtgctctggcactcctattctgcctcttccagtcagtacatattgtgggacgataaagccattttaataattgcttccacaaaatttagaggtataacttgttaatgtttcattattttcctttagctacaacctcggtcttcttcactctgtacctgaaagcattttcttatctcaaagtctggttcctcgacaccaccaccctcaataatctggcttctattcctactccatcactaaaacagcatgtttgagggatctatgaatccttaaaatccaagggattatttattttttttttaatggagatgggatcttgccatgttgcccagtctggcttcaaactcctggactcatgcaatcctcccaccttggcctcccaaagttctaagattacaagtgtgagctatcgtgcccaacacccatgcgattcttctcagtctcattttatttgaactttctatatttgacaatatcattactctctccatctttctttcctctgtatattctgtaatttatatctctgctgtttccattgctagatgaggtcctcaaaacttctttatactactgaaatcaccttcgaattggctctccagtttcacgtataaaccagctgcctctgccacaaatacattgtaactaatcatctttcaagccttttcatatgatcaagttactccactgctcaaaaacatttgactacttgtaaattcttgttaagttctcagcatgctaagactccttatgatctatgctttaagctttactgctccctgatgatccatgcttttccactggagatgacattcttttcttgaatacttggtaaactttcactcattctttcataatgagattttaaaaataccttctttgattaaaaaaatttcctcttccctaattcactccctacatactccacaggcacctctaagataaccgttgatatctcttgcatagacatacaatattgtaatattgtctcttccagcaggctgtgagtccccagcatggtatataccatgctgttcatagttgaacactcagcccttaatacggtgcctgcatcatatatgtttacttagtgaataaacggaaaatacgcatccaacgatggaaacacttgagtttcttccactatttcttatgacttcagtgattgctcatgtttactttatatcaacaaaataatgtagaactttttggaatacacacatgtatctgaatatatatggtctggctattcagtataatcaagaaagcaagccctacatgcatttaatccttcgctgattattttacaaaactttactagaaataaagtttcttctatcttgggagttcgaagtatagaaaacttacatatgggattctttattaattagttaagatgcactaaagacttggcaactatctggaaactaaactcaatcacctacgataattaacaaagggggctgagggccgggtgctgtggctcaggcctgtaatgccagcacttcggtaggcggaagcgggcagactgcttgagcccaggagttcgagaccagcctggccaacatggtgaaagcccgtctctactaaaaatacaaacattagcggggcgtggtggctggcgcctgtaatcccagctacaggctgacgcaacagaagaatcgcttgaacccgggaggcaaagcttgcattaagccaagatcgcaccactgccctccagtctgggcgacagagtgagactccgtctcaaagaaaaagaaaaaaaaataaaaagaaagggggctgaattttttgtctaaatacaaagtcctcatgtctgctctgacattacaaggatctgagcacggatcagccagctttggtttctcggctataatttgcctcccactcctccctgcgcctaagagaaagctagtgaggtcatctgaggaccaccaagcagtttctaaaatctgggagcaataagtgcggaaaagggcgcagcaaaaaaggaacccggaagaagaaaaagggagggggtgggaggaaggcctccagtgctatcccctttggggtcggggaaagaggcggaaccgcctgagcaccgccctacctgctccgcacaagtgacgcccgcgatgccgccgccgaccaccacgaacttccctgccgtcgggggagggcgcgctgcctccatgctgccggactcccagtggtttactga

SEQ ID NO: 8821 - DNA, 503 bp, Homo sapiens
cagctgtttctatggtaattttttgttcattgttatcacttatagcttactctattatggctttttaaaaaaaaaatctctgtatattttcttatccttacttgtttgcttacttttctaaccattagtctaaattgacatttaggtaaatttgcttttaagttgaatacttaagccaatgattcagtcattttgtcttttctggggtgggtagtgcctactagacatttaattgtgctgcattttaatatttcttaccattcattataaactttttttttttagacaggctctccctccgttgcccagactggagtgcagtggcaccattttggctcattgcatccttaacctcttgggctcaggcgatccccccaccttagcctcctgagtagctgggactactggtgcgtgccactgccatgccttgctaatttttgtaccttttttttttttttctgtagagatgggattttgccatgttgctcgggctggtcctcgag

SEQ ID NO: 8822 - DNA, 503 bp, Homo sapiens; identical to SEQ ID NO: 8821

SEQ ID NO: 8823 - DNA, 305 bp, Homo sapiens
attaatttatgagcagctgttgctgtatacatgtaattatgtttgactacaaatgcatctttacaaaatgggcctagtggaatcataatataaatggttcagattaacttaattcagattaagaaaattgtttcatactgaggtaagcgattgaaaaattgtctatttaaaaatgcagtgcattttaaagagttactatttgaggatctaaaatatacagagaaggctgcatattttactttgatcttattaccatccaaaagaaagcttacatagaaatgatttgtcactttctgctttctgaa

SEQ ID NO: 8824 - DNA, 305 bp, Homo sapiens; identical to SEQ ID NO: 8823

SEQ ID NO: 8825 - DNA, 16807 bp, Homo sapiens
aggatgtgctgatggagctccttgagcagtgcgcagatggactctggaaagccgagcgctacgagctcatcgccgacatctacaaacttatcatccccatttatgagaagcggagggattttgaggtatgagagtgcctttttgtttttttcctatttgagagcatgacgctgtgacatatacccagacctgcatatatgtgagagaggaagcaggccatgggccagagatgagtgggggtctctgaccctccacgttacgctgaaggtggtggccagtcatcatctccaaatagtcatcgggtatcacccagacctgggccctacctctgtggagacccccacatctcaaactacagagtaaccggcactccactttcgaaaggctgccatgaacagagttttgtgatcaccagttgtcccttttctgagaactcttccttactccacctgcgtgaaaaaatggtgtcccttccgtccatcctgggcttgggaggtcatccagtttctctaggcatatcaaacagagcaggaaaagcaaaggccaagaatcacgttggggaaccatctctgacatcgcatcttaacttgaaaacagagtttgcttactctaatgtggaaatgtgatgggtcctcacgtgtgggctggcctttgggtaggaaatgttaccattcattaatgatcactacaagttgtgcagccaaaatgtgtgtgtgtgtatttttattcaagttcaaggacttttcacctccattatcacatttgttattttaaaatcgattctcctctttgcacatgggaagaaatgggctttgttctgctttccagaggctggcccatctgtatgacacgctgcaccgggcctacagcaaagtgaccgaggtcatgcactcgggccgcaggcttctggggacctacttccgggtagccttcttcgggcaggtgagcctcctgtccattctgcagactgtcctaagtcctttaaaaaaaaacaaaaacaaaaacaaaaaaaaaactataataaagttatatcttataaattctctgttttctgtaattgctaatttgatgaatttgtcatatttagtatgattcttatcttcctcagtagtaaactttctgctttttttctttcttcctgtcttttctttattactttcttaaggcagcggtaagttcttcctccttaagacattcttagcaacatctttggtacttcagtgtggtttgcaagtttgcttttcaagtctgtatgtttatctgtctagttattacaaactccaaaaaaattaacattttattccatttacagaaataaatcacctgttttcttatatatctatattgcatgttttaaaccaaaattaagactttctggtgtcctttgtgcctgtgcatctttatcctttgtagtataatatctccacaagtatatttacagtttttcagaaaccctataggaaagggtttatctaaatttaacttaaattttaaccttcgagtcccttaacattattaaatggtataaattataatacatatatttagggcgtgtggttttctatgagcattatataaccttcaatttattctgttattgtcttttataactttatagcaataccagtttacagacagtgaaacagatgtggaggtaattacagtaaatgcctaaaaagcaagtaatatagtgaaattactgcgtctaaactcctagtttgatgtggatgttttttgtttcatgctagcttgcatttttttttactgttttgtgcaccattttctctctcttaatttacgtgagaaactttaaaaaattttcttttaaacattaaccccagttggactttttaattttcaacctttttcacttcccatgcaattctaagccttgtagtcaaacatgattggtgctaaaacagatgatgactggtgatatgaaaatattttctgatattgagctacaggtctttaatatttttttctcatcggtaaagcaaaatacaatttatacaagctttacctaacttttactaaacttactccagacccccaaacgcttcagttcatgccataaaatcctgtgtgcatgggagccatcaggagaagggaggcatgtccacttctgagcctgcctgtcgtgggctgctcatcattttctagtgagttctgcttcttgggaaagtgaaacaggcttgactcccattagacttccctgggacagcttagtcttgtatccaaaatctttcatttcactcaacacttaatgactgcattcttgaataagtttgcaatgttgtgtttttcctttacctttgcacctagacttcatgttattagcattttctttctcattcagaaagcccatttcagcaggatttttagacccattcctttttttcccccttgtaataaaagaacgcttcctaggtggtaagccctgggcttacgttcagggatagctctaattgtgctttatgtcacagggattctttgaagatgaagatggaaaggagtatatttacaaggaacccaaactcacaccgctgtcggaaatttctcagagactccttaaactgtactcggataaatttggttctgaaaatgtcaaaatgatacaggattctggcaaggtatgaccatgtttggataagtttcatagcaatgtaatgttgtgattgattacatattatatatttttaaatgtatatagaaaaaaacacaagaaaaatattaaggattgttggccgtgagtggcaggtgtattttcttcctgatacctttagtgctttccattacatgcttgacattaaaaaatctttatcgcctaatttttgaaacatctaattttacaaaataattaacgtctgacaggatatgtcatttttagtccagctatttagaaactctgacagaatgaggcccgtggcttcgctactcactgcacctcttcctgcatgtagcacatgacttgccactctgtcactgacggctggatgtaaggacaggtgaacagatgggcggatgggtgaatggacacatggacaggccaaggaatgaactcaccagcagcgtgactgtgggaatggcgatcattttctgcttagagagctgtcctctggcattctgttctcatgaagacccttttggaacctgcacctttgtcctgtacctttgtgtgtcccaccctcctcaggacatctccaggaggtcaggtctccctctgcttcctgaaggtgaaacatggggcaagacggtttcactcccactgcctttaaattattcctgctaaagaaagttaagttttaataggtttggatacaattagaatgaatggccaaatggctttttctaaaatacaaataataactttttttttttttttgagatggagtctggctctgtcacctgggctggagtgcagtggcgctatctcagctcactgcaatctctgcctcctgggttcaagagattcttgtgcctcagcctcccgagtagctgggattacaggaacgcgccaccacgcctggctaatttttgtatttttggtagagacagggtttcaccatgttggccaggttgttctccaactcccgacctcaagtgacctgcctgcctcggcctcccaaagtgctaggattataggcgtgagccaccgagcctggcccaaataataactttctatgactttatgtattttcttctaaagtttcaggcacttttccatctgttttttcatttttcttcacaatcgtctctgttttgagaacagttctctttcatttgcctgccttataccagtatggtctccatgtgctctgcacagccatttcttttgtgtccctttttattgctctagaaggttaaatacaattaaaatgtgcaaaattgatttgttgatttgtcttcctaataaattagcttttgtttctgcataggaattgcctatgtttaattctctatcatgtcacagaaatgaaagtaccaccaattctagcaatgtggttttaaaagcatttatatgttaaatagaaactaaatttatcattagattagtctagattaatctgtacctgtattaaattaattgatctgcagctgttgcatctaatctcagctgtctgtagattaatgataatttggaggcctagcttccaaacattattcctaaaataaacatttatctctctaagccaaatatattaaaaatgcagtttaagaaacaatcagagaaatccagactggaggtcattcaataagaaaaccagcactttgggaggccaaggcgggcggatcacctgaggtcgggagttcgagaccagcctgaccaacatggagaaaccctgtgtctgctaaaaatatataattagctgggcatggtggcacacacctgtagtcacagctacttgggaggctgaggcaggagaatcacttgaacgctggaggcagaggttgcagtagctgagatcgcgccattgcactccagcctgggcaacaagagcaaaactctgtctcaaaaaaaaataaaataattcaatgttatgggaaaaatgaatgatagggaattcttctaaattaaacatgactagggacataacaactaaatgtaaagtgtgattgttgattagattctgatccaaacacaaatatctataactaacattctggagacatttgagaaaatgttaatatagactgggtattggatggtattagggaatcagtgttaatttgggtaggcatgataatgtattgcggttatagaagcaaatgtccttatttttaggagaagctgactgtagtatcctgacgtgtaccacttactttgaaatggttctactggaaaaaaaaaagtctgtatgtctgtgtgtgtgtgcacatccataagtgtatgtgtatgtatatttgaaacaaatatagcaaactgctagcagttgttgatccaagtggtggatatgtggatgtttgttgtactcttctctccgttatatttacaaataaaatgttggaaaataccacgtaggtaagaactgagtgattccttcatggagcaccaatctcccattgtgctgtttcaattaaaggtcaaccctaaggatctggattctaagtatgcatacatccaggtgactcacgtcatccccttctttgacgaaaaagagttgcaagaaaggaaaacagagtttgagagatcccacaacatccgccgcttcatgtttgagatgccatttacgcagaccgggaagaggcagggcggggtggaagagcagtgcaaacggcgcaccatcctgacaggtatgggccccagaagccgcatggacacgagcccggacacctcgccaaagagctgtccagagggattcagaagcttcaggactggaagggtctttcgagctcagttagccacccccacacccatttcagtttcacatttatctagtgcttccttttgaatacttgggatgtttttctgttgatctgttgacacttccttcttccacaagaccagaagctcatatccaatctaaggtcacttacccttctgagaatctgatgaaaatggcgtgccttatgtgcctagatgcttttgcacacagtctaaggtgacttatggactccaggtccagcagccacacccagtcctgggtctccgcacagggagggacccgtctcacacacctgtctcaggttctagcatggcctgctcagcggtctcaggctgtgagtaaatgggatgtgagcttggatcgccccacgctgttgcccccgggggctggccagctgccacttgaatgcctcctctgccaggaagctcactgcattcagtggctatccacgagttcagcttaggcagttttcactgatccctttggcactgtttagccagtgataacccactctgggaaatgtgttttgcatcatttcccggtccctggcaagtgtctagtcatcctggggtgatttttaccttctgtgggagagcttgacccatccctgcctcattagggtcagcgacatcactggggtaacctaacataaaatgctttcttgaccaagaaatatcagtgggagggccgttgagaatgccaggtgtgccagctttcaccacacgtcttccaaagagtggccctagttaagtcagaccaggaaagggcctgctccccggaagttggggttgttgagtttctgtctgggtaataatacacactatcataataagcggaaggagcgctgtggagatgctgcacccaggtgcttatcagctctcaccggcgaagcgtatgctttaaaaagagagactggatggcgtggggtttatatctcagtaaagctgttacaaaaaaaaaaaaaaaaatacaggtttttatgaattagcccaggacagcgtattgcagggagcttttcacactccctatgagggaaaagagatacaagttaaaacaaaactgtgttcttaaagtgtccctaatcctgcttgtaaaataagaagacagcatatataaagcacaaataatattgtcctcacaaacatcaccccaccccaaataatttaattatttttttaatgcacacatcagtagcaaattctcattaagccaaataactgcgcttccagatggaatcactttatgggaatcaccagcttacagtgtttatggttcagctgtgataactttccttctgaccctttaagtcagtggttacccaaggttggtccaggaccagcagcatcagcacccccagggaacttgttagagatggaagttccaggtccccacctccgaaactgctggatcagaaactctgggggcggggcccagctctttgtgttcaacaggccctcccggttatcctggtgcatgctcagattagagaactgctgcctttaataaacctagttcactgctgagtcagggtcaggattttttagtatggttattgttaaggcagtgtacggattcataaacattcattaccataggctgttttcccagggcacatttctccagggttacaggtcatcattttgttagagactactttagattagataaagcacatgagcaatgctctgtatctgcgggaacaaggggacagagagtgcgcttcagagagaggtggggcagacacctgtgttgttggcttggggattgccgtccacagctgtgggttgagacagcctaagcaatggcgaggctgtcctgggggtcctgtaggcctgggtcacagcctcattgtgtgaccttgggcaggtcactcttcctctctatgccttagtttcctcatctgtaaaatgcaagttaggacacttatctcattatattgtcataactttgtaaatagtaagaagcaagggaaagagcgttcttcattttttgctagatttcatccgctgttgagctagatacacacaccagggcgttctgaaggctagacctgagggttttccctcaagttatcaacccctcaggttcttcttccattgcattgctttgtacctaacctttggccttccaaaggtcaaagggagcccaggccttccctgccctctacaccaggaaaaggctcacctttctgggtagttcccagtcagctgactgtaactgtgcaatcatttgaaaaacctcatgatcaccctccagcctccttcagtggaaatttctgagcctgtcccaaagaaggggggcgaggagaagcctcctccacttctttcatggaacttttgccaaggagtttcttcccagtcactattccagagtcttccaaacctggattagcttccggccctccactttctattcaagacacacagaccagcagtcaccatacttatcactgggccttccccgtcctcctttctaaagggctggctcagtcggtcacctaattgtccaccttccagagccagtttggactctcatgcagccatttgggcagtaatgcattcattcattcaacaaaatgtattgcacactgaccatgttcccattggcaggctaatgaaacagacatctgtgggcctgtgcagctggcattctagccagaggagacagatgataaacagtacccagatgagtaaatataaccgtggtagaacgtgatctgtgttccagacaaagcaaaaggagactgggaacctggagttgacctccttcctcagaaacaggaaggcagccccactcttcccctgaagcacagccccctgtccaaatacaagcaggcatctgccagcactgcctccctgactagggagcagcgaggccgagtcctcaccatcctaccagggagctttgtggatccccagtgctaccacttaaaatctgtgaaaccaagtcgggaacccttcacctttcactgataaaacattgtgaaaaggcaacaggcctataagtacgtgacatatgaggttgcctcagggtggacatgttttccgcttttgtccagatgttgggtggcccatcggaactctgtgtttcacaggggctgggcctgtttcccatcctgtgatgagtccttcccaattgaactcttccctagccagttgctaactagagaccaggaccactcccatctgacgtttgcttgttcaaaaaaaataataagcttttaagtacatatctacctgcctattagtaaatatatgtcaagtgagaatattatagatatttctatattatatagagcaataagaaatgtgaaatagtaaatgagaacctgctgtttttctgttcatttttaaattaactcctttgtgttgatgtttaggtatctcattatgataaaggaaaacaatattaatcagatttttttggttaaaaaatatataagaaaaagtaaatatttttatttttatttcttattcattgctgtaagtttcaaaatacctttattagcactacagctccaaaagtttgtgaatttctggttcatgaaatcctttgcttaggagtatattctttgtgtttttttggtttgggttttaggggaatggtttttgttttcttttttgagacagggtctcactctgtagcccaggctggagtgcagtggcacaatcacagctcactgcagctttgacctcctgggctcaagcctcctgtgtcagcctccccagtagctgggactacaggcatataccaccacactcagctaattttttgtattttttacaaaattacaaaaattaggtttttgccatgttgcccaggctggtcttaaactcctgggctcaagtgatctaccagccttggcctcccaaagtgctaagattacaggtgtgagcactgtacccaccctaggaatatattcttacttattattttctactgatttctcagctttgtgcaagcttagcatgtgattcaaagttattctatggacaaaaatgaattttctcaaggatatttttatggaactattttctggacttaatctgttatgtagtatctcaaaattgtttagtcttttttatgttgtcaaagtcatcttatatccactaactcattcaaacctcagagcttccaaggaaggtttgagtggggaatgataacctcatttatttaaagacacgcttgtcacattaaaaggataacaaggacccaactctcttgactttacgagacacacgattgtaaaggaagacaatattctagctccatcaagtactagtatgtgtctttggcaagctttgggttccttattttaaaaatgtaagtaataatgacatgtataataatcacttctaataataatcagctcaataacactaaagctcgtgcaagccatgcagtaattctggggcttaccctctgcagccatacactgcttcccttatgtgaagaagcgcatccctgtcatgtaccagcaccacactgacctgaaccccatcgaggtggccattgacgagatgagtaagaaggtggcggagctccggcagctgtgctcctcggccgaggtggacatgatcaaactgcagctcaaactccagggcagcgtgagtgttcaggtgagccaggcacagcaggccggagggcagcaggggacgtccttgcccctgggtgacttgagagtcgtttccactaacaaggtctacttgagagcctcggtttaccaagtgatccctgctcccttcccccaacgtctgtgacatttctcctgatatcagagggggaggaaacctcatgatccctgccccccgccccatgaggactgactgtggggacaagagccagatctcatacactaccctgatttgtcagtatttggggaattctgggtgcctgattagaagcatcaagactcttctaaatacaaagaagtgtggagagcagtagattttcctataaaactgttgtttgctgttttctatgaaaattgtatccaaaaaagtaccttaagttttaccctcttaatggtatcttttgattaatgaattcattattttaatatagcccaatcaatcaatttttctttattggtagcatttttatgttctctttaagaaatctgtgtctactccaaaatttcacagatgttctcctaggttttcctcctttgctcagcatccacatccaggtctgcagtccatctggaattgatttttgtatatgttatagtgtaagggtcaggatatattttttccatatgaccttccaagtgatatacacaatttattgaaaagatcatctttgatctagatactaacatatatgttcagtttgtgaaaattcatcaagctgtatacacttgtgatatatgcgctttcccgtttgtatattatactttagtaagaggtttttaaaaagttatcttacttacatggtttcctagttaattggtaagtgttaaatcactccctccagtaacaagtatgactcttattttctggtatttttaagtgtatatagttcaagcacatgtttgttcatatgtatatgtacatgtgtgtatatatgtatttgtatatcctattgttttatctttcaagaagggtatgtttatgaaagttacatgtggattataatacataggttttggtttttttggttcattttctgaaattatattttgtcaacttcccatcagatccacgctaaagaaccgtgagttgttgcccaacatttttgtgtcattcaccacaaaagcatttacagatgtttttaatctctttccttatagtctcaaagacatatgtgccaaaataagttagcaagtgaacataagtattccagcaacatgagtgattatgtaacaggtccagaggccacaattttctgtagctaaaaacaaaaccactcaatcaacatgatcttggaacatccagcccctatggaaaggccgctggaggggtgtggcaccagtccagggtagggctggaccattgagctttgtaaaaggcaaaatatgccctgctaatttgatggtaaacttagcattttataaaattcccagtcatcttaaaaagcaagaaattccatgttgaaatgagaagattaagtttatactcatacctaccaaagtaacaacaaagttgcagccagaggaaattaactttatcattttatttgcgtatttctgtaattgtttcatcaagcagctcactggcgctgcagctttactgggcagagccgtctgcggagcttcttgtcattgcactccaagatcttgctattagaccttatggagtctcatcagccttcctctttctatcttcttcaaatacagaccgtcttgtatcattttagatgatcagtcattttggtcgtcttcaggtgatgaatacagttccccccacgcaccagcctggtgctgagttccaccctcaacgcaccttgggctgttcacccattgcccccggctcagaggtccccctctgaccactgtggctggaacctggaaccctcctgtgtctccacgtctggtgtgagttcctgtggctcagttttcctgccattgctagacaagtcctgcctaccatgggtcagaaccacacacggggagctcccctaattccttgctaagctcaccagaccttccgggaaatatcaagcagtgaccacatagtcacgttcttccccaggctgtctcagacgcctggaacattcttcttcccatcccagtgtgtccagccttctttctcaccacgttcttacctttccttacttatccagaatcagcagacccttcttagctgcttgcaagggtggtgcagggttctggttcactcaccgtgctgtctgctcctaacatctagctctccagcacaccgcaaacgctcacttcatcccaggatagcaaatcagtttgcccatggctgtctatacaattcaatgaaatgaacagttgggtttcaaaaactggaatagttactgcatttttcaatttttcactgaattcaccagattggcctgttagttcagtgtagtgcagcacaaatcccagtgactaaacaccttggaagtaagaatccttgacctggatttggaagacctgggctgtgatctctggcgttttgcttattggctcttcaaacttcaacaggcccctaagttttccaagcattggtttcttcttacataaagtaaaccatcatcacaagtgccctgaagatggctgagatcatggaatcaagtggtgtgcaacagagtgaactttgtggtttctttttgggcttaagttcctggaaggcagggattgtgagtagctcacgcgaacgggctttttagtgcctgcaaactgaaactgagcagatggtcatggtgattttcttcctagtggaactgaaaatctttgctctttgtctaggtcaatgctggcccactagcatatgcgcgagctttcttagatgatacaaacacaaagcgatatcctgacaataaagtgaagctgcttaaggaagttttcaggtaaagcacactgaaagcatctttttctcttcgagtattgatcatttctgtactcattcgggaaggagatgctgctggttggactcatgccttatcctctgcgtgcctttgtttctcccgcctgtaccattccaggcaatttgtggaagcttgcggtcaagccttagcggtaaacgaacgtctgattaaagaagaccagctcgagtatcaggaagaaatgaaagccaactacagggaaatggcgaaggagctttctgaaatcatgcatgagcaggtgagggccgcactggctccaacaacttggagttcttggttaggggtttcaagtacaccctatcatgacttaggccgcctgatatccttccagaactgtgacatctgaaggagaatgtagcataccacactcctgccatgctctagccccaggtcatttgggaacagctaacagattgcccatatgctgttatctacggcaagcaggggagagcgggcccgcctcctcgtggctctaagaggtggccatgtttcctaagctttctctctccccacccccgtctagccaaaaagaaaagaaaggaaaaactcacacgaaaatatccatactgttctgacaactttattcctttaatcctttgaaaaaagcaggacttgccaacctggtttaaggaattatctgttgcattcaatgtttttgctgtttaaaaatacagactgattccatttttgatgatgtacagtgggccttggcgccccagtggattcttcctttaagttccttgtcactatgggcatcttccctgattattttgctgttatctctttcctgtgggtttcttcagtaggattctatgtgtgggctcagttgtcacagaggagacagtgtcccatacccagggaatgcctagagcagcatccacattgttttttttgtgaggggtctgtctcagtcactgtcctttctttataattgacattagcaccttgataacacagaactgctctgtctggcccctccattatcgtccttcagtctggcacagtggaagccagggccgtttgtggagtgatcctatcccctgacagtttagttagtacattttcattgcaggaaacgaacgtcagtgtgtgagctttaactcacttgctttttttctcctccatgctaacacgttcagctgggatggtaatgtcatttttaaacattatttttctgataatctgacttagaaaaagctattacttttttgagtttgagcaactacagacattggcataatgacagtacatgggcagaggaaagcaccctcttctggacattttaaaaagtagaggccagacatggtggctcactcctgtaatcccagcactttgggaggccaagatgggtggatcatctgaggtcaggagttcgagaccagcctggccaacatggtgaaaccccatctctactaaaaaatacaaaaattagctgggtgtagtggcacataccctagtctcagctactcgggaggctgaggcaggagaattgctggaacccaggaggtggaggctgcagtgagccaagatcatgccactaccctctagcctgggccacagagcgagactccatctcaaaaaaaaaaaaagtagaaaaaaattgaaacgattagagaaatgaatgtctgaataattaagcagaacaggagggactcatgggaaccgattttcagagaaaacttgagatcttttctgtggagcctccagattcctatagaatggagagtttggtcagtgggtgccgacattgggcactagagaagatgaaagtagtaagagatcataggctgaaactgttaaactcccaaagtacagggatatttaatgcacttgctgtcagctgcaccttgaacttcccattatgccaacagctgtgaagactgagcccccgtgaacccctgaagggccgtggcgggggtagacttgctttcgatgtttccaggggagcctctgctggaggtgaagacctacactcagatccttccaggcaccactgggcatggaaagatacttgttcagggtcagaggagtagccaccctctcccaagacaaaatccgtaagaccctgagaaaaggaggcaggagagaaacacaaatgcttcaaattcatttttaaaggctttttcaaggtcaaggctaggttgtgtcccagtcaagcacatgtaagtagacctcacgttgccttaagtagacctcacgttgccttatgatctggtgagcgtagaaggctctccattcactagctttgtaaaagaaacaaaatgtgctgttcttgactttctccttataatcctcacctgaaaacagtcatttatgagataagctgaacatctccctctgtaaaccagcagccaggctttccggctgcacatcactcacgtgatggagtgagtgtagacttgtgtgtgtgatgtggggtgcaacacattgagaaatatctgcttgcatccttatactcagtaacattgtgttgcacgtggcaacattgccttaaactctgtaacattttgttacacttggtaacattgtgtcacacatggcaacatggcattgcatatggtaaccttgtgttgccctcagtaacgttgtgtttctgtcctcaagatctgccccctggaggagaagacgagcgtcttaccgaattcccttcacatcttcaacgccatcagtgggactccaacaagcacaatggttcacgggatgaccagctcgtcttcggtcgtgtgattacatctcatggcccgtgtgtggggacttgctttgtcatttgcaaactcaggatgctttccaaagccaatcactggggagaccgagcacagggaggaccaaggggaaggggagagaaaggaaataaagaacaacgttatttcttaacagactttctataggagttgtaagaaggtgcacatatttttttaaatctcactggcaatattcaaagttttcattgtgtcttaacaaaggtgtggtagacactcttgagctggacttagattttattcttccttgcagagtagtgttagaatagatggcctacagaaaaaaaaggttctgggatctacatggcagggagggctgcactgacattgatgcctgggggaccttttgcctcgaggctgagctggaaaatcttgaaaatattttttttttcctgtggcacattcaggttgaatacaagaactatttttgtgactagtttttgatgacctaagggaactgaccattgtaatttttgtaccagtgaaccaggagatttagtgcttttatattcatttccttgcatttaagaaaatatgaaagcttaaggaattatgtgagcttaaaactagtcaagcagtttagaaccaaaggcctatattaataaccgcaactatgctgaaaagtacaaagtagtacagtatattgttatgtacatatcattgttaatacagtcctggcattctgtacatatatgtattacatttctacatttttaatactcacatgggcttatgcattaagtttaattgtgataaatttgtgctgttccagtatatgcaatacactttaatgttttattcttgtacataaaaatgtgcaatatggagatgtatacagtctttactatattaggtttataaacagttttaagaatttcatccttttgccaaaatggtggagtatgtaattggtaaatcataaatcctgtggtgaatggtggtgtactttaaagctgtcaccatgttatattttcttttaagactttaatttagtaattttatatttgggaaaataaaggtttttaattttatttaactggaatcactgccctgctgtaattaaacattctgtaccacatctgtattaaaaagacattgctgaccatt

SEQ ID NO: 8826 - DNA, 16793 bp, Homo sapiens
  SITE (13408): n equals a,t,g, or c
  SITE (13809): n equals a,t,g, or c
  SITE (14012): n equals a,t,g, or c
aggatgtgctgatggagctccttgagcagtgcgcagatggactctggaaagccgagcgctacgagctcatcgccgacatctacaaacttatcatccccatttatgagaagcggagggattttgaggtatgagagtgcctttttgtttttttcctatttgagagcatgacgctgtgacatatacccagacctgcatatatgtgagagaggaagcaggccatgggccagagatgagtgggggtctctgaccctccacgttacgctgaaggtggtggccagtcatcatctccaaatagtcatcgggtatcacccagacctgggccctacctctgtggagacccccacatctcaaactacagagtaaccggcactccactttcgaaaggctgccatgaacagagttttgtgatcaccaggtgtcccttttctgagaactcttccttactccacctgcgtgaaaaaatggtgtcccttccgtccatcctgggcttgggaggtcatccagtttctctaggcatatcaaacagagcaggaaaagcaaaggccaagaatcacgttggggaaccatctctgacatcgcatcttaacttgaaaacagagtttgcttactctaatgtggaaatgtgatgggtcctcacgtgtgggctggcctttgggtaggaaatgttaccattcattaatgatcactacaagttgtgcagccaaaatgtgtgtgtgtgtatttttattcaagttcaaggacttttcacctccattatcacatttgttattttaaaatcgattctcctctttgcacatgggaagaaatgggctttgttctgctttccagaggctggcccatctgtatgacacgctgcaccgggcctacagcaaagtgaccgaggtcatgcactcgggccgcaggcttctggggacctacttccgggtagccttcttcgggcaggtgagcctcctgtccattctgcagactgtcctaagtcctttaaaaaaaaacaaaaacaaaaacaaaaaaaaaactataataaagttatatcttataaattctctgttttctgtaattgctaatttgatgaatttgtcatatttagtatgattcttatcttcctcagtagtaaactttctgctttttttctttcttcctgtcttttctttattactttcttaaggcagcggtaagttcttcctccttaagacattcttagcaacatctttggtacttcagtgtggtttgcaagtttgcttttcaagtctgtatgtttatctgtctagttattacaaactccaaaaaaattaacattttattccatttacagaaataaatcacctgttttcttatatatctatattgcatgttttaaaccaaaattaagactttctggtgtcctttgtgcctgtgcatctttatcctttgtagtataatatctccacaagtatatttacagtttttcagaaaccctataggaaagggtttatctaaatttaacttaaattttaaccttcgagtcccttaacattattaaatggtataaattataatacatatatttagggcgtgtggttttctatgagcattatataaccttcaatttattctgttattgtcttttataactttatagcaataccagtttacagacagtgaaacagatgtggaggtaattacagtaaatgcctaaaaagcaagtaatatagtgaaattactgcgtctaaactcctagtttgatgtggatgttttttgtttcatgctagcttgcatttttttttactgttttgtgcaccattttctctctcttaatttacgtgagaaactttaaaaaattttcttttaaacattaaccccagttggactttttaattttcaacctttttcacttcccatgcaattctaagccttgtagtcaaacatgattggtgctaaaacagatgatgactggtgatatgaaaatattttctgatattgagctacaggtctttaatatttttttctcatcggtaaagcaaaatacaatttatacaagctttacctaacttttactaaacttactccagacccccaaacgcttcagttcatgccataaaatcctgtgtgcatgggagccatcaggagaagggaggcatgtccacttctgagcctgcctgtcgtgggctgctcatcattttctagtgagttctgcttcttgggaaagtgaaacaggcttgactcccattagacttccctgggacagcttagtcttgtatccaaaatctttcatttcactcaacacttaatgactgcattcttgaataagtttgcaatgttgtgtttttcctttacctttgcacctagacttcatgttattagcattttctttctcattcagaaagcccatttcagctggatttttagacccattcctttttttcccccttgtaataaaagaacgcttcctaggtggtaagccctgggcttacgttcagggatagctctaattgtgctttatgtcacagggattctttgaagatgaagatggaaaggagtatatttacaaggaacccaaactcacaccgctgtcggaaatttctcagagactccttaaactgtactcggataaatttggttctgaaaatgtcaaaatgatacaggattctggcaaggtatgaccatgtttggataagtttcatagcaatgtaatgttgtgattgattacatattatatatttttaaatgtatatagaaaaaaacacaagaaaaatattaaggattgttggccgtgagtggcaggtgtattttcttcctgatacctttagtgctttccattacatgcttgacattaaaaaatctttatcgcctaatttttgaaacatctaattttacaaaataattaacgtctgacaggatatgtcatttttagtccagctatttagaaactctgacagaatgaggcctgtggcttcgctactcactgcacctcttcctgcatgtagcacatgacttgccactctgtcactgacggctggatgtaaggacaggtgaacagatgggcggatgggtgaatggacacatggacaggccaaggaatgaactcaccagcagcgtgactgtgggaatggcgatcattttctgcttagagagctgtcctctggcattctgttctcatgaagacccttttggaacctgcacctttgtcctgtacctttgtgtgtcccaccctcctcaggacatctccaggaggtcaggtctccctctgcttcctgaaggtgaaacatggggcaagacggtttcgctcccactgcctttaaattattcctgctaaagaaagttaagttttaataggtttggatacaattagaatgaatggccaaatggctttttctaaaatacaaataataactttttttttttttttgagatggagtctggctctgtcacctgggctggagtgcagtggcgctatctcagctcactgcaatctctgcctcctgggttcaagagattcttgtgcctcagcctcccgagtagctgggattacaggaacgcgccaccacgcctggctaatttttgtatttttggtagagacagggtttcaccatgttggccaggttgttctccaactcccgacctcaagtgacctgcctgcctcggcctcccaaagtgctaggattataggcgtgagccaccgagcctggcccaaataataactttctatgactttatgtattttcttctaaagtttcaggcacttttccatctgttttttcatttttcttcacaatcgtctctgttttgagaacagttctctttcatttgcctgccttataccagtatgggctccatgtgctctgcacagccatttcttttgtgtccctttttattgctctagaaggttaaatacaattaaaatgtgcaaaattgatttgttgatttgtcttcctaataaattagcttttgtttctgcataggaattgcctatgtttaattctctatcatgtcacagaaatgaaagtaccaccaattctagcaatgtggttttaaaagcatttatatgttaaatagaaactaaatttatcattagattagtctagattaatctgtacctgtattaaattaattgatctgcagctgttgcatctaatctcagctgtctgtagattaatgataatttggaggcctagcttccaaacattattcctaaaataaacatttatctctctaagccaaatatattaaaaatgcagtttaagaaacaatcagagaaatccagactggaggtcattcaataagaaaaccagcactttgggaggccaaggcgggcggatcacctgaggtcgggagttcgagaccagcctgaccaacatggagaaaccctgtgtctgctaaaaatatataattagctgggcatggtggcacacacctgtagtcacagctacttgggaggctgaggcaggagaatcacttgaacgctggaggcagaggttgcagtagctgagatcgcgccattgcactccagcctgggcaacaagagcaaaactctgtctcaaaaaaaaataaaataattcaatgttatgggaaaaatgaatgatagggaattcttctaaattaaacatgactagggacataacaactaaatgtaaagtgtgattgttgattagattctgatccaaacacaaatatctataactaacattctggagacatttgagaaaatgttaatatagactgggtattggatggtattagggaatcagtgttaatttgggtaggcatgataatgtattgcggttatagaagcaaatgtccttatttttaggagaagctgactgtagtatcctgacgtgtaccacttactttgaaatggttctactggaaaaaaaaaagtctgtatgtctgtgtgtgtgtgcacatccataagtgtatgtgtatgtatatttgaaacaaatatagcaaactgctagcagttgttgatccaagtggtggatatgtggatgtttgttgtactcttctctccgttatatttacaaataaaatgttggaaaataccacgtaggtaagaactgagtgattccttcatggagcaccaatctcccattgtgctgtttcaattaaaggtcaaccctaaggatctggattctaagtatgcatacatccaggtgactcacgtcatccccttctttgacgaaaaagagttgcaagaaaggaaaacagagtttgagagatcccacaacatccgccgcttcatgtttgagatgccatttacgcagaccgggaagaggcagggcggggtggaagagcagtgcaaacggcgcaccatcctgacaggtatgggccccagaagccgcatggacacgagcccggacacctcgccaaagagctgtccagagggattcagaagcttcaggactggaagggtctttcgagctcagttagccacccccacacccatttcagtttcacatttatctagtgcttccttttgaatacttgggatgtttttctgttgatctgttggcacttccttcttccacaagaccagaagctcatatccaatctaaggtcacttacccttctgagaatctgatgaaaatggcgtgccttatgtgcctagatgcttttgcacacagtctaaggtgacttatggactccaggtccagcagccacacccagtcctgggtctccgcacagggagggacccgtctcacacacctgtctcaggttctagcatggcctgctcagcggtctcaggctgtgagtaaatgggatgtgagcttggatcgccccacgctgttgcccccgggggctggccagctgccacttgaatgcctcctctgccaggaagctcactgcattcagtggctatccacgagttcagcttaggcagttttcactgatccctttggcactgtttagccagtgataacccactctgggaaatgtgttttgcatcatttcccggtccctggcaagtgtctagtcatcctggggtgatttttaccttctgtgggagagcttgacccatccctgcctcattagggtcagcgacatcactggggtaacctaacataaaatgctttcttgaccaagaaatatcagtgggagggccgttgagaatgccaggtgtgccagctttcaccacacgtcttccaaagagtggccctagttaagtcagaccaggaaagggcctgctccccggaagttggggttgttgagtttctgtctgggtaataatacacactatcataataagcggaaggagcgctgtggagatgctgcacccaggtgcttatcagctctcaccggcgaagcgtatgctttaaaaagagagactggatggcgtggggtttatatctcagtaaagctgttacaaaaaaaaaaaaaaatacaggtttttatgaattagcccaggacagcgtattgcagggagcttttcacactccctatgagggaaaagagatacaagttaaaacaaaactgtgttcttaaagtgtccctaatcctgcttgtaaaataagaagacagcatatataaagcacaaataatattgtcctcacaaacatcaccccaccccaaataatttaattatttttttaatgcacacatcagtagcaaattctcattaagccaaataactgcgcttccagatggaatcactttatgggaatcaccagcttacagtgtttatggttcagctgtgataactttccttctgaccctttaagtcagtggttacccaaggttggtccaggaccagcagcatcagcacccccagggaacttgttagagatggaagttccaggtccccacctccgaaactgctggatcagaaactctgggggcggggcccagctctttgtgttcaacaggccctcccggttatcctggtgcatgctcagattagagaactgctgcctttaataaacctagttcactgctgagtcagggtcaggattttttagtatggttattgttaaggcagtgtacggattcataaacattcattaccataggctgttttcccagggcacatttctccagggttacaggtcatcattttgttagagactactttagattagataaagcacatgagcaatgctctgtatctgcgggaacaaggggacagagagtgcgcttcagagagaggtggggcagacacctgtgttgttggcttggggattgccgtccacagctgtgggttgagacagcctaagcaatggcgaggctgtcctgggggtcctgtaggcctgggtcacagcctcactgtgtgaccttgggcaggtcactcttcctctctatgccttagtttcctcatctgtaaaatgcaagttaggacacttatctcattatattgtcataactttgtaaatagtaagaagcaagggaaagagcgttcttcattttttgctagatttcatccgctgttgagctagatacacacaccagggcgttctgaaggctagacctgagggttttccctcaagttatcaacccctcaggttcttcttccattgcattgctttgtacctaacctttggccttccaaaggtcaaagggagcccaggccttccctgccctctacaccaggaaaaggctcacctttctgggtagttcccagtcagctgactgtaactgtgcaatcatttgaaaaacctcatgatcaccctccagcctccttcagtggaaatttctgagcctgtcccaaagaaggggggcgaggagaagcctcctccacttctttcatggaacttttgccaaggagtttcttcccagtcactattccagagtcttccaaacctggattagcttccggccctccactttctattcaagacacacagaccagcagtcaccatacttatcactgggccttccccgtcctcctttctaaagggctggctcagtcggtcacctaattgtccaccttccagagccagtttggactctcatgcagccatttgggcagtaatgcattcattcattcaacaaaatgtattgcacactgaccatgttcccattggcaggctaatgaaacagacatctgtgggcctgtgcagctggcattctagccagaggagacagatgataaacagtacccagatgagtaaatataaccgtggtagaacgtgatctgtgttccagacaaagcaaaaggagactgggaacctggagttgacctccttcctcagaaacaggaaggcagccccactcttcccctgaagcacagccccctgtccaaatacaagcaggcatctgccagcactgcctccctgactagggagcagcgaggccgagtcctcaccatcctaccagggagctttgtggatccccagtgctaccacttaaaatctgtgaaaccaagtcgggaacccttcacctttcactgataaaacattgtgaaaaggcaacaggcctataagtacgtgacatatgaggttgcctcagggtggacatgttttccgcttttgtccagatgttgggtggcccatcggaactctgtgtttcacaggggctgggcctgtttcccatcctgtgatgagtccttcccaattgaactcttccctagccagttgctaactagagaccaggaccactcccatctgacgtttgcttgttcaaaaaaaataataagcttttaagtacatatctacctgcctattagtaaatatatgtcaagtgagaatattatagatatttctatattatatagagcaataagaaatgtgaaatagtaaatgagaacctgctgtttttctgttcatttttaaattaactcctttgtgttgatgtttaggtatctcattatgataaaggaaaacaatattaatcagatttttttggttaaaaaatatataagaaaaagtaaatatttttatttttatttcttattcattgctgtaagtttcaaaatacctttattagcactacagctccaaaagtttgtgaatttctggttcatgaaatcctttgcttaggagtatattctttgtgtttttttggtttgggttttaggggaatggtttttgttttcttttttgagacagggtctcactctgtagcccaggctggagtgcagtggcacaatcacagctcactgcagctttgacctcctgggctcaagcctcccgtgtcagcctccccagtagctgggactacaggcatataccaccacactcagctaattttttgtattttttacaaaattacaaaaattaggtttttgccatgttgcccaggctggtcttaaactcctgggctcaagtgatctaccagccttggcctcccaaagtgctaagattacaggtgtgagcactgtacccaccctaggaatatattcttacttattattttctactgatttctcagctttgtgcaagcttagcatgtgattcaaagttattctatggacaaaaatgaattttctcaaggatatttttatggaactattttctggacttaatctgttatgtagtatctcaaaattgtttagtcttttttatgttgtcaaagtcatcttatatccactaactcattcaaacctcagagcttccaaggaaggtttgagtggggaatgataacctcatttatttaaagacacgcttgtcacattaaaaggataacaaggacccaactctcttgactttacgagacacacgattgtaaaggaagacaatattctagctccatcaagtactagtatgtgtctttggcaagctttgggttccttattttaaaaatgtaagtaataatgacatgtataataatcacttctaataataatcagctcaataacactaaagctcgtgcaagccatgcagtaattctggggcttaccctctgcagccatacactgcttcccttatgtgaagaagcgcatccctgtcatgtaccagcaccacactgacctgaaccccatcgaggtggccattgacgagatgagtaagaaggtggcggagctccggcagctgtgctcctcggccgaggtggacatgatcaaactgcagctcaaactccagggcagcgtgagtgttcaggtgagccaggcacagcaggccggagggcagcaggggacgtccttgcccctgggtgacttgagagtcgtttccactaacaaggtctacttgagagcctcggtttaccaagtgatccctgctcccttcccccaacgtctgtgacatttctcctgatatcagagggggaggaaacctcatgatccctgccccccgccccatgaggactgactgtggggacaagagccagatctcatagactaccctgatttgtcagtatttggggaattctgggtgcctgattagaagcatcaagactcttctaaatacaaagaagtgtggagagcagtagattttcctataaaactgttgtttgctgttttctatgaaaattgtatccaaaaaagtaccttaagttttaccctcttaatggtatcttttgattaatgaattcattattttaatatagcccaatcaatcaatttttctttattggtagcatttttatgttctctttaagaaatctgtgtctactccaaaatttcacagatgttctcctaggttttcctcctttgctcagcatccacatccaggtctgcagtccatctggaattgatttttgtatatgttatagtgtaagggtcaggatatattttttccatatgaccttccaagtgatatacacaatttattgaaaagatcatctttgatctagatactaacatatatgttcagtttgtgaaaattcatcaagctgtatacacttgtgatatatgcgctttcccgtttgtatattatactttagtaagaggtttttaaaaagttatcttacttacatggtttcctagttaattggtaagtgttaaatcactccctccagtaacaagtatgactcttattttctggtatttttaagtgtatatagttcaagcacatgtttgttcatatgtatatgtacatgtgtgtatatatgtatttgtatatcctattgttttatctttcaagaagggtatgtttatgaaagttacatgtggattataatacataggttttggtttttttggttcattttctgaaattatattttgtcaacttcccatcagatccacgctaaagaaccgtgagttgttgcccaacatttttgtgtcattcaccacaaaagcatttacagatgtttttaatctctttccttatagtctcaaagacatatgtgccaaaataagttagcaagtgaacataagtattccagcaacatgagtgattatgtaacaggtccagaggccacaattttctgtagctaaaaacaaaaccactcaatcaacatgatcttggaacatccagcccctatggaaaggccgctggaggggtgtggcaccagtccagggtagggctggaccattgagctttgtaaaaggcaaaatatgccctgctaatttgatggtaaacttagcgttttataaaattcccagtcatcttaaaaagcaagaaattccatgttgaaatgagaagattaagtttatactcatacctaccaaagtaacaacaaagttgcagccagaggaaattaactttatcattttatttgcgtatttctgtaattgtttcatcaagcagctcactggcgctgcagctttactgggcagagccgtctgcggagcttcttgtcattgcactccaagatcttgctattagaccttatggagtctcatcagccttcctctttctatcttcttcaaatacagaccgtcttgtatcattttagatgatcagtcattttgtgatgaatacagttccccccacgcaccagcctggtgctgagttccaccctcaacgcaccttgggctgttcacccattgcccccggctcagaggtccccctctgaccactgtggctggaacctggaaccctcctgtctctccacgtctggtgtgagttcctgtggctcagttttcctgccattgctagacaagtcctgcctaccatgggtcagaaccacacacggagagctcccctaattccttgctaagctcaccagaccttccgggaaatatcaagcagtgaccacatagtcacgttcttccccaggctgtctcagacgcctggaacattcttcttcccatcccagtgtgtccagccttctttctcaccacgttcttacctttccttacttatccagaatcagcagacccttcttagctgcttgcaagggtggtgcagggttctggttcactcaccgtgctgtctgctcctaacatctagctctccagcacactgcaaacgctcacttcatcccaggatagcaaatcagtttgcccatggctgtctatacaattcaatgaaatgaacagttgggttttaaaaactggaatagttactgcatttttcaatttttcactgaattcaccagattggcctgttagttcagtgtagtgcagcacaaatcccagtgactaaacaccttggaagtaagaatccttgacctggatttggaagacctgggctgtgatctctggcgttttgcttattggctcttcaaacttcaacaggcccctaagttttccaagcattggtttcttcttacataaagtaaaccatcatcacaagtgccctgaagatggctgagatcatggaatcaagtggtgtgcaacagagtgagctttgtggtttctttttgggcttaagttcctggaaggcagggattgtgagtagctcacgcgaacgggctttttagtgcctgcaaactgaaactgagcagatggtcatggtgattttcttcctagtggaactgaaaatctttgttctttgtctaggtcaatgctggcccactagcatatgcgcgagctttcttagatgatacaaacacaaagcgatatcctgacaataaagtgaagctgcttaaggaagttttcaggtaaagcacactgaaagcatctttttctcttcgagtattgatcatttctgtactcattcgggagggagatgctgctggttggactcatgccttatcctctgcgtgcctttgtttctcccgcctgtaccattccaggcaatttgtggaagcttgcggtcaagccttagcggtaaacgaacgtctgattaaagaagaccagctcgagtatcaggaagaaatgaaagccaactacagggaaatggcgaaggagctttctgaaatcatgcatgagcaggtgagggccgcactggctccaacaacttggagttcttggttaggggtttcaagtacaccctatcatgacttaggccgcctgatatccttccagaactgtgacatctgaaggagaatgtagcataccacactcctgccatgctctagccccaggtcatttgggaacagctaacagattgcccatatgctgttatctacggcaagcaggggagagcgggcccgcctcctcgtggctctaagaggnggccatgtttcctaagctttctctctccccacccccgtctagccaaaaagaaaagaaaggaaaaactcacactaaaatatccatactgttctgacaactttattcctttaatcctttgaaaaaagcaggacttgccaacctggtttaaggaattatctgttgcattcaatgtttttgctgtttaaaaatacagactgattccatttttgacgatgtacagtgggccttggcgccccagtggattcttcctttaagttccttgtcactatgggcatcttccctgattattttgctgttatctctttcctgtgggtttgttcagtaggattctatgtgtgggctcagttgtcacagaggagacagtgtcccatacccacaaaaaaactagagcagcatcaaantatttaatttgtgaggggtctgtctcagtcactgtcctttctttataattgacattagcaccttgataacacagaactgctctgtctggcccctccattatcgtccttcagtctggcacagtggaagccagggccgtttgtggagtgatcctatcccctgacagtttagttagtacattttcattgcaggaaacgaacgtcangttgttagctttaactcacttgctttttttctcctccatgctaacacgttcagctgggatggtaatgtcatttttaaacattatttttctgataatctgacttagaaaaagctattacttttttgagtttgagcaactacagacattggcataatgacagtacatgggcagaggaaagcaccctcttctggacattttaaaaagtagaggccagacatggtggctcactcctgtaatcccagcactttgggaggccaagatgggtggatcatctgaggtcaggagttcgagaccagcctggccaacatggtgaaaccccatctctactaaaaaatacaaaaattagctgggtgtagtggcacataccctagtctcagctactcgggaggctgaggcaggagaattgctggaacccaggaggtggaggctgcagtgagccaagatcatgccactaccctctagcctgggccacagagcgagactccatctcaaaaaaaaaaaaaagtagaaaaaaattgaaacgattagagaaatgaatgtctgaataattaagcagaacaggagggactcatgggaaccgattttcagagaaaacttgagatcttttctgtggagcctccagattcctatagaatggagagtttggtcagtgggtgccgacattgggcactagagaagatgaaagtagtaagagatcttaggctgaaactgttaaactcccaaagtacagggatatttaatgcacttgctgtcagctgcaccttgaacttcccattatgccaacagctgtgaagactgagcccccgtgaacccctgaagggccgtggcgggggtagacttgctttcgatgtttccaggggagcctctgctggaggtgaagacctacactcagatccttccaggcaccactgggcatggaaagatacttgttcagggtcagaggagtagccaccctctcccaagacaaaatccgtaagaccctgagaaaaggaggcaggagagaaacacaaatgcttcaaattcatttttaaaggctttttcaaggtcaaggctaggttgtgtcccagtcaagcacatgtaagtagacctcacgttgccttaagtagacctcacgttgccttatgatctggtgagcgtagaaggctctccattcactagctttgtaaaagaaacaaaatgtgctgttcttgactttctccttataatcctcacctgaaaacagtcatttatgagataagctgaacatctccctctgtaaaccagcagccaggctttccggctgcacatcactcacgtgatggagtgagtgtagacttgtgtgtgtgatgtggggtgcaacacattgagaaatatctgcttgcatccttatactcagtaacattgtgttgcacgtggcaacattgccttaaactctgtaacattttgttacacttggtaacattgtgtcacacatggcaacatggcattgcatatggtaaccttgtgttgccctcagtaacgttgtgtttctgtcctcgagatctgccccctggaggagaagacgagcgtcttaccgaattcccttcacatcttcaacgccatcagtgggactccaacaagcacaatggttcacgggatgaccagctcgtcttcggtcgtgtgattacatctcatggcccgtgtgtggggacttgctttgtcatttgcaaactcaggatgctttccaaagccaatcactggggagaccgagcacagggaggaccaaggggaaggggagagaaaggaaataaagaacaacgttatttcttaacagactttctataggagttgtaagaaggtgcacatatttttttaaatctcactggcaatattcaaagttttcattgtgtcttaacaaaggtgtggtagacactcttgagctggacttagattttattcttccttgcagagtagtgttagaatagatggcctacagaaaaaaaaggttctgggatctacatggcagggagggctgcactgacattgatgcctgggggaccttttgcctcgaggctgagctggaaaatcttgaaaatattttttttttcctgtggcacattcaggttgaatacaagaactatttttgtgactagtttttgatgacctaagggaactgaccattgtaatttttgtaccagtgaaccaggagatttagtgcttttatattcatttccttgcatttaagaaaatatgaaagcttaaggaattatgtgagcttaaaactagtcaagcagtttagaaccaaaggcctatattaataaccgcaactatgctgaaaagtacaaagtagtacagtatattgttatgtacatatcattgttaatacagtcctggcattctgtacatatatgtattacatttctacatttttaatactcacatgggcttatgcattaagtttaattgtgataaatttgtgctgttccagtatatgcaatacactttaatgttttattcttgtacataaaaatgtgcaatatggagatgtatacagtctttactatattaggtttataaacagttttaagaatttcatccttttgccaaaatggtggagtatgtaattggtaaatcataaatcctgtggtgaatggtggtgtactttaaagctgtcaccatgttatattttcttttaagactttaatttagtaattttatatttgggaaaataaaggtttttaattttatttaactggaatcactgccctgctgtaattaaacattctgtaccacatctgtattaaaaagacattgctgaccatt

SEQ ID NO: 8827 - DNA, 16808 bp, Homo sapiens
aggatgtgctgatggagctccttgagcagtgcgcagatggactctggaaagccgagcgctacgagctcatcgccgacatctacaaacttatcatccccatttatgagaagcggagggattttgaggtatgagagtgcctttttgtttttttcctatttgagagcatgacgctgtgacatatacccagacctgcatatatgtgagagaggaagcaggccatgggccagagatgagtgggggtctctgaccctccacgttacgctgaaggtggtggccagtcatcatctccaaatagtcatcgggtatcacccagacctgggccctacctctgtggagacccccacatctcaaactacagagtaaccggcactccactttcgaaaggctgccatgaacagagttttgtgatcaccagttgtcccttttctgagaactcttccttactccacctgcgtgaaaaaatggtgtcccttccgtccatcctgggcttgggaggtcatccagtttctctaggcatatcaaacagagcaggaaaagcaaaggccaagaatcacgttggggaaccatctctgacatcgcatcttaacttgaaaacagagtttgcttactctaatgtggaaatgtgatgggtcctcacgtgtgggctggcctttgggtaggaaatgttaccattcattaatgatcactacaagttgtgcagccaaaatgtgtgtgtgtgtatttttattcaagttcaaggacttttcacctccattatcacatttgttattttaaaatcgattctcctctttgcacatgggaagaaatgggctttgttctgctttccagaggctggcccatctgtatgacacgctgcaccgggcctacagcaaagtgaccgaggtcatgcactcgggccgcaggcttctggggacctacttccgggtagccttcttcgggcaggtgagcctcctgtccattctgcagactgtcctaagtcctttaaaaaaaaacaaaaacaaaaacaaaaaaaaaactataataaagttatatcttataaattctctgttttctgtaattgctaatttgatgaatttgtcatatttagtatgattcttatcttcctcagtagtaaactttctgctttttttctttcttcctgtcttttctttattactttcttaaggcagcggtaagttcttcctccttaagacattcttagcaacatctttggtacttcagtgtggtttgcaagtttgcttttcaagtctgtatgtttatctgtctagttattacaaactccaaaaaaattaacattttattccatttacagaaataaatcacctgttttcttatatatctatattgcatgttttaaaccaaaattaagactttctggtgtcctttgtgcctgtgcatctttatcctttgtagtataatatctccacaagtatatttacagtttttcagaaaccctataggaaagggtttatctaaatttaacttaaattttaaccttcgagtcccttaacattattaaatggtataaattataatacatatatttagggcgtgtggttttctatgagcattatataaccttcaatttattctgttattgtcttttataactttatagcaataccagtttacagacagtgaaacagatgtggaggtaattacagtaaatgcctaaaaagcaagtaatatagtgaaattactgcgtctaaactcctagtttgatgtggatgttttttgtttcatgctagcttgcatttttttttactgttttgtgcaccattttctctctcttaatttacgtgagaaactttaaaaaattttcttttaaacattaaccccagttggactttttaattttcaacctttttcacttcccatgcaattctaagccttgtagtcaaacatgattggtgctaaaacagatgatgactggtgatatgaaaatattttctgatattgagctacaggtctttaatatttttttctcatcggtaaagcaaaatacaatttatacaagctttacctaacttttactaaacttactccagacccccaaacgcttcagttcatgccataaaatcctgtgtgcatgggagccatcaggagaagggaggcatgtccacttctgagcctgcctgtcgtgggctgctcatcattttctagtgagttctgcttcttgggaaagtgaaacaggcttgactcccattagacttccctgggacagcttagtcttgtatccaaaatctttcatttcactcaacacttaatgactgcattcttgaataagtttgcaatgttgtgtttttcctttacctttgcacctagacttcatgttattagcattttctttctcattcagaaagcccatttcagcaggatttttagacccattcctttttttcccccttgtaataaaagaacgcttcctaggtggtaagccctgggcttacgttcagggatagctctaattgtgctttatgtcacagggattctttgaagatgaagatggaaaggagtatatttacaaggaacccaaactcacaccgctgtcggaaatttctcagagactccttaaactgtactcggataaatttggttctgaaaatgtcaaaatgatacaggattctggcaaggtatgaccatgtttggataagtttcatagcaatgtaatgttgtgattgattacatattatatatttttaaatgtatatagaaaaaaacacaagaaaaatattaaggattgttggccgtgagtggcaggtgtattttcttcctgatacctttagtgctttccattacatgcttgacattaaaaaatctttatcgcctaatttttgaaacatctaattttacaaaataattaacgtctgacaggatatgtcatttttagtccagctatttagaaactctgacagaatgaggcccgtggcttcgctactcactgcacctcttcctgcatgtagcacatgacttgccactctgtcactgacggctggatgtaaggacaggtgaacagatgggcggatgggtgaatggacacatggacaggccaaggaatgaactcaccagcagcgtgactgtgggaatggcgatcattttctgcttagagagctgtcctctggcattctgttctcatgaagacccttttggaacctgcacctttgtcctgtacctttgtgtgtcccaccctcctcaggacatctccaggaggtcaggtctccctctgcttcctgaaggtgaaacatggggcaagacggtttcactcccactgcctttaaattattcctgctaaagaaagttaagttttaataggtttggatacaattagaatgaatggccaaatggctttttctaaaatacaaataataactttttttttttttttgagatggagtctggctctgtcacctgggctggagtgcagtggcgctatctcagctcactgcaatctctgcctcctgggttcaagagattcttgtgcctcagcctcccgagtagctgggattacaggaacgcgccaccacgcctggctaatttttgtatttttggtagagacagggtttcaccatgttggccaggttgttctccaactcccgacctcaagtgacctgcctgcctcggcctcccaaagtgctaggattataggcgtgagccaccgagcctggcccaaataataactttctatgactttatgtattttcttctaaagtttcaggcacttttccatctgttttttcatttttcttcacaatcgtctctgttttgagaacagttctctttcatttgcctgccttataccagtatggtctccatgtgctctgcacagccatttcttttgtgtccctttttattgctctagaaggttaaatacaattaaaatgtgcaaaattgatttgttgatttgtcttcctaataaattagcttttgtttctgcataggaattgcctatgtttaattctctatcatgtcacagaaatgaaagtaccaccaattctagcaatgtggttttaaaagcatttatatgttaaatagaaactaaatttatcattagattagtctagattaatctgtacctgtattaaattaattgatctgcagctgttgcatctaatctcagctgtctgtagattaatgataatttggaggcctagcttccaaacattattcctaaaataaacatttatctctctaagccaaatatattaaaaatgcagtttaagaaacaatcagagaaatccagactggaggtcattcaataagaaaaccagcactttgggaggccaaggcgggcggatcacctgaggtcgggagttcgagaccagcctgaccaacatggagaaaccctgtgtctgctaaaaatatataattagctgggcatggtggcacacacctgtagtcacagctacttgggaggctgaggcaggagaatcacttgaacgctggaggcagaggttgcagtagctgagatcgcgccattgcactccagcctgggcaacaagagcaaaactctgtctcaaaaaaaaataaaataattcaatgttatgggaaaaatgaatgatagggaattcttctaaattaaacatgactagggacataacaactaaatgtaaagtgtgattgttgattagattctgatccaaacacaaatatctataactaacattctggagacatttgagaaaatgttaatatagactgggtattggatggtattagggaatcagtgttaatttgggtaggcatgataatgtattgcggttatagaagcaaatgtccttatttttaggagaagctgactgtagtatcctgacgtgtaccacttactttgaaatggttctactggaaaaaaaaaagtctgtatgtctgtgtgtgtgtgcacatccataagtgtatgtgtatgtatatttgaaacaaatatagcaaactgctagcagttgttgatccaagtggtggatatgtggatgtttgttgtactcttctctccgttatatttacaaataaaatgttggaaaataccacgtaggtaagaactgagtgattccttcatggagcaccaatctcccattgtgctgtttcaattaaaggtcaaccctaaggatctggattctaagtatgcatacatccaggtgactcacgtcatccccttctttgacgaaaaagagttgcaagaaaggaaaacagagtttgagagatcccacaacatccgccgcttcatgtttgagatgccatttacgcagaccgggaagaggcagggcggggtggaagagcagtgcaaacggcgcaccatcctgacaggtatgggccccagaagccgcatggacacgagcccggacacctcgccaaagagctgtccagagggattcagaagcttcaggactggaagggtctttcgagctcagttagccacccccacacccatttcagtttcacatttatctagtgcttccttttgaatacttgggatgtttttctgttgatctgttgacacttccttcttccacaagaccagaagctcatatccaatctaaggtcacttacccttctgagaatctgatgaaaatggcgtgccttatgtgcctagatgcttttgcacacagtctaaggtgacttatggactccaggtccagcagccacacccagtcctgggtctccgcacagggagggacccgtctcacacacctgtctcaggttctagcatggcctgctcagcggtctcaggctgtgagtaaatgggatgtgagcttggatcgccccacgctgttgcccccgggggctggccagctgccacttgaatgcctcctctgccaggaagctcactgcattcagtggctatccacgagttcagcttaggcagttttcactgatccctttggcactgtttagccagtgataacccactctgggaaatgtgttttgcatcatttcccggtccctggcaagtgtctagtcatcctggggtgatttttaccttctgtgggagagcttgacccatccctgcctcattagggtcagcgacatcactggggtaacctaacataaaatgctttcttgaccaagaaatatcagtgggagggccgttgagaatgccaggtgtgccagctttcaccacacgtcttccaaagagtggccctagttaagtcagaccaggaaagggcctgctccccggaagttggggttgttgagtttctgtctgggtaataatacacactatcataataagcggaaggagcgctgtggagatgctgcacccaggtgcttatcagctctcaccggcgaagcgtatgctttaaaaagagagactggatggcgtggggtttatatctcagtaaagctgttacaaaaaaaaaaaaaaaaatacaggtttttatgaattagcccaggacagcgtattgcagggagcttttcacactccctatgagggaaaagagatacaagttaaaacaaaactgtgttcttaaagtgtccctaatcctgcttgtaaaataagaagacagcatatataaagcacaaataatattgtcctcacaaacatcaccccaccccaaataatttaattatttttttaatgcacacatcagtagcaaattctcattaagccaaataactgcgcttccagatggaatcactttatgggaatcaccagcttacagtgtttatggttcagctgtgataactttccttctgaccctttaagtcagtggttacccaaggttggtccaggaccagcagcatcagcacccccagggaacttgttagagatggaagttccaggtccccacctccgaaactgctggatcagaaactctgggggcggggcccagctctttgtgttcaacaggccctcccggttatcctggtgcatgctcagattagagaactgctgcctttaataaacctagttcactgctgagtcagggtcaggattttttagtatggttattgttaaggcagtgtacggattcataaacattcattaccataggctgttttcccagggcacatttctccagggttacaggtcatcattttgttagagactactttagattagataaagcacatgagcaatgctctgtatctgcgggaacaaggggacagagagtgcgcttcagagagaggtggggcagacacctgtgttgttggcttggggattgccgtccacagctgtgggttgagacagcctaagcaatggcgaggctgtcctgggggtcctgtaggcctgggtcacagcctcattgtgtgaccttgggcaggtcactcttcctctctatgccttagtttcctcatctgtaaaatgcaagttaggacacttatctcattatattgtcataactttgtaaatagtaagaagcaagggaaagagcgttcttcattttttgctagatttcatccgctgttgagctagatacacacaccagggcgttctgaaggctagacctgagggttttccctcaagttatcaacccctcaggttcttcttccattgcattgctttgtacctaacctttggccttccaaaggtcaaagggagcccaggccttccctgccctctacaccaggaaaaggctcacctttctgggtagttcccagtcagctgactgtaactgtgcaatcatttgaaaaacctcatgatcaccctccagcctccttcagtggaaatttctgagcctgtcccaaagaaggggggcgaggagaagcctcctccacttctttcatggaacttttgccaaggagtttcttcccagtcactattccagagtcttccaaacctggattagcttccggccctccactttctattcaagacacacagaccagcagtcaccatacttatcactgggccttccccgtcctcctttctaaagggctggctcagtcggtcacctaattgtccaccttccagagccagtttggactctcatgcagccatttgggcagtaatgcattcattcattcaacaaaatgtattgcacactgaccatgttcccattggcaggctaatgaaacagacatctgtgggcctgtgcagctggcattctagccagaggagacagatgataaacagtacccagatgagtaaatataaccgtggtagaacgtgatctgtgttccagacaaagcaaaaggagactgggaacctggagttgacctccttcctcagaaacaggaaggcagccccactcttcccctgaagcacagccccctgtccaaatacaagcaggcatctgccagcactgcctccctgactagggagcagcgaggccgagtcctcaccatcctaccagggagctttgtggatccccagtgctaccacttaaaatctgtgaaaccaagtcgggaacccttcacctttcactgataaaacattgtgaaaaggcaacaggcctataagtacgtgacatatgaggttgcctcagggtggacatgttttccgcttttgtccagatgttgggtggcccatcggaactctgtgtttcacaggggctgggcctgtttcccatcctgtgatgagtccttcccaattgaactcttccctagccagttgctaactagagaccaggaccactcccatctgacgtttgcttgttcaaaaaaaataataagcttttaagtacatatctacctgcctattagtaaatatatgtcaagtgagaatattatagatatttctatattatatagagcaataagaaatgtgaaatagtaaatgagaacctgctgtttttctgttcatttttaaattaactcctttgtgttgatgtttaggtatctcattatgataaaggaaaacaatattaatcagatttttttggttaaaaaatatataagaaaaagtaaatatttttatttttatttcttattcattgctgtaagtttcaaaatacctttattagcactacagctccaaaagtttgtgaatttctggttcatgaaatcctttgcttaggagtatattctttgtgtttttttggtttgggttttaggggaatggtttttgttttcttttttgagacagggtctcactctgtagcccaggctggagtgcagtggcacaatcacagctcactgcagctttgacctcctgggctcaagcctcctgtgtcagcctccccagtagctgggactacaggcatataccaccacactcagctaattttttgtattttttacaaaattacaaaaattaggtttttgccatgttgcccaggctggtcttaaactcctgggctcaagtgatctaccagccttggcctcccaaagtgctaagattacaggtgtgagcactgtacccaccctaggaatatattcttacttattattttctactgatttctcagctttgtgcaagcttagcatgtgattcaaagttattctatggacaaaaatgaattttctcaaggatatttttatggaactattttctggacttaatctgttatgtagtatctcaaaattgtttagtcttttttatgttgtcaaagtcatcttatatccactaactcattcaaacctcagagcttccaaggaaggtttgagtggggaatgataacctcatttatttaaagacacgcttgtcacattaaaaggataacaaggacccaactctcttgactttacgagacacacgattgtaaaggaagacaatattctagctccatcaagtactagtatgtgtctttggcaagctttgggttccttattttaaaaatgtaagtaataatgacatgtataataatcacttctaataataatcagctcaataacactaaagctcgtgcaagccatgcagtaattctggggcttaccctctgcagccatacactgcttcccttatgtgaagaagcgcatccctgtcatgtaccagcaccacactgacctgaaccccatcgaggtggccattgacgagatgagtaagaaggtggcggagctccggcagctgtgctcctcggccgaggtggacatgatcaaactgcagctcaaactccagggcagcgtgagtgttcaggtgagccaggcacagcaggccggagggcagcaggggacgtccttgcccctgggtgacttgagagtcgtttccactaacaaggtctacttgagagcctcggtttaccaagtgatccctgctcccttcccccaacgtctgtgacatttctcctgatatcagagggggaggaaacctcatgatccctgccccccgccccatgaggactgactgtggggacaagagccagatctcatacactaccctgatttgtcagtatttggggaattctgggtgcctgattagaagcatcaagactcttctaaatacaaagaagtgtggagagcagtagattttcctataaaactgttgtttgctgttttctatgaaaattgtatccaaaaaagtaccttaagttttaccctcttaatggtatcttttgattaatgaattcattattttaatatagcccaatcaatcaatttttctttattggtagcatttttatgttctctttaagaaatctgtgtctactccaaaatttcacagatgttctcctaggttttcctcctttgctcagcatccacatccaggtctgcagtccatctggaattgatttttgtatatgttatagtgtaagggtcaggatatattttttccatatgaccttccaagtgatatacacaatttattgaaaagatcatctttgatctagatactaacatatatgttcagtttgtgaaaattcatcaagctgtatacacttgtgatatatgcgctttcccgtttgtatattatactttagtaagaggtttttaaaaagttatcttacttacatggtttcctagttaattggtaagtgttaaatcactccctccagtaacaagtatgactcttattttctggtatttttaagtgtatatagttcaagcacatgtttgttcatatgtatatgtacatgtgtgtatatatgtatttgtatatcctattgttttatctttcaagaagggtatgtttatgaaagttacatgtggattataatacataggttttggtttttttggttcattttctgaaattatattttgtcaacttcccatcagatccacgctaaagaaccgtgagttgttgcccaacatttttgtgtcattcaccacaaaagcatttacagatgtttttaatctctttccttatagtctcaaagacatatgtgccaaaataagttagcaagtgaacataagtattccagcaacatgagtgattatgtaacaggtccagaggccacaattttctgtagctaaaaacaaaaccactcaatcaacatgatcttggaacatccagcccctatggaaaggccgctggaggggtgtggcaccagtccagggtagggctggaccattgagctttgtaaaaggcaaaatatgccctgctaatttgatggtaaacttagcgttttataaaattcccagtcatcttaaaaagcaagaaattccatgttgaaatgagaagattaagtttatactcatacctaccaaagtaacaacaaagttgcagccagaggaaattaactttatcattttatttgcgtatttctgtaattgtttcatcaagcagctcactggcgctgcagctttactgggcagagccgtctgcggagcttcttgtcattgcactccaagatcttgctattagaccttatggagtctcatcagccttcctctttctatcttcttcaaatacagaccgtcttgtatcattttagatgatcagtcattttggtcgtcttcaggtgatgaatacagttccccccacgcaccagcctggtgctgagttccaccctcaacgcaccttgggctgttcacccattgcccccggctcagaggtccccctctgaccactgtggctggaacctggaaccctcctgtgtctccacgtctggtgtgagttcctgtggctcagttttcctgccattgctagacaagtcctgcctaccatgggtcagaaccacacacggggagctcccctaattccttgctaagctcaccagaccttccgggaaatatcaagcagtgaccacatagtcacgttcttccccaggctgtctcagacgcctggaacattcttcttcccatcccagtgtgtccagccttctttctcaccacgttcttacctttccttacttatccagaatcagcagacccttcttagctgcttgcaagggtggtgcagggttctggttcactcaccgtgctgtctgctcctaacatctagctctccagcacaccgcaaacgctcacttcatcccaggatagcaaatcagtttgcccatggctgtctatacaattcaatgaaatgaacagttgggtttcaaaaactggaatagttactgcatttttcaatttttcactgaattcaccagattggcctgttagttcagtgtagtgcagcacaaatcccagtgactaaacaccttggaagtaagaatccttgacctggatttggaagacctgggctgtgatctctggcgttttgcttattggctcttcaaacttcaacaggcccctaagttttccaagcattggtttcttcttacataaagtaaaccatcatcacaagtgccctgaagatggctgagatcatggaatcaagtggtgtgcaacagagtgagctttgtggtttctttttgggcttaagttcctggaaggcagggattgtgagtagctcacgcgaacgggctttttagtgcctgcaaactgaaactgagcagatggtcatggtgattttcttcctagtggaactgaaaatctttgctctttgtctaggtcaatgctggcccactagcatatgcgcgagctttcttagatgatacaaacacaaagcgatatcctgacaataaagtgaagctgcttaaggaagttttcaggtaaagcacactgaaagcatctttttctcttcgagtattgatcatttctgtactcattcgggagggagatgctgctggttggactcatgccttatcctctgcgtgcctttgtttctcccgcctgtaccattccaggcaatttgtggaagcttgcggtcaagccttagcggtaaacgaacgtctgattaaagaagaccagctcgagtatcaggaagaaatgaaagccaactacagggaaatggcgaaggagctttctgaaatcatgcatgagcaggtgagggccgcactggctccaacaacttggagttcttggttaggggtttcaagtacaccctatcatgacttaggccgcctgatatccttccagaactgtgacatctgaaggagaatgtagcataccacactcctgccatgctctagccccaggtcatttgggaacagctaacagattgcccatatgctgttatctacggcaagcaggggagagcgggcccgcctcctcgtggctctaagaggtggccatgtttcctaagctttctctctccccacccccgtctagccaaaaagaaaagaaaggaaaaactcacacgaaaatatccatactgttctgacaactttattcctttaatcctttgaaaaaagcaggacttgccaacctggtttaaggaattatctgttgcattcaatgtttttgctgtttaaaaatacagactgattccatttttgacgatgtacagtgggccttggcgccccagtggattcttcctttaagttccttgtcactatgggcatcttccctgattattttgctgttatctctttcctgtgggtttcttcagtaggattctatgtgtgggctcagttgtcacagaggagacagtgtcccatacccagggaatgcctagagcagcatccacattgttttttttgtgaggggtctgtctcagtcactgtcctttctttataattgacattagcaccttgataacacagaactgctctgtctggcccctccattatcgtccttcagtctggcacagtggaagccagggccgtttgtggagtgatcctatcccctgacagtttagttagtacattttcattgcaggaaacgaacgtcagtgtgtgagctttaactcacttgctttttttctcctccatgctaacacgttcagctgggatggtaatgtcatttttaaacattatttttctgataatctgacttagaaaaagctattacttttttgagtttgagcaactacagacattggcataatgacagtacatgggcagaggaaagcaccctcttctggacattttaaaaagtagaggccagacatggtggctcactcctgtaatcccagcactttgggaggccaagatgggtggatcatctgaggtcaggagttcgagaccagcctggccaacatggtgaaaccccatctctactaaaaaatacaaaaattagctgggtgtagtggcacataccctagtctcagctactcgggaggctgaggcaggagaattgctggaacccaggaggtggaggctgcagtgagccaagatcatgccactaccctctagcctgggccacagagcgagactccatctcaaaaaaaaaaaaaagtagaaaaaaattgaaacgattagagaaatgaatgtctgaataattaagcagaacaggagggactcatgggaaccgattttcagagaaaacttgagatcttttctgtggagcctccagattcctatagaatggagagtttggtcagtgggtgccgacattgggcactagagaagatgaaagtagtaagagatcataggctgaaactgttaaactcccaaagtacagggatatttaatgcacttgctgtcagctgcaccttgaacttcccattatgccaacagctgtgaagactgagcccccgtgaacccctgaagggccgtggcgggggtagacttgctttcgatgtttccaggggagcctctgctggaggtgaagacctacactcagatccttccaggcaccactgggcatggaaagatacttgttcagggtcagaggagtagccaccctctcccaagacaaaatccgtaagaccctgagaaaaggaggcaggagagaaacacaaatgcttcaaattcatttttaaaggctttttcaaggtcaaggctaggttgtgtcccagtcaagcacatgtaagtagacctcacgttgccttaagtagacctcacgttgccttatgatctggtgagcgtagaaggctctccattcactagctttgtaaaagaaacaaaatgtgctgttcttgactttctccttataatcctcacctgaaaacagtcatttatgagataagctgaacatctccctctgtaaaccagcagccaggctttccggctgcacatcactcacgtgatggagtgagtgtagacttgtgtgtgtgatgtggggtgcaacacattgagaaatatctgcttgcatccttatactcagtaacattgtgttgcacgtggcaacattgccttaaactctgtaacattttgttacacttggtaacattgtgtcacacatggcaacatggcattgcatatggtaaccttgtgttgccctcagtaacgttgtgtttctgtcctcaagatctgccccctggaggagaagacgagcgtcttaccgaattcccttcacatcttcaacgccatcagtgggactccaacaagcacaatggttcacgggatgaccagctcgtcttcggtcgtgtgattacatctcatggcccgtgtgtggggacttgctttgtcatttgcaaactcaggatgctttccaaagccaatcactggggagaccgagcacagggaggaccaaggggaaggggagagaaaggaaataaagaacaacgttatttcttaacagactttctataggagttgtaagaaggtgcacatatttttttaaatctcactggcaatattcaaagttttcattgtgtcttaacaaaggtgtggtagacactcttgagctggacttagattttattcttccttgcagagtagtgttagaatagatggcctacagaaaaaaaaggttctgggatctacatggcagggagggctgcactgacattgatgcctgggggaccttttgcctcgaggctgagctggaaaatcttgaaaatattttttttttcctgtggcacattcaggttgaatacaagaactatttttgtgactagtttttgatgacctaagggaactgaccattgtaatttttgtaccagtgaaccaggagatttagtgcttttatattcatttccttgcatttaagaaaatatgaaagcttaaggaattatgtgagcttaaaactagtcaagcagtttagaaccaaaggcctatattaataaccgcaactatgctgaaaagtacaaagtagtacagtatattgttatgtacatatcattgttaatacagtcctggcattctgtacatatatgtattacatttctacatttttaatactcacatgggcttatgcattaagtttaattgtgataaatttgtgctgttccagtatatgcaatacactttaatgttttattcttgtacataaaaatgtgcaatatggagatgtatacagtctttactatattaggtttataaacagttttaagaatttcatccttttgccaaaatggtggagtatgtaattggtaaatcataaatcctgtggtgaatggtggtgtactttaaagctgtcaccatgttatattttcttttaagactttaatttagtaattttatatttgggaaaataaaggtttttaattttatttaactggaatcactgccctgctgtaattaaacattctgtaccacatctgtattaaaaagacattgctgaccatt

SEQ ID NO: 8828 - DNA, 1263 bp, Homo sapiens
tgttaagtccatttagcaagatcacaggatacaagattagtatacaaaaattaacttcttcattcttatactatggttttactgtatagttcatgattacttaatgtaatttttagaaacaaataagctggatgatatttaatcttattcaaacaaagcactttcctttaaagtgatcatcaaaactttaaaacagtgctatttacaatagcataaaaaatatcgccatttatttcctatttagatatactgacattcatccatatgaaaatatgcaggtcattagcttactataatttacttttgacttaatggggcataaataaaactttcatagtacacatgaggtggatatttgatacacagaacatttgcggtgggctttctgtgggttagatgtaaagcccacatattttaatattcactattttaaatgagcaatgcatgaggggaatgcagtgtcagtacctggcctatttttaaactagtgtaatcaccctagtcataccattcagtatgtttgctttttaaaataagtaaccacaattaagttgttgtagcccttgcacttcaagagatctagtctttactttcagttgtctgttaggtccattctgtttactagacggatgttaataaaaactatgcgagcctgaatgaattctcagccaaatttagtcttgtctctcatcttgattggattaattccaaattctaaaatgattcagtccacaatagctctaggggatgaagaatttgccttactttgcccagttcctaagactgtgagttgtcaaatccctagactgtaagctcttcaaggagcaagaggcgcattttctccgtgtcatgtaatttttctaaggtgcttggcagcactctgtaccctgtggagtactcagtaccttttgtttgatgttgctgacaagacctgaaaaaaaatcccttaaaaaaaaaacccattaaagtgtagcaaaaccgaaaaaaaaaaaaaaaaaaaaaatcctgtggtttgacacaaggatgggcacatatatcaatggaacaaaacagagagtccagaaatggacccacacacttatgatcagttgatttttgacagaggttcaaaggcaatccaatagagaaagcatagtctctcatcgaatggtattgaaacaattggatatacatatgcaaaaaagaatatttatacttcattagaaaataacccaaaatgggtcatagtctaaaatgtaaaatgtaaaactataaagcttctgg

SEQ ID NO: 8829 - DNA, 376 bp, Homo sapiens
tgggaagagataaagaggtagcaaagggtcgccacgacccaccagaatccacagcccacttatgcactcatgacgccattgggacttacccagcatacgtttgttccatgtcgctgacatcccagccggggctaataaaccttaaggcaaacatcagcatgtctgggagaagagcctggcgctgagctggatcgtctagtcataaatgcctcatccagaaaccataaaactcaagtcaccatgtagtaagataaatagaagtctagaaagagcccatgtcagataaaggtaagtttggaaggcgaccaagccttgcttatgacaggagtggagagaggagccatctctaagttgggaacatcctgcagggaaacat

SEQ ID NO: 8830 - DNA, 1261 bp, Homo sapiens
tgttaagtccatttagcaagatcacaggatacaagattagtatacaaaaattaacttcttcattcttatactatggttttactgtatagttcatgattacttaatgtaatttttagaaacaaataagctggatgatatttaatcttattcaaacaaagcactttcctttaaagtgatcatcaaaactttaaaacagtgctatttacaatagcataaaaaatatcgccatttatttcctatttagatatactgacattcatccatatgaaaatatgcaggtcattagcttactataatttacttttgacttaatggggcataaataaaactttcatagtacacatgaggtggatatttgatacacagaacatttgcggtgggctttctgtgggttagatgtaaagcccacatattttaatattcactattttaaatgagcaatgcatgaggggaatgcagtgtcagtacctggcctatttttaaactagtgtaatcaccctagtcataccattcagtatgtttgctttttaaaataagtaaccacaattaagttgttgtagcccttgcacttcaagagatctagtctttactttcagttgtctgttaggtccattctgtttactagacggatgttaataaaaactatgcgagcctgaatgaattctcagccaaatttagtcttgtctctcatcttgattggattaattccaaattctaaaatgattcagtccacaatagctctaggggatgaagaatttgccttactttgcccagttcctaagactgtgagttgtcaaatccctagactgtaagctcttcaaggagcaagaggcgcattttctccgtgtcatgtaatttttctaaggtgcttggcagcactctgtaccctgtggagtactcagtaccttttgtttgatgttgctgacaagacctgaaaaaaaatcccttaaaaaaaaaacccattaaagtgtagcaaaaccgaaaaaaaaaaaaaaaaaaaatcctgtggtttgacacaaggatgggcacatttatcaatggaacaaaacagagagtccagaaatggacccacacacttatgatcagttgatttttgacagaggttcaaaggcaatccaatagagaaagcatagtctctcatcgaatggtattgaaacaattggatatacatatgcaaaaaagaatatttatacttcattagaaaataacccaaaatgggtcatagtctaaaatgtaaaatgtaaaactataaagcttctgg

SEQ ID NO: 8831 - DNA, 376 bp, Homo sapiens; identical to SEQ ID NO: 8829

SEQ ID NO: 8832 - DNA, 376 bp, Homo sapiens; identical to SEQ ID NO: 8829

SEQ ID NO: 8833 - DNA, 1263 bp, Homo sapiens; identical to SEQ ID NO: 8828

SEQ ID NO: 8834 - DNA, 18007 bp, Homo sapiens
tcaaaaactttagtcgttataacaactgtgactgttgagaaatttcactgttttcctgcattcctggcgcgggactctagccagaggctccgaggactttgtagcgactgtcccaagcgtccagttcgatgcttctcagggcggcttgctttaagggcccacccctaaatttgggttgtaaaaatttttgaggtaatgcttgttcaagttcgcttaagtgttcactcagcccaacacgcgggttgggcttgaggttcggcacccgggcagcctcaccccccgcgtcaggcgcgcgcacacagtaggtccgcgacccttagccctccactaggcagcccgcggggatgggtggccgggccgcccacacgggcagcaccggcactgcgcatgctcggcgcgtcggcgcaggtttccgcagctgagggggcagctccgcggcggcgtccggggtctccagtagggctgacgctccggtgctcgcacaatcccccgcctcggctggcaacgggcgtccctccactccccgagtccccggcagccgccgccaccccagcgcgccccgatctggccccctgccccgcgaagatggctgccgtacgccgggcccgcagttattgccgctgcctggtgcgcttctccgaccgagaactctgctaagctccgctgcagagacaggcaggagtagacacccggacacccagcacccctcctccggggggcggtgcagagggggcacggagagcccctcgagcgcagcaggccgccccgccagcatggtaacctggccagggggctcgagggtggacgccgcggggcgggagcgtggtgtgcagaggggccgggcctagggctgggggtcggcggggactctggggaggagtgggagcttcacggctgccacccgttagagggccctggcctgagaaggagtgcgtcggggggcggggggtgccaaccctggcttctccccaggattccttcctgctgagcctccccaacccccgccgagctcgatgtgaggaggagggtttgcaggacagccggggaaaatgtcccttctcggctcactgagtatattgaaccagtctcggtcctctcaagggattttatcagaagcattgagcatagattgaggtaagctgtcacagcgcctgaattcgggagggagctctggcaagaggagacacttgttgattgctcttctgcggaaaagccaggcccaccgacagtccctgccggcaccttgaggagccctgggtgtaggacgcatctgccccgcgaggcgtcattccctgggaggatgttggcaggcggtcctggcggagtggggttggagggttcgtctccgcggcgtcggtgccgtccaaatgagagactgagctaagttgcagagcttgacagtgcagattccatgagactgttccatattggaatacgtagtctctgccctatgcctttctttggtttagaataaattgttcatctgagaaactaatctctggctggggcttaaagaatcagggatgcaataattccaaacgatttaatttatagtggactcaaatatttattgcataaatgaatggctgaatttatttttattaaattaatctggaggatagaaaaggcaattgcccctgcccctaaactttcagaagtagttctctgaccgggattaagtacttagcctttataatttattaatcgcacctgtgaaacaggagtaacatgatgaagacatggactactcatacacatgagctattcaagtgaaggtgatatttaggtcaaactcgattatgaaaaataaaaggaaaacctccaggtggcatctgaggccctacttatttcaagtagtagttgaattgaccaaatgtcaactcagccgatcccagatataatagtttgtttttgtgatcatactgtcaaaatcaaagtaagaatggtttagagctccactgtaacacaggggagaagaaagatgctgtctatattacacttctcccatttcctttcctcatccttcagatacacattatccagatggcattttatttgtcgattcagccaatatttttgagtacctattagcctggcatagtgtgagactctggtacaatactagatcttcaatataaccaaacctgcaaggtgatttatgataaacttttaatcacagaatgtcacatgaaaagggacctcagtagatcaccatacctctttatagatgtcccatagacatgacagctgaggcctagacaggcctttactacaaatcaagcaatgtgtttgaccttatggttacagaggtaactgagatgtgttcctgtcctggatgccttaaatctagtaaatgaaacagccaacctcagtacaaatgttgtgataaaagtaagcacaagtgttatgggaacacaaaaatgttgaaaaatgcttctgactaagatgaaccctgagctgaatcttgaagaatgagtagaaatagctaagtgaggaagaaggcattccagatagagcaagcagcgtatgcaagccaactggacagagcaggggaagctcttgaagtcagtttagaatgactgctaggcaagagttagaaaactaaattacaaaggataccccacagaactcaggtcccctcgcattacctgtacttagagtttgcaataataaagcagactcttgagaagagagagaaatacacttctcagtgggatttatacgctcagtctttcattacatattttcctactaatggtgttcttagtaggaaaagctcccaacttaaagaaactaaaaaataatgtatttgacaatacattaatccttaaattttccatttttctagaaattcatctgagttcttgatctcatttatttcttcacagatgtgtgctttacagtgtgcccagcattttaccatatactaactggttcaagtctgaaaggcacctctgctttgagtctgcttgccagagataagataggaggcaaggctaatttatgttctgtaatatagtgcaagtatatctggtagctgtgttaaagatgtgtgttaatataaacattaccctcccccccctggccgccctgaaataacatatgactaaaatttgcaattgtaaaacttaccatctttggaaccagtaaaattaaatgggttttattattatctagcttaccttgaaggccatttccctgattgccacatttctttacagtaagtgttgagcaagtttcatttcctaataaatctattagctaacagactgaactgaggcaacatgccattttcactggaaggtaggatttagtttaatttagcaaacatttattgagaataaaaggataaaattaaagtcatctgattgaaacctttattaggctccaagtcacacacagtaattccagtctagctttattccactgaagccgatccaatatataaaaattggatttatagacagataaaatagaaggggtttctttacaaaagcatttactattaaaagtctttgactaagctttcctagtacatataaaatacacagaagtcatattttcatagaacacatttaataacatgctagctgtataaaagaagtgacatcatcttacggaatatatatatatatgtgttttttttttttttttgagacagggtctctctctgtctcctgggttggagagcagtggtgcagtctcggctcactgcaacctgcatctcccaggctcaagcaatcctctcacctcagcctcccgagtagctggggctactgtgtaccaccaccccctggtaatttttgtattttttgtagagacggggtcttgccatgttgcccagccttgtctcaaactcctgggctcaagcagtccttccacctcagccttccaaagtgttgggattacaggcatgagccaccacaccctgcctggactgtattctcttaagtgatccatgaagcaaaaactatctgctacagccaggtatggctgcacaagcctgtagtctcagctactcaagaggtggagcagaaggatctttggagctcaggagtttgaggccatcctgggctgcataaggagactctgtcccaagaaagcaataactatttgctgaactccataggacaactaaatgttactattttctgaaacaaagttgttatttttagccacctaacaatacattttaacctagaacccagtggatttgtttattctacagtatcaaaaaaaattcaagtatcaagttatatctgattggtatcattaaacttacctgtgaagaagataactataaagaagcaatgttgtatttcattaacatgaaacattagagtattttctgttttgggacttgtagaagtttatggacactaaaattatttgggctttttgccttagactcaattatgtttggaacatctgtcacagcaccttgtcaactgcattctagaacatttctcctcctgatggaaaatacaacatgacctatgaggcagtcttgcaaaagaaaaaagaaatagcagaatctaatctagcctttcaagatcctgccacaatttataggaaataagagtaagaggtcaaaggaacatatttattgacacctcagcaaaatctagcttctacagaaaaacgacccagtttcatcccaaataaattacaagaaaaaagagtgaggattacaaaagacttgagacatatcaagcaattacaatgtggactttatttgaatcttgatttcacaaactgtgaaatatatgtattttacatatgacatcttgagaaatatgaatactgtgacttgatatttgatctaaggaattacattgataattattgaagttgggtcatgagtacttagggattaattctctttaagtgtttttctcataaaaagttttaaagtcttgtagaactaaaaaaataccaaagatgttctaattttatttcatttttttctaagaagaataatatttttcttttcttttttcctttttttttttttttttttttttatgatggggtctctgtcatccaggctggagtgcaatggtgcagtctcggctcactgcaacctccatctctcaggctcaagcaaccctcccacctcagcctcccaattagctgggaccacaggcgtgtaccaccacgcctggctgattttttgtatttttagtagagatggggtttcactatgttggctaggctggtcttgaactcctgacctcaagtgatgctcctgcctcagcctcacaaagtgtggggattacaggtgtgagccaccgcacctggccagaaaaagagaaaataatttttattatagattatcagtagttatgtatattaatgaagaatttggcttcatttacctaattagattaatcataaatcatttatgaatagtaatagacttgaattgttactttatattacacagttggccctctgtacctgcaggttctgcatcctgggattcaactgtggatcaaaaatatttgggggaaaaaaagcaatacaacaataaaaaataatacaaattaggaaaaatatactacaagaactatttacatggcatttacattataagtaacctagagatgacttaaagtatatgagaagatgtgcataggttatatgcaaatatgccatatgagggactggaaaacccagggattttggtgtcctgggggctcctggaactaatcacctgtggatactgagggacaactgtaattaaattgatttttggatggatgcaactgatgttaaatttggcgggggggaaatgttaggattcacaataacgtgagtactgtgggttggagtagagaatatgcttttcagactcattttcctttggaaattaatagtaaggtctcaagtgccccctacagccttgctactcaaagtgggttccacaaagtgttgacagtatggtactaaatagaaagtggctgaatgagaaatgtagattgcagagggcaactggtgtgtttatatgcctgacattatttgggttttcccccctcaggcagaagctgaggaagattgtcattctgatactgtcagagcagatgatgatgaagaaaatgaaagtcctgctgaaacagatctgcaggcatgtttcttcaattgtgtctttgatttttattccattgttcccatacatatgcagaaattgatcataatcatgggtatttgtaggttattactgtttgcatggaatttaactgtttccatactggtttatagaatacttaaaactatgttatggctttctttgtgaaaagaaatatcaataatggttgcttgtagtttaacatgggtttaaagtattcaaactaaggcttacgcatgactcaaaacccataatcttaaaaagattgatgggtttgaccacctaaaagtttaaaacctgtgtataagaaaaggcatcataaataaagttaagagaaatagccagctggaaaaactgtttattatatatgggcagaggattcatctcattacatagagcactcatatatttggaagaacagaggataaaaagatatgagtggactgttaatggcaaaataatacaaatggccattaaatatttgaagagataattagcctcattaataatttaatcagattggtgaataatgtgcatcgctgtccaagctgtgagaacactcatgcagtgtacatgaaaatgtaaattggtacagctttctggagggcagactggtgatatggatcaaaatgaaaaacatgcattcccttgatacagcaattctacttccaggaaattaattttaaggaaatagtggggaaagtaaatatgcaactataaagatgtttagtatagcattgtttatctggaaaaacatcatacaacttaaatattcattacctgttattaagtaatgatgcatccatacagtgaaaacactacagccatttaaaaggatgaagtaaatctttatacattaaaagagaaaaaaagttgctgtaactagttaagtgtgtctcactgcacttgtaaggttaataataattatttggaacagctcatctagtagacattgaatgctgctaaagattctgcaggtcagagatctatgtgtaacaggttaaaagcgtagcaacaaagcagtgtacagaatatagagaaaaattaatttaaaacattctagatacgtctttttttaaaaaaaaaaaaggaagccaggaataacatatgcatccctgttagcaatggctgcctttgggcagaacgtgtaacccagtttgggttccccaggaagcagactaggtgaagattgctgtgcaggaagtttattaaggagtattcttgggatcaacacctatggaagggagagagggaaacaaatgggcagggagaagaccagctgcaatgcagtcttaatggactgcttagccatcctcgagggagttctgaagatgaaataccctttcagagatgacctgagttgcaaagagccaagactttattagccgttgatcagtcattgggtggggattgagaggacagtgtgattttgctgaggcaatacccaaaagggctgacaactcaagtgttttcagatagaactctcagcagtttgggtaacaagttctttatttctgaaagggaatctgggcaacacaccagagtctaccttatagggttcactttttatgtgcttttaattttttttttttttgagatggagtctcgctccattgcccaggctggagtgcagtagcacgatctctgctgactgccaacctctgccacccgagttcaagcaattctcatggctcagcctcccaagtagctgggattacaggtgcccgccaccacacctggctaatttgtttgtatttttagtagagacagggtttcaccatgttggccgggctgttctcgaactcctgacctcaggtgatccgtctgcctcggcctcccaaagtgctgggattataggcatgagcctctgtgcctggcctttacatttttgaaataacaaatatttgaaaaaacattttctttttgaaatacagaatgttaatagattttgggcttacctacagaatttttggcagcattcttaatgtctactagatgatatagtcattaaaaaattattggaagcttataacttcagtctgtaagtgatggcttatattttcaattctaattaaaatttggttttccaatataatttgacttttggtgtactgacatgtattttatgctaattttcttgattctttaagttttgagcagaaaattattttaaaagatgtatttaatggatatttaataattcagaagacagtgatttctggacttagagtaataagtatatacgtggaagtagatagatgttggacatattgatacattgttccagagttgagctacccttccttgatgagtcctaaaatgctgttctccccataggcacaactccagatgttccgagctcagtggatgtttgaacttgctccaggtgtaagctctagcaatttagaaaatcgaccttgcagagcagcaagaggctctctccagaaaacatcggcagataccaaaggaaaacaagaacaggcaaaagaagaaaagttaagtattatagatattgtaacaaattacatttttttttttttggcacatggaaattttcactgacacagtaagtaggcattataaccagactttcgggacataaacacatatcttgtaaaataaaaattttgactagtatactagtttatatatttctcacaatttcttctaggtactttggatggtaccactactcctgcatggcttttttctctgtgggtacactgtcttcattgagctgtcttttgttaatttatagacctctgggattcatgtggttcctaaaagattggtgtctctgaatttattaacagaaccaaaaagaaaaaacagaattttctaaatttattaatagaaccaaaaagattgctcacatgttaatgtctttccagaggtcttaatttcatgcagtattttgttatattttgaattgatcagcttacaataatgcattaatcatttccttattctggaaaattttgaaatattttcacactgaaaatattttgaatgctgtctaacattcatatctcttctggtacttactcacacagagtaggcacagcataccatttcatttcttattcttcttccatagaggctgccatctttttaccatcagatccaagtttgtgtttataattagtcatcaaataattggcattaccatgatgacttaccttctatctcctcttaatttttattttgaaataattacaggtccacaggtatagggaagtcctgtgtgccctttaacctcctccgatggtaacaacttgcataactatagtacaatatcaaaaacgaggaaatagacattggaacaatccacagtttacttggatttcctgagtttacaagcacttgtctgtgtgtatgtgtataaatagttgtttgcagttttattacaaggtagcttcatgtaaccaccaccacaatcaagatacagaactgttttatagttatatactccctttccctagccattcgtaaccactggcaaccactagtctgttctccattttgtaattttgatattccaagaatgttgtataagtggaatcatccagtatgtaaccttttgagattggcttttttcactaagtataattccctcaagatcagtccaagttactatgtatcagtagtttgttcctttttattgcagaatagtattgcatggtatggatgtaccccagtttaaccatttattggttgaaggacatttgagttgtttccaatatttggctgttatgaatggagctatggaaatatgtgtgtaggttttctcatgaacataattttcacttctctgggatgaaaccccaagagtacaattgctaagttctatagtaagtacatgtttgattttaaaagaaactgccaaagtgttttctagagtatcttatattaagttcccaccagcaatgtatgagtgatccagttcatcctcatcagcatttagtgttgctactttttaatttaatttaattaatttatttatttattttaagacagagtctcactttgtcgcccaggctggagtgcagtggtgtgattccagctcactgcaacctctgcctcccgggttcaagcgattctcgtgccttggcctcccaaatagctgggattacaggccccgtcagtaacgctgggctaatttttgtatttttacaaatttgtattttgtatctagaatgcaaaaagaacttccaaaacacaatattaaaaatattagcaatctagctgggtgcggtggctcacttctgtaatcccagcactttgggagcctggggtttcaccatgttggtcaggcttgtctcgaactcctgacctcaagcagtctacctgcttcagcctcccaaagtgctgggattacaggagtgagccactgcacctggcctttaattttattaatagccattctgataggtatgtagtggtatctcattgtcattttaatttgcatttctctaatggcttgtgatgttgaacatcttttcatgtgcttatttttcatctattaatatatattctctctctgaaatatctgttgatgtcttttctaattggattacatatatatatataattatttttttttttttttttttttttgagatggagtgtcactgtgtcaccccaggctggagtgctgtggcacgatctcagctcacagcaagctctgcctcccaggttcaactgattctcctgcctcagcctccagagtagctgagactgtagacgtgtgccaccacaaccggctaatttttgtatttttagtacagatggggtttcatcttgttggccaggccagtgtcgaactcctggcctcaggtgatctgccgacctcagcctcccaaagtgctgggattacaggcgtgagccaccgcgcccagccagatgctaatatttttgatgttgtgttttggaagttctttattctagatgcaagtcttttattgaatatgtggcttgtaaatattttcatcctcttaacagggcatttcacagagcaaaaatttttaattttgacaaggtccagtttatcagtttttccttttgtgaatggtgcttttggtgtcaagaactctttgcctagtcctaggtctccaagattttctttgttttcttttcttctaaaaggtttatggattttacatttaagtccatgatccagtcaagttaatttttatgtaaagtatgaggtttaggtcaaggttcattaatttgcctatgaatatccagttattttgcacaatttattaaaaaggctctccttctgccatccatactaatttttaatgcaggttttcaaaaatttttactttatatttttataggctcgagaactcttcctaaaagcagtagaagaagaacaaaatggagctctctatgaaggtaaaaattcagagcccaggttcatatcataacatttctgaataatgactctgttattaaccatatttttttttctataacttatttggtatagaacatcacttttcttaatacattcttccttcagtactcattggaaattggttccaggaccctttgtagataccaaaatgctcaagtcctttatatgaatggtgtaatatttacatataacttacttattatgtaaatagttattatactgtattttttttttaaatttgtatttattttaaatatttttgatctgtagttggttgaatcagagaatgtgaaacccatgaatacagagggccagctatatttgaaattgttttttaaaaaataaaaaatagaaattgtttttctatataacctgtctttttgcaaaaaaatattgctgggaaacatcatcatgttggtaggatgagcaaaataacttttttttacatttagctttagttattcttcattaataaagtatttaaaaattattcattttaaaatatgctctttttataggtgaaaattgcttcagaggatgggaatataaaggataaattgaggaaaaaatacatgtttttctttctaagttccaatttacatattaccaacagaaatatgtggtaatggccgggcgcggtggctcacgcctgtaatcccagcactttgggaggccgaggcgggcggatcacgaggtcaggagatcgagaccatcccggctaaaacggtgaaaccccgtctctactaaaaatacaaaaaattagccggcgtagtggcgggcgcctgtagtcccagctacttgggaggctgaggcaggagaatggcgtgaacccgggaggcggagcttgcagtgagccgagatcccgccactgcactccagcctgggcgacagagcgagactccgtctcaaaaaaaaaaaaaaaaaaaaaaaaaaaagaaatatgtggtaatatatgtgtcagctttgtgtcttttattaacccaatagaaatgtgtaaataaagtgataggactatttgccatattaggtttgtaattatgctttccttttgtgatagtaaagataataattgatgcataggaaaaatccttgtgcttgaatcgtttgaaaatgccccaaaactaacatcattcagagttactgcatttatatgcaagtttcttctagtgatatttttctttagatttttagaaaggcccagttgatcaagtccctgtgcagccttcattggtttgtgaaattcgcatctccacttagtgtatggtgtaattcatccagaataatagaacatggcagaatatattgaatcataaactcctttgtagggaaaaagaactagtcagcctctacagctccaagttctactggtgtatctctgtggggagagttattgaatattacagctctaaactacctgtctaggaaatttgtaaaaaataagttttgaagattacttaggtaaataagaggcagctgggctaaaagaagttaaatttaaaggataatttaaaaacaaaaacaaaaactattctttattccacccagtaggaagcatttaattttcctcaactctgtgtcttagaaaagtttgcttagaagtgtttttggccaggcatggtagctgacacctctaatctcagcactttggcaggctgaggcgggaggatcgcttgaacccaggagttcaagaccagcctgggcaatatagcaagatgttgtctctacaaaaaatttaaaaattagctgagtgtgctggctggggcatgcctgtagccccagctactcaggagactgaggtgggagaatcacttggacctgggaggtggagtctgcagtgagccaagatcgtgccaactgcactccaacctggacaacagagtgagaccttgtcttaaaaaagagagaagtatttttgttggctatagcaattgcatcttcagagcccaaagaaagacaactatttaaaaatcatgatacgtaagagggtgaggaaaaatatgggaagggctaatatataagagtaaaatacaacatcttaagtttagggaaaagtttctttctgagcattaaggtttggaaatagttttgtgtcactgaactgctgttgcatgtagaaaaacagaatttggccgtttgtaaagaaagttaccaaattaaaccacagttaagggtaatcaaaggaaatgacaaaaatgtgtggtcacagctaatttagctttatttcttcttttagccatcaagttttatcgtagggctatgcaacttgtacctgatatagagttcaagattacttatacccggtctccagatggtgatggcgttggaaacagctagtgcgtatataatttgatagatagtaatgcatagagtttgttaaagttaagcatctttgccctgttgactcttaagatggtgctaattctgttgagctctatactctttagtatatctttgtttataaagttgtagaaattttttaattagggaaattgcaagataacacatagaaatgcaccttttaaacagatacaaaaataaacagatacaaaaataaacagatacaaaaaaacggtttaaaaaaataaaagcagtagttactgaaaggagtaaattaaaggacacatttcaactttctgaaacctatttgaagtagaaagttttaaaatgtaattaggctaaatttggcaaaatattaataatggttaaaattgagtgatgggtacatgggagtttattacactagtttccttacgtatatgtttgaaattttacattttaaaaaaggcttctaattaggaaaatgctgaactataaaagatgttattattctcttaatgtttttagtaaaacattaaaactctaacatttatttaaaagcacaggtgcagaatatattcctaaaagaaatcatgtttgaattgtatagttgccactgcatcaaagccatgaagtagcattggttttatatggataaagatcaagaaaacttatttttaaggcaatacttttgcaagacaattataaaattgttttggcttaattgcactatctcccaaaactcaatttgctgatattagaagagaagggagtctgtacccatgagagaatgtcaggttaaaaatagacagtacagagaaaaaagttttggtaatgaaatattatattagctattatattaatatattccctctgtcatgaaataattgtcacctttattgataacatatgcttattgccaatgttttttaactgcatatggtattaacacttaagctttggataagtcatattaaaaacattcccaacaaggtcaatattaatagcctgtttaaattttcagctaataatattgttcaccaaattagagttaacagtatgaggtagttcatacttaaaatgaatcacttgggttttttctaaaccttctttaaatttgggtagagtcgtttagactcagctcttagccagttttataaatatgtgccagatgctgttaagaaagattgtattaaaatattaaagaggcatttcttttctttcccattttttatacaaacccagacgctatgaaagttctttaaggattcatcttttttttttaaataagatctgataagccctaaaagtttgcctttttttttctttcctgtaacatgtttgtagaatagccattgagtccatctagcctcaaccacacttatattttgttgtattacaaaatgcccttcctggtttttttttttgtttttttgttttttttaagtctacatcacttgaaacttcctggttttctaacttcgccttcatccaatcctctttgtaagtctgatcatctttaaggtttacttcagtaaaaatagaaagctcatttttctagcaccattcactacacatttgtgtatactggtagatgatttgtgaaccctaagatgttttcaaagtaggtattttcctctctaaaggtaggctgataaggcaaatctgttagaaaacccttggtaagtaagtacctcagatgacgtctgtagatttggtttttatccagttagaataaattaaggttaaagaacatactacgttaagatttttgaaaccatttgaaagcttgcagtaactcataaaatctctactttacaataaaattagttaaatctcaacacctgtatccaaaaattctaattctttctggatgataattactgaagcttttttctttgaaaaacttgatacagtattcctttgcaagacaggataaattcatcacatttaaaaatgtatcacatgttgaataagctttaggtgactttttgtaaagcaaatttgaaaatgctatgaaaaatcagtttctaaactgtacgcttgtagactgaggcacttaatttattcacctcccttttttcagcattgaagataatgatgatgacagcaaaatggcagatctcttgtcctacttccagcagcaactcacatttcaggagtctgtgcttaaactgtgtcagcctgagcttgagagcagtcagattcacatatcaggtgtgaatacttgtttttcataactcagtgagaaatatcttaaccttaaagatttccaaatttataaggtcagataatttgccagataactgctgctttagttcagaatatggtggaagatctagttataattatcatttgcatatactattaagctgttttgtgttttgttttgtcttgttttgttttttgaaatggagacgtgccctgtcacccaggctggagtgcagtggtgcaatctcggctcactgcaacctctgcctcctgggttcaagcaattctgctgcctcagcctcccaagtggctgggattacaggcgtgtgccaccacacccagctaaatttttgtatcttcagtaaagacagagtttcaccatgttggccaggctggtctcgaactcctgacttcatgatctgcccaccttggcctcccaaagtgctgggattacaggcctctgaggcactgcgcccagcccagtagtaagctgctttacaatctgaagcagaacagtttgtagtgctgttgtttaaggatgccatacctttttcagtaaagatctaacagggtaagtctgagttgttgaggtagccctaagaaaactggaggaatactggtatcatgaagcatttcagccatgttggacaattgtcctgagacagactgaatgtttaggaattaatggatttttgttcgggcatggtggctcacgcctgcaatctcagcattttgggaggctgagttgggaggatcacttgaggccaggagttcaagataagcctggccaacatggtgaaaccccacctctactaaaaatacaaaaattagctgggcgtcgtggcgcatgactgtagtcccacctacttgggaggctgaggcacgagaattacttgaacccaggaggcagaggctgcagtgagctgagattgtatcactgcactccagcctgggcaacagagcaagaacctgtcacaaaaaaaaaagaaattcatgtatttttaatatgttaaatattgtttggttcggggctttttcagaggaggacaattaaaagttttcaaggagatgaaaataactttagtgttaatagatgcaatatggatcacacacacatagattattttcctaaaacatttattttaatatgtctggcaaaataatcttatgagggaaaagagtgctttataaaaagtagcttcagatctatactgaaaaaacaaagatatttatgtcttgatgttaagaaccattattattattgagtagctaaatacattcatgctttagctctgagcaatacagagggtgtgattataaatttctaggaaggtataaatgtactgggaatgtagttgtgacaatagaatgacatagaggagagtcactgaaggatgattttcttttgcagtgctgccaatggaggtcctgatgtacatcttccgatgggtggtgtctagtgacttggacctcagatcattggagcagttgtcgctggtgtgcagaggattctacatctgtgccaggtactaagtttttgtttttgttttttaaacaactgaggcaatggtgaaaagaaagatggtcctttgccaatcctgataaaattacttgattggtgttctgagttaaagcttagaataaacaagttttgctaagctgtacttaactttctcaaataacttagaatttaaaggctagaatatgctaggtttctagggtatagaataatatgtaggacagatgtagtaacccatactactaccatagagtttacatgctagcttaactgatttgggaaaaagagttatattagaaaaatatattcaagtcatttttacactaactgtaaactcattgtggtaatggtttagattaaaacagcactagcattttcttatggctcattaaaagttattctatattttgaa

SEQ ID NO: 8835 - DNA, 8551 bp, Homo sapiens
gcgtcggcgcaggtttccgcagctgagggggcagctccgcggcggcgtccggggtctccagtagggctgacgctccggtgctcgcacaatcccccgcctcggctggcaacgggcgtccctccactccccgagtccccggcagccgccgccaccccagcgcgccccgatctggccccctgccccgcgaagatggctgccgtacgccgggcccgcagttattgccgctgcctggtgcgcttctccgaccgagaactctgctaagctccgctgcagagacaggcaggagtagacacccggacacccagcacccctcctccggggggcggtgcagagggggcacggagagcccctcgagcgcagcaggccgccccgccagcatggtaacctggccagggggctcgagggtggacgccgcggggcgggagcgtggtgtgcagaggggccgggcctagggctgggggtcggcggggactctggggaggagtgggagcttcacggctgccacccgttagagggccctggcctgagaaggagtgcgtcggggggcggggggtgccaaccctggcttctccccaggattccttcctgctgagcctccccaacccccgccgagctcgatgtgaggaggagggtttgcaggacagccggggaaaatgtcccttctcggctcactgagtatattgaaccagtctcggtcctctcaagggattttatcagaagcattgagcatagattgaggtaagctgtcacagcgcctgaattcgggagggagctctggcaagaggagacacttgttgattgctcttctgcggaaaagccaggcccaccgacaggccctgccggcaccttgaggagccctgggtgtaggacgcatctgccccgcgaggcgtcattccctgggaggatgttggcaggcggtcctggcggagtggggttggagggttcgtctccgcggcgtcggtgccgtccaaatgagagactgagctaagttgcagagcttgacagtgcagattccatgagactgttccatattggaatacgtagtctctgccctatgcctttctttggtttagaataaattgttcatctgagaaactaatctctggctggggcttaaagaatcagggatgcaataattccaaacgatttaatttatagtggactcaaatatttattgcataaatgaatggctgaatttatttttattaaattaatctggaggatagaaaaggcaattgcccctgcccctaaactttcagaagtagttctctgaccgggattaagtacttagcctttataatttattaatcgcacctgtgaaacaggagtaacatgatgaagacatggactactcatacacatgagctattcaagtgaaggtgatatttaggtcaaactcgattatgaaaaataaaaggaaaacctccaggtggcatctgaggccctacttatttcaagtagtagttgaattgaccaaatgtcaactcagccgatcccagatataatagtttgtttttgtgatcatactgtcaaaatcaaagtaagaatggtttagagctccactgtaacacaggggagaagaaagatgctgtctatattacacttctcccatttcctttcctcatccttcagatacacattatccagatggcattttatttgtcgattcagccaatatttttgagtacctattagcctggcatagtgtgagactctggtacaatactagatcttcaatataaccaaacctgcaaggtgatttatgataaacttttaatcacagaatgtcacatgaaaagggacctcagtagatcaccatacctctttatagatgtcccatagacatgacagctgaggcctagacaggcctttactacaaatcaagcaatgtgtttgaccttatggttacagaggtaactgagatgtgttcctgtcctggatgccttaaatctagtaaatgaaacagccaacctcagtacaaatgttgtgataaaagtaagcacaagtgttatgggaacacaaaaatgttgaaaaatgcttctgactaagatgaaccctgagctgaatcttgaagaatgagtagaaatagctaagtgaggaagaaggcattccagatagagcaagcagcgtatgcaagccaactggacagagcaggggaagctcttgaagtcagtttagaatgactgctaggcaagagttagaaaactaaattacaaaggataccccacagaactcaggtcccctcgcattacctgtacttagagtttgcaataataaagcagactcttgagaagagagagaaatacacttctcagtgggatttatacgctcagtctttcattacatattttcctactaatggtgttcttagtaggaaaagctcccaacttaaagaaactaaaaaataatgtatttgacaatacattaatccttaaattttccatttttctagaaattcatctgagttcttgatctcatttatttcttcacagatgtgtgctttacagtgtgcccagcattttaccatatactaactggttcaagtctgaaaggcacctctgctttgagtctgcttgccagagataagataggaggcaaggctaatttatgttctgtaatatagtgcaagtatatctggtagctgtgttaaagatgtgtgttaatataaacattaccctccccccccggccgccctgaaataacatatgactaaaatttgcaattgtaaaacttaccatctttggaaccagtaaaattaaatgggttttattattatctagcttaccttgaaggccatttccctgattgccacatttctttacagtaagtgttgagcaagtttcatttcctaataaatctattagctaacagactgaactgaggcaacatgccattttcactggaaggtaggatttagtttaatttagcaaacatttattgagaataaaaggataaaattaaagtcatctgattgaaacctttattaggctccaagtcacacacagtaattccagtctagctttattccactgaagccgatccaatatataaaaattggatttatagacagataaaatagaaggggtttctttacaaaagcatttactattaaaagtctttgactaagctttcctagtacatataaaatacacagaagtcatattttcatagaacacatttaataacatgctagctgtataaaagaagtgacatcatcttacggaatatatatatatatatgtgtttttttttttttttttgagacagggtctctctctgtctcctgggttggagagcagtggtgcagtctcggctcactgcaacctgcatctcccaggctcaagcaatcctctcacctcagcctcccgagtagctggggctactgtgtaccaccaccccctggtaatttttgtattttttgtagagacggggtcttgccatgttgcccagccttgtctcaaactcctgggctcaagcagtccttccacctcagccttccaaagtgttgggattacaggcatgagccaccacaccctgcctggactgtattctcttaagtgatccatgaagcaaaaactatctgctacagccaggtatggctgcacaagcctgtagtctcagctactcaagaggtggagcagaaggatctttggagctcaggagtttgaggccatcctgggctgcataaggagactctgtcccaagaaagcaataactatttgctgaactccataggacaactaaatgttactattttctgaaacaaagttgttatttttagccacctaacaatacattttaacctagaacccagtggatttgtttattctacagtatcaaaaaaaattcaagtatcaagttatatctgattggtatcattaaacttacctgtgaagaagataactataaagaagcaatgttgtatttcattaacatgaaacattagagtattttctgttttgggacttgtagaagtttatggacactaaaattatttgggctttttgccttagactcaattatgtttggaacatctgtcacagcaccttgtcaactgcattctagaacatttctcctcctgatggaaaatacaacatgacctatgaggcagtcttgcaaaagaaaaaagaaatagcagaatctaatctagcctttcaagatcctgccacaatttataggaaataagagtaagaggtcaaaggaacatatttattgacacctcagcaaaatctagcttctacagaaaaacgacccagtttcatcccaaataaattacaagaaaaaagagtgaggattacaaaagacttgagacatatcaagcaattacaatgtggactttatttgaatcttgatttcacaaactgtgaaatatatgtattttacatatgacatcttgagaaatatgaatactgtgacttgatatttgatctaaggaattacattgataattattgaagttgggtcatgagtacttagggattaattctctttaagtgtttttctcataaaaagttttaaagtcttgtagaactaaaaaaataccaaagatgttctaattttatttcatttttttctaagaagaataatatttttcttttcttttttccttttttttttttttttttttttttatgatggggtctctgtcatccaggctggagtgcaatggcgcagtctcggctcactgcaacctccatctctcaggctcaagcaaccctcccacctcagcctcccaattagctgggaccacaggcgtgtaccaccacgcctggctgattttttgtatttttagtagagatggggtttcactatgttggctaggctggtcttgaactcctgacctcaagtgatgctcctgcctcagcctcacaaagtgtggggattacaggtgtgagccaccgcacctggccagaaaaagagaaaataatttttattatagattatcagtagttatgtatattaatgaagaatttggcttcatttacctaattagattaatcataaatcatttatgaatagtaatagacttgaattgttactttatattacacagttggccctctgtacctgcaggttctgcatcctgggattcaactgtggatcaaaaatatttgggggaaaaaaagcaatacaacaataaaaaataatacaaattaggaaaaatatactacaagaactatttacatggcatttacattataagtaacctagagatgacttaaagtatatgagaagatgtgcataggttatatgcaaatatgccatatgagggactggaaaacccagggattttggtgtcctgggggctcctggaactaatcacctgtggatactgagggacaactgtaattaaattgatttttggatggatgcaactgatgttaaatttggcgggggggaaatgttaggattcacaataacgtgagtactgtgggttggagtagagaatatgcttttcagactcattttcctttggaaattaatagtaaggtctcaagtgccccctacagccttgctactcaaagtgggttccacaaagtgttgacagtatggtactaaatagaaagtggttgaatgagaaatgtagattgcagagggcaactggtgtgtttatatgcctgacattatttgggttttcccccctcaggcagaagctgaggaagattgtcattctgatactgtcagagcagatgatgatgaagaaaatgaaagtcctgctgaaacagatctgcaggcatgtttcttcaattgtgtctttgatttttattccattgttcccatacatatgcagaaattgatcataatcatgggtatttgtaggttattactgtttgcatggaatttaactgtttccatactggtttatagaatacttaaaactatgttatggctttctttgtgaaaagaaatatcaataatggttgcttgtagtttaacatgggtttaaagtattcaaactaaggcttacgcatgactcaaaacccataatcttaaaaagattgatgggtttgaccacctaaaagtttaaaacctgtgtataagaaaaggcatcataaataaagttaagagaaatagccagctggaaaaactgtttattatatatgggcagaggattcatctcattacatagagcactcatatatttggaagaacagaggataaaaagatatgagtggactgttaatggcaaaataatacaaatggccattaaatatttgaagagataattagcctcattaataatttaatcagattggtgaataatgtgcatcgctgtccaagctgtgagaacactcatgcagtgtacatgaaaatgtaaattggtacagctttctggagggcagactggtgatatggatcaaaatgaaaaacatgcattcccttgatacagcaattctacttccaggaaattaattttaaggaaatagtggggaaagtaaatatgcaactataaagatgtttagtatagcattgtttatctggaaaaacatcatacaacttaaatattcattacctgttattaagtaatgatgcatccatacagtgaaaacactacagccatttaaaaggatgaagtaaatctttatacattaaaagagaaaaaaagttgctgtaactagttaagtgtgtctcactgcacttgtaaggttaataataattatttggaacagctcatctagtagacattgaatgctgctaaagattctgcaggtcagagatctatgtgtaacaggttaaaagcgtagcaacaaagcagtgtacagaatatagagaaaaattaatttaaaacattctagatacgtctttttaaaaaaaaaaaaaaggaagccaggaataacatatgcatccctgttagcaatggctgcctttgggcagaacgtgtaacccagtttgggttccccaggaagcagactaggtgaagattgctgtgcaggaagtttattaaggagtattcttgggatcaacacctatggaagggagagagggaaacaaatgggcagggagaagaccagctgcaatgcagtcttaatggactgcttagccatcctcgagggagttctgaagatgaaataccctttcagagatgacctgagttgcaaagagccaagactttattagccgttgatcagtcattgggtggggattgagaggacagtgtgattttgctgaggcaatacccaaaagggctgacaactcaagtgttttcagatagaactctcagcagtttgggtaacaagttctttatttctgaaagggaatctgggcaacacaccagagtctaccttatagggttcactttttatgtgcttttaattttttttttttttgagatggagtctcgctccattgcccaggctggagtgcagtagcacgatctctgctgactgccaacctctgccacccgagttcaagcaattctcatggctcagcctcccaagtagctgggattacaggtgcccgccaccacacctggctaatttgtttgtatttttagtagagacagggtttcaccatgttggccgggctgttctcgaactcctgacctcaggtgatccgtctgcctcggcctcccaaagtgctgggattataggcatgagcctctgtgcctggcctttacatttttgaaataacaaatatttgaaaaaacattttctttttgaaatacagaatgttaatagattttgggcttacctacagaatttttggcagcattcttaatgtctactagatgatatagtcattaaaaaattattggaagcttataacttcagtctgtaagtgatggcttatattttcaattctaattaaaatttggttttccaatataatttgacttttggtgtactgacatgtattttatgctaattttcttgattctttaagttttgagcagaaaattattttaaaagatgtatttaatggatatttaataattcagaagacagtgatttctggacttagagtaataagtatatacgtggaagtagatagatgttggacatattgatacattgttccagagttgagctacccttccttgatgagtcctaaaatgctgttctccccataggcacaactccagatgttccgagctcagtggatgtttgaacttgctccaggtgtaagctctagcaatttagaaaatcgaccttgcagagcagcaagaggctctctccagaaaacatcggcagataccaaaggaaaacaagaacaggcaaaagaagaaaagttaagtattatagatattgtaacaaattacattttttttttttggcacatggaaattttcactgacacagtaagtaggcattataaccagactttcgggacataaacacatatcttgtaaaataaaaattttgactagtatactagtttatatatttctcacaatttcttctaggtactttggatggtaccactactcctgcatggcttttttctctgtgggtacactgtcttcattgagctgtcttttgttaatttatagacctctgggattcatgtggttcctaaaagattggtgtctctgaatttattaacagaacca

SEQ ID NO: 8836 - DNA, 18004 bp, Homo sapiens
tcaaaaactttagtcgttataacaactgtgactgttgagaaatttcactgttttcctgcattcctggcgcgggactctagccagaggctccgaggactttgtagcgactgtcccaagcgtccagttcgatgcttctcagggcggcttgctttaagggcccacccctaaatttgggttgtaaaaatttttgaggtaatgcttgttcaagttcgcttaagtgttcactcagcccaacacgcgggttgggcttgaggttcggcacccgggcagcctcaccccccgcgtcaggcgcgcgcacacagtaggtccgcgacccttagccctccactaggcagcccgcggggatgggtggccgggccgcccacacgggcagcaccggcactgcgcatgctcggcgcgtcggcgcaggtttccgcagctgagggggcagctccgcggcggcgtccggggtctccagtagggctgacgctccggtgctcgcacaatcccccgcctcggctggcaacgggcgtccctccactccccgagtccccggcagccgccgccaccccagcgcgccccgatctggccccctgccccgcgaagatggctgccgtacgccgggcccgcagttattgccgctgcctggtgcgcttctccgaccgagaactctgctaagctccgctgcagagacaggcaggagtagacacccggacacccagcacccctcctccggggggcggtgcagagggggcacggagagcccctcgagcgcagcaggccgccccgccagcatggtaacctggccagggggctcgagggtggacgccgcggggcgggagcgtggtgtgcagaggggccgggcctagggctgggggtcggcggggactctggggaggagtgggagcttcacggctgccacccgttagagggccctggcctgagaaggagtgcgtcggggggcggggggtgccaaccctggcttctccccaggattccttcctgctgagcctccccaacccccgccgagctcgatgtgaggaggagggtttgcaggacagccggggaaaatgtcccttctcggctcactgagtatattgaaccagtctcggtcctctcaagggattttatcagaagcattgagcatagattgaggtaagctgtcacagcgcctgaattcgggagggagctctggcaagaggagacacttgttgattgctcttctgcggaaaagccaggcccaccgacaggccctgccggcaccttgaggagccctgggtgtaggacgcatctgccccgcgaggcgtcattccctgggaggatgttggcaggcggtcctggcggagtggggttggagggttcgtctccgcggcgtcggtgccgtccaaatgagagactgagctaagttgcagagcttgacagtgcagattccatgagactgttccatattggaatacgtagtctctgccctatgcctttctttggtttagaataaattgttcatctgagaaactaatctctggctggggcttaaagaatcagggatgcaataattccaaacgatttaatttatagtggactcaaatatttattgcataaatgaatggctgaatttatttttattaaattaatctggaggatagaaaaggcaattgcccctgcccctaaactttcagaagtagttctctgaccgggattaagtacttagcctttataatttattaatcgcacctgtgaaacaggagtaacatgatgaagacatggactactcatacacatgagctattcaagtgaaggtgatatttaggtcaaactcgattatgaaaaataaaaggaaaacctccaggtggcatctgaggccctacttatttcaagtagtagttgaattgaccaaatgtcaactcagccgatcccagatataatagtttgtttttgtgatcatactgtcaaaatcaaagtaagaatggtttagagctccactgtaacacaggggagaagaaagatgctgtctatattacacttctcccatttcctttcctcatccttcagatacacattatccagatggcattttatttgtcgattcagccaatatttttgagtacctattagcctggcatagtgtgagactctggtacaatactagatcttcaatataaccaaacctgcaaggtgatttatgataaacttttaatcacagaatgtcacatgaaaagggacctcagtagatcaccatacctctttatagatgtcccatagacatgacagctgaggcctagacaggcctttactacaaatcaagcaatgtgtttgaccttatggttacagaggtaactgagatgtgttcctgtcctggatgccttaaatctagtaaatgaaacagccaacctcagtacaaatgttgtgataaaagtaagcacaagtgttatgggaacacaaaaatgttgaaaaatgcttctgactaagatgaaccctgagctgaatcttgaagaatgagtagaaatagctaagtgaggaagaaggcattccagatagagcaagcagcgtatgcaagccaactggacagagcaggggaagctcttgaagtcagtttagaatgactgctaggaaagagttagaaaactaaattacaaaggataccccacagaactcaggtcccctcgcattacctgtacttagagtttgcaataataaagcagactcttgagaagagagagaaatacacttctcagtgggatttatacgctcagtctttcattacatattttcctactaatggtgttcttagtaggaaaagctcccaacttaaagaaactaaaaaataatgtatttgacaatacattaatccttaaattttccatttttctagaaattcatctgagttcttgatctcatttatttcttcacagatgtgtgctttacagtgtgcccagcattttaccatatactaactggttcaagtctgaaaggcacctctgctttgagtctgcttgccagagataagataggaggcaaggctaatttatgttctgtaatatagtgcaagtatatctggtagctgtgttaaagatgtgtgttaatataaacattaccctccccccccggccgccctgaaataacatatgactaaaatttgcaattgtaaaacttaccatctttggaaccagtaaaattaaatgggttttattattatctagcttaccttgaaggccatttccctgattgccacatttctttacagtaagtgttgagcaagtttcatttcctaataaatctattagctaacagactgaactgaggcaacatgccattttcactggaaggtaggatttagtttaatttagcaaacatttattgagaataaaaggataaaattaaagtcatctgattgaaacctttattaggctccaagtcacacacagtaattccagtctagctttattccactgaagccgatccaatatataaaaattggatttatagacagataaaatagaaggggtttctttacaaaagcatttactattaaaagtctttgactaagctttcctagtacatataaaatacacagaagtcatattttcatagaacacatttaataacatgctagctgtataaaagaagtgacatcatcttacggaatatatatatatatatatgtgtttttttttttttttttgagacagggtctctctctgtctcctgggttggagagcagtggtgcagtctcggctcactgcaacctgcatctcccaggctcaagcaatcctctcacctcagcctcccgagtagctggggctactgtgtaccaccaccccctggtaatttttgtattttttgtagagacggggtcttgccatgttgcccagccttgtctcaaactcctgggctcaagcagtccttccacctcagccttccaaagtgttgggattacaggcatgagccaccacaccctgcctggactgtattctcttaagtgatccatgaagcaaaaactatctgctacagccaggtatggctgcacaagcctgtagtctcagctactcaagaggtggagcagaaggatctttggagctcaggagtttgaggccatcctgggctgcataaggagactctgtcccaagaaagcaataactatttgctgaactccataggacaactaaatgttactattttctgaaacaaagttgttatttttagccacctaacaatacattttaacctagaacccagtggatttgtttattctacagtatcaaaaaaaattcaagtatcaagttatatctgattggtatcattaaacttacctgtgaagaagataactataaagaagcaatgttgtatttcattaacatgaaacattagagtattttctgttttgggacttgtagaagtttatggacactaaaattatttgggctttttgccttagactcaattatgtttggaacatctgtcacagcaccttgtcaactgcattctagaacatttctcctcctgatggaaaatacaacatgacctatgaggcagtcttgcaaaagaaaaaagaaatagcagaatctaatctagcctttcaagatcctgccacaatttataggaaataagagtaagaggtcaaaggaacatatttattgacacctcagcaaaatctagcttctacagaaaaacgacccagtttcatcccaaataaattacaagaaaaaagagtgaggattacaaaagacttgagacatatcaagcaattacaatgtggactttatttgaatcttgatttcacaaactgtgaaatatatgtattttacatatgacatcttgagaaatatgaatactgtgacttgatatttgatctaaggaattacattgataattattgaagttgggtcatgagtacttagggattaattctctttaagtgtttttctcataaaaagttttaaagtcttgtagaactaaaaaaataccaaagatgttctaattttatttcatttttttctaagaagaataatatttttcttttcttttttcctttttttttttttttttttttttatgatggggtctctgtcatccaggctggagtgcaatggcgcagtctcggctcactgcaacctccatctctcaggctcaagcaaccctcccacctcagcctcccaattagctgggaccacaggcgtgtaccaccacgcctggctgattttttgtatttttagtagagatggggtttcactatgttggctaggctggtcttgaactcctgacctcaagtgatgctcctgcctcagcctcacaaagtgtggggattacaggtgtgagccaccgcacctggccagaaaaagagaaaataatttttattatagattatcagtagttatgtatattaatgaagaatttggcttcatttacctaattagattaatcataaatcatttatgaatagtaatagacttgaattgttactttatattacacagttggccctctgtacctgcaggttctgcatcctgggattcaactgtggatcaaaaatatttgggggaaaaaaagcaatacaacaataaaaaataatacaaattaggaaaaatatactacaagaactatttacatggcatttacattataagtaacctagagatgacttaaagtatatgagaagatgtgcataggttatatgcaaatatgccatatgagggactggaaaacccagggattttggtgtcctgggggctcctggaactaatcacctgtggatactgagggacaactgtaattaaattgatttttggatggatgcaactgatgttaaatttggcgggggggaaatgttaggattcacaataacgtgagtactgtgggttggagtagagaatatgcttttcagactcattttcctttggaaattaatagtaaggtctcaagtgccccctacagccttgctactcaaagtgggttccacaaagtgttgacagtatggtactaaatagaaagtggctgaatgagaaatgtagattgcagagggcaactggtgtgtttatatgcctgacattatttgggttttcccccctcaggcagaagctgaggaagattgtcattctgatactgtcagagcagatgatgatgaagaaaatgaaagtcctgctgaaacagatctgcaggcatgtttcttcaattgtgtctttgatttttattccattgttcccatacatatgcagaaattgatcataatcatgggtatttgtaggttattactgtttgcatggaatttaactgtttccatactggtttatagaatacttaaaactatgttatggctttctttgtgaaaagaaatatcaataatggttgcttgtagtttaacatgggtttaaagtattcaaactaaggcttacgcatgactcaaaacccataatcttaaaaagattgatgggtttgaccacctaaaagtttaaaacctgtgtataagaaaaggcatcataaataaagttaagagaaatagccagctggaaaaactgtttattatatatgggcagaggattcatctcattacatagagcactcatatatttggaagaacagaggataaaaagatatgagtggactgttaatggcaaaataatacaaatggccattaaatatttgaagagataattagcctcattaataatttaatcagattggtgaataatgtgcatcgctgtccaagctgtgagaacactcatgcagtgtacatgaaaatgtaaattggtacagctttctggagggcagactggtgatatggatcaaaatgaaaaacatgcattcccttgatacagcaattctacttccaggaaattaattttaaggaaatagtggggaaagtaaatatgcaactataaagatgtttagtatagcattgtttatctggaaaaacatcatacaacttaaatattcattacctgttattaagtaatgatgcatccatacagtgaaaacactacagccatttaaaaggatgaagtaaatctttatacattaaaagagaaaaaaagttgctgtaactagttaagtgtgtctcactgcacttgtaaggttaataataattatttggaacagctcatctagtagacattgaatgctgctaaagattctgcaggtcagagatctatgtgtaacaggttaaaagcgtagcaacaaagcagtgtacagaatatagagaaaaattaatttaaaacattctagatacgtcttttttaaaaaaaaaaaaaggaagccaggaataacatatgcatccctgttagcaatggctgcctttgggcagaacgtgtaacccagtttgggttccccaggaagcagactaggtgaagattgctgtgcaggaagtttattaaggagtattcttgggatcaacacctatggaagggagagagggaaacaaatgggcagggagaagaccagctgcaatgcagtcttaatggactgcttagccatcctcgagggagttctgaagatgaaataccctttcagagatgacctgagttgcaaagagccaagactttattagccgttgatcagtcattgggtggggattgagaggacagtgtgattttgctgaggcaatacccaaaagggctgacaactcaagtgttttcagatagaactctcagcagtttgggtaacaagttctttatttctgaaagggaatctgggcaacacaccagagtctaccttatagggttcactttttatgtgcttttaattttttttttttttgagatggagtctcgctccattgcccaggctggagtgcagtagcacgatctctgctgactgccaacctctgccacccgagttcaagcaattctcatggctcagcctcccaagtagctgggattacaggtgcccgccaccacacctggctaatttgtttgtatttttagtagagacagggtttcaccatgttggccgggctgttctcgaactcctgacctcaggtgatccgtctgcctcggcctcccaaagtgctgggattataggcatgagcctctgtgcctggcctttacatttttgaaataacaaatatttgaaaaaacattttctttttgaaatacagaatgttaatagattttgggcttacctacagaatttttggcagcattcttaatgtctactagatgatatagtcattaaaaaattattggaagcttataacttcagtctgtaagtgatggcttatattttcaattctaattaaaatttggttttccaatataatttgacttttggtgtactgacatgtattttatgctaattttcttgattctttaagttttgagcagaaaattattttaaaagatgtatttaatggatatttaataattcagaagacagtgatttctggacttagagtaataagtatatacgtggaagtagatagatgttggacatattgatacattgttccagagttgagctacccttccttgatgagtcctaaaatgctgttctccccataggcacaactccagatgttccgagctcagtggatgtttgaacttgctccaggtgtaagctctagcaatttagaaaatcgaccttgcagagcagcaagaggctctctccagaaaacatcggcagataccaaaggaaaacaagaacaggcaaaagaagaaaagttaagtattatagatattgtaacaaattacattttttttttttggcacatggaaattttcactgacacagtaagtaggcattataaccagactttcgggacataaacacatatcttgtaaaataaaaattttgactagtatactagtttatatatttctcacaatttcttctaggtactttggatggtaccactactcctgcatggcttttttctctgtgggtacactgtcttcattgagctgtcttttgttaatttatagacctctgggattcatgtggttcctaaaagattggtgtctctgaatttattaacagaaccaaaaagaaaaaacagaattttctaaatttattaatagaaccaaaaagattgctcacatgttaatgtctttccagaggtcttaatttcatgcagtattttgttatattttgaattgatcagcttacaataatgcattaatcatttccttattctggaaaattttgaaatattttcacactgaaaatattttgaatgctgtctaacattcatatctcttctggtacttactcacacagagtaggcacagcataccatttcatttcttattcttccatagaggctgccatctttttaccatcagatccaagtttgtgtttataattagtcatcaaataattggcattaccatgatgacttaccttctatctcctcttaatttttattttgaaataattacaggtccacaggtatagggaagtcctgtgtgccctttaacctcctccgatggtaacaacttgcataactatagtacaatatcaaaaacgaggaaatagacattggaacaatccacagtttacttggatttcctgagtttacaagcacttgtctgtgtgtatgtgtataaatagttgtttgcagttttattacaaggtagcttcatgtaaccaccaccacaatcaagatacagaactgttttatagttatatactccctttccctagccattcgtaaccactggcaaccactagtctgttctccattttgtaattttgatattccaagaatgttgtataagtggaatcatccagtatgtaaccttttgagattggcttttttcactaagtataattccctcaagatcagtccaagttactatgtatcagtagtttgttcctttttattgcagaatagtattgcatggtatggatgtaccccagtttaaccatttattggttgaaggacatttgagttgtttccaatatttggctgttatgaatggagctatggaaatatgtgtgtaggttttctcatgaacataattttcacttctctgggatgaaaccccaagagtacaattgctaagttctatagtaagtacatgtttgattttaaaagaaactgccaaagtgttttctagagtatcttatattaagttcccaccagcaatgtatgagtgatccagttcatcctcatcagcatttagtgttgctactttttaatttaatttaattaatttatttatttattttaagacagagtctcactttgtcgcccaggctggagtgcagtggtgtgattccagctcactgcaacctctgcctcccgggttcaagcgattctcgtgccttggcctcccaaatagctgggattacaggccccgtcagtaacgctgggctaatttttgtatttttacaaatttgtattttgtatctagaatgcaaaaagaacttccaaaacacaatattaaaaatattagcaatctagctgggtgcggtggctcacttctgtaatcccagcactttgggagcctggggtttcaccatgttggtcaggcttgtctcgaactcctgacctcaagcagtctacctgcttcagcctcccaaagtgctgggattacaggagtgagccactgcacctggcctttaattttattaatagccattctgataggtatgtagtggtatctcattgtcattttaatttgcatttctctaatggcttgtgatgttgaacatcttttcatgtgcttatttttcatctattaatatatattctctctctcaaatatctgttgatgtcttttctaattggattacatatatatatataatttttttttttttttttttttttttttgagatggagtgtcactgtgtcaccccaggctggagtgctgtggcacgatctcagctcacagcaagctctgcctcccaggttcaactgattctcctgcctcagcctccagagtagctgagactgtagacgtgtgccaccacaaccggctaatttttgtatttttagtacagatggggtttcatcttgttggccaggccagtgtcgaactcctggcctcaggtgatctgccgacctcagcctcccaaagtgctgggattacaggcgtgagccaccgcgcccagccagatgctaatatttttgatgttgtgttttggaagttctttattctagatgcaagtcttttattgaatatgtggcttgtaaatattttcatcctcttaacagggcatttcacagagcaaaaatttttaattttgacaaggtccagtttatcagtttttccttttgtgaatggtgcttttggtgtcaagaactctttgcctagtcctaggtctccaagattttctttgttttcttttcttctaaaaggtttatggattttacatttaagtccatgatccagtcaagttaatttttatgtaaagtatgaggtttaggtcaaggttcattaatttgcctatgaatatccagttattttgcacaatttattaaaaaggctctccttctgccatccatactaatttttaatgcaggttttcaaaaatttttactttatatttttataggctcgagaactcttcctaaaagcagtagaagaagaacaaaatggagctctctatgaaggtaaaaattcagagcccaggttcatatcataacatttctgaataatgactctgttattaaccatatttttttttctataacttatttggtatagaacatcacttttcttaatacattcttccttcagtactcattggaaattggttccaggaccctttgtagataccaaaatgctcaagtcctttatatgaatggtgtaatatttacatataacttacttattatgtaaatagttattatactgtatttttttttaatttgtatttattttaaatatttttgatctgtagttggttgaatcagagaatgtgaaacccatgaatacagagggccagctatatttgaaattgttttttaaaaaataaaaaatagaaattgtttttctatataacctgtctttttgcaaaaaaatattgctgggaaacatcatcatgttggtaggatgagcaaaataacttttttttacatttagctttagttattcttcattaataaagtatttaaaaattattcattttaaaatatgctctttttataggtgaaaattgcttcagaggatgggaatataaaggataaattgaggaaaaaatacatgtttttctttctaagttccaatttacatattaccaacagaaatatgtggtaatggccgggcgcggtggctcacgcctgtaatcccagcactttgggaggccgaggcgggcggatcacgaggtcaggagatcgagaccatcccggctaaaacggtgaaaccccgtctctactaaaaatacaaaaaattagccggcgtagtggcgggcgcctgtagtcccagctacttgggaggctgaggcaggagaatggcgtgaacccaggaggcggagcttgcagtgagccgagatcccgccactgcactccagcctgggcgacagagcgagactccgtctcaaaaaaaaaaaaaaaaaaaaaaaaaaagaaatatgtggtaatatatgtgtcagctttgtgtcttttattaacccaatagaaatgtgtaaataaagtgataggactatttgccatattaggtttgtaattatgctttccttttgtgatagtaaagataataattgatgcataggaaaaatccttgtgcttgaatcgtttgaaaatgccccaaaactaacatcattcagagttactgcatttatatgcaagtttcttctagtgatatttttctttagatttttagaaaggcccagttgatcaagtccctgtgcagccttcattggtttgtgaaattcgcatctccacttagtgtatggtgtaattcatccagaataatagaacatggcagaatatattgaatcataaactcctttgtagggaaaaagaactagtcagcctctacagctccaagttctactggtgtatctctgtggggagagttattgaatattacagctctaaactacctgtctaggaaatttgtaaaaaataagttttgaagattacttaggtaaataagaggcagctgggctaaaagaagttaaatttaaaggataatttaaaaacaaaaacaaaaactattctttattccacccagtaggaagcatttaattttcctcaactctgtgtcttagaaaagtttgcttagaagtgtttttggccaggcatggtagctgacacctctaatctcagcactttggcaggctgaggcgggaggatcgcttgaacccaggagttcaagaccagcctgggcaatatagcaagatgttgtctctacaaaaaatttaaaaattagctgagtgtgctggctggggcatgcctgtagccccagctactcaggagactgaggtgggagaatcacttggacctgggaggtggagtctgcagtgagccaagatcgtgccaactgcactccaacctggacaacagagtgagaccttgtcttaaaaaagagagaagtatttttgttggctatagcaattgcatcttcagagcccaaagaaagacaactatttaaaaatcatgatacgtaagagggtgaggaaaaatatgggaagggctaatatataagagtaaaatacaacatcttaagtttagggaaaagtttctttctgagcattaaggtttggaaatagttttgtgtcactgaactgctgttgcatgtagaaaaacagaatttggccgtttgtaaagaaagttaccaaattaaaccacagttaagggtaatcaaaggaaatgacaaaaatgtgtggtcacagctaatttagctttatttcttcttttagccatcaagttttatcgtagggctatgcaacttgtacctgatatagagttcaagattacttatacccggtctccagatggtgatggcgttggaaacagctagtgcgtatataatttgatagatagtaatgcatagagtttgttaaagttaagcatctttgccctgttgactcttaagatggtgctaattctgttgagctctatactctttagtatatctttgtttataaagttgtagaaattttttattagggaaattgcaagataacacatagaaatgcaccttttaaacagatacaaaaataaacagatacaaaaataaacagatacaaaaaaacggtttaaaaaaataaaagcagtagttactgaaaggagtaaattaaaggacacatttcaactttctgaaacctatttgaagtagaaagttttaaaatgtaattaggctaaatttggcaaaatattaataatggttaaaattgagtgatgggtacatgggagtttattacactagtttccttacgtatatgtttgaaattttacattttaaaaaaggcttctaattaggaaaatgctgaactataaaagatgttattattctcttaatgtttttagtaaaacattaaaactctaacatttatttaaaagcacaggtgcagaatatattcctaaaagaaatcatgtttgaattgtatagttgccactgcatcaaagccatgaagtagcattggttttatatggataaagatcaagaaaacttatttttaaggcaatacttttgcaagacaattataaaattgttttggcttaattgcactatctcccaaaactcaatttgctgatattagaagagaagggagtctgtacccatgagagaatgtcaggttaaaaatagacagtacagagaaaaaagttttggtaatgaaatattatattagctattatattaatatattccctctgtcatgaaataattgtcacctttattgataacatatgcttattgccaatgttttttaactgcatatggtattaacacttaagctttggataagtcatattaaaaacattcccaacaaggtcaatattaatagcctgtttaaattttcagctaataatattgttcaccaaattagagttaacagtatgaggtagttcatacttaaaatgaatcacttgggttttttctaaaccttctttaaatttgggtagagtcgtttagactcagctcttagccagttttataaatatgtgccagatgctgttaagaaagattgtattaaaatattaaagaggcatttcttttctttcccattttttatacaaacccagacgctatgaaagttctttaaggattcatcttttttttttaaataagatctgataagccctaaaagtttgcctttttttttctttcctgtaacatgtttgtagaatagccattgagtccatctagcctcaaccacacttatattttgttgtattacaaaatgcccttcctggtttttttttttgtttttttgttttttttaagtctacatcacttgaaacttcctggttttctaacttcgccttcatccaatcctctttgtaagtctgatcatctttaaggtttacttcagtaaaaatagaaagctcatttttctagcaccattcactacacatttgtgtatactggtagatgatttgtgaaccctaagatgttttcaaagtaggtattttcctctctaaaggtaggctgataaggcaaatctgttagaaaacccttggtaagtaagtacctcagatgacgtctgtagatttggtttttatccagttagaataaattaaggttaaagaacatactacgttaagatttttgaaaccatttgaaagcttgcagtaactcataaaatctctactttacaataaaattagttaaatctcaacacctgtatccaaaaattctaattctttctggatgataattactgaagcttttttctttgaaaaacttgatacagtattcctttgcaagacaggataaattcatcacatttaaaaatgtatcacatgttgaataagctttaggtgactttttgtaaagcaaatttgaaaatgctatgaaaaatcagtttctaaactgtacgcttgtagactgaggcacttaatttattcacctcccttttttcagcattgaagataatgatgatgacagcaaaatggcagatctcttgtcctacttccagcagcaactcacatttcaggagtctgtgcttaaactgtgtcagcctgagcttgagagcagtcagattcacatatcaggtgtgaatacttgtttttcataactcagtgagaaatatcttaaccttaaagatttccaaatttataaggtcagataatttgccagataactgctgctttagttcagaatatggtggaagatctagttataattatcatttgcatatactattaagctgttttgtgttttgttttgtcttgttttgttttttgaaatggagacgtgccctgtcacccaggctggagtgcagtggtgcaatctcggctcactgcaacctctgcctcctgggttcaagcaattctgctgcctcagcctcccaagtggctgggattacaggcgtgtgccaccacacccagctaaatttttgtatcttcagtaaagacagagtttcaccatgttggccaggctggtctcgaactcctgacttcatgatctgcccacctcggcctcccaaagtgctgggattacaggcctctgaggcactgcgcccagcccagtagtaagctgctttacaatctgaagcagaacagtttgtagtgctgttgtttaaggatgccatacctttttcagtaaagatctaacagggtaagtctgagttgttgaggtagccctaagaaaactggaggaatactggtatcatgaagcatttcagccatgttggacaattgtcctgagacagactgaatgtttaggaattaatggatttttgttcgggcatggtggctcacgcctgcaatctcagcattttgggaggctgagttgggaggatcacttgaggccaggagttcaagataagcctggccaacatggtgaaaccccacctctactaaaaatacaaaaattagctgggcgtcgtggcgcatgactgtagtcccacctacttgggaggctgaggcacgagaattacttgaacccaggaggcagaggctgcagtgagctgagattgtatcactgcactccagcctgggcaacagagcaagaacctgtcacaaaaaaaaaagaaattcatgtatttttaatatgttaaatattgtttggttcggggctttttcagaggaggacaattaaaagttttcaaggagatgaaaataactttagtgttaatagatgcaatatggatcacacacacatagattattttcctaaaacatttattttaatatgtctggcaaaataatcttatgagggaaaagagtgctttataaaaagtagcttcagatctatactgaaaaaacaaagatatttatgtcttgatgttaagaaccattattattattgagtagctaaatacattcatgctttagctctgagcaatacagagggtgtgattataaatttctaggaaggtataaatgtactgggaatgtagttgtgacaatagaatgacatagaggagagtcactgaaggatgattttcttttgcagtgctgccaatggaggtcctgatgtacatcttccgatgggtggtgtctagtgacttggacctcagatcattggagcagttgtcgctggtgtgcagaggattctacatctgtgccaggtactaagtttttgtttttgttttttaaacaactgaggcaatggtgaaaagaaagatggtcctttgccaatcctgataaaattacttgattggtgttctgagttaaagcttagaataaacaagttttgctaagctgtacttaactttctcaaataacttagaatttaaaggctagaatatgctaggtttctagggtatagaataatatgtaggacagatgtagtaacccatactactaccatagagtttacatgctagcttaactgatttgggaaaaagagttatattagaaaaatatattcaagtcatttttacactaactgtaaactcattgtggtaatggtttagattaaaacagcactagcattttcttatggctcattaaaagttattctatattttgaa

SEQ ID NO: 8837 - DNA, 87 bp, Homo sapiens
ctcacgcctgtaatcccagcactttgggaggccgaggcgggcggatcacgaggtcaggagttcgagaccagcctcaccaacatggtg

SEQ ID NO: 8838 - DNA, 87 bp, Homo sapiens; identical to SEQ ID NO: 8837

SEQ ID NO: 8839 - DNA, 1493 bp, Homo sapiens
cgacaagtgacttaaacactctgtgcccagttttccgcatctgcaaaatggggagataaatagcccctacctcctaggatcatcatgagaatgaggtgtgcgaagcttggccggcatgggttccatagcaggcactcaggggtgtcggccacgaagattattctttctcttctctctttgccgtcttatttcatctctctccgttatttggttcccctgtccttagtcccctttctcccccaatggcatcccaagatgcacaatagtggcaagtgcccagcctgtttccacagcctgatccccaccactgcgttggccagtcacccaagaagcagctggacccatcatctggctctagggatgacccagttccagcacccccgcaaacctccgtctgtccccctacctccctcagcagaggcccagcccaatgcaggcccgtggctggatgggagtagctcttcccaccacccctgggcagggctctgcggagcttgggagcctcacctggaatcggccctcatgcctcagtagagaaggagagcgaggagagaggtgatggggctccgcgggcacccccgatgcacagtctccttctgggcttctgatggccacaaggccagaagacctgcccagaagaattcagtataacccagttcagtgaaattggagagaacgagggcctgcgtcttccgggcagaaggcagggttcctgccctctggagcccttggcctggcgcgggctgattaggacctagatctgcctgggtggctgggtggccgagtggcgattgggctggttctgtaccgggtgtgctccgtggggggcgtgatctggcaaagccttggaggtgggactgtggaggcaccattgattgaactgtgtcccctgcaattcacatgttgaggcccaaacccccagtgtggctgcatttggagtagggcagtaattatggttaaatgaggtcgtatgggcgggtgctgatccactaggattaggatccttataagaacctgccaccttctctctgccacgtgaggacatggggaggaggcggctgcctcccacccaggaggagcccttactggacactgggccctggctgcaccttgaccttggacttctagtccccagaactgtgagaagtagatttctgctgattacgctttcctgtctgcggcctgagctaagacagcagcgcttggggagaagcagaatttgaggagctcctcagtggcaggctgccctggccctgctgtcagcagaggggaatggccatccatgctggcccctcaccagccgggccttcagtgagctccccgggtaggtgaagctctcccagctctgtgtcccccgccaaagcaggcccacaagcgagcgcctatggggtggagtgagagtgaggaagaaacattacccgaggggtcactctcttcagaagacctcaatgactgtagactactgaattatttccttaaaaaaaaaaaaaaaa

SEQ ID NO: 8840 - DNA, 470 bp, Homo sapiens
gggtcatgggtcatttacggcctgggtctccccctctcctccctcctccttctctccaacctgctttcttgctgctggaagggggtgtgcaggctcccgtgtgcctggcacagcaggggcagcacaggagactccatggggcctgtgtcccgcacccccacgcccccgcccccagccacagccctttgagagcacagcggaatgaacgcctgattaggaatcagatgccagaaagaagctgtgtctgttccaaaatcaagagaccaggagaagtgacgtcctttaaaaggagagagctaagtgacagagagggggcttgtccccagcccaggcacctcggggctgcaagctcctttgagatgcggggctcaggcctcatcaggggaaacgtgggcatctagatgaccctccacactgagcagacccagcacaggctgcgccactcatcattataggctgcgccactcatt

SEQ ID NO: 8841 - DNA, 89 bp, Homo sapiens
tttttagatggagttttgctcttgttgcccaggctggagtgcaatggcgcaatcttgactcactgcaacctccgcctcccgggttcaag

SEQ ID NO: 8842 - DNA, 1616 bp, Homo sapiens
ctgcagtctccctagcatctgttatttattgactttttaataacagccattctgaccgctgtgaaatggtatctcattatggttttgatttgcatttctctaattgttagtgatgtggaacattttttcatatgtttgttggctccttgtatgtcttcttttgagaagtgtctgttcatgtcttttgcccagttttaaatgggatttgttttttgcttgttcacttgttcacacttttttttttttatagattctggatgttagacctttgtcagatgcataatttgcgaacattttttctattttgtaggttgtctgtttactccactgaaagtttcttttgtagtgcagaagctctttaattaggtctcacttgtcaatttttatttttgttgcagttgcttttaagcacttagtcataaattctttcccagagccgatatctagaatggtgtttcctaggttttcttgtaaaattcttatagtttgaggtcttacacttaaatatttaatccatcttgagttaatttttgtatatggtgaaaggtaggggtcctttcaccatagaataaaacgttgtttcattcttttgcatatggctagccagctatctcagcaccatttactgaatagggaatcctttccccattgcctattttttgttgactttgtcaaagaacaggtggctgtaggtgtacagctttatttctgggttctcaattctgttcccttggtctgtttgtctgcttttgtaccagtaccatgctgtttgggttactgtagctttatagtatagtataaagtcaggtaatgtgatgcctcagctttgttctttttgcttgggattgctttggttatttgggttcttttttggttccatatgaatttcagaatagttttttctagttctgtgaaaaatgacactggtcatttgataggaataacattgaatctatagattgctttgagaagtatagccattttaacaatattgattcttgtaatccatgagcatggaatgtttttccatttgtctgtgtcatctgtgatttctttcagcagtgtttcctagttctctttgtaaagatccttcacctccttggttagatgtatttctaggtactttgtttttttgatggctatcgtaaacaggattgtgttcttcatttggctctctagcttggatgttattggtgtatagaaatgctactgatttttgtacattgattttgtatcctgaaactttaccaaagttgtatgtcagttccaggagccttttggtggagtccttagggtttcccatgtgcagaatctcatgattccttaaaagcatgcatttctacttaaaccatcatgtttacttttctagagagcaattaacttggaggtgggtgccggggaggttaggttgcttttgtaatattaatggatgtacaccaagaatattgcttctgagaatgatcttatcctcattgggaaagatttttctgtttttagttgaaattgagatgaaatacatcttattataaataaattttgactcttactaatgattacaggattgtagacaattaactgtctttcctcatgctgagtacataaaaaaaaaaaaaaaa

SEQ ID NO: 8843 - DNA, 489 bp, Homo sapiens
atagctcagagtgtatgtttctagacttcactctctacatacacaaaatcataaataacatcttttatattacttttttatttagtttttaaagtaaatgctttttaaagttttttcttttaaaaataaatgccttttttcccctaaatatctgtctcttccaacagaacttcctcaacaatttccaaactgctaaagaagctttgagtacagccacagtccaggctgcagaaagagctgcttccagcatgaaagacttggctcaaaagagtttccgccttttgatggatattaatttgaaagcaccagttattattattcctcagtcttcagtatcacctaatgctgttatagcagatctgggtttaatcagagttgaaaacaagtttagcttggttcctatggaacattattctcttcctccagtcattgataaaatgaacatcgaactcactcagttgaagctgtcaaggtataaatatgtaatct

SEQ ID NO: 8844 - DNA, 342 bp, Homo sapiens
tgagaactcactatcacaagaacagcatgggggaaactgcccctgtgatccagtcacctcctaccagttccctcccttgacactggggattacaattcgagatgagatttgggtggggacgcagagccagaccatatcacatgggctgaaggatttaaatctgcctattcttcttagtggggctgccaatcaaaacttttaaaaatcatatttttttttcaaagaaagataatttcaactcttttggacttcacttgttaatttcagttgataatccaactattttagattcagggcatacatgggcaggcttgctacatgagtatattgcatgatgctgag

SEQ ID NO: 8845 - DNA, 1197 bp, Homo sapiens
cgagatcacaccactgtactccagcctgggtgacagagcgagactgtccaaaaaaaaaattgataattaaatgttaaaagtcagcgactccagtaatacgtggtgggctgagtattagactactggcttacatcctctgatgtcattactttcttgttcgtttgtgacttgaggttggattttaagcaaatgtatttgtggctttttaccaaggtcatatggccagataacttttcaaaagcattagttaaagaattctgattagtttgaattagaaacaaaactcaaagaacatgacctaatttaacaggttaatttgaagtgcatctgccaagtagaagaccagcaagaaaaaaaaaatgggttcctaggaagaggtagtaggttgcatagttttagggcagggattttgcccacaaggaggtaactatacgacctgctgcctttcttagggccttattattcaccgataacctgtttccttgctactttgctttggtgtaagcagagttctttctgtaggttttttcaaatgaaaacattgcaagaatatcaaagagagcagtgtttgcgttagtgattataaactgcagcatggtgctgacattgataactgaaagtcaactaatgagaatttgagacttctgaagtacacttagttgctagtgtctcccttttggtgtcactggaaagtttagaaagcatggttttgtttttgctcaggtttctctttctgtgatgcagagactctcagctgttcctcctctatgtctacattatgtctgaaggaaagaatttaacaaaacttgaaatactgctgtttttctacaatgtttgtaaatatttatcttgctgcttttctaggtttgtcttctggatttaaaatttggggcggctggggtggaattgcatggtttgggaatgggtaattgagctgctgctcattatggtatgtaacagtgatttgtctgtttaatatgtacaagaactggaaggtcaataaaatgaaagtggttgtcttgactgggtaatagtgttacatattttgttaaaagttatacatcttttcaataaaaacactgcatacttcaaaactagtgctttttaagtcatccttaacccttatccccatccttgcagtagtagatgcatttttcatttgtaattattatgatttgttcttagtttcatttttca

SEQ ID NO: 8846 - DNA, 2248 bp, Homo sapiens
ttaactctggaccaaatgtatgctttttgttttatccactgtggacagctgcatagataattggtctttgttctaaactgcacataaaaacatgggagaaaatgacatttgttgccttttgatgtgccaaagaagagtgggaatgttctaagaattctttttggcttaatctttgttgaattgaaaatatgtataactcttctgctgaaagtgtagcaagtacagtcatgaaattttgtggtcttcctgacatgttcttccagcataacgttgccaccttcagttggaaacgtatccttatctaataattaagccctggagaaaaattaatttatatattttattaattacataaggacattgttattagctaagcagagtaagtaaatcgaaataaaactttaaaaatgcctttatggagagaatgactatctctgaaagcttgtttttaatgatgataaaattcatgatcagaatttgtttctgtttgctttaattcaggggtcaaaaactgaaataccatcagaggcccaggaggggctagttgtaactggcaaatatagtaaattaatttgctctggttgataggtagcaagcagggtttatatacattgtcacctacttttccagttaacaggagagactggagattttatgaaatttgatatttaaatgttggtaactgggttgggcaccatggctcacacctctaatcccagcacttcgggaggctgaggcgggtggagcacctgaggtcaggagttaaagaccatcctgaccagcctggtgaaacacagtctctaataaagatacaaaaattaggccgggtgtggtggctcatgccggtaatcccagcactttggggaggccaaggtgggcggatcacctgagtcaggagtttgagaccagcctgcctaaatggtgaaaacctgtttctactaaaaatacaaaaaagtagctgggcgtggtggtgggcgcctgtaatcccagctactctgggggctgaggcaggagaatcacttaaacccaggaggcagaggttgcagtgagccgagatcacaccactgtactccagcctgggtgacagagcgagactgtccaaaaaaaaaattgataattaaatgttaaaagtcagcgactccagtaatacgtggtgggctgagtattagactactggcttacatcctctgatgtcattactttcttgttcgtttgtgacttgaggttggattttaagcaaatgtatttgtggctttttaccaaggtcatatggccagataacttttcaaaagcattagttaaagaattctgattagtttgaattagaaacaaaactcaaagaacatgacctaatttaacaggttaatttgaagtgcatctgccaagtagaagaccagcaagaaaaaaaaaatgggttcctaggaagaggtagtaggttgcatagttttagggcagggattttgcccacaaggaggtaactatacgacctgctgcctttcttagggccttattattcaccgataacctgtttccttgctactttgctttggtgtaagcagagttctttctgtaggttttttcaaatgaaaacattgcaagaatatcaaagagagcagtgtttgcgttagtgattataaactgcagcatggtgctgacattgataactgaaagtcaactaatgagaatttgagacttctgaagtacacttagttgctagtgtctcccttttggtgtcactggaaagtttagaaagcatggttttgtttttgctcaggtttctctttctgtgatgcagagactctcagctgttcctcctctatgtctacattatgtctgaaggaaagaatttaacaaaacttgaaatactgctgtttttctacaatgtttgtaaatatttatcttgctgcttttctaggtttgtcttctggatttaaaatttggggcggctggggtggaattgcatggtttgggaatgggtaattgagctgctgctcattatggtatgtaacagtgatttgtctgtttaatatgtacaagaactggaaggtcaataaaatgaaagtggttgtcttgactgggtaatagtgttacatattttgttaaaagttatacatcttttcaataaaaacactgcatacttcaaaactagtgctttttaagtcatccttaacccttatccccatccttgcagtagtagatgcatttttcatttgtaattattatgatttgttcttagtttcatttttca

SEQ ID NO: 8847 - DNA, 814 bp, Homo sapiens
caggcggtctgatagaaagtcagttaactaattgtacaatatttaagattaacttgtcttaaagagatgtagtgcagcatttgtttatggcctggaaataaattaatttagagataaagtctgtagcaagtacactggatgggggtggggaaaccttttgcttcttgtcttatttctctgtgtcagaataaatgtatttttttattttgatttatgctgataattttatgttgaaattttctttcgaaagagattgtactttccattccagaagaaaacattgctctatcagagtgaggtagtagattgtatagttgtggggtagtgattttaccctgttcaggagataactatacaatctattgccttccctgaggagtagacttgctgcattattttctttttatttagatgatattaaaactcagaagaattaattttgacattttgtatttacagtttatcagttaattttctctgttcaagtagtacagtaggcacagattaacatttaaatttttcacatatggtatatttcagaaatttgaagttaagcaaaaattttaatgagtagagaaagtaagtagccttcaggaaatcttcatagaggaccaggcccttttggaattgtgaataggtttattgccttacatcctggtacacatgtccaaggtcaggtcctgggtggtaaaggtaaatacaaattggaagggcactgtgtgagccaaaatgagtcagattagtcatgattcatttccagtttgggttttgggtggtcttggagaatgttgtaagcactgcttcattgataggt

SEQ ID NO: 8848 - DNA, 1348 bp, Homo sapiens
tcacggcatcccactctgttctgccgaggacgtgaatctttcctttgttcagtatatcccatgctgtatacactacctgcctgtcagtcattcagtagcggcctatgttatcagattggctgatcattgtattgcagtgctatgttcaggtaacacttattttacttatagtggtcccaaggtgcaagagtagtgatgctgacatattattataacttctattttattattcttattgttaatcttactatgcctaatttataaattaaacttaatcataggtatatatatataggaaaaacatagtgttatatagggttcaatactagccccagtttcagttgggggtcttggaatgtgccccccacagataagaggggactatattcttatagaagaagagtttgattttttaggacgttatttcctgttcaaaccattgacccactctttgagataagttattctgaagctttcatataagtaaaagcaattaaattttgccaccagcaccatcctcaaccattctgaattataaagtgttaaaattaagaacaggaagaatggaagtattcaataaaaaatgaagtattttcagttccatattgtcatcaaataagggtgggaaaggcaaaggagaaaatcaataagtatggagaagaaagaaatgagtagacagaacaaaaaagatgagaaaggaagccatattgaagtcaggagagagtgcagagcaagaaaggatgggcagaaaaaaagaaaacaagaaaggagtttaatgagtgagtagaatgtgctcttgttgcattctactgccagtctaagccatggaatagttcactattctgggaagtattcttaagatcatcagtgaccttcaggtcatgaaatctaataagcattctttcagacctgttcttatttgacctctcagtggtgtttgacactctcaaccaccaactctttgtgaaacctttttttccctgaaagctgtgaggtcgtgctttctcggttctcttctcatgtctctggtaactcctgctttgtctactttgggttttttgttttgttttgttttttgttttttaagagttgggatcttgctctgctgcctaggctggagtgcagtggcgcaatcatagctcactgcaacctcacactcctgggcttaagtgatctacctgccttggcctcctaagtaactgtgttcatttgacacagtttaggaactaaagatcaggtaaaaccagccagttcctgagctggaattgaatctgttcagaatgtctgggaactaactccatttttacgtgtcaaccatacctggctaattaaaaaaaaaaaaaaaaaa

SEQ ID NO: 8849 - DNA, 1348 bp, Homo sapiens
tcacggcatcccactctgttctgccgaggacgtgaatctttcctttgttcagtatatcccatgctgtatacactacctgcctgtcagtcattcagtagcggcctatgttatcagattggctgatcattgtattgcagtgctatgttcaggtaacacttattttacttatagtggtcccaaggtgcaagagtagtgatgctgacatattattataacttctattttattattcttattgttaatcttactatgcctaatttataaattaaacttaatcataggtatatatatataggaaaaacatagtgttatatagggttcaatactagccccagtttcagttgggggtcttggaatgtgccccccacagataagaggggactatattcttatagaagaagagtttgattttttaggacgttatttcctgttcaaaccattgacccactctttgagataagttattctgaagctttcatataagtaaaagcaattaaattttgccaccagcaccatcctcaaccattctgaattataaagtgttaaaattaagaacaggaagaatggaagtattcaataaaaaatgaagtattttcagttccatattgtcatcaaataagggtgggaaaggcaaaggagaaaatcaataagtatggagaagaaagaaatgagtagatagaacaaaaaagatgagaaaggaagccatattgaagtcaggagagagtgcagagcaagaaaggatgggcagaaaaaaagaaaacaagaaaggagtttaatgagtgagtagaatgtgctcttgttgcattctactgccagtctaagccatggaatagttcactattctgggaagtattcttaagatcatcagtgaccttcaggtcatgaaatctaataagcattctttcagacctgttcttatttgacctctcagtggtgtttgacactctcaaccaccaactctttgtgaaacctttttttccctgaaagctgtgaggtcgtgctttctcggttctcttctcatgtctctggtaactcctgctttgtctactttgggttttttgttttgttttgttttttgttttttaagagttgggatcttgctctgctgcctaggctggagtgcagtggcgcaatcatagctcactgcaacctcacactcctgggcttaagtgatctacctgccttggcctcctaagtaactgtgttcatttgacacagtttaggaactaaagatcaggtaaaaccagccagttcctgagctggaattgaatctgttcagaatgtctgggaactaactccatttttacgtgtcaaccatacctggctaattaaaaaaaaaaaaaaaaaa

SEQ ID NO: 8850 - DNA, 6662 bp, Homo sapiens
agcctcctgagtagctgggactacaggcgcacgccaccatgcctggctaatttttgtatttttagtagagacggggcttcaccatgttggtgaggctggtctcaaactcctgacctcgtgatccgcctgcctcagcctcccaaagtgctgagattacaggcgtgagccatcgcgcccagcttcggtgtgtttttaaaaaccttgattttaagatgttatttgtttcaggtcattacattagtgatgtatatgacattaagaagcaagcgtggtttacttacaatgacctggaggtatcaaaaatccaagaggctgccgtgcagagtgatcgagatcggagtggctacatcttcttttatatgcacaagtaagaaactttgccagattctaaataatgagttagaaatcaccggaactcttttttttttttttttttcctttgaggataaaatgtttccatcagttgattggttgaaaatttttggtttttatcatctttggttagggtctatctcttgatatttccttgtaagtccagaatattttctctcataactcagcattaattgctcattacacagttgtatctaggtatggaagttaagacagtttgttttatgatagaagatgtcctgtcataaatagttttggtcatccagttttatcagctagaagatctgatttatatggatgggaattacctagcatgttcattaaagctaactgttgtcagttcccctctattcttaaaaatcagcattcaaagggttaagatcaaatgagtgagctgctttttaaataaaatacaggcatgaaatggaattgtgaaggccttatccatatcaattttattttactttttctcctgcctattctttggttctgcttactaaatttccagttttattttttgcttgttttatcttaagggagatctttgatgagctgctggaaacagaaaagaactctcagtcacttagcacggaagtggggaagactacccgtcaggccttgtgaggaacaaactcctgggttggcagcatgcactgcatatttgttactgctgcccacctcacctttcctctgctgaaggagaatttggaattctacttgatgcgggagcaacaaacagctcagggccaaaccaaaagacaaaaattggagtaacgtagaatgctccatgctattttatggaaactttggtctcacatccgtagctgattatcctctttttctcctatgagtggcacttcttttgtcttaggaatacatgttgtaaatatatatctgtgtatgtgtgtatacacacacacagacacacacacacacacacgggatgaatggagccttaaagagttaggatgagccaccagaatatgcctgctcaaaattaatagcacagcagtttggagaagaaatgaaggtgtcaaagagtccattcacctgagaaatgtgtgaagacatacttatcagttggcttttagcttttatgttccttgagtagtttcactcaagtctgtaaccttttgtgtttccttattagtaaaattcactggaaagccagctcttcatgttacactaatgacagtttgttctctttgcaagagaggggcattactgtcacctgacttgaggagctgttttgttgttgttgttgtctgcaaatttcatgaatttgtgatgtctttgctgtttacatgcagtcccaagaaatggattgttggtgctttggaatatgttacagtcccacatttgatatttcttatatactttgttttctctaaggagatttcttcacacagtatgttcatcatatatcatcatcattattatggtggtaaagatagaatcttttttcttttttgtcattctgccatggagcagcattaccctaatggattgcaaccaaaactttaaacaagtagaaagataatatttctccaattgggactccccagcaggaatacttagggataaggaagaatgctagcatctctgtctctcaaacatagggaggataagaagagtgttcttctggtaaagctaaaattctggaccactgaagctaaaagccctattgcaagtatgaaattaagtacttgagctgtaggacaaaccttgggcatttaaccatttactgtctggctttgcccttaaaatagggttgcaattaaaatgtgattggcttaggtaatcccaaaaactaacaaataacaaaggtgcataatttatttatctactttttaggtgctctgagttgaggcaaagtagagcggcaacattaagtgctatgctagtcacttagctgacgtaaccagcttggttaagcagcttatgaaaccatataaagaattcttttgaggatggaattctgtccacaaaataattttgtgagcccagatatcattaggatcacacagagttaaatatagaaaaatgaaaccatcattatattctttcgtgttttttcttttattataaacaaggggattattctttagttctcagaggtagggacaaaaccacatcaggttttcagaaggaaaaaacatttaaaaacccaccatcacatgagagaatcacttgaacccaggaggcagaggttgcagtgagctgagatcgcatcattgcactgcagtctgagtgacagagtgagactccatctcattaaaaaaaacgaaaacaaaaacaaaaaaaacacaaaccatcatcacagaagatgcaacatcttttctgaaagattgccttaagagagctccagtcctactcttggaacttggatgtattctaatgtagtaaactattctaagttttcattctttgaattataaatggcctcagcagttttgctcaactactgataaatgctttgcctcctaccatctacctatataccttattgtaatgaatgttccaaaatggtagagtggtagaaaacgccagagtagtttagagcagaggaaaatatttgttttaaaactagctttaaagttttgtttcatttctaccaggagcctctttggtttggtttgattttgcttggaaataattggttttcttataaatgagtgaagcggtgataaaattctttggctagttattaattcttttacgtgtctttgcatttgagaggcactgttaaaaattattgggaaagatttaaagtgcaggctgcaattaaaacatggagaaaagtagaaataatgccataagtctagattgcctcatgaagcagcctcatttgaattgctttcatagctttcatgtgtgtatggtttagaagtacacttacctcagaaacctgatttgatcttcatgtcttgggcaggagttgttgaaaataggttattggaatatataagttatctcactgctcatgtacttgcatgtttgggactcaaattttacttgatgtctgtccattcttgtggccctatcagccttctccttcctttactcctttaatctacttctttgactaccagtggagatttcagctggactatgttgatggggtttgttgttgtttttgagctggctgtatatattttaaaattataaatagataatatattattttttgcacattgtgatcagtttgcccagaattggggatggggcagttagcatgttggggccaggaagggacaagttagataaggactgagtgcttccgttgcaggcagtttgcacaatacctaattaaccttcctattgaaaataccaaatgtgtggttacattactttaaatgacattgaattggaacttgatggcaattagttctagatacaaccttttgatctttgttggaattttaagggaaaaatgaactaaacttcatatttgttgattttaatcacctaatagtactgaaggttggaaagttgcatgtggctggatgctgttaatttctttaatagccatgactataatttaagcctatgagaagatagactgtttcgtagggatatattcacatgtgtgtgcacactcatgagttttgtctcagcaggatagaataagcaaatccatgaactggtcttctattaatactttgattctaaaaattatttgtttacttgctatggtctgttcattctgggcctaaccttaaaggctcaataacaaatacaacaaatgtaaatatgtttacattttaagacatatgcagtggttcttacagatcagttaattaactccagaaagcaaatgttagactacacatttatttttctccttgatcaagtataaaattctgaaacagaggctttaaaatttaaaacctcagcaaaataatccatgaatttactgattcttctgtatcgtgtgtagttaccattatgtaactatacacacatacagctacggatataatgaaaattatctgcaaacacctaaattaaagagaaaaaaaagtagtttgtaaactcatttgtgatctactgaaaagaggttatattaaagcaaattaaaatattttccttctctgtcctctgaaatgactgcagtagatactcttagttatcccatttagggtggttggagggcctttttaatttaattgaccccccgaggtggtcttttgttttaaacagggggcaacagctggatctccaagtacatatggattttgtatatataggagatttttagaaaaatcaacaacctaacaccagattcaagtcacataaaagtgttccaataaaatggatggatgtctttttcctccccattttgctttatactgagtaatgcactcttgcaagtgtatacaaaaactaaatagacttctgccctccaacatctttttattgcattacttcaaaatcctaattttgtctctactgatatgtcttattaacatctgaaaaaatatatattttttattggaaaattctaatttgttaggccttgaaagttttgtgacaattattttgctgtgtttaaccacaatcattcaccttatggcatgctttgattactagacttcaggcagtctcattcattgtatcatacttacacacaattagtaagttgtctccatgtgtgctatatgtctgaggtgtatggagtttttatttaaaaagtgtgccagtctgaatataagcatttgattttgtaacattggacttttcttaaaagtacagaggttcaaagtataggtatgtccattggcataagaatagagtgggtgagggtctggaccaggttccaggttggtccagtcagatgccagaacaaagaagaacagtcaactaaactggtctacttcaaaaatagtgggcctgtgtgaagagtgagaccacatgtgggtgtgcacacctcttgtccccaggtttccctccctttgagcttttctttccctccctaacttctctggcctattgtcattgttgtttctttaaacttaaggagagaaaaacaaaaatgagattcctacactttgcctaattgagccactaccaggttttctggcagctgtggccacattatttgtgagatgattttttttctttatgttcagagtgacttttgattctgattctttatgttttgtatggagcggcacttttatctgtgttttagcagaactgttcctctgtatcctttacggtttttctttgtttttgtttcctttttaaattatgcatagagtttttttgtgtgtatgaaattaaagcctttattaaccttctttgatttgactgttatttctgaaaaggacacattcttgctgatacttgtaacaacctgttcaaagttgtggaaatcaccttctgttggctttctgacatggacttccttgcagcactgttacttcttaaaaggaacagaatggcaaaccagtgtctggccgtagtccccattgattcctgttattttcatctgaggagcctgtgaagctttgcagaggcttctgggtaagtttgtaaacctagcattggccttcactaggctcttgctttgcctcattattaagggttgggagagggagtgaagtagcatatgcatttcatacttgcctttaggtctcaagcctagccccagtggaagtgctgctctcactggtactgtttggaatttgtgaaacctcttaagagggtagtcttgtggaccattcaactctccttcagccctttaacttacccactgagtaaggcagtaaggaaagtatatgtgaaaaggaaaagctgttactctggggaagatgtaaacctgcaaagtgcttcagcctacctgccatagataaaaatgagtcatgatagaggacaagctagggtagtgcctcagaactctaatgttccatggagtgtttgtgctcttctaagaagagaaaactataggagtattaaaattgatgcaatacctcaggatagaaacaatctagcgaccttagaagttgaaatgaggaccataggctccttttggggtatcatctttctgaaggaataggtacattattaaacaaaactggcatttgccacagaagtttgtgctcataggcacatctgcaaaatttcacttcaattggtgtaggactaatatcggtgagaaaatgagaccctacaatcagggtagggtactgctttacaaccacagctactcttctcaaaatagtcctttttctttcttgaggttttgttgcttccatcgaggcaga

SEQ ID NO: 8851 - DNA, 3484 bp, Homo sapiens
cataacaactctgttctttcctcctggcaggtgacagagctgaatgagccactgtcgaatgaggaacgaaaccttctgtctgtggcctacaagaacgttgtgggggcacgccgctcttcctggagggtcatcagtagcattgagcagaagacatctgcagacggcaatgagaagaagattgagatggtccgtgcgtaccgggagaagatagagaaggagttggaggctgtgtgccaggatgtgctgagcctgctggataactacctgatcaagaattgcagcgagacccagtacgagagcaaagtgttctacctgaagatgaaaggggactactaccgctacctggctgaagtggccaccggagagaaaagggcgacggtggtggagtcctccgagaaggcctacagcgaagcccacgagatcagcaaagagcacatgcagcccacccaccccatccgattaggcctggctcttaactactccgtcttctactatgagatccagaacgccccagagcaagcgtgccacttggccaagaccgcgttcgacgacgccatcgccgagcttgacaccctcaacgaggactcctacaaggactccacgctcatcatgcagctcctccgcgacaacctcacgctctggacgagcgaccagcaggacgacgatggcggcgaaggcaacaattaaggccccaggggaactggcagcgcacgcggatgctactactgcagtctttatttttttcccatgagttgggggtcgggtgggggagggaaagggagggatgaccttcccagggagaaacccacgacctgtcctgtctttgatcgcctctttgacatttttgccaaaataccactagtggaaagtcaggctagctgtgctggtattggaatagcagcctcacactggcgtctggactgttctgtagattcatgcaagtggagctgtctgtctctaatttaacttattgctagataatagggttttcagatgaaaagaaaacttaaagaggaatggccctcattcagtaagttctgtggttccagtaaggatttttatgtacatacgctctcgtctctcgttttgggtactttctatctcatctgtctcggctctgcatgttttccagggtgtagcctacagacatggaacagtgtaaatcccagactgacagacttagaacctgaggtctcattcatccttatggtttaggccttgccagttttccgaagtctctgattagttgacagtattaacactaaattgcagtttacagtatttctacattacagccatatgtaacatcaagccatcgattgtgtacttttcctttgctagttgtttgggctttaacatccttattcagccttatccaggttggttttgctgttgatcggtctcctaggctaaatgagaatgaaagcgacttcaggtcaggtggctgtgggattttttttttttggtccttctttcctcttaacgtaaatccaccaccaaaattattaatcctcttgagagaaacgtgaaacgccacaaaaatagagaaaattcaggtctgtatgtcatggatcgtgttggtattttcagagaacatcccgcttctgaagctgctgcagctccctcctcagggatcacactgccgtcacccactctgcactggggcgtttcctactgcgcctcgtgctggcggacgcagctgggtgcagaagctgtggggtcggagaggcgtttggagaaggtctgtggtgcagtgtgtgaaaattcaggtgctagaagcctactggtagaaaaacccaaaaggaagagctatatccttaaccattctgtccaatttcgggagccttgtcagtgtgtcagtttttcctccccgaagacactccttccccaagtaattgtaggaagataaaaaaactgttaccagataacaaacactgaactcctatttgaccagaactttttcctctcgagatagttttttctttttaatgaaaaaagcataggaattggagattggcttgtctcacgcagccagtgcacatttggaattgacggaaacaacgttgctatttccacccatttgttttcggcagccttaaggccctcattctcatttcgggtgaatctgtctatctgtgaacgtggcccgcatgtgcattcttttttttatatatataaagtcagtgacgaggaactcccgagacgtgtaatgacaccacacttgttttctttgtttctttgttttatttaggcaagaagaggtgtgagtaattgaggaaaaactgacagatgcttttgctaataccaaaattgagcttacaattaggaactgagtatgtgtaacaggatacaggtgacagtgaagatagaagaaccacgatgaccacagactcaatgtgctctgtaacatcgcacagtttacccagcatgactttccttaggaggccccctcctcacgctagagtaaaagtcccagttaagtgaagcctaccagaagaactagtagaagaagctttgccgcttttgtgcctctcacaggcgcctaaagtcattgccatgggaggaagacgatttggggggggaggggggggggggcagggtaggtggggctttccctaatttatcttcatgtccagtgagcagtgttgcgtttttccttgtagcatttggaaatgatttactggaattacaaaacctatttttcctttaaatttcagctttggctctggctgctttttagaataatgcaagataaaaatcacacctgagggctgaaaacggagagggaatgggagacttgatatttaagcagcttgaatggtttttcttttctttatttttaaagaaatgcacttgcctatgatactgtctctccagtgaaatgattactcctccattactctattgatacaatattgtgcatgctagtgttgtatttctatacagtagcttgaaattgattaacttatactgtaggtgttatgtattcctatgacaaaaaaaattaagtcttcaaattttttaaaggttttttttttttaatttaatttttccttttgggggtaaagtttgctctaccaaatagtgattgtaacaaattgatctgttttggatgttgctatagtgacatgcagttatatattttgtttttaaaagggggggagcaaaagaaacaccagtgttagcttaatcttaatgtctggtgtttgtcatggtgaaattataactattacagtgttggagaacaacaaatatgttctctgaatgagcctttgtgctttttgtcatgttatgcagtgaactatttttaaggtctaatcagtgattatttttccagctccgtgtttctctaaggaattatttcacacacggaccatctttagcagtttcctcagtgatggaatatcatgaatgtgagtcattatgtagctgtcgtacattgagcaaataaacttacagatctgacgccagtgctccttagctt

SEQ ID NO: 8852 - DNA, 1218 bp, Homo sapiens
catcatgccattgcactccagcctgggcaacagagtgagaccaggtctttttgaaactctgtctccaaaaaaaaaaaaaaaagaaatcagccatgcatggtggtgcacacctgtagtcccaggtactctggagattgaggtgggaggattgcttgagcccagtagtttgaggctgcagtgaggtgtgatcatgcctctgcacttcagcttgggaaacagagtaagaccatgtctcaaaaagaacaaaaaaagactttcttatttgtctgatatacctgtatattaccttatgaaagaagcagaaatccccattttgcagataagaaaaccaaagcccagagaaatgaagcggcttgtccccaagattgcttagcgaatgatggagctgggaaaagcccaatcttccgttatttgtggacacatcagaattcagcatgagtgacagcggtctgctggatgacagatcgtcagtgcagaatgagacacgaggtgcctgtgtttattcatgcaggaggagtgtttgcagaagtgccgggaacaagaggtggtggagcaaagcatctctttcctggtttccttctgctctgaactcaagtagtacccaccccctattcttcccctcttttgagtctgtttcactgagggcacggctggtaggagtaacgttgtccagcattaaaacagagcatcagtaatgtctaggaaaatgttaactttaacaacaccactaatcagtttagagaatatttgagcgtgtagcacttgctgatcattcattcagaaaatgaattgcctgccataaactaataagcatgatttggtttatgttttgatttaattatctctgagtagatgctgcttgaagtaatgactgtaatcacttttgccaagcataccccccgtttataatttaagaaaaaaaatttttttttttttgagatggggccttgttatgttggccaggctggtcttgaactcctggcctcaagcagtcctccccacctggtgtctcaaagcactgggattacaggcatgggccaacatactgaacataatgattcaaacatagaaaaaaaagtctcctggtagttcagttcccccatgccccaggagtttagtacaggggtgtccagtcttttggcttccctgggccacattcccttgggccacacataaaatacactaacactaacaatagttgatgagctaaaaaaaaaa

SEQ ID NO: 8853 - DNA, 158 bp, Homo sapiens
ggcatggtgctgggtgtctgtaggaccagctactcgggaggctgaggcaggagaatcacttgagcccaagaggtggaggttgcagtgagccaagattgcaccactgccttccagcctgggcaacagagtgagactccgtctccaaaaaaaaaaaaaaa

SEQ ID NO: 8854 - DNA, 6585 bp, Homo sapiens; identical to SEQ ID NO: 5223

SEQ ID NO: 8855 - DNA, 246 bp, Homo sapiens; identical to SEQ ID NO: 5224

SEQ ID NO: 8856 - DNA, 13646 bp, Homo sapiens; identical to SEQ ID NO: 5831

SEQ ID NO: 8857 - DNA, 7770 bp, Homo sapiens; identical to SEQ ID NO: 5832

SEQ ID NO: 8858 - DNA, 139 bp, Homo sapiens; identical to SEQ ID NO: 5833

SEQ ID NO: 8859 - DNA, 661 bp, Homo sapiens; identical to SEQ ID NO: 5834

SEQ ID NO: 8860 - DNA, 139 bp, Homo sapiens; identical to SEQ ID NO: 5833

SEQ ID NO: 8861 - DNA, 1605 bp, Homo sapiens
ggctagatagtgctatgaaactaattttggcaaaagactttgatgaagatagaaaatagtaaaattgatggaattcaccaatttggtgatattgacaatgtttcttaagctaggactttcttttcctttttggtttgtagcctatgatgttggtttacctggaataaaatctagtaagaattcatagaatattgaagctaaaattttacttagacatccctgtcctagctctttattttctgataaagaaattgagacatagaacatggcacacaactcaacatctaggtttagcaaatgtttactggaaacctgtaaggagcctggtactgtatttgcagaggcatttgggacacagagctgtagttcccgacctagagaaacttagccatactttctgactttcatttcattgttctttccatcataccgtgctgcctcccttctcctcttccctctaactttaaataataagctgatttaacttcaaagagaacatttcaattttaattcctagtatttaggatctctcgttataacttaaaaaaattcgacactaatcttagaaataactgctgtttaccactaaggaaagatagttattctccatgttataaatggcttcaatatactttagggttctgggtttcccccagcattggcatctgaaaaagaaagatgtcttagagcagcaggagaagtatgggatacatgagctgttcattcttgcctgacatgaactggcctgtagaggatgagctgggcatttgggatcaagtttagagaaatctgacagaaagaaatttcactttcttgggattcacaggatcatagagtcttaccaacgagagaggcactcaaagaatgtgaaggttcagttgattattttttaacttgggcttggctgtagaacataactcttcttcgtatgactttttcatttcctggaattctcctaacaacaaaacaagaggcttagtatccaaaaggaatggagtaaacactgcaggcaagcaggagcacattagaaatttttacctattctttattagatagggatttagtagtcatcttaaatggcacgatagtttgaatgcccacacttctgcatgtggtctttctcttggttcattttttaggtatcccagtggttcttaaatataatatgtaaagggattactgtagtgcaaggttgtatatacatatctgtatgtgaactttagaagagtttaaaaggattttcttaatgttaattctgtagcatttggctacaggtgatgttacaacccatccccaatgtaagacgttagtactgtaatgacgcacttgtcccactgtaactaagtagctggatatgttacaatggaaaagggagaatgaatgattgaaaatagatttttattcaaaaggaaaagaatcattatttcctagtttctaaatatccttcaaaatgagaagaggctaaagacatattaactaagtatatcagcagttgtctaccaatattatttattctcaaaggacatagtggttctttttcctaagagaagatagtacaaactatttaaatgtagacgatttcctggagctttgaaaaaaagaaaa

SEQ ID NO: 8862 - DNA, 1606 bp, Homo sapiens
ggctagatagtgctatgaaactaattttggcaaaagactttgatgaagatagaaaatagtaaaattgatggaattcaccaatttggtgatattgacaatgtttcttaagctaggactttcttttcctttttggtttgtagcctatgatgttggtttacttggaataaaatctagtaagaatccctagaatattgaagctaaaattttacttagacatccctgtcctagctctttattttctgataaagaaattgagacatagaacatggcacacaactcaacatctaggtttagcaaatgtttactggaaacctgtaaggagcctggtactgtatttgcagaggcatttgggacacagagctgtagttcccgacctggagaaacttagccatactttctgactttcatttcattgttctttccatcataccgtgctgcctcccttctcctcttccctctaactttaaataataagctgatttaacttcaaagagaacatttcaattttaattcctagtatttaggatctctcgttataacttaaaaaaattcgacactaatcttagaaataactgctgtttaccactaaggaaagatagttattctccatgttataaatggcttcaatatactttagggttctgggtttcccccagcattggcatctgaaaaagaaagatgtcttagagcagcaggagaagtatgggatacatgagctgttcattcttgcctgacatgaactggcctgtagaggatgagctgggcatttgggatcaagtttagagaaatctgacagaaagaaatttcactttcttgggattcacaggatcatagagtcttaccaacgagagaggcactcaaagaatgtgaaggttcagttgattattttttaacttgggcttggctgtagaacataactcttcttcgtatgactttttcatttcctggaattctcctaacaacaaaacaagaggcttagtatccaaaaggaatggagtaaacactgcaggcaagcaggagcacattagaaatttttacctattctttattagatagggatttagtagtcatcttaaatggcacgatagtttgaatgcccacacttctgcatgtggtctttctcttggttcattttttaggtatcccagtggttcttaaatataatatgtaaagggattactgtagtgcaaggttgtatatacatatctgtatgtgaactttagaagagtttaaaaggattttcttaatgttaattctgtagcatttggctacaggtgatgttacaacccatccccaatgtaagacgttagtactgtaatgacgcacttgtcccactgtaactaagtagctggatatgttacaatggaaaagggagaatgaatgattgaaaatagatttttattcaagaggaaaagaatcattatttcctagtttctaaatatccttcaaaatgagaagaggctaaagacatattaactaagtatatcagcagttgtctaccaatattatttattctcaaaggacatagaggttctttttcctaaaaaaaaatagtacaaactattaaaatgtaaacgatttcctaaaagctttgaaaaaaagaaaa

SEQ ID NO: 8863 - DNA, 1605 bp, Homo sapiens
ggctagatagtgctatgaaactaattttggcaaaagactttgatgaagatagaaaatagtaaaattgatggaattcaccaatttggtgatattgacaatgtttcttaagctaggactttcttttcctttttggtttgtagcctatgatgttggtttacctggaataaaatctagtaagaattcatagaatattgaagctaaaattttacttagacatccctgtcctagctctttattttctgataaagaaattgagacatagaacatggcacacaactcaacatctaggtttagcaaatgtttactggaaacctgtaaggagcctggtactgtatttgcagaggcatttgggacacagagctgtagttcccgacctagagaaacttagccatactttctgactttcatttcattgttctttccatcataccgtgctgcctcccttctcctcttccctctaactttaaataataagctgatttaacttcaaagagaacatttcaattttaattcctagtatttaggatctctcgttataacttaaaaaaattcgacactaatcttagaaataactgctgtttaccactaaggaaagatagttattctccatgttataaatggcttcaatatactttagggttctgggtttcccccagcattggcatctgaaaaagaaagatgtcttagagcagcaggagaagtatgggatacatgagctgttcattcttgcctgacatgaactggcctgtagaggatgagctgggcatttgggatcaagtttagagaaatctgacagaaagaaatttcactttcttgggattcacaggatcatagagtcttaccaacgagagaggcactcaaagaatgtgaaggttcagttgattattttttaacttgggcttggctgtagaacataactcttcttcgtatgactttttcatttcctggaattctcctaacaacaaaacaagaggcttagtatccaaaaggaatggagtaaacactgcaggcaagcaggagcacattagaaatttttacctattctttattagatagggatttagtagtcatcttaaatggcacgatagtttgaatgcccacacttctgcatgtggtctttctcttggttcattttttaggtatcccagtggttcttaaatataatatgtaaagggattactgtagtgcaaggttgtatatacatatctgtatgtgaactttagaagagtttaaaaggattttcttaatgttaattctgtagcatttggctacaggtgatgttacaacccatccccaatgtaagacgttagtactgtaatgacgcacttgtcccactgtaactaagtagctggatatgttacaatggaaaagggagaatgaatgattgaaaatagatttttattcaagaggaaaagaatcattatttcctagtttctaaatatccttcaaaatgagaagaggctaaagacatattaactaagtatatcagcagttgtctaccaatattatttattctcaaaggacatagtggttctttttcctaagagaagatagtacaaactatttaaatgtagacgatttcctggagctttgaaaaaaagaaaa

SEQ ID NO: 8864 - DNA, 4648 bp, Homo sapiens
aaggccctcggccggaagctccgctttctcttcctgctctccatcatggcggtgagtagctgggacctggatttgctttcctttatccgtcgccatccatggcaggccgagcctgcgggggctacttcgcccgcagcccgaggaatatggagcccgcaatgcctgctggcccaaaactagcagagccgttcgagccaaggacgcagggttgaattctgtcactttccctgccatcgttttaggagcggctccgggcacttgcccggagtgctcagaagcacggtcaggaggctgcagcgggggcagatggggtgaatggagggttctgaggcaggggggtccgggccttttcctggtcccggggacttgagacttgctcggtgctaggaaaccttagtcggttgctccgcttagggaaggtgccagcctttagacagcttccgaataggatgctggacgtcgcataaccacgtgtttcctgttaactgagcaattaagttctgtttcttcgctcactccccttagttggccttacaatgggggcgctctttgttaccctgagcctcttagggttcgatctcagtgtccgtatcttttaacactcaataactgtcctgagttttctcttcacccgttccgttcgtggaggaaggataggttccgagctgtcttcttcccttgatgtcccctaaacattataccttttaaacattcagggtcttcgttacgatttgggatgagcagaaataaaaatgctgtgcagatagaaagtagtaaaactcagggccctcagctgtgagtgtattgactgctgctcttccctgttgcagcaggatcaaggtgaaaaggagaaccccatgcgggaacttcgcatccgcaaactctgtctcaacatctgtgttggggagagtggagacagactgacgcgagcagccaaggtgttggagcagctcacagggcagacccctgtgttttccaaaggtgagtagtcacaaggacatacagggtttgcctgcttgggtcgcttggttgtttcttgatttacctgctgtcgagtctgtttagaaagtgacagtcggcatcacttaaagcattaaattcatgagccggccaagaggtgtcttttttttttttttttattcaagatggcgtgtgggattggaacactagattttatttgagcagatcttaagctaagactagcccaagtaaagattttcctaagtaactaggatatgagatagagtggaaatgtcaggaacgaagtaaagatcattagatctgattagcagttagggttatataggctgcattaagaacagggctgtacgggagcatgaggcttcagtggcctatattagtgccactgcactccagcctggttgaccctatctcaaaagttgtatacagattgcctgggtttgagtgatggcttcaccatttgctggtctgactctgggctctctggacctctgcttttttctttgcataaagagggtaatactttataattgtggaagataaaatgagttgtacatgtgtagttgctttaggacagtgaaatatggcaagtctttggattccactcctgctttttgttaccagctgtgatgtttggcaagttaataaacctctcaaaacctcacctgtaaaatatggataacagtacaataaggtttcagcaaatagtagatgttgtcaataatgctttgttttctttggaacatgataatcttactagtggcttcttcggcctattctggttgtgaccttgcccttcctggaacttcggcgttatgactgttcttaactgctgaaggatggctggatgtctggaaatgggaaaatctgtgctgtggatgaaatcttattaatagatgtgggagacactaattagaacaccacaacttaaaagagtgtggatgaatgcttaatgtctctttaagtcatggagatggtgttctgggaaagaggtgagtgtagtgggggtatgatggcatctgactccttgttacccacttcctgcagctagatacactgtcagatcctttggcatccggagaaatgaaaagattgctgtccactgcacagttcgaggggccaaggcagaagaaatcttggagaagggtctaaaggtgagcctaatcccctaatggagtgatattgatcagcactcctttagtaacacatgtagataagttacatttaatgttctgttctttggtgtcttgatatttatttacttaagcttctaaaaggctttttctacaatcagcagggttaaactgttcttggtggtttaaaagatgcttgaggctgggcacggtggctcaacgcctgtaatcccaacactttgggaggccaaggcggttggatcatttgtggccaggagttcgagaccatcctggccaacatggtgaaacaccatctctactaaaaaaagataaaaattagccgggcttggtggcgggctcctgtagtcccagctactcgggaagctgaggcacgacaattgctagaacctgggaggtagaggttgcagtgagctgatattgtgccactgcactccagcttaggccacagagtgagactcttgtctcaaaaaaaaaaaagaaaaaggatgcttgggagtcatttcatgcctctgctttctctgggtttttctctgctctttggaagctgggagaggtcatactgggtagttggggtgtgaatctatagtcgaggtatagtgaggaagtcaggttgtgttctcagccaagtttcattgacttctgtttgctctggggtgcatgttgcaggctgagctattaatagttacttgggggtgggagggagttgaagatgacaaggaatgttattgctgcatttttctccacaggtgcgggagtatgagttaagaaaaaacaacttctcagatactggaaactttggttttgggatccaggaacacatcgatctgggtatcaaatatgacccaagcattggtatctacggcctggacttctatgtggtatgaatatttaatcttttcccgctcctggtctgtgaggagaggggaatctttatttcatatgtggtatgttggtgttcacatgttgagttgcagctttgaatattgtctgcctttgtgttctcctcccccttggggaaatgtgcctcatttgtggcaaatgtaggggtgcagctctgaacaaggtggacaagatccctgctgttggggaacttgcagtcgaggatctgtaaagcacccacatggcttaaaggtggatgaaggaaactgttccctccagccagtgatttgaaactttggagagaggcagtattggtgccacatttggcctatgggttggttggctgcactgaggctgttctccccctggttcttcctatagaaacagctttgggtgatgcagtggtttgctcaggaagggggttttaacatagaaatgaccttttgtgttactgccgtgttttggtccaacaataaaactgaatagcctaaatcagaagtcctgactagtgtggaacctgaaagatggtggcaccctcattagacagacaagtaataagacttggatactcacaggatgttggaggaacagcacacctttgggaagcatttttgagctgaagcagaaggaagaaaatatatatatttgtgcttctcagagttgtatgttttctacactgctggtgtggcaatagatttttaaatgttacttttaaaaagaaaaatggagatttgggagcagtaatggaggatcctcagcaccactggaaaataggctgggttaggggggtgctgaaagttccagcctccaaagcaaacttacagtatggctgtgtgttgcgtgggatgctggtggcagctttgtcagacacagatcatgggtcttgctccagaatccattgggctgccaagtgactctttgaagatctgtctgtaatgtgtgagtcttgtccatctgctcttgactctgagctggctaggtgactgttggttattcctgggacaggtgctgggtaggccaggtttcagcatcgcagacaagaagcgcaggacaggctgcattggggccaaacacagaatcagcaaagaggaggccatgcgctggttccagcagaaggtaaagctgatttatctcaagtgaagtggtggaatgtgatgttggtgaatggagttgggatttggggatgcaaaatatagtactatttgctgggtatcttctttaaagttagaatattgggcatcttgacaaatcaggggcttccagggatgatggtttaaaagaacatccagaactaggccttctccctgtcaccatgaatgggggtagatggaaggggaggaatatggcttttaacaggagccccctttctcagatgatagtgcagttcagcacagtgtaaaaaccagccagcttcctatttagtccagaaaaggatgggattcagagcccaagttcatgtatcaatcagatgtgaattctcaaaagttagccattgctgcaatctctgctgttgcctcctgttctgaaaaaattaaatctcttctctttcagtatgatgggatcatccttcctggcaaataaattcccgtttctatccaaaagagcaataaaaagttttcagtgaaatgtgcaat

SEQ ID NO: 8865 - DNA, 638 bp, Homo sapiens
acaaccccgtcatcctctgattggatgccagtatttcctggcagatccaagtccaagcttcatagcattcattgcctgtgcttgccacaccttggttgatgtgctgtggtgcagtagccccatttggaggggagggtttggttgatgttggggtttgaatttagagccttggttaagcagggtgcagtgctcctgtgttccaggaggccccctgctattcagtgattctgttctgtactagaaattttatcagcattgatgcgtcatgaaggaatgacaggctttggtgtgatggttgagattaaatttagacttaactgttcaggctcaggtttcttttacaatgagagtataaggttcttgggaggcagtatgtgcagataagagggcagtctttccgtttccagccctttcctttaactgttacctcgggtgagttgttaatctgcctcagtttccttatctgtatcaggaggcagtaatagtagtatctctcagaggattaaatgatttaatacttaacaaaatgctcagactagcaccagccacgtagtgctcaaaaggggtttcatttttgtgtttgggtataagaaatattacttctgctagcttgcttccctttggtgcaaaaatgaaaa

SEQ ID NO: 8866 - DNA, 313 bp, Homo sapiens
acttattttttatttttgagacggagtctcgctctgtcacccaggctggagtgcagtggcgcgacctcggctcactgaaagctccgcctcccaggttcacgccattctcctgcctcagcctccagagtagctgggactacaggcgcccgccaccacgcccggctaatttttttttttttttttttttgtatttttagtagagacggagtttcaccgtgttagccaggatggtctcgatttcctgacctcgcgatccgcccgtctcggtctcccaaagtgctgggattacaggcgtgagccaccgcgcccggcc

SEQ ID NO: 8867 - DNA, 11240 bp, Homo sapiens
ttcagagtgttgttttattgccctgggatgtaaagacttggggacacctgacaaagggatgcttagatatattgcttggccttgactgcaggagagtttacagcagcagagacagcatctgggcccggagggaatgtgtcaccaaatgaacttgatttttactccataggtcctggctccccagaagcaagagagttcaaatgaaggaaggaggaggttcctggatgtggatgtcatcatttctgggaacactcttaaatggagactcagatttcttagccaaaatttagggaggatccagaagaaaccaaagacgaagcatcccagttcttgggtatttcctgaaacagaagaaaatgacaaaggcccaggtaacttttggtttgttttattcttaactcgattccctgatggatttgtggaagtctgaagaaatcagttcatttacattaaaagtataaattggaaaaaatgagctctggggagaaacagacttagactgtacctttaatccaggacaaagtgggatcacaaatactttgttcacatagttcacatgtgaccagtgttggaatataatgtgcgactctgccagaccctgttggctacattaagtgtcagcttgtgtccaaaatctttggccaccatcacacccagagaatcatggtaagttacatgatgtgcactgattctgaggagaaagcgggtccgttcctcaggggatgtcagtatttcatggcacttaaatcttgggaaattagtttgatgctttttgctagaggtgacaagatagactttttgtccttaacagcatttttccaaaagatacacaagcaagttttgtgtgactgtttctacatgattattctgagtcctctatgggactataccaagaagggtttaatgaacacagtttttccagagctcacagcactgcggcctatatacccaaccttgttgcagtctgtgtttatctgtgagtaaacctaattgcctaaaaaatgcaaggtttgctttcaaaggagctccatgaacaggtcactaaactggtgtttaagtacagatttgaccaaagggagttgaaagttctctttggcaatggcttgggttgttgagatccacagggtttgctttagaatgtcatgttgtctcagaaaatacagagcccttccctgtgttcaaatccagttattaacctctcacctcttttaatgccttaacttaaaaaattatgcaaatgactcattatggttttacacgtatatatatttggtctctgtctctggttcttggcacagagctcctaaaacctttggaatttcctgagtgataggagtgtattttgttcttcataaccagtgcctttcaaccacacctgagtttatggtaatgaggtggctcagaatgggctcctagacaacctcaggatggggctggttgccagaaagaccaagccttgattacagagttgggactttcagtcccacccccgacctccagattctgtgaccaatggttgatgatttcttttttttattttttattttttaatgagatggagtcttgctctgttgccaggctggagtgcagtggtgcaacctcggctcactgcatcctccaccttctgggttcaagcaattctcctgcctcagcctcctgagtagctggaaccacaggtacaaaccaccacacccagctaatttttttttttttttagtagagacagggtttcaatatcttggccaggatggtctcgatctcttgacctcatgatctgcccacctcggcctcccaaagtgttgggattacaggtgtgagccaccgcacccagccatggttgatgatttaatcatgcccacgtcgtagaagctccataaaaacccccatggggtttggagatcacatgtggaagtggggggtgggggaagggggcactgcaattccatgggatcagaggctcctgtgcttggcaccctttggaccttgacttctgtacctctttacctggctgtcatttgtatcctatataataaactgtaattgtgtgacattttcctgagttctgtgagtcattctagcaaattatcgaacctgagcagggaggttgtggcaacctccagttgtggtcaagttggacagaagtgtgataacgtggggaccccagagtggcacatgatgtgagggcagtcttgtgggaccgagccctgaaacctgcagagtctgatgataaccctcagcggttagtgttagcatagcatcgaactctaggatacccagttggcatcagagaaagtgttgctggaaaagacactgtgtatttggtgtcagaaagaaccacagattcatagttttttttttttttttttttgagacagtcttactttgttgcccaggctggagtgcagtggcgtgatcttcgctcactgcaacctctgcatcctgggttcaagcgattctcatgcttcatctaggtgccaccatgcccacctaatttttgtatttttagtagagaccatgtttagccatgttagccaggctggtctcaaactcctgacctcgggtgatccgcccacctttgcctcccaaagtgctgggtttacaggcgtgagacatcatgcccggcctcatggatagattttcaatgtgaaagactcaagttaaatagtacacatagtgtgaaaacaaagttccccctctgtatactttttttcctaattccctagtatgtcactaacaaatgcttgtcttcctgttctagggatttacctgtgaggacatctatgtctgcatgcgtgtgtatgtgtgtgtatacatgcgttgtatacatatacatgtatctatgcatgtcaatgcttacatgtatgatggcttattttttatggccactgcatagtttatttgttgttttgctaaatatcatggtatagtttacatgaagggggtcatgctagattattctgcacgtactatatgactgtagcatatagtttagggttgcaagtaggtgctgaaaaacactgcagacattctcatgttagcaagaggatttaatggctgcatattacagaaacttatgatttgttggattaatggatggctgcatggttattataaaatatagaatattttactatgactttgcttctttcacagtatatttaaaaaactaggaatacagtttatttgtgaacatgaatttgtactgcaagggtccacttatatccaaacttgaatcaaaaatatagtattctcaggatgtgaaactcgcttatacagagtaacataagcagattccactaggccaactgtaggtcatgagtatgcacaatttcggtatatgtggggcatcctgaaaccattccattgagtataccaagggacaactgtgcaggtgcagcttatgtggtgaaaatgggccgaacaacttcatatttcttccatgtcaataaaagagaaacatattaagcaggactgtgttattacaggaatcactgaccctggaggatgtggctgtggacttcacctgggaggagtggcagttcctgagccctgctcagaaggacctgtaccgggatgtgatgttggagaactacagcaaccttgtgtcagtgggtgaggacagctgccctgtgtcactcagagggtacccagtcagtggcctttgctttctcagcttctggaagctttggtatgtctgctgtgctcccaaatggcagatcctcaggcccgtctctggtcccacaggaagaggcataatcttccttcgtcttagaaaaaaagcctttaatttgctaacatgcaaattatgcagtccctaacatgtacctttctcctatcatcagagccacgtggtgcaattcagtgagcctaagtcttctcccatttcccacaaacagggtatcaagccggcaaacctgatgccctcaccaagttggaacaaggagaaccactatggacactagaagatgaaatccacagtccagcccacccaggtaagtgagagagaaccagcaagaggggaaggcagcggaagtcacattctggtcatttagagaaggcatgacagttgtgaaagtgtctagggagacagaaacagctgccacatcttcttctcccctaggatacaagagctctttttcttataggaattcagagaagcatacatacccctttatctcttcttggaactgatccctattcatttcttcttagatgttgagttgcttcccctaagttcttcttgcttggattttcacatcttcccattcttcttcatcacttgtcagaggatcattttgtgtttctgaggcaaaaacgacaaactgtttttttctctgtcacatagtcactcaacacagcatttatgccactggatatataggggttgttttctcacagcccaggcaattctccagcagacatcagctgggtatcgtctgtttcaaatcagctctgaccctatctacctgatacggcatcagatcccaccggttaagggctcagtccaagactgtgtcccacttcagatgccagtggcaagtcccaggttgtcacctcagcttctgaccaaccagctgtaaagtaggggttcccaagaccctctcctcaagtttgattaatttgctagaacagcatttatatgtatatgcgtgtgtgtatatatgtgtatgtgtgtgtgtatgtgtgtatatacatttatatatatactttatatatttatatgtatatatacatttatataagagagagagggagaaagagtgccataagcattgtctagagttactgattcatcaagtgagataagaactgaggcataggaggccgggcatggtggctcacacctgtaatcccagcactttgggaggctgaggcgggcggatcacaaagtcaggagtttgagaccagctttgccaacatggtgaaaccccatctctactaaaaatacaaaaattagccgggcgtggtgacatgtgcctgtagtcccagctactcaggaggctgaggcaggagaattacttgaacccaggaggcagaggttgcagtgagctgagatcgcgccatttcactccagcctgggtgacagagtgagactctgtttcaaaaaacaaaaagaaacgaaaaacaaaaaaacaaaaaaactgaggcatcggtatgtgattatggtttgtttttcacattctgacactatgtatttttcaccttgaattttcttttcatgaaatggtttttaatacactacaatataataatatcttccatgtctaaattcccattctactttgcatcccaatcacacacaagccactcccatagataccacatcagtgtgatttggtggtgcttgaggttcctttgctactctggagtcaagggcctggttttcattcttcttcatgtaagattgaaatacatcttggtcattcatgcatttcttcatcgaaggacagattagccaggctgaagagaggtcatacttttccatctattaagcatttcttaaaggctagatctttattaaaggagttttcatgacactgtccataccaaggcctcttgctctgtgagtctggttttgttagaattgagttgggggcctgggcgtgtctttacatgaagctctctcgggggctgtttttatgagttgatgaactgtagccataatacacagtagaagagactgaatttagtgagaaacagaaatgtctttcttgagcaaagattttgttagcaaaaatagggcaaatttttatgtaatatttacaaattaaacttttgaacgtgtgaaatgtttttgttacaattcagggctatacaaagttaaagtgaatagtaaatacagaaagaattgtaggactttagaagaaatgtaacctacagtggtctagacaagatggagaaagacagactgataaaatatcttatgcaagagacatagctaggtattgaattaagatgaagacatatgacaagaagttgtagaactggaaatgcaaggccatgtggggactgtcagaagattagcctgaaggccgggtgcggtggctcatgcctgtaatcccagcactttgggaggccgagttgggcagatcacctgaggtcaggagtttgagaccagtctggccaatgtggtgaaaccctgtctctacataaaatacaaaaaattagccaggcgtggtggcacgtgcctgtcatcccagctgctcgggagactgaggcaggagaattgcttgaacctgggaggcggaggttgaagtgagccaagatcgtgccactgtactccagcctgggtgacagagcaagactccatctcaaaaaaaaagaaaaaaaaaagattagcttgaaactggtcacatggaggccacagttagaagatatttgctgggaaatggtgaagtgggaacttaaagtggatgcgtcatggtaatggtaaaacttttattgttcagctcctgctgtgaattttctgtgccagtaattcagggtagtggtggaggtaaagttttgtatttttctagctctaggtagagcttacctttcacctggtggcagtactatagcaatcatactgtatagctgatgttctaagaaaaactaaaagtaaagctgcctcaagtcttgattcagaagtagggaggtggtccttgagggctccattcaccgatgccaacagagacataagtacaaaattcagagagtagaggctgttagtggcaaggtgaggaattagtatattagggacagcaaagtggaaaaaaaatccaatatgacatctgtgcaagtagggcatgatgaagaaggtgacagtttccatatttggtgcagtggcagagctgtgtggagaggaccacgtgttctgcttgcatgttctgaaagtccatagggatcaccctgtttctctttctgttggaacatatgagaatatatcatagccaggtagatacaaggtgttaaccaaaaaattgaggaggcaaagagaaactttatattctaacaaaagatgattcgcagatctgagtggtgtgactttgaggaagtggaaaaaacacacatcactgaagaggggaaacttttttttttttgccttgcaggaggctttttgccttctaggatttgctttgcatacctattcagtgagagatggggagtcttatgaatatctttatgagaatcagcaaacatgtgcatagtgagcaaacatatatgtaacatataatccactttcattttggagtggagttttaacattaaaatgaggtggaatttgactgtatgctagcaggtcttttacaggatataagaaaagtctgcacagactccggcagctgaccaaaacagctggtgtttatcaggagaaggatattgagatcagtctcctgtccaatcatagctgcagttatggcctgtggaatgctgttgggggtgaggggcatcagttagtcagcatctggtggtccgggagctgcaattgtttcaatattgcttgtcccaaggccagtgtttgtttagctgctacagaaaaagaaacaaaacaaaacaaaacaaaaaacactcgtggcagttagaacatagtttattctttaaatgtagggggtgtgtgacttaacccttacctgtatgtccttagacctagtttatagtttggtatcttattgctacaaagagtctgttccatcagtcttgtgatctctgttttaacaaaggttagagtattgactgcagttttcctggaaatatgagattggtgctctaggaaagttagcgtgatgatggtctacagaatggagaagggcatattttagcacccaacagtctaataggattaggatgaagtcaaaggctgtgtatccaacattctaacttgcctttctgggatatttattctactacctatgtctgctgtttccctactcaggattattcttttttaaattaaaaaaaaagtttttgtagagacagtctccctattgtagcccaggctggtctcaaactcctgggctcaagtgatcttcccacctcaccctcccaaagtgctgggattacaggcatgagccactgtgcctggctggcaaattttttttttttttttgagatggagtcttgctctgttggcagactggagtgcagtggagcgatcttggcttgctacaacctctgtctcccaggttcaagcgattttcctgcctcaacctcctgagtagctgggactacaggcacgtgccaccacgcccagccaatttttttgtatttttagtagagatggggtttcaccatgttggccaggatggtcttgatctcttgaccttgtgatccacccgccttggcctctcaaagtgctgggattacaggcataagccaccgcacccagctggcaaattttatcttatatgtatttaactacaattcttaaaagtttttttaacagatagggaacacttatacttggaattccttccatgttggtattataggggttccagtaaaaagccagccaaccccaaggcatctttgaagcagttttattccgtgtgatgatcatggaaggatttattgttctctctcttagaaattgagaaagctgatgatcatctgcagcagcccttgcaaaaccaaaaaatactgaagaggacgggacaacgctatgaacacggaagaactttgaaatcatatttaggtttaaccaaccagagcagaagatacaacagaaaggagcctgctgagtttaatggagatggagcttttctccatgataatcatgaacaaatgcctacggaaattgaattccctgaaagtagaaaacccatcagcaccaagtcacaattccttaaacatcagcaaacacacaacatagagaaagcccatgaatgcactgactgtgggaaagctttcctcaagaagtctcagctcactgagcataagagaattcatacaggaaagaaaccccacgtgtgtagcttgtgtgggaaagccttctacaagaagtacaggctcactgaacacgagagagctcacagaggagagaaaccccacgggtgtagcttgtgtgggaaagccttctacaagaggtacaggctcactgaacacgagagagctcacaaaggagagaaaccatacgggtgcagtgaatgtgggaaagccttccccaggaaatctgagcttactgaacatcaaaggattcacacgggaattaagccccatcaatgcagcgaatgtgggagagctttctccagaaaatcactactcgttgtacatcagcgaactcatacaggagagaagcctcatacatgcagtgaatgtggaaaaggcttcattcagaagggcaatctcaacatacatcaacgaactcacactggagagaaaccttatggatgcattgactgtggcaaggccttcagccagaagtcttgccttgtagcacatcagagatatcatacaggaaagactccctttgtatgtcctgaatgtgggcaaccctgttcacagaagtcaggactcattagacatcagaaaattcactcaggagagaaaccctataaatgcagtgactgtgggaaagccttccttacaaagacaatgctcattgtacatcacagaactcacacgggagagagaccctatggctgtgatgagtgtgagaaagcttacttctatatgtcttgccttgttaaacataagagaatacactcaagggagaaacggggggattcagtgaaggtggaaaatccttccacagcaagtcacagcttaagtcctagtgaacatgtgcaggggaaaagccctgttaatatggtaactgtggcaatggtggcagggcagtgtgagtttgcccacatcctgcattcatgataaacagtttgctgtttgatcatatagcctccagcggaatgctgagtttgtcatgtcccatgggcctttggctccctgcactaatatgtatagtagggtttacaagatatgaaatatattttacttttttatatcttataaacctcactacccctcccacaatattgtttttcatttactatcttgatcatagagtttggctggggaggggggcagttttagaggcttccacttggtgttcctcagaatgatatctcttactccgggggccaaggtaggggttagcttttgttctctttgtagtttagattgtatctcttgccttgttcaagttcacaaatctttttgtgtatacacatatgtacatgaaaatgatgttcatgctttttattattttacccttcattatttcattttttatagttctcatagctatgtctttcagttcactaatcttttttccacagtgtttaatctgtcattaatcccatccaaagtatgttttctctcagaaattgtaatttttaacctctaataatttgacatgggtttttccctgttatatctttcatatctttatttatcatggttttacttttaacctatttatgctttcatatttaaagtgggtgtttagtgggcaacatacagttgggccttccttttttatccagttaacaatctctgtctttttactggggtatttagatcatttacgttcaatgtattgatgtttttaggtttaaattactaacttactatttgttgtttattctatgtcttctttgttctccttttcttctttttctgctttcccttagagtagctgagtgtgtttatattacatattgtctcctttgttggcttattaactgtaaatccttgtcatttgattccttgagattttatagcatacatcattgtgagggattgcatatttatgtcctctccaaatttacatgttgaagtcctaatccctaagggatggcattaggaagtgtgacctttggaaggtaattacatcttgaaagtggaaccctcatgatgagattatgtgtcttatgagacaacacagaagagagtttgttttctctttctctgctctttgccatgtgaagacagaatgagatgaccatgcataaaccaggaaatggactctcactggacactagacctgccaacaccttgattgtgttttagagtccagttctagagactcctcagcctctggaacgtgagaaatgaatgtttgttaaggcagtcagtcagtctatggtgtattttttctagtagcctgaactgactgaaagaaaatcatgaacttatcattctaacttcaaggacattatatcacttactgtataataaaataatcttacagtagtatatctcta

SEQ ID NO: 8868 - DNA, 497 bp, Homo sapiens
aattttgagtccaagtttcagtcaaccagccaagtcaacagttagcaccactcaatttagctcacacactgaaattgccagtagaatgtaatctccatgaatgagagtctttgtgcctgaatttccaactgttgtattcccagcacgcacaacagtgtttgacacattaggcattttataaacattcgctggataaatgagtgaatgatcaatccctttaaaggttctctgaggctggttataaaattatagggagcaggtttggtgctagaattcatcagttaattgatcagctgagtttcagtattgaacagaatcatctccccttcagagttttgatttcaagttgctcccaccttcctggatgtaaaggcttgttctgcctttggcttttccagggtgagagagccctgttttcgtgttggttccccactttgtcaactgctgatcaactgtgttctccattctccacaccaattataaccaaagctttaaca

SEQ ID NO: 8869 - DNA, 9754 bp, Homo sapiens
  SITE (7069): n equals a,t,g, or c
aggggaggaagtaactgtagatgtggtggaaatagcaagagaactagaagtggagcctgaagaattaactgaattgtttcaatctcatgataaaacttaaatagatgaggagttgcttcttatagatgagcagagtattttcttgagatgcattctattcctggtgaagatgctgtgaacattgctgaaattacaacaaaggattttaaatgttacataaatttaattgataaaacattggaagggtttccaattttgaaaaaaagttccgtggataaagtgctgtcaaatagcatcagatgctacagaaaaatcttttatgaaaggaagcatcaatggctgcagcaaatttcattgttgtcttattttaagaaattgccacagccaacccccactttaagcaaccatcaccctgatcagccagcagtcattaatatctaggcaagatcctccacctgtaaaaagatgatgactcactgaaggctgagatgattgttaggatattttaacaatgaagtatttttaaattaaggtatgtattttcttaggcataatgctattgcacacttagtaaactacagtatagtataaacgcaacttacatgcactgggaaactgaaaaaattatgtgacttgctttattgagatactcactttattgtggtggcctgaaaccaaacccgcagtacctgtgagcatgcctatatttgatacaataggaactatattgcaggtagtaaaaaatgatgaatagtgttagttcaaagcgatagatgatttgtatgtccaaattaaagaaaagcatgtatgggaaaaagattgtcatttttatgtaaatgataagtgctttctgaattgtatttaaagaaaagaagattttataagtccaaagaatcacttaatacaatgaataaagggtaataatttaccacttttggattaccttttatttaagacataaatttttcaactcataagctatttaaaatcttttcacttaagatacctgttgaaattttgtttaggtatctggccaggaacagtcttcacggggacaaagaattttatctattccaatttggcccccaaacctaggtatctcacagaactgtgtgtatgaggtacagcaggtaccaaaagtagaaaagacaggtaagtgtttgtaatacattttggcagtctgctgggtaatcatgttccctttgaagacataaaactaagtttttaaaaagaaaaaatctcagggatgaatattcatatatataaatatgtagttattcattttttttcttaagacctctaaatttacctttttaaagttgaacttccagaattatctgtgcatgatttacttgcatgttgctttggaattgtttgcatttttctatttttcctaattctggaggccatcgaaatatatagattccagaatgaaacatgtaactaggcatctttctaacctagataagtcttaaatattgtttctagagtaagatgacgatattaaggcaaactagaacaataacattaatatattttcctctattcttacagacagtgatctgacacaaacacagctgaagcaaacagaggtcctagtgacagctgaaaagtgagttctggaaagcaaaaggagacatttgctaactttagttgaataaaaaactcatttctcaaaaatcacttggataaaaaaatgaaggtgatagtattccgtgctggtgaagggtgctggcccttaagtcagataggcctgagttccagtcctgactctgctgtgttttagccgaatgattttgagcaagaaacttaacatctctgaggttcagtttctttgtctatagtttggattgttgtgaggattagatgagacaaagcatataaagcacaatgtctgaaacatacctaggcacctaggtagtgttaggaagggaaacagcttgtctgtggacctggaccagctcaaatactctttgaaattcacatacttaaacaaaggtcaagatcacataaaaatatctttcagatctcaaaaggatctttagttgtctttgatttactaaatctcaaaaccatctataagagaattgatccaaaaatgaatatgccagttgaaaagatgatcattttaatttatctcttgaactgtaggagaagattgtcagaggggtgaagatgctggaattcttcattaaagaaataggaatatttggggctatggttgagaaattgatacatgttaataaaacaggacagagacttaaatcttgtctcagggagattcttgaaatatcttgattgttaattatattgtggctgttttatagttttttgttttaacatttaaatttagggaccaattctcatttattttatctgcttctcaatctttattttgtataccttgttttgagaaaatattactacataaataagaactagtaagaatggaagcaatttttaaaaaaattttttaaatgaatattttaaaattcatgattaaacctttcaatatagtaaaaacttctttgaataagattaataaggaggctaatctaacaagtacttcgttttgagtaactcttaaatctttttgtaacaatataggatataaaaaagatattggctgggcgtgttggctcacgcctataatctcagcactttgggaggccagggcgggaggattgcttgagcccaggagtttgaaaccagcctgggcaacacagtgagaccctgcctctattaaaaaaaaaattaaaacattctggccgggcgtggtggctcgtgcctgtaatctcggcactttgggaggctgaggtgggtggatcacgaggtcaggagttcaagagcagtctggccaagatggtgaaaccccatctttactaaaaatacaaaaaattagccgggcatggtggcatgcacgtgtaatcccaggtaggctgaggcagagtattgcttgaaccctggggggcagaggttgcagtgagccgagatcgcaccaccgcattccagcctgggtgacaaagcaagcctccgtctcaataatgataataattttaaaaaatagataccttacttgcccttggtgtctaaaaattaaaagaaaaaaagaggccgggcgcggtggctcacgcctgtaatcccagcactttaggaggctgaggcgggcggatcatgaggtcaggagattgagaccatcctggctaacacggtgaaaccgcgtctctactaaagatacaaaaaaaaaaattagctaggtgtggtggtgggcgcctgtagtcccagctactcgggaggctgaggcaggagaatggtgtgaacctgggaggtggaggttgcagtgagctgagatcatgccactgcactccagcctgggcgacagagcaagactctgtctcaaaaaaaaaaaaaaaaaaagatacttttttgtatctttatgtaaatacagagtgtttatatgcatagcttatatctgtaaactgaaaaattgatagataagagtttgcagaagacctatttttatttattatttttatttgagagttgatctcactgtcatccaggctagagtgcagtggcatgatcttggctcactgcagcctccacctcccaggctcaagcctttctcctaccttagtctgccaagtagctgagatcacaggcatgtgcctccacgcgtagctacttttctagattttttttttttttttgtagagatgaggtctcactgtgttgcccaggctggtctcgagctcctgagctcaagcaatcttcccgccttggcttcccaaagtgctgggattacaggtgtgagccaccgcgtccggccctattttatgtttaatattataaatccttagacataaaaagttgctaataaaacttagagggcatttttaaggatttacctttgttcctgacatatgaacactttaaaagcaagggaaacatcttcatctatgtattctcagcacctgacatattgcctagaacttagaagatgtttggtaaatgtttgttggataagttttttttttaattttattttccttcaaggcataaaagatccttaagattcataaagtatcactagaaaatagtctttaaaccttttactcataacatcacatatatttgtgcatggggcaaatataataaaccattagagaagctgttttaagatgcagtacaaaattatatgtgatagcaagaaaaattagagaagaatatggcctctctgtcatcaaaagtctagaggattccaaatagtgttcctgaagacccccttgattctctttcttaaaaacacaataaaacttgttagaatacatgttctttagtaagtggaggcattcacacgttataaataatgaaaaaacacattagtatgttaattattgagctttttttaaaaaccacatttataatggctttattgatgggttttagatatcactgcataagtaaattaatactaaattatgatatggtctttttaaataaagcttgtcctaatgtttggtcttagtctagaaattaagtgaaaaagaaattcagataggaggaattcttgaagttacaaaaactcggattctaaacacttcttcttttctatttagattgtcttcaaatttacagcaccatttcagtttgtcatctgtttattcacattactttcctgacactggaattccagaagtgaccacctgtcattcccgaagtgccataactgtggattatattttctactctgcagaaaaggaagatgttgctgggcacccaggtaaggaatgcatgtaatcttaaattctcctagagagcacagtagctaaaacctcaaggttaaagttaagaaagctctctaaacatccagttgaagttctagatctagaaggtaaaaatatttcgaaatagacagattggtaatatatttgaataaatcagttgattacttgcatatgagggaggcaataaaacacatccaagcaaattattacccaagaattacattagcagtcctaccctccagttccagtcagcctctgagttataggtctttcatattgccctttctttttgcttgccataaatttactgtttttcctgtgacaggaactgagtatgttgttaatggtcatcatagttttgtgcttaaattttaccgaggcgtcctgccttcattggaggaccatagttacactgccagcaacacagcttatgctgtcatgttgactctggaatattggatttttctgaggaggaaaagtatatatatatatatatatatatatatatatatattttttttttttttgatacagagtctcgctctgttacccaggctagagtgcagtggcatgattctcggcttactgcaacctctgtctcccgggttcaagtgaccttcccacctcagcttcccgagtagctaagactacaggcatgagccaccatgcccacctaatttttgtattttttgtagagacagggtttcaccgtgttgcccaggctggtctcaaactcctgggctcaagccgtccacctcggcctcccagggtggcttggattacaggcatgagccaccacattcggtcagaaaagtctatataatttttttgtttgtttgtttttgagacggagtctcgctcgtcacccaggctggagtgcagtggcgctatctcagctcactgcaagctccgcctcccaggttcacaccattctcctgcctcagcctcccgagccactgggactacaggcgcccgccaccatgcccggctaattttttgtatttttagtagagacgggatttcaccgtgttggccaggatggtctcgatctcctgacctcatgatctgcctgcctcggcctcccaaagtgctgggattacaggcgtgagccactgtgcccggccgaaaatcaggttttaaacattagccaaaggatttaaagtggagaagaaaatgcagtttaagattactggaagtacaaaaatacctttaagaaaactttggaatgtgagcagctgttttattcttttctgatttttttcatttttttctcttccatttttttggatgcttctttttctttacccttttcccctctgtttgttcccccctcctttcttctgggaataaccttattagtaacactcacgagatgacttattcctgccactagatctactctacaaaaaatatgcctgctgctttgaatttatagtaaggttttcgtagttgtcatgctgacagaagttcactaggtggcaggagagtgttatggatcagcatttcaaaaagagcatgtcatcttcacttctgtgggtgctgactatctgggactaaattatactaatttattctccattcaccttataaactgctacagggctgtggcccggtgtctctggctttatgcaactacagaatggttgctggatgagtttcttatgtagttgtcaaccacaaattacccttaacattcttaagtatttcatttatattttcttctaaagattgtttacagagctggaaatagaaaaaatatctcaaactgctgtgtgtttgataattataattaggttataattcaataaagcttagatattctaaaaactgtgtcatagtttttagtcttctggaggggcctcaagttctatatttgtttggagaaaagacttgtatgattaatttacaataacccgttgacaattttactaaatatgtgtgtgcttctttaatgtaggagctgaagttgctttggttggtggcttgaaacttctagctagactgtcacttcttacagaacaagacttatggactgttaatggacttccaaacgaaaataactcttcagatcatctgcctttattggcaaagttcagacttgagctctgactctctttgatcacatactaattttctttccaatttgtattgtttttcaaagaatgtaaagttcttaagtgtatgcatgttgtttatttttgcactgtggagattctgaagcggttatgttagatgctttgaaactccatatcagaagaaataactttataacaatgtttttnaataatgaaaaatattttcctgacaagtgagctctaaattctctttattgtaaaagagatgtaaaggttttatattctaaatcctagtaaaattgacagtgatttttaaatataatgcatcttcctttgtctgcttagtaaaaaatttcatttcataattttggcaagctctgtagtggatccaaagtatctttgagttcttgcaaactacaagttgtttcctttccagaaggcttgatttcattaggagacccctctattgagttctaaatagtttatcttagaaagccttgggtcattcacaggtatccaaccagccattgtttagtttgtttttgaaggggtttgataatgctttttaagttgtacagaatgcttaatccatcttattactgtcctgagccatgtaatatgcctgcatcgtgttggggaaatgtttgggaaatacaagccagcataacgtgtaaagctcactctttcaccctggaacagacaagaggtgggcttaatagaggcagagactggggatatacctttgtttccctagcatttttatttatttatttttattttattttattttttgagatggagtttcactcttgttgcccaggctgggggtgcaatggcgcaatctttgctcactgcaacccctgcctcccgggctcaagcgattctcctgcctcagcctctcgagtagctgggattacaggcatgcgtcaccactcccagctaattttgtattttcagtagagacagggtttccccatgttggttaggctggtctcgaactcccaacctcaggtgatccgcccacctcagctctcaaagtgctgggattacaggcgggagccactgcacatggcagcattttttaaaaattcagttttaagatctctggtttaggggagagattttattttactgaaccagttctatagaaatttattttattaggaaatttgtctttggaacaaagtggcagctataaaattatttttgttaagcctcagaaatatgaggaagcctgtaaaactctagtggggagatattaacttggagacctaatgctctgtaaatagtcatttaaactgttggttttagtggttttgtttctaaaatgttttcttttaccgtgatgcaccagtatgagatggtgctgacactttctatgaagtggttatgagcaggtttaataaatcctctatacaagtgtttgaatcaattttaaaacataaaaagtggaaatttccttttttgtagacagtaggaacaaggaattatatgcatttttactaagtagtaattttacactgaattgtaaatgtttttacagtgagttttattaatagaatgcttcaccttaaattggaaaacaataatagtcttggactaagtctttgtactaaagcatttgctataattatttttaaaaaaacaaacagatgaaaacctcagagaaggcatgtggattataagatttgtctagtaaaaattgtaattgaatatgtttaaatatttaatttctcattttggggggtttttatttttttattttttagatggtgtctcacgctatcgcccaggctggagtgcagtggcgcgaactcggctcactgcaacctccgcctcctgggttcaagcaattctccttcctcagcctcccaagtagctgggattacaggcatgcaccaccatgcccagctaatttttgtatttttagtagagatggaattttgccatgttggccaggctggtcttgaactcctgacctcaggggtgatccaccgcctcgggctcccaaagtgctgtgattacaggcatgagccaccatgcctggcctttggggggattttaattacagtattaattatagttctaggatttcccacattttatagtagtagtttgcaggatattatgtgccctaattagcagatatagacattatcaaattataatgatagtataattatccctttttaatattggggaaagaaaaatgaaaattcattagttaattactgctttgtgttgtgtgaatttattaacaaataacattattacatataggtcattgttaacaaacaaacatccctgaaaacctctgtgaaaatttaattttttatatcctgattaatatattgtgactttaggcccatttttcatgtgcttcactttgatagagttaatccataaaattgctctttactttagcttatcaaatgaagtattattttgtggactggaggccaaaaagtcaatgtgagcttctcacaggtttttaaagctccactaaaaataattatccacttgtctttacttttgttgaccagaatagttggtaactctgccagagcctgtacttacctgccaaaaacaattaaatctggttaatgcctgaaaccaaatctctcagtctcaagtgttatactatccaagttttaaatggaaaggtaaactgtggagtaatgaaattttggttttactgtaccttttgctatcaagataatattcatgtttgaaatcttgtctttatttggaatttagttactgtctgcttttaacctttgctttcctaaagaaagtttgagatccagagagttcaagggattggggaaagagaggcgtcaagtcatttgcactttgtacctgtaagttaggtaataaactattatactcgta

SEQ ID NO: 8870 - DNA, 288 bp, Homo sapiens
aggatggttttattaaagtcccatgctgtgttagaaacatacaagtgatgagaaaaacattaacttgaaacatgcacttactggcattctctaaaataccattatacaagttttcatttaattagaaaaatacccactaaaacaatcacagttcttcttaaagatttaaaaaaaatgtattggccagaacaaagtccaagagaataaacaaagttctgaattgtatgtcaaaaaactgtacatggttgtacataaaactatagcttacaaaagactcaggtatagtaa

SEQ ID NO: 8871 - DNA, 619 bp, Homo sapiens
ttatattgcaagaagatgccatctaggacttcataactagaaagaagaagtcagtgcctggtttcaaaggacaggctgactcttttgttaggagctaatatagcttgttactttaagttaaagtcagcattcattgaccattctgaaaatcctagggcacttaaaaattatgctaaatccactctacctgtgctatgtcagtggaaaaacaaagcttggggatgacagtgcatctgtttatggcatagaatattttaagcacactgctgagaccactattcagaaaaacagattcctttccaaagattactgttcgttcacaaggcacctggtcacccaagagctctgatgaagatgtacaaggaaatgaatgttttttcatccctgctaacacggcatccattctgcagcctatggaatcaaggagtaattttgtacctacaggtctccttatttaagaaatacatttcataggctatagctgccatagaagtgatttctctgatggatctggggaaagtaaattgcaaacctgcaaaggattcagcatcctaaatgctattcagaacattcgtgattcatgggaggaggtcaaaatatcaccattaaaaagagtttg

SEQ ID NO: 8872 - DNA, 1355 bp, Homo sapiens
agcatttggtggacttctgagcggtgtccaccttttagctgtgatgaacggtgctgttgtgaacacttgtgtacaagtttcagtgtggacgtgtgtcttcgtttctctcgggtatatacctaaggtggaatcactgggactatggtaactgtgtttactcatttgagcagccgccagcctgctttcccaagtgtctgcaccatctcacgtcccttcctgcagccttgggagttctgatttcgccacatctttgccatcacttgtttttctctgactttttgtttccagcccatgttgggtgtaaagcagtgtcttgtggttttcatttgcattttcatgatgactgataatgttgaacatctttttttgtctttcttggcgatctgtatttcttctttggagaaatgtctattccgattcttgcccacttttagttggattattgtctttttgttgttgatttatgagttctttacatcatctagatagaagtgcttcctcacatatatgattcgcaaatatcttctcccattctgtgagatgtcatttcactttcttgatggtgtcctttgaggcacaaaacttttaagtttttacgaagtccaatttatttttcttttgtcacttgggcttttgctgtcatatgtaagaatcttttgccaaatccaaggttatgaaaaagaaaaccttcaaaagtttttttattttagctcttttatttaagagctaaaataaaaattttaatagctgcatgtggtgtgaagtagggatccagcttcgcccttttgcgtgtatctgttcgttggcccagcaccgtttgttgaaggctgctctttcctcactgaacagtctcgacattcttgtcaaacatgagttgcccgtaggttatgagtttattccagaaccctcagttccactgcaccgatgcgtgtgtctgtccttgcgccactcccacactgtcctgttaccatcgcattgtaagtcttaaaactgggaatgtaagtcctttgacttttttctaatccaatactatgaacaaaatagatggcagatgaaattgaaaatttcctagaaaggtgcaaactactcaaactgattcaacaagaaatagacaatgtgaatagatatataacaagtgaagaggttgaattagtaatccaaaaacacccataaagaaaagccaaggaccagagagcttcccagctaaattctaccaagcatttaaagaattaaaaccaattctcacaaactctttcaaaagactaggagagtgggaaatgcttctcaattcattttatgagaccaatattactctgataccataatcagacaaagacattgccaaaaaaagaaaa

SEQ ID NO: 8873 - DNA, 507 bp, Homo sapiens
ggtgctggtgtgggcggtggtggtgctggtgtgggtggtggtggtgctgatgtgggcggcggtgctggtgtgggcggcggtgctggtgtgggcggcggtgctggtgtgggcggcggtgctggtgtgggtggattcctggaggacagctgggtcttgcatccagcacaggtcctggtgcctgggaggtgcttaccccatggccccaaccggcacaagtgtggctgtcacagctggggtctgggtaggtctggcagccccatgggaacctggctgtgtgagcctgccctggggccttccatgagaaaacccagttaaggagcaacctggtaaacccttgaaaaccaagtgggccttcaccagcttgaaaggccgcccgtgcctttcctccttggccctcacagcccagctcggcatcgcagcagagtcccggtggtggagatgctttgccactggccacccagagctaggagcctcggccaagggctccctccttgcactgtggtctct

SEQ ID NO: 8874 - DNA, 3640 bp, Homo sapiens
caaggtgggggattgccagggggagaaaacttatttattgctgtaagacaggacccctcctcccaacctcataccccaccgcacaccagagctaaattcaaagctgaaaggcgcacgtttctatacctacattcattcctgagggaccctccagagggtcaaggtcccagccccaggcagccctgtcacagtgagaagtagttcctgtccttaaggaatttccttctaatccaggtgcttgggcaggaacccgatggccttcgggtcaccaaggctgtctgggagggaggcacagggccgccctctgtgctgaggccgtggaggaagccaggaggagggtggcttgctttgcttccttgtctaattagcttgcttgaagatgtggccttggcagggagccagacccatggggccaaggaagaggaagagcatcctcaatagactcactcccccttccttggtctccacgggccccgtggactgagggctgcattggggtcttctgcctaggggaagtgctggacctgagctggagccacttggcttagaagccacaggattcacttttcactggcctttgcagtccccaaaggatcaggtctcagaaccaaggctccaaaggctgaggtctccccagttcctcctctcagaactcccacagtagctcagaggccgggggtcctgccaactttcatttggaaagttctttcgaacatctaaactagatctatcttagggtttctttctctcctagataggatcagctcccagccctagccattaggctgctggtcctggcgggggatggggtcccctcgttacccagtccttcccagggacccaacttcctaacacaacctggcttggacatgaagaccctcccccaggttaccttgtaaagagtccctccagagctgggatcccatgggcgcagcagcacacccagctcccatgcgtcactccctagctctgtcccagcttttgctatcattgctgacttttcctcctgtggctcatctctgtccctgctctctttgaaaacctaaactaccaaggtgtcatgctgcaactccctgcccagtcctgcacaaagccttggctgtgtgtggcaccccttgcctcctaccccagagcagctggctccattggcttctccctgcaccagccctgtcctcaggggtcaggaaaaagcagcacagctttctttcctctcctccagaggcctggaagggaggtggaggtccagtaagggcctggctgccttggatttcttggtcctgccttgccaactgcaccctgtagctcctgctccctgtgaccccagaaccagaggtgctgccttccctgtctcctagacaaagcacaaagggatgccctgcttggcttgagcctgcccaactgaaggattttctctgccccagggaccttccatccctgaatacaaggctctaggcaacttctctctgggtggtacacactagaatgcctggcattagccctagaaaggaggttggggtgtatgggtagtgagctagggtgggagaaaggtggtgctgaaaggacagatgctagttgtagtttcactcactcattcattcattagtgcaacagtactgagcaccacctgcactagaggcagaggggtgaacaagatacccttctgcctggggggacgtccacttcccatgggtttggctatttccaggaaagcccctcagtcctccaccctgttctggctgtgtgtgaaggatgtgtgtgagcaggcccaatcctttgcagcaagaatgagaggtcagagtattccattgcacacgcaccctggggctgacagacttgtgccccctagccttcatgcatgcccaagcactggcagctttgcagcccctgccccaccagccccttgacgctcttcttttgttctctcctcggggatgagctctgctgctgagtagggagcttttgcttgctgggaggctctatgcatggatttttttggtgaccatacagctagggctgaggatgggaacagggacagagggcctggctatccctagaagcacttcatccatctttacccacccaaacgggatcccttcacatctcatacccagtaagatgcaagaaaggaatatctgagagcaagcagccctgctccaggggccccaggtatgtgtagaggcccagtgggggtggccacttggtgtttctaccaccccctgccatccagtctggccccagtacctacctgggaggttggtgtacttggcttaagtacttcatgctttattcaggctgcttccccacagcaccggcaggaaatgaaggtgcacttatatgcatccctgcaggaataaagagtgggtggcctgcccagcccagcaccacagcctttccccagccaggagagaccacctaaggatcaaggcagctcctgttttcttggttctgtgacactcgagtctgagccagcccctcaggaattgcctcaaaagagaaaaacaaaaaaaagtcctccttcccaaggcctgctactccaaggtttggctccatcccttgcctttgggtcctgcctatttccccactcctggtctcttatctttggggccaccagtggggagtcacccgggccccaatccctctaaggcgctaagttgaaggaggccttcccagagtgactattggtgccaaagtcccagttcctgttggacttggggtaaaaacaggagatggtgagtgggtgtaaggcccaaatgcccagagaagttaactcgaacccatgggacctgtcccagcctgtcagtccctgatgagtgtaacttccttcccctgggggcctggcccttctctccaacccagtggccatgctttctcacccagccttgtgcccggcctgcatttctgtatatattgctgtgtattgtgtgtatgtatgtattcctggacaagtgtgttcatctgcagcccttgcctgaggataaggtttaggattgggtaaagatcagaataccagggccagctaaggcaacgactccctccccaaacccttgggacctcagccagtcccaaggctgccctgacaatcaggcaggctccccaccgtgagccaagcctcctctgccactgccagcatggcccaagggaggcttggccttgcgcttgccagcctcagctctgccctgacaagggtcttgtatccagggcagaggcctgaggtgacccaggcttgctttgtggctgatgccagcaggcttggttctagtgggcaccactggtgggcaacctccataactggcccttaggcctaccttcctacacagctaggctataatgggcctgagtgagagggtagcttccccagccccaagcacaggcagaggggtggagagcaatttttggttttatttttgtttctgaagtggtgcctgtacctccagcccccaggggccttccctggccacacttctctgccccacccaggcatcgccatcccagcactttgctccatgtcacccgtaagatgccctttgctgaatgtacctgagtgtatgtatttaaaaggactcacatgggcatcagagaatttatggctctgtatccaataaaaaagatggtgaaactggtctatctgccccagagaggt

SEQ ID NO: 8875 - DNA, 19447 bp, Homo sapiens
aatttacaaagttatctgaagtcttacattttatttaaatagcctccagtaagaagagagtgggccaattactaccccttccttgtaaaatgaagtaaccaagccaaggagggtaagtgcacccagcagccagccagccatgtgatgggtggggtgcctctcagtgggggcggccacgacacggccccggcctgctgctgtgggagcatccacagtcgagcgggggttcttgatggtttcatctacagacacgatcaggcacgcagcctcagaggctgctgtcagcgcattgatccgcaccatagctggctcccacacgaaagcttcaaagttgtcagcaatgtcctcgttgttgatgtctactccataccatgtacccccctaaaagagtaggaaaagaaaggaggtaatatggaactactttcaactttcctcttgtaaactggtactccaaaagacactgctaggaacccgcagactctctgaacttggtggcatttcgctgaagaatactgcatcttcctatgagcatgccaggaacctggaaacacccctactcccgccaactcctccccttagccctggacataccacacaagacctctgggatcttctcccaggcaagctgttgtgttttggggcggccccatcctcaggtcacctgaggactatatatatatatatatatatatatatcaaacaatgagttctcaagataaacaggaataacaaaaatactatcccatctttcatctcattgcttcaaatagcccgattttacagatgaggcaagtgagacacagaggtaaagtgactttaagcaaaagtcctaatacaagccagaagcagggtcattcactgggtgctaagcacttaacaaacctctatctatttaacaaatggagaaattaaactctcagagaggttgaagtaactagcccagggtcacacttgtagggctctggagagcttcaccacaccagtaagcccactccatgtggtcagtatgtgcttccaggaaggtggatgcaaggttcctcctgtggtaccataagaagcaatcatactctttttttttttttgagatggagtctcacactaccacccgggctggagtgcagcggcacgatctctgctcactgcaagctctgcctcctgggttcaagcaattctcctgcctcagcctcctgagtagctgggattacaggtgcccaccaccacgcctggctaattttttgtatttttagtagacatagggtttcactatgttggccaggctggtctcgaactcctgacctcatgatccgcccacctcggcctcccgaatgttgggattacaggcgtgagccaccgcacctggccacgatcatactcttggtagaagcaatgaagaaaccctggatctcctgtgctagcaccatggctttccttctgccctcagaggagggagttggtcaggcagacaggctggggggagttgcagcctatctcctgggccaggcgtgcacagcttgagtaagcacagctcacattcagaatctagccccacccgcccaaaccctgaaccctggggagagaaaggacccacctgggcatgccgagcccgcagcttgttgagaatgtttgtggcatcaaagccagcattgtcacacagctggcgtgggataatctccaaggccttggcatatgccccaatcaacagctgctgttttcctggaatagtccttgagtaatcccgcaggtacttggagagttccatctcaatggccccgccaccagccaccactgaatcattctgcagagatcagaccacctctcaatgtaagagggcccctggtccaagcttccatgctgggccactcagtaggtcccttcagcccagaaagagtggttcttcattccttcctccatcccaagccccaaacgcccagacacagcccctatctagaacatcccaacttcaacctggtgaaccttatggtttctgactattttcaaggtcacctgcagctcaaggacactggcacaattactggaatatctgactacattagctccagtttgctaacaaaacgaagtctttttcttctgcttgctctgttgcccaggctggagtgcagtggtgtgatcatagctcactgtaacctccaactcctgggctcaaggcatctttccacctcagcctcccgagtagctgggactgactacaggcacatgccaccattcctggctaatttttttatttttgtagagacaggatctcgctatgttgcccaggctggtgtcaaactcttggtcttatgcaaccctcccatctcggccttccaaagtgctgggattacaggtgtgagctaccacgcccggctaaaagaacaagtcttagctttcaaggcaggatgacctatttttgagaaactgaggctcagtttctctaccatttgtggggcaaatcagggctcaccacaccacccaggaaagggcaggttatatagagaaggaatcaccacacaaatccaaggtctgatcagctagggagataggagagagtaggctgtgcaagcaggaggatatcagcccagtaccttgatggccctcctgacgatcatgatggcatcatgcagggaccgctctgtctcctccataaactgctcggcgccgccacggagaatgaaggtgcatgtcttggccttggggcagccagtaaaaaaattgtacctatgcccaggattaaacagtacacacatgaactcttgtctgccaccatcctactgtattgtcctcactgccagcccccccaacactcagcagctgctcttacattcttcactcaggttacccaatcccaaccttatagacattttcttggaaaggtctgcagctgtaccactagggcataaaagattgtggagtcaaggcttttagatcttcctgtaatcctgtatattatctgagctctttatggctcaaaggtgagactctgtaaaagctgtataccactttgtacacaaaggtgagactttgtaaaagctgtataccacagccaaaagatggcagaagaccagacccaggcaggtttgtgagctcggcctgggcccacggctcacctctcgcctccaatctgggtctcttcaaacacctggcatcgacccagcacatctgctgacagagcattcacactggtctggattgagcctccacaggcctagggagcaaggaaggcaagatctagcagtgaaggttcccgaggccaggcagcttcctgccacctcgtctcaaagccaattcccacgcatgcccccagagcctctacattacccgccctttcccttgacttccaggcgacccttccccctctctgaaagagcaaaaaaaaaacaaaatagaactaaaacacatcaaaggcaaacagaagaagttaaaaggagatagggacccattcaattcagcttatactccctcccctaaactagggtggcactgggtccagcaactgaactcaggagtactttaaacctaaaagtatcttttgtgggatgctcatgaaagggaaaaaatctggctggaagaatcaatatttgagtttgtccagctaatcatagcattactgctaggttctctcacaaaccagatttctggacttgttttggttagactaaagtagtttgtgctactgggcacacacacatggaaatggaatgtgtcctggaaaaaaaagagttaaaaaaaaaaaacagggctcaattcacacgccaacctgacagtacactctgttataccaggggtcagtgaaaacccttcagggccacaaaggccgagaagcagcctgtgaaaatctggttaccatcattgtcctcttcagatcctcctcaggtactcggccagcacagaacatgtccctgtcagcaaagtactgggtggccacatccccaatggggagtttggacaagacaactttggctccagaatgatggatcttctctaacttgtcatagagaatgttccactcagcatcaacaattgcctgataatcctggagagacccagaaaaggatgagaatgctttggggtgaaggttgacatatacggtagggtaaaatatacccatctgcccccaccaaataaaacatgctgattcatctgggaattaacagagataaacagaatagctactcctcagtccaagcaaataaggaccccatgagatgacttaggaatcacctgaaactccccaacacaaaagcagaaagtaaccccaaggctgagaaccacagctggtgctgtccagatgcgagaaatagtttaaactggctgaggtctagactcttctgaggtgctggattcatggagttcccaataagacccctttggccgggcacagtggctcatgcctgtaatcacagaactttgggaggccaaggcaggtagatcacctgaggtcagaagttcaagaccagcctggccaacatggtgaaaccctgtctctactaaaaatacaaaaaaaaattagctgggcatggtggcacatacctgtaatcccagctactcagaaggctaaggcaggggaatcacttgaacccaggaggcagaggttacagtgagccgagattgcaccactgcactccagcctgggcaacagagcgagactccgtcttaaaggaaaaaaaaaaaagaccccttccccaagaactgctcaaaggtgggtgacatggctacctccagaggtagcctgggtaacatcaacaatgagagcacacctgtctctgcagcactaggtctagtctagaagtggaggaactcacacttgcaccaacaagaggaaccaaaataccgggcaggctatgtagctagagagtccctgccatccccttccccaggaccacagcgtatttcaacaggtgttccctatccaaatttcctcaggtcaaggtcactcagggagaacacagagtatggaaagaagggggcctagtacttagacatcaatattcaggggggcaggaagagaaaggggcccacaatagccatgaagacccagggctctggctcagaaagctgcccatttccatgcccccaccaactggtgaacccacctacctcaactgtgtggactcttatctcagcattgtctttctcagctttcaactcgagctcgacattcaaaagggcaatcttgggattgtggtactttttgggttgcatttcaaacccagcgtaagagaaagtcttcttgaatgcaacaccagctaccagctgagaatcctgttttaaaaaaacaaacactttaatggtttggtactaacatgaaataaaatcaagctagttgtttgctggctagtgcttatccattcctgtgagcctgagctaatcatgtctttatttcactgctgtaacacagcctttctgttatcataaaatcgaagacaaatccttttttttttttttaaataacacaacatattatttcagtcaccccttaagcataaggaaaatcatctggttagcagaggcaaagcatggtaaaggcctactgggctgtcctctaagactggcctctgcagcactggccgatggataatgctgtacaaacttccaaaaagtatgccagaagaggagccaggtgtttacaaagaaggcaaaacaaaagctgtgcaatgctaccctcttctatgccccagctcccaaatctcaagtatcctcctgtacacctccatgtacccataatttgcactgcaccctccacccccacacccccaacagcatggatactatagccttgacgcttcctccctccagaagatgatgccaaaaggtcttaagaatcagaaatcccctgcataatttctaagctatcactgcagctcctcagacctcaatccctcaaggtagggatcttctaccacttgttctgcaacagagcttctctgtgggttggatttaacagcagggcataatagaaagcacactgcacccagggctgactcagcactaccgtgagacttaggttccaatctcagatcttttccttactaaatgaccgagtcatttcccacaccataaaaaagggtattcagttcaataacctttagtttctctgccagtgctcatctacaattctaatctataatactgtaacccatgggtgaagagtatctgtccccagttcctgcatcattcaaatccacagcttcctaaagggagtgatgcctgagctgaatgacagatgagcagaaattagtcaaagagaaaaaaggaaaaaaggggttctcctaagaggtgggaggcagtgttgtggaatcagagaatgaaaagccatttgaagttgctagaatttagagggtaagaaccagccagtgaagaagagagaggggaagtaggcaggggccagtttagaaggatcttacaggctttgttaatgcctggctttgtatagggaatgtagatatcagaaggctttacgcagaagaataaagtaggaaacttcaccctgcaaatagtaaataagtacaatggatttaggggatccaagactggaagaggggtggcaatagtaccagaaagagtaaaagagacagactcaataaataattaggaaatcacgaggtaaaatggaacaatggtaattgacaggctggagtcagaagggttttcaaggatgatcccagatttctggtttgagtgactgaataaacggtggtgacaccaactatgacaagaaatacagaaaatgctatcacaggagtggaggacaagataaagcgtttaacagcagttagacacaagaaagagcatgaggctcagaggagaggtgagtactaaagatatggatcagaaaattcccagttaaccctggtaacaagtaaataatcactaccactatttattgaattctgggtcaggtttgtatgtatttaacgaatgtaggacagtctcggaaaaacgcaagtgtggcttagagtccctggctctcttgccaggtaagattattagtcctgatttctaatctatgtagattagaaatggatgccatttctagattagaagtggatgccaatctaatctcaaccatttatggaagtaggaaggcccaagagaagatgaaaaatcgctactaaagcagtgagtaaagacaaagtcagcaagccatgatgaagatagggaaatggctcagatgacctccaggttcctcacagctttattacatacagagaatctcagcccactggtctgacatgtgccacaataggaggggaaatggcaaagtgggaatgcaatttgggagggtaaaatttaaagagaagggccaggctatctttcaagctggtcctcctctatccaaatcgcttcagttgaggtcactgacgaagagtaataagtaaagcaggccagagactgaaaaggccaaaagcagcatggagataccaaggacgtttccagacagatactactgtgttaaaaagaaggagttgtgctgtccaagacagtagccactagctacatgttgccatttaaatggaaataaaattaagattcagttcttcagttacattagttgcatttcaggtgctcagtagccaagtgtggatggggctatcatattggacagcgcagatatgtaacagtcccaccaccctacagaaagctctactggagggtgctgagttaagagctacacacgctaatgtggatcaatttctaaaatatgttgttgaatggacaaaagcaagctacagaacactatataagcaatcttttgtctttaaaaaacagtatttacatacatgttcatatatgcacaaagtaattctgcaaggatacacacaaactaatagtggctgtatatggggcaggggtagtgcatgaaacacttttaactttaggccccttcacagtttgaaatatgtatcatctattcaagataaatgaatgaaagaagggcaagcttaacagtatcacttaggagtaagcagtgaactgaaaaatccctctcagatgtattaattgggaggtcattgatgatttgagctagtcctactacccctccaccacccactgacacagagaacctgagattctgaaaatcatacagtccaattttctactctgctgacaaataatatccacagaggttaccaagttcatctagtaacagcctctaatggcagtatggaaagtacaatgtaagtctgacttcctgcctaacatgcattctctttattcctgtaatgagtacccctctgccatatgaagctgtctgaagggtcaatatgaaagcaagagctgtctaggaaggccacagcaggcttacctcgagggctccaccctgtaccttcttgattccaatcattttaagctgcagcaaatcatcgagcatcatcactgcatccaccaccatcttagcaaagaaagctttctgctgggagatcagcttggagctcagagcggtcatggcacacttttccagcagcttcctctgctccctgggacacaagggcagaatctgcatcaggtcttgaaaaccaaatccctcttatctgattctactacagtgtggaggtagttcccttccagtctctaaactcagccctctccaacttcaccttttgtatctttagggcagattatcagtgacagatggtgactgcagtcaaagatctcatatgtggcagcttttaaactacagtcgacagcttcttttgtgctctgtgggctgggacacagccaagggtctggcaggagccaaacagccccaggcacatagagggattgcagcatgcttctgcatccaatttggccacaggaagtcagtcaaggttctgacaaaggcctgacacggtgactcacacctgtaatcccagcactttgggagtcgcaggtgggagatcacttgagccagtagttcaagactagcctgggcaatacagcaaggctccgtctctttaaaaaaaaaaaaaaaaacccactacagacttacactttatctgccttcttcacggtcacagcaatctctttgatcttgttaactgcctgccaagaacagaagttgaatgagtctctcatgctaaagacaaactgctgaagtggacctcaatctctcaatagtcctgagtctgttcactcccaaatcctaagcatttctactctacagctgaaaaaacacttctaggtcttgtaactgctcagaaaaatgtaaaactctatagttcagaaaattccaagtcagaaatgcagagtgggtatacagttctgaagaatcagggtgcttccaagattttgctctgggtctgcaggtaacacgctacaacgaatgagtggaaacagctgtgacacgagattaagccaaacctcctggtttactaaaaacacctacgacaacttctagcactttatatattagttatatataaaatatgcatacaaatatataaactttttatttttttccaaagtactcctcatatattatttcattttaatgtcaccactcaaattagagatagcaaagaaagtaaggcctagaaagattaaatgacttgccccagatcacaaatgaaggttagagggcaaataatagctaggtctcaatatacaccatgaggtgcttgagtatagcatgtagtagtagtatgccatgagtctcttagtccttactaaaagactatgtctacatcatagtctaccaggctgactctaacctgaggcttaaagagattaagtaatacacctcatcaaatggctacagattagtagaactgagattactaaggagatgtcagaaaatgcccaaagtaccctgttccccagtccctccacactcctgaaaagaaattccccttcctaagagaaatgtgaaggtgtccaggcccaagagaaggttaatcagtactgccataccagctgggtggctgtgcggaaagctcgaatgatgatctgggggtgtaaaccttcctccacatagggtttcacctgcttcagaaactctgcagccagcaaggtcactgaggtggtgccatcacccacctggaagatgatgacaggaaatacacgttttctgatgttcagggaataaagccctgaaactccatttttaggcacgctacccatttaaactgcatattatttaaatggatgtcaagcttttttctggaagcacaggtttttgcaataagtagaaagaagctaatggtagttacatatccatcatgtcaaacagtcctgggctaccaaattaattccccagacagccccattctctaaagagggctgatgtggacaatcaaatgtcctcagggtaaaaaattacacacatgaactgagaacttatgttacgtacaaggcattgtgatgaataaaacagtccttgtcatgcttattgtaatacaatacttaaaataatcatggtaccaagaagcaagagacaaacattgtttaagaagcaaaaggtggctgggcacggtggctcacacctgtaatctcagcactttgggaggctgaggcaggtggatcacctgaggtcaggagttcaagaccagcctggacaacacggtgaaaccctgtctctactaaaaatacaaaaattagctgggcgtgatgcgggcgcctgtaatcccagctactcaggaggctgaggcaggagaattgcttgaacctgggaggcagaggttgcagtgagccaagatcgcaccacagcactccagcctgggcgacagagtgagactccgtctcaagaagcaaaaggtactgcaggagttcctttcttttttaatagagaaagggtctccctatgttgtctagactggttttgaactcctggcctcaagcaatcctcccacctcggcctcccaaagtgctagaattacaggcatgagccactgcatctggccaggagttaaaaaaaaaaaaaggtaactttcagtcaaatcacactaaaacaaacgtcctaggaccagccaaagttctttatatttcaaaaactatgaggaggccaggcacggtggctcatgcctgtaatcccagcacttggggaggccgaggcgggctgatcacctgaggtcaggagttcgagaccagcctggccaacatggtgaaaccccgtctctaccaaaaatacaaaaattacccgggcgtggtggtgggtgcctgcaatctcagctactcgggaggctgaggcaagagaattgcttgatcccaggaggcggaggttgcagtgagccaagatcacaccattgcactccagcctgggcaacaagaatgaaaccccctctcaaaagaaaaaaaaaaaaaactactgggaataagcagattactagtctgctaatcttttttagatggtgcttttctgtgatgggatctaaatcctatttaatgagggtgaaaaagaaaaagagctttctaagaaaattggataaactctaaactggaagaaatttatttcggtagagatggggtcgtgctgtattgcccaggctgatctcaaactcctggactgaagggatcctcccaccttggcctcctaaagtaatgagacacaagcatgagccaccatgctcagcccagaaatttatttttaacttcatgtatgttcactgtgtaaggtaagaaattctcaaggggcaaaaaaaaaaaggttactatagagaaggtttaagtgggcagatttctggaccaaaaggcattattccctcgttgaagacaaaaacaaatcaaatccagactcttctctctttaattttatatatgctatacctgttttataggcttggctcctaataaaccttttaacgtaacttcaagacatacctgtagtatacatattttgcagtactctaaaatacaaaacctatctgtcaacacatttattaatactccagtgttagaatttatttttaaaagatagactggttaatgccatgaattatacacttaaacatggtattaagaataaatattatgtctgttttatcatcagtttaaaaaaaaaaaaaaaaaagcctggtgtagtggggaatgccagtagttccaacgactaaggaagctgaggtgagagaaggcttgagccccggagttcaaggccaacctgggaaacatagtaagaccctatctctttaaaaaaaaaaaaaaaagaaagaaaggcagattggaagtcttagtttacagccccattttgtaagagatgagaagtcaaattatttaacctagcaactcacacaaatgacagcacacaacctgttaagatctcaggcagtagacttatatctaaagactgttgtcattcaccaatgtattaatggatatgaaaagctacatgtaacgaaatagtatgaattttaaaaggctgttaattctaaatacttttataagcatgtattacttgtacaattataattatataaaatcttaaaaaaatttaatagaggagaactaaggagcaagcaagcatgtgtttcaacctccatttaaacacacaactattttcctacctcagcatcttgggatttggcaatgtctaccaaagtctttgctgcaggatggacaacatcaagaagtttcagaattgtggccccatcattagaaattgttgctttgccttaaaagaaacaaacaaaaatctaaagcccctttcttaaatgctgtcttcaagtgggacctagaacccatctacactttactgggatggggcagaggggatcacggcagggctgaagggaaaggatacctatctgatctttctatacagaattagctctgtacacaaagggtctaaaatcacaagcttttgcagaccacagactcccaattttccttgaagagcaattaatacaggtcaactggatacagaaaagattttttaaataaaagtaaccacttagatattcttaccacagttgataccctcacacatcaattaatataccaagatataaacaggaattttctcatcttgataacaatggaagtgaacacaggaaactccagatggttctatttcatgtttctaggccacgtctccctatgaggcaacaggctcctgagcctaggttctctcatatagtcccacacgggctcagcagtcaggacaatataagaattggaactgcttcagagtgagtcatctttcaacgatcttaaaagcagtgggatttctgataccaacctatgctagtcccaaacaccccctcaggagcctcctttcctgcacacaggcctgaggaactctgtagacttacctctgccatctacaataagcttgtccatgccacggggacccagggtagttcttacagcctcagcaatcacctggcaggcactgatgttactcacaagctgggggatgccttgggagctatcagtcccctctttcaataggataactggtgtgggctagaaaagaaagaaattaactgcttttaataatcatctattataatgagactggcaggggaaaggggaaaatgctcccatctctcccttaacagaattatctagaggtcttcttaaaccacattcccccaactgtctaccacatccattccccaaccagcctctacctccagagacactatcaaatttagcctaccctgcaggtatgctagacaggaaaatggtttgagaagcactgacctaatctaaaagaaaaaatcatgagttctccagtacccagctgaatgaccatggccttttcaacttctgaccttactccctgtgctgaggaattgggtcacaacacaggaggaagaggcagaccctgctaagtgttcattccgcagcaaaacatccacttgtctgtgttacagctcaatcttagagaagcagatgggacactgatgcaaaatgcaagatgccaagagcttgaggtgttgtcctagagatgcctaggcagtcagctttatgtaacagtgatgttcagctgcagtgtaggaaaacaggcagagaaacaaacagcacctttgccctgttttgaaaaatgatggcaaatctaattcatacagcaatgtttccatctctcatgctggctgaataaagcttctgtgtgactaatttccaatcagataccccaaagaagttttcctctttctatattgcattggtctccagaacattccctatccccgtaagggcttcatttgcagacctgctttagaaactgagaaacagggatacttgcttgttttaaagggcccgctcagatatctttgctctagtgaccaccattattagcagagagagcaatttctcagcttagcaaaccagactactttctctccacattcaaatctgagccttcagagataagcccacgaactagatccagtcttctcaagtgtttctggctaattttgtgtgtgacacagaatgtagtaaggataaatactatttcaaaacttttattgtgttaaatttgttactaggctatgattaaaaatgtatttcttactgtggaatgcaataaaaagtttgaaagccatcacctagtccttagaggtacgtggatgtctgagcaaggaaggcacaggaaagcacagagctttcccaacctaacaatgaggagtgaggaattcctgccaaagacagagtcttgccactcatgaggctgattccttattaactggtcaattccttaaaaagttcaactcttttggccagcgcagctggagggtagtaagcaagaggaagactggaataaagctgaagaggcaggcaggaaccagatcacatacacactcgtagacacactatggtgaggagttcagatttcattcctaaaaaggaaagccctgggaagctttcagcagaggaatggcatactgtgatttacataaaaaacaaaaaccactgtagaaaaaagaggatcacttgagctcatggagttcaagaccagcctggggaacatggcaagaccctgtctctacaaaaagaaaacgaaaaatacccaataaactctacggaataagagagtgggagtaatttaatatattattcattttttaatatatatttctaagagacagggtcttgctccaccacccatgctggagtgcagtggtgagatcatagcttactataagctcaagcctcctgagtagctggaccgcaatgcatgaggtaccacacctggctaattttttaaatttgtatttaaaaaatgttgcccaggctggtctccaactcctggcctctaacaaccctcctgcctcagccttctgaagtgctaggattacaggcatgaggcaccatgccaggccctcattaaatttttttaaatgcttgtcaaataatcatacattactccttttattttttattttaaaaagaatgcttgtcatgtaaacccctacatttgggatcaggcgtcaactgaagggaaaattccttccttttgctggagtgtcccaggtctggtggcaagaaatggcttctctatactcccagcattctttctggctcttcagctggcccagtccctggcaccttctgtaagggaaagatgtgtgtcctgaaaggccctaccatctcccagtcttgctaaatcattccttatggcagccccaagtcttctctggtccacccctgccacggatggagtcttacactttaaatcaaaaactaacatgagtctcaatcacttcctatcaccttcaacaggttctttcacctcaacaggttaacttacccaatgcttgtgtatactttttctcacctcaacctgcaaagtgtacccccatctaaaatagtcactctgccatcttctaccaaaaccactttctcaccaccaggccaccaattcctcagagctccaattcttccaagaagttttctctacagtaataaacaagggcatctgaataggggaatcccataactttctcttcacttgcccttgctcgcaactttttatcaccatccagcttaagtacaagctttccaaagacaaggaccaaaataaccttaatttgaagagtgccaagatttggccacacatgaagcaatattcagcagcttttggggctgaaaatccaactgctacttgtaagtgcttgacagcactggcttcttgacttttggggagaaaagcactggcactacagtaacactacatttactgagagttcttaagcacaatgcaagaagagcttggaagcagctaaccacagattccccaggttccctatgctttgcaggccctgaagaaacagcaggctgggtagagagcatctatggggtggaaaaggtggcagagctggattgagtcaagccaagacaagcaggataggtcctcttctaacagttccccagcagcaggcactgtatgcaaagtccagtttccatcccttagttactttcaacctcgctccttttttttattcctctaataaataagaaacaaggtcgggtgcggtggctcacgcctgtaatcccagcactttgggagtccaaggtgggtgaatcacaaggtcaggtgttcgagaccagcctggtcaacacggtgaaaccccgtctctactaaaaatacaaaaattagccaggcgtggtggcgtatgcctgtaatcccagctacttgggaggctgaggcaggagaattgcttgaacctgggaatggaggttgcagtgagccaagatggtgccactgcactccagcctgggcaacagagcaagactccatctcgggaaaaaaaaaaaagaaaaagaaacaagagcagactccagtaattggccacaggtataatggaaggttttggaatttcagcttactgatcttcctcttcatcctactttaaaactttcactaagcatcattaagcttaatggcttacaaaacaagtgtgtctatgccaaggcacacagcgctcaacgccacaaaggcaaggacatacattttatgcaagctgtaccaacatcacaggactgaggtttcaggggaccttttcacctctctttcgattacagaagtattctagaatatcaggggccaatttgaagacaggaagactcttggagatagaagtttcacattccaaaaatggggaggagatatcaagagccaatacagcagggaaacgtcaatctgacagaggaggggtcagttcagggaaaatccaagtgtgatgatctagagcccactggtgaagttttatcacggcagagaatggcggttctgatccctagctgtgtgaatgtgaaccaaagctcttacggaagccctggcagcgggatggactgatttcagagatgaaaggaagcaaacaaccacctcgccgagtaagagctaacattgctgagtgcttactatctgctaggcacactgacaaactgagaaccagaaattaaataacatgctcaaagtcacacagctagtaagtggcagagctaagttacaaacctaggcattcagtgtagctccagaggccttactctcaactgctgtactatgctgcctctgcacagaagatgaagacgacttcaagaatgagcaatgctagagacataaaggggagaggaagtactgttaaatgctaatttccttctaccttgggtacaagcgggattcatagggcatttggtagaacacctaaaaggtgtctgcgtccctaacaggacagagaaaagctgcaggaagcaggaaaagagcagaagatagagtcggacaggccaaaatgaataagtgaactgccaagtgcacagaaagcagtatctcagtcagggtcaaacaccacctcggaagctggccctactcaataacaacccaggagataccatcgaggcttgggacccacggaaagtatctaaagctccgagagacagagaaaagaagtgtgggaagtagggctacaaggagcactttaggtggctccaggactcacagcaactccctcgccccaaatttcaagaaaacgagacccagagttaggtagccaactagaaaagcctttcttatgtcaccagagtccgagcctgggtcttcccacctccgatacagtgtctccatctacctttcccgttctcctggctgagaggctgcaacccccagcaaccaccagggcctggtacattcagtaggcactaaagacgcgtttatttaatgactgagcgaatgagtgaatgaattaaaagtactagggaaggcgtctgcttctctgcacgctgcggtgagggtcagcgagtgaacatagtgagtccctaggcgggcacaatatgaggtccccaatgtgcctgtgccggttccaagaagcacacgtctttacagcccgcaaatctcagagcagccccagcttccaagtctagctgccgaccgcgtaaccacggccgacctgcactcgtttcacgcaagtcccgatcatgcggggctaaaaaagaggtccccgacgtgggttcgcgggcccgaagcaccctgggacttgtagtccccaaccggccagcccagagactcctctaaagccccacgcagccctcgccaacggctccagcgccgtgctcgggccgagccaggccgcggctggctggggtcgcccctaagctggggatctgggcgaggacagaggcggcaagcaaaagagggtcctacagagcaagcccaggccgagcggcgccggccaccggccagatggcagctgatggcgacggatgcgcgagacgccactcaccatcattttggaagcttattcagcggcccgccactctcccctcttctccgagaccgggccgcccagcaacccacaatgcctcgcgcaatagaaatacccagaagcttgggccgggagaggaagagaacggaccacttccgctactctatggttcgttaccaccgactcggtgcggctagaaggacctgaggctgggcttcggggactctctagtgaggggcgttcattaaagaggggtcgccgcatttcggtcgtgcttcttagagcacggagggtctttgctcggcccgcatcacctactaacttaattccaccctcctccatccccggacgccagaccaaggaatgcaataaaggcaaaagtgtgggacgcaaagtgtgggataggctggtgccaaagcactttacgtgagcgatctcatttaatcctcacaaccctattgcgttggtcctattaaggccattttactgatgacagaaaggaggctgagaggtcaaggtgtccagtgtcacagttacatagtcagtgtcaacgggacgagcgtgggaagctgcccccaatgcccgttttctggctttgcactggccagaggctcctcgtggatggcgtgcgccaggccgcggccccagcgcctatccacggtgagcgcgcaagcgttggtggcactgggcggaagaccccctggcgcaagacgagtgccttcccgtgaaggcgtggggaggagggaagcgcagctcggaggagggaagcgcagctgggagaaggctaatcgtcgtcaatcgaggcggccttggagtggacaggaccgaga

SEQ ID NO: 8876 - DNA, 2088 bp, Homo sapiens
gtgtccttctaatgccatctctgtagaaaatgtgccctgtaaggtcagtttcctggaagctcttctgtgtgttgtcccttctccagcagtgggtcgattgtcagggagcccaggatggaagctaagtgcactggtcattggttgttctttcagtgcccttcagacagcccttgccctggtggtcttgtgcctccctgtctgtttggtgcctcttttataaattagtgatgacttcaggaaatggtcctggatttcaaatagctattcctggagacattctaattctgtggtttaaaccttaaaacaaacaaaccaaagtaattccctggatattggtggctactggtgtgaagagcatggtgcggcgcctgttacttggatgagctttgatcaaagaatggcatcaaatgataacagacattggaggtataagtgattacaaggagaatcatagatctaaataaaaatggaatggtggttaatactttaattgatcgagatgatacagcaatatttttattcatatatcagtacaatatttaacttttaaaggaagtgatattcatcttagcagaggtctcttagcaccatatttgcaacattggatgttatccattgagccttgttttggggaggaaaaaagacaccaactttcttgagtaaattgttctctgaaggtgttttacacaggaatacaaatttgcctgaactcaaaagggtcttgtttacagtactttaatcttgtttttcacttcataagccctctgtaaactgaaatacagagctacaggcaaacctcattttattgcacttagctttattgctctttgaagatactctgttttttttttttattcaaattacagatttgtggtaaccctgcctcaaacaagtctgttggtgccatgtttccaataacaggtgctcactttttgtctctgtgtcacattttagtcattatctcaatatttcagactttttcattactgttatatctgttatggtgacctgtggtcccagatctttgatgttactattgtcattgttttggggccccataaaccatgcccatataacgtggcaaaccttatcaataagttttgtgtgttccgattgctccatgaaaccagctgttccccctctctctccctcttctcgggcctccctattgcctgagacacacaatattgagattatgccagttaataaccctgcaatgcctctaaatgttcaaatgaaaggaagaatctcatgtctctcactttaaataaaattctagaaaggattaaacttggtgagaaaggcatgttgaaagccagaatacgctgaaggctagacctcttgcaccaaacagccaagttgtgaatgcaatgaaaagttcttgaaggaaattaaaagtgctacttcatagaacacatgaataataaggaaaacaccttatttctgatatagagaaagttttaatggtctggatagaagatcaaatcagccacaacgtttccttaagccgaagccagagcaaggctctaactctcttcaattctctgaaagctgagacaggtgagggagctgcagccaaaaagctggaagctagccgagggtggtttatgaggtttaagaaaagaagctatctccgtaacataaaagtactagacgaagcagcaagtgctgatgtagaagctgcagtgagttatccagaagatctagctgggataattgataaagctagctacactaaacaacacattttcactgtaaaccaaatagccatctattggaaaaagatgctgtctaggactttcttagctagagagtacgaggcatcgccttttcttaaagcttgaaaggacaagctgacccttggtaggagctaatgcagctagtgacactaaattgaagttagtgctcattttcccttctcaaaatcctacggcccttcagaattatccttaaatctactctgcctgtgctctaggaatggaactacaaaggctagataacagcacatctgctgacagcatgatttactgactattttaagcccactattaagacctactgcttagaggcaaaaaaaaaaaaaaaaag

SEQ ID NO: 8877 - DNA, 463 bp, Homo sapiens
ctgatgtttttactcaccatcttgccacccaacagcattcacttgggagcttattagaattgcagaatcctcagccccaccctgacctactacattagaatctgcattttaccaagaggtccaagtggtttacattcacgtggaagtttgcaaagcactggtctacaacggtggtccatggagcaaagcttgagtagtaaagctgtagcacagtagttctcaaacttgattgctcattagaatcatacagggagctctgtaagcttctcatctccagccttcaccgtcagagattctatttgttagagtggcacctggacatggatagctttaaaagcttccccggtgattctgatgcgcagcctaggttctcaacaccttgctactcccaggtgtgggcctcagactaacagacatcacctggacctggttagaaatgtgtctctcagataccaccctggac

SEQ ID NO: 8878 - DNA, 3943 bp, Homo sapiens
tgacaattcaaattcgaatatcacttgaaaagctcttaagaggaaataataaattctttaccttgttgaacttcaaaaaattaacatttggggctcaagagactctccaaattggctgtgtgaccttggataagtaacttaatctcaaaatctctcatatcaaaactgggggattagtttaagtgatttggaaaatcccattcagttttaaaatcctgtggttctctaatttttttctttagctttgttttccggaaagttcgaagcttgctagggggaaatattcgtctcctgttgtgtggtggcgctccactttctgcaaccacgcagcgattcatgaacatctgtttctgctgtcctgttggtcagggatacgggctcactgaatctgctggggctggaacaatttccgaaggtagtgttctccatggtcagaggctggagtgtgatgccagacgtttttttggggtatgggatattttctgcaaatatataggagaagagtagtaaggtgtttgtgaggcagaataatggtggattccaagtactatgatcattgatatcaatttttagaatgtattagatgcatctggagtcaataatttatctggagaagtttttatatcaaactgataggtaatattaaaaaccacttagcattttggaagagaaactttagtaacaaacactgactgttttgtgtacatttattttctcacatcagtgattaaatttctttttatgtagaaaacttaaggtgcttttgtttatttgtgtaggtgagtatattaaggctcaggttcagaaatgtttatgaggatttctgtaagtgttagagaaggaactaagttctggtctagggaatattattaccagagtttatcatgtggttgtgtttgaggaggagatctaccaactaatcagcagttctgagatgaatcgcatagggcctcatgcgtcccttttatgggagaaagttattttgctttccggtacaggatacagctgtgcttctcctactttgtatttgccatatacggatagatacaaaacctcatgactgatttttccctatttattttgagtggctctgtataccattttcatgtattacttcatttttctgtttttcagttatgttctctgttttcgtatatttttggaagctagttctaagtcatgttttgtaggaaataagcaatcttaaatacatgcataggggatttctttcttctgaggatccttaatttcttctatttttaagattcaaattgaatgattaatcagtaacagtttatgttttaaataaaagtctttaaaatgttaaatatcagcctttcatttctgatatttggtctttgaagaggaaacataatgcaatagtaattcataatagtggagggttctttcctcacatccttgaaagccaccagtcttattcttcagcctggctcttgagctattgctgtattaattttaaatagggtgtgatagcataagctgatggaagcctgcagagatctcactttgaaatggtgatacattacatgggaaaagattagagaggtgttttatactgcacatcggtgaggcctaataagaaagtagaatagacgtaaaccattgttttcatcatcctttaagacagggatttcaaactcaagaaccaggcagctacctatttaaatgagtcaagtgggccctaatgtaagacaatgtgatgggtaaggattgattctgagggaacaggagcaggcatgccctctctaacagaggccgtcagttctgctgtacctgaaatgtgggcccattgttgctggcgattccacacttacatctaaaatttcctgattttttaagaatgacaataactaatttaaaaaaaaaaaaaaaacctcaatgtaggccaaaaaatacgactctacaggcctcacggcctgtgcttcaccaatatgtgacttctgcttttaaggaatagctggggatacctcagccttaggataaataatcatttttggtaatttagaaaaatgaagcagtgtattagctactgttctcaaatatcctttttttcatttaattcctagtgtgggactacaatactggcagagtgggagcaccattagtttgctgtgaaatcaaattaaaaaactgggaggaaggtaataaactattttaaccacagagcattaatttttaaagtattaaacttgaaaattagtgcttcactttcttgctttagaatgtaaacacccataagtgctcatttttgtcctttgtgatagacgtgttttatctcgaactatatgaatgcatttatttttcttgtttcaaagatgtttctgaagaactattattgttttcattttacttattacgtagatgcaagtaagaattatggcaaaaacttgagaaatgtactaataagtgaataatgtcaataaattaggagtgatcataactttattttgcagaagtaaaattataaaatttattttatgaaattgtggatttttaaatgatttttttctttttttttctgagggcttcaaccttgtattattagaaggaaattttcactgcaattccatagaagtctgtttattctcatgccatttaaaataatggtcacttaaaaatttatttgatcctgttaaaatatacaaattatctgtgttttattgggatgcacctttcctctacattaagtaaagataaagattctggccgggcgcagtggctcactcctgtaatcccagcactttgggaggccaagacgggcggatcatggggtcaggagttcgagaccagcctgaccaacatggtgaaaccgtctctactaaaaatacaaaaattagccaggcgtggtggtgcgtgcctgtaattccagctactcgggaggctgaggcaggagaatcacttgaacccgggaggtggaggttgcagtgagccaagattgcgccactgcactctagcctgggtgacagagcgaaactctcatctccaaaataaataaataaagaaagattctaaggcttggatgtcttttagctatctttagcagaattagtgggaatatttaataaatttaggcttggagtcattttgaaattatctataagaataaatcttaatatgtagtaactcactttttttttttttttttttttgacacggagttttgctcttgttgcccaggctggagtgcagtgtcaatggtttcggctcactgcaacctccacctcctgggttcaagtgattctcctgcctcagcctccctaatagctgggatttcaggtgtgcgccaccatgcccgactaattttttgtatttttagtagaggtggggtttcaccatgttggccaggctgacctcaaactcctgacctcaggcgatccaccctccttggcctcccaaagtgttgtgattacagacatgagccactggcccagcagtaactcattcttatatagggatttgttctattaattgcatgacttaatacttctgtcagtttatcaatatgatatttaagatgttgcagaatctttcaaataatttgtctcttgtatttataattttatacaacaaatggaagatgttgggttttagagtttaatttttttctcagaatagaagtttgaaaacataaatacttatggtttagcaactgagattttgtgcctactgttaaattgataaactttgttcattcatagtgtctgccttttttcctttgggaagttctaattggattaaaataagatgactgtttagaaactagtagtttcaaattttcatgtgttgtatttaactcaactattaactcaattattattttattaggtggatactttaatactgataagccacaccccaggggtgaaattcttattgggggccaaagtgtgacaatggggtactacaaaaatgaagcaaaaac

SEQ ID NO: 8879 - DNA, 1239 bp, Homo sapiens
atttgagatatttccttttgattcagacgtaacactgtgctttcaagcttaacatcctattattttcctatatatagctagtgtttatgaaagtttctctactccttatttttaaatccatataaataaagcatttattggatttatactgaggttgaattaaagaagtgtaagtttatttttagcatcgtgagaagtgtctcacttaaggtagtttttaatctggttgtgtttgcaatgaaacaatattagacagttttataattgatttctttctttttcctaccatttcatcagcaagtcccttcagctctttcaaaataaaccctgaatctgatcattgtggtctgaatcactattatattttgccagaactgctacaatagcctccaaattcttttttcctcttttcttacactcaattaatgaaaattttaccttacccaagtaaaatcagctatgcccagtgatcttttaaagacaaatcagattaacattcacctgctgaaaacccttcagtgaatttctgtctcttctagaataaaatctaaagtctttattgtggcctccaatgctctatctagtctggcccatatctatctctaactgtatctttgatcaatctctatcttaatcattgtgttccaggcacactaaccatctcgctattccttgaatagcatatttctgtctggaatggtcaactaacagcaaagaggacagtgtggttggataggaatgagagagggaggaagagggtgatgaggttacagaggtaattaggggaaagattatatggtcttataggccgtagtagtacttttagatttttctctgaaaaaatagagagccattttagggttttgaacaaaggactgatatcttccacttgccatttaaaaggatcattctggctgttgcattaagaatgactatagaggctgggagtggtggctcacacctgtaatcccagcactttgggaggccaaggcgggcagatcatttgaggccaggagttcgagaccagcctggccaatatggtaaaaccctgtttctactaaaaatacaaaaattagctgggtgtggtggcgcccacctgtaatcccagctactccagaggctaaggtgggagaattgcttgaaccagggaggtggaggttgcagtgaactgagatcatgccactgtgctctagcctgggtgacagagtgagactccatctcgggggaaaaaaaaaagaa

SEQ ID NO: 8880 - DNA, 1239 bp, Homo sapiens; identical to SEQ ID NO: 8879

SEQ ID NO: 8881 - DNA, 1674 bp, Homo sapiens
gaaggatggaaataggacccttgagccgattactccgtgatggctcagactgcatgcaaagactaggatggggctcttgctctggctcagtgttgggcatacttcccctcagaaggcccccgccaaagagcttagattttggcttgggaaaaacattacccctcttcagtaaccctgaagctctgtatttggtatttgggattcaggtaggtcagctgctcatgttgcctggcccaagtgtgtaagaacaaacagtaatgccagtcattttcccactaagatgttccagtgggaaggggggctggtatgaaaaagagaatttttttttctctgtgtaatgataactttgttcacgtagtaagaattcagttcttactattggtgtgaatagggggtaaatattatttttatttaaaagcaaaattaaatactttctgaacctcatccatgtttgcaagtagatgtctactgtggttgccttttttcctcaagagaatattttaataaacttgtaagtaattttgttacatttttctgtctgcctgtgtactatgtattaaaactcacatgggggctttcatgataaaaagataaactgttaagcagttggaaattttcagtgttcttccagtggacacctgccttggggcaggagcttctttgtagtcattattgatagaatggggtcacacacattgtgctcctgcattaagggcagctccaaggtttggcatgagactatgcatgtgtgtggacacggaggtttctcagtgagaaagagtcctaagacagtgaagtggaacgaggccttaaaaatcatctagtcagctgacttccagtttcaggttctcaggctccttttggtattttaggaagcccacattggactagagagagacttcagaccaagatatcatgtttatgttcttttagctagaattgtgttaaggcaatgactatctcctacagcttagaagttctgaagtacatggccaggagcggtggctcacacctgcaatcccagcactttgggaggccgaggcgggtggatcacccgagctcaggagtttgagaccagcctgggcaagatggtgaaaccctgtctctactaaaactgtgaaaaacacattagccgagcatggtgatgcatgcctgtaatcccagctacttgagaggctggggcacaagaatcacttgagcctgggaggcagaggttacagtgagccaagatggtgccagtggactccagcctaggcaacagagcaagactctgtctcaaaaaaaaaaaaaaaaaaagttctgaagtacagttatatatgtatttgattaatacaaaagtagagaagttaatcactccttaaaaaatgcagtttgggaggccaggcacaatggcttatgcctgtaatcccagtactttggaaggccgaggaaaggcggatcacttgagtccaggagtaggagaccagcctgagcaacatggtgaaaccccatctctacaaaaaatacaaaaattagctgggtctggtgacgtgtgcctgtggtcccagctacttgggagactgaggtaggaggttcacgtgggcccaggagattgagacttcagtgagccatgattacaccactgcacttcagcctgggcagcagagtaagaccctgtctcaaaaaaaaaaaaaa

SEQ ID NO: 8882 - DNA, 1674 bp, Homo sapiens; identical to SEQ ID NO: 8881

SEQ ID NO: 8883 - DNA, 153 bp, Homo sapiens
tataaattgaattatgtaatatgtgatctttgtgattggcttctctcagttagcataaggttttcaatgttcatacatgctatagcctgtgttagtactttgtttctttttcttgccaaataatatccattgtaggggtatgtaacattttgt

SEQ ID NO: 8884 - DNA, 153 bp, Homo sapiens
tataaattgaattatgtaatatgtgatctttgtgattggcttctctcagttagcataaggttttcaaagttcatccatgttatagcctgtgttagtactttgtttctttttcttgccaaataatatccattgtaggggtatgtaacattttgt

SEQ ID NO: 8885 - DNA, 230 bp, Homo sapiens
cgggcggatcatgaggtcaggagatcgagaccatcctggctaacacagtgaaaccccgtctctactaaaaaatacaaaaaattagctgggcgtggtggcaggcgcctgtagtcccagctactcgggaggctgaggcaggagaatagtgtgaacccaggaggcggagcttgcagtgagcagagatcgtgccactacactccagcctgggtgacagagtgagagactctgtc

SEQ ID NO: 8886 - DNA, 7029 bp, Homo sapiens
attggctacaaacccactggtataagcagcagtgtgccttctctctaactgtggacaagtcgggcatgtggcgggtgaggagccctgggctgggcactggggcacagtgaatggggcgggaggggctcacatcaaaaccaaaatggcacgcagcccaggtctggttcctccatcagtgtctctttcctcagcgcttttcttccgaggtaactttgtgaagcttgacttggacttgcctagccttggagggaccacaacagggaggcctaatagattatgaactaagccctcaaaagggctacctgcccaggaggaggaagtgggcatctccttccacagtccctgcctggcggggctgttcagggagactgagttccgagctcaggatgtctggcaggctggctgtgacttccagccaccatcaccaggacaccggtgtgggctgcatgcctcagtgggccaggagaggcacggcctctgagttgggtagaggcttcccacaaaggcctgggaacctgatcctggccgtaaatctgaaagtaccacagccctcaggagaaccaagagatagggaggcaggctggggaaatgtcatcaatgtgcacccaggcgtggtggagctggtcagccccagctggagtgggaccccatcaagatggagcctttcctggcacctccgggaggccgttttgcgtttccgcccttcatgcatctgaaacaccaagggccatgttccttctggtgcttgtccttttgagcttggtgtttcagccgtgtctgttttgtagactttgattttgtcttaaatgagaaagaaagctggtgaaggttatttcaaagttaaatagctagtctgaggggcttatcactgaagccagttgtgcttatgtggggtgggagtgtcactgcctacttgaaagtatgcacttgtgtggaacagattcagggtggcccctagcacttggggctgcgggagcttctgcacactttccctttaacggtaaagagacaagcttggagtgtttaagtggttcgttcaggagcacagtgatagcggtgacaaaggagatttgaacccacgtctgcgtggctccaaagttcactctttcatcactccctgctgcgtccttcttgaggctttagcatttttagtgtgttttgtgcccccagacctcagagttgacatttagcagtgataaactgctgtaaatccaaagaacgtttagtgtctcttgtggtgaggtcctgaaatgattgttgtattagtcaaacagaatgatcatggagcatgtatggagatgtcagatgcaatccctgtattgtaaggcaatgacatttaatgaaggataagatgaattcacagataactagaactcagggccaaacgcacacagcctgtagcaacagtgtcatgctgagatttaaaggaagaagaggtgccgtggcagaactccacgtgaccgtcccctccctgcacgcagccaggatgagaggagcagagctgagcgccacctccctgtcggtgccacggctgaggtgaggagctcttgccggatggtggggtgggggcagcagggcagattgaagtcagggattctcttatacctgagtttggaatgcctcctattcaaacaaagcaaaatatctaacagatggttggatatgagtctcagggaggaattcaatttgaaaagcacagaattaacatgtattgcttatatgaagaatctcagctagaataacaaggtcggatgggaggaatcaggactgatttgaagcacgatttactaaatcattctttccttttcctccttagcagatcataccgccagctgcttaacacgtaatagtttaataaattgtttcttcttacctctcagtgagggtaagcacatgcagggagatgggtgagtcttttaaatggatagtgtcatctctgatgatcagccttgacagggagagatcctagtaaagctgcaaattcaggcactcagttcccagccctccagttatcaagggggtgggaacgctggtgggctggaaaatgtggaacagacctgctcctcttcttttcctgccaattaccgtattcatagaaggttgtgtctgtggatcacacctgtgtgtgtgctgatggcggatgcttgtgtagcatagtgacttgggacaaaacagcatggtagatgaggctggagacgggtgggctaagtaaacaggcattgcattgcacattttgtgggcaaagaagttgaagcatcgcatgattttaacaaattacttgccagatgatttcaacacactgcaaaatttagaatcaataatgccaaattggccacatgatttatataaaaccaagtgctatggttttaatattatctttagaggagaaaccattttgatctgtgtccaaataactcttttttttttttttttttttgagacagagtctcactctgtcgcttgagctggagtgcagtggtgctatctcggctcactgtaacctccgcctcctgggttcaagcgattctcctgcctcaacctcctgagtagctgggattacaggcacccgccaccacgcccagctaattttttgtatttttagtagagacggggtttcaccatgttggccaagctggtctcgaactcctgacctcatgatttgcctgcctcagcctacaaaagtgctgggattacaggcgtgagccaccgtgcccagcccccaaataactcttgaactggaaaataactctttagctatatactggcagaatatttgaacaactctagcaagaaatgtcagtttagggatgcctcctctaaatgggggcttagaatataacattttgcaggaagtcctttctgatacatagctgactagatgaaggaccagattaacaagttcatgagttgtaaatataaaagttgtgtaccacgataaaaaagaaaaagaagtatggctgcactgttgatggctggtcaaacagcccccaagaatcctggggtgactccaatactgccaccttttctctgtgggtgcagttgcctgcggatgtgtgtgcacatctgtgcctcggtatgcacactcgagatgcccgctctcatagacggtgcagagcgtcactgcattcctatctgattaatgtgaccttagtgttgtagatacactgtgtcactttcatcctccctcctccccacaaaagatgccacgagaactcgtgaactgtgataagcaatgaacagaataactgttgaagaagcacctcatgaacctccccagagaaacgggatggaggagcacccagggtgctcttgctctcttgcctgcgctgccatttccttccagcctgggtttctagctctttggggagattccccgttttgtggaatgctttctgtgtttcctacttctggatgcctaaggagtggccagtcatactcctggctgaccactgccaggcaccgtggttttcctcactgaactcaaggagtcaccctccgtggggaggccacactcacagctccaggcctgccatttagcccttggggcttggctgtaaagttgcccaagaggattacaggagctgccagccaagtttaatttggccaccttagagaactgcagcaaggccctatcagcttcccattagacaaacaactgcatttaaattaaataaagtttgcacctctagggagtgctgacctgaaaataagaaccttctgtctgtgattatagagtacacttgcttttattaattgctgattcttagtttacaaaaaaaaaaattagaaaagcattaccatttactttccaaggggcaagagattctctacaatacccttcccccaaccctctcctcaaatttccaaatcctaaatactttgaagaaatttgtgtgactgtttaaaattgagtatttccttctaactattgtcttttgaaaagggatggttcaccaggccagtgatactctatggactgcattttgggacctctaccccagcaaggatacaggttcctggggtcttgaagatgggaaaagttgtctcagaatttacccaaatgtcgttctcaccataaaagatatacttgtagaaatgagaagcttcagtataactcaaaacactggacgcagcaataactataaacattttaatttcaaaaacaaaggtgtgtgcgatgttgtgtgcacagtaagggttgcggggcttggagaacaagcacgcgtccctgtgaagcccgcagggtgctggcggcccaccaatcgcctggactacagtgaggagcattgtgtgactccgcggtggatttccatgcaccgaatggactcagtttctaaactcacatcctaacgtatcctggcttttcacagaatactggagacatgactgcatgcatgatcacggttcttgttgtgaagctgccaccatgttacgcttaacagctgcataaatattataaagaaatagggttttcttgacacttagatttaaccttaatgcatctgcccagctgatggtatcagacgtgctgctgttcatttctttttcatggtaacagtaatgtataaagtgccgatgatgtaacatgcagttgtcttattttcatcagggcatttgtttcatggctctgttgagttgttttaagttagtgaatggcttttgagatttcagattctggaacatgtgtggtgctgtccgcggtgtgccgctctgggcagcgctgtgcctggccagggaggtgtggtgtggcttctttgttgcttttttttgtttccccatcatgtgaggtttttttgttgttgttgtttgatttttttttttttttttttttttttttcaaaaacctgagatcagttctgtgttctggaacagctctccttttccacaggaggagtccctcatggatcgcggtattggttggttgtggtgatttggggagcacgagggagagcaatgcaggtgggaggtgtgggggagccagcctccccgcccggccgcacgcccgtcactgctcgtctgacacactttgctgcgaggccgtgtcgtccaggcccatgtcctcctggcttgctctcctgcagacaaccccgagagtgtccgccacagcctcagccagacatcggtcatgaagctgcccctgctcggtggcatcagggggctcacatggctcggagaggtgcttccaaagagaagagagaaacagtgaacagctcagcaaacgttcactacccacttctaactggcatcacccccatccgtgctgtgggagctaaaggctagcgctgccatatccttgaggtcaggttctaaagtcaggtcaaatgatagagggccagcacagtggcctctgaggacaggacgggcaactgaagcagcatctgagacacaggggctctgcacgtgggcctttctggatgactgcgctggaaagagcggccctggggggaaggggcatttgtgcgcctggctttctagctgtagtcagtgtcacttcatgcacacttagcccctgtcatgaatgctgagttctagcaggcttgaccccagtagaacacagaggccattgtattctgggggcatgtggtccctacgacaattgtccattttggagagcaggaaggagaatttgacagaatcccagaactacacccatagattgtgactttaacacagattggggcatggagaagggtgatactttgtacatttttattgaggaaataaagaaaagggaggggaaatgtattcttttagttatctaactaaggtcaaactcctgaagtaaccacctctttcctcttggccaggacagcctgggggttccaggaaagcccataaatctccccttccatgaaaggtggcacccatggctgcaatcctgtggctccttgtagggcggccggcccagccttggcttcccctggcaggaaggtacttccctggagagctgtttcccatgaaggagagggagggtgacactagaaatgttcaggtgcagccccccgtctccacctgcaaataacctcacccagaaccagaggccaagccactgcaactctggtgcttgatggaaagcatgagccatggtaaggaaaacctgaacactcaaaaggagtgggggaactctccaaacctgacccatttttgccttgacaccatcgattttccctgtctaccaggtcacataggagcactgctgggtatttatttacttttttctcactgaagaagctcaagtattcatttcatctcagctggtttgggattctggacaagtaacagcttatttgggtgaagtccttagaactctccttgtctagtatttaaatacctaaaagcagtgggccatctcagcagctttaaagtcaaatcgattggctgagaagcagtgaagctctaactccagcattgacaggtgtcctttcctctccctcaggccagaatcatgtgagaagagtcctgctgtgtgaatgggtggagggcattctccgtcatgccccggtgtagggcagatggccacagttctgcagaacctctgtatccggtgactcctttcagtgcctgcctgggcattatcgtttacaggatatctgctctgtatcttgtctgctttcaagagcagctaagccacttcgtgtctaatcactgtcctttgtcactctgggagccccatagagaaggggatggggttctgcaggcagaagggtgggaacgcaaggcaggtgccacgctcaggccaggagcccgtgccaccatcccagcctgtcctggtgagccctgcccagccccttacccgagtggcctggctggcagccctggctgaggggcccatcacgatgttgacgctgctggatgactgggtgtcactggtattgcccccctccgcagcagagagtccggaaatgacgagcgcgctggaaaagctcctcttgccgaagaggaagctcagggtggagctggtggaggagcccaggctggacctgatgagcgcctcggcccgctcacggacactcaggtggccggtggtgg

SEQ ID NO: 8887 - DNA, 28215 bp, Homo sapiens
gggcggggcctgcgacacgcggtgggcgggtcctgagtcgcgaccctggtccggacctgacctgaattgcgaccccaacctggactgctcccctgaccgcaacccctacccccgcccaccagtatggcccggcacgtgttcctaacggggcccccaggtaaccctgaggggatccccacctccaagaggtcgagggggtgggggcgcgcgggctgcgggcgaccttgtgctgtcggggagggtctccggctccagggctccggcctctgaagttcccaatttaaatggcgggcttggtagtctgaagagtttgtactccttcccggaaaacgtgatttaaaagacacagggcctaaaggattagaacacacttgtgagggggtcctagactggcttcttgatgaagggcagaaaccgcaggggccagcggcagcggtaactcctactgtagtgttgacgttgtggtctgcacaaatggtatttcaagagatctgcggcaaccgcgatgtgaagtggagatgtctaatttctgttgatagtcacaggtatttccttactgtgggtctttgctacattgatcgtgcaaaaaaaaaatggtaaattttagttggaggacagcgaaactgaagttgtaacctttctttcccatctaagttcatccccccacccccatccccatctccatccccacgaattccctccacagctgaggccagaggtggagaagctttggtacctacaggagcccttctcagacactcttgcttgttcctgtcgctgtcccctcctgatgtctgtcagatccctcaaccctgtggcctgtggagttctcatctgagaagcaggatagcgttgaggtcagatgagaggtgtaggaggaggtgcttttaaaccaaggcgctacccatgtatcaagcattactaaaaaggacaggtaggctgcatcagataggctaaaaaaagatagatgggctaagagtggagaaagtgatttcttcagctcctttgcaaggcaaatctaattttgaagtttagtgtgggttcagatatcaaaggctgtaaccctggatctagaattctctttcactttattttaatgattatgtttagttgtaagtagcaaaggctacagctaatattgcagactttgggattttgtcaggcattggatgggggagttggggagcagggggtgaggaggaggagggtggtttgagaaatgcctgctatctaaagtcactcctaagtattgcaaagaactgttttctgaaagttggtttgtcaatcctttatttgaaacttggaatgcagtttgatactcagcaggctgaccccaagacaactgtgtgttttattaatggaggtgtcctgttaccgtgattgtattgatggtggttcttgtttctgctttatcaaagtcttacctacacgtagttgaaagactcaaataattctacagtgtagctctcttaaacctgtcctcaaacccacgcacctttgtcttttctccttctcttcttaatgtagttacagcgtaattttcattagtcaatgtttacagtattatggccatgtaaagacaatcacaacagagccacatagtaatctatgatttcttttccatttatttatttattttagagacaggatcttgctttgtcacccaggctggagtgcagtgaaacagttatagctcactgcattctcaaactcctgggcttaagtgatcctcccacttcaacctcctgaatagctggatctacaagcgcatgccaccacacccgggtatttttttttttttgtagagacctgtctcttgttatgttgcccaggctgatctccaactcctagcctcaagtgatcctcccatctgggcctcccaaaatactgggattataagtgtgagccaccttacccatcttttttttccctcttcttattgagacagggcctctctctgttgcccaggttggagtgcagtggcacaatcttggctcactgcaacctccaccttccaggctcaaaccatcttcccacctcagcctccctagtagctagtactacaggcatgcaccaccatgccctctaattttttttttttccttttacacataacttttttccccattaggagttattgtcaggtgtttttatttgcctagtttctttctgttttctcaatatgttcagaccatcaggtaaagtctcctctcaaagaggtcactttttgttgcatatcctcttagtgcccctggcacttagcattttttccgatttccaactgtctgtacccatgactcatcttggagggctttctctggtccctggagcccacttggcctgcaaacagagcaggccagaagagccagggaattcctgtgccctgggattagccttcaacctgtgattggtgaaagttagttgataaattccctactttctcactcctcagacaggataactgagccacttgccctgacttgtcccttaggattccccagggggttgaagctccagctgcccccagtggaacttgcttgacagtgcacctcatgctggtgtccttcccttccctttctgaatttcttccctgccagtccatcatgttgtcactgcccaggttaaactacctgcacttgaatctttatctgaggatctgcttaggggagaaccagaaccaaaataattccagagctttctgatctgtttgtgcctggtatacagctatcatctcgaggtctcctgaagcagaggtcatttcttatccagacagcattggggtagcagcttaactaatgaagaaaaaattaactgaaagaagattcctagagctgaagaagccaaaagggactttgcccaaatgcttcctatttattgctctactatgttctacacaacatacagtccccacagtataccctttgtgaacaggaatagttaccgttgctccattttatctttttcaaaatataaacggcaatttttgttaggataagagtaagacccattcagtataagaattaaaaaaaacaagaaaagtttaaggaagaaagtgacaatcacagggaatttgaacatcagaaatcaacattgtaaatctttgttctgtattcttcttgacattttttttttctgtagacacgtacttgaccattctttaaaaaaaacataatggaatggtttctgctattaacctgctttttccatatattattttcatacattgtggtctattttccatgctaataaatacatataagcagtatattttttaatggttgcatggtatttctgtgtatttatgtgctattatatacatggtgccatgagttaacattcccttacaatcaacatttaggttgttttcagtgttttgctattataaagaatgttgcagtgaatgtcctctttcacacatttgtattgttgatgtttcctgaggatgaattcctagtcatgaactacagggtgctgtggcaggcgcattgaaattgcccttcagaaaagaagtagcagcttacacattcggcaatgccattacttgcatgaaacagattctttagtgactttcctaaagcagttgttactgatggccagggctggattagaatgtcatcattttatgttctacacagttctaccagctgcatgctcactgtggcttactgtagccagaatcctgttgtgttgctgttcatgttccagaaagccaggtgccattattttaatgtgaagtgtgaagatagatacattaaataagaataatggatcatattttatgtcaaggaggcttaaaagagtgggtagtcttagaaatagcatgatttgcaactctgtagtatctcaaaatagctcacttgcagacatgctaggagttttctctctctttccattgttgggtagtcatgatgccacttacttaaatccatattgggaacaaggctcatattttaaaaagtcatggtgacaggtaaagtcccctgttgaaaggtatggaccttatgaggggtatagccttgggtaaaatacctaaccaccatgtacctcagtttctccatctgtaaaatatgcataaggatggtaattgcctcagaggatggttgtgaggacttaaccaagaaaatgcttccaaagtgtgctagaacagtgtctggctccatgacgtcagtgatgagtattactatattaggtagcacctgttggtgcttacaaaccagtgagttcatcagagtagtcagctgaccaggctggatggacaggaaggatcaaggtggggaggctgagggggcagaggtacataggttcaaactggggaaggtgtgggggataaaggtgaagaaatgcttagagaccctggagaagatgatgttggaaggagttgctaacctgataggcttgctgttatgaaaaagtttgaaagtgaccattaacagggatgctaatgatatttaagagacacattttcaggagttacaacaatgtaagtcaaaggaggaacaaagtgattttcccactgttaagtgtaggtccgtttgtaatctcttgaaagctgaaatcttaaattcccagcccctgactcaagtgtgaccagtgttacttcctgggcagaaaaatgggaactgtaaaccatttcacaggatgcaaatggcatgggagaatatcatcaggaacctctcagttgattctgggattgtgtacgtgacaaaattaacaatgtttcacaatttaaaaataaacctcaagatatcattcgtgtttttattatgcttgtttctacttgaaattaagcatttttagcacctggagcaatcaaaattaaattgaagttcatattcataaatccatttacagcccatttctctacccaccataattgctgcctcagagtccacaagtgctgtgtgtgctctagtaagggaatgtttcctaatgggcttttcttctttttttttttttttttttattttaggagttggaaaaacaacattgatccataaagccagtgaggttttaaaatcctctggtgtgcctgttgatggattttataccgaagaagtcagacagggagggagaagaataggattcgatgtcgtcacgttgtccggcacccgggggcctttatcgagagttgggtactgatatttcatttctgtggtgttctattatctaagctccccttccatctgtgctttgggagcttttcaacaagagctaaattcaccaaaagcagatactctgttgggtccttggatgcccatctgctttccctttaggttgagagtgtctccctgggcacagggttgagccaaatgttgtcatctatcctcaagaatcttaggcctttagggatttctcagagaaagaaaacagaatgaaaccatcacatgaaaaaagtataagaaagtgatattttacttaaaacttgttcaccaagtcataaactcctctcactttataattcttagtcctgtttctggtgccacttttcaaagactgttgatgcagtagctgcttggaccttaagagatagccctgccataactgcaaggcccattgttggaggtgtggacactttgaacagggtagctctgttcaaagcagagaaaacctgatcagctttacagaccaccgcattttgtgttggtcatttttaaggatgatttagcatatgtggaatgccagaggctcagtggagcagctaaaaaccagaaatcaatacaggagtttttcaacaaagaacataatgtcttttccttcaggttagagcctccacctggaaaacgtgaatgccgagttgggcagtatgtggtcgacctgacttcttttgagcagttggcactacccgtcttgaggaatgtgagtacgtgatttctgctttttgaacccatctgctcttagtgtattgtgggaattgctagccatggaaacagaatgccttttgctcttaaaggccccagttttgcattttacaattgaaaagattgagtcttaataaggataaacaacataatttgctatcactctgagctacagataaattcctataaattcagtacatataaatattttattttggaaaggctcttgatgcccaggtaccaacattcccaaagataagtctttcctctgtcttctcacagtcatgtcttaacctggtttcacagcacaacaaacatttaggaagagaaaatgtcattatatgaacataatagccagttgttattgaatgcctaccaagtactgtaagcagttaacgtattatattattatattaccttttttaaaaaagaaaaaaactttattgacatcttacggcttctttctttctactttgaatgccttttatttcatttgcttgcctaattaccctggctagaacctccagtccaacattgaataaaagtggtgagagtagacatccttatcttattcctaatcttagaaagaaagtatttagtctttcaccattatgtatgatgttaactgtgtcttatttgtatagagtttactcaggcgtattttgttgaggatttctgcatctttattcacaaaagatatggtctgtagctttcttttcttgggatattgttgtttagttttggtatcaggttaatactggtctaatagagttaggaagtgtttccttcttttctaatttttggaagagtttgtgaatgattcgtattaatttttctttgaataattgatagaattcactagagaagccatgtgggctaggtttttcttggtgagaagcttttaaattaccaattaaatctctccttataggtctgttgattttgtatttttttgttgaatcagttgtggtaatttgtaccttttagtaatttgtccatttcatctgaagtatctaagttattggcatatagttgttcatagattcacccataatgctttttattttgtaagattggtgatattgtcacttctttctttattttagttatttaaatcttctcttttttccttggtcagtctaaaagtttgtcaatttagatgatcttttcaaagaaccagcttttgttttattgattatgtagttttatgtatctatttatcagatatttatcaagtactgcatatacagtcatgaacaaaacagacatgtttctactctttcaaaactgttagtctagtgggaaaggtagacactaagtaaatttatacttgtcatggtcattaatgctgtgaaagaaaagaacagggtgctatgaaagggagggacaggaagaactgactttagaccaagggaccaggaaagagttctgggaagatgacatttaaacagaaaggaacaggtgagagggcattggggagagagagttagtattggggtatttgtatgtgtcagggtggggaggtctggggagaatattctaaatggcaggaacagatacattcagacctcagagccctggagcaggagcaggtgaagaaggtaagtttggtgaggtggggggccatgagatgcagggctctgtggaccatgttaaggaatgtgagtgtcatttaatctattacagacttactactttgatttgtgaaaattaaatgatacagacctgtctcaaaaaccaactataaactatccagagttttctatggcaccaagaataaagtccaaagtccttccagtggcctagaaggccctgtagccctgtgatatctggccttactaacctctgacctcatcttgccattcttcagccacactggttcaatcagacttcccacatatgccaggctgaggcccttggcacttgccattttttttggtgagcacgctgtcttcatagatctttgcctctctgctccttgacattcagagctcagctgaagtatgtagtggtggttgcccaaaggctgctgaagattttagctatagcctctgaggatatcctctaatctcagagggctggtggtatcttatggtctgtttcagcagggggttgtgcttcttggaacccaccaagttctccttttcttcctacgctgtgtttcctcctcccacctccttcttccccaattccttcctcttggaacttaccctcagttcctgtgctggggactctcgtggccactgtgttttgcgggagcagagaacatggtacttttctttttagctgttttcccgtcacatacattcctctctacttaaatgttcaaaagtcaagtgaaatacttcaaatgaaattccaagtgaagattctggttttaggaactgactgggtcaatacaaagaattttttacttaccctgctcagacagagtagaccaaatcctgggaggagagtttgcacaggtgtttagtgtctagatgcaagattatataagagatcatatgctgaccagatcagagcataaatctgttttttaattaaaaaataaagaaatacagacttctcccaacattttgtattctgattgccaaatgcagacatgtacattccatgtagaaaaagttcctggcaggggatttgatatgatttggctctgtgtccccacccaaatctcatcttgaattgtaatccccatgtgtggagggagagacctgaagggaggtgattggatcatgggggtggtttcccccatgctgttctcccgatagtgagggagttctcatgagatccagtggtttcaaaagtggcagtttcccctgcactctctctctcccgccgccacgtgaagaatatccttgcttcccttctgccttccaccatgattgtaagtttcctgaggcctccccaacaatgcggaactgtgagtcaattacacctcttttgtttataaattatccagtctcaggtagttatagcagtgtgaaaatggactaatataggattctcacccagtcagggtcatggatttcttttctggagcagaaatttttctcccatcatacatattttatgggaatgaagaaaggagaaggaactagtgttttgtctttatactaaagaaaaaaatgaaaagaatattaattaaaataattaggcaacaaaactggggagtataaacacaccatttttgatactggcaatgaaaacaaccaagtaaactggaagtgttagaaaccctttataaagggacacagtattagttcatagtgctgggatctatgaaaacacaaattccgataataagaaatatccattgtgtgtaagaaatttcaatatgtatgagtgaaagatagtttgagggttgtatgtatgtgtgtgtgtgtgttttaatactacaaaaaaataagaaaaaagtacttctctaattaggccaagcagggctatgcctatttgcaggtggggaagtaaggatgtggctgggactggttgcagcggctcatgtctgtaaccccagctctttgggagtctgaggtgagtggataacttcaggccaggagtttgagaccaggctggccaatatggtgaaacccagtatctactaaaaacaaaaacaaaaatcagctgggtatggtggcacatgcccgtgtcccaggtactcaggaggctgaagcaggagaatcgcttgaacccaggaagcagaggtggcagtgagctaagatggcaccattgcattccagcctgggtgacagagcaagactccatctcaaaaaaaaaaaaaaaaaaaaaaaaagtggccgggagctgaagagcagctccaggagaggctcaggagggccaggcacaacccaggttcaccttgcaaaactgctctggttatgtttcttgtttctttttcttttccttttttttttttgagacagagtcttgctctgtcagccaggctagagtgcagtggcgccatctcagctcactgcaacttccacctccagggttcaagcgattcttgtgcctcagcctcccgagtagctgggattacaggtgcctgccaccgcacctggctaatttttgtatttttagtagagacggggtttcaccatcatggtcaggctggtctcgaactcctgacctcgtgatccacccaccttggcctcccaaagtgctgggattacaggcgtgaaccactgtgcctagcctggttacgtttctttaggcaggaatggagcctgagcatcgtggtcgctcgtgagaaataaagaaaaatagagtgtgtgtggtaagtgttctagactcaggaaggtttttggaaagcctctagtagggttgactgttaatttttttcattccatgagttaactctttccttatttgtcaacatttgttattttcctgagtattcaagttctagatattcatggttaaaaaaattataaaaaatgtaaaataaaaataaaaaacacaatgtgaataactcataatcttatcactaagttagccaatgttagcttattttgtttctgccccttttgtatacctggtttatttattcagtcattcaggatcagggaaaatgttatgtatagtttcataggcttggtgtgtttcccttaatatgattgagggacatgggaatggtctcacaacatgctaatcttcaaagctgggagattttagtggtttcatcctatttcatggtatgagttttcatctttgatttaactattactccctcagtgttgagcattcaggttccgtatcaccattgtaagtaaccttgcaacaaagcaccctttatacatgaatctttttctctagccatgattgtttccctggggagggtctaaaaggtgaagtctgagatggtggggtgtgaaccttcaaggtcttgatggtgctgcgttgactttgtgtcccactgccagggtgtgagtgtgcttgtcttgctgcgctgtgccagccctgagcactctacttattttcaacacactgctttgttttgatttgcatttttcagttactaatggggttaaatgtttttcagttgttcattaagttttccttaattttagttgttcatccattgctcttcccatttattttctttgggcttaaatagatgttttataaagcagatagcctttttatattattgattctgtttttctcagtttagcacttcactttggtgattattttcccttcaaggtagagaaaagtctgtccctattccaaatttatataaaattttacctatatatttcttcttctgcatgctttttttaaacatttatgttttcaattcatttggattatgttgagtgtaatatgctatgagattctcagctgattttcttccagatatttagccagtttactaaaactgtttgttaaataacccatttctaattagttttttatgcttaattaattatattaaaactatgtgtgcttgtatgtatagtgtttcagagttatctgttctcttccattgatctgtttgatccttgcatcagtaccatagtattttaattaccatggtaatcgtttttatttttcttcttcaaaaaatggccttgttcagaaactgtagtaatggtggcacttgtaatagtaaactattattgagtgcgaactacgtgccaggcatgaactcacttaatcctcagaacactatcactctattcctattttacagatgaggaaactgaggcatagaatggaaagttacttgcccagggacacactaattgtgtaagtggtagagctggagtgaactatagaatcaagactttactatccattaaaaaaaatgtcttatatggagtgattgggactatagttattttgacataaagggtgtcttaatttttcagataatcttaattctccacagcccaaaacatgtttctctttctccatctgtttctttaaaatttttattggtgaggttattcatagggctctcctattttctggtgctactggaattaggattgttttttctgttttctaatgatcaaggctgataagataatgctggcctttttcataatggcctttttgatagctaccctcaatgctttattaaaatttgatgcaatgtaagatgtaacattttattgattttcaacatatctcctactcacacaaaatggagacaatagattataatgttttaaagaacaaaggacatctactcaaagccctgttttccaggtgaacagtgtcattttttacaaagatctgtgaaaggaagagtaagctaaaatcagaacacccagggaaaaccaacatagtttgaaccttgtattttcctgttttgattaaaataagtctttaaagtatatttgtttttgagagcaggatctacttttggttctgaaataggctctgctttggaaaatcttagaaacttcctttgaaggtgagaggactcctgtctagggaaaagtattttgtttttgtttttttagactcgacctggaagtgttccttaggtcactctcaggccacttggctttagaaagaatgtagaaaaaccaagttctagtcaggatccattcttgaaagattgacaagctcctcagcattgctagaatttctgtcattgctgttagcaaatgtggcatttgattctttgttctctctcagcttctgtttctctacctcatgtattacaagtatgtaatgcaggatcagccagggaaattaaaagctatctggcgcaaacagaaaatcagtttttaaactgtcagtaaggacattcctgcagtgaatcagcataagaaaatgaggtgaaaattcagcatgaggttgactctgcagttcattttgcaagatttgtcatggcaaatcttcataatttctattgagcagagactgagactttattatttctgattgttggcgagattctgtggatttagatgctaagcaggcttttgccctgggttatgacaccttcatgtctttcttcttgcagtccactctcaagaaacacagaaaagttgcatgctccttaagtcacacgtcccttaagctggactggggttgagtttgtataaactgttgccgtttttctttttccctctcactttgtcccatttccagcatttccttctgtctcgcctcccgtgcgtatcagtctaaaaccacactccattaggaggaagttcatacggggtgagttggttgttttcttgagtctggtactgagaaagtacatacgtgtgtgttttctttttttgacaatttttttaacttcatttggataaaattttactcttagagaaagttataagtgtaagaatagtgcaagaacacctgtatactctcattatccagagtcacctatgtttatcatttgccttgtttgcttattctctctctctgtgtgtgtgtgtgtgtgtgtgtgtgtgtgtgtttgtgtgtgtgtataaatatataagctggaagggggtgactatttgagaatacgttgcaatcatcaaggtactttactcctaaatgttcagtatatttttcctaaaaataaggatatgcttttacataatcaatacagttatcaacctctgtaaatcttacattgaaaaaatactttaatctatcgttagtgttctagtttcatcagttgacaatattctttgtaacatttcttttcctccagatgttacacttagttgtcacatctccatagcctccgttaatttggaacatttccacagtcattctttgtcttccaggacattgacatttgtaaagaatatagttccaatttaaaagaacgttcatcttttggagtttttctgatgtttcctcatgaccaaataaagctggaatactccataagtcataagtgatgatgcatccttctcgagtatctcatctggaggtgtgtgatgtttagtgatattaattttgattacctgatcaaggacttgtcctatttctccactgtatagttactatttttttctttgacactaatgagcagtgagtggggagatagtgtgagaccatgcacatcctcctcatcagatttcccctagccaattctaattttatctaaactttattagatcatcttaagataaaaataattttctcttgaggccttaattggcaagcagatttaactactctcttttgaaattgtttctctagcaaggtgagcagtaattaacaaacataaaattactatacattgaagctgcactaaaaaaaatgccataatggttaagcttttttccactctaagctgtgcttctctctatttgtatccggttacctccccattagaaaagccatcaccattttattataggaaaaacaatcagttctttctcctcaggcagtttctaatgaaaacggtatcaggtatcagagatactaaacatttaccaaaagcttaaatattgatgaaaatttttactaagcaagtgaaattttttttaatttggtttttgtaaacactggcaggaaggtggacatatcaggatacctggtcataactcttccaccgtcttctcggggtgtgctcctggtagaggagagaagtccttttactttatcatatctgcctactgcagtgggccattcgctatccatacttgatgaaataattttggtgatattattctcagacccaaaatatgagttattttcgagtaatttagagcaatatgattactccaaataaattgaggttttgtgcctatgcctccatagatccctaaacaccagagtgctattcgttcttattggagaggaaagcagtttcttcgtggttaggtcagtttcctagatgctattctttatttcagaatcaaagtgtggaggcgtattgcacacagggtgtggaagagagctttgaagtcaggtgatctctggtttgactccagctctgtcactgtgctctcagtgagttttgagtaaatcccttaatgcctaatttcctttcctcatctgtgaaacagatgctgttacctgctatgtgaagttgctgggaggactgaatgtaatgcttgtaaagtgccttggcccctggctcctaggaggtgctcagcagagcaatagcagtgattattttcttgagaagttaattgaggtggtggatggcagtaccttgagaggagcctcccttcacaatttggtttgtgtttgccagggagctggggtccggagtgggatagtaatctgtcatggagtcccaggagcccaaatgtgcaggccagtcccaagtgctcagagcatgaggaggacgaggagtactgggctctccgtctcactggactgactgtcagccaggaggtgttgtttcagtcccaagatagcttggaaaaccccatggctaccattcaagcgctcttcagtcgggtgaccatgtgggtgagcccctgtgagtcccgagaggccatttaggacatccaggaagagcctcagagctagtctgtctgtgtgccggggtgaggatctctggcatgtccgggggagcagcttctgcccggagtattcttgactggggaagggccgggttaccaggcgccatcgggcagtctagacaccttgtcctggctatgccctggagactcacagtccatatgccaccagacagcaaagggattatgagacttgaaggcttggaataaacacacataaaatatgaccggagccctgcatttttagctaataacttcagtgggtgaggaattgtgggctggctcagagatggctgctgttagcaccatttgcctttctgcttccctagaacttgctgctgtttggcgaagggctgcagttttgctgcctaacttctgagagacactccttattcactttcatgactttccatacttgctgtcccaggtgggtaagctcaggagctagtctgtgtgtctgatattaaaataaaacaatccaaacagtcctcctaaaattaacattaataccactggaaacatttattatgcaaataattcagaataaggcaaagaccacttggattagcttgctctcagtttgatattttggttaaatgaaattattttatatttatatgttctttgtatttttaaaagtacatataaaaataaaggacccaaaaaaatcacactattttcaggtctctgatataactggtacgaagatatttgttgttctaatctttctggaaagcaaactaggtgagtgtaaccaaagttataaaattattcgtagcttctcttatccctggctggtcaattttaggactctatctaaggaaatatcttctctcccggaacagggaaactaaaagtgcgcttcatggctgaacatttataatcagctgaagtggaagcctgtgaggggtgtggccaggaaggctagtgtgttacataggactgaggtgtggcactaggaagcaatgctgcctgggttgttctctgaggagaggctgtgaggggaggaaagggtgctccccagttggtgtgtacaccccagatggtgtgtacatcgtgattctgaccacgtggctgagagccacctacagtttttacacactccttactccagcagctgtaggtggagtttctctgggagctcattaggactctcctcacactgggggttggggaggggttcctgaccatcttcaaacctgggcccctattgttctaagtctgtgtctctatcaatttagaacaatgtaaagggggtgaatgtttgtttacttacttatttctttgtttccctctaaagttgcttgaatttatatagaaataaaaccatgttacacgttatagtggttctttttttaagaccttgagtgtatgatcttgtactatttagaaaagcaggctgagtgtctacatgcttcagagtggctcagcagctgacatctttctctcaactgaatatgaataacttgcatttttaattaaaaatcacagatttatttttgagattcctgaagttcttggattataaaattccccaattctggacagattgaggattttatgtaagctaaggttttaaaatgaggatttccaattggtagaaagtaatgtatacatgtgtgtccaaattcttttgtgctgaaacttaaataaatgttgatgagctttcactggtgaatgttctagaggattgcaggaaggctggttgttgaagagccacacactttctacctgtacgtgtgtatttacacatggccacgtgcattttactaccctcatgtatatagtcaaataaatacatgtgcatgtgtacacacattctttcatatcacttcttgtctgatttggcaccttccaaaactcattttgaggtgccagaataagttttattttggcttttagatgacagcctccagaggaatggcatccacaattactcttcgtctctgggggcagcaaaatgtccacagcacttgggaacagtcgggtcagttggagtggcatgcccccaggaagacagaaaccttcttgtacagttgtctgtttttattatcatagacaggtggttgatagctgttttatttctcccaaatatggctttcgttttggaggaaaaacttggaataagtagtgacttacttcatagatgctctgcccttctccccgaccccaccagtggagggtgacattgctccttcagctccccacttctcagctctgggacatcggtgagttccccaggaaggatgcggacgaggacaaccatgtacctgccctaagtggggagaccaggcgtgtgtacagataaacttaatagagaggcaaaaatgaagcatgtcagaaacacagaagtgcggagattgttcagacctctcttgggtgattacagtggactccttattgatcttttagctaataaaatgaatggaaaaatatttcataagtgtacaatatgcagtaggaaaatagagtactgtttacttaaaagtctgaaaaacactgctgtactgcttccgtgcaatcacaactggggtttagacacccactatcttatcttgtctattccaaaaggagtctaacatttgtttctgactccacagccagcagtctttctagcacaacttgtgatcctccctggattagactctttcggctgtgggagaagattcccacctctgtgtgtgccttcgaaggcctttaggatctgggcccgcagccccgtctgtcactggctgcccctggttgccactgatccctaccaccagccacactgtaccatatgctgctttggcttttggaatttgaacaaaatctagcttaactcagacatgccctctaggactatattgctgtcatcatttaaggaatcagaactgtagtgaagaatactttgtaaatcagctttacatacagttttcaaaataatcatgtatacaaacatatataaggtgtatttgtcattcaccattcattgaagtgtttattacatgttctgttttgtccctcccagggaagaatcaaccaaagtcctgtcagccttccccaggaaggctttctatagaggacatgtgtgttagttatatgttgctatggaacaagttatctcaaaatttagcagcttaaaacaacaaacacattattgtacacagtatctgaggatcaggaatccaggtacagcttagctggggttctgaggttgcagtcaagctgttggctggggctgtggtcatctgaggcttgcctgggagggccctgcctctaagcttgctcatgtggttgctggcaggttcatttcctcttggctgttggcatgaggcctcagtgcctcaccacgtggacctcaccgtcagctgcctgagtatcctcacagcatagcacttctcttcccccagagtgagtgattcgagagaggggatccaagacagagatcaagctttatatttatatacaaccagaaaataagtggcacccaaatacctcaggcttaaaaaaagtgagacagcaagcatgggagcctttgttgataataatggcctcttttttccattttgagccatatgagattccctacgtgctgggggggagataactgctctaggtagatgtttgtgtatttcatgatctggtccataagcgttgttggaaaaaagtgaaaattaaaaggaaacaagtcttggctaaaggggaaaaaaaagtaagtacaattgcatcctttagatctcagattctctttctcatgactttattccaatttatgtccgttacttccttgaacatcccactggtgacaggcatagctgccagcttccaagagtcctaatgattcccagctcctgggactcacccttgtgcagtcccctcccacacagtaccagcggtggtctgtgggatgctgtcactttttgaaatccagtaaaaaggtttctgtcttttttacctcattggtgagtgattggggagtgggacccatgggccctttgattaatgtgactctgatgtcccagtgaaagtctttgtcattctcaggccgactgcagcagtggcccagggcaaagagtgtgcgtcatcgatgagattgggaagatggagctcttcagtcagcttttcattcaagctgttcgtcagacgctgtctaccccagggactataatccttggcacaatcccagttcctaaaggaaagccactggctcttgtagaagaaatcagaaacagaaaggatgtgaaggtgtttaatgtgagtacagccagtcctccataatcagtggaaatggagcagatgatctaaaatagcagatggctctaaaatatctctttggttttgagttaacattttttcccttccatgctgaaatgtaggtgagtctaattttctagaaatgtatagaacttaaattatacctctacttgatgaaaaaacaaactcgcttatgggggggcctcctgacggtcccagttgttctggctgcttttttcttccatctcctcaccagacactaggacctctctggcatcagaattgcctgagctaaggtgcttgttctaagcttatctcttctcagattgaaaggcgccaggttgggatacagaggcaaatattttttgttttgttttaaagatttcccttttaaagctgacccacttgtgcttgtggggagaagaggctgtggatgtgttgggagacacagcttccaggtgctgaagagcagcaccgtccagttgaacttcccagtagtgagggaaatgtgctctctgcattgctcagaacagtagcgactagccacatctcgctatttatgtttaataaatttaatcatatttaaattgaattatttatttaatcacataaataatcaaatttaaattgaattaaacatttggattctcagtcacactggccacatctgaggtgctctgtggtctcgtgtggctgctacattcactagtgcatctgtaggatgtgccactcagtgtgaggcttgcagaatggcagcatgggcatcacctgggagtgggccttgccctggtccaaggagtcaaactctgggggatggccccatgatctgttctggcaagttctcatgtggtttttaggtcccccgcactttgagaagcactgctgtagaccacatgtgagagatgaggggctagggcttgttgaccagtggcagcgtctgagccagtcggaagggactcatggcattgctggcactttgtctaaattcttgcctttctttccctgttgtccctctgttttcctctcagtcagatattgcttctccccaacccctacccttagtttctttgagtcagtggtagctgtgctcttggctgagctctgctcacacacctcactccccacccccagtttaaaagctccctggccctgcaagtgccaagtgaacaagtcaggcaggcagggccactcctatcagggggagtggagagtgagtacccgtgagcaccttcctcatgatcattttaatcactgagtgaaatgtcaccttggcccactggcagtatccacatgttgccaccaaagaatcctggagtatccacatgttgccaccaagaatcctggagtgtggtggtaaacagccattagggttagaccagccagacttggaaaaatgtatgcgcttctttattgatttatttattccttcatttggtcaatagtgattgagcacctactgtatgctaggtgtcattctaagtcttgggatactgtggtgaacgagactgaccaaggcgctgctttcatggagcttacattctaatggaggagctgaataccaaaaatgtgaacagataagttaagcaatttcagatactgataaaggcaaaaataaagaaaccaggcaatgtggtagttgggggcaggagtagcaagggcgatcagggaaggtctcttcaaggaggtgacatttgagagccctgaaaagtctgtggggttcttcagagtttcatgtcgtcttctcttattttacatttttggttgtgattatagagtttccatggaaatcaaggcaatgaatagtgaaagatcatgaaagaaaattagttttgaggtcagatagcttctaggctggaagaccgggaaattgctagtgttagactccagggattggctagttccacaaactaatctaatctaacagtcctaaggaaggattgaaaggagctgactgtgatgcccagaaacagactttgtgtcttaggatcataccacatttcttccgctctctgagactcaaaattattctccaggcaagataatcattgcttctaatgatctgtaaataaaacaattagctttgagttaattaagtaagagataggggctgacataccctgtttttttttgttgttgttgctttggggtttgtgtggtccttctgtttcagttttattttattttttatttaacttatttttttgagggggagggacagagtcttgctctgttgcccagagtaatctgtgctgggattacaggtgtgagccactgtgcctggccttttccagttttataaatcaagaacctcattttctttttttctgagacaaggttagtctctgtggcccatgctggagtgcagtggcatgctcttggctcactgcatcctctgcctcctaggctgaagccatcctccacctcagcctcccaaaaagctgggactacaggcatgtgccaccacacctgactcatttgtgcattttttgtagagatggggtttcaccatgttgcccggggttgatctcgaattgaagagctgaaacaatctgcctgcctcagcctctcaaagtgttggaattataggcatgagccactgtgcctggccaagaacctcattttctttatctgcaaacttaggtgttggattagatatatttttgggttctttccattgctcacatgcaataaagtatccgaatccatttttgagagtgcccttcacattcagtacttagtccatcgtttaggcacctgtgaggcatgatctctgccctcaagaaaaacagaccatggggcaatcaaaatctaggggcagggaagggagagatctatgtgagcagtggtagtggagaggtgtccaaaggaaggggttcttgagttggctcttgaaggaggaaatgggaaaaagaagggagaacattccaggtaagaaaatgagctatgaaaaggggtcagagtcagcgtccccttgctaccagctgaacatgcgtagtgtgaagatgagactgagcccgtgatatgggggaaatgtaccacacgaattagtaatattatctagacttattcttcacaatgttgggtgaacagagtactttccaatgaatatgcatagtgtgaagatgagactgagctcatgatatgggggaaatataccacacaaattagtaatattatcttgacttattcttcataacgttgggtgaacagagtactttccaaaaacacccgagaactcttccagttttagacaagatagagtagacacacttgtgtttatttttcctgctaaggatgttatttataatacaagcataagaagacctgaaaagtgaagagaaaaagacagactggctaggaacctaaggacctaaggaacaacacaacagacacaactgaaaatcatttgtcatgccaagaatcaggaatacctaaacctgagtgaggaaaggccatcagcagatctcaacagcaaggtgactcagatagtggaattatagggcaaggatttgaaaacagctatcataaaaatgcttcataaaattacagatacacatgaaacaaatgaaaaatagtctcagcaagaactggaaagtttcagcaaaaacctagaagatagaagaatcaaatgaaaattttagaactatacaatagccaataaaaaagtcactgaatgggctcatcagcagaatagagatgacaggagaaagaatcagtgaacttgaaggtagaacaatagaaattacctgacaaagagcagacttaaaagaaaaagtaatgaacaaaatgaacagagtttctgggacctgtgggactataacaaaagatgtgacattcacatcattgtagtaacaggagatgagtgtggggttgaaaaagtgtttgaagaagtaatggctgcatttttgtcatatttggcaaaagacataaacctacattttcagtgaaccccaagaggataaactcaaattcatgccaagacataccatagtcaaacttatgaaaattaaagtcttgaaagcagtgaaaggaaagcagcaccttacctatagggtaaaaacaatatgagtgacagcagatttctcaggagaaaccatgaaggccagaaggaggtggtacattttccaagtgttgaaacaactgtcgactcataattctataagacattcacagatgaaggaaaactaagagaatttgtcataatagaactgctctaaaagaatggccaaaggaagttctcttatcagaaaggaaatggtaaaaggagacctggaacatcaggaaggaagaaagaacaatgggaagagtaaaactctgagtgagtgtagtgggcttttcttcctctgttgacttttgaagaattatgtttgacagttgaggcaaaacgataacattctctgatgtgttaaaaaaaatagctgaaaaaagaaaagaaagaacagtacctgagaaggaaaataaaatctcactgatacaatctttggcacctcctattacctagtaaagcatcagtagaagaaattggtgatggagtatttttattcatctatttggtaaatattgagcacgcactgtatgtcaggtactgttctatccactggagttttagcagtgaacaatagagagggagaaccagacatcattttatcagtaacccagtcctgccataactcactccctcccactataatggcattaatccattcatgagggctgcccccatgacctaatcacctcttaaaggtcccacctctatttgcatgggggttaagtttccaacacatgaaatgtgggggacacagtcaaatcatagcaggtgacttatgggttcttcaataatttgtttttcagaactctaagaggttattaccattgtatcccattgagttttatcccattgtatcccaatgagtgtgtcattgattgattttgctgccttctagttaatgtcataacattgaaaatgttatcaacaactttagttctttttcaagctggcagcttcatagtatgactaagcctcttgtttagaccttggggtgcacatgttcttggcagcagtgagtggatattatctgatcttccaggctgcttgcatgctacctcactgccttctaacttgtttaatatgatcagtgtctgtatgccctgctcagtctccccttcccgcttcttgattgtttaaataagaagttgaggtggtgatatcacaaatttgtcttctcatctggttggcctaggtacggcgagagacagtacttgactcatctgctgggcacagatgcagtaccagatactgggtcctgcttatgttctgactttaacaaccccagacctgaaaacatggatggagcaggcaggggaagaaatgcctcttagtatacaactatgtgcaagaaagcaaaacaaaaccacatgcatttccttgaaactgtgggaagggcccccaacattcctaataagcaagggattggatctggaggtcacaggatgaatgagatgtggcctctgaccccatggtgctcacagtcttatcttcactgtgcccaggataaattcttaccaagggcccccctacagccactgggcaggtgcaagggttcaggttcactcagcttcctttctttctcttaaggctccagtgcagaaaaaaagaatggttgggattactttcttctttctgcagtcttctttatttccttttcctgctcccagctcccagttccctcttctaattagcttctcaggaaaggctttctgcaaccaaaattctggctgttgaataaaaagtagactagaatttcacataaggcaaagactcctgaggttggcagatgctgtgatccttgttcttgcatttgggagtgtgcttttctcaacagggaatatcataagtgaatactgcagagagttgcacatcaacattttattgcataattttcagaaataatcttagggaaatcaaagggagtatcaaaatattaatattggagtgtttgcattctgctcaattttcaaattaatttttaatttgtaattgatataatgtacatatttatggggtacagtgtgatgtttcagtgcatgtatacattgtataatgatcaaatcagggtaatttccatatctgtcactttaaattatcatttttgtggtgatgacattcaaaatcttctcttctagctatcttgaaatatacactaccttgttatttactctgtagtcaccgtactgtgtcatagaagaccagagcaaattctccagctgtgtatcacagtccactctcacagagcctggctggaggcagaagctactgcaatcactgctgaactcagagtggaagaaaagggcccctgtggtgcccacctctgtgtcgcctcctttctacctcaggtggattccttgaatgcaaacaacaggaatggactttggctaacttaagtgaaaacagcatcaaaaagccttataggctttggagctgtcccatgaagccaaaggaaaagctgactgtcctcatttcaagtggagccacagccgcccaggattgacgcagccaggaccagtagaaatgggatcacaggattgacgcagccaggaccggtagaaatgggatcacgggactgacgcagccaggaccagtagaaatgggatcacgggattgacgcagccaggaccagtagaaatgggatcagcttctggcacttgctgcgtgagctcactcctcttggggtgcagatctcagtcactcctcttggggtacagatctcagagaagttgccagggcctggcttgcccacttgttggctgggggcaagtttcctagaccgtacagtctcctaaagacaaccagagcactcttccaagaagggtgagcaggtgccaggaaccagaattgacgaggtccgctctgcatctcctcttcagacatgtattggcacctattgtatgccaggccccctcttcagatacaaccaccctgaacctcagaaggcttccacatgcactccctgctcttaccgggaaccttggctcagccccttttccatggttcacctgtcgaaattacatccaggcttaagcacccctggaagcctttcctgcccctgaccccacacatgcccctgttcctgcctgccccccagactccttcattgtccttgttcatgcctgtcctgtcctggtctgcgagctccatgaggtcagggtccttacctgtggtgcttctctatgcgcatctctgtgcctggctcctgtttgcccttccaccccatcagcgtgtgttgagtggatggatattatatgggccaagtaggaaggcactgtgatgggagcagagatggcccttcctttaccctggggcactcgggatggtgtggtagtgaaagaaaaataaacagatcatcgggtaaagctctggtgaactctttgttgcttttgtttgattttgtaatggtgtaagtgttggagaacacactgcagtcaggaggcctgagtaacagtctgtacggaggcaccctcacgtctctggctctcccacttctccatgtttcaaatgagcacttgatgtttgtggagaggcgggtagatgactgagcatcccagaatcctgggcgcttcactgctgctctgctgggtgccctcctgggccccgctggctcccaggctctcctcctcgcttcactccaacagttgagttccttccattcaggacaggtcgtgctcaggggtcctgtgtgcccatcatccgtcccggtgtgcctcgtcggactcacttcacagctctccccatggttggctgaaatctgtctgggctccaaacccactttgactttttgagctgtcacttggcagaaactgatgctgggactcggtgattcctgtcctgtttctgagtgctcctgaagagctgggcctcctgcctgggtaacaaaacatacctcaccctctcccagccttccaggcgtttcttttagagagttacctagcacaagattgaagaagaggaaaggagctctgaagcctgttctctcacttcttcccacaggtcaccaaggaaaacagaaaccaccttctgccagatatcgtgacgtgcgtgcagagcagcaggaagtgaagacacgtgcattcctgccttccgtgaaggagtgcccagttcaagaggagcctgatggagccctgcctgtcgaggctgtatgcctatggggttatggaaccttgtgggcttttctagagaaaactcaacagctgtttcccataaaatgtttaaaagatcaaattagccttaatgctggattgtctgtacaagattaactatccattgtggcttatctatgcttaaagatttcttgtttatttcctcttgcagtcatgcacatgatttgggtaaactgtgagatgagaaatggttttcagagtattagatggaattcacccccgttgaagtttataaatgtgttcaggggaagcgggaggaaagagttcactgcctaatcagttttgcatgtcatgaaaattaaattcctctccaggtgcagcttcagcctcatgcaacttaaagtgataacagttatttgattttttaaaaaatattattccaaaagaaaaccattttaggtcatctcccccaactctgtttgcttactgcttaataaatataaaaataaatctgatggttacagacagga

SEQ ID NO: 8888 - DNA, 951 bp, Homo sapiens
gtggaaatgaaataaatttgtacatgtaaagcacaagaacatggaaggtgcttactaaatgttacttatctttactttctctgccttggtcctctcatacccactcctgattttaggtgattgggtggaaatggccattgaacatcatactctactaacaaagaccatttgagagttagattaatctctttcccgtttcaacaacaggaagaagccccacaaatcaagtatttcccttgttctataccttgtcattttgttgctactcccaccagccaaagagggaggaaagtttcttggtataattaaaatgttataggctgggtcgggggggctcatgcctgtcatcccagcactttgggaggctaagacgggaggatcgcttgaggctaggagttcaagaccaggctgggcaacatagtgagacccatctctacaaaaaaaaaaagatagccaggcatgatggcatctatctgtagtcccagctacttgggaggctgaggcaggaggatcacttgagcccgagggtttcaggctgcaggaagctatgatcatgccactacactccagcctgggcaatagagcaagactgtctctctaaaaaccaaaaattgttatagaatatagagttgaataacttttctggaatgagaaagctctcattttagatatccattcattcattcattcaatagtgtgctggatgccaggaatttaatggtgaggaaaatagacatgatctctgccttctgaggctcaagatcctccctctatttttaaaaatcaggtttattgaagtataattgatgtacagtaaaatttactctttttagtggaaacttctgtgggttttggcaaatgtgtaaccaacacaattaagatctagaacatcctgtctctcccctcccgattttcttgtgctcctttggagtcaacaactctcccccaacc

SEQ ID NO: 8889 - DNA, 951 bp, Homo sapiens; identical to SEQ ID NO: 8888

SEQ ID NO: 8890 - DNA, 2919 bp, Homo sapiens
ttttatttaatttatacttaagtttgaatagccacacatggctagtggctatcatactggtcaacatgggctatctaattctgatgtacagtctctgcatcatcattccattttctaaagtgggtttctcccacagcagttgttaaaacaaggatttggatacaaagagattatttaagaggtgatcctagacagcaggagagggattgaggaggtgagatggagaaggtgaatactagtaaaagactacattgatatgctgtaggcacttgaggtttctgtttgtttgtttgtttgtttttttggaaaccttcgagagacttatggaaaacactgtataattgtttcattgaggagcacggaactgatcatgtttattcaccaactctcatgcctttttggttgaaggatgctcctaggggcattcacacctgctctgaactccttcttcatctccagcctgcctcccttatgggccatttcatgccactgtacctagataaagccttagggccaagagattcaggtgcttgaggctgggtctatccttctgagctgcaaataacttccagggtggatcaagggaatgtggggtcaggatagattatattgcctctcatttacaaccaaccatattagctcatattagtgttttatctggaataggaggagaagcatttgagactgttagaaaaaaggttctgctatttaaaaaaaaagttttgaaactgtagctctaaactacattcctacctgttttcctgaccacctcaattactaacttgtatcgtgttccatattatttctagcacagcatggattctctaacattcttgcagtctgggccctgcaaggtagctgtaaaaatgctgccctgggactttctcagtggagacataagaagactcaagcattccagaaagtgtttgtttggttggcttttattgatgtatataaaaagattagagacagcaagagaagaaaatcagagagaacctatacttggttaaaaaaaaaaaaaagattttacagcagaagtagatagaagtggtgcaaatgatgatttctcctcttctgatatcaagctttgttaagttcctggaaaagcaaacgtgattatggcaggagtaaattgactgaaagccaagtcaaagaggcagatcagcttctgaaggaggtctgctcacttcagcaaagaaagcagggcaaagaatcctaggcttttgagctagttaggcccccagttcctacaaccatgggctgaaataatgtggagaactcttgatattgtaggcaaaatgaatgttagcagagttccatcagagataatggctggccatgagctaaagagagtttagccaccacaaagaagaacctgcctgtagagatatctctaagctaaaaacctctgcaagtttcctttcgaaattctaccttaaaaatttgaaataacctcagatcaaagttaacgcaagagtttccagaagagtgaagttcataatgccacaaggaaaaaaactagaggatgactaaagtaaaatttcattttaaaatttttattcatctagctgaggttggaaagagtaaaatttttacatgaaaatattaagtatctagaaactcttataaaaagaaaaattaaaaagcacaatgatagacaaaaaggatgagaataaacaattcagaaaaaaaaatagaactgatccataaaaagaaaaaaatggccaacttcacttattgcattgaagaaacacaaaataaaatataatactgcctattaaagttgtacatttttaaataaattaattaaaatgcccaatgtgggtacaattgtggaggcagtgagcactcttctacttgttggtagaagtggaaattaaattgttacatccttctaaaataatttggcaatctattaatatattcagatcctagaatagtttaaagcctccagtccaataatttattatatctatatattgtctgttcatatattttctatttatatatatatctataatctgtatctacatatatatctagcctactgcctatctttgtaaataaagttttattggaactcagccatactcattagtgcatggtattgtctatggctgctttccacctgcaatggtagcattcagtagtcgccctggagaccatacaactaaaaacatgtaatatgcagccctttgcagaaaaagtttgctaacccctgcaccagaatataaactctttgacatgtaagctcaatgagtgcaaataatttgtctgctttgtttgctattgcattcccagtggctagaacagtgcctggcacacagtagatgctcaataaatattagtgaagtcatcagttgctcctattaaagtatattcatattgtttttacatttagtgggtttttggttttacaaataatgttgcagtgaacacagatctttgcttacttttgcaattatatcagacacaatattttaaaaaaaatagttaacaactttaacaacctggaaaaatactgttgatatatcaaatttttaaaatagactaaaattttatagatgactctaaattttgtttttaaaagtgtgtgtgcatgtgtgtgcgtgtttgtgttaactataaataatttgaaggctaggaggtgggtggggtgattttgatttcctttcctttcttttctttttgttttttgttttgttttttttttttttttttgaagtggagtctcgctctgttgcccaggcttgagtgcagtggcgcgatctcagctcactgcaacctctgcctcccaggttcaagccattctcttgcctcagcctcctgaatagctgggattacaagtgcacgccaccatgcccagctaatttttgtgtttttagtagagaccaggtttcaccatgttggtcaggcagt

SEQ ID NO: 8891 - DNA, 224 bp, Homo sapiens
aagggacaaggactgaaaaactgcctattgggtactatgcccactacctagttgatgggatccttcataccccaaacctcagcattacacaatataaccatggaacagacacccctgaatgcacatgcaccccctgaatctaagacaagttcaagttattaaaaaaaaaaaaaaaagatgaagatggggataggttgagaatgaggaaagaacaagaggttttg

SEQ ID NO: 8892 - DNA, 286 bp, Homo sapiens
catgcttcatggttggagaaacaccaacatcagccgggcgcggtggctcaagcctgtaatcccagcactttgggaggccgtcactggcagatcacttgaggtcaggagttcaagacctgcctggccaacatggtgaaatcccgtctctactgaaaatacaaaaattagccaggcatggtggcaggcacctgtaatcccagctacttgggaggcaggggcaggagaatcacttgaatccaggaggcagaggttgcagtgcatcaaaggtagcactttggcatagcta

SEQ ID NO: 8893 - DNA, 4132 bp, Homo sapiens
gaagacgatgggaatcacattaaaaaggagaagcatcctctcctcgtcggacacatgcccgtgatggtggccaagcagcaggagttcaaggtgaagggaggcagggcccgcggcccggggtgggacgcacctcgcagctctgaatgggccacttgggagatgattcttaaggggcgtggtcagaacatggtcctcccaggttcaccacagtgaccgcttctctagaggtcatttatctggaaataagactgctgttgattgaaacctaaaaaaacgcccagccattgtctctgaagcccagtcctgggccaggaccctggggtattccagcagtgccacagcacctgaggccttgttagttaaagaggggacacgtgtttcacatttgtagctctgttttgcctttgcttggcaagcagtctgtttccacagtggatcgtaactccaggtctcctgtctgcttgaggtaccgtgcccgctctttgccttggcagactccatctccagggtggcgtcttattaatgttcccagtgttgctgactcaggcatcacaggccagggccttcagtgacgctgacaatgtcttattctttaagaaataaagatgtttcttctcaccctgctctctggccagggtttcccagcagctcccctgacccctcctgttgagagttgcaggcggtgcacaggactcctctgggagaggctggggtgggacagggaaggggagaggcacaggccatcacaggctgtacttgatgcctgcagggccagccctcccatctgaagcgccctgagctgccggatttcagtgtgctgatgggatctaaagattaagataccaaaggttgaatctccttaggtgttcacttctaaaaagctaacttctgagagttgtacttttaaactttcatcctccctattttaatctttggtaggtaatgaacctgtaatttctgtgtttatacattggaagtaagtcatccatttaagacgttatgtagtctaggagcctcttagctctgttttatatgtgagcgtttgattttattccattttagattgaatgtgctgcttataaccctgaaccttacctaaataatgaaagccagccagattcattttccacggcacatggtttcctgtgggtaagatgtgtttatttggttttggtacaagttcacagagaatcaacgttcatggtcggtgtgatgagagactgagatgtgaattgctcagtagagagttggcggtggcgtatcccagagtgtacttagaaacatgaaaacttctttgaaagggagctgatcacttttggaaaagatttacagttcttaggaatgcaaatatttgtttcttttccttttcatctaaaacatttaccagataaagttgagtccagagacaactaactaataagagaataattttaatatgtttttccattttggtgtcaacattgcatggattttttttcttgttccaagactggctttttccagtggaaacttagcagttaaaattaatttgttccaaatgaaatattgcatctgaaattaggctggaattgcagtagacgttcctggttcttgcaaaccagaggacattcttgaagctgtgtggtcccaggctctcccctctctggtttcctgtgttccctccctgcagcctcagactcgccctccagggctccactgtgcttttccaaactctcatcctttcctcccaggcgtcctgtgcagcacgccactgcctctcacttctcacatccacagctcctgcttggtcagtgttcctagttgagtgtcagaaattgaacaacccaattagctggtatttcatttgtaccaacctatgaatggaggagtagccttaattcccttgggggcttccacttctaagagaactgttttccgtccaggtaggcagacctgtcatggctgaagcttcatcacctggcctggtcatagcccccaggccctgtaggcaggacaggggcttggcagattggcatccttcccacaaaagcatgaaagtaggatgtctgtatgtagcgacaacaaatacaagaataaggagagtttaacaacattctcaaagttggtggaaaagaaaaagaatcaatgaaaacatcaccctaaaccagctagtgctttctgtttacagggatcagaccccttcccacttaaaaaaaaaaagacaaataaatttaagtttaaattgggaaactaactgtgctatgtgttctcgttgtagagattcaaacacacaggaagttcatgtacactgttgcagcaatgctactttagaaattccacggcaggcgtggtggctcatgcctgtaatcccagcactttgggaggccgaggcgggtggatcacaaggtcaggagtttgagaccagcctggccaaacatagtgaaaccccgtctgtactttcacatagtgaaaccccatctctactaagaatgcaaaaattagccggatgtggtggcacgagcctaaagtcccagtttctcaggaggctgaggtggcagaatcgcttgaacccaggaggcagaggttgcagtgagccaagatcatgccattgcactccagcctgggtgacagagtgagactgtctccaaaaaaaagaaaaaaaaagaaattccacagcataccacatgttgacttccaatgagctacttgggatgcattcttactgatgtttttcctatttgaaaggtttattttcttagcctaggtcattgaatattagtgttaagttattaaaattgataataatctgcttcttaggattttaaattgaggatagatgggcccttaccttcatattgtgatgagtacgtgatttttaaagtatagaaatgtgactttgtagaaatgaaagttacgcttttgctttaaaattttttgaaaactgaattaaatgtgttgaaaagaaaaaggggctctgtgagcaattgtttaagaatttttttttatttttttaagtgtgttgattctcacatgaaaatcgaagcttgtcgtggcctttaagggtcaggttccagcgtattatggaagccgccacatggtcgttttcttctttcctcctaattctctgattcagatcggaagttgcacccatcaaatgggtcagattgccatcgtctcgtttcaaaattccactcccaaagtcattgagtgcttcaacgtggaatctcgcatcctgtgcatgctgtacgttcccgtcgaggagaagcgcagagagcctggggcacccccggaccccgagaccccggccgtgagagcttctgatgtccccacgatctgtgtagggatggaggagggaaggtagggcatgctcactgcgttacagagaattagcaagctctgcccatggagggcgtggtggggagcctgtcctggaaagagtccttgactttgactcaggagtagcccgtgcaggaattaggggataccaggggaaatttttagggtcattgcactttgaaataactagtgaattgggcccatggaaattattctaggaaactcttaaagagaagtggtatttctttaaaggggacagtttggctgtttgccactgaaatgtctcatttatattaatggttttgaaaaggacattccccccttatattttggaataaaacagccatattctatgtcatgatcatactgaattgctgacaccatttaaaggagagttaaaatgattttcctgatgtgaagttccaagatacacagtaggaagaactaagttttttcatatatcccagaatttcccttttaaaaataaagaaatcaaggtggttgcaaattttttaaaagtactggcaagtgtccctaggaatggagaaggaagggcaagagggaagagttgaaatgtttgtgtttatgttaacaggcaccctcgttcttgttacaacgagcaaatatatttattagcttgtatttttctcttaaagcatttccatttataaaagcagtcaaggctccaagaaagtgagacttcagcactttttcactcctgagaagtccacagtcatgagcctggcttgcacgtctcagagcctgtacgctggcctggtcaacggggcagtcgccagctacgccagagccccaggtg

SEQ ID NO: 8894 - DNA, 4131 bp, Homo sapiens
gaagacgatgggaatcacattaaaaaggagaagcatcctctcctcgtcggacacatgcccgtgatggtggccaagcagcaggagttcaaggtgaagggaggcagggcccgcggcccggggtgggacgcacctcgcagctctgaatgggccacttgggagatgattcttaaggggcgtggtcagaacatggtcctcccaggttcaccacagtgaccgcttctctagaggtcatttatccggaaataagactgctgttgattgaaacctaaaaaaacgcccagccattgtctctgaagcccagtcctgggccaggaccctggggtattccagcagtgccacagcacctgaggccttgttagttaaagagggacacgtgtttcacatttgtagctctgttttgcctttgcttggcaagcagtctgtttccacagtggatcgtaactccaggtctcccgtctgcttgaggtaccgtgcccgctctttgccttggcagactccatctccagggtggcgtcttattaatgttcccagtgttgctgactcaggcatcacaggccagggccttcagtgacgctgacaatgtcttattctttaagaaataaagatgtttcttctcaccctggtctctggccagggtttcccagcagctcccctgacccctcctgttgagagttgcaggcggtgcacaggactcctctgggagaggctggggtgggacagggaaggggagaggcacaggccatcacaggctgtacttgatgcctgcagggccagccctcccatctgaagcgccctgagctgccggatttcagtgtgctgatgggatctaaagattaagataccaaaggttgaatctccttaggtgttcacttctaaaaagctaacttctgagagttgtacttttaaactttcatcctccctattttaatctttggtaggtaatgaacctgtaatttctgtgtttatacattggaagtaagtcatccatttaagacgttatgtagtctaggagcctcttagctctgttttatatgtgagcgtttgattttattccattttagattgaatgtgctgcttataaccctgaaccttacctaaataatgaaagccagccagattcattttccacggcacatggtttcctgtgggtaagatgtgtttatttggttttggtacaagttcacagagaatcaacgttcatggtcggtgtgatgagagactgagatgtgaattgctcagtagagagttggcggtggcgtatcccagagtgtacttagaaacatgaaaacttctttgaaagggagctgatcacttttggaaaagatttacagttcttaggaatgcaaatatttgtttcttttccttttcatctaaaacatttaccagataaagttgagtccagagacaactaactaataagagaataattttaatatgtttttccattttggtgtcaacattgcatggattttttttcttgttccaagactggctttttccagtggaaacttagcagttaaaattaatttgttccaaatgaaatattgcatctgaaattaggctggaattgcagtagacgttcctggttcttgcaaaccagaggacattcttgaagctgtgtggtcccaggctctcccctctctggtttcctgtgttccctccctgcagcctcagactcgccctccagggctccactgtgcttttccaaactctcatcctttcctcccaggcgtcctgtgcagcacgccactgcctctcacttctcacatccacagctcctgcttggtcagtgttcctagttgagtgtcagaaattgaacaacccaattagctggtatttcatttgtaccaacctatgaatggaggagtagccttaattcccttgggggcttccacttctaagagaactgttttccgtccaggtaggcagacctgtcatggctgaagcttcatcacctggcctggtcatagcccccaggccctgtaggcaggacaggggcttggcagattggcatccttcccacaaaagcatgaaagtaggatgtctgtatgtagcgacaacaaatacaagaataaggagagtttaacaacattctcaaagttggtggaaaagaaaaagaatcaatgaaaacatcaccctaaaccagctagtgctttctgtttacagggatcagaccccttcccacttaaaaaaaaaaagacaaataaatttaagtttaaattgggaaactaactgtgctatgtgttctcgttgtagagattcaaacacacaggaagttcatgtacactgttgcagcaatgctactttagaaattccacggcaggcgtggtggctcatgcctgtaatcccagcactttgggaggccgaggcgggtggatcacaaggtcaggagtttgagaccagcctggccaaacatagtgaaaccccgtctgtactttcacatagtgaaaccccatctctactaagaatgcaaaaattagccggatgtggtggcacgagcctatagtcccagtttctcaggaggctgaggtggcagaatcgcttgaacccaggaggcagaggttgcagtgagccaagatcatgccattgcactccagcctgggtgacagagtgagactgtctccaaaaaaaagaaaaaaaaagaaattccacagcataccacatgttgacttccaatgagctacttgggatgcattcttactgatgtttttcctatttgaaaggtttattttcttagcctaggtcattgaatattagtgttaagttattaaaattgataataatctgcttcttaggattttaaattgaggatagatgggcccttaccttcatattgtgatgagtacgtgatttttaaagtatagaaatgtgactttgtagaaatgaaagttacgcttttgctttaaaattttttgaaaactgaattaaatgtgttgaaaagaaaaaggggctctgtgagcaattgtttaagaatttttttttatttttttaagtgtgttgattctcacatgaaaatcgaagcttgtcgtggcctttaagggtcaggttccagcgtattatggaagccgccacatggtcgttttcttctttcctcctaattctctgattcagatcggaagttgcacccatcaaatgggtcagattgccatcgtctcgtttcaaaattccactcccaaagtcattgagtgcttcaacgtggaatctcgcatcctgtgcatgctgtacgttcccgtcgaggagaagcgcagagagcctggggcacccccggaccccgagaccccggccgtgagagcttctgatgtccccacgatctgtgtagggacggaggagggaaggtagggcatgctcactgcgttacagagaattagcaagctctgcccatggagggcgtggtggggagcctgtcctggaaagagtccttgactttgactcaggagtagcccgtgcaggaattaggggataccaggggaaatttttagggtcattgcactttgaaataactagtgaattgggcccatggaaattattctaggaaactcttaaagagaagtggtatttctttaaaggggacagtttggctgtttgccactgaaatgtctcatttatattaatggttttgaaaaggacattccccccttatattttggaataaaacagccatattctatgtcatgatcatactgaattgctgacaccatttaaaggaaagttaaaatgattttcctgatgtgaagttccaagatacacagtaggaagaactaagttttttcatatatcccagaatttcccttttaaaaataaagaaatcaaggtggttgcaaattttttaaaagtactggcaagtgtccctaggaatggagaaggaagggcaagagggaagagttgaaatgtttgtgtttatgttaacaggcaccctcgttcttgttacaacgagcaaatatatttattagcttgtatttttctcttaaagcatttccatttataaaagcagtcaaggcgccaagaaagtgagacttcagcactttttcactcctgagaagtccacagtcatgagcctggcttgcacgtctcagagcctgtacgctggcctggtcaacggggcagtcgccacctaccccagagccccaggtg

SEQ ID NO: 8895 - DNA, 1752 bp, Homo sapiens
gaagagaccttgggtaataagcttgccactgagtggctgctttatgtcctcaagggattgtaccatatcaagcactcagcattggtgtctgttgctaatggtcaggcattcagtagtggtggtagctagatcagccttggagagagagagcccatcatttcaggccatcacgactaatccattcatttatgggccctttgtaaggattgagatggctgaggacaggggctgacaggcattcattagaccagtcatcctgtccatatgcttattcagtgcttcttctgccacacgtgctctctggtgggctctagtgtgagacacaaagatcaacacattatgtgcccattcttatagctccagccacatgcctcttcctcagacatgcttggtttcaatcctctagtgttgttcccttgaggcccttgaccaagcaaccaagccattctccaccacctagaagtctgtgtatattcttacttttggccgcttctctccagacacaaagcagatgaccactggacttgaattggcacccagagttattttgggtgtgtctttagtgcagcaacagtccatatttttagctcacgccagcatatcatgctagcctaatccttataaagcccttttcctgctccttttctattctgtcaactgtctgtggagaaatccccaaggggccataggtattatgtctggaattggttctctccgaggggttcttggtctcgctgacttcaagaatgaagccatggaccctcgcagtgagtgttgcagttcttaaagatggtgtgtccggagtttgtgttttcagatgttcagatgtgtctggaggagtttcttccttctggtgggctcgtggtctcgctgacttcaggagtgaagccacagaccttcacagtgagcattacagctcttaaaggtggtgcgtccagagttgtttgttcctcccggtgggtttgtggtctcactggcttcaggagtgaagctgcagacctttgcagtgagtgttacagctcataaaggtagtgtggacccaaagagtgagcagcagcaagatttattgtgaagagtgaaagaaaaaagcttccacagcgtggaaggggacctgagaaggttgccgccactggctcgggtggccagcttttattcccttatttggccccgccctcatcctcctgattggtccgttttacagggtgctgattgccccattttacagagtgctgattggtccgtttttacagagtgctgattggtgcgtttacaaacctttagttagacacagagtgctaattggtgcatttttacagagtgctgattggtgcatttacaaacctttggctagacacagagcgcttattggtgcatttacaatcctttagctaggcagaaaagttctccaagtccccacccaacccagaagtccagctggcttcacttctcaatcctccttctaaacaggacaccacaagtgttgttgggaattggccgatgaccgctctagctatttcctgctggataggggcaaagaaggggccctgcagttgtagtgtcctccagaggggaactctttaggccagtgaaagggccagcaggttggtctggggtcctcagtagaagttgttagttgagctcatttggggttccatttgtaagaccatctgtagcttgatggcctcaattctagaggaaacaaatttgacaaggagattaaaaatacagggtccaaaggcaagaaatagcaag

SEQ ID NO: 8896 - DNA, 685 bp, Homo sapiens
gcaaacatggtgaaaccccatctctactcaaaatacaaaaattagttaggcatggtggcacacacctgtaatcccagctacttcggaggctgaggcacaagaatcgcttgaacccgggaggtgcaggttgcagtgagccaagatcacaccactgcactccagcctgggcagcagagtgagaccgtgtcccaaaaaagagaaggagaaacagagatcatgtggaaaaagttattttttatttatttacttagttttcagtttggtttgagactcgtgttttaaaccagagggcatggttactgagggataacatcaatagaactcctataattgaggggataattatcaaggtattagatgattcactggctattacaaagaacacagaaattatgaaacctggttctgtaacttatagtttttcatattatttttataccatggacaactcttctatgtgtattcataggtgtaagattactggcagtgtcatatgaaacaacgtattacattttttaagcctggaaagcatctagtatggctgtgcacgtagtgatgacattgactttttttacttaaagaagagctaccacttcaaatccacacggtggcagttctcctgcctagccagctgccactggactctctcccctgtatataagcccccaataactacgtcttattt

SEQ ID NO: 8897 - DNA, 618 bp, Homo sapiens
ctccaaactgttttccatagtggttgtactgatttagatttccaccaagagatatgtatgagagttcccttttctccacattcttgccagcatttgttattgcctgtcttttggataaaaaccatttgaactagggtgagatgacatctcattgtagttttgatttgcatttgtctgatgataattatgttgagcactgatatggtttggatctgtgtccccaccaaatctcatgttgaattgtagctcccagtgttggaggtggggtctgctggagggtggttggatttctcatgaatggtttcatactgtcctcttggtgctgttcttgtgatagtgagtgagttctcatgagatttggttatttaaaagcgtacagcacctccccgctcactctctcttgctcctgcttccgccatctaagatgccttactccctctttgctttctgccatgattggcagtttcttgaggcctctccagaagcagaagctgctatgcttcctatacagcctacaaaactgtaagccaattaaaactcttttctttataaattacccagtctcaggtatttctctgtagcagcatgagaacggattaatacaagtctcaggtattt

SEQ ID NO: 8898 - DNA, 614 bp, Homo sapiens
ctccaaactgttttccatagtggttgtactgatttagatttccaccaagagatatgtatgagagttcccttttctccacattcttgccagcatttgttattgcctgtcttttggataaaagccatttgaactagggtgagatgacatcttattgtagttttgatttgcatttctctgatgataattatgttgagcactgatatggtttggatctgtgtccccaccaaatctcatgttgaattgtagctcccaatgttggaggtggggtctgctggagggtggttggatttctcatgaatagtttcatactgtcctcttggtgctgttcttgtgatagtgagttctcatgagatttggttattcaaaagcgtacagcacctccccgctcactctctcttgctcctgcttccgccgtctaagatgccttactccctctttgctttctgccatgattggcagtttcttgaggcctctccagaagcagaagctgctgtgcttcctgtacagcctacaaaactgtaagccaattaaaactcttttctttataaattacccagtctcaggtatttctttatagcagcgtgagaatggattaatacaagtctcaggtattt

SEQ ID NO: 8899 - DNA, 614 bp, Homo sapiens; identical to SEQ ID NO: 8898

SEQ ID NO: 8900 - DNA, 436 bp, Homo sapiens
tggcctcccaaagtgctgggattacaggtgtgagccaccgcatctggccaatcttttctttttctttcataaaagttgtactatttatgaagtacatgtgatattttgacacatagacacaatgtgtaataatcgaataaaagaaattcggatatccataacttcaggcatttatcatttctttgtattaggcacattccaattccactctcagttattttgaaatatactaaaaatcattgttaactacattcaccctattgtgctaccaaacactagatcttattctttccatataactgtatttttgtacccattaaccatctcctttttatcctcccttctccactaccctttttagcttctgctaaccatcattatacctctacctccatgagttcaattttttttggctctcccataggagtgagaacat

SEQ ID NO: 8901 - DNA, 436 bp, Homo sapiens
tggcctcccaaagtgctgggattacaggtgtgagccaccgcacctggccaatcttttctttttctttcatgaaagttgtactatttatggagtacatgtgatgttttgacacatagacaaaatgtgtaataatcgaatcaaagaaattcggatatccataacttcaggcatttatcatttctctgtattaggcacattccaattccactctcagttattttgaaatatactataaatcattgttaactacattcaccctattgtgctaccaaacactagatcttattctttccatataactgtatttttgtacccattaaccatctcctttttatcctcccttctccactaccctttttagcttctgctaaccatcattatacctctacctccatgagttcaattttttttagctgtcccatagtagtgagaacat

SEQ ID NO: 8902 - DNA, 436 bp, Homo sapiens; identical to SEQ ID NO: 8901

SEQ ID NO: 8903 - DNA, 1311 bp, Homo sapiens
ggaggaattgctatttaagtggaaagtgcttgaacagccaaatgagcacctgtcatgtttattttcactttgaaaagtagaaacatgacagtatagtttccactgcctatccaatatgaacttctggcattcttgttatcttctcaggaactgcactgtttgcttcttgtgttcaatttttttttttttccagggatgaggatgtatctctcctcctgaaactttcactctaaaatatgcccccaaatactgacattttcaagcttgtgcttttttacttgatatctgattttttttaaatttttatttaatagggagaaggtcatgacttatggaatttactctaaggatagggatctgagcaggttcctgagtacttgaaaggctttatttacctcttacacttttttgttacatccaggtttttgctcatttctctatcatttgtgtcttgaactttacctgaaatgcatgtcttgagtgcctactaaggtccaggcattgtgctggcagatttgatatatttttgtttattccttattacaggactattacatagtagactctcattctgacactcactttttttttccagaaaaaaaaattaatggagattgattgctaatgggtacagggctgcttttaaggctatgaaaatgctctaaaattagtttgtggtgatggttgcacatctctgaacgtactaaaatacattgaattatatactttcttttttcttcgttttgcagcttttgctcaaaggagaattagatatttaaaatgagtgaattgtatggtacatgaattagatctcaataaaactattttaaaaaaagaaactaaagcttagagaagtataatatcttgttcaatatgacactacctggtaaagcttttgtccaaatttttctgagaccaaagctattctttcttccactgacgcatgctatctctactaattatatagccacggtatcctttttctttaaaaatgtaggaaaaaatggctgggtgcggtggctcacgcctgtaatcccagcactttgggaggccaaggcggacggatctcttgaggtcaggagtttgagaccagcctggccaacatggtgataccccacctctactaaaaaaaaaaaaaaaaaaaaaaaattagccaggtgtggtggcgtgcacctgtaatcccagctactcgggaggctgaggcatgataatcacttgaacctgggaggcagaggttgcagcgagtcaagattgcaccactgcactccagcctgggcaacagagtgagactccgtctcaaaaaaaaaaaaa

SEQ ID NO: 8904 - DNA, 1311 bp, Homo sapiens; identical to SEQ ID NO: 8903

SEQ ID NO: 8905 - DNA, 611 bp, Homo sapiens
gaaataaaatgtagacattctctttccccttgctttcccatctggtcctttgtaagtgttagcgtaaagatagttatgttgacatatttaaatatatgttgctgctgctgtatttttaaaaaacataaatgatactttattataaatattactctagtgtttgttttttgtacataatatgtgctggaaatttttttatgtcagtatgtcattcatattattattgttattataaaaatactacatgcacaaggaaataaaaattgaaagatttaaaatggaaagttgaggaagatctaaaatggaaagtgaaaaactccacctatccccaagttccatcccttagaggtaactgcttttcactgtatttgcgttttattctttgattacctccctaacccttaaacatatatatacttgtacttttatttctttaataactttaagcattcttggttgttgatcagttaagaatgacagaaacaggcagattgctggagcccggaagtttgagtccagcctgggcaacatggcaaaactctgtctctacaaaaaatacaaaaaaaaaaaaaaaaaaagccaggtaagccaggtatggtggcaaacacccg

SEQ ID NO: 8906 - DNA, 611 bp, Homo sapiens; identical to SEQ ID NO: 8905

SEQ ID NO: 8907 - DNA, 295 bp, Homo sapiens
actactggccgggtgcggtggctcacgcctgtaatcccagcactttgggaggctgaggcgggcggatcatgaggtcaggagatcgagaccatcctggctaacacggtgaaaccccgtctctactaaaaatacaaaaaattagccaggcgcggtggcaggcccctgggagaggctgaggcaggagaatggcgtgcacccgggaggtggagctttcagtgagctgagattatgccactgcactccagcctgggcgacagagccagactccgtctcaaaaaaaaaaaaaaaaaaagaa

SEQ ID NO: 8908 - DNA, 200 bp, Homo sapiens
cccagcactttgggaggccgaggcgggcggatcacgaggtcaggagatcgagaccatcctggctaacaaggtgaaactccgtcactactaaaaatataaaaaattggccgggagtggtggcgggtgcctgtggtcccagctactcgggaggctgaggcaggagaatggcgtgaacccgggaagcggagctggcagtgagc

SEQ ID NO: 8909 - DNA, 303 bp, Homo sapiens
tctggccgggcgccgtggctcacgcctgtaatcccagcactttgggaggccgaggcaggcggatcatgaggtcaggagattgagaccatcctggctaacacggtgaaaccctgtctctactaaaaatacaaaaaattagcagggcgtggtggcaggcacctgtagtcccagctactcaggaggttgaggcaggagaatggcgtgaaccagggaggtggagcttgcagtgagccgagatcgcaccacggcactccagcctggatgacagagcaagactccgtctcaaaaaaaaaaaaaaaaaag

SEQ ID NO: 8910 - DNA, 305 bp, Homo sapiens
ttaccggccaggcgtggtggctcacgcctgtaatcccagcactttgggaggccgaggcgggcagatcacgaggtcaggagatcgagaccatcctggctaacatggtgaaaccccgtctctactaaaaatacaaaaaattagcctggtgtggtggcgggcacctgcagtcccagctactcggaaggctgaggcaggagaatggcgggaacccaggaggcgaaggctgcagtgagctgagatcgcgccactgcactccagcctgggcgacagagcgagactccatctcaaaaaaaaaaaaaaagaaa

SEQ ID NO: 8911 - DNA, 326 bp, Homo sapiens; identical to SEQ ID NO: 8033

SEQ ID NO: 8912 - DNA, 319 bp, Homo sapiens; identical to SEQ ID NO: 5402

SEQ ID NO: 8913 - DNA, 163 bp, Homo sapiens; identical to SEQ ID NO: 6516

SEQ ID NO: 8914 - DNA, 316 bp, Homo sapiens; identical to SEQ ID NO: 5403

SEQ ID NO: 8915 - DNA, 305 bp, Homo sapiens; identical to SEQ ID NO: 5407

SEQ ID NO: 8916 - DNA, 300 bp, Homo sapiens; identical to SEQ ID NO: 7804

SEQ ID NO: 8917 - DNA, 316 bp, Homo sapiens; identical to SEQ ID NO: 5409

SEQ ID NO: 8918 - DNA, 157 bp, Homo sapiens
gtggtgactccgctgtaatcacagcactttgggaggccgagacaggtggatcacgaggtcaggagatcgagaccatcctggctaacacggtgaaaccccgtctctactaaaaatacaaaaaaattagccgggcatggtggcaggtgcctgtcgtccc

SEQ ID NO: 8919 - DNA, 283 bp, Homo sapiens; identical to SEQ ID NO: 5410

SEQ ID NO: 8920 - DNA, 1052 bp, Homo sapiens
tcacgcctgtaatcccagcactttgggaggccgaggcaggtggatcacgaggtaaggagatcgagaccatcctggctaacacggtgaaaccccgtctctactaaaaatacaaaaaattagccgggcatggtggcaggcgcctgtggtcccagttacccaggaggctgaggcaggagaatggcgtgaacccgggaggcggagcttgcagtgagccgagatcgagccactgcactccagcctgggcaacagagctagactccgtctcaaaaaaaaaaaaaaattattgtttatatttgagatgagaattcttgatacattttttggtatattaaaaagtgagataaattgtttgtgctttaacatgtaaattgcatcgtagattcataaaattcatcttggatttatttctagcacagtactttctattgaaagcagtttactatcaagaaaatctatcaaaggggatggaatcccattcttcattttcatgaattgttttaaaaagtgttcttctggccagggtcggtggctcacacctgtaatcccagcactttgggaggtcgaggtgggtggatcacgaggtcaggagatcgagaccatcctggccaacatggtgaaacctcgtctctgctaaaaatacaaaaatttgctgggtgtgaccgcacgtgactgtaatcccagctactcgggaggctgaggcaggagaatcgcttgaacctgggaggcggaggctgcagtgaaccaagatcgtgccgctgcactccagcctggcaacagagccagactccgtctggaaaaaaaaacaaaacaaaaaacaatgccgggcgcggtggctcacgcctgtaatcccagcactttgggaggccgaggcaggcggatcacgaggtcaggagatcgagaccatcctggctaacacggtgaaaccctgtctctactaaaaatacaaaaaattagccgggcgtggtggcaggcgcctgtagtcccagctactcgggaggctgaggcaggagaatggcatgaacccgggaggcggaacttgcagtgagccgaga

SEQ ID NO: 8921 - DNA, 203 bp, Homo sapiens
attttaccttgtgccgggcacggtggctcacgcctgtaatcccagcactttgggaggctgaggcgggcggatcaagaggtcaggagatcgagaccatcctggctaacacggtgaaaccccgtctctactaaaaatacaaaaaattagccgggcgtggtggcgggcgcctgtagtcccagctactcgggaggctgaggcaggag

SEQ ID NO: 8922 - DNA, 293 bp, Homo sapiens; identical to SEQ ID NO: 5412

SEQ ID NO: 8923 - DNA, 295 bp, Homo sapiens; identical to SEQ ID NO: 5413

SEQ ID NO: 8924 - DNA, 138 bp, Homo sapiens
ggctaatgcctgtaatcccagcactttgggaggctgaggcgggtggatcactaggtcaggagctcgagaccatcctggctaacatggtgaaaccccgtctctactaaaaatacaaaaaaattgaccgggtgtggtggc

SEQ ID NO: 8925 - DNA, 167 bp, Homo sapiens
gcctgtaatcccagcactttgggaggccgaggcgggtggatcacgagctcaggagatcaagaccatccttgctaacacggtgaaaccccgtctctactaaaaagacaaaaaattagctggacctggtggcgggcgcctgtagtcccagctacttgggaggctgaggc

SEQ ID NO: 8926 - DNA, 300 bp, Homo sapiens; identical to SEQ ID NO: 5417

SEQ ID NO: 8927 - DNA, 183 bp, Homo sapiens
tgtggtggctcacgcctgtaatcccagcactttgggaggcggaggcgggtggatcacgaggtcaggagatcgagaccatcctggctaacatggtgaaaccctgtctctattaaaaatacaaaaaattagctgggcgtggtggtgggcgcctgtagtcccagctgctcaggaggctgaggcagg

SEQ ID NO: 8928 - DNA, 184 bp, Homo sapiens
gtgcagtggctcacgcctgtaatcccagcactttgggaggccgaggtgggtggatcacgaggtcaggagatcgaggccatcctggcccacatggtgaaacctcgtctctactaaaaatacaaaagttagccaggcatggtggcatgtgcctgtagtcccagctactcgggaggctgaggcagga

SEQ ID NO: 8929 - DNA, 306 bp, Homo sapiens; identical to SEQ ID NO: 5419

SEQ ID NO: 8930 - DNA, 294 bp, Homo sapiens; identical to SEQ ID NO: 5420

SEQ ID NO: 8931 - DNA, 127 bp, Homo sapiens
ccaggagcagtggctcaggcctgtaatcccagcactttgggaggccgaggcaggtggatcaccaggtcaggagaccgagaccatcctggctaacatggtgaaaccccatctctactaaaaatacaaa

SEQ ID NO: 8932 - DNA, 299 bp, Homo sapiens; identical to SEQ ID NO: 5424
  SITE (18): n equals a,t,g, or c
  SITE (27): n equals a,t,g, or c

SEQ ID NO: 8933 - DNA, 321 bp, Homo sapiens; identical to SEQ ID NO: 8034

SEQ ID NO: 8934 - DNA, 316 bp, Homo sapiens; identical to SEQ ID NO: 5429

SEQ ID NO: 8935 - DNA, 130 bp, Homo sapiens
cctgtaatcccagcactttgggaggccgaggcgggcagatcacgaggtcaggagatcgagaccatcctggttaacatggtgaaaccccatctctactaaaaatacaaaaaaaagttagccgggcgtggtg

SEQ ID NO: 8936 - DNA, 257 bp, Homo sapiens; identical to SEQ ID NO: 7817

SEQ ID NO: 8937 - DNA, 102 bp, Homo sapiens
cccagcattttgggaggccgaggcgggcagatcacgaggtcaggagatcgagaatatcttggccaacatggtgaaaccccgtctctactaaaaatacaaaaa

SEQ ID NO: 8938 - DNA, 318 bp, Homo sapiens; identical to SEQ ID NO: 8035

SEQ ID NO: 8939 - DNA, 298 bp, Homo sapiens; identical to SEQ ID NO: 5442

SEQ ID NO: 8940 - DNA, 140 bp, Homo sapiens
ttctcacgcctgtaatcccagcactttgggaggccgaggtgggtggatcacgaggtcaggagatcgagaccatcctggctaacatggtgaaaccccgtctctactaaaaaaacacaaaaaattagctgggcatggtggca

SEQ ID NO: 8941 - DNA, 306 bp, Homo sapiens; identical to SEQ ID NO: 5445

SEQ ID NO: 8942 - DNA, 223 bp, Homo sapiens
tggctcacgcctgtaatcccagcactttgggagtccgaggcaggtggatcacgaggtcaggagatcgagaccatcctggctaacatggtgaaaccccgtctttactcaaaatacaaaaaaattagccaggcatggtggcgggcgcctgtagtcccagctactctggaggctgaggcaggagaatggtgtgaacccccgaggaggagcttgcagtgagccgaga

SEQ ID NO: 8943 - DNA, 143 bp, Homo sapiens
atcccagcactttgggaggctgaggcgggcggatcacgaggtcaggagatccagaccatcctggctaacatggtgaaaccccgtctctactaaaaatacaaaaaaattagccaggcatggtggcgggtgcctgtagtcccagc

SEQ ID NO: 8944 - DNA, 1575 bp, Homo sapiens
tgggccaggcgcggtggctcacgcctgtaatcccagcacttagggaggctgaggcgggcggatcacgaggtcaggagatcgagaccatcctggctaacatggtgaaaccccatctctactaaaaatacaagaaaattagccgggcgtggtggcaggcgcctgtagtcccagctaatcgggaggctgaggcaggagaatggcgtgaacctgcgaggtggagcttgcagtaagctgagattacgccactgcactccaacctgggtgacagagtgagactctgtctcaaaaaaaaaaaaaaattccaacccctttacactgggtcagtatattgaaatatataaactttcacttgggaattattttttacctttgcacccatatttgcctgaagccgtttaagttgtcgaagtcgcatgtattcagatttcacttttcttttccagtaagtgatacatttggaggtagggggatttggtatttccatcttgctgtaatctaagagagacagagatgagaaatagcattttattgcctggaaataaagcattcctcaaatacaaaaaaaaaaaaaagatcaattatgctttcattcccattaaatttactcataaaaacacacatttaaagaacccaaatgtgtgagttcaacagaaagtttcaatttaaaaaaaagaggcaggggctcacacctgtaaaaccaacactttaggaagccgaggtgagagcactacttgagcccagtgatttgagacaaccttgggcaacatggtgaaaccccatctctacagaaaatacaaaagttagccagatgtgttggccagtgcctgtagtcccagctactcaggaggctgatgtgggaggactgcttgagcccaggaggtcaaggctgcattgagccgtgaccacgccactgcacttcagcctgagtgacagagtgagaccttgtctcaaaaaacaaaacaaaacaaaaaaacaaaaaacaacaagaagtccaggcacggtggctcacgcctgtaatcccagcactttgggaggccaaggtgggtggatcttctgaggtcagtagttcaagactagcctggccaacatagtgaaaccccgtctctactaaaaatacaaaaaaaaaaaaaaattagtcgggcatggtggcttgtgcctgtaatcccagttatgtgggaagctgagacacgagaatttcttgaacctgggaggtggaagttgcagtaagccgagatcgcaccactgcactccagcctgggtgacacagtgagactccatctcaaaaaagaaaaaaaaaaaagtccgggcatggtgattcatgcctgtaatcccagcactttgggaggccaaggtgggtggatcacgaggtcaggagttcaagaccagcctggccaagatgctgaaaccccgtctctactaaaaatacaaaaattagctggatgtggtggcacacgcctataatcccagctactcaggtggctgaggcaggagaatggcttgaaaccgggaggtggaagttgcagtgaaccgagatcacatcactgcactccagcctgggcgacagagcaagactcc

SEQ ID NO: 8945 - DNA, 279 bp, Homo sapiens
cccccgcctgtaatcccagcactttgggaggccaaggcgggcggatcacgaggtcaggagatcgagaccatcctggctaacacggtgaaaccccttctctactaaaaatacaaaaaatcagccgggcgtggtggcgggcgcctgtagtcccagctactcaggaggctgaggcgagagaatggcgtgaacccgggaggcggacttgcagtgagccgagatggcgccactgcactccagcctgggcaacaaacagagcaagattccgtctcaaaaaaaaaa

SEQ ID NO: 8946 - DNA, 146 bp, Homo sapiens; identical to SEQ ID NO: 6519

SEQ ID NO: 8947 - DNA, 271 bp, Homo sapiens; identical to SEQ ID NO: 5448

SEQ ID NO: 8948 - DNA, 296 bp, Homo sapiens; identical to SEQ ID NO: 5450

SEQ ID NO: 8949 - DNA, 270 bp, Homo sapiens; identical to SEQ ID NO: 8036

SEQ ID NO: 8950 - DNA, 243 bp, Homo sapiens
tcggccgggcgcggtggctcacgcctgtaatcccagcactttgggaggccgaggcgggcggatcacgaggtcaggagatcgaccccatcctggctaacgcggtgaaaccctgtctcttctaaaaatacaaaaaattacccgggtgtggtagcgggcgcctgtagtcccagcttctcgggagtctgaggcaggaaaatggtgtgaacccgggaggcggagcttacagtgagccgagatcgcgcc

SEQ ID NO: 8951 - DNA, 100 bp, Homo sapiens
actttgggaggccgaggtgggcagatcacgaggtcaggagatcgagaccatcctggctaacgtggtgaaaccccgtctctactaaaaatacagaaacaaa

SEQ ID NO: 8952 - DNA, 281 bp, Homo sapiens
cacgcctgtaatcccagcactttgggaggccgaggcgggtggatcacgaggtcaggagatcgagaccatcctggctaacacagtgaaaccccgtatctactaaaaatacaaaaaattagcagggtgtgggggggggcgcctgtagtcccagctactcaggaggctgaggcaggagaatggcgtgaacccgggaggtggagcttgcagtgagttgagattgcgccactgcactccagcctgggcgacagagcaagactccatctcaaaaataaataaataaa

SEQ ID NO: 8953 - DNA, 319 bp, Homo sapiens; identical to SEQ ID NO: 5458

SEQ ID NO: 8954 - DNA, 311 bp, Homo sapiens; identical to SEQ ID NO: 5460

SEQ ID NO: 8955 - DNA, 300 bp, Homo sapiens; identical to SEQ ID NO: 5461

SEQ ID NO: 8956 - DNA, 277 bp, Homo sapiens; identical to SEQ ID NO: 5464

SEQ ID NO: 8957 - DNA, 17946 bp, Homo sapiens
aagatttttcaaggaattttcttctctataatataattaatgatctcctacttggacttctgtaaaagattacagtaaatcgtgaagtcttatggaggtttttgcgggagtgggtgggagtagttgtctattactgcgtctttgaatctaaaacagtaccaggatggggccagagggcatctgggctcttcacggattatataggcttgaccttgttagtactgcatgctgtcagagcctcatccaaaaaccactgagatgtttttgtgcaggggaaataaaatttcaagcactggcctatcatctaaagtgacttcttttcttgacccagtagttttctggtgggttataaagtgactttttttatgccgagaactattgaaacaatttatttttgtgtacaaatatgtatgttttgaattaactataaatattacgttataaaacttttttatttttatttttataaaacttgtgtttttaaattggaaattacactcattgaattgttttacacatgcagacacacagacacacacacacacacagcgaaacaaaatcctgagtgacagcaccctgtaactaactgtggtgagatttgattcaagttgacagactcttctgttttagagagtaaatgcctttggattataacttacatgtctttctcaggaaaccagaatgggaggtgggtaacgaaatattctttttggaaatggaagaatcttagaataaaatataaattcaaattgccaatactggcttgacggtaaagtggcaaatctcaccaagacagaggattgtgtgcattaccctgagctgccactcattcatcaggggtttactgagcatttgttatgtgcctggccctgtgctaggccccggggatggcaggataaatccaatgtggcttctgcctgtgaggttctgtaagtttgtggggaagagggatgtctcagcagaagcttgtgagactgtagaaggggtctcagggacactggaggtgcaaaaactagctcttcctggagtgggagtaggactagcttccctgaagcagctgccctggtgctgggccttgggaacagatggaggagccggtgtccccagccaggactccgtaaaggtgtggcattgcaggagggcctggtctgttctgaagagggtagggtgagactggaaagccaaacgggccagattgtgtggaggttttatctcatgggcagcgtaccatttggcccaggagtgccatgcctggggttgtatttttaaaaatatagtaaccatctccccctgcactctcatctaccctgctgcgtattcttggtgatacgttccaagacccccaatgaatgcctgaaaccacagatggtactgaaccctgtatatactacacacgaatttcacttttcttcacaatttcatgggtagaagattcgttcttaccgaagatcttaacatccttacctctttttttttccttattgagacttttgccgtttcacttaaaggaagcatttttggcttctctttggcatatctgaattgccagcatcactatccttacactttgggggcccttctaataaataaagggttacttgaagacaagcactgtgatactgagacagttgatctgataactgcgttggctactaagtaacaggctggcagcatccacagcatggacacgctggacaaagggatggctcgcagtttttgtaatggcaaaaatttcatcacactactcagagcgacatgtagtttaaaacttacgacttgtttatttctggaattttccatttagtatttttgaaccggagttgaccatggataactgaaattacagaaagtgaaacgtggctaacggggtgctagtccctcagtcatccccaagcccttcaccaactctgccctgtatttcagatcaccgaagtggccttggagtacaacaactgtcatggggaccaggtggtggagcgtctccttcagcacctgcggcgggtggatgctccagtgctggagtccctggccctggaagtgccggcacagctgccagacccgccaacgatcacagcgtccccctgctgcaacactgtggtgctgccccagtggcactccttctccaggacccacaacgtctgtgaactctgtgtcaaccagacctccgggggcatgaagccgagctcggtcagcgtgccacagtgcagcttttttgaaatggcagcagctctggattctttctacctcaaggagcagaccttttatcatgtggcatcagacagcatagaatgcagcaattttttaacttcctatagccccttcagctactacactgcatgttgcaggaccataagcaggggtgtgtcaggcttcatcgactctgaacaaggtgtctttgaagcccctactgttgcattttcttcccttgagaagaaatgtgaggttgatgccccaagctccgttcctcacattgaggagaacaggtatctctttccagaagtggacatgactagcacaaacttcacaggcctgagctgcagaaccaacaagactctcaacatctaccttttggattcaaatttgttttggttatatgcagagagactgggtgctccgagctccactcaggtgaaagaatttgcggcaattgttgacgtgaaagaagaatctcattacatcttggatccaaagcaagcactgatgaagctcaccctaggtactgcaggcagtttatttccccaagcattgtacattttgcttgacttcatatgggtaaattttattgatggctctcattacatttagttgtggggtgatgtcaccttcgtagctcattttaagtctttagaccaccatcagtcataattttcaaagaagctaattttgtctattaaatggaacagaaacttcctcactctgaattttggataagtttgtcatttagcccatggtgggggtaagagtcccactttctaaattggcgatttctgtcacatgtctaaggtagaaccagctgcaggcagtggggacttggggactagaacaggcagggaggtggagagctattctggtgggatgtcctaggggctgatgaaagtgagccttgacagcagctttgttctaaaggagcttaaagagaaagcagtggccgggcgcagtggctcacgcctgtaatcccagcactttgggaggccgaggcgggtggatcacgaggtcaggagatcgagactatcctggctaatgtggtgaaaccccgtctctactaaaaatacaaaaaaaaaaaaaattagccgggcgcgttggcgggcgcctgtagtcccagctactcgggaggctgaggcaggagaatgtcgtgaacctgggaggcagagcttgcagtgagcagagatcgcgcccctgcactccagcctgggcgacagagcaagactccgtctccaaaaaaagagagcagtgaagaaggaagtagagccgccttgcctccctttttgtctcataggcttaaatgtctaaggatcaaggccaccagacctaatttgttctgctgctgtttcataatgtactgagtaatattgctgggacctggggtacctacactgtaacaagtgtaaagtgcaaataaataagtgtcagtcgcaaaccagcaaaacccactttttgaggagtaaggctccatgatgagaaagcacccagagcttgcccctgggacttggcagcaacattgggctgacccaccctggcctgttcccaggaatttgctgatgcccttgactacacacaatgaagtgagaattcaaaagccacgttagttcagcctcattggaaacgggagggagggtcagtgtatgccgaatggagaaaggaggaatttggtagggaaggaaacctttcatttcaagttttaaagtatgaactcaacagtagactcagagcttctacatatgagtctttttagccatcctctttcaaatctaggtgaagcttgtttcttacattagacacatttgtgaaaaggctttatgtaaatattgatttttctatatcaagttacatattataaatccaagagttcctcactgtgtaaaagaaccctgtgaccagtcactttttgaagggcataaatctgtcgatattatagattactcccaattcatgttatctaaagtcattttgatgtgttgagctttcttaaaatgaaacaagcattttttttttaaatgggaaagagactccagagaaatggggtcagtgttcctacaagcatgtatttttgaggtagtctgtattagattttcctgaattccattcagtaatgctcaagtgtttaatgacctcataatgtgttcactttgaatttaagggtaattgaaagaagccttctttagatttctttccatcttctgtatcttctctgaaatgtttagcctagctgttctttgtcctgcagttagtgacagaattcttagggagcttgtaaaaaacacctactgtgtgtcattgttggtttagagacttaactcataaatcagctgtctctaggctagtttcagaatttaggctttattcagattaggaaataattcttggtttcatgtttcaaaaacatagccaactaagtgtttctcagatgctgatcatgaattctctttagtattcacatgacattcttcacttcctcttccattctgcacgctgcattgcccattgcacctcaaaatggagggagttagaagaaagaaaaagaactgaaactttagctgagtgcaatggtggacgcctgtagtcccagctactctggaggctgaggtaggaggatcgcttgagcccaggagtttaaggctacagtgagctatgattgcagcactgtactccagcctgggcaacagagtgagaccctgtctctttaaaaaaaaaaaaaaaagtgaaattcaaattagtattgtttcagatgaagcaaaggactctgaagatggcagaatttgtggtaaaactgttggttcaaatcaggtttttgattattatgggttttatgtatttttccactacatataattttttcttaacctttaaaaaaagaaacttaaagaaccttaataaaggaaacaaaaaactgtagctccttgtcctcaaattaatgagcatttaaacacattccacactactgtagcttgtgcagttgtcacatttgtggttaagcttaaaggtcttagtattatagggtgaaatttcttgaaaagatggtggcttgttgatgatttatacagtctcacttggtgtctatttgtggaccagtccttttaaaaaaagaatagtctatgaatattagagcatctaacattgcatagtgttttgttatccacattactgtctgctgagttaatactaccagagctaaacctgatgccacccgggcagctttgtttggggttttgctgataggtgaaatgttaaaaatgtgagcctatgaagtcatttgagtttttaaaatgtggagtttaaaagtaggccagctattctctttgtatctagaggagagttgatctcattttctctttatttttagagtcttttattcaaaacttcagcgttctctatagtcccttgaaaaggcatctcattggaagtggctctgcccagttcccgtctcagcatttaatcactgaagtgacaactgataccttttgggaagtagtccttcaaaaacaggtatggagtcatgagaggcaaaagttaagccatctgtccctcttaaaataatttccaaactacagttgttggggtgagcagctgtttttgatgtatagaagagtaaccacgtgatggcccaattatggaccgtgaatgaattacatgtggtttttaaatttcagaaaagtgctccagaaagcacagtattggaaagacctaaagatgaaaattttcactgtaatatttgcataggtagcatttttcgggtgcttgctggattctaagcaatgaggaaagaaatgaagaagagcccatttcccggtgcaagtaacatctgtcttccctttcccacaggacgttctcctgctctattacgctccgtggtgcggcttctgtccatccctcaatcacatcttcatccagctagctcggaacctgcccatggacacattcactgtggcaaggtaagcaggcctcttctgcagcgctttgggctgtatgcccattttcactcttatttgcagcttagccatatggtgtgtgagggtctgcccattttccattaacctttggtaggacttggctgaatttaattgtcaggttgaagccatgagcaaagcctctttgaaactgaacttttcctcatgaattctgagtgttccttccatgatgttgatgtttagccctgactagattcgtaggtggctgagtgcagttctgtggggagagcactgacctggttgccaggatggccccgtggaataccatgggacagttgccccaggcaatgccagtgggtcctgggatcccaagcagatctctccaccagccctggtttatctcatttgtgaaattaaaaggaaagaccaatagatatccacattctggtattgtgattccatgggtactgtatgtgcgcttttgagtaaacaaaatttttaaaaatattttttgggaaaagaaggctcaaatacagagtctttagatggggtagtaagcagttttgggtgaggaaaactgttcacatttaaccccccacctcccccaaaaccctacagatagataagagttaaatataaaaaaatcaaaacaaaaaataggatttgctgattcctctgggagatggaaactttccaaagtggaagcagttggaaaaataaagagagaaaaatggacagattccactagaaatacgtgcagtgaaaacagggaaagcagacaaaaagggggaccattaatatattttccagtgtctctgtgtcacctgttatatgcactgtaagtaataattagaatcaaatctgaggagttactatgttgggagagtttttgatatacatattacctgactgagtccttgcgacgcttagtgaaggcactctagttaaaaaaagaaagtgctatttgtgttgaggaggaaactgagacatagaaagattcgacaagttgcccagagtttcaagctgcaaatgaggggccaggattaaatcaggcattcatactccagcctccccggaaattaaaatggtttagaagatggctgagaccgattccattctgaacaaaggatgtgagcaggtttttcttttaagaggagagagtaaataaacaagtggggaaattataacctaataaatgtaaattaaaacagtaacaaagtatcatttaacatattaaagtaatcagtggttttaagtgacagaatcttgtgttgataaaataaaatggaaactgcagtcagatgtatctaatggaatgagtacattgccataactcttttggaaagcattttggcaacatttacaagaaatcaacaaaaacagttaacacatttttgacccagttaattttactttggagaagtaatggaataggaattccgaagaagcatgagctcatcattatagcattgtttacatccaccaggagatgaatgtttaagtaaattatggctgggcatttaatggaatttttatccttcaacagtgcttttcatacagttaatggaaaagaacagagtatgaaatatatgacaactcttcttaaaaatatgtaaggatataggcgaggtgcagtggctcatgcctgtaatcccagcatgttgggaggccgaggtgggcggatcacctgaggccaggagttcgagaccagcctggccaacatagtgaaaacctgtctctactaaaaataaaaaattagccaagtgtggcggcacgtgcctgtagtcccaactactcaggaggctgaggcaggagaatcacttgaatccagcagccggaggttacagggagctgagattgcaccactgcattccagcctgggcgacagagcaagactgtgtctcagaaaaaaaaaagtaagcatatagaccaagcctgcagcctgcataagaaaggggggccttatttagcccaatggaattctgagtggattttgacaatgttttaattttatagtttgctttctttgaagtaagaatcaagtgagaaaaagcatttaattatggaatatagtgttcactcccacttgtttagaaaggaacactaatgttttaggtaggctggcacaggtgaggcaggagtgctgttttgttagtaaacttttggtaaatggttttcatttggttatgccttttgttgctgttgttgttttttgtttttgtttttttttttgagatggagtcttgctctgttgcccaggctggagtgcagaggtgcaatctcagctcactataagctccgcctcccgggttcacgccattctcctgcctcagcctcccgagtagctgggactacaggcgcccgccattatgcccagctaattttttgtatttttagtagagacgggtggcgtttcaccgcgttagccaggatggtctcgatcacctgacctcgtgatctgcctgcctcggcctcctaaagtgctgggattacagacgtgagccaccacgcccggcgttgttgtttttttgagacagggtctcactctgttgcccaggctggaatgcagtggtgcaatcacagctcactgcagccccaacctcccaggttcaggtgattctcccaccttcccaagtagctgggactacaggcatgtgccagaatacccggccaattttttgtagagacagggtttccccatgttgcccaggctagtctcgaactcctgggctcaaacagtccacccacctcggcctcccaaagtgttggatttacaggcgtgagcccctgtgctcagcctggttgtgccattttttgaaaagcaaatttcatccttttggacacatacatgacacttaccgcaccctcactccccccagttatgctttctaaaaacttctgtcaaggtaaagattgaaaacatgttcatcttttgtgtgcactgtttatgaatagtagctgaatagcccctccgcaaggaggatgcagccccttccataaaggatgctgttgtggctccatgtctgcttagcccgagtgtgggcgcccagctgtgtgcccagctctgtgccagctgcccggggcaggcctctagagcagttgcggttagctcccacagtgattgagcacaggctgggtgagttagtacagatgtcattttctgtattagaaaattaatgtcaaatctgctaagaaaataggctgtttttggtctctatccagatttacaacataaagagggtataattttccatcttcagaggggcttgatgtattttgctcaatgatttcctttcttttcccagagctattcagggattaaaatacttggctagatcctgtcaggtgaggagtgaatgactcctcaggtgtcagtgcggcattttctgcaagttcatttttactttcaggacatcacattgccactcagtggaaagcgtccacgtagtagaatgttgtatgtcttggaagtatcagcgcccagctcacacctggtagtacattcatcgagaagggactagcccaatgtggggtgtaaaaaatgcaccaggttcttgaagttatctgagaaggttctttcaagttggtgtttcttgggctgatcatctgccatttctgttctttccctttaccaggattgacgtgtctcagaatgaccttccttgggaatttatggtcgatcgtcttcctactgtcttgttttttccctgcaacaggtaatgccaaatttttgtcactggtgggcagttgggattcttttgtggaggtctgaaaatgaaatgggtttaagatgtaaatcattcattatgttcaaaaaatgttcccttaggaaccaggcgtggtggctcatgcctgtaatcccagcactttgggaggctgaggcaggcagattgcttgagctcaagaggttgagaccagcctggccgacatggtgaaaccccatcagtacaaaaaatacaaaaattagccaggcatggtgacatatgcttgtaatcccagctactctgaggctgaggcacgagaatctcttgaacctgggatgcggaggttgcagtgagccaagatcacaccactgcactccaacctgggtgacagagcgaggctctgcctcaaaaaaaaaaaaaaaaaaaaagtgtccttagggacataaaagggttgtagtgtcaggatgttatgtgtggtatggatcttttaaaggttgtttttcccagtctatctcttacccgagcttgaatgtggccgtgagaattcttagctttcatggcctgtatgaacatatggaggacgcagagactgacaggattcttctgttgccctggctggagtgcagtggtgcaatgtttgtgtggggcaaaacagcagagaatctgtggagccctgcctgccccaagccttccacttgcttgtctctcagttggcctcccagcagctcctcatccctctcgtacagaggacagggtggctttcttacccatggcacgtccttttctcggattccaggaggcctacaaaggggttttctcccatgcgtgcagactgctgtgaacgtccgccatgggatggtcgcttgattttttcacacttgcctaatcagtattccaggtgcagttcttaacggcaactaccccggaagcccctgcaagcaggacattaacaagggggagcggacttccagttagtaaacgtagatgcagatgttttagtggaaaaagaaattaactcttggtcctttagagcctaatacactggatgtttgctccctttttatagattccctttggtttttagaaagttgagtccttttggggacccactcacatgactttgacagtatcttctctccaggggaaagtgtctgcagcatcatttagggagttccctggctcgcatgtatgacgtttgctgttttaatttcctgcctcccttttgcgattcagcttgtcatgtttctctaggagagtgtttccttcatatctattgaatcattcccttggtttttgctttgtatctcaaagaatttttgcgggagtacttctgtggtagtagggtcttgtcacatcatgcactaaaaacagaatgtgactcacccttttctactgctgactgagttgtgatgaggctttttctttctaagaagtgtttaaattaccacatagtccaggaatcacggacagtaacactaacactttcatctgtgtgggccaggagttgggcatgtagtttaatgacgtataatttttgaattccaagcatagtttgaaaaaatatgaaaatcttagcacccagcacatgccttttaatgaagaagttctcagcagctggcagaaatgcatctgtgtagagagacacaggcggaacaggtggcagggtggggcgtcatctggaggcctgcgtctgggctgagtgaccttcgttcttaggctgcctggtgtgggaaacgtgaagatgtgcgcatttctccggccccatgctgggcacttgctgcaggcccttacccttgtcgtttctaaatatcgaacataagaagactgtccacttctcttttaatgtaaggatgttggtaaaccaaagctttatggctttggaatggaatttttctcatttcctaaaaataaatggtagaagtaaagtatgctcatcatgagctggtcccaagcgagtgtttggtttagccagaaggtaaatgggcaagcagcgtgagctgacagcttgcaaaagaggaaatgaaaaaggctgttggataacatgtagtaagacctttttcattgtccacctgcttatgctatttttagtgaaaagaatatgaaattgtatatttactgtgataaaatataaacttgtgcatgtgctaggtggagatgttcacagaggggaaaatgttgaggtgttaacattgatgacttcagaggagtgagattgcaagtgatttgaaggtgctgcttgtatgtttttacatcccttgcaaattgtctacaaagagcatgtcttgatttataaaaatcatgaaggaaaaaaatgcaagagcctgtccttgggaggaagaggaaggggtggggccttgagggagacatagccttcctgtgcagaggcatcttggagccacttgctccaccgagcaggtgctcctccagccagcacttgcgtcagactctgtgtgacattgcaaaatataggtgctctggcctggccctgggccagggtgatgagggggagatgggtgctcctgtccaccaagagactctgatgtgtcccaggggaagaatcacagttttttagaggtgtgccctgccactccctcagggttagaggagagttgcatagacatggggacctcttcccaccatagtttcacatgactgctttcctggaagtagactgttgacattctctgtccctgctactttcacaaagtgtggcagtattttagtgtgcccattagggacattgatggagagtgcaccaagacctcttagttagcagatagcatgctcacggatgtcactgtcctgtaaatgtctggaggtagacatcctgagggatcttggcagctttttctgggaagtaattcacgtttactctgccttacaagaccaggcttgtgccgcagaacgtgggggcaggtccagcgtctggtattcttccatgggcccacttgacagggccacgatgtgttttcagttgttgtggggttttttggttttctgtttttgagacaaggtctgactctgttgcccaggctggagtgcagtggtgcaattacggctcactgcagtcttgaactcctggactcaagtgatcctcccacctcaggctcctaagtagctggatctacaggtgtgtgccaccttgcctggctaatttttttatcttactttttatacagatgaggccttactatattgtccaggctggtctcaaactcctggcctcaagcgatcctcccacctcagcctcccaaagcactgggattacaggcacacagcaccacacccagctttgtcatttgaatggctgggccccacttgaagaaagcttatatgttaagaaaactaagctttaaaggaggggatggttgaatgtttaccccaaaattataaaacaatttacggccgggtccagtggccctgggcagccaggctctggagtccctgctgttgacttccattctgttaacacctgagggagacaaactcggctgccggcccacctcatacctaagtgcataaagctggtagttttgatcaattgcagccaggctgtacaggcacaggtaaatagatatgtgagagaaacatcatcagacgattaaatgacaagttctgaagaggaattttctagatctctagatcaggacctggaacaaagctgtagggaaaacccctttctatgtcaccttccttccttattctgtgctctcagggctgggcagcctgaattcatagtcctttggttgggctgtttgccagttatcaggttgccaggtgtgagccagatgtacctggggaatgggggtacagtcacccccagttgagaacccctgccttagagaatgtgtaataaatgcttgctgaagaaacagactgggtatctttcaagttcttcctttttctccgggcactgtcagtgggcacaagagggacataggtgggacactcctgcctcccctggacgctcttcctgacacagccgctgggcatctccgagcacacagaggccccatgcctacacactcctggggccctgcatcactggctttaggcctgggcctaggagctcttgtctttcttggagggtgtgggtgaagctgagctctggcttcaggaacagataagccatcttaattacagaacgagcatatgggacagcctcagctttgtagagaatttcttgcccaggcaacattttccttactttcagtaagtaaaatccacggaacgtcttttcttggtgagaagtagatggcctggcctcaggtacagcctgcttttggactcattgtgttggtgtgactcctgtctttgcttcctttccctctctctccagaaaggacctaagtgtgaaataccccgaagacgtccccatcacccttccaaacctgttgaggttcattttgcatcactcagaccctgcttccagcccccagaatgtggctaactctcctaccaaggagtgtcttcagagcgaggcagtcttacagcgggggcacatctcccacttggagagagagatccagaaactgagagcagaaataagcagcctccagcgagcacaagtgcaggtggagtcccagctctccagtgcccgcagagatgagcaccggctgcggcagcagcagcgggccctggaagagcagcacagcctgctccacgcacacagtgagcagctgcaggccctctatgagcagaagacacgtgagctgcaggagctggcccgcaagctgcaggagctggccgatgcctcagaaaacctccttaccgagaacacgtggctcaagatcctggtggcgaccatggagaggaaactggagggcagggatggagctgaaagcctggcggcccagagagaggtccaccccaagcagcctgagccctcagccaccccccagctccctggcagctcccctccacctgccaatgtcagcgccacactggtgtctgaaaggaataaggagaacaggacagactaactttttaaatgatatgaagaaatcagaggtgaaaattgtacattgggaatatatttatgcaaattttattgaaatttattgtaaataaagattttctcagtggtctagaaaatcagcttgaatgtcattcagcatttattgaagaaggatgacatcccttccacttattgcacaaacttggtagctttgagacaaatacagtagcacagtccgtttgaagatttgtccaaaaaattagtccatattttagtggctcagtgtcaagagttccctccctgtgcccccactgttgcttctgcagtgatacgaaggatgaatgcttaatttcttattagtcagaaaacttgaatgcaacagttgggcattcaaaaataatccagagaggtcataacctacttagccatttgagtgtggctctggtgtctgctaaaaaaagtagctattgaaaaaacagtgagagctatgatgtggttcactcattctagaagcattttcattttcctcccgaaaacccccccagtgcctcaccgagccccggaccttcacccaacacggctgccacgctcaaatgggcctgattcaaactcccaggtacgtccctggcaccagggagtaggataagaaaacctccagaagtgaaactgatgaggaagtgacatttaatcacttcaaaaccgaaacttcactggcaaggtcaaaaccccaggccaaggctgacaatcgagcgctggtcagttccaggggtcaggctcggaacctgaaaatgcagatcctagctgttgctgcgtccctcaggtgtggaggaaggaaaaacagcctaggtgtatgtgctggctgtggtgagagtcgaggtagaaagcctggaagttctgaaacgtgaggggatggatcacacgccccagccttttctcactcaccaaagcaaacttttacccccttcttccagtcggcacctttggaacttgttctccctcctaggcctggtttcagtggcccccaccacgtgtcctgcccacccagcctgcagggcttctgctgacatcacgcctaccccaccaccacctcttctgaacttgccacaccatcagtagccagaggtgttgcctctcctgcttcctaaggtctcccaagagcccagctgaggtgtttcattaccaccttctgctcaggtggcccagccggctgtccctcttccaccccaagctcctacttaatgtttaaacccccaatttaggtgtatgctgcttaaacgaacagctccctacttctcccgcctcggggttccagaacgtggattcattcaacatggtttttagaagaggcttgggtgaggccagaggaggtgcctttagtctgagcaggaggccagagctctgagctcagccatgaagggccagtgctctgtggttaagccggggctgaccttccatctattacagggatgggcaggcacgagtcacatttgaatcataaataaaattagtatgtgcttgtggtgggattaaaaatcaaagtgagctcactgaaatgtacataggggaggccttggagacaggctgtggagacactagctcaccagagagccaccagctcaccacctgtgggagagtcaagtcctgaacttcaagttcacctctgccctgccccggctccctgccgcaagcacaggctggcaggaagcagtctggtggctcttaggggaatgtgcacgtgagaaatgttccctgggtcctaagtgcctttagagctgggtcaggggactggagacccgctgaggaaagtgaagtcagaaccccataggcggacggtcatcagagaggaaaggaagccaagtgatgtgaagagggaagaggaaaagaagaaaaaagacagaacctcaacagtcccctcccctccagtgcagaaaataggaaacaccaacacaaaacatacaaccttttctctttcctgggccaagtgggtttcagaccaaaagtagccaccacaggctctatgaggaccaaagcaatttcagcgaagccttcactcggggtggagggttggtggggggcttggcgtgctgaagacccaagcggcaagaaactgctctgctacaaggacgctggcagcctccaggacgcgtgccctgactcgcccttcactggctcccaggcaggtccggtagcttccctgcagtaactccactctcaacagaactgctatttaacaagtgagtctatgcagaaagaacggaggggtgcggggggtgtggtttttcttccacccatgactaatgaagcagagatcacccaagcaccccaactggtcagcctcaagaccccaaattggcatctcacttccttgacatacacgcagatggacacacatgagagacccctgccgagtgtggcgtgggcctttacaagcctatgaccctccagggtcttgactcagcttgtcattagtacagccagaataccagtcccgtgtgcgctagatgatatttttaaaaatcagcaaaagggcttaagcacgtgcttccaggggcctatttacagttcacaggtttgttagttcacgcattacagtagtagctccatcaaaaacaggctcagctagacattcaagtaacaaaagcgctacagggccatgagccccagcaaggtcaggcctgcccagtgcctgcaatgggcagcctcacctggaggccgaggggaagcccaggacagccaggtccccgggcatcagtgcatgcgatgacgaagcccgcagaggccatgccagcaagtgtcagcccttcctctcagacagcagcgcatccgtatggttttgcccctcccagcgcctcttggccggctgcaaacaggaccaggagccttgcatcctggctcagccgtggacttccgggccgttgggagtcatcagcttggcctttctctccacgcacggtcccttggccgaatactgcaccagcaggaagggttccttggtctccccatcccccacgatgctctcctcgtcctctgactggctgatgcgctgcagccgcaggtagcaccagcagcccaggatcaaggcccccagggccgcgatggcaatgaggatgacgatgactgtgaccacgcccgtggtggggctgtggtccataatagacat

SEQ ID NO: 8958 - DNA, 140 bp, Homo sapiens
ccacacctgtaaccccagcactttgggaggccgaggcgggcggatcacaaagtcaggagatcgagaccatcctggctaacatggtgaaaccccatctctactaaaaatacaaaaagttagccgggcgtggtggcaggcgc

SEQ ID NO: 8959 - DNA, 268 bp, Homo sapiens
tgtaatcccagcactttgggaggccgaggcagggggatcacgaggtcaggagatcgagaccatcctggctaacatggtgaaacctcgtctctactaaaaatataaaaaattagccgggcgcggtggcaggcgcctgtagtcccagctacccaggaggctgaggcaggagaatggcatgaatctgggaggcggagcttgcagtgagctgagatggggccactgcactccagcctgggggacagagcgagaccccgtctcaataaataaa

SEQ ID NO: 8960 - DNA, 301 bp, Homo sapiens; identical to SEQ ID NO: 5468

SEQ ID NO: 8961 - DNA, 2548 bp, Homo sapiens; identical to SEQ ID NO: 5470

SEQ ID NO: 8962 - DNA, 6141 bp, Homo sapiens; identical to SEQ ID NO: 5471

SEQ ID NO: 8963 - DNA, 130 bp, Homo sapiens
ccgggagcagtggctcacgcctgtaatcccagcattttgggaggccgaggcgggtggatcacaagctcaggagattgagaccaccctggccaacatggtgaaaccccgtctctactaaaaatacaaaaaa

SEQ ID NO: 8964 - DNA, 272 bp, Homo sapiens
cgggcacagtggctcacgcctataatcccagcactttgggaggccgaggtgggtggatcacaaggtcaggagatcaagaccatcctggctaagaaggtgaaaccctgtctctactaaaaatacaaaaaattagccgggcgtggtggcgggcacctgtggtcccaggtactcaggaggctgaggcaggagaatggcgtgaactcaggaggtggagcttgcagcgagccaagatggtgccactgcactccagcctgggcgacagagcaagactc

SEQ ID NO: 8965 - DNA, 205 bp, Homo sapiens
tcccagcactttgggaggccaaggtgggcggatcacgaggtcaggagatcgagaccatcctggctaacacggtgaaaccccgtctctactaaaaatacaaaaattagccaggtgtggtggcgggcatctgtagtcccagctactctggaggctgaggcgggagaatggcgtgaaccccggaggcagagcttgcagtgagccgaga

SEQ ID NO: 8966 - DNA, 167 bp, Homo sapiens
gggccgggcgcagtgactcacgcctgtaatcccagcactttgggaggccgaggcgggtggatcacgaggtcacgagatcgagaccatcctggctaacacagtgaaaccccgtctgtactaaaaacacaaaaaattagccgggcatgttggcaggtgcctgtagtccc

SEQ ID NO: 8967 - DNA, 299 bp, Homo sapiens
ggtgcattggctcacgcctgtaatcccagcactttgggaggccgaggccggcggatcacgaggtcaggagatcaagaccatcctggctaacacggtgaaactccgtctctactaaaaatacaaaaaattagccaggcatggtggtgggcacctgtagtcccagctactggggaggctgaggcaagagaatggcgtgaacccagggggcagagcttgcagtgagccgagatctcgccactgcactccagcctgggcgacagagtgagattacatctaaaaaaaaaaaaaaaaaaaaaaaa

SEQ ID NO: 8968 - DNA, 288 bp, Homo sapiens; identical to SEQ ID NO: 5476

SEQ ID NO: 8969 - DNA, 282 bp, Homo sapiens; identical to SEQ ID NO: 5477

SEQ ID NO: 8970 - DNA, 275 bp, Homo sapiens; identical to SEQ ID NO: 5478

SEQ ID NO: 8971 - DNA, 133 bp, Homo sapiens
tgccgggcgcggtgactcacgcctgtaatcccagcactttgggaggctgaggcgggcggatcatgaggtcaggagatcgagaccatcctggctaacacggtgaaaccccgtctctactaaaaatacaaaaatt

SEQ ID NO: 8972 - DNA, 181 bp, Homo sapiens
aaagcaagcccgggcgcggtggctcacgcctgtaatcccagcactttgggaggccgaggcgggcggatcacgaggtcaggagatcgagaccatcctggctaacacggtgaaaccctgtctctactaaaaatacataaaaattagccgggcaaggtggcaggtgcctgtagtcccagctact

SEQ ID NO: 8973 - DNA, 301 bp, Homo sapiens; identical to SEQ ID NO: 5486
  SITE (98): n equals a,t,g, or c

SEQ ID NO: 8974 - DNA, 301 bp, Homo sapiens; identical to SEQ ID NO: 5488

SEQ ID NO: 8975 - DNA, 111 bp, Homo sapiens
taatcccagcactttgggaggccaaggtgggtggatcacgaagtcaggagatcaagaccatcctggctaacgtggtgaaaccccgtctctactaaaaatacaaaaacaaaa

SEQ ID NO: 8976 - DNA, 182 bp, Homo sapiens; identical to SEQ ID NO: 6521

SEQ ID NO: 8977 - DNA, 300 bp, Homo sapiens
ggcgcggtggctcacgcctgtaatcccagcactttgggaggccgaggcgggcggatcacaaggtcaggagattgagaccatcctggctaacacggtgaaatcccgtcttactaaaaatacaaaaaaaaattagccaggcatggtggcgggcgcctgtagtcccagctactccggaggctgaggcaggagaatggcgtgaacccgggaggcggagcttgcagtgagcagagatcgcgccactgcactacagcctgggcgacagagcaagactccgtctcaaaaataaataaataaataaaa

SEQ ID NO: 8978 - DNA, 611 bp, Homo sapiens; identical to SEQ ID NO: 5489

SEQ ID NO: 8979 - DNA, 291 bp, Homo sapiens; identical to SEQ ID NO: 5490

SEQ ID NO: 8980 - DNA, 308 bp, Homo sapiens; identical to SEQ ID NO: 5491

SEQ ID NO: 8981 - DNA, 197 bp, Homo sapiens
accacggtgaaaccccatctctactaaaaatacaaaaaattagccgggtgcagtggcaagcgcctgtagtcccagctactcaggaggctgaggcaggagaatggcgtgaacccgggaggtggagcttgcagtgagctgagattgcaccactgcactccagcctgggcgacacagcaagactctgtctcaaaaaaaaa

SEQ ID NO: 8982 - DNA, 114 bp, Homo sapiens
cagcactttgggaggccgaggtgggtggatcacgaggtcaggagatcgagaccatcctggccaatatggtgaaaccccatctctactaaaaatacaaaaattagctgggcatgg

SEQ ID NO: 8983 - DNA, 297 bp, Homo sapiens; identical to SEQ ID NO: 5498

SEQ ID NO: 8984 - DNA, 307 bp, Homo sapiens; identical to SEQ ID NO: 5502

SEQ ID NO: 8985 - DNA, 226 bp, Homo sapiens
gggtgcagtggctcacgcctgtaatctcagcactatgggaggccgagacgggtggatcatgaggtcaggagatcgagaccatcctggctaacacggtgaaaccccgtctctactaaaaatacaaaaaaattagctgggcgtgatggcaggtgcctgtagtcccagctactcgggaggctgaggcaggagaatggcatgaaactgggaggcggagcttgcagtgagc

SEQ ID NO: 8986 - DNA, 280 bp, Homo sapiens; identical to SEQ ID NO: 5505

SEQ ID NO: 8987 - DNA, 305 bp, Homo sapiens
gtggggccaggcgcggtggctcatgcctgtaatcccagcactttgggaggccaaggcgggtggatcacgaggtcaggagatccagaccatcctggctaacacggtgaaaccccgtctctactaaaaatacaaaaaattagccaggtgtggtggcgggtgcctgtagtcccatctactccagaggatgaggcaggagaatggcgtgaacctgggaggcggagtttgcagtgagccgagatggcgccactgccctgcagcctgggcgacagagagagactccgtctcaaaaaaaaaaaaaaaaaaaa

SEQ ID NO: 8988 - DNA, 148 bp, Homo sapiens; identical to SEQ ID NO: 8735

SEQ ID NO: 8989 - DNA, 3905 bp, Homo sapiens; identical to SEQ ID NO: 5513

SEQ ID NO: 8990 - DNA, 130 bp, Homo sapiens
ggccgggcgcggtggctcacgcctgtaatcccagcactttgggaggccgaggctgacggttcacaaggtcaggagttcgagaccatcctggccaatatggtgaaaccccgtctctactaaaaatacaaaa

SEQ ID NO: 8991 - DNA, 275 bp, Homo sapiens; identical to SEQ ID NO: 8582

SEQ ID NO: 8992 - DNA, 264 bp, Homo sapiens
atcccagcactttgggaggccgaggtgggcggatcacgaggtcaggagatcgagaccatcctggctaacacagtgaaaccccgtctctactaaaaatacaaaaaaactagccaggcgtggtggtgggcacctgtagtcccagctgctcaggaggctgaggcaggagaatggcgtgaacctgggagccagagcttgcagtgagccgagatggcgccaccgcactccagcctgggagacacagagagactctgtctcaaaaaaata

SEQ ID NO: 8993 - DNA, 163 bp, Homo sapiens
ccgggcatggtggttcatgcctgtaatcccagcactttgggaggccgaggcgggtggatcacgaggtcaggagatcgagaccatcctggctaacacggtgaaaccccgtctctactaaaaatacaaaaattagctggacgtggtggcatgtgccagtaatccc

SEQ ID NO: 8994 - DNA, 237 bp, Homo sapiens
agaccgaggcgggcggatcacgaggtcaggagatcgagaccatcatggctaacacggtgaaaccccgtctctactaaaaatacaaaaaattagccgggcgatgtggcgggcgcctgtagtcccagctactcgggaggctgaggcaggagaaaggcgtgaaccccgcgggccagagcctgcagtgagccgagatcgccccactgcactccagcctgcgcaacagcgagactccatctc

SEQ ID NO: 8995 - DNA, 310 bp, Homo sapiens; identical to SEQ ID NO: 5521

SEQ ID NO: 8996 - DNA, 176 bp, Homo sapiens
tggctcacacctgtaatcccagcactttgggaggccgaggcaggcggatcacgaggtcaggagatcaagaccatcctggctaacacggtgaaaccccgtctctactaaaaatacaaaaaattagccagcgcagtggcacgtgcctgtagtccaagctacttgggaggctgaggcag

SEQ ID NO: 8997 - DNA, 278 bp, Homo sapiens; identical to SEQ ID NO: 5524

SEQ ID NO: 8998 - DNA, 176 bp, Homo sapiens
gcagtggctcacgcctgtaatcccagcactttgggaggccaaggtgggcagatcatgaggtcaggagatcgagaccatcctggctaacatggtgaaaccccatctctactaaaaatacaaaaaactagccaggcgtggtggcgggcgcctgtagttccagctactcgggaggctga

SEQ ID NO: 8999 - DNA, 2364 bp, Homo sapiens; identical to SEQ ID NO: 5525

SEQ ID NO: 9000 - DNA, 298 bp, Homo sapiens
tattatgaggccgggcgctgtggctcacgcctgtaatcccagcactttgggaggctgaggtgggcggatcacgaggtcaggagatcgagaccatcctggctaacatggtgaaaccccatctctactaaaaatacaaaaaattagcagggcgaggtggcagacgcctgtagtcctagctactcgggaggctgaggcaggagaatggcgtgaaccccggggggtggagcctgcagtgagctgagaccgcgccactgcactccagcctgggcgacagcgagactctgtctcaaaaaaaaaa

SEQ ID NO: 9001 - DNA, 276 bp, Homo sapiens; identical to SEQ ID NO: 8591

SEQ ID NO: 9002 - DNA, 289 bp, Homo sapiens
aggccgggcgcagtggctcacgcctgtaatcccagcactttgggaggccgaggagggtggatcacgaggtcaggagatcgagaccatcctggccaacatggtgaaaccccgtctctactacaaatacaaaaattagcagggcctggggcgggcgcctgtagtcccagctacttgggaggctgaggcgggagaatggcgtgaacccgggaggcggagcttgcagtgagccgagatcgcgcactgcactccagcctgggtgacagagcgagactccctctcagaataaata

SEQ ID NO: 9003 - DNA, 261 bp, Homo sapiens
gtgcctcacgcctgtaatcccagcactttgggaggccgaggcgggcggatcatgaggtcaggagatctagaccatcctggctaacacagtgaaaccccgtctctactaaaaatacaaaaaattagccgggcatggtggcgggcgcctgtattcccagctactagggaggctgaggcgggagaatggcgtgaacctgggaggcggagcttgcagtgagccgagattgcgttaatgcaatccagcctgggcgacagagcgaga

SEQ ID NO: 9004 - DNA, 169 bp, Homo sapiens
ctgtaatcccagcactttgggaggctgaggtggacggatcacgaggtcaggagatcgagactatcctggctaacatggtgaaaccccatctctactaaaaatacaaaaaattagccaggcgtggtggcaggcgcctgtagtcccagctacttgggaggctgaggcagga

SEQ ID NO: 9005 - DNA, 312 bp, Homo sapiens; identical to SEQ ID NO: 5530

SEQ ID NO: 9006 - DNA, 284 bp, Homo sapiens; identical to SEQ ID NO: 8038

SEQ ID NO: 9007 - DNA, 298 bp, Homo sapiens; identical to SEQ ID NO: 5532

SEQ ID NO: 9008 - DNA, 282 bp, Homo sapiens
ttaaacctgtaatcccagcactttgggaggccaaggcaggcggatcatgaggtcaggagatcgagaccatcctggctaacacggtgaaaccccatctctactaaaaatacaaaaaaaaattagcagggtgtggtggtgggtgcctgtagtcccagctactcgggaggctgaggcaggagaatggcgtgaacccaggaggcggagcttgcagtgagccgagattgtgccactgcactccagcttgggtgacagagtgagactccgtctcaaaaaaagaaagaa

SEQ ID NO: 9009 - DNA, 138 bp, Homo sapiens
ctcatgcctgtaatcgcagcactttgggaggctgaggcgggtggatcacgaggtgaggagatcgagaccatcctgggtaacatggtgaaaccccgtctctactcaaaatacaaaaagttagccgagtgtggtggtggg

SEQ ID NO: 9010 - DNA, 311 bp, Homo sapiens; identical to SEQ ID NO: 5535

SEQ ID NO: 9011 - DNA, 131 bp, Homo sapiens
agtggctcatgcctgtaattccagcactttgggaggctgaggtgggtggatcacgaggtcaggagattgagaccatcctggctaacatggtgaaacccagtctctactaaaaatacaaaaaaaaaaagaaa

SEQ ID NO: 9012 - DNA, 158 bp, Homo sapiens
gcagtggctcacgcctgtaatcctagcactttggaaggccgaggggggtggatcacgaggacaggagatcgagaccatcctggctaacatggtgaaactctgtctctactaaaaatacaaaaaattagccaggcgtggtggcaggcgcctgtagtccc

SEQ ID NO: 9013 - DNA, 6150 bp, Homo sapiens
aagatttttcaaggaattttcttctctataatataattaatgatctcctacttggacttctgtaaaagattacagtaaatcgtgaagtcttatggaggtttttgcgggagtgggtgggagtagttgtctattactgcgtctttgaatctaaaacagtaccaggatggggccagagggcatctgggctcttcacggattatataggcttgaccttgttagtactgcatgctgtcagagcctcatccaaaaaccactgagatgtttttgtgcaggggaaataaaatttcaagcactggcctatcatctaaagtgacttcttttcttgacccagtagttttctggtgggttataaagtgactttttttatgccgagaactattgaaacaatttatttttgtgtacaaatatgtatgttttgaattaactataaatattacgttataaaacttttttatttttatttttataaaacttgtgtttttaaattggaaattacactcattgaattgttttacacatgcagacacacagacacacacacacacacagcgaaacaaaatcctgagtgacagcaccctgtaactaactgtggtgagatttgattcaagttgacagactcttctgttttagagagtaaatgcctttggattataacttacatgtctttctcaggaaaccagaatgggaggtgggtaacgaaatattctttttggaaatggaagaatcttagaataaaatataaattcaaattgccaatactggcttgacggtaaagtggcaaatctcaccaagacagaggattgtgtgcattaccctgagctgccactcattcatcaggggtttactgagcatttgttatgtgcctggccctgtgctaggccccggggatggcaggataaatccaatgtggcttctgcctgtgaggttctgtaagtttgtggggaagagggatgtctcagcagaagcttgtgagactgtagaaggggtctcagggacactggaggtgcaaaaactagctcttcctggagtgggagtaggactagcttccctgaagcagctgccctggtgctgggccttgggaacagatggaggagccggtgtccccagccaggactccgtaaaggtgtggcattgcaggagggcctggtctgttctgaagagggtagggtgagactggaaagccaaacgggccagattgtgtggaggttttatctcatgggcagcgtaccatttggcccaggagtgccatgcctggggttgtatttttaaaaatatagtaaccatctccccctgcactctcatctaccctgctgcgtattcttggtgatacgttccaagacccccaatgaatgcctgaaaccacagatggtactgaaccctgtatatactacacacgaatttcacttttcttcacaatttcatgggtagaagattcgttcttaccgaagatcttaacatccttacctctttttttttccttattgagacttttgccgtttcacttaaaggaagcatttttggcttctctttggcatatctgaattgccagcatcactatccttacactttgggggcccttctaataaataaagggttacttgaagacaagcactgtgatactgagacagttgatctgataactgcgttggctactaagtaacaggctggcagcatccacagcatggacacgctggacaaagggatggctcgcagtttttgtaatggcaaaaatttcatcacactactcagagcgacatgtagtttaaaacttacgacttgtttatttctggaattttccatttagtatttttgaaccggagttgaccatggataactgaaattacagaaagtgaaacgtggctaacggggtgctagtccctcagtcatccccaagcccttcaccaactctgccctgtatttcagatcaccgaagtggccttggagtacaacaactgtcatggggaccaggtggtggagcgtctccttcagcacctgcggcgggtggatgctccagtgctggagtccctggccctggaagtgccggcacagctgccagacccgccaacgatcacagcgtccccctgctgcaacactgtggtgctgccccagtggcactccttctccaggacccacaacgtctgtgaactctgtgtcaaccagacctccgggggcatgaagccgagctcggtcagcgtgccacagtgcagcttttttgaaatggcagcagctctggattctttctacctcaaggagcagaccttttatcatgtggcatcagacagcatagaatgcagcaattttttaacttcctatagccccttcagctactacactgcatgttgcaggaccataagcaggggtgtgtcaggcttcatcgactctgaacaaggtgtctttgaagcccctactgttgcattttcttcccttgagaagaaatgtgaggttgatgccccaagctccgttcctcacattgaggagaacaggtatctctttccagaagtggacatgactagcacaaacttcacaggcctgagctgcagaaccaacaagactctcaacatctaccttttggattcaaatttgttttggttatatgcagagagactgggtgctccgagctccactcaggtgaaagaatttgcggcaattgttgacgtgaaagaagaatctcattacatcttggatccaaagcaagcactgatgaagctcaccctaggtactgcaggcagtttatttccccaagcattgtacattttgcttgacttcatatgggtaaattttattgatggctctcattacatttagttgtggggtgatgtcaccttcgtagctcattttaagtctttagaccaccatcagtcataattttcaaagaagctaattttgtctattaaatggaacagaaacttcctcactctgaattttggataagtttgtcatttagcccatggtgggggtaagagtcccactttctaaattggcgatttctgtcacatgtctaaggtagaaccagctgcaggcagtggggacttggggactagaacaggcagggaggtggagagctattctggtgggatgtcctaggggctgatgaaagtgagccttgacagcagctttgttctaaaggagcttaaagagaaagcagtggccgggcgcagtggctcacgcctgtaatcccagcactttgggaggccgaggcgggtggatcacgaggtcaggagatcgagactatcctggctaatgtggtgaaaccccgtctctactaaaaatacaaaaaaaaaaaaaattagccgggcgcgttggcgggcgcctgtagtcccagctactcgggaggctgaggcaggagaatgtcgtgaacctgggaggcagagcttgcagtgagcagagatcgcgcccctgcactccagcctgggcgacagagcaagactccgtctccaaaaaaagagagcagtgaagaaggaagtagagccgccttgcctccctttttgtctcataggcttaaatgtctaaggatcaaggccaccagacctaatttgttctgctgctgtttcataatgtactgagtaatattgctgggacctggggtacctacactgtaacaagtgtaaagtgcaaataaataagtgtcagtcgcaaaccagcaaaacccactttttgaggagtaaggctccatgatgagaaagcacccagagcttgcccctgggacttggcagcaacattgggctgacccaccctggcctgttcccaggaatttgctgatgcccttgactacacacaatgaagtgagaattcaaaagccacgttagttcagcctcattggaaacgggagggagggtcagtgtatgccgaatggagaaaggaggaatttggtagggaaggaaacctttcatttcaagttttaaagtatgaactcaacagtagactcagagcttctacatatgagtctttttagccatcctctttcaaatctaggtgaagcttgtttcttacattagacacatttgtgaaaaggctttatgtaaatattgatttttctatatcaagttacatattataaatccaagagttcctcactgtgtaaaagaaccctgtgaccagtcactttttgaagggcataaatctgtcgatattatagattactcccaattcatgttatctaaagtcattttgatgtgttgagctttcttaaaatgaaacaagcattttttttttaaatgggaaagagactccagagaaatggggtcagtgttcctacaagcatgtatttttgaggtagtctgtattagattttcctgaattccattcagtaatgctcaagtgtttaatgacctcataatgtgttcactttgaatttaagggtaattgaaagaagccttctttagatttctttccatcttctgtatcttctctgaaatgtttagcctagctgttctttgtcctgcagttagtgacagaattcttagggagcttgtaaaaaacacctactgtgtgtcattgttggtttagagacttaactcataaatcagctgtctctaggctagtttcagaatttaggctttattcagattaggaaataattcttggtttcatgtttcaaaaacatagccaactaagtgtttctcagatgctgatcatgaattctctttagtattcacatgacattcttcacttcctcttccattctgcacgctgcattgcccattgcacctcaaaatggagggagttagaagaaagaaaaagaactgaaactttagctgagtgcaatggtggacgcctgtagtcccagctactctggaggctgaggtaggaggatcgcttgagcccaggagtttaaggctacagtgagctatgattgcagcactgtactccagcctgggcaacagagtgagaccctgtctctttaaaaaaaaaaaaaaaagtgaaattcaaattagtattgtttcagatgaagcaaaggactctgaagatggcagaatttgtggtaaaactgttggttcaaatcaggtttttgattattatgggttttatgtatttttccactacatataattttttcttaacctttaaaaaaagaaacttaaagaaccttaataaaggaaacaaaaaactgtagctccttgtcctcaaattaatgagcatttaaacacattccacactactgtagcttgtgcagttgtcacatttgtggttaagcttaaaggtcttagtattatagggtgaaatttcttgaaaagatggtggcttgttgatgatttatacagtctcacttggtgtctatttgtggaccagtccttttaaaaaaagaatagtctatgaatattagagcatctaacattgcatagtgttttgttatccacattactgtctgctgagttaatactaccagagctaaacctgatgccacccgggcagctttgtttggggttttgctgataggtgaaatgttaaaaatgtgagcctatgaagtcatttgagtttttaaaatgtggagtttaaaagtaggccagctattctctttgtatctagaggagagttgatctcattttctctttatttttagagtcttttattcaaaacttcagcgttctctatagtcccttgaaaaggcatctcattggaagtggctctgcccagttcccgtctcagcatttaatcactgaagtgacaactgataccttttgggaagtagtccttcaaaaacaggtatggagtcatgagaggcaaaagttaagccatctgtccctcttaaaataatttccaaactacagttgttggggtgagcagctgtttttgatgtatagaagagtaaccacgtgatggcccaattatggaccgtgaatgaattacatgtggtttttaaatttcagaaaagtgctccagaaagcacagtattggaaagacctaaagatgaaaattttcactgtaatatttgcataggtagcatttttcgggtgcttgctggattctaagcaatgaggaaagaaatgaagaagagcccatttcccggtgcaagtaacatctgtcttccctttcccacaggacgttctcctgctctattacgctccgtggtgcggcttctgtccatccctcaatcacatcttcatccagctagctcggaacctgcccatggacacattcactgtggcaagg

SEQ ID NO: 9014 - DNA, 142 bp, Homo sapiens; identical to SEQ ID NO: 5856

SEQ ID NO: 9015 - DNA, 281 bp, Homo sapiens; identical to SEQ ID NO: 5541

SEQ ID NO: 9016 - DNA, 147 bp, Homo sapiens
tcggccgggcgcggtggctcacgcctgtaatctcagcactttgggaggccaaggcgggtggatcaagaggtcaagagatcaagaccatcctggctaacatggtgaaaccccgtctctactgaaaatacaaaaaattagctgggcgtg

SEQ ID NO: 9017 - DNA, 312 bp, Homo sapiens
aaacagaagcccttggccgggcgcggtggctcacgcctgtaatcccagcactttgggaggctgaggcgggcggatcacgaggtcaggagatcgagaccatcctggctaacatggtgaaaccccgtctctactaaaaatacaaaaaattagccgggcgaggtggcgggcacctgtagtcacagctactcgggaggctgaggcaggaaaatggcgtgaacccaggaggcggagcctgcagtgagccgagatagtgccactgcactccagcctgggggacagagcgagactccgtctcaaaaaaaaaaaaaaaaa

SEQ ID NO: 9018 - DNA, 129 bp, Homo sapiens
gggcgctgtggctcacgcctgtaatcctagcactttgggaggccgaggcaagtggatcacgaggtcaggagatcgagaccatcttggctaacacggtgaaaccccgtgtctactaaaaatacaaaaaaa

SEQ ID NO: 9019 - DNA, 277 bp, Homo sapiens; identical to SEQ ID NO: 5549

SEQ ID NO: 9020 - DNA, 175 bp, Homo sapiens
cacgcctgtaatcccagcactttgggaagcccaggtgggcggatcacgaggtcaggagatcaagaccatcctggccaacatggtgaaaccccgtctctactaaaaatacaaaaaaattagccgggcgtggtggcccgcgcctgtggtcccagatactcgggagtctgaggcagga

SEQ ID NO: 9021 - DNA, 309 bp, Homo sapiens; identical to SEQ ID NO: 5551

SEQ ID NO: 9022 - DNA, 310 bp, Homo sapiens; identical to SEQ ID NO: 5552

SEQ ID NO: 9023 - DNA, 253 bp, Homo sapiens; identical to SEQ ID NO: 8600

SEQ ID NO: 9024 - DNA, 303 bp, Homo sapiens; identical to SEQ ID NO: 7896

SEQ ID NO: 9025 - DNA, 292 bp, Homo sapiens; identical to SEQ ID NO: 5557

SEQ ID NO: 9026 - DNA, 287 bp, Homo sapiens; identical to SEQ ID NO: 5559

SEQ ID NO: 9027 - DNA, 130 bp, Homo sapiens
tgcctgtaatccaagcactttgggaggtcgaggcgggtggatcacgaggtcaggagatggagaccatcctggctaacatggtgaaaccccatctctactaaaaaatacaaaaaattagctgggcatggtg

SEQ ID NO: 9028 - DNA, 273 bp, Homo sapiens; identical to SEQ ID NO: 5561
  SITE (18): n equals a,t,g, or c

SEQ ID NO: 9029 - DNA, 279 bp, Homo sapiens; identical to SEQ ID NO: 5923

SEQ ID NO: 9030 - DNA, 308 bp, Homo sapiens; identical to SEQ ID NO: 5563

SEQ ID NO: 9031 - DNA, 158 bp, Homo sapiens
aaaccccgtctctactaaaaatacaaaattagctgggcttggtggcgcatgcctgtaatcccagctactcgggaggttgaggcaagagaattgcctgaacccaggaggcggaggttgcggagagccgagatcatgccattgcactccagcctgggcaa

SEQ ID NO: 9032 - DNA, 320 bp, Homo sapiens; identical to SEQ ID NO: 5570

SEQ ID NO: 9033 - DNA, 124 bp, Homo sapiens
gcccatgcctgtaatcccagaactttgggaggccgaggcgggcggatcacgaggtcaggagatcgagaccatcctggcaaacacggtgaaaccccgtctctactaaaaatacaaaaaaaaaaat

SEQ ID NO: 9034 - DNA, 308 bp, Homo sapiens; identical to SEQ ID NO: 5572

SEQ ID NO: 9035 - DNA, 300 bp, Homo sapiens; identical to SEQ ID NO: 5574

SEQ ID NO: 9036 - DNA, 226 bp, Homo sapiens
tggtggctctcgcctgtaatcccagcactttgggaggccgaggcgggcggatcgcgaggtcaggagatcaagaccatcctggctaacatggtgaaaccccgcctccactaaaaatacaaaaaattagccgggcatggtggcgggcgcctgtagtcccagcaactcgggaggctgaggcaggagaatggcgtgaacccaggaggcggaggttgcagtcagccaagat

SEQ ID NO: 9037 - DNA, 308 bp, Homo sapiens; identical to SEQ ID NO: 5575

SEQ ID NO: 9038 - DNA, 140 bp, Homo sapiens
aggccgaggcgggtggatcacgaggtcaggagatcgagaccatcctggctaacatggtgaaaccccatctctactaaaaatacaaaaaaatagccgggcgcggtggtgggcgcctgtaggcccagctacttgggaggctg

SEQ ID NO: 9039 - DNA, 287 bp, Homo sapiens; identical to SEQ ID NO: 5579

SEQ ID NO: 9040 - DNA, 266 bp, Homo sapiens; identical to SEQ ID NO: 5581

SEQ ID NO: 9041 - DNA, 142 bp, Homo sapiens
taaaggctgggcgcagtggctcacgcctgtaatcccagcactttgggaggccgaggcaggtggatcacgaggtcaggagattgagaccatcctggctaacatggtgaaaccccgtctctactaaaaatacaaaaaaaaaaaa

SEQ ID NO: 9042 - DNA, 157 bp, Homo sapiens
cgtgactcacgcctgtaatcccagcactttgggaggccgaggcgggcagatcacgaggtcagaagatcgagactatcctggctaacacggtgaaaccccgtctctactaaaaatcaaaaaaaattagccgggagtggtggcggttgcctgtagtccc

SEQ ID NO: 9043 - DNA, 322 bp, Homo sapiens; identical to SEQ ID NO: 5582

SEQ ID NO: 9044 - DNA, 5125 bp, Homo sapiens; identical to SEQ ID NO: 8039

SEQ ID NO: 9045 - DNA, 140 bp, Homo sapiens
tggctcacgcctgtaatcccagcactttgggaggctgaggcaggcggatcacaaggtcaggagattgagactatcctggctaacacggtgaaaccccatctctactaaaaatacaaaaaattagctgggcgttgtggcgg

SEQ ID NO: 9046 - DNA, 146 bp, Homo sapiens
ccaggcgcggtggctcacgcctgtgatcccagcactttgggaggccgaggcgggcagatcacgaggtcaggagattgagaccgtcctggctaatatggtgaaaccccgtctctactgaaaatacaaaaaattagccgggcaaggtg

SEQ ID NO: 9047 - DNA, 281 bp, Homo sapiens; identical to SEQ ID NO: 5587

SEQ ID NO: 9048 - DNA, 166 bp, Homo sapiens
ggccgggcgcagtggctcacgcctgtaatcacagcactttgggaggccaaggtgggtggatcacgaggtaaggagatcgagaccatcctggctaacacggtgaaacctcgtctctaccaaaaatacaaaaaattagccgggcgtcgtggcacgtgcctgtagtccc

SEQ ID NO: 9049 - DNA, 270 bp, Homo sapiens; identical to SEQ ID NO: 5591

SEQ ID NO: 9050 - DNA, 296 bp, Homo sapiens; identical to SEQ ID NO: 8040

SEQ ID NO: 9051 - DNA, 160 bp, Homo sapiens
cccagaactttgggaggccaaggcggttggatcacgaggtcaggagatcgagaccatcctggctaacatggtgaaaccccgtctctactaaaaatacaaaaaattaaccaggcgtggtggtgggcgcctgtagtcccagctactcaggaggctgaggcag

SEQ ID NO: 9052 - DNA, 238 bp, Homo sapiens
aaaaggccgggcacggtggctcacgcctgtaatcccaacactttgggaggctgaggcaggcggatcacgaggtcaggagatcgaggccatcctggctaacatggtgaaaccccgtctctactaaaaatacaaaaaattagccgggtgtggtggcgggcacctgtagtcccagctactcggggggctgacgcaggagaatggcgtgaacccaggaggcagagcttgcagtgagctgaga

SEQ ID NO: 9053 - DNA, 301 bp, Homo sapiens; identical to SEQ ID NO: 5594

SEQ ID NO: 9054 - DNA, 278 bp, Homo sapiens; identical to SEQ ID NO: 5596

SEQ ID NO: 9055 - DNA, 195 bp, Homo sapiens; identical to SEQ ID NO: 8789

SEQ ID NO: 9056 - DNA, 299 bp, Homo sapiens; identical to SEQ ID NO: 5598

SEQ ID NO: 9057 - DNA, 218 bp, Homo sapiens
ggccgggtgcagaggctcaagcctgtaatcccagcactttggggaggccaaggtgggcggatcacgaggtcaggagatcgagaccatcctggctaacatggtgaaaccccgtctctactaaaaatacaaaaaattagccgggcgtggtggtgggcgcctgtagtcccagctactcgggaggctgaggcaggagaatggcgtgaatccgggaggcagcg

SEQ ID NO: 9058 - DNA, 296 bp, Homo sapiens; identical to SEQ ID NO: 5601

SEQ ID NO: 9059 - DNA, 295 bp, Homo sapiens; identical to SEQ ID NO: 8041

SEQ ID NO: 9060 - DNA, 107 bp, Homo sapiens
tcccagcactttgggaggccgaggcaggtggatcatgaggtcaggagatcgaggccatcctggccaacatggtgaaaccccgtctctactaaaatacaaaaaaaaaa

SEQ ID NO: 9061 - DNA, 318 bp, Homo sapiens; identical to SEQ ID NO: 5602

SEQ ID NO: 9062 - DNA, 217 bp, Homo sapiens
tggctcacgcctgtaatcccagcactctgggaggccgaggcaggtggatcaggaggtcagcagatcgagaccatcctggctaacacggtgaaaccccgtctctactaaaaacacaaaaaattagctgggtgcggtggcgggtgcctgtagtcccagcttctcgggaggctgaggcaggagaatggcgtgaacccgggaggtggagcttgcagtgagc

SEQ ID NO: 9063 - DNA, 307 bp, Homo sapiens; identical to SEQ ID NO: 5607

SEQ ID NO: 9064 - DNA, 306 bp, Homo sapiens; identical to SEQ ID NO: 5611

SEQ ID NO: 9065 - DNA, 663 bp, Homo sapiens
gaaacaacaggtgctggagaggatgtggagaaataggaacacttttacactgttggtgggactgtaaactagttcaaccattgtggaagacagtgtggtgattcctcaaggatctagaactagaaataccatttgacccagccatcccattactggatatatacccaaaggaatataaatcatgctgctataaagacatatgcacacgtatgttcattgtgccactcttcacaatagcaaagacttggaaccaacccaaatgtccatcagtgacagactggattaagaaaatgtggcacatatacaacatggaatactatgcagccataaaaaaggatgagttcatgtcctttgtaggtacatggatgaagctggaaaccatcattctgagcaaactatcacaaggtcagaaaaccaaacaccgcatgttctcactcataggtgagaattgaacaatgagaacacatggacacaggaaggggaacatcacacaccggggcctgtcgtggggtgggggtagtggggagggatagcattaggagatatacctaatgctaaatgacgagttaatgggtgaagcacaccaacatggcacatgtatacatatgtaacaaacctgcacgttgtgcacatgtaccctagaacttaaagtataattaaaaa

SEQ ID NO: 9066 - DNA, 214 bp, Homo sapiens; identical to SEQ ID NO: 5614

SEQ ID NO: 9067 - DNA, 1096 bp, Homo sapiens; identical to SEQ ID NO: 5615

SEQ ID NO: 9068 - DNA, 1902 bp, Homo sapiens
tcagaagaggaaagatgcggttcaggtagtcattcagcagcttctcctgcacaatgcctgagccacaagtcagaagggagaaaagggccacacgatgagtgcagctcctggcccctgctggccccagagacttctggtcctaggccagccacaggtgcagcaaggcctgaggcctttgtcccttccttctcctcccaacaagaggagcctccttccttctctgccagcccttacctgtgaccctggatttctcagcatctgaggtcagcctacagctcttgcgggagaaagacacgccggcccccttggatgccatccttcgtctctcatgggcagccagtggtcctggaggctgaggcagacacagagcctgtctactcagggccagccaggggcccccacacctgacctcagtcctgccatggcaggaagtcttgggagcaggtgaggccaggggcatgcacactaacacataggacaggggaatgcaggggctcccagcttcctacacaggcagggtagccagggtctaggcccatgtaacagggaccacttcttgttctccagtgtccctgtgcccagcacagggctgggcagagagcaggtaccagatatatttttgccaaaccataacaaaatgtctcagctctgtggaaatcagaccaaaatgtccaaagtgaggtgtcctaggggcagagcccctgtattcatctcggttgtaagccatactgagtccagctcacaaccagaagcgacaatcctacacattcccccaagtgcagaccaccactggtctggtcatctctagccataagtcccacttactccccacaaggctggagcctctttcctcagccctgggttcctcccttcttttatccatggtcctgatagtttcactgttcccactcacacatgtggcctcccacctcatccaagcaccacccttgcccagccctcatggcaaactccattggtcctcctagtgcatctatccctcacatcatgttgctgctgcagctgctccaaaacctgcactgagtccctggtgctggcctcactgatgtgtagctgtgctgtccaacacagcagccgtcatccacgtgaggttacttaaatttaaagttttaaaaattaacaattcgatttctcagttgcctcagccacatttcaagagttcaatgaccacatgtggctaacggttactctattggacagcacaaaggtagaacattcccaccatcatataaagttctattagacagcgcaggtctagagtttcgctctgcagcactgccttagccagcactccctactctgccgttcagtctcttatctcgccccaaacagaccctctactcccgccacaaacccctgtgggtctgcaccacgcctgctcctcgggaaggtgattttcccgacctcgggccctcggtgggcctccatgatcggtgccccttcactaccagagtagttgaagatctgattaaatgcagtcattcatttgatgagcagaccttccagacacccactccgggtgtcagttgctgaggacccaggtgagaggcggaccttgtccccgcccggggactccctgtcacggctatcccgtccaacctcgccggggtatccgggctcagaactgaacctactccgtctgggagcccaaggatggctcccccaagtcgcccccgcctggccccaagctccagaggacctgccagaccagcttccgctcggagtttcgcactcagatcccggcgctgcaggtgccctcgcactggactaaactggaccgcgaagggaatagccggaacccgccaggctcagagccctgccgcccctcactcaccccgagcctcggccgccgcgacccggttcacaacatccgcccaacctctc

SEQ ID NO: 9069 - DNA, 1087 bp, Homo sapiens
ttttttttttttttttttattatactctaagttttagggtacatgtgcacattgtgcaggttagttacatatgtatacatgtgccatgctggtgcgctgcacccactaatgtgtcatctagcattaggtatatctcccaatgctatccctcccccctcccccgaccccaccacagtccccagagtgtgatattccccttcctgtgtccatgtgatctcattgttcaattcccacctatgagtgagaatatgcggggtttggttttttgttcttgcgatagtttactgagaatgatggtttccaatttcatccatgtccctacaaaggatatgaactcatcattttttatggctgcatagtattccatggtgtatatgtgccacattttcttaatccagtctatcattgttggacatttgggttggttccaagtctttgctattgtgaatagtgccgcaataaacatacgtgtgcatgtgtctttatagcagcatgatttatactcatttgggtatatacccagtaatgggatggctgggtcaaatggtatttctagttctagatccctgaggaatcgccacactgacttccacaatggttgaactagtttacagtcccaccaacagtgtaaaagtgttcctatttctccgcatcctctccagcacctgttgtttcctgactttttaatgattgccattctaactggtgtgagatgatatctcatagtggttttgatttgcatttctctgatggccagtgatgatgagcatttcttcatgtgttttttggctgcataaatgtcttcttttgagaactgtctgttcatgtccttcgcccactttttgatggggttgtttgtttttttcttgtaaatttgtttgagttcattgtagattctggatattagccctttgtcagatgagtaggttgcaaaaattttctcccatgttgtaggttgcctgttcactctgatggtagtttcttttgctgtgcagaagctctttagtttaattagatcccatttgtcaattttgtcttttgttgccattgcttttggtgttttggacatgaagtccttgcccacgcc

SEQ ID NO: 9070 - DNA, 523 bp, Homo sapiens
agaaaatacaactggttgcttgcttttataggaattttccctggaggccacacgaaaccacttgtgcctcagaacaactcatgactgggggagtaaggacaagcagtatatccattggcttctttctgtgtctcgtttcttactggttaatgtctactcctggggtatttcacttttccacacttcttagttatgtttcctggcctctttgaggagctgctgggaagacagagctttaattggtcctgttagagttatgaacaggaatggtggtttgtctctcttttctgggaagatacataactccagaaactgtgagagtcttttctggggctacaagacaagtggctgaagccaggggtgaggtgagaggtgatagtgtggttggtgggtgtgcaagcagggccaagcaaattcaaggtggggcatattctaggacttacacaacagtctggaaataaatatgtattttagaatattgagattctaaactaagaatgatgtcttacgtaaaattacaaaa

SEQ ID NO: 9071 - DNA, 470 bp, Homo sapiens
ccgttaacgggattctggaatttgttaggataattgcttttcaatatcaagagatctggcaatcaaatttaataatatcaagcttgcttggtgagcatggatttataagatagaatggtttgtgggggagaatatagttacaaaaaagattattgtttcccataatgcctggtattgtattaagtactttgcatacagtagggcatttcattgtcccagtgatcctcctgcaaagtaggtacaattatcttcaatttacaaatgaggaaaccaagctctcttcaagctgataagatgctgaactgagatttgaaccaagtccctctgcccctaagagcccctacccctagctgctactatatgctgtacccatctaagctttgtgaaataaccttgttccactgcagagaagatgttgtgtcacctatctctagtatttcttggctttgggcagttctggagtcaaaatg

SEQ ID NO: 9072 - DNA, 2327 bp, Homo sapiens
gcctttttgtctgtctttatttacagcaaagtacataatatgtggtcactttgtaaccactaacaataaaggtagggtggtaaaaagaaaagggagaggagcaagcatcttaaaaggggggaaaaaaaagcctaagtctgtatttagctactcaccctgctcctgaggcaggactgggtaggcactccctgcctctaagaccacagccaagctgacctggaatgccagtccccggtatgaggaaggcagcagaacgcccagagacaaaagattaaaggggactgagctctggatgcatccacttatgctttgccagacagttcccttccttgttttgtttgaatgcttcccccaccccgccctgagcaaagtgtaaagggcaacggtggtacagaagtacaggcagtcccttccagaagcagtcctgaaccgcataacccacctacctagctgctcctcagcctgccgagttcttggccctggaatctttaacaggcacataggagattccagggcaggggaaaatatttccctgcaagaggctacttccctccaacagctgtgagggccagtgcaggtcaaggttgctaaatcaaggaaagtgcacaagggcaagagaggtcatatacaaaccaaccaggcttccggccctcctgctgcccgactgctccgaggtgtacacaagcctccagcccgacccagcggcctaatgaaactctggcaacctatcctgggcgtggccacaagtatccagctccaagcccaagtgaggcggggagtcaacttccccatgattgccaagtggccaagaccagaagcagggatgattaggctagttctgcggcaaggtgaactggagaccctgtctctgccctccttccctggcctgtcccacagacatcccgttgtttaacccactgcctttgcaaggacctgctctgtccactccaaatcaaaggatacttgcatccttcttacacagactcccatctctctgctcatagtggtcccaggctgcccgagaaaaagaaacttgggtcagtagaaggctcattagtgtgaaggagtgagaggccaggccttcctgtgacataatgcttctatgcttgtttcctaaacacttggtccacacacaatacctgggcaggaagagagaaccaagcaccactggatggctctggagccaggggacttctatgcacatacaaccaacatcaccccactctgctcatctgtgcctccaccctgaacagcagagtacctagatggcaaatgtcatggtttctggtccactaattctactcctgactctccatggaatcagagacccagaggctcttaaaaaactaagaccattgtttgttccatagaaagctcaagttcagatacagagttggccaaatgctgggctgccacggaggggtagagccttccatcccttccttgttccagaaacagtgtgtcacagaccccagcagacactgttcattgtccccagccaagccaccaagaattggtgatcatttgacaaggggcagggcagcccttatagctgtttccaagctaggagtgggctattcagagatattggaggcttggtcccaacaccacaggtagatgaggaagcagctaggtaaaggctcagagatgagaggagtccatcttccaaggcagtgggataaacagccaaggcactaaatggtttggcacctgggagcttcaagtaaagttgagcatgctgcccactgaaaagccaaggctctcccagacacgggtgggcttcacctgagcacagcccagtgccatcaaggccaggggccctgtgtcctcaggatactaacccaggcctgcattccctgcttcatctcagaactgatcaaggcatgactacaaggataatgattgatcctgaactgatcttggtgagcaccggctttcaaaggaggcatcttgggagccttcccttgctccaagtaggcggctgctgtgactgggagctcccttcagagcctgcacggtctcctgaaagtctccgggtggcaagctctgctggggaccaggtttgactttttaaaatagcaaaacagatttagagtcaaactgagcccagaaacggggaatcagactggatggtgctgagtctgggggaaaatctggtgtgaccaggtaataatggagaccaatttacctgaatggctcgaacaggctctgagagcaatgggaagaaaaggttctccaaaatgtttctggcaatggcagccacagtgggatagctaagggcacagtccaccaagcactagggtggtcaacaatgaaatgaacatctc

SEQ ID NO: 9073 - DNA, 131 bp, Homo sapiens
tatttattttgagatggagtctcgctctgtcgcccaggctggagtgcagtggctcgatctcggctcactgcaacctccgcctcctgggttcacgccattctcctgcctcagcctcccgagtagctgggact

SEQ ID NO: 9074 - DNA, 126 bp, Homo sapiens; identical to SEQ ID NO: 5635

SEQ ID NO: 9075 - DNA, 531 bp, Homo sapiens
cctgtatcactcgagaagccctgtatgtcacatttattattccttttagacacatcctcagccaagtgtagtaaatgtccacactccctccctgcttccctcccttccttccctcttttttcaagaagaggaggtttgtgttgccttcagatgactgttgatttaattgacaggcagcttttcttcattgtgtgctttttgcttttgctcacaaaagtgcattcactattctatagtatgttgaaacttttaaatggaaacggcttttcattaacaaaggaagcattttcttccccccttccatgccttagctttctccgctaagtcttggcttcttcagcagctgtacctccaccagaaatgacaaaaggtgcaattgtgctaggagatggcgatgaagatatgccagtggagttttgtgtgtgggctgctggggactgttttccttctgtgtttggttttgttttatttttgttattccagaaagttgagagcacatctaaaaaccaaaaaaaaaaaaaaaaaaaaaaa

SEQ ID NO: 9076 - DNA, 531 bp, Homo sapiens
cctgtatcactcgagaagccctgtatgtcacatttattattccttttagacacatcctcagccaagtgtagtaaatgtccacactccctccctgcttccctcccttccttccctcttttttcaagaagaggaggtttgtgttgccttcagatgactgttgatttaattgacaggcagcttttcttcattgtgtgctttttgctattgctcacaaaagtgcattcactattctatagtatgttgaaacttttaaatggaaacggcttttcattaacaaaggaagcattttcttccccccttccatgccttagctttctccgctaagtcttggcttcttcagcagctgtacctccaccagaaatgacaaaaggtgcaattgtgctaggagatggcgatgaagatatgccagtggagttttgtgtgtgggctgctggggactgttttccttctgtgtttggttttgttttatttttgttattccagaaagttgagagcacatctaaaaaccaaaaaaaaaaaaaaaaaaaaaag

SEQ ID NO: 9077 - DNA, 518 bp, Homo sapiens
caagttaacaatgagcaaaattcagtaaactagttacctctggaggcagagacagagggatgggatagggaagaagtatactagtagatacaaccatattggcaatgttttagttcttaagttgggtagtggattcataggcatttattattaccaggcttcatagcttacagatatagtatatgtattcttttgcatttttcagaattttaaaggcagctaaaggatgttgtctaaatagaatttataaaagagaggagtagaagacagtatgtcatgcatgatttgtttgtatatgtcttacatccttaactaaaagtgtaaattaattgagcataaagaccgtatttaatgcttctattttattatctatattatagattctataagacctactataattccgtctacaaaataaggactcagtctgtgtttattgattacatgatttgaaatagctataaaacagtaagtttaaacactttattttcagaaaaattcaaattgatctgttgggg

SEQ ID NO: 9078 - DNA, 512 bp, Homo sapiens
caagttaacaatgagcaaaattcagtaaactagttacctctggaggcagagacagagggatgggatagggaggaagtatactagtagatacaaccatattggcaatgttttagttcttaagttgggtagtggattcataggcatttattattaccaggcttcatagcttacagatatagtatatgtattcttttgcatttttcagaattttaaaggcagctaaaggatgttgtctaaatagaatttataaaagagaggagtagaagacagtatgtcatgcatgatttgtttgtatatgtcttacatccttaactaaaagtgtaaattgagcataaagaccgtatttaatgcttctattttattatctatattatagattctataagacctactataattccgtctacaaaataaggactcagtctgtgtttattgattacatgatttgaaatagctataaaacagtaagtttaaacactattttcagaaaaattcaaattgatctgttgggg

SEQ ID NO: 9079 - DNA, 1014 bp, Homo sapiens
gccaagcttcaaacatagatctcctgactccattcatatgaccctataaactgtctcaaaacaaaaagataaattaatataaatatttattgaatatgtctttgtagagaaagcataataagcataaagggcaatgcgttaacctttatcacaagcaaccctattggaatgtgtcaacttatcagaatgaatcaggccagaatatcaagtataaatgaagcctgtagttaactgaaagttgcatatcaatcaggcactccagtttctctcctcaaactctgaatattcaatgaataagataaagaaatggctaatttgattttacctttcatttttttgacctaattctaaggtgactactcactcctcaagatttaactaatgttgctttatttttatccctctggggagacagaagagatgattgggaaacacatgtttgaagtttgtaagttctgctgctttcaaccccacagatgtctcttactgcccacttgggccctggtgattaagcaactagatttggagccagtcaggcttttgtttagacattttaactttttcttgctttccttgcaaactcctcagccttcagactggttggaaagtaaatgtacaatcttacataaattttcaggtaatagcatttcagctttttccccaagattttttgcttgggaggagacagattagactggattcggagtcttgattttgcaaaggtaacaaaagacatgtttttttataagacttttcatcataagtttattttattcaacagaagcaaaatctaatataatggaaaaaataaagatctgtgataaatctgatctgtgtggataaacacaattagaaagacttaaagattaagtattgaaacaaactaccaaaatattttaatactgatttgtaaaaatttcagtacatttttcttctttgcttaattctactgggtcctgtttttcatcaaaacattctatcatgttagtatacaatagccaaaaaaaaaaaaaa

SEQ ID NO: 9080 - DNA, 1015 bp, Homo sapiens
gccaagcttcaaacatagatctcctgactccattcatatgaccctataaactgtctcaaaacaaaaagataaattaatataaatatttattgaatatgtctttgtagagaaagcataataagcataaagggcaatgcgttaacctttatcacaagcaaccctattggaatgtgtcaacttatcagaatgaatcaggccagaatatcaagtataaatgaagcctgtagttaactgaaagttgcatatcaatcaggcactccagtttctctcctcaaactctgaatattcaatgaataagataaagaaatggctaatttgattttacctttcatttttttgacctaattctaaggtgactactcactcctcaagatttaactaatgttgctttatttttatccctctggggagacagaagagatgattgggaaacacatgtttgaagtttgtaagttctgctgctttcaaccccacagatgtctcttactgcccacttgggccctggtgattaagcaactagatttggagccagtcaggcttttgtttagacattttaactttttcttgctttccttgcaaactcctcagccttcagactggttggaaagtaaatgtacaatcttacataaattttcaggtaatagcatttcagctttttccccaagattttttgcttgggaggagacagattagactggattcggagtcttgattttgcaaaggtaacaaaagacatgtttttttataagacttttcatcataagtttattttattcaacagaagcaaaatctaatataatggaaaaaataaagatctgtgataaatctgatctgtgtggataaacacaattagaaagatttaaagattaagtattgaaacaaactaccaaaatattttaatactgatttgtaaaaatttcagtacatttttcttctttgcttaattctactgggtcctgtttttcatcaaaacattctatcatgttagtatacaatagccaaaaaaaaaaaaaaa

SEQ ID NO: 9081 - DNA, 1142 bp, Homo sapiens
gtttgttttctatttttctcatatattgcttgttcctcagtccttcttttcctgatttcttttacgttaaatgtttattttaccattttaattctgttgtctttttaaagctacatttctttgcattcttcttataatgattactatagggactataatatgtgtatttaatttatcacaatgaaaactatttgcgaattaaccttggttttacatatataaatcttgcaacactaaagttctgcttacctcccgtctatcctttggtgctatagttgccatatacattacatctatattttttaaaacacaaaatgcagtgctacaagtttgtctttaagaaactaagaacagtatgaaaaggatgttaaaatatctgggtagttattaaaataaattatctctaaaatgaattttgtaatctattattataattttactagttagaattttcaattgttattttttatatctttaagaggtgaaccgagtatagagtatagaacaagaaaaatgtcaggcagtcagctggactcacttgttccctggacgaatctgtttcagttaaatgacagatcaccataatcatatggaccttcaggttttcccaccaaaaggccaaactgaaaatacgaaattcctgacccataaatatcttactgcattgtaaatcatttagcattcattaatcactatttacaattttttaaaaaaaataaggcttgtgccttttctcatctgtttagaatattcagtttagtaactgtatggcaacgtaagttactgacagggaaagccttgtaagacagtactcatttacttaaaatgtggagtttttgcatttctttacaattgaatggaaaaattaccagcagtgctttgggttatagtgacacctggtggtacggtttgaggttttaaaaaaattctttttaaatttgttactcttttttttttctagaccattttttgtaaggaatcattttatcaactaggatgacaagaggcctctcccatcctggttgcacatcactttctataacagagagacatgggccagaagccctgatggagaaagcagccaatgtcccttacatttccacctttggcttgaaaaaaagatctgtgcactaaatacaggg

SEQ ID NO: 9082 - DNA, 1142 bp, Homo sapiens
gtttgttttctatttttctcatatattgcttgttcctcagtccttcttttcctgatttcttttacgttaaatgtttattttaccattttaattctgttgtctttttaaagctacatttctttgcattcttcttataatgattactatagggactataatatgtgtatttaatttatcacaatgaaaactatttgcgaattaaccttggttttacgtatataaatcttgcaacactaaagttctgcttacctcccgtctatcctttggtgctatagttgccatatacattacatctatattttttaaaacacaaaatgcagtgctacaagtttgtctttaagaaactaagaacagtatgaaaaggatgttaaaatatctgggtagttattaaaataaattatctctaaaatgaattttgtaatctattattataattttactagttagaattttcaattgttattttttatatctttaagaggtgaaccgagtatagagtatagaacaagaaaaatgtcaggcagtcagctggactcacttgttccctggacgaatctgtttcagttaaatgacagatcaccataatcatatggaccttcaggttttcccaccaaaaggccaaactgaaaatacgaaattcctgacccataaatatcttactgcattgtaaatcatttagcattcattaatcactatttacaattttttaaaaaaaataaggcttgtgccttttctcatctgtttagaatattcagtttagtaactgtatggcaacgtaagttactgacagggaaagccttgtaagacagtactcatttacttaaaatgtggagtttttgcatttctttacaattgaatggaaaaattaccagcagtgctttgggttatagtgacacctggtggtacggtttgaggttttaaaaaaattctttttaaatttgttactcttttttttttctagaccattttttgtaaggaatcattttatcaactaggatgacaagaggcctctcccatcctggttgcacatcactttctataacagagagacatgggccagaagccctgatggagaaagcagccaatgtcccttacatttccacctttggcttgaaaaaaagatctgtgcactaaatacaggg

SEQ ID NO: 9083 - DNA, 7024 bp, Homo sapiens
  SITE (6957): n equals a,t,g, or c
cctcatccctccctcggacccacttctgagactggtttcccaagcagaagtggagatggacatcagaccctcgtgagaaactcagaccaggcatttcggacagagttcaacttgatgtatgcctactcccctttgaatgctatgcctcgagcagatggactgtatcgaggatctcctctagtgggggataggaagcctttacatttggatgggggatattgttcccctgcagaaggattttccagcagatatgaacatggcttaatgaaagacctctctcgtggatccttgtcacctggtggtgaaagggcctgtgaaggagtcccatctgccccccagaacccaccacagaggaaaaaagtaagtgtttcatgttatatcggcgaacttttcaagaatgttaaccaagtagtttagtagatattcataagtttctgctatgtgttccgcactactctcagacaagtgagacatagtctctgccaaatccagtgaaagacaggctgttttagtacaacttggtgaatgttgtaaatattcagcaaatgtaaatgcctgtatgtgccatatacttgctaggcaattgagaggttagaacagtgaaaaagaaattttacctattatttagtgtgtcccaagttcgaggcactgtattaagctctttaaatgtgttttatcctcacagtaagcctataagataggcaattttctattttgcacatgaggaaactaaggcaagttgagtaactttcccgtggtcacacagctagtaaatggaaggaccaggatactacccagtttgagagagaaggctggagtgagaggcagcaggttactgatttaactgaatctcaaacaataagtaggagtcagccaaccaacaattgagggtgaggtatgttacagtagagggagtagaacaggtaattaggtggcactccattggccaggcagcaggcatgcagtatggtgcaaacagttggatgttgttgtatcaggtggaaggccgggggagccaggaggaaagtgcagagagtgctgggctgggccaggccatagagagcttgctaatgggttgggactccacttccaagtaatgcctgatcaagaagtcacaaagccaaaaatatgcttttgtataagtggttctcaactaggggtgtttgagaatgagtaggagtgttttgaattgtcccagtgacttgcatttattgagcagggccagggatgctgaatgtcctgtataggggacagtcccatgtaatggccaaacatctgtagtatcctcattgaaatgaaacctagtggtttttttatattttcattataatgatattaccagaatttattaacttctttccaaaattatttctagaaaatgcatatgcaaaactgtctatatttttgttccatttggacagaaaaatgagaaccctaaggggatagaaggaggaggaaacattggcagataatttggattaagataataattgatttcgaagattgttgcgtgaacagcattgactaccagaaacaaacatgaaaacaatctttggatttctggttttataatatttactatgtgcaaaagtcatagaaattatgatattttatttcagaaacacttctgaaatttattgggcacatttaagcataaatttaagcatatgccaaattctgtgctggatgttaaagataaaaagccagataaacttggcctttgccttcctagaacttatagtttagtcagggagcaatcaaggcatggtaataggttctacggcctgtgtaagcaatgtgccagaacaacaaagagaaggtgtctaggcagggcacggattatggtgggcagggtgggatgggaggtctgctgtcaggaaagaatgagcaagcattagggagatgaaggggaagttagggagaagttaccaagttgttttctagagctagcttgctaaaattataaactggaaataataatttcctctctttttacattaattacatctatgtgtaagacagaaacagtaataaattcctatttatatcttgaaaatttgaacatatttaagtatcctggagcattgggtttttcttctgttttgttttgtttttccttctctctctccctctctctctccacctacctctccccacctccctctcctccatctccttctcctctccctgcttctttctctcaaacagctaactctaggggttcccaaggagtacagaacagccatcagtcacctgggaggctttttaaactatacaagcttccaattctcccttctctaggtacttccattgttgcaaataactgtgatagcatgcttctgttactgtgtaatggtaacctcacaagtttttctgaaggcagaaaaaaagatggtggtctaattggcaaacattctttagagacttgcctcctagtttattatcttcctcttaccaatttccagctgccttaaatatgtagctgtgctcagatctctttcatactccccaaaaaaagttatcagggttggtgtctgctttgtttgcgtggcttggctagtggtttactaaggtaccatctttccttctttccctgttgctggtgatccactaatgatatccagatagagtaccgttttttgtttgtttgttttttcctttctaggtatccctgctggagtaccgaaaacggaaacaagaagctaaggaaaattctgctggtgggggaggtgactctgcacagagcaaaagcaagtctgcaggagctgggcaaggcagcagtaactccgtttccgacactggtgcccatggtgtgcagggatcctcagcccgaactccatcttcccctcacaaaaaattctccccatctcattcctctatgtcccatttggaggcggtaagcccatcagattccagaggcacttcttcatctcactgcagacctcaagagaatatcagcagtaggtggtaagtttatatttgatgttttatagttaaattgggggtgggggggagtatatatctaagatcattcccagttttacctaaaatctatgggaacacttgatgggaacatctgagacagccagccaacagtaccatctgtcctgttcagctgatttaataatgtcagctgcaaccccccagctttgcagaattaagaattaccaacatgcctgtggagcagtgctttggatgacatgtagttatggatgcagatgagctctttcatttggtgggcactaacactgcctttcctatttctcatttcacatgaaaggtgagtcaagaatccagccaagttccacatgaattaacaacagatgtctctcttccacacagctagcatatacagagcaaaaagacattctgaaaggatttgtctggtttaggggagaccacaaatttaaaaatgaataatactggtggcaaatactgaggatcaaatgtgtgaaatagagaatgaagcacaggagttcagggatcttgaactgaaaaaaataagtctgggaaagaacagtcctggctcaaatgtttcatgttcattaatctatgaaacctttattaaaccagtactgtgtatcaggcacatgatttcctaaaggagaaattttaacattttaaatgggggttaagggaagttaacatctttaacccactttttccttgatttctttttctttaaaagtggttgttgttgatgtttctcttttgtgcctgacatagttggaggcagaggaaatacgttgttttaaattggttctgaagaaagtaatgtttaagaggatgttttaagaaaatacactgtgcactggttagggcttcatttgttttggttaagtcctgtggcttgaacttgcaccctgttgcctttacaggatggttcccacatcagtagaacgactccgagaaggagggagcatccccaaggtcctccgaagcagcgtgagggtggcccaaaagggagagccctctcccacatgggagagtaacatcacagagaaagactcaggtgagcccatggccttctgctgccaccacattcagggacacatgagccgagtcctgtacagttcatgcctagtgctgagttgaggtgagtcagtttctgatgcagttgggctccaccgcatgctaggttccagcccacttatgctcatttgggctaccacatttgtaagatctagcattgcttgctctctgtctgctcttttttccccaaggaatacctttctgtaactctcatctctccaaagtcctggaaatctacctcgatgaaggatgaagagaaagaagacgggaatcacatcaggcatttagaacatagcccataattaaccactcattttgcccttctggcatgctgcactcacccaatttgtcacaaagagagcagtacgggttggtgatggcactggtgatttaaatgaaaaatggctctttcttacttattctaagaagccaagttgatttttttttatatatgttaccttccagaccctgcagatggagaaggcccagagacattaagctcagcactctctaaaggagcaacagtttacagcccttccagatacagctaccaggtgagatgagaaattgctggtctctagccataggagtgtgttctgggtcccaaattgtcctggtcatcctttgccattgagatgctgtctttgcatatagtttcagcagccttggaaataagtcatcatctgcttgtcctcaggtaataaattatgccagaagatgaatacggtgatcaaagacagacattttactgcctttggtttcctaaaaagaatacatggttaaaagatgaagaaaaaagaatgtagggtattataaatgttcaccagccatttaagggacttgttcgcgtccttattcgtttcctcccaactttgtctagctcctgcagtgtgatagtcctcggacagaatcacaaagcctccttcagcagagttcctcccccttcagaggacatcctacacagtctccaggatacagttatcgaactactgcactgagacctggaaaccccccctctcacggttcttcagaatcatccctctcttccacgtcctattccagccccgcccaccctgtgtccacagactcgttggccccatttacggggacaccagggtattttagcagccagccacattctggaaacagcactgggcagcaatcttccaaggaggagctgcccttctagtgctgctagccctaccctgcagggaccctcagactcgccaacctcagattcagtttctcagtccagcacaggaactctgagttccacctcctttcctcagaactctaggtcgtcattgccatcagacttacggactatcagtctgcccagtgctgggcagtcagctgtctaccaggcctccagggtatctgcggtttccaattcacatttctacccacaccgtgggagtgggggtgtgcaccagtaccgactccagccactgcaagggtcaggagtcaagactcagacgggactttcctagggcttctggatttgggcaaacagaactgaatgagcccatagctgcttccttccagctgcctctggaacctaggccgagcatattgctgaggaacggggggtacaaggtgccagaggattgggtctggtggacaagaaacaagacttgtggtcacaattggcctctggccttggagaaagctgtaaatcttgtctgaagcagagactataaagaagtttctccctgctgtcaagggtacattgttgacaagcaaatggtgtttcggttagtaacggttctaagtgcaatgagttgtgttgaagcctccgtctcccatccttgcctgtagcccgtagtcacttgtgcagtgaggacatctttttaaatttaaaaaaaaaaaaaaaaaaagttttcaaaggaaaaaaagttaaaagagccaatctcaaagccccaagccatctgagtactgttagggttttatgcacttaagaaaaaaggtaggtatgtaaatgttcatcctaagacaaccattccaaaagcaggtatctggccaatgtgtgtccaccaagaatactgtttatctttgtcttaagatcaccaagaaataggcaaggatagtaaagcttggaacctgcaccaactggagggtgcctggctctttgaagaaaagctcatggtcagctcttgattattcgggagcagattatttgagtagattgtctgagcctccaactgttaccatcctactcccccttcccaagctatttcacagctcagtaacccatgaagtaagtagacaagaaaaggaggaatgagacatgatataggccaattgcattgctacttaccagcttttggcaataaatttcattaggaaggataccgagtggtttgggaatgcttcgaattttattttttctactcccaattaatcaggagttgatgatcccatgagcaggaccgcctccatgattggggagcatgcacttgtgactgcagggtaagagtgggaagataggtttgtggagtggcaccgacaggactgtgattgtgtgtgggcctgccccacatttctctgggggatgcttatgtgagagtgggcccagtgaaagagttaccaagccacccacacccctaacactgttctggatgagagatgagagcagaccggcttctccccatcagtgcattgtgcctgttgtacacccctggaggagccctggagccagcccaggtggggtacacaatctttttaaattccatatggttgccagcttatttctttcacttgtttactgtaatatctggcgtgtttttatttatctaattttgtattcagttataaccatggtaggggtagtgaatatatgacaggtgtaatccctggtgctgcagtggaccttcttttcttttggacaagataatactgtgagtttccctccttccttccctctantttggtttcctttttttcccagccctcttgcatccccttcttttctaccctgtcctacaactatcat

SEQ ID NO: 9084 - DNA, 3488 bp, Homo sapiens
tttcatgttcattaatctatgaaacctttattaaaccagtactgtgtatcaggcacatgatttcctaaaggagaaattttaacattttaaatgggggttaagggaagttaacatctttaacccactttttccttgatttctttttctttaaaagtggttgttgttgatgtttctcttttgtgcctgacatagttggaggcagaggaaatacgttgttttaaattggttctgaagaaagtaatgtttaagaggatgttttaagaaaatacactgtgcactggttagggcttcatttgttttggttaagtcctgtggcttgaacttgcaccctgttgcctttacaggatggttcccacatcagtagaacgactccgagaaggagggagcatccccaaggtcctccgaagcagcgtgagggtggcccaaaagggagagccctctcccacatgggagagtaacatcacagagaaagactcaggtgagcccatggccttctgctgccaccacattcagggacacatgagccgagtcctgtacagttcatgcctagtgctgagttgaggtgagtcagtttctgatgcagttgggctccaccgcatgctaggttccagcccacttatgctcatttgggctaccacatttgtaagatctagcattgcttgctctctgtctgctcttttttccccaaggaatacctttctgtaactctcatctctccaaagtcctggaaatctacctcgatgaaggatgaagagaaagaagacgggaatcacatcaggcatttagaacatagcccataattaaccactcattttgcccttctggcatgctgcactcacccaatttgtcacaaagagagcagtacgggttggtgatggcactggtgatttaaatgaaaaatggctctttcttacttattctaagaagccaagttgatttttttttatatatgttaccttccagaccctgcagatggagaaggcccagagacattaagctcagcactctctaaaggagcaacagtttacagcccttccagatacagctaccaggtgagatgagaaattgctggtctctagccataggagtgtgttctgggtcccaaattgtcctggtcatcctttgccattgagatgctgtctttgcatatagtttcagcagccttggaaataagtcatcatctgcttgtcctcaggtaataaattatgccagaagatgaatacggtgatcaaagacagacattttactgcctttggtttcctaaaaagaatacatggttaaaagatgaagaaaaaagaatgtagggtattataaatgttcaccagccatttaagggacttgttcgcgtccttattcgtttcctcccaactttgtctagctcctgcagtgtgatagtcctcggacagaatcacaaagcctccttcagcagagttcctcccccttcagaggacatcctacacagtctccaggatacagttatcgaactactgcactgagacctggaaaccccccctctcacggttcttcagaatcatccctctcttccacgtcctattccagccccgcccaccctgtgtccacagactcgttggccccatttacggggacaccagggtattttagcagccagccacattctggaaacagcactggcagcaatcttccaaggaggagctgcccttctagtgctgctagccctaccctgcagggaccctcagactcgccaacctcagattcagtttctcagtccagcacaggaactctgagttccacctcctttcctcagaactctaggtcgtcattgccatcagacttacggactatcagtctgcccagtgctgggcagtcagctgtctaccaggcctccagggtatctgcggtttccaattcacagcactacccacaccgtgggagtgggggtgtgcaccagtaccgactccagccactgcaagggtcaggagtcaagactcagacgggactttcctagggcttctggatttgggcaaacagaactgaatgagcccatagctgcttccttccagctgcctctggaacctaggccgagcatattgctgaggaacggggggtacaaggtgccagaggattgggtctggtggacaagaaacaagacttgtggtcacaattggcctctggccttggagaaagctgtaaatcttgtctgaagcagagactataaagaagtttctccctgctgtcaagggtacattgttgacaagcaaatggtgtttcggttagtaacggttctaagtgcaatgagttgtgttgaagcctccgtctcccatccttgcctgtagcccgtagtcacttgtgcagtgaggacatctttttaaatttaaaaaaaaaaaaaaaaaaagttttcaaaggaaaaaaagttaaaagagccaatctcaaagccccaagccatctgagtactgttagggttttatgcacttaagaaaaaaggtaggtatgtaaatgttcatcctaagacaaccattccaaaagcaggtatctggccaatgtgtgtccaccaagaatactgtttatctttgtcttaagatcaccaagaaataggcaaggatagtaaagcttggaacctgcaccaactggagggtgcctggctctttgaagaaaagctcatggtcagctcttgattattcgggagcagattatttgagtagattgtctgagcctccaactgttaccatcctactcccccttcccaagctatttcacagctcagtaacccatgaagtaagtagacaagaaaaggaggaatgagacatgatataggccaattgcattgctacttaccagcttttggcaataaatttcattaggaaggataccgagtggtttgggaatgcttcgaattttattttttctactcccaattaatcaggagttgatgatcccatgagcaggaccgcctccatgattggggagcatgcacttgtgactgcagggtaagagtgggaagataggtttgtggagtggcaccgacaggactgtgattgtgtgtgggcctgccccacatttctctgggggatgcttatgtgagagtgggcccagtgaaagagttaccaagccacccacacccctaacactgttctggatgagagatgagagcagaccggcttctccccatcagtgcattgtgcctgttgtacacccctggaggagccctggagccagcccaggtggggtacacaatctttttaaattccatatggttgccagcttatttctttcacttgtttactgtaatatctggcgtgtttttatttatctaattttgtattcagttataaccatggtaggggtagtgaatatatgacaggtgtaatccctggtgctgcagtggaccttcttttcttttggacaagataatactgtgagtttccctccttccttccctctaatttgttttccttttttccccagcctcttgcatccccttcttttctaccctgtcctacaactatcat

SEQ ID NO: 9085 - DNA, 13138 bp, Homo sapiens
ctcgctatctgatggagcagaatgtcaccaagttacttcggcctctgtctccagtcacaccaccccctcccaattcaggctcaaagagtccccagctggccacacctggctcatctcacccaggagaagaggagtgtcgaaatggatacagcctcatgttttcaccagtcacatctcttactactgctagtcgctgcaacactcctctacagtttgaggtgatttgggtttggttgctgggagtgctggatatgaaaatcatcatttgtaccttctcatttcaaatataataccattccaaatgtttctttactatctttcttccccatctcagtaagagaatgggaaacctcagggtcattgtggcctgttacctggtagcctctcatcttggcagcccctatgcttcccaaaataggcatactgctaccacaaatcccattcatgtatcttttgcatgcagtccatcaatctccataagtttaggtagtaagcatgctagatctccatcgttatctttactgtatactttggtcaaaataggcctctagctgcctgtagtatctgttagtaacactagcctgagagcacagatgatattgattgattgtgtcttcgtttctaggcctttaaataagtgaagtgtctttcccaggttgtttggtattttcattgtggccttagcagagatttagaaaacattggggtatggcttatggcgaatgtgggttttttccactccaggttactttccctctttgttataatgtcttaggaatcagaagtagacaagaggctagcaacatgtattcatgagacaaatttattaccttcactgttggattaagttagaaatgtctgcctcagctgtttcaaaaagtaatcttgaatcactttagtgttcaggtttgggtgacagcaggtttcaatagaatccatgtatacttttttaaaacacttcatctattgcatgttactttgatttgtaattaaaatggacactgtctcttttttccttctcagaaaaatttgttctgaccactaaacacactctgctgctctgcccccttgtttgcacttctccagatgtgttttttgagaaaggtgaacattttaaccaatcttacgtttcctattcagcttttccaagtatgaggattcagaatacttagcttttatgagtaactaagaggcagctagcaacattgaaagcagaactgtattctttcttaccctagacctctacttttggagcagacctctttctgggtgagggaaaaaacctcctggttacatatcagttatctagggaaattactctttaccagattatttatgaaattctttcagccagataataaagcagctgattcaggcctttctaacttgactttgtctacttgcaattgactttgcagtttgcacctagagctttatagtaaggtatcatgagaggaattctccctggagggcataagattataggaatagagtgtcatactttatcaatacaggttttattataaatgtggaattatgaaaattagaaggaggccgggcgcagtggctcacacctataatcccatcactttgggaggctgaggcaggcggatcacgaggtcagtagatcaagaccatcctggctaacgtggtgaaaccccgtctctactaaaaatacaaaatattagccgggcgtggtagtgggcgcctgtagtcccagctactcgggaggctgaggcaggagaatggcgtgaacccgggaggcggagcttgcagtgagccgagatcgcgccattgcactccagcctgggcaacagagcaagactccgtctcaaaaaaaaaaaaaaaaaaaaaagaaaatcagaaggtaagtcactttgcaaaacaagcgggttcagtactcagtgtgttccttatcccttgtagcatttgggataactattaaacactgcaaatataaagtggttttggttttgttttgttttgttttttttaattggtgatcattttaataatacagtccatgcataatgttagaataccaggagggaaggaaaatattaaatagtaaaaggtccaaggcatggtttcacttgcaatttaaggaaattttacctttctcatcaataatagaacagatttcaccaccctgacccattctaatcaccattttaatggccatactctttgctgtattctagtacagagaggtggggagccttttttgtagcaaaggctgtgacacattgtgaaatatcaaaaaggtgtcacgtataaagaccagcttaggctgggcatggtggctcacacctgtaatcacagtgctttggaaggctgaggcaggaggattgcttgaggccaggggtttgagaccagcctgggtaacatcgtgagaccacatttctgcaaaaataaaatacaaaacttagccaggtgtagtggcatatacctgtagtcccagctacttgggaggctgaagcaggaagatcacttaagaccaggagtttaagactgcagtgagccattattgtgccactacatgccagcctgggcaacagtgagatcccatctctaaaaataatttaaagaccagcttaggccaggtacagtggcacacacctgtaatcccagctactcgggaggccaaggcaaaggaattgcttgagcctgggaggttgcagggagccaagactgcgccactgcattccacattccagcctgggcaacagagggagactctctctcaaaaaaaaaaaaaaaaaaaaaaaaacaaccttactagattagtttggggaaggatatttttgagaaggaaaaaagcattcaggaaaatggtgagaagtcttaagtgctaaggggaagaaggtaagaagataaacagtggaagagaacaagatcttcaggaggggaaagcatctagaaagaagagtggaagcaacattgggaggacaagcttagttagcctctcctttctaccagaataaccctcccctcctattcttgccctgagagccatactccacccgccatttcacacatacgtgcacctagatgtacaccacccactgtccatgccaagtaaaattcacagccaaaaccctgctttgctgaagcagcctcatttcccctacctcagcatgtgcctgccacctaggccacagttattcagagtctacattaggcaccctctccttacctcagccctagcacccctgagtcattgtcacactaccaccttcactctcttcacgtgttcccatttacatctttccattaagcactcactgctcagtctctgttatgggactgctgcctcacctgaaagtcccaaggtaaagtcctaccctctgtaggatacagggacctaagtatacacatacatgctttttctgctctgttgccaaaagtacaatggattttacaaaataacattaataggggtggctcaggtctaattagattatgccaagaaccaactctagcctgtgagctagggattccatcaatcacatttcctgtaactgtcattcaagaggaactggccatctccctaaccatgtcagcccccagcacactaatgtctccccctggatagcactgggagggcctgaggcatataagagaataaagaaatgtgacaagcagaagaggcattggatgaaggaacaaggtccatgtaaggaggaataaggggtagggtgcccctcaataacaaatactgtaggttgctaaactctcatctaaaatacaaagacgtataacactaaaatttcaccagtctaactctttccttgtatgtgcttgagatgtttacttacagcatgaaacattataaccaatttatccttaaatgctttcagagataccaggaagcattttaacaagtcattctgtccattgagatgagttctgcagttaaatatttcccctatgcattcttattcaacttccccgcccccgaaaaaagttatggctaacatctatgcttgcttttattttttgttttgttttgcttcttgacttcgagtagatgaataataacaagatgcttttccctcctctagaacatatcctcccctgagagttcccctgcgcataggcccgagtccctgtcacccgaggtagttatcacaccatctcaatcacacttggaggctgagagtgagtgttcatgaatgtgttcctgagtgtgtggggagggctggggatctgagtcagtggggtgatgggctggagggcggccactcagtcacagtaagttgaatgagtcttcctgtgtgactgtgactacacaggactgtcaatgtagatggaggaaaatgaaggtaggagcgtgtgtgtttgtgtgtgtgtgtgttgtgtgtgtgtttggtggggttggtttttgccgtttgggggagggggtggctggagttctattaaagaatagaatctagaagtcaagatgctgatatgtggtaggagccttgttaaagaaaggctaataaatcaggaaagttgagtcaaaagttgtaagagctgttttttgagttgggtggtgacttatgccttgttctagggttaatctaacagctctgtaaaccagatgttttgacctttggttgatagattgagcagcttcttcaggaagggaaagtcattctgtctttcagctttcctacattttctctgcagctccttactgggtgcacaaggaaaccaagtgagtccctggctttctgtcacaggccaccattctgcaatggttaggatatggttgctatacaagtgttatctctttaggatatcagtagagtggttttctcacaaaccctactgctgtggatatgtcaaactcagattttagtgctagagtttctattataagctttcagatttagtaacattaactctgaatctattaatacatgggaccttttttctcttgaagagaaagttagagtctctcagaaatagtcaactgaactttaaccctatccccttccaataaaaaattagggcataattcagtgacagtctactaagttctgaatcagtagtagttcacaggttaatatgaaactgaaaaaggttttattccactagtatattagagattttcttggtgttttgactctagcttgttaggaaagtaaagctctctctcctcagttgttaaagattctaagataacgtaatttgaagactgatatggtatggtatctggttttctggtaccattctttgtcggttagctgtagttgacctagtgttggaagtttggaggttatgataaccaaatagtaggtggggtttatttttggtacatttcagcatttcagaatctgcagtgatgagcattagtggtcttgtggtatgttgacgtacattagaggataaagaagaattgagtggccagaaagttgtatgagaaacacagcttctttaacagtgaaagtgagtgaagaactggttggttgatgtctttaatgccatcctcctttactgaaccagtaacttaagtacttgcctttccgtctaccttctccttcctccacctttttcccttccccccaccttccatcaatattaatttagaaattgataaccccggaagccagttatcttaagacaccagtctcatctttgttttgtgcatggggctaaggtaaattcctaattataccacttgtcccttagtgtagtacaaggtgactcagcaacctgatgaaaggctaagcaggcaaaatagtcacatttagccaattacctaattctaactttcccagtatttcccatccagaaagacttgaaagcaattttggaaaggccaggattctttagtactctggcccatgtacactgttgctacgtgggacttttacagaatataatggctttatctgctctacttccgtccctcttatctttccctgttcacctgtgtccctctcccctcctttctgccctttgactttttcctttctcccctaccccatgtctccgttgatttttattctttcagctttgtcaccgaaaagacctggatttggcaaaagtaggataccttgactccaacactaacagctgtgctgatagaccttccctactcaactcaggtcattctgacctggctcctcatccctccctcggacccacttctgagactggtttcccaagcagaagtggagatggacatcagaccctcgtgagaaactcagaccaggcatttcggacagagttcaacttgatgtatgcctactcccctttgaatgctatgcctcgagcagatggactgtatcgaggatctcctctagtgggggataggaagcctttacatttggatgggggatattgttcccctgcagaaggattttccagcagatatgaacatggcttaatgaaagacctctctcgtggatccttgtcacctggtggtgaaagggcctgtgaaggagtcccatctgccccccagaacccaccacagaggaaaaaagtaagtgtttcatgttatatcggcgaacttttcaagaatgttaaccaagtagtttagtagatattcataagtttctgctatgtgttccgcactactctcagacaagtgagacatagtctctgccaaatccagtgaaagacaggctgttttagtacaacttggtgaatgttgtaaatattcagcaaatgtaaatgcctgtatgtgccatatacttgctaggcaattgagaggttagaacagtgaaaaagaaattttacctattatttagtgtgtcccaagttcgaggcactgtattaagctctttaaatgtgttttatcctcacagtaagcctataagataggcaattttctattttgcacatgaggaaactaaggcaagttgagtaactttcccgtggtcacacagctagtaaatggaaggaccaggatactacccagtttgagagagaaggctggagtgagaggcagcaggttactgatttaactgaatctcaaacaataagtaggagtcagccaaccaacaattgagggtgaggtatgttacagtagagggagtagaacaggtaattaggtggcactccattggccaggcagcaggcatgcagtatggtgcaaacagttggatgttgttgtatcaggtggaaggccgggggagccaggaggaaagtgcagagagtgctgggctgggccaggccatagagagcttgctaatgggttgggactccacttccaagtaatgcctgatcaagaagtcacaaagccaaaaatatgcttttgtataagtggttctcaactaggggtgtttgagaatgagtaggagtgttttgaattgtcccagtgacttgcatttattgagcagggccagggatgctgaatgtcctgtataggggacagtcccatgtaatggccaaacatctgtagtatcctcattgaaatgaaacctagtggtttttttatattttcattataatgatattaccagaatttattaacttctttccaaaattatttctagaaaatgcatatgcaaaactgtctatatttttgttccatttggacagaaaaatgagaaccctaaggggatagaaggaggaggaaacattggcagataatttggattaagataataattgatttcgaagattgttgcgtgaacagcattgactaccagaaacaaacatgaaaacaatctttggatttctggttttataatatttactatgtgcaaaagtcatagaaattatgatattttatttcagaaacacttctgaaatttattgggcacatttaagcataaatttaagcatatgccaaattctgtgctggatgttaaagataaaaagccagataaacttggcctttgccttcctagaacttatagtttagtcagggagcaatcaaggcatggtaataggttctacggcctgtgtaagcaatgtgccagaacaacaaagagaaggtgtactaggcagggcacggattatggtgggcagggtgggatgggaggtctgctgtcaggaaagaatgagcaagcattagggagatgaaggggaagttagggagaagttaccaagttgttttctagagctagcttgctaaaattataaactggaaataataatttcctctctttttacattaattacatctatgtgtaagacagaaacagtaataaattcctatttatatcttgaaaatttgaacatatttaagtatcctggagcattgggtttttcttctgttttgttttgtttttccttctctctctccctctctctctccacctacctctccccacctccctctcctccatctccttctcctctccctgcttctttctctcaaacagctaactctaggggttcccaaggagtacagaacagccatcagtcacctgggaggctttttaaactatacaagcttccaattctcccttctctaggtacttccattgttgcaaataactgtgatagcatgcttctgttactgtgtaatggtaacctcacaagtttttctgaaggcagaaaaaaagatggtggtctaattggcaaacattctttagagacttgcctcctagtttattatcttcctcttaccaatttccagctgccttaaatatgtagctgtgctcagatctctttcatactccccaaaaaaagttatcagggttggtgtctgctttgtttgcgtggcttggctagtggtttactaaggtaccatctttccttctttccctgttgctggtgatccactaatgatatccagatagagtaccgttttttgtttgtttgttttttcctttctaggtatccctgctggagtaccgaaaacggaaacaagaagctaaggaaaattctgctggtgggggaggtgactctgcacagagcaaaagcaagtctgcaggagctgggcaaggcagcagtaactccgtttccgacactggtgcccatggtgtgcagggatcctcagcccgaactccatcttcccctcacaaaaaattctccccatctcattcctctatgtcccatttggaggcggtaagcccatcagattccagaggcacttcttcatctcactgcagacctcaagagaatatcagcagtaggtggtaagtttatatttgatgttttatagttaaattgggggtgggggggagtatatatctaagatcattcccagttttacctaaaatctatgggaacacttgatgggaacatctgagacagccagccaacagtaccatctgtcctgttcagctgatttaataatgtcagctgcaaccccccagctttgcagaattaagaattaccaacatgcctgtggagcagtgctttggatgacatgtagttatggatgcagatgagctctttcatttggtgggcactaacactgcctttcctatttctcatttcacatgaaaggtgagtcaagaatccagccaagttccacatgaattaacaacagatgtctctcttccacacagctagcatatacagagcaaaaagacattctgaaaggatttgtctggtttaggggagaccacaaatttaaaaatgaataatactggtggcaaatactgaggatcaaatgtgtgaaatagagaatgaagcacaggagttcagggatcttgaactgaaaaaaataagtctgggaaagaacagtcctggctcaaatgtttcatgttcattaatctatgaaacctttattaaaccagtactgtgtatcaggcacatgatttcctaaaggagaaattttaacattttaaatgggggttaagggaagttaacatctttaacccactttttccttgatttctttttctttaaaagtggttgttgttgatgtttctcttttgtgcctgacatagttggaggcagaggaaatacgttgttttaaattggttctgaagaaagtaatgtttaagaggatgttttaagaaaatacactgtgcactggttagggcttcatttgttttggttaagtcctgtggcttgaacttgcaccctgttgcctttacaggatggttcccacatcagtagaacgactccgagaaggagggagcatccccaaggtcctccgaagcagcgtgagggtggcccaaaagggagagccctctcccacatgggagagtaacatcacagagaaagactcaggtgagcccatggccttctgctgccaccacattcagggacacatgagccgagtcctgtacagttcatgcctagtgctgagttgaggtgagtcagtttctgatgcagttgggctccaccgcatgctaggttccagcccacttatgctcatttgggctaccacatttgtaagatctagcattgcttgctctctgtctgctcttttttccccaaggaatacctttctgtaactctcatctctccaaagtcctggaaatctacctcgatgaaggatgaagagaaagaagacgggaatcacatcaggcatttagaacatagcccataattaaccactcattttgcccttctggcatgctgcactcacccaatttgtcacaaagagagcagtacgggttggtgatggcactggtgatttaaatgaaaaatggctctttcttacttattctaagaagccaagttgatttttttttatatatgttaccttccagaccctgcagatggagaaggcccagagacattaagctcagcactctctaaaggagcaacagtttacagcccttccagatacagctaccaggtgagatgagaaattgctggtctctagccataggagtgtgttctgggtcccaaattgtcctggtcatcctttgccattgagatgctgtctttgcatatagtttcagcagccttggaaataagtcatcatctgcttgtcctcaggtaataaattatgccagaagatgaatacggtgatcaaagacagacattttactgcctttggtttcctaaaaagaatacatggttaaaagatgaagaaaaaagaatgtagggtattataaatgttcaccagccatttaagggacttgttcgcgtccttattcgtttcctcccaactttgtctagctcctgcagtgtgatagtcctcggacagaatcacaaagcctccttcagcagagttcctcccccttcagaggacatcctacacagtctccaggatacagttatcgaactactgcactgagacctggaaaccccccctctcacggttcttcagaatcatccctctcttccacgtcctattccagccccgcccaccctgtgtccacagactcgttggccccatttacggggacaccagggtattttagcagccagccacattctggaaacagcactggcagcaatcttccaaggaggagctgcccttctagtgctgctagccctaccctgcagggaccctcagactcgccaacctcagattcagtttctcagtccagcacaggaactctgagttccacctcctttcctcagaactctaggtcgtcattgccatcagacttacggactatcagtctgcccagtgctgggcagtcagctgtctaccaggcctccagggtatctgcggtttccaattcacagcactacccacaccgtgggagtgggggtgtgcaccagtaccgactccagccactgcaagggtcaggagtcaagactcagacgggactttcctagggcttctggatttgggcaaacagaactgaatgagcccatagctgcttccttccagctgcctctggaacctaggccgagcatattgctgaggaacggggggtacaaggtgccagaggattgggtctggtggacaagaaacaagacttgtggtcacaattggcctctggccttggagaaagctgtaaatcttgtctgaagcagagactataaagaagtttctccctgctgtcaagggtacattgttgacaagcaaatggtgtttcggttagtaacggttctaagtgcaatgagttgtgttgaagcctccgtctcccatccttgcctgtagcccgtagtcacttgtgcagtgaggacatctttttaaatttaaaaaaaaaaaaaaaaaaagttttcaaaggaaaaaaagttaaaagagccaatctcaaagccccaagccatctgagtactgttagggttttatgcacttaagaaaaaaggtaggtatgtaaatgttcatcctaagacaaccattccaaaagcaggtatctggccaatgtgtgtccaccaagaatactgtttatctttgtcttaagatcaccaagaaataggcaaggatagtaaagcttggaacctgcaccaactggagggtgcctggctctttgaagaaaagctcatggtcagctcttgattattcgggagcagattatttgagtagattgtctgagcctccaactgttaccatcctactcccccttcccaagctatttcacagctcagtaacccatgaagtaagtagacaagaaaaggaggaatgagacatgatataggccaattgcattgctacttaccagcttttggcaataaatttcattaggaaggataccgagtggtttgggaatgcttcgaattttattttttctactcccaattaatcaggagttgatgatcccatgagcaggaccgcctccatgattggggagcatgcacttgtgactgcagggtaagagtgggaagataggtttgtggagtggcaccgacaggactgtgattgtgtgtgggcctgccccacatttctctgggggatgcttatgtgagagtgggcccagtgaaagagttaccaagccacccacacccctaacactgttctggatgagagatgagagcagaccggcttctccccatcagtgcattgtgcctgttgtacacccctggaggagccctggagccagcccaggtggggtacacaatctttttaaattccatatggttgccagcttatttctttcacttgtttactgtaatatctggcgtgtttttatttatctaattttgtattcagttataaccatggtaggggtagtgaatatatgacaggtgtaatccctggtgctgcagtggaccttcttttcttttggacaagataatactgtgagtttccctccttccttccctctaatttgttttccttttttccccagcctcttgcatccccttcttttctaccctgtcctacaactatcat

SEQ ID NO: 9086 - DNA, 3169 bp, Homo sapiens
gtatccctgctggagtaccgaaaacggaaacaagaagctaaggaaaattctgctggtgggggaggtgactctgcacagagcaaaagcaagtctgcaggagctgggcaaggcagcagtaactccgtttccgacactggtgcccatggtgtgcagggatcctcagcccgaactccatcttcccctcacaaaaaattctccccatctcattcctctatgtcccatttggaggcggtaagcccatcagattccagaggcacttcttcatctcactgcagacctcaagagaatatcagcagtaggtggtaagtttatatttgatgttttatagttaaattgggggtgggggggagtatatatctaagatcattcccagttttacctaaaatctatgggaacacttgatgggaacatctgagacagccagccaacagtaccatctgtcctgttcagctgatttaataatgtcagctgcaaccccccagctttgcagaattaagaattaccaacatgcctgtggagcagtgctttggatgacatgtagttatggatgcagatgagctctttcatttggtgggcactaacactgcctttcctatttctcatttcacatgaaaggtgagtcaagaatccagccaagttccacatgaattaacaacagatgtctctcttccacacagctagcatatacagagcaaaaagacattctgaaaggatttgtctggtttaggggagaccacaaatttaaaaatgaataatactggtggcaaatactgaggatcaaatgtgtgaaatagagaatgaagcacaggagttcagggatcttgaactgaaaaaaataagtctgggaaagaacagtcctggctcaaatgtttcatgttcattaatctatgaaacctttattaaaccagtactgtgtatcaggcacatgatttcctaaaggagaaattttaacattttaaatgggggttaagggaagttaacatctttaacccactttttccttgatttctttttctttaaaagtggttgttgttgatgtttctcttttgtgcctgacatagttggaggcagaggaaatacgttgttttaaattggttctgaagaaagtaatgtttaagaggatgttttaagaaaatacactgtgcactggttagggcttcatttgttttggttaagtcctgtggcttgaacttgcaccctgttgcctttacaggatggttcccacatcagtagaacgactccgagaaggagggagcatccccaaggtcctccgaagcagcgtgagggtggcccaaaagggagagccctctcccacatgggagagtaacatcacagagaaagactcaggtgagcccatggccttctgctgccaccacattcagggacacatgagccgagtcctgtacagttcatgcctagtgctgagttgaggtgagtcagtttctgatgcagttgggctccaccgcatgctaggttccagcccacttatgctcatttgggctaccacatttgtaagatctagcattgcttgctctctgtctgctcttttttccccaaggaatacctttctgtaactctcatctctccaaagtcctggaaatctacctcgatgaaggatgaagagaaagaagacgggaatcacatcaggcatttagaacatagcccataattaaccactcattttgcccttctggcatgctgcactcacccaatttgtcacaaagagagcagtacgggttggtgatggcactggtgatttaaatgaaaaatggctctttcttacttattctaagaagccaagttgatttttttttatatatgttaccttccagaccctgcagatggagaaggcccagagacattaagctcagcactctctaaaggagcaacagtttacagcccttccagatacagctaccaggtgagatgagaaattgctggtctctagccataggagtgtgttctgggtcccaaattgtcctggtcatcctttgccattgagatgctgtctttgcatatagtttcagcagccttggaaataagtcatcatctgcttgtcctcaggtaataaattatgccagaagatgaatacggtgatcaaagacagacattttactgcctttggtttcctaaaaagaatacatggttaaaagatgaagaaaaaagaatgtagggtattataaatgttcaccagccatttaagggacttgttcgcgtccttattcgtttcctcccaactttgtctagctcctgcagtgtgatagtcctcggacagaatcacaaagcctccttcagcagagttcctcccccttcagaggacatcctacacagtctccaggatacagttatcgaactactgcactgagacctggaaaccccccctctcacggttcttcagaatcatccctctcttccacgtcctattccagccccgcccaccctgtgtccacagactcgttggccccatttacggggacaccagggtattttagcagccagccacattctggaaacagcactggcagcaatcttccaaggaggagctgcccttctagtgctgctagccctaccctgcagggaccctcagactcgccaacctcagattcagtttctcagtccagcacaggaactctgagttccacctcctttcctcagaactctaggtcgtcattgccatcagacttacggactatcagtctgcccagtgctgggcagtcagctgtctaccaggcctccagggtatctgcggtttccaattcacagcactacccacaccgtgggagtgggggtgtgcaccagtaccgactccagccactgcaagggtcaggagtcaagactcagacgggactttcctagggcttctggatttgggcaaacagaactgaatgagcccatagctgcttccttccagctgcctctggaacctaggccgagcatattgctgaggaacggggggtacaaggtgccagaggattgggtctggtggacaagaaacaagacttgtggtcaccaattggcctctggccttggagaaagctgtaaatcttgtctgaagcagagactataaagaagtttctccctgctgtcaagggtacattgttgacaagcaaatggtgtttcggttagtaacggttctaagtgcaatgagttgtgttgaagcctccgtctc

SEQ ID NO: 9087 - DNA, 554 bp, Homo sapiens
atgcacagtcttctctctttgtgtgtgactgttacaaaatttcacttttcaaaatcgaaatcaggtgtttgctcaaatgaggggagattttttttttttttttttttttaaatgctgagacctcagcagagtacttttctttttgttgtttcccccacaaacccatcagtctgggagagcattgggagtggaaatcatgttgcctgggatgctggtttctttgtatattatataaaacgtatgtaaatgtctctccatttgggctggggtttgcattctccccttggctatttaaccaaggggagaggccagcgggcaggcggccctcaccctgcctggcacgtgcagagaccccagccactctgtgtgggcagggtgctgtcaagaccagacctcttgggggggtaggggcgggggggtggggggaactcttggaagggaagaagtatcacttctttctcaagtggagtgtttacaccttgctgtaacatttgaactttcacaagagatgtaataattttgataataaaattcttaaccataataatcataaa

SEQ ID NO: 9088 - DNA, 426 bp, Homo sapiens
cagctctgtaaaccagatgttttgacctttggttgatagattgagcagcttcttcaggaagggaaagtcattctgtctttcagctttcctacattttctctgcagctccttactgggtgcacaaggaaaccaagtgagtccctggctttctgtcacaggccaccattctgcaatggttaggatatggttgctatacaagtgttatctctttaggatatcagtagagtggttttctcacaaaccctactgctgtggatatgtcaaactcagattttagtgctagagtttctattataagctttcagatttagtaacattaactctgaatctattaatacatgggaccttttttctcttgaagagaaagttagagtctctcagaaatagtcaactgaactttaaccctatccccttccaataaaaaat

SEQ ID NO: 9089 - DNA, 309 bp, Homo sapiens
ttaaatgctgagacctcagcagagtacttttctttttgttgtttcccccacaaacccatcagtctgggagagcattgcaagtggaaatcatgttgcctgggatggctggattctttgtatattatataaaacgtatgtaaatgtctctccattcgctctgaggattgcattctccccttggctagttaaccaaggggagaggacagcgggcaggcgatcctcaccctgcctggcacgtgcagagaccccagacactctgtgtgggcaaggtgctgtcaagaccagacctcttggggggggaggggcggg

SEQ ID NO: 9090 - DNA, 1586 bp, Homo sapiens
cagaatacttagcttttatgagtaactaagaggcagctagcaacattgaaagcagaactgtattctttcttaccctagacctctacttttggagcagacctctttctgggtgagggaaaaaacctcctggttacatatcagttatctagggaaattactctttaccagattatttatgaaattctttcagccagataataaagcagctgattcaggcctttctaacttgactttgtctacttgcaattgactttgcagtttgcacctagagctttatagtaaggtatcatgagaggaattctccctggagggcataagattataggaatagagtgtcatactttatcaatacaggttttattataaatgtggaattatgaaaattagaaggaggccgggcgcagtggctcacacctataatcccatcactttgggaggctgaggcaggcggatcacgaggtcagtagatcaagaccatcctggctaacgtggtgaaaccccgtctctactaaaaatacaaaatattagccgggcgtggtagtgggcgcctgtagtcccagctactcgggaggctgaggcaggagaatggcgtgaacccgggaggcggagcttgcagtgagccgagatcgcgccattgcactccagcctgggcaacagagcaagactccgtctcaaaaaaaaaaaaaaaaaaaaaagaaaatcagaaggtaagtcactttgcaaaacaagcgggttcagtactcagtgtgttccttatcccttgtagcatttgggataactattaaacactgcaaatataaagtggttttggttttgttttgttttgttttttttaattggtgatcattttaataatacagtccatgcataatgttagaataccaggagggaaggaaaatattaaatagtaaaaggtccaaggcatggtttcacttgcaatttaaggaaattttacctttctcatcaataatagaacagatttcaccaccctgacccattctaatcaccattttaatggccatactctttgctgtattctagtacagagaggtggggagccttttttgtagcaaaggctgtgacacattgtgaaatatcaaaaaggtgtcacgtataaagaccagcttaggctgggcatggtggctcacacctgtaatcacagtgctttggaaggctgaggcaggaggattgcttgaggccaggggtttgagaccagcctgggtaacatcgtgagaccacatttctgcaaaaataaaatacaaaacttagccaggtgtagtggcatatacctgtagtcccagctacttgggaggctgaagcaggaagatcacttaagaccaggagtttaagactgcagtgagccattattgtgccactacatgccagcctgggcaacagtgagatcccatctctaaaaataatttaaagaccagcttaggccaggtacagtggcacacacctgtaatcccagctactcgggaggccaaggcaaaggaattgcttgagcctgggaggttgcagggagccaagactgcgccactgcattccacattccagcctgggcaacagagggagactctctctca

SEQ ID NO: 9091 - DNA, 313 bp, Homo sapiens
ttaaatgctgagacctcagcagagtacttttctttttgttgtttcccccacaaacccatcagtctgggagagcattgggagtggaaatcatgttgcctgggatgctggctttctttgtatattatataaaacgtatgtaaatgtctctccatttgggctggggttagcattctccccttggctatttaccaaggggagacgccagcggcaggcggcctcaccctgcctggcacgtgcagagaccccagccactctgtgtgggcagggtgctgtcaagaccagacctcttgggggggtaggggcgggggggtgg

SEQ ID NO: 9092 - DNA, 124 bp, Homo sapiens
tcacttgaacccgggagacggaggttgcagtgagctaagtaaatgccattgcactccagccttagcgacagagcaaggctctgtctcataaataaataaatgaataaatgaaagaattttatat

SEQ ID NO: 9093 - DNA, 900 bp, Homo sapiens
gctggggtttgccattttgtgtcttttttagtgttcttccaaattaaattttcaagatcaaatatgggactcattgtcctgtttatggagctttttttcttttggttgactattcttttgtttcctacagtcttcaacaactgttagtgcttacaatggatacatcatgcatcttaattgataggatggatatgataataccttttttggtccaaggtcccgctcattaaaaaaaatagtttataaagctgaaaagtttttatttctattttttgtaaaatgattttcatgataggattttatataaaggggaagggttttttgtatcatttttataacatttttgaaatgaatacttattctctttcatcatctattttagactcacagttttatgagtaatgcagtaaaggtcatgtggcacattagtaaaatatgttctgaacacagaaactattctccttatcacaaattaaattttatgttaagtttgaagagcactggcctggggtatactttgctgtgaaaagatcattttggtcacttaaattacaatagaaatatttgtgttaagaaaattaagtaaaaattaggctgggcacagtggctcacacctgtaattccaggactttgggaggcctaggcaagtggatcacctgaggtcaggagttcaagaccagcccaaccaacacagtgaaaccctgtctgtactaaaaatacaaaaattatccaggcgtagtggcaggagcctgtaatcccagctccttgggaagctgaggcaggagaatcgcttgaacccgggaggcggaggttgcagtgagccgagactgtgccactgtaccccagcctgggtgacaagagtgaaactctgtctcaaaaaaaaaaaaaaaaaaaaaaagg

SEQ ID NO: 9094 - DNA, 145 bp, Homo sapiens
ctgtagtcccagcttcttgggaggctgaggcagaagaatggcgtgaacccgggaggcggaggttgcagtgagccgagatcgcgctactgcactccagcctgggcaacagagcgaggctccatctcaaaaaaaaaaaaaaaaaaaa

SEQ ID NO: 9095 - DNA, 1668 bp, Homo sapiens
atagatagatagatagttggagtttggataaaaatctcgagttgagatctgagagaccattctgagggagtgtgtgagtagaagaccaagatttgaaccctggtaaacatggtgcaagaggaagaaaatgaaggagacattctaggtggaaggagaacggtagtattattgggatggtaaagagaagagtttaaagatatttggaatagtgaattgtgtttggcacgaggatttgtgacagccatccttagctctgtcagctgattatcgactggggccgggagtgtgggcagtggagactgtttggaaatgtatggtggtgttggagattgccacagtgattgtaggacactactgccacttactaggctggggctagggatgttgaactttgtccagtgcacaagaccatcccatacaagtccaaaatttaatagcacctctgctgagaaatataatgccagggatctatttcagttctccacactccattggtcaccatgttcattcatgtctgccttctaaacatctcaatctagccctttcttcccccttctcagagccactgccatacttgaggcttccattgtctcctgattggactatttatattgccgtaacttcctaccttgattgtctattgccactctctttgccacctcccttctgtttaccaccagaaccgtgaatctaaaatatttcctcttcattaaaagtgaaagaacattatcacgtcatttcctgtttcattaaaagtgaaacattttttaaaaggaaaaataatagcccttcaaggtctggcgctaagctcattttctcgcagcttcaccatggtatctatcttgtattccagctgcagacctccacattcctcagataagtctttccttttttgtactcctttatatgtcagtgtgttcctccttttgtctgggctgtcatttcccttacccacatagagaactccttcctttcaagaatcaactcctgtgtcacctactttgccagtacgatctgttcctctctctctctcgctccaaaagactaatctgcacactctgttacagcacttgtctaattgtgctgtagcgtttatttacatgtttgtttctcctctagccagtgagcacctctcaagcagaattatcttccttgtttctctggcaccctaaatatttgttgaattaatagtccttctcttcttttgtaattttgctttctgtaatagaagcttaattttaagtatagttatatcagtaatcaaaatgaatcacacactgagaaatcaatgtggatgccctttaagggttctgttattttttttattgccattgagtaaaataagatactctgtgataaagtatattagcattaaagtgttcaaatctgatctttattagtaggcctcaagtgaatccttgctgacatttaaggtttatgacatttccttcacgttcgttcttgactggaaggcataaatggctgacagtaaagagcaattaataattttccaagtaaaacattttcagggacatctgcctttattgctccccagatgagagtacagcctgtttcttatgtgttccaaagatgatttccctatcagctttttggtcagttaaccaaaaaaaaaaaaaaaaaaaaaagaaaagaaaaaagaaaaaaaag

SEQ ID NO: 9096 - DNA, 2674 bp, Homo sapiens
aaataggcgagtgttgtgtataaaggaagttgaaatcctgggccttatgtgtgtagactggcaatgtccatttgaagattttgtatttcctcctagtgtcagtgaaaatgtgctaaaaatttcagttaaggtaagaaaacatgtcacacctttagagctaagagttcattgcttttagactgttttgcagttaactacacaaaatatttgaaggattagtgtcgttattactactatatgctgagatgtgaagaaagatgtaatcaatttatttgaataactgtacttattttctggcagtcttgattgcatagagtgaaatatcagtctacccacccaaataattaagattctcatatgctgatattttctttttggtagaattaagcattagtaaataggagaggttttttttttaacttcatatggacacccatgttgctgtaatcttagacatttctggaaagattccctctttttaggtttttagaagattattaagtgatttgataaaatgtcttttctcccatcattttgtaaggaagcacttttattttaattacatagtaatttgtaaaagtgatactctgtcttttgcttagttcttagactcaagtacttaactttctttgaaatatgtttgttacattatatattataaatttattttcatgcctttaaaaaactataaattattattctaaatatggcaatttctttagtgcatttgttttccctaaacaataatgttatttctattagtgaaactatctgcaaaactaaacgttttttactgggaaatttagtagctagaagaacatttactgtgaaatttaatagctatagatgtgagtactgttaccctttaatttatgtttacttatcttttcatggaaatttacaaataaaggaaacaccgtgttaccctaccattttgtatttcagcattactacattgtagagtgtcaaaatttaaggaatgttttgatgtatgaaatatagttttcaaactaggaaagactatgtcactgtgcatatattttatagtttcctcagttatcacttctctttcacatcaatggtgagaattgactcagtgtattttacattatacagaaattttatgtatcagccaaagaaatgaaggaagggttttttgatttgtcagatgtgatgagttaccaagtggtgtttctgtaggctatttatcatagcctgcagaaagccattattttatacagatagatgtatgctcatccaattttataagttctaacaactcacatatggaaataccgtccttgttccaagatgatttatttcatatcttacttgaatatgtgtatttggttagcctacttgttataagatagagttgacatttaagtatacaattaaaagttaggaatttttttcttcctcagaataatttcttttctgtcattgtttcttttgaaacaggaacagggtctgttccacaaaaaagacagtgccaatcaaggctgtgttcgaaaagtttacctgaaggacaccgccacagcagaggtaaacaatttaaagagcatgcctcaattttttttagctgaaatacttttttaaaagcctcttataatgaataccattatttctcccaaagctctcccaaatataactatggatggatatataaacttaatatgctgtggactcagtcgggtgcaagggtcttatttttatatgacacatctggactgtatccttggtccttagctgttggtcctgtttggagagcttcagcccttgctttcatacctttcccttcaaccaaatgagcctatacttgtctttaaaattcataataagtattttactttacagagagcatgtaatgccattgaggatgcacagtcaacgagacagcagcaaaaattgatgaagcagtcatcagtgagacttctcagaccccaattgccatcttaatcacagacctcaggggctccaacagggagaaaaaacaatcactggtcttgtctataagtcactctgctttatcttgctaaagacaatttttcaagcaatcctttagttttagttttctggaatagctagtattgggttttctagttttttcaccttttagtttttactctaattttgtaaccatgtatatgctagcagtccacttctacgccaccacccaaatgggtcagacccttgaagaaacgtcacttcaaactcagaatgaaattttcattaatattaaaattgtgaagcaaaggtcaataggcttatatttaattaaagccttactgaagaataagaaatgagcttagaatgactagtgttctttgaaaggtttttttatttttgtttttttggggttttttttttttttgagaccgagtcttgctctgtcgcccaggctggaatgcagtggtgcgatcttggctcactgcaatctctgcctctcgggttcaagctgttctactgcctcagcctcctgagtagctgggattacaggtgtgtgccaccacgcctgggtaattttttttttttttgtatttttagtagagatgagtttcaccatgttggtcagtctagtctcgaactcctgaccttgtgatccgcatgcctcagcctcccaaagtgctgggattacaggcatgagccaccacggcccgccaaaaggctttaa

SEQ ID NO: 9097 - DNA, 320 bp, Homo sapiens
ttggcagaattctaagatccctgtttctttgacctctgtcagccagcgagctgctcttagctcctagaagctacccttattccaacccaacaagggtgctttgaatctctgacttcttggtctcttacgcagatttatagtccatgaacttaggtcaggcccacctacataaactatttttgctcagagtcacctgtgccttataataacctaatcttggaagtaaaatccattatattcaaagtccagggcactatacagagatatataccagggttggggaatcttggagacttgtcttagaattctgtctaccatag

SEQ ID NO: 9098 - DNA, 1344 bp, Homo sapiens
aggctgaggcaggaggattgcttgagcacaggactttgagggctgtagtgagctgtgattgtgcctgtgaatagccattgtgctccagcctgggcaacatagcaagaccctgataccttgggtttttaaaaaacaaaacaagatacatgctgacatttctggtttggcaggcagagcttgttctgctccccaccctcccttttcccatagtaaccatttataggacatctcactgttgtctactctgtgttgcctctgcttccctgcctggtagatctaggaatcttaggatttcttagttttagctggtgatccgtatctttttcttaattccattgtaacttcagcttttcttattgcttgtaggaaggctgtttccattgaatacaaacaaaataaaagcttttattcttaatcttagagataggatgtttgtatttaaaaataattgtgctgtcaaaattctgtcaagttggcttttaccacattagttttttttaatgtggtttatatgaccctggagtaccttgtcttctcactgttaaattctcaactgagttgtccctatttaaagtgtgagactgtgccagtttgattttaaaatattgcaagtgcgttatggcaagataaaactgcaaagaaagaaccttcatgtccctttgattataaatgcttttggcacttgtttctactttttcctaatgttttttgaggaaagaacctccaactctccagacaggtctgggggcaaatgactaaaacatgaactgaggccctgggctgtctctgtgaggatatcccctctattctctctgaaatgtcccagcatgtggtgcatttcttgttagtgtggactcctctgtatataacacatcttatttatcttctgtgcataacatgaagtagtgccctaatgcaattccaggatgtaattcagcatttctataaaaatacagtgtttttctacatttgcatcaaaaaataaccagataattatatttattaagaaaatagcatttttggctgggtgtggtagctcacgtaatcccagcactttgggaggccgaggcaggcagatcacttgaggtcaggagtgaggcaggcagatcacttgagatcaggagttcgagaccagcctggccaacatggtgaaaccccatctctactaaaaatgcaaaattagcctggcgtagtggtgcatgcctgtaatcctagctactcaggagactgaggcaggagaatcacttgaacttgggaaggggagattgcagtgagctgagattgtgccactgcactccagcctaggcaacagagtgagactctgtttcaaaaaaaaaaaaaaag

SEQ ID NO: 9099 - DNA, 186 bp, Homo sapiens
tgttggattttttttaagaacagtgcatttttgaatgcttttgaaaaattgtagtaaaatacataaaacaacatttaccttgtaagcattttaattggtacaattcagtgacattaagtacagtcccagtttagtgcaaccactgttactgtctagtttcagaacgtttttgccccagatggatac

SEQ ID NO: 9100 - DNA, 17000 bp, Homo sapiens
ggatgaaaggattcagaggaaagtagagaaactagagcaacaatgtcagaaagaagccaaggaatttgccaagaaggtacaagagctgcagaaaagcaatcaggtaaacgttttgttaagaaatgggtattttatataggctataatatctttattttcttccagttttaagctcttaaaaaagtctagtcagatgatagtaactgtcaagatttctttctactgctttagtcccatggggtaaaatgttaatgaattgttatcaagtactcttggcattggctttccacagagtgttggtttaggatcacagtactcttcttaggatagagtggtatccagtttagtgtggtccttgattctcctctaacaatgcgaactttgaagaatgacacttcagtagacccctagttttaggaactctttattagcttggatatttaggtagtcatttgctttctctttaatcgtaaaacaaagtaatatgaaagcagctattgtctgaattaggttttcccttgagaaaacctggtctgggaagtttcacaaaagtcatgagggtatgctccaatgagaattctagtgtaactgtaggaaaaactgccttgatctgttttggagtaaaaccaaatcactagattggtcctggggctcagcaggccaaacttcttagtcactcttaggtcctagacttaatctggaacctctgaatcccattcacaggctgggccttatctggaatttgattccccccttttttttttaagacagagttttactctgtcgcccaggctggagtgcagtggtgtgttcttggctcactgcaacctccacctcccaagttcaagtgattctcctgtctcagcctcccgagtaggtaggattacatgcacatgctaccacacccagctaatttttttgtatttttagtagagattttgctatgttggccaggtttgtcttgaactcctgacctcaggtgatccgcctgcctcggcctcccaaagtgctaggattacaggtgtgagctactgctcctggccttgatttcccttagtgtagtttggaatattgtttagctttgctgcctctcagggatcattagttctttagtgttagggattagcaaactgattgctgctaaagtttcaattttttagattccttttcttaaacatatgtggctatgagaaataaggaagtcagtaatttaagataaggaatgcatttttaagagttaaggtgacagtttctaaatacttttaatgcagttttcccttggtaataataataatagttaagctaataaactctgggacaagtctgcctgagtttgagtttcagctctgccgcttatgaactgtgtaatctcaagcaatttaaccttttcatggctcaggtttttttttaatctgtaaagtgtgttgttgagagaattatataagtaaatacatgtaatatgcttagaacagtgtctagtctagcacagagaaagtccttaataaatgtttacagctcttccccacctcagtttaaggttggaaaaacgtcccacactagattatcagcaattccactgttggcaattacaaggcattcattgcattcaatttccatatgccacaggacaatcagtgtaccctgggagaagggaaagaatattctagaaagtaatatacctttgccttagtagaataattgctacttttctgttttcaaaactgggaaagaactattttactttatatataaacatcactttttaaatatttaaaataaattggtatattttaccactgactttttttttttttttttgaggcagagttttactctgttacctaggctggactgcagtggtgcaatctcagctcactgcaacctctgcctcctgagttcaagcgattctcctgcctcagcctcccagctagctggggttgcagggcccaccaccaaacccagctaatatttgtatttttagtagagattgggttttaccatgttgtccaggctggtcttgaactcctgacctcaagtgatctgcctccctcggcctcctactgacatattttttattcttttcagtttagtagcaagagagctctttagatgtctggtccttttcatacttagctaattgttttcagaatcatcatttggggctaaatggtgttgagtgtttttttaaaacaggatgaggagtaaacagctttttttgtttgcttttttgttgattaatgtactcacgataaatattattttaatagttaatggtataaaagtttgcagtttggttaacagattttcagatcatgtcacactaatgagcatgaattttgtagatcatctcgtatataacttctgttatctttagttagtagcaataagagtagtagtttagattataaactgagcacactgattgtattttatgcttatgcacatttttcctaggttgccttccaacatttccaagaactagatgagcacattagctatgtagcaactaaagtctgtcaccttggagaccagttagagggggtaaacacacccagacaacgggcagtggaggctcagaaattgatgaaatactttaatgagtttctagatggagaattgaaatctgatgtttttacaaattctgaaaaggtaagtgctgtcagaggataaaaccaaatcacagcattaataacagtgccctaattatgagctgcaataattgctttccagagttagacttcaaatcactgagtagctgacttattaaaagtttttattgttctgaaatgtaaactaatacagtttcttgtagattgctgatgaagtgttaatattgagatgtttaattgggtttcctggcatttttttaatgaaattttttgtggcttaaaaatgctgtggtagctgtgttcataaatatctctttaccatagatttctttcaatattaacagaatttctatagtttttaaatagtgacagtccattgggtggtggtggggtggtctgacctaaatcattgataagctgagatgcttttctgtaaagcaataaggaattcagaacttctggtttttattacttgaataaagatctcttataaagaattaaagcagtttggaccaaggagagctgaaaaaaattctgaattaattgtttatgttaatccttttcatagcactagtcacttactcctggtctaagggtacatggtattggctgctctacaatcttgaaagaaggtaatttagctcactttcttcccctcaggggaaaaaaaatcaaaatgtgcaagaaaatggacattcttatggatcttgtatgtacatagcaacattgtccactcatattgaatacagtcttcctgaattattccagatttactccatagaatatttcagatagtggaatgtaaaagctaagtattattgacactcactttgaattaagcaacacttttttttaatagaactctatagggttatagaatttataatttttagagttctttggaaaatagttatgtgtgtacagataattcctctaaagaaaaggtgtttttgaaaaatttagtttttcaagtacaggtggttttttggttataagaatgagttctttagtgttaaattctgagattttagtgtacctgtcacccaaacattgtacactgtatccaatatgtagtcttgtaccccttattcccctctcaacttccgcctttagagcccccaaagtccattatatcactgtgtatgtttttgtgtcctcatagcttagctcccgcttataaatgagagcatatggtatttggttttccattcctgagtaacttcatttagagtaatggcctcccgctctatccaagttgctgcaaaagacattattttgttcctttttgtggctgagtagttttccatggtgtaaacgtaccatatttatctttatctgctcgttggttgatgggcacttaggttggttccatatctttgcagttgaattaatttttggcctagttctaccagttagccatccttaagaactcatatagtattagattgccaattattagataaactcctagctgtctcaatttctggactctgtaccaatcaccttcccaatggaaagaaaaggaaaaagcacccacagagctagaccagtgtgtgattgtgggaggaattagaatgggataagatatcaacacatcatattcttttccttctttccccctagtcatttttgtttttttaattgttcttttttggcatcttggctgggtgtggtggctcaggcctgcaatcccagcactttaggaggccaaggcaggatgattgcttgggcttaggagtttgaaaccagcccgggcaacatggtgaaaccgcatctctaccaaaaaaaaaaaattagctgaccgttgtggcacatgtccatagatcctagcactcaggaggctgaggcaggaggattgcttgagccccagaggttgaggctgcagtgagctgtgactgccacactgcactccagcctgggtgacagacagaccctgtctcaagaaaaaaaagaatcttctcatattctgaaaacaaaaacaaaaacaaaaaaaaccctattatgtgtttacctctgtccttacacatatgttggttttgtttttttttcttttttttcttttttttttttttcagacggagtctcgctctgtcccccaggctggagtgcagtggcgcaatctcggctcactgcaacctccgcctcctgggttcatgccattctcctgcctcagcctcctgagtagctgggaccacaggcgcctgccaccatacccggctaattttttgtatttttagtagagatggggtttcaccatgttagccaggatggtctccatctactgaccttgtgatccgcccacctcggcctcccaaagtgctgggattacaggcatgagccaccgcacctggtctgtttttcttttttacctagaatggcagcttattgttcctcatgtggataatacttgatgactgtgattatctttaacactattagcaagggtagtctctcacctcacccaaatgtcaataactattagaatatagttttgccagcttttgttacttattgttgtagtatgttttaactgactaaatgttgtatattgtaaccttaagagatatctgtgctttacacaatttttataaaataatttgctatggaaattcaatataaacaagtgccatttacccctatactagttagtacattaaacaaagtttgcaatagcacaatgatgatgatgacttcttaaaagaacaaaaactccttatggaagcatagagcaggctgtgtgccaagtatattatttctgaagtgggtattaagggggtattggtgaggagaaaatgatggattttgctaatacaactaaatggcatggtgaggacagatactgcagtgatatttgtgcccatatacaacaggacagagtgagtgtttggtagttgaaaatgatagtgacctgctgactaggagaaaagggatgactgaagcagaaatgctatattcactataatttggagcaagaagggagaagaggctctgctgttgttattcacagttgcttgtcagagttcacatgcctacttagaaaaatctatattgggcagggcgtggtgtctcaagcctgtaatcccagcactttggaaagccaagatgggcagatcacttgaggccaggtgttcaagaccagcctggctaacatggcgaaaccccgtctctactaaaaaaataccaaaattagcgggtgtggtggtgcatgcctataatcccagctacttgggaggctgaggcatgagcattgcttgaacccaggaggtggagattgtagtgagccaagatcatgccaccgcactccagtctgagtgaccgagcaagactctgtctcaaaaaaaagagaaaataaaaaaaatctatattgatgttcttagctcttccttcgtatttatgagtctcactgttttttcaaatgtaaaagaaaatgaatcttcataaaatgaattattaaaattgtgccaaagtaaaactgagaactagtttgagatttaaagaataaatgaacattgtaaactcccctgaactgttgtgtaaataagcacagatatctgcattaaagaattttagaactcttgcctaagttccttagttccacaacttgaataaatttacacatttctggctgggctcggtggctcacgcctgtaatcccagcactttgggaggccgaggtgggcggatcacctaaggtcaggagttcaagaccagcctgaccaatataaagaaaccccgtgtctactaaaaatacaaaaattagccgggcatggtggcatgcgcctgtaatcccagctactcgggaggctgagacaggagaatcacttgaacccaggaggcggaggttgcagtgagcagatatcgcgccattgcactccagccttaagagatatctgtgctttacacacaagagatatctaggccacaagatatctgtggccttaagagatatctgggccacaagagtgaaactctgtctcaaaaaaaaaaaaaaagacagaaagaaaagaaatatacacatttctatattatatttcatcatggggctttacattaaactttatattttcttttagaacaagtgttataaattcatatgatcagtaatgacaggcatttaacttacagtaggatatatgtggcagtatgctctaaattatttttataaatctcgtttatccttttcgggttcataaacttagaattctgagatttacacctggctttcagcaagcaatgatttaaatttctttggaataaacttgaactacaggtttcattgggaagggattgtggcatcaaaaaaatcacagaatttcagtaccagaaagctaaatgtttatgttattattgactcattattggtaacaccccaaatgtattcttgttgctcataaagttttatttgttgtggatttttaaaggaaatttttttagggaagggactgtgggcacatgcagggagatattactaatttcagatatataattattttttgatatgcctaaaagttttttaaattattgcttttatttattttttcatagataaaggaagcagcagacatcattcagaagttgcacctaattgcccaagagttaccttttgataggcaagttcatttctcaagagctaatttgaatatgtggtataatttataaaataaaatagtatcttttcctgtatgattttctttgcccattaattaaacggaaatttattgagcacttgctggttcatttacttgctagtttattcactttgtacaagatgcagtgtaaaatagtttattgaaaaaatacagtctcttcttaatatctaaatttaatgataggccttgaaataatttcagtccctgtctcctgaaaaaaaatttgatgaaggagaattttgaaatcgactgaggttaaatttggattttcatactttggactttgagaaccaggtaggggatagagagaacacttttcctatttcctgatgaaggttcttaggcttttggaggccttggacacctttgaaaagctgatgaacgctatcacctttcttcaggaaattaagatacacacagattattgtatacaatttcatggagttttagactctagcctatccacagaactcttcctagggacttcaggttaagaaccccttttttttaaaatgcaaggccccagagccattactaagttagatttcatcctaaaataaactatccactgagaaggaaattttttcatgatttcttctagtgtatggaatgtcagactctttaataaactgttggtaaaatagtacttcctccatgtgaatatttgaaagaaatatgatttaatatattataaatgatacatagtaatagacatataatatgttatttttgttcatacttgaagatcttcaggaacaggtaaaatatggatatattgctatacttagcttaaccattatctcccaaacatgtaatgaattccccctaaaaatgtatctattttattctcaactctgattatcatgaagaattagcaataatgatcatctatcattcttaataataatctggtagttgcccagcattatgatttaacttactgtaatactttttaaagtcacccaccaaaacttctctttaactttatgtcatttcagaattggactatttacttaaatgggtaaaatgtctagctcaaaataggctcataataattattgactgcatccccctaccctgtcttcatcctatttttccactccagaacacacatgcatatatacatatatatatgaatatgaatatgtgtgtgtgtgtgtgtgtgtgtgtgtgtgtgtgtatatatatatatatatatatatatatgtctaattaggatatatattcaactccaaggcttggtgaagaggccaaaacaaaaccataagagaagtatgtacctgagtggtggtgaatatgagtgtgtgtgtgtgtgtgtgtgtgtgtgtgtgtatatatatgtggagttgaatatatatcctaaatagattcaattttttcacacagattaatatggccttatatgtgatctgatctactgtgactttgatacatcatttttgtataacactctagatttttgtttccttcttcatttgtctttggcatctcttttgccagccactctcctctctcttcaaacaattgcacacaatcttaaaatatttctttttcatgctatgcatttcacttagatatttgagatttgaaaaaattctactgcgtggtattttagttttttaatttgtaaagattgaatggctactctgctaggcacattgctgggtcttatcatttgtcattaatatatcatcatataatatattatttgatcatctttttcttttgaataataatgatggaactttatttttaaaaataccaaccatgggaatggggagggagacaaataatcaagtgtatttaaaatgccagcaaataaaagtaagaacagtaagtcagttttgggactggctgggttgttagtgtcttatgcagagcagttgattctttaaaaagagaattgattttcaatgtgaatttcctaaatgagaaccagctacctacctacattaagttttatcacctggcatgcttcctatcagaattctctcctctgattttgtcttttttctttttacaataaccttttaactttataatggttttggatttacagaaaagttgcaaagatagtacagatggttctcgtatctcctgcacccagtttcccatttggttagcatcttacattgccataggatgtttatcacaactaacaaacctcatggttggtttttgtctttcagattttcagaagttaaatccaaaattgcaagtaagtgatgtatttattttaccttttttttaataagtaaaaaaactacttgtgtaaaaataaaacagcaaaaggagaaaaagcaggaacaatgtcatcttcctaccctagtaggctactgcatagaagatccctgagtttgatttctcttccctcaaaacaaccattaccagtttttttggatattcttgcagaataatctatggatatacaagcataagacataaattctatatatgtgtgtgtgtacatatgtatgtgtatgtatagatatttatatgtacttctatcctcatttatttttaaataattgctaccatactatataaatagctttataccttgcatttttaatttaatagtgcattttggaaatcctgtgctttccatacatctatctctgaataagattctctctttttttttttaagattatataagcatttcagtatctatttaactccttacatgattagtttggttcttgccagtcttggattttagtttaggttagatcattctaggtttttgaaaagaccactaaatttgcaggttctgtggtagctggggtcactatttagagtaggccactgcatagaagattcaaagattcatctatattcccaaaaagtcttagaataaggatgacacagctagttagacttcctgggaatatttttgatcacaatagattggtctgaagttcaggtgttcgttaagaaccatactagcctcaagaatatagtgaatagggccggacatggtggttcgcacctgtaatcccagcactttgggaggccgaggcgggtggatcacctgaggtcaggagttcgagaccagcttggccaacatagtgaaaccccgtctctattaaaaatacaaaaattagctgggtgtggtaatgggtgtctataatcctagctactcaggaggctgaggcaggagaatcgcttgaacccagcaggtggaggttgcagtgagccgagatcgcgccactgcactttgactgggtgacacagagaaactctgtctcgaaaaaaaaaaaaaaaagaaaatgaaaaaaatataaatactgcatattatcaggatgagatttggtgttcagtcatcagtccactattgttctaggtagaggcatcagaactctagtaaagagttctgtagtcctcttcaccctttccatgtgtaggatttttcatgtgtgttgctatcagaaatagcatctggaggattttttccagtcagctactggtttaagtaacaatggcatatgacagtcagaccctggaaagctcagtaattttgccagtttggaagttttttgtcttgaaaatatagatttatatgccacagtatattacaggggctgggttcacggcctataatctcatttgtttttgtaattccttcaaaagaaagctatattcatagtcattatatttgtaaataatgtagatactcttaaataacgtggatgccttgtatgcctcagtgtagctgaatgactttatttttaggtaaataccatgatttagaatgccagctgattcaggagtttaccagtgctcaaagaagaggtgaaatctccagaatgagagaagtagcagcagttttacttcattttaaggtaaatagtaggaattaaaaatgaatagtgttcaaggctatggaaattacgtaagttctatatattatagtctctgatttcccccattcattatgtaactatcacagtgataattttcactgttttgagtaatttgtacatttgatactctgtaaatggtattgaatgttatatatttaatatttaaggttttatattcaataatattaatattgaattaaaattaattgatcaattaaatattgatgaatttttatactttgataaagaaaatcatattgtctgcctttttgcttccacatattataatataggtgaaaagaaagaaaacgtgaccgtaaatatctgtaggatataggaaccagagagtagatggaacatgactagtaagagacttaaatccaggggacctcaggaggtaatacaaaagaattttgtattacggaattgtttacctagaatttgaactcgggagagaatccctgtgtaggagtatatttctgcaaagaaagtgcttaaagaaatggttcttccttcaatctgtttctttgatttgtatcagattagggaaggggaagctatttgttggacttttcattttggtaaaatctgaatgagtattgagaatggctcttgagacagtagtgcactttatattgctttccttactggtttttatgtatgatttattaataggcaaaaatctcattatggtgagcttaatgacaaatcagtttgttttaaacacattttattaaaatacatttagtttaaaaagtaaatttccaaactaccagctgaatacaactgtccagattcttgcaaggaaaaccaaatgctagagaaggccaggcgcaatggctcactcctgtaatcctagtattttgggaggccgaggcgggtggatcagtttagctcaggagttcgagatcagcttaggcaacatggtgagaccctgtctctacagaaaatacaaaaattagccggaggggaggcatgtgcctgtagtcccagctactcgggaggctacagcaggaggatcgcatgagcctgggaggcagaggttgtagttagccaagatgacaccattgcattccagcctgggtgacaggagtgaaatcctgtctcaaaaaaaaaaaaagaaatatatatatacacatatatatatatatacacacacacacacacacacacacacacgtatatatacacactttaatatatataaatatatttatatgtatataaaacacatacatatatatatgtaaaaccttttcccaagaccttgactctctgtgtatgtgtgtgtttgtgtgtatgtgtgtgggtgggtgtgagtgggtgtgttttggagttgaaggagatggctagatgatcataggacaaaaattactctaaagaactcagttacatacttcatctttcttgttttagtctaaagttcaacaaggatatgtaccaactgataaattttatcatagaaagtgactagggagacgatacctttatcaagttactggttttctgcagttaattttatttaagtccaacaggtgttgctattggccatttactggtaaatagtcatagctttatgacatataacacttctttttttgaaataataattattataattgaatcagaataataacaatgtgtttcttccttgtagggttattcccattgtgttgatgtttatataaagcagtgccaggaggtaacataacagtacactttgttggatattattttatgctaattgttgttttaaaatcatgtagaaattatatgttcactgtataaaatgtctctgctgtttagggtgcttatttgagaaatgatatatttgaagacgctggaatactctgtcaaagagtgaacaaacaagttggagatatcttcagtaatccagaaacagtcctggctaaacttattcaaaatgtatttgaaatcaaactacaggtaattttaaatagtaacaaattaaatagttcttaaagcaatatgtaattttttccctatattttaaaagtatttttaaaatttagtttacttatgtaatgaccttagaaatagtaatctagttaaggagaaaggaatcctcatgctttttaaaaaatgttttgtattcaccaagaagaaagtgctaatcaataagtatcatcagagaacatgcttgaaatttgtgtagtattcgtagtagtagtataatatattgtggtaagatagccttgaagatttttctttttttttggtccctgccttcaccaatagatgtcatttgtgaaactgaacaagaattacaagagcagtctgtagaatttttaataatatggtactaacctgaaaagggaaaacacagaaatttaatttacccccatatcactgtactttcagataacatttcctaagctgtttacaactggattaaacaacattcaataaatgtttgcttttttttttttttaacacaattcaggaattttgatagtattgtcattctctagaagtggggatgtaatgtacagcatttcacacatttactgtctaagaaaccctgttttggagtaatgcctatagacatctgaaggaacactagtgttacctggaactcagtttgggagatgctgccttaaggaattgactctattgtttgtactctcagttttgtttttttgatgcacctcacagagcagaataggccaatttaacagaaaaggtattattcctaagactgataaagatcctctacaggtaaatatgagaagtggtaaaatgtaaaaacctgttttaaaatattttatgattggtttgttttctgtaattgcctttttgattggattgtaagtcagaaaggttcaaaactgtggagtgaattttaaaagaaaaatatcttgagaagttgtagaatttaatatttacctaattaacagaatgttaacctttttcttttagagttttgtgaaagagcagttagaagaatgtaggaagtccgatgcagagcaatatctcaaaaatctctatgatctgtatacaaggtaaatttttaatgattagaaaataatagataacagattttttaaatttttttgataaaaacaaggaagtattcaggtatttttgaataagtttgtcaccagtttaccttttagcattaaatgcttagctgtatagactagttatattgtacaagactgtattgtacaacattcttaatacattaacgtcaggaattggatgttatgctttattttttctctaagcattagtgtaattacatttatctgcagtcaaaactttagaaactgcaaaaggaagtgatgtaatcttaacaaatgacaatttcagctctaaatcttctgtaggaatttgtcttgtgcttttgtaaatgtcagtgttactcttagagattgtctcagaagcttcatatggagtcttgtggggttttttttttccttgacttttcccaaccctattactcttcttcagtgtcttcattttgggagaaggtttttccaaagttaccgtaatgaggaagtccatctcaacaacaacactgttatgaccctatcttcagcaatgggaaatagaaaattagagggaaagtccacaaggacaaaacaaaagagggtgaacagacagtagatctttcagtactctgttttgggtcccatgtgatgaatggcattagacatacttgaggccaatctgccactgtcgccatttctggactagttaattgcctcacaagttcttttcctaggaatttataacagttctcaaaaccgtaaagttgttcgtaatatttcactgtatttatatgtaaccctgtagagttgatctctgcatcataagtactctcccagagtttaagaaatggtggcttaacataagtcatgaaagtcacgttgtaaaaatttgtattccttaatattgttactatacctaaaatgtatattaatctttttctccccctttttcatgaaaagaaccaccaatctttccagcaagctgatggagtttaatttaggtactgataaacagactttcttgtctaagcttatcaaatccattttcatttcctatttggagaactatattgaggtggagactggatatttgaaaagcagaagtgctatgatcctacagcgctattatgattcgaaaaaccatcaaaagagatccattggcacaggagggtgagtatttttgttaaatacttctgttaaaactgaagacattaataacttcattatatttgggcaaattatcaaatgttgactatcattagaattttctgtgaagagttcttttaatccagattgttatattattgatcaaatcttgttcttaaaccacatgttgaaatgacctaacataacatgattgaaatgtaagccgggcgtggtaactcactcctgtaatcgcagcactttgggaggccgagatgggctgatcacctgaggtctggagttcgagaccagcctggccaacgtggtgaaaccccatctctactaaaaacacaaaaattagctgggcgtggtggcagacacctgtaatcccagccattaaggaggctgaagcaggagaatcacttgaacctgggagacggaggttgcagtgagccaagattacgccactgcactccagcctgggcgacacagcaagactccgtgtcaaaaaaaaaaaaaaaagtaaagtagatatttgtcaattaaaaaataatgttttaaaactatcgagcagaacactagtaatataaaaagttccatagtttctttcatttttttttttctcgatagaataagttccaggttattgaccaggaaacgcatcttttttttgttactgttgcaggtgtgaaaaaaatagaaaatagtttgtagtttaagtaccttgaattgatgagttttgttcagagactttagcataaaaaactattaaattaataccttaatgcctacaattatttacagactagaagaaaataacttgctccaagaatagttggcatcttagctaccaggctttaactgcctggaacccagattctaaaaagagacagaatgacattggtggactcaaagtccagaatccccacatgtatatatcgaaaccagttttcttatttcccattttgttgtgtattaaataatgattagagagagttaaaattagtagtaagaggtaatacctgaaaggtagtagcaaggaagggaagaggaaaactaatgaataataggaatttgtgtgtgtgtttgtgtgtgtgtgtgtgtgtgtttacggtagtctcaagttacatatcctaagagcaaaaaaagtttaaccttccaaagataccccatataagtgtttcaggtgaccctcagtaattaagaatagctaaattatgtttaatatatcttctttaatatcatgaataaatgtgcataatcttaaaatgactatattttaaaattgttaaacttttaaaggtttctttttaaacaggactatttcgttatttagaatgccaacctatttggaatagctcactttctaaggaaacccagcaagttttactattgagtcagaattgtaaggctgaattgtaaagcaacttcagaaattagaagtccaaatctactcatttatcagatgaaaatcttccgtttagatatcagggctaactttatttcacaaaactagttattggaattagaaattaggtctcttggctattggtccatttttgttgttgatatatactaagtttggaagtactcaaagttgaaatctaagtaaaatgttttctttttttcatttgtctttatgatgtactagtattcaagatttgaaggaaagaattagacagcgtaccaacttaccacttgggccaagtatcgatactc

SEQ ID NO: 9101 - DNA, 147 bp, Homo sapiens
atactttaagttctgggatacgtgtgcagagcatgcaggtttgttacataggtatacacgtgccatggtggtttgctgcacccatcaactcctcatctacattaggtatttctcctaatgctattcctcccttagtcccccaccccc

SEQ ID NO: 9102 - DNA, 5116 bp, Homo sapiens
  SITE (3802): n equals a,t,g, or c
gctgaagaatttagggagttgattctgatgtaagaagacaatggataaagtatttttcagaagtcagtacaaattggcagcaaatctaccaaaaacaaataataagagaaaaactatcagtgatggatttatcttcacatgtagcatgtactggtttaaatcagtgaataactacatagttattgaattcaaaaacttttatttagacctggtcatctattctcttaattaaatgaaatgaagtttatggagattcacttataagtcatgtgttgcttaatgacagggaaacattctgagaaatgcattgttaggtgatttcctcattgtgcaaacatcacagagtatacgtacacaaatctagatggtagcacctattacacacctaggctatatgctatagcttattgctcctaggctataaacctctacagcatgtttctgtactgaattctgtaggcaactgtagcagaatggaaagtatttatgtatctaaacatagaaaaatatatagtaaaaatacagcattgtaatcatatatgtgggccattaggtgatgcataactgtaatatctaatatttaatttattagatagttatctcaaacatttagtatctagtaaataaacttattttatattactatctaggggacttatttgaaaattactgcagaaatgatgacctggtaacatttggaagattttgttatggtgtcactgtcattttgacataccctatggaatgctttgtgacaagagaggtaagcgcggttccttcccaacgctttacccaggtgatctctctgccacatttaatttaggaagatttataaataatacagtttggcaaattcccaagggcatgacaaatggtataatttgtaaaattttcttttttgactctaaaatgtcagagtttaaagatgaatttatattcagatgtttacaagacaatttttcaaaagttcggtttgaaaattaggtttggtagatttggcttatatttctgtgagcacaaatatttatacaactgcattccaaagtgactgccagccttttgcgacagccaaactaaagttgttgcttttaaggcattcttacaaagaaattaagtatcaaggtttaaaacatgttttacaaaactgtctttttgcttagatgttttatcagtcaacatgtattaaaggcactgtagaatctacagattctaactggttttgttattttttaaaaactaaaatatcttatattccatggagaaccaaaattcaactgaaacttttagttttacagatacattttatttatgtatttatacatgtagacgtgtatatttacaactatacataacataaactaataatataaataataacaaatatataggatattatttacatataaatatattgtattgtcaaagtcagctctaaattgggttatatattccacttgtatttgtagagaaatattatctgaaagagaattcattcttttggtgtaaaattggataacatggcctgtcaggaatcccttatgctgtcagctaaaaatccactgtaccagtcggcagtaaaacatgatcttgcttcacagtgggtctttcagggaccacactgaaaagggctcagtcataggatctgttcctagaggctgtttatacagtgcaccatgtgaaagggtctaatgagataagtgaaatatctacagagctttaaatacactaaataatcagcaggcttcttgaggcaagccagggcttactttaagtcagtcccagggataaggaactgactgcacggggaaacagaagagggaaatgtttagcactgtgtatgtcctttacaactagcacttctctccctcacacatgtataactcacaggccagttctctaccttgactataaaggagaaatagactgaactaatttttttttaaatttaagagcctttcgaaactttactagctattgtcagatgcaggacatggtattattttagcttctgctcagtacgtaggttcaaatctaatctctagatcagcaagtaagaacagatggtgcattctcacgtggttgctagtaaactgcctgcctgcagacgatctgagtcacttcacctgcacaacttctgtgtttagtacttgaaacttgagtttcctttctagctgctgtggcaggaagatagaactgaatcaagatctctgccacaatagcaaatactcagcagaagaatggtgtctataactttcccttctcttactcttcattctgcacacacacacaggtacacacacaaatgtatgactgacaaaaatataatcaaactgtttcaattcataaaagcactaaaaaggctgtctacccttaacaaatatctcttactacctgcctcactaagtgatttttcactctcacaattatatcatagaggcatctgtaagaatggatcttaaataagataatacttggagagacattacaacttatgttattaatatcaccattaaattattagcaaagtcatggcagtatgtgacacatgggagatgttgcatatccaggcagcacagcttagagagatggcttctttatgatacctcaatatctgaccttctgttatttccaactctttgtctcactgttcttttgcacagggtcactacttattcagactatcttctctttatcctccataggaattgttcctgttattacctctttgctctttttcacgctcttgtctcagcctataattctctccaaatcctgtgcatgtttcaagccctacctcaaaccaaggtaggtcaagcatatttcagggatgctgtaaaggagattactgtaaggagacggctctagatacctaaagctccttctagtcctaaattctccttgatcttttttgtcctgttataaattgatctctacttgcttttttaagtttcgttgtatgcctccaaaaattaattcctgagaataggaatcatttccctgacattttatctttgcaaaccatatcataatatgggacacattaagtcagtaattttttattgctttcctgatctgagtagtcatgaaaaatggtgatgaactcttgcccatttttgttgaggaaaggcaagataaaatagacttaaattataacaaataggaattagttaatgcagaattaatttcctgttagtaaaggatattacacatccagtattaataagggaaatgtgacagctacttcttagaggccatgcaaataatctaaatagcatgtttagtttgttttagtagtaacctattggactcaagaaagaaggataagataactttccaaagtctctcctgtacttgaaagatacatgtattgaaacatcggtatgccacactataggtctgtaatataatccactgactaatagttcaacaaagaatacttgttattgatatgtgtgtctgtatgtaagtaatttggaaaatatagaacattcctagtgacttaagatttgattaatagccttgttggtagtattttatatattcctaaatactattgtaaaatactccctcaataaatcctgcatgcctttaaaagtccctctcaaaataatctgtttattcggcaggtaattgccaatgtgttttttggtgggaatctttcatcggttttccacattgttgtaacagtgatggtcatcactgtagccacgcttgtgtcattgctgattgattgcctcgggatagttctagaactcaatgtgagtacgtgcaaagatttaccccttcactctaaaattctctntaaaagataatgattacatttaacataagatgtattttccttaacaaaagtgtcacttttgaagtggaatcaaaatatgtttgtaatagtaaatattttcaatgatgattctgtgcactttgtgggactatatagttttaaagtagtggttgtttagagacatatggggtcgtcacaactgggtaggcagtgctgttggcctctagtggatagaggccagggatatacatcccacaatgtgcaggtctctcacagcaaaaaattatctgatccaaaatgtcaattgtgctgaggttgagaaaccctggtttagagtacttttgcatatctcatttactataacacataaatgttactaaaaatagctataaattaagtggatttggactttgctgaataataatatatctagtgaaatttatgagaaatatgaaaggattcaagttatatccattcacttgctatgacaaaatttctttttctttaaatatttttctttctccagatctttcttttatagtctgcactgccatcaaccaaatagaagtcctcataatatcacagttgaattaatcccagctctgtttcaactatcatgtatttaagttctgctttcagtttatcggcattttcctaccagagcaagtataaattccgttgcttctaccatcttgtcttctgtgtaaaactatttcccatttacttcccaaaatttatgttcagctctagtcaatctaattttttggcctgtgaataagccatatcaattctttccattattctttgtcctatctgctttttatttccgataatgattatttttctttcatttctgtccaaattttacaaaaactttaagatccagtgcaacttctaattcctttattcacattcactgatcatatatttattgagtaattactatgtgccacacaatagaatataaggatgaatgcaataagaaaggacctgtgcattctcacaaataaacataaaagttcaactgcaatataggtgatgaagacagaggaggccaggaacggtggctcacactgtaatctcagcatttttggaggccaaagtggatggattgcttgagcccaggagttggagaccagcctgggcaacacagtgaaaccccgtctctacaaaaaattagccgggtttggtggcatgtgcctgtagtcccagctacttgagaggctgaggtgagaggattgcttgagcccaggaggtagaggtttcagtgagctgagatggcaccactgcactccagcctgggcaacagagtgagacccggtctcaaaaaaaaaa

SEQ ID NO: 9103 - DNA, 10115 bp, Homo sapiens
ctgaacctcttctttacaacgaaatgatgctcaaggtattgtagcattttatgtgacttacttaaattgcttttctagcagacttcttccttcctcaatttcttcagttgccctctccttttaagaactacctgcttctgctttaacttttctttcaacctgtgggctacctaattaactgcatggtggctttcattactgttttacaaatgagatacatgattctattgtacaaagttaggaagggaatgaattatgacaagttcattgaattttaaccccctagttttatgtgtccattatgacgctgccagattgcatttctgttaatctatttactgtcaccaccttctgtataagataagctttttgaggcaggaaccatccagtattgacttggcagtcttgagagcttagaacagtgctggactcatagtaagaacttgtgggccgggcacagtggctcaggcctgtaatcccagcactttgggaggccgaggcggatggatcacgagatcaggggagatcgacaccatgctcgctaactcggtaaaacccggtctctactaagaatacaaaaaattagctgggcgtggtggcaggcgcccgtagtcccagctactcgggaggctgaggcaggagaatggcgtgaacccgggaggtggagcttgcagtgagccgagatcgtgtcactgtactccagcctagcgacagagcgagactccgtcttgaaaaaaaaaaattgtgaaattgatttgttcagtggctttatgttattctttaacttaaataatcactgtatttaactaaacagagatgcaaatgccatgagaaggtcaagcagatcagaagatattttggaaatagatgaacgcaaggaccacagacagctgagcagctgtgtgtttattcccctcacgtttcgttccttcaggggccagggacagccatgtgttctttggcacacagggtgctgttcaggacttccagaggattccagggctccaccttcctgtatcaccagcagcacggtctcatatggatggatggtgcaagtacctccagggctccatgtcaccaccccacctcccccactgctccccagtctcacattcctccataagacacccctgggtcagatctagccctgaagagatgaatgatcaatcactacatgcccccagctgtggggtttgtgggggtgagaagagaggtttaaaagaggtagttttgcttagagtcagggatccaatcaatatttgaaactcttaagtttaaaccctttcttcctctctctttctgcccctaaaaatattttaactgcaatttctagcagcgtgaaaatcaacattattgttattcttccaccctaatctgaaacctttgtgccaccatcctttctctctcccagccatcttctctcctgctttcgcccaccccatacacccctccacctttctatcaaagccctcagagacataaaaaatagcccatccttttgaaaatggcaagtgttccttgacttgataaacctgacatgaggctctgtaaatgggactagtcagtgtccaggttgaaggacgttcagctaggcacgggttccatctctgtagctctgtcctggcactgagctcagtatcaaagaaccccagataccccaggtcccctaatccaatagcccctcaccctacagctaagatttaaaaatgaagtatctgatgttgagagagacaaattaagttgtgcaatgatgtagtaaccagaacaagaaagggaagcaatccaatattcactaggtggtgagcagatagtgaaacctgacttaagagtggatgtttttaactctacataatagatgctctcttgtgaaaatgtgtagaaaacaaaataacagtctacatattgaagaatttgaattttaaaagaattgcagagtactccactgcttatgaaattcaagtaatcttacatgtttttcttatctagcttatgggtagaagcagaatgagcttctccagtgggatgaacacagacacttcatattcaacaagttcacactgagcccatcatcattgcttggaaggctgctcctcttcctgtgttctctctcttggccaatggcactgccatttccccatccagaacctgggatactgcagcagtcttttcactgcccctgtctacccctctccaatccattctctacacaactgcctacaggaatctttccaaaacattagttctgaccataactctacttttcttaagacagcactttggctccccattgacatcacagtctttagagtgatgtaatgttcatcattcggtcataagctgcaaatccattctccttctcacctctgtctcctgcatgcaactccacagctgaaaggagccaaactccctccactctctcacacctcccagccttggcccttgcttccacttctacctttaccctccattctcatcaccctacactattatctgatgactactcttaagttttcataaccagatcaagtatcgatgtctccaccaacagggaagagcaggcagtggttctcaagtcacatatgtaatttaaaattttctagtattttaaattttagaaaatgtttagaagaaactgatcaattaataacatgttttatttacaccatatcccatatattattatgttgatatcaatatattgaattttttttattaagatgagaggagtctcactctgttgcccaggcgggagtgcggtggcatgatctcagctcactgcaacctccgcctcccaggttcaagcaattctcccacctcagcttcctgagtagctgggattacaggtacccaccaccacacccggctaatttttgtatttttagtagagatggggttttgccaccttggccaggctgttcttgaactgctgacctcaagtgatccatctgccttggtctcccaaagtgctgggattacgggcatgagccaccacacctggtcaatgaatagaacattgattcagcatgcaatcaatatttttaaattattgagatgctttatatcctttttttcctactaagctttcaaaaatcagtctttattttactcttatgacacatctcaatttgctgcatttcaagtgctcagtagccacattagggagtagctgccatattgtacgtaagagcaccagagcacttgagagcctcctagagatcctaatgaaaacagaatcctgtgctatgcttccagaggttccatttctggggagagtctaattttggtggtctggagtggggaccagaaatgttccttttcagcaagaaccccaggcagttctgaggtacatgttcgtctgaccatttgggacttgatagctagatgcactgattgtcgagttacacctataggggtttatgttcagattccaccacctaaaagctgtgaaaattagtaacttcagttctctaggtctcagtctcctcacctgcaaaaataactacctagagacttgtgggtattaaaagggtaatatatttgagacattcagcacagtgcctggcaggtgtctcataatagcagctgtgcactgcacccgcagaaatctctatcacacagacgaggtgtcccttgcatcctcctcccacaactctctgtgcttccctccaccaccacccatcacgcaatgctgtgtcctgtgcttgctatgctgcccctcaactcaactgagaagataaactggctgctgtgtgctcccacattactctgcctcacacatagtaggtgcttagtacacatctttttttttttagaaattaaactaaatctgagcaactgggtttcttgtagtggagcaaaactctttatgcaaaagtgcctcaaggtgtcttatagaacagaagtgtgtaagtaaagtggggtgtatccctgtcctaacactcttccctttaaagtctatcacagaaagctttgccacagcaatccatggcttgaaagtgggacacctgacagatcgtgttattcagaggagcaagaggatgattctagacactctgggtgctgggttcctgggaaccactacggaagtgtttcacatagccagccaatatagcaaggtaagaagctcaaggtctacattagagataaaacccagtgcatacatatgtgttacatttactctatacttcgttttatagacagcacttgatgtacatagcactgttctatatcatttttataatttcctatgttccattatctgagttttaatagtcatccatattctttactaagtcactgtcttaaaaccatacacagtgaggcacagtggctcatatctgtaatcccagcactaccagaggccaaggtgggcagacggtttgagcctaggaatttgagaccagccttggcaacatggcaaagacccatttctacaaaaacaaaaaacataaaaattagccaggtgtgatagcacacgcctatagtcccagctactcgggaggctgagaggtgggaggatcacttgagcctgagaggttggggttgtagtaagtcaagatcatgccactgcactccagccaaggcaacagagcatgaccttgtcttaaaaacaaacaaacaaataaacagaaaaaaaatatgctaataatatctcacagtttattattattattctctggagaaaagcctggtcaagtactctgagcagagtggggatgtatgtgagagctcctgctctccctagggtgtattagagataaacagttagtccatcttccctggtatttaccccaaggagtaaataagagtaacttcagatgtgcttccttggagcacttccggatcatgatctaggatcaagcaacgacatctcctccccctttcacaggggagagctgtgtattctacaaggatgagaggtattcaatgactagggcttctatctgtggcaaaggttcaagtaagaactatgaataatgcctccaaagatgaagaataactcttgaaatggtgacttggtatactgtattcacactatcactggttgatttgcttttgttccagatctacagttccaacatatccagcactgtttggggtcagccagacatcaggctcccgcccacatatgctgcttttgtgaacggtgtggctgtaaggaggttttcacgtcttttcaactattagataatcataataattttagagtcaggaaatatctcagaaattgcccaaattctatattttacagatgaaagaactgaaagtcagacagataaagtggcttaccctctctcctatgtagtaattcagttttcatgtttttacagtaaattgatgcttttcaaacagattgtgtagcagaggaaagaagatggaaggatttagataaaaacaccctaaggtatcccaattcaaaaccttgaatataaatagcaaaaaaatataaaacccatatccagacctaatatcttctgtttttcctgttgtggggccagtttctctcaagtaatgtgttctttattcattcactcattcatccattcaacagatagttattgagaaaggaacaatggccttatagtgtctgtattttctgaaccaaaaatctgtacttctcatctgacagatgatttttatgctttttctgtgtgtcacgggaaatattctacaagatgtaacttggaaacagacatgttgggatttccgagatatttttatgatttatgggtacaatagctcaggagattgaaagttaaagccaacggtgcattccaaagcaatgtcctgaaagcagtgggaaatgcaccagtgacagcaaatagatataaaaatctatttttaaatgaacttctggatattactgttttaatataaagaaaaagaaaatggctaggagaaagaggaataagatcttaaagcagaaaataatgatttttaaaatatatagctgaaaagttaatctgagtttgacagttattgtgctattcttacaacttctctaaaagtttgaaattatttcataataaaaaggtacaaaaacgtatggcctcatatggaataaatgacattaaacttgcagtgcaacttatttaaagggtggaggaggaattgccagccacctgattctgcagctttgtttttaaaagggaatatagatctttccaggggccacagcagagggagctcaggccaccagggcaagacccaagctccttggggctcacaagctgctctccaaggtactcccttcctctggcagaggaacagcatttcccagtgcccggccatgtgattaataatcacagccaggccaggtgtggtggctcacgcctgtaatcctagcactttgggaggctgaggcgggcggataacgaggtcaggagtttgagaccaccctggccaacatagtgaaactccgtctctactaaaaatacaaaaattagccaggtgcggtggtgggcacctgttatcccagctgctccagaggctgaggcaggagaattgcttgaacccaggaggcagaggttgcagtgagccaggatcatgccactgcactccagcctaggtgacagagcaagactctgtctcaaaaaaaaaaaaaaaaaaaaaaaaaagaaaaaaaatcacagacatttctcagattttcttttctgagaatcagatcaaaagaatctcacataaaacaaggttattactaaactaagtccttagtggtccaaaagccattgcattaagggaaaatttaaggctttttgttgctgtttgtgtctgtttatacagattcactccatggattttgatgacacgtggcaccctgccacccacccttctggggctgtccttcctgtcctcacagctttagcagaagccctgccaaggagtccaaagttttctggccttgacctgctgctggctttcaatgttggtattgaagtgcaaggccgattactgcatttcgccaaggaggccaatgacatgccaaagaggtatggagagaatttgccccatcaaaaggtagtcacatccccttcatctatcaatcattatctccgtagagctttctgacttagaggccggttcagaggaagatgttaacattagcacaggtagataagtcaatacaccagtcacatacgaaaccctctatccacatttaaagaagtgacttcaagagtgcaacctggaccgtgagattaattgggcctctcgttgcaaggtgattcatgtcattctggcattcatgggtgtactgagtattccttatttcattctcaaagcagaatctattctgagactagctagcgtccctcagactaatgaggacattcagaatatccttactctgactgttcatcctgcagataaaaaatggtcaaatgtcggccacatcatatggctcagtctcagatttatgttgccacttgctccagcctgccaggagagaagtaaattgaaatactaggtagtgaagtttcagtttcttcaaggcccacaattctcacagtgacttagatgagatctcagcaatcaatagctgttgcctttctggcaataattgtaatggtaccatttataaagaactcactatgtgctagcactattgtaaacatgttaatttattcaaagctcctaaaactctaagaggtagatgttattattatcaccattttattttattttttgagatggagtctcgctctgttgccaggctggagtgcagtggtgtaatcttggctcattgcaacctccgcctcctgggttcaagtgattctcctgcctcagcctcccaagtagctgggactacaggcatgcaccaccatgcccagctaatttttgtatttttagtagagacggggtttcgtcatgttggccaggatggtctcgagctcttgaccttgtgatctgcctgcctcagcctcccaaagtgctgggattacaggcgtgagccatcgtgcccggccttattattattatttttattattatatttttttgagacagtctcactctgtcacctaggctggagtgcagcagcatgatctcagctcactgcagcgtctgcctcccaggttcaagggattctcctgcctcagtctcccaagtagctgggactgcaggcacccaccaccacatccggcaaatttttgtatttttagtagagtcagtgttttgccatgttggccaacctagtctcaaactcctgacctcagatgaccctcccaccttggcctcccaaagtcctgggattacaggcatgaaccaccacacctcgcctatcaccattttgtgtaagaaaaactctacagagaagttgaataattttccccagatcatatagctaataaagtaatggagctgagatctgaacccagacagtgtgactccattatcaatgttcttgatgactacgctatcctgcctcctggtggttacggtttgtacatctccaactctgcttctttgcttttcagattccatcccccttccgtggtaggaacgttgggtagtgctgctgctgcatccaagtttttaggacttagctcgacaaagtgccgagaagctctggccattgctgtttcccatgctggggcacccatggccaatgctgccacccagaccaagcccctccacattggcaatgctgccaagcatgggatagaagctgcatttttggcaatgttgggtctccaaggaaacaagcaggtcttggacttggaggcaggatttggggccttttatgccaactattccccaaaagtccttccaagcatagcttcctacagttggctgctggaccagcaggacgtggcctttaagcgttttcctgcacatttatctacccactgggtggcagacgcagctgcatctgtgagaaagcaccttgtagcagagagagccctgcttccaactgactacattaagagaattgtgctcaggataccaaatgtccagtatgtaaacaggccctttccagtttcggagcatgaagcccgtcattcattccagtatgtggcctgtgccatgctgcttgatggtggcatcactgtcccctcattccatgaatgccagatcaacaggccacaggtgagagagctgctcagtaaggtggagctggagtaccctccggacaacttgccaagcttcaacatactgtactgtgaaataagtgtcaccctcaaggatggagccaccttcacagatcgctctgataccttctatgggcactggagaaaaccactgagccaggaggacctagaggaaaagttcagagccaatgcctccaagatgctgtcctgggacacagtggaaagccttataaagatagtcaaaaatctagaagacctagaagactgttctgtgttaactacacttctcaaaggaccctctccaccagaggtagcttcaaactctccagcatgtaataattctatcacaaatctctcctgaggcttaccaacatctaaatgactttgcatttggggagattcaatgatttggtttgtaaagcaagggtctgctgcttggttttcccaggaaaaatgaacaaagatggagagagtccagaaacagaactacatatatctggaaggagccttctcctgaaaattttgcaggacagttccacttacctaaatcaagatgaaacacacacacaaaaatgagtttgtaagcattcacaagggtgaaattcaactcacctgtgatttacttataaaattaatctcttcataggaattatgtgtggacttcatgagcctcaaggttttagagggatgtgaacctgcatgtatattttctgacagtggagagggctctggtgcattgtgtcaccaacagatctcctagaccatggcttattaccaagccctccacagtgcaaggggtgctactggggaatgggtgggtttaaatcctgcctctgccattcactagatgtagccttgagcatgttaccattagccctctgcctcagtttccctatttgtcaagccgaagtaaaaagcagtctggaaaaatcgcattttggctctagaacccatggtcttaagcactgcaatatatcacctttcagtataaaaatatttgaatcagagttgcaataaagaatgaaa

SEQ ID NO: 9104 - DNA, 6404 bp, Homo sapiens
  SITE (1484): n equals a,t,g, or c
ctcaactcaactgagaagataaactggctgctgtgtgctcccacattactctgcctcacacatagtaggtgcttagtacacatctttttttttttagaaattaaactaaatctgagcaactgggtttcttgtagtggagcaaaactctttatgcaaaagtgcctcaaggtgtcttatagaacagaagtgtgtaagtaaagtggggtgtatccctgtcctaacactcttccctttaaagtctatcacagaaagctttgccacagcaatccatggcttgaaagtgggacacctgacagatcgtgttattcagaggagcaagaggatgattctagacactctgggtgctgggttcctgggaaccactacggaagtgtttcacatagccagccaatatagcaaggtaagaagctcaaggtctacattagagataaaacccagtgcatacatatgtgttacatttactctatacttcgttttatagacagcacttgatgtacatagcactgttctatatcatttttataatttcccatgttccattatctgagttttaatagtcatccatattctttactaagtcactgtcttaaaaccatacacagtgaggcacagtggctcatatctgtaatcccagcactaccagaggccaaggtgggcagacggtttgagcctaggaatttgagaccagccttggcaacatggcaaagacccatttctacaaaaacaaaaaacataaaaattagccaggtgtgatagcacacgcctatagtcccagctactcgggaggctgagaggtgggaggatcacttgagcctgagaggttggggttgtagtaagtcaagatcatgccactgcactccagccaaggcaacagagcatgaccttgtcttaaaaacaaacaaacaaataaacagaaaaaaaatatgctaataatatctcacagtttattattattattctctggagaaaagcctggtcaagtactctgagcagagtggggatgtatgtgagagctcctgctctccctagggtgtattagagataaacagttagtccatcttccctggtatttaccccaaggagtaaataagagtaacttcagatgtgcttccttggagcacttccggatcatgatctaggatcaagcaacgacatctcctccccctttcacaggggagagctgtgtattctacaaggatgagaggtattcaatgactagggcttctatctgtggcaaaggttcaagtaagaactatgaataatgcctccaaagatgaagaataactcttgaaatggtgacttggtatactgtactcacactatcactggttgatttgcttttgttccagatctacagttccaacatatccagcactgtttggggtcagccagacatcaggctccctcccacatatgctgcttttgtgaacggtgtggctgtaaggaggttttcacgtcttttcaactattacataatcataatnattttagagtcacgaaatatctcagaaattgcccaaattctatatttcacagatgaaagaactgcaagtcacacagataacgtcgctcggcttaccctctctcctatgtagtaattcagttttcatgtttttacagtaaattgatgcttttcaaacagattgtgtagcagaggaaagaagatggaaggatttagataaaaacaccctaaggtatcccaattcaaaaccttgaatataaatagcaaaaaaatataaaacccatatccagacctaatatcttctgtttttcctgttgtggggccagtttctctcaagtaatgtgttctttattcattcactcattcatccattcaacagatagttattgagaaaggaacaatggccttatagtgtctgtattttctgaaccaaaaatctgtacttctcatctgacagatgatttttatgctttttctgtgtgtcacgggaaatattctacaagatgtaacttggaaacagacatgttgggatttccgagatatttttatgatttatgggtacaatagctcaggagattgaaagttaaagccaacggtgcattccaaagcaatgtcctgaaagcagtgggaaatgcaccagtgacagcaaatagatataaaaatctatttttaaatgaacttctggatattactgttttaatataaagaaaaagaaaatggctaggagaaagaggaataagatcttaaagcagaaaataatgatttttaaaatatatagctgaaaagttaatctgagtttgacagttattgtgctattcttacaacttctctaaaagtttgaaattatttcataataaaaaggtacaaaaacgtatggcctcatatggaataaatgacattaaacttgcagtgcaacttatttaaagggtggaggaggaattgccagccacctgattctgcagctttgtttttaaaagggaatatagatctttccaggggccacagcagagggagctcaggccaccagggcaagacccaagctccttggggctcacaagctgctctccaaggtactcccttcctctggcagaggaacagcatttcccagtgcccggccatgtgattaataatcacagccaggccaggtgtggtggctcacgcctgtaatcctagcactttgggaggctgaggcgggcggataacgaggtcaggagtttgagaccaccctggccaacatagtgaaactccgtctctactaaaaatacaaaaattagccaggtgcggtggtgggcacctgttatcccagctgctccagaggctgaggcaggagaattgcttgaacccaggaggcagaggttgcagtgagccaggatcatgccactgcactccagcctaggtgacagagcaagactctgtctcaaaaaaaaaaaaaaaaaaaaaaaaagaaaaaaaatcacagacatttctcagattttcttttctgagaatcagatcaaaagaatctcacataaaacaaggttattactaaactaagtccttagtggtccaaaagccattgcattaagggaaaatttaaggctttttgttgctgtttgtgtctgtttatacagattcactccatggattttgatgacacgtggcaccctgccacccacccttctggggctgtccttcctgtcctcacagctttagcagaagccctgccaaggagtccaaagttttctggccttgacctgctgctggctttcaatgttggtattgaagtgcaaggccgattactgcatttcgccaaggaggccagtgacatgccaaagaggtatggagagaatttgccccatcaaaaggtagtcacatccccttcatctatcaatcattatctccgtagagctttctgacttagaggccggttcagaggaagatgttaacattagcacaggtagataagtcaatacaccagtcacatacgaaaccctctatccacatttaaagaagtgacttcaagagtgcaacctggaccgtgagattaattgggcctctcgttgcaaggtgattcatgtcattctggcattcatgggtgtactgagtattccttatttcattctcaaagcagaatctattctgagactagctagcgtccctcagactaatgaggacattcagaatatccttactctgactgttcatcctgcagataaaaaatggtcaaatgtcggccacatcatatggctcagtctcagatttatgttgccacttgctccagcctgccaggagagaagtaaattgaaatactaggtagtgaagtttcagtttcttcaaggcccacaattctcacagtgacttagatgagatctcagcaatcaatagctgttgcctttctggcaataattgtaatggtaccatttataaagaactcactatgtgctagcactattgtaaacatgttaatttattcaaagctcctaaaactctaagaggtagatgttattattatcaccattttattttattttttgagatggagtctcgctctgttgccaggctggagtgcagtggtgtaatcttggctcattgcaacctccgcctcctgggttcaagtgattctcctgcctcagcctcccaagtagctgggactacaggcatgcaccaccatgcccagctaatttttgtatttttagtagagacggggtttcgtcatgttggccaggatggtctcgagctcttgaccttgtgatctgcctgcctcagcctcccaaagtgctgggattacaggcgtgagccatcgtgcccggccttattattattatttttattattatatttttttgagacagtctcactctgtcacctaggctggagtgcagcagcatgatctcagctcactgcagcgtctgcctcccaggttcaagggattctcctgcctcagtctcccaagtagctgggactgcaggcacccaccaccacatccggcaaatttttgtatttttagtagagtcagtgttttgccatgttggccaacctagtctcaaactcctgacctcagatgaccctcccaccttggcctcccaaagtcctgggattacaggcatgaaccaccacacctcgcctatcaccattttgtgtaagaaaaactctacagagaagttgaataattttccccagatcatatagctaataaagtaatggagctgagatctgaacccagacagtgtgactccattatcaatgttcttgatgactacgctatcctgcctcctggtggttacggtttgtacatctccaactctgcttctttgcttttcagattccatcccccttccgtggtaggaacgttgggtagtgctgctgctgcatccaagtttttaggacttagctcgacaaagtgccgagaagctctggccattgctgtttcccatgctggggcacccatggccaatgctgccacccagaccaagcccctccacattggcaatgctgccaagcatgggatagaagctgcatttttggcaatgttgggtctccaaggaaacaagcaggtcttggacttggaggcaggatttggggccttttatgccaactattccccaaaagtccttccaagcatagcttcctacagttggctgctggaccagcaggacgtggcctttaagcgttttcctgcacatttatctacccactgggtggcagacgcagctgcatctgtgagaaagcaccttgtagcagagagagccctgcttccaactgactacattaagagaattgtgctcaggataccaaatgtccagtatgtaaacaggccctttccagtttcggagcatgaagcccgtcattcattccagtatgtggcctgtgccatgctgcttgatggtggcatcactgtcccctcattccatgaatgccagatcaacaggccacaggtgagagagctgctcagtaaggtggagctggagtaccctccggacaacttgccaagcttcaacatactgtactgtgaaataagtgtcaccctcaaggatggagccaccttcacagatcgctctgataccttctatgggcactggagaaaaccactgagccaggaggacctagaggaaaagttcagagccaatgcctccaagatgctgtcctgggacacagtggaaagccttataaagatagtcaaaaatctagaagacctagaagactgttctgtgttaactacacttctcaaaggaccctctccaccagaggtagcttcaaactctccagcatgtaataattctatcacaaatctctcctgaggcttaccaacatctaaatgactttgcatttggggagattcaatgatttggtttgtaaagcaagggtctgctgcttggttttcccaggaaaaatgaacaaagatggagagagtccagaaacagaactacatatatctggaaggagccttctcctgaaaattttgcaggacagttccacttacctaaatcaagatgaaacacacacacaaaaatgagtttgtaagcattcacaagggtgaaattcaactcacctgtgatttacttataaaattaatctcttcataggaattatgtgtggacttcatgagcctcaaggttttagagggatgtgaacctgcatgtatattttctgacagtggagagggctctggtgcattgtgtcaccaacagatctcctagaccatggcttattaccaagccctccacagtgcaaggggtgctactggggaatgggtgggtttaaatcctgcctctgccattcactagatgtagccttgagcatgttaccattagccctctgcctcagtttccctatttgtcaagccgaagtaaaaagcagtctggaaaaatcgcattttggctctagaacccatggtcttaagcactgcaatatatcacctttcagtataaaaatatttgaatcagagttgcaataaagaatgaaa

SEQ ID NO: 9105 - DNA, 10642 bp, Homo sapiens
cctgaggagggagttgtggggacctccaatttacagccagttggtcagatgcataggtgatgcttggccttgcacctggggtctgacatgcggatggtcctgtgtgactgagcccttaacctgtggagtctggtgctcactctgcttagggcttctcttgcctttttagtgtccttctaggcggcctttccttcctcttgtcagctcagaaaacttttcttccacttcccttcttctaaaccatcccttacatctactcctttccagccgaccaagagcagaaccacggctggttccactgccaccatgctgtcccacactgtctcctcaggatgtattcagatgtccagccctccccccagtctaggagccccccctttgaggaaagggatgctggcctagtcaactctttcccagcaccaggtacagcatctggcacgttccatctttttcatggactctccccaggcggcctgaccttccctcctctgaaccggtgcatttcttgtctgcatcatgtttgccctaatcagatatcaccttatttcctcttttaaaaaatgctttgtttctctggcaggcttcatcggaatcacaattttcattcatttagtaactgttgttgtttattctatgtatttttgcaggaggcctgaggtgggctgtgttctcctcctatggcagggcttcactctcctcctcctccgttggggcttcgctgtccctgggataagaataacaatgccaaggttttcattcttgaaaggagcaattaagcttctcaccccctcctcattttagatgggaactgtgagggccccatcatttacccagggtccctgttgaggatcttgtcctcattagatgacttcttgtgcagcttccatgcatgattatttattcttgtggcactgagaggtttgtacatatctttaaaccagagcggctgtccaaatgaggaaagtccatcctagaagatagaaagggaaatattaattttgcatgtcctctgctttccctggccacagcaatgaatcctccaatgtacctgactctcccttcgcgaagagcatcccctccatggcagaaatctgaaaatgcccctggggagacacatgcacaagacagtgagtgatgcagccgtttcccacgtatctcacaatgtacttctctggtcttattaggactaaatgagtatctcagtccataatcacagggagaaccaccaccacagaccacatacccggggtcttgaaaataattccatgcatgtgggactttcagaagctctccatgtctgcccagaagggccccacaatatactggggggactttgtatgtggctcagcatggagcaggggcaggattttcagtcccactcactcccttggccaagtgcccttgtgcagtgaacaaactgcacaaccatgctgggcagaagcattttatatcagtccccttcggacttagtctcacaggcatcatttgatgggggatgggagatgaagtggttcttcgttttctagatactttattctataagttggatcacctcaagcaaatgcgtgagtgcagctagccaagttctctatctcacagtcttcatatggctggctgtcgctgatgagtgagtgagctacgaaatcagcttaaagcacaacatgttatttttgaatttgaataaaataggaaaaggcagagtgcattgtgtgaccatggggtaagtaagacactctccctttctccttctcagttttcctgtcataaaaggacaaactactatctaaggtctccgtagttaaaattcttttttgttgttttttttttatttgagacagtttggctcattccccaggctggagtgcaatggtgctatcttggctccctgcaacctgcgcctcctgggctcaagcagttctcctgcctcagcctcccaagtagctgggattacacgcctgcgccaccacacccagctaatttagtatttttagtagagatggggtttcaccatgttggtcaggctggtcacgagctcctaacctcaagtgatcccaaagtgctgtgattacaggcgtgagccatcctgcctggcctttctggttaaaattctgtgaggtttgcataaaaggaatagagtaggggcccaaaaaccagtaagatgagaaaatagtgtttcctcagttctaggatccaggggaaaaaaaaaagaaataaaagagaaaatactgtttcctgccacttaagaggaaggactcacatatcctaccttccatcagccttgaaggagacaagtgccctctctctcacacccggtggccttcccttcccctttcccagagcctccaagaaggcccctggcctggcctgatgcccaccatcagcagcaataggcaccaaaacctttctccttcctatccctccccacctcccgaaagggctggggacagcaggtgtgtccttgttagttccatccagctcagctttggctggggagctaatttcactggagccaggctaagcattagggtaagtatttgtcctgtcttgggcagtttcctcactgaaaaatgagggcagagttctaagccctcctctaattctaaaattctaattaaaacgtcgcgagactagtggtgcatgcctgtaatcccagctactcgggaggctgaggcaggagaatcgcttgaacctgggaagtggaggttgccgtgagccgagatcgtgtcattgcactccagcctggcaacaagagggaaactccgtctcaaaagagaagaaaaaaaaaatcaccagactaatatttaccttgagaatccttcttcatcttcttgtaatgaccttcggtgacaacatatctgttttagaagaaaacgcaattaagattatctatgacaacaaccaccgtctccaaatctgtattgattccttttattcattataagtctcatctacctgatgaggtaacttttttgaagacaggaattgtatgctgtgtaacactgctttgattcttccatagttcagtcatccttgctatcttgcgggggattggttctaggataccgcccccacaccataccagaatctgtggatgctcaatcccttacatataatggtgtaatatttgcttataaccaacacgcatcccccctatactttatttacttagcgacaggattgccctctgttgcttacgctggagtgcagtgtcatcctctgttactcaggatggagtgcggtgtcacgatcacagctcactgtagcctcaacctcctgggctccagtgatccgcccacctcagcctcttgagtagctgagactacaggtgcatactaccacacctggctatttttttttttaatttttaataaagacaaggtctcactatgctgcccaggttggcctcccaatgtgttgggattacaagtgtgagccaccatgcctggccccatgtaatttaagtcatcactaataaaatgtatacatattgtacattgttgacagttgttatattgtactttctgtttgtatttttattggttttttttttcttcaaatattcagcctgatctagttgaatctgaagatgtggacctgctgatgaagagggctgactgtatctaacttagggtcttgcatgcagctggcacttaatacattttattgactgttttagataacattcaacagataattcctaataaaaactcttaaaagtaggagaaaaaggaaacctgagtccttcctctgaagtggcaggaaaaccagcctgggcaacatagcaagaccttgtctctacgaacacattttttaaattagctgcctgcctgtagtcccagccactcaggaagctgaggcaggaggatcccttaagcccaggagtttgatgttacagtgagctaggtcacaccattgctctccagcctgggtgacaacaaggccctgagaagggaaaaaaaaggaaaggaaaggaaaggaaaaaggaaaagggaaaggaaggaaagagtagaagtattggaaaggaagagacaaaactatcattatttgcatattaaatgataaatgttagccaaagaagcctaagagaatcaactaagattttactggaagtaatgagaattcaatacagtggctatctacaaaatcaagaaatcagcacacaaacctcaaatacttttcccatgtaccaccaataactaattagaaaatggaagaaagatcccatttacaatggcaatacaaatgtatgaagaatttaggaacaaaaatacaaagatcttttatctaacaaaagatgtataagatctatatatggaaacactaaagctcttctgaaagacattaacaagaaatgaatacatgacatgagatagcacgttcctagaatgtcgtacagatgtaaattctcaaattaatctacaaatttaacgtaatcctattcaaatcccaagatagtttttggtggtggctgtttttaagacagggcctagctgtgttgcccaggctagagtgcagtggtacgaccacagctcactgcatcctcgacctcccaggctcaagcgatcctcccacttcagcctctgaagtctctcatatggtgtccaagaaatggtgacaaatctcacaaagggactaggctcagcagggctggaatattcagggaaggtgtcaagaagaaagatgaacttgagttggcttttgagagatgcataggactcccacaggcagagtgaaataagggcattttagatggacaaacacacagacaaaagcagaaatgtgggtggtgtgactggggtttggtgaggggctgctgtggctggaatggagggctgccacaataatggaaatggtaaatgaggcaagtaaggttggactggtggcatagcgtcaaggttgccagctttattaaatcactcttccaatatgctagcactggcctgttgggaaaagtaatacatcatgtaatcgaacaaaagacagaggcaagctccaggaatgggcactgtaaacaggacttgtcccagagtagccagatgtaggctttaggtaagttgatgcaagctgagcatctctaatctgagggggaatgtctcacatggtgtccaagaaatggtgacacatctcacagagggtctaggctcaggagggctagagtatgagacgttccccctcaccagtgaacttaaaaatgtggccaaaaatttttgtaaaagatggctactctgtagtgctttaactggacctatttagacaatgccttacacactggaggacgatactgtgtaaatctaataagtctacaagacaatacgtatgtcttttggctctctccttcctctccagggtgatgacaactccgtgagggtggagattatacctctctcatcatttcagcaacaaggaaataaattagtggcagagtaagggtgacttgatgagtacatccaattgttgacatagttttgggtgggagaaattttcgacttcttaaaatagtctagtgggattcacatggtttcaattcacagagatctgaaagcgaggatcctttaaaaatcctgaaatatacactgcagtaaaagaacaaagcatacacctcagccttaaatgactgaagaagtatgtcaagtagcagcaggtgggaaagtggctttggttttcagtttgtgagctctgaatccacacaaagacaggactgcattctgaaaacctgaattaattattgtccttaccacaatgaggcagaaaagtataatcaaaatcgttagtattccagtaacaattaatgccaagatgagtttgtcagtatagccatatcctggaacttcttttttgagctaaaaaaaaaaacacacaaaaaaaaaaccagaatgagagctaactattcaaaaccccagtattccaggtgagtagctgacaggttcttttttatttttttgaaagagggtctcactctgtcacccaggcttgggtaccgtggtgcaatcaccgttcactagactcgacctccctgggctcaggtgatcctcccacctcagccttccaagtagctgggactacaggcacgtgtcatcaacccagctaattttcttattttttgtggagacaggctttcactatgttggccaagctggtctcaaactcctgacttcaagtaatccacccaccttcgcctcccaaagtgctgagattacaggcgtgagctaccacccccggcctacagttcatcttgtgccctaatctatttctctctctacatgagcaaagtgggagatcactgtcatgaccaaagttacatggccaagataagctatggcctgggagtcccagactcttctgtgtgggcactttcctgggatatgctaaatgatgggaaatctgggtctcatgtttctgtgtggtcctcacctcaagcgacttctctttctgttcactctgggcttctgtgctctcattaatgtagttctcaatcttccattggtccgtatcccattctatcttggatgcctttacttcctgctgcccactgagaagcttcatcaggtggcctgtcctggagatgagcttggcacaggtcacttgcacatgggccccagagcagtccatcttcaaggtccggataacatgagcaatgagccttctcacattgttgttggggataagggactgtagctgctgggttagctgaatttcaaactgatcacctggggacgagagcaatgggtaattgaagcttttgggctcgggggacaggtcagtgcccacgttgttgtattcccattttgtctcagtttgtttaacagttggccctaagttgaatgcagtcccagcggaatctgcctcatgaggatgattgtagtttgtgttttcagagatggttccttctggcatgttagtgttttccataaaatcattttcttcaaaggcatttcttgcagttgtgtgttttgtattattgttttctataaaatgttctgaaggagcagatacttccagaaaagggttttcttgaggactcaggtctcctaaggatgaaaaagccccttgtgaaggggaatttatgaggctcttcgctgcagagaatggaagcctgtttgcgagcatcagtctactcagataacttttctttctgacctttggactctttttgactttgggtgttctgtgggtcacgtgggagcgagttttgtgaaagcggtatttttttctggcatgtacgattggtttagacgtcttcgtatttgtaactctagcctttgcactttctaaaatggaaatagcgtgggttaagtctttccatctgtctctcacctgtggtagggcttttgcagggctggaggtagaaggcgcgcccttggagaagggtttcagcacagagactgctgccttatgctcttgggtgaaggaaggcttggtgtagacggcgtttcccgctaacttctcaggcccctgctgtgtgtggggctgttccacctcccttggggctggactcccgagccttttttcttcggcagcgttctccacagatgcctgggcaccctgttccctcctgatgctctgccttcctacctctttgaagtgccttttctggatgctccttgggcccatgaggactctcttcactctctgccggttttggcctacagtttgaatctttgccaggctgtttcctgtggttggcagtttaatgaacggtagtaacagtgatttcacatctaggtttaccgctgagaaataaggcaagatgtaacttagtgtactgataaaatcactctcgtcattggtgtctagctgctcactcccaaagcctgacaagttgatgccactgctgtctgagggctcctctggctcaacaatcagctcagtgcttgtgtagttcttccgggcttgtaacaccttcatgaacgctccttctggattccctaccgatgcttcttcagctgtcaaaaaagaagagactgctttgatcatgaaagatgatgggatgggatgcatcagtccatagctgtacaccccagtcacacagagtaggagtcagcaaacattcgagtgccattcagagaggagaaacacacacccaatcctaaacctatgaaatggcaacaacaaaaggagaaaatacatcttttgaaaacacggccacctacttggaacattccatagtgtgacatagagtaactctgtttaggattatttcgttgatccccagaggccaattgcccagtgctcagtcaaagcccaaggtggaagacaagtgcttccctgatgagctggcctctctgcagactgctccgtaccctgtgctgtcctgcctcagatgcagagagagcacaaggctcctgctctcctcgtcctcggtgcacctgtgttcgtgctaccatcacagctgaatgcaatgaaaggcggtcctctgagaggagcagggtggagatgctaaagtggaggccccgtcccattgctgatagatcctcatctggcatgcgctccaccctccccattctctgctcccacgtatcgtagccccatcacagaagatgcgacatggaaaaacgcactgtgtccaccctagttcttaaatttgggcagggatttggggtgtatgttaagagtttttcaaatttgccagattgtatgcctatgttgttaaatacacaatgaatccctggtatgatagcagtttctggataaacattacttgaggtcctaaaatgcagaagggaaaaagcaacttttgtcagatgcctactttgctttcatttcatctctaatattttggatggggaatcatccaaagcttctgactgcatgaaggtcaggtgtgccagtgtgcagctgggtttcttttctggaattaaaagtactttgggtggtggtgagggtcagaggaagaagtaaagattgtgagaaaggggaagaaacatgggcttggggagaacccagaattggggccagaagacctggcactaggctacagcacttagcacctctgatcttgtttttcctcatctgtaaaaggaggttaacaaagcttttctgcccacttcttggggagaagggaataacataattggtaaaaaaaaaaaaaaaaaaaaaaagttttgaaaaataagcaacactgactttatgtaaccaagcattattaattctccaccccatatcactggtagatacctgtattcaagctatctggacatgaaagcagtcacattttagaagtcatgaagttgatgctaataagcctaatctacagaaacactcttgaaagcccttgagcgtttgttctgtgaacagaaaggtttgagattcggagcaagttcagagttggatggtctaagaatggaaaagccctccattccattagaagagccaggtagcaatttctggttatggaaccagaagctctcaggcttcaaataaaacagcatcacttgtactcttataaaactgtaaaaacagaaagaccaaaaccgtatctacatctgtcctataaggcagagagtacttgagatctcatggatttaaaaccagcttacaaactacattgcactatatgaagaaattatcactgtgggcaaagcatcaagcagagagcacagtatacagtgtgtggatgttaatgttattccctagccttcccattcctttgtcttggtcctttctgcatatggaacagttctattattaaattttgtaatagtaactgagaacctgactttcagcaagggagtagttcggaaattgagggagtttaactctgaatgagtaaataaaaataaagcaattatgtcattagcttaaaattttatcatcattaaaaataaaaagtttaaaaacaaatacttaatgtaacaatttatcaccgcgcaatttggactcacgacaatgtgtggtgtttgtcagacatgcactgttgcaatgcagcttgactgtcttgcagacagcctcaatgctgtttttaaattggcagaggcagcaggccatatggctaggtaagatcctatagatgaaaacagagagcaataaattagcggtaaagcggttacttgagtaggtaaaggaggcagccaacgctaccacaggtgtgggaaaaaggtgtcattgaagcctatggactggacagttgggtaggaaccagaaggccaataggaaggaggacaaaagtgcccaactgaagggtaagcatggcagtgagtatggtatgcctagaataaagatggttgggattagaattgggtgacagtgattagtagtttcagaagtatctcttcccaattcaaaagtctcactttgggctgaaagtacagaggaagaaggtagacttttaagaagtctgaataagcccccaacttctggagtccctttctcaattcctgttgggagtgggaaatattataaattactctgggcattaaaaatagcttagtttaacctggattgcggagttaaaaaataacaaagactgcattggtcaaatctggacaatttgagcattcaaaagaataacaacaataagttaccacatatttaatataaagaagaatccacgaagagtgatattgaaaaagaaagaggaggagttcttcttcaatgaaataatgccagctagtaaatgtagaaggaatgacagaatttttaaaag

SEQ ID NO: 9106 - DNA, 10085 bp, Homo sapiens
cctgaggagggagttgtggggacctccaatttacagccagttggtcagatgcataggtgatgcttggccttgcacctggggtctgacatgcggatggttctgtgtgactgagcccttaacctgtggagtctggtgctcactctgcttagggcttctcttgcctttttaatgtccttctaggcggcctttccttcctcttgtcagctcagaaaacttttcttccacttcccttcttctaaaccatcccttacatctactcctttccagccgaccaagagcagaaccacggctggttccactgccaccatgctgtcccacactgtctcctcaggatgtattcagatgtccagccctccccccagtctaggagccccccctttgaggaaagggatgctggcctagtcaactctttcccagcaccaggtacagcatctggcacgttccatctttttcatggactctccccaggcggcctgaccttccctcctctgaaccggtgcatttcttgtctgcatcatgtttgccctaatcagatatcaccttatttcctcttttaaaaaatgctttgtttctctggcaggcttcatcggaatcacaattttcattcatttagtaactgttgttgtttattctatgtatttttgcaggaggcctgaggtgggctgtgttctcctcctatggcagggcttcactctcctcctcctccgttggggcttcgctgtccctgggataagaataacaatgccaaggttttcattcttgaaaggagcaattaagcttctcaccccctcctcattttagatgggaactgtgagggccccatcatttacccagggtccctgttgaggatcttgtcctcattagatgacttcttgtgcagcttccatgcatgattatttattcttgtggcactgagaggtttgtacagatctttaaaccagagcggctgtccaaatgaggaaagtccatcctagaagatagaaagggaaatattaattttgcatgtcctctgctttccctggccacagcaatgaatcctccaatgtacctgactctcccttcgcgaagagcatcccctccatggcagaaatctgaaaatgcccctggggagacacatgcacaagacagtgagtgatgcagccgtttcccacgtatctgacaatgtacttctctggtcttattaggactaaatgagtatctcagtccataatcacagggagaaccaccaccacagaccacatacccggggtcttgaaaataattccatgcatgtgggactttcagaagctctccatgtctgcccagaagggccccacaatatactggggggactttgtatgtggctcagcatggagcaggggcaggattttcagtcccactcactcccttggccaagtgcccttgtgcagtgaacaaactgcacaaccatgctgggcagaagcattttatatcagtccccttcggacttagtctcacaggcatcatttgatgggggatgggagatgaagtggttcttcgttttctagatactttattctataagttggatcacctcaagcaaatgcgtgagtgcagctagccaagttctctatctcacagtcttcatatggctggctgtcgctgatgagtgagtgagctacgaaatcagcttaaagcacaacatgttatttttgaatttgaataaaataggaaaaggcagagtgcattgtgtgaccatggggtaagtaagacactctccctttctccttctcagttttcctgtcataaaaggacaaactactatctaaggtctccgtagttaaaattcttttttgttgttttttttttatttgagaaagtttggctcattccccaggctggagtgcaatggtgctatcttggctccctgcaacctgcgcctcttgggctcaagcagttctcctgcctcagcctcccaagtagctgggattacacgcctgcgccaccacacccagcgtaatttagtatttttagtagagatggggtttcaccatgttggtcaggctggtcacgagctcctaacctcaagtgatcccaaagtgctgtgattacaggcgtgagccatcctgcctggcctttctggttaaaattctgtgaggtttgcataaaaggaatagagtaggggcccaaaaaccagtaagatgagaaaatagtgtttcctcagttctaggatccaggggaaaaaaaaagaaataaaagagaaaatactgtttcctgccacttaagaggaaggactcacatatcctaccttccatcagccttgaaggagacaagtgccctctcacacccggtggccttcccttcccctttcccagagcctccaagaaggcccctggcctggcctgatgcccaccatcagcagcaataggcaccaaaacctttctccttcctatccctccccacctcccgaaagggctggggacagcaggtgtgtccttgttagttccatccagctcagctttggctggggagctaatttcactggagccaggctaagcattagggtaagtatttgtcctgtcttgggcagtttcctcactgaaaaatgagggcagagttctaagccctcctctaattctaaaattctaattaaaacgtcgcgagactagtggtgcatgcctgtaatcccagctactcgggaggctgaggcaggagaatcgcttgaacctgggaagtggaggttgccgtgagccgagatcgtgtcattgcactccagcctggcaacaagagggaaactccatctcaaaagagaagaaaaaaaaaatcaccagactaatatttaccttgagaatccttcttcatcttcttgtaatgaccttcggtgacaacatatctgttttagaagaaaacgcaattaagattatctatgacaacaaccaccatctccaaatctgtattgattccttttattcattataagtctcatgtacctgatgaggtaacttttttgaagacaggaattgtatgctgtgtaacactgctttgattcttccatagttcagtcatccttgctatcttgcgggggattggttctaggataccgcccccacaccataccagaatctgtggatgctcaatcccttacatataatggtgtaatatttgcttataaccaacacgcatcccccctatactttatttacttagcgacaggattgccctctgttgcttacgctggagtgcagtgtcatcctctgttactcaggatggagtgcggtgtcacgatcacagctcactgtagcctcaacctcctgggctccagtgatccgcccacctcagcctcttgagtagctgagactacaggtgcatactaccacacctggctattttttttttaatttttaataaagacaaggtctcactatgctgcccaggttggcctcccaatgtgttgggattacaagtgtgagccaccatgcctggccccatgtaatttaagtcatcactaataaaatgtatacatattgtacattgttgacagttgttatattgtactttctgtttgtatttttattggtttttttttcttcaaatattcagcctgatctagttgaatctgaagatgtggacctgctgatgaagagggctgactgtatctaacttagggtcttgcatgcagctggcacttaatacattttattgactgttttagataacattcaacagataattcctaataaaaactcttaaaagtaggagaaaaaggaaacctgagtccttcctctgaagtggcaggaaaaccagcctgggcaacatagcaagaccttgtctctacgaacacattttttaaattagctgcctgcctgtagtcccagccactcaggaagctgaggcaggaggatcccttaagcccaggagtttgatgttacagtgagctaggtcacaccattgctctccagcctgggtgacaacaaggccctgagaagggaaaaaaaaggaaaggaaaggaaaggaaaaaggaaaagggaaaggaaggaaagagtagaagtattggaaaggaagagacaaaactatcattatttgcatattaaatgataaatgttagccaaagaagcctaagagaatcaactaagattttactggaagtaatgagaattcaatacagtggctatctacaaaatcaagaaatcagcacacaaacctcaaatacttttcccatgtaccaccaataactaattagaaaatggaagaaagatcccatttacaatggcaatacaaatgtatgaagaatttaggaacaaaaatacaaagatcttttatctaacaaaagatgtataagatctatatatggaaacactaaagctcttctgaaagacattaacaagaaatgaatacatgacatgagatagcacgttcctagaatgtcgtacagatgtaaattctcaaattaatctacaaatttaacgtaatcctattcaaatcccaagatagtttttggtggtggctgtttttaagacagggcctagctgtgttgcccaggctagagtgcagtggtacgaccacagctcactgcatcctcgacctcccaggctcaagcgatcctcccacttcagcctctgaagtctctcatatggtgtccaagaaatggtgacaaatctcacaaagggaccaggctcagcagggctggaatattcagggaaggtgtcaagaagaaagatgaacttgagttggcttttgagagatgcataggactcccacaggcagagtgaaataagggcattttagatggacaaacacacagacaaaagcagaaatgtgggtggtgtgactggggtttggtgaggggctgctgtggctggaatggagggctgccacaataatggaaatggtaaatgaggcaagtaaggttggactggtagcatagcgtcaaggttgccagctttattaaatcactcttccaatatgctagcactggcctgttgggaaaagtaatacatcatgtaatcgaacaaaagacagaggcaagctccaggaatgggcactgtaaacaggacttgtcccagagtagccagatgtaggctttaggtaagttgatgcaagctgagcatctctaatctgagggggaatgtctcacatggtgtccaagaaatggtgacacatctcacagagggtataggctcaggagggctagagtatgagacgttcctcctcaccagtgaacttaaaaatgtggccaaaaatttttgtaaaagatggctactctgtagtgctttaactggacctatttagacaatgccttacacactggaggatgatactgtgtaaatctaataagtctacaagacaatacgtatgtcttttggctctctccttcctctccagggtgatgacaactccgtgagggtggagattatacctctctcatcatttcagcaacaaggaaataaattagtggcagagtaagggtgacttgatgagtacatccaattgttgacatagttttgggtgggagaaattttgctattatatcgacttcttaaaatagtctagtgggattcacttggtttcaattcacagagatctgaaagcgaggatcctttaaaaatcctgaaatatacactgcaataaaagaacaaagcatacacctcagccttaaatgactgaagaagtatgtcaagtagcagcaggtgggaaagtggctttggttttcagtttgtgagctctgaatccacacaaagacaggactgcattctgaaaacctgaattaattattgtccttaccacaatgaggcagaaaagtataatcaaaatcgttagtattccagtaacaattaatgccaagatgagtttgtcagtatagccatatcctggaacttcttttttgagctaaaaaaaaaaacacacaaaaaaaaaaccagaatgagagctaactattcaaaaccccagtattccaggtgagtagctgacaggttcttttttatttttttgaaagagggtctcactctgtcacccaggcttgggtaccgtggtgcaatcaccgttcactagactcgacctccctgggctcaggtgatcctcccacctcagccttccaagtagctgggactacaggcacgtgtcatcaacccagctaattttcttattttttgtggagacaggctttcactatgttggccaagctggtctcaaactcctgacttcaagtaatccacccaccttcgcctcccaaagtgctgagattacaggcgtgagctaccacccccggcctacagttcatcttgtgccctaatctatttctctctctacatgagcaaagtgggagatcactgtcatgaccaaagttacatggccaagataagctatggcctgggagtcccagactcttctgtgtgggcactttcctgggatatgctaaatgatgggaaatctgggtctcatgtttctgtgtggtcctcacctcaagcgacttctctttctgttcactctgggcttctgtgctctcattaatgtagttctcaatcttccattggtccgtatcccattctatcttggatgcctttacttcctgctgcccactgagaagcttcatcaggtggcctgtcctggagatgagcttggcacaggtcacttgcacatgggccccagagcagtccatcttcaaggtccggataacatgagcaatgagccttctcacattgttgttggggataagggactgtagctgctgggttagctgaatttcaaactgatcacctggggacgagagcaatgggtaattgaagcttttgggctcgggggacaggtcagtgcccacgttgttgtattcccattttgtctcagtttgtttaacagttggccctaagttgaatgcagtcccagcggaatctgcctcaggaggatgattgtagtttgtgttttcagagatggttccttctggcatgttagtgttttccataaaatcattttcttcaaaggcatttcttgcagttgtgtgttttgtattattcttctctataaaatgttctgaaagagcagatacttccagaaaagggttttcttgaggactcaggtctcctaaggatgaaaaagccccttgtgaaggggaatttatgaggctcttcgctgcagagaatggaagcctgtttgcgagcatcagtctactcagataacttttctttctgacctttggactctttttgactttggttgttctgtgggtcacgtgggagcgagttttgtgaaagcggtatttttttctggcatgtacgattggtttagacgtcttcgtatttgtaactctagcctttgcactttctaaaatggaaatagcgtgggttaagtctttcgatctgtctctcacctgtggtagggcttttgcagggctggaggtagaaggcgcgcccttggagaagggtttcagcacagagactgctgccttatgctcttgggtgaacgaaggcttggtgtagacggcgtttcccgctaacttctcaggcccctgctgtgtgtggggctgttccacctcccttggggctggactcgtgagccttttttcttcggcagcgttctccacagatgcctgggcaccctgttccctcctgatgctctgccttcctacctctttgaagtgccttttctggatgctccttgggcccatgaggactctcttcactctctgccggttttggcctacagtttgaatctttgccaggctgtttcctgtggttggcagtttaatgaacggtagtaacagtgatttcacatctaggtttaccgctgagaaataaggcaagatgtaacttagtgtactgataaaatcactctcgtcattggtgtctagctgctcactcccaaagcctgacaagttgatgccactgctgtctgagggctcctctggctcaacaatcagctcagtgcttgtgtagttcttccgggcttgtaacaccttcatgaacgctccttctggattccctaccgatgcttcttcagctgtcaaaaaagaagagactgctttgatcatgaaagatgatgggatgggatgcatcagtccatagctgtacaccccagtcacacagagtaggagtcagcaaacattcgagtgccattcagagaggagaaacacacacccaatcctaaacctatgaaatggcaacaacaaaaggagaaaatacatcttttgaaaacacggccacctacttggaacattccatagtgtgacatagagtaactctgtttaggattatttcgttgatccccagaggccaattgcccagtgctcagtcaaagcccaaggtggaagacaagtgcttccctgatgagctggcctctctgcagactgctccgtaccctgtgctgtcctgcctcagatgcagagagagcacaaggctcctgctctcctcgtcctcggtgcacctgtgttcgtgctaccatcacagctgaatgcaatgaaaggcggtcctctgagaggagcagggtggagatgctaaagtggaggccccgtcccattgctgatagatcctcatctggcatgcgctccaccctccccattctctgctcccacgtatcgtagccccatcacagaagatgcgacatggaaaaacgcactgtgtccaccctagttcttaaatttgggcagggatttggggtgtatgttaagagtttttcaaatttgccagattgtatgcctatgttgttaaatacacaatgaatccctggtatgatagcagtttctggataaacattacttgaggtcctaaaatgcagaagggaaaaagcaacttttgtcagatgcctactttgctttcatttcatctctaatattttggatggggaatcatccaaagcttctgactgcatgaaggtcaggtgtgccagtgtgcagctgggtttcttttctggaattaaaagtactttgggtggtggtgagggtcagaggaagaagtaaagattgtgagaaaggggaagaaacatgggcttggggagaacccagaattggggccagaagacctggcactaggctacagcacttagcacctctgatcttgtttttcctcatctgtaaaaggaggttaacaaagcttttctgcccacttcttggggagaagggaataacataattggtaaaaaaaaaaaaaaaaaaaaagttttgaaaaataagcaacactgactttatgtaaccaagcattattaattctccaccccatatcactggtagatacctgtattcaagctatctggacatgaaagcagtcacattttagaagtcatgaagttgatgctaataagcctaatctacagaaacactcttgaaagcccttgagcgtttgttctgtgaacagaaaggtttgagattcggagcaagttcagagttggatggtctaagaatggaaaagccctccattccattagaagagccaggtagcaatttctggttatggaaccagaagctctcaggcttcaaataaaacagcatcacttgtactcttataaaactgtaaaaacagaaagaccaaaaccgtatctacatctgtcctataaggcagagagtacttgagatctcatggatttaaaaccagcttacaaactacattgcactatatgaagaaattatcactgtgggcaaagcatcaagcagagagcacagtatacagtgtgtggatgttaatgttattccctagccttcccattcctttgtcttggtcctttctgcatatggaacagttctattattaaattttgtaatagtaactgagaacctgactttcagcaagggagtagttcggaaattgagggagtttaactctgaatgagtaaataaaaataaagcaattatgtcattagcttaaaattttatcatcattaaaaataaaaagtttaaaaacaaatacttaatgtaacaatttatcaccgcgcaatttggactcacgacaatgtgtggtgtttgtcagacatgcactgttgcaatgcagcttgactgtcttgcagacagcctcaatgctgtttttaaattggcagaggcagcaggccatatggctaggtaagatcctatagatgaaaacagagagcaataaattagcggtaaagcggttacttgagtaggtaaaggaggcagccaacgctaccacagg

SEQ ID NO: 9107 - DNA, 4377 bp, Homo sapiens
tctcaccccctcctcattttagatgggacctgtgagggctccgtcatttacccagggtccctgttgaggatctcgtcctcattagatgacttcttgtgcagcttccatgcgtgattatttactcttgtggcactgagaggtttgtacatatctttaagccagagcggccgtctgaatgaaaaaagtccatcctagaagatagaaagggaaatactaattttgcatgtcctctgccttccctggccacagcaatgaatcctccaatgtacctgactctcccttcgtgaagagcatctcctccgtggcagaaacctgaaaatgcccctggggagacacatgcacaagacagtgagtgatgcagccatttcccacgtatctcacaatgtacttctctggtcttactaggactaaatgagtatctcagtccataatcacagggagaagaaccaccacagaccacatacctggggtcttgaaaataattccatgcatgtgggactttcagaagctctcccatgtctgtccagaagggccccacaatataatggggggactttgtatgtggctcagcatggagcaggggcaggatgttcagtcccactcactcccttggccaagtgcccttgtgcagtgaacaaactgcacaaccatgctgggcggaagcattttatatcagtcccctttggacttagtctcacaggcatcatttgatgggggggtgggagatgaagtggttcttccttttctagatactttattctataagttggatcacctcaagcaaatgtctgagtgcagctagccaagttctctatctcagtcttcatacggctggctgtcgctgatgagtgagtgagctacgaaatcagcttaaagcacaacatgttatttttgaatttgaataaaataggaaaaggcagagtgcattgtgtgaccatggggtaagacactctccctttctccttctcagttttcctgtcataaaaggacaaactactatctaaggtctccgtagttaaaattcttttttgttgttttttttatttgagacagtttggctcattccccaggctggagtgcaatggtgctatcttggctccctgcaacctgtgcctcctgggttcaagcagttctcctgcctcagcctcccaagtagctgggattacaggcctgcgccaccacacccagctaatttagtatttttagtagagatggggtttcaccatgttggtcaggctggtcacgagctcctaacctcaagtgatcccaaagtgctgtgattacaggcgtgagccatcctgcctggcctttctggttaaaattctgtgaggtttgcctaaaaggaatagagtagggacacaaaaaccagtaagatgagaaaatagtgtttcctcagttctaggatccaggggaaaaaataaataaataaaagagaaaatactgtttcctgccacttaagaggaaggactcacatatcctaccttccatcagccttgaaggagacaagtgccctctctctcacacccggtggccttcccttcccctttcccagagcctccaagaaggcccctggcctgcctgatgcccaccatcagcagcaataggcaccaaaacctttctccttcctatccctccccacctcccgaaagggctggggacagcaggtgtgtccttgttagttccatccagctcagctttggctggggagctaatttcactggagccaggctaagcattagggtaagtaagtatttgtcctgtcttgggcagtttcctcactgaaaaatgagggcagagttctaagccctcctctaattctaaaattctaattaaaacgtcgcgagactagtggtggtgcatgcctgtaatcccagctactcgggaggctgaggcaggagaatcgcttgaacctggtaagtggaggttgccgtgagccgagatcgcgtcattgcactccagcctggcaacaagagggaaactccgtctgaaaagaaaagaaaaaaaaaaatcaccagactaatatttaccttgagaatccttcttcatcttcttgtaatgacttcggtgacaacacatctgttttagaagaaaacgcaattaagattatctatgacaacaaccaccatctccaaatctgtattgattcattttattcattataagtctcatctacctgatgaggtaacttttttgaagacaggaattgcatactgtgtaacactgctttgattcttccatagttcagtcatccttgctatcttgcgggggattggttctaggataccgcccccacaccataccagaatctgtggatgctcaatcccttacacataatggtgtagtatttgcttataaccaacacgcatcccccctatactttatttacttagcgacaggattgccctctgttgcttacgctggagtgcagtgtcatcctctgttactcaggatggagtgcggtgtcatgatcacagctcactgtagcctcaacctcctgggctccagtgatccgcccacctcagcctcttgagtagctgagactacaggtgcatactaccacacctggctatttttttttttaatttttaataaagacaaggtctcactatgctgcccaggttggcctcccaatgtgttgggattacaagtgtgagccaccatgcctggccccatgtaatttaagtcatcactaataaaatgtatacatattgtacagtggtgacagttgttatattgtactttctgtttgtatttttattgtttttttttcttcaaatattcagcctgatctagttgaatctgaagatgtggacctgctgatgaagagggctgactgtatctaacttagggtcttgcatgcagctggcacttaatacattttattgactgttttagataacattcaacagataattcctaataaaaactcttaaaagtaggagaaaaaggaaacctgagtccttcctctgaagtggcaggaaaactagcctgggcaacatagcaagaccttgtctctacaaacacattttttaaattagctgcctgcctgtagtcccagccactcaggaagctgaggcaggaggatcccttaagcccaggagtttgatgttacagtgagctaggtcacaccattgctctccagcctgggtgacaacaaggccctgagaagggaaaaaaaaggaaaggaaaggaaaggaaaaaggaaaagggaaaggaaggaaagagtagaagtattggaaaggaagagacaaaactatcattatttgcatattaaatgaaaaatgttagccaaagaagcctaagagaatcaactaagattttactggaagtaatgagaattcaatacagtggctatctacaaaatcaagaaatcagcacacaaacctcaaatacttttcccatgtaccaccaataactaattagaaaatggaagaaagatcccatttacaatggcaatacaaatgtatgaagaatttaggaacaaaaatacaaagatcttttatctaataaaagatgtgtaagatctatatatggaaacactaaagctcttctgaaagacattaacaagaaatgaatacatgacatgagatagcacgttcctagaatgttctacagatgtaaattctcaaattaatctacaaatttaacataatcctattcaaatcccaagatagtttttggtggtggttgtttttaagacagggcctcgctgtgttgcccaggctagagtgcagtggtacgaccacagcttactgcattctcgacctcccaggctcaagcgatcctcccacttcagcctctgaagtctctcatatggtgtccaagaaatggtgacaaatctcacaaagggactaggctcagcagggctggaatattcagggaaggtgtcaagaagaaagatgaacttgagttggcttttgagagatgcataggactcccacaggcagagtgaaataagggcattttagatggacaaacacacagacaaaagcagaaatgtgggtggtgtgactggggtatggtgaggggctgctgtggctggaatggagggctgccacaataatggaaatggtaaatgaggcaaataaggttggactggtggcatagcgtcaaggttgccagctttattaaatcactcttccaatatgctagcactggcctgttgggaaaactaatatatcatgtaatcgaacaaaagacaaacagaggcaagctccagtaattgtcactgtaaacaggacttgccccacagtagccagatgtaggctttagataagttgatgcaggctgagcatctctattctgagggggaatgtctcacgtgctctccaacaaatcctgacacctctcacaaacgctctaggctcccgagggcta

SEQ ID NO: 9108 - DNA, 1562 bp, Homo sapiens
ttttattttgtcacccaggctgaaatacagtggcaaaattatacctcaatgcagcctcaacccccctgggctcaagggatcctccaaattcagcctcctgagtagctgggagtataggcttgcaccaccatgcccagctaattttttttttttttttgtacttttgtattttcagtagtgacagagtttccccatgttgctcaggctggtgtagaactcctgggctcaagcaatcctcccacctcggccttccaaagtgctgggattacaagtgggagccactgtagccagcaaaataattacaatggagagacctggaagatcaccttagtcaagtgatcaaacttagtattacaggccatctgcggttacgaggcaggaaggatacatcacctatgcagtatttttcccaaaaatgcttaacttgaatttcatcatgaggaaacagacaaatctggattgtgggacaatttacaagacaactatctttgactcttaaaaaatgccagtgtcatgaaagatcaaagaaagtagaggcatgttttagattaaaggaaatgaagacatgacatgcagtgcctgatctttgattggattctgtactattctttcatctttctggcttgtttgaattttttccaatacgtaaatttgggcaaaagaggtgaccgagacaattgattaatttattgttgtggcttattgggggcactttcagagagataaaaacaatccctgtaactgaagtaaaaggttaatcttaggcagtatagcatggtcattaagaatacagattccatagccagactatgcttcaatctcagctctgctaataatgtgaatttgggcaaattgtttaatctctgttccttggccttgtcattataatagtacctacctctaatgaattttgaggatcaaatgaatcaatacctgaaaaatgcctggtgcacagtgagtgctcaataagagttaactataattattgtgttgcagaggttgtggggggccttttctgagtcctccaaaaggatggctttattggggccatattaagactatgaaaacagaagagggtttcatggatacaagaagtctgtgagttgggggtacaatgtatagagttttagattaaaactgcatccaataagttggcctgagacatctttcaaacctataaaggaacaatcacaagtgactagtagtattcctttgggtccagtggaagcctctgatcttcatatggaatggacccggaaccgtaacccagcattttgttgtatagcaaccttacctctgccacaaaggtgtttcttttgtttattttgaggccgggtctcgctctgttacacaggctgagtgcagtggtgcaatcttggctcactgcagcctctgtctcctgtgctcaagtgatcctcccacctcagcctcctgagtacctagaactacaggtgtgtgccaccacacctggctaatttttgtatattttgtagaaatggggtttcaccatgttgtccaggctggtctcgaactcctgggcacaagcaaccctctctctttgg

SEQ ID NO: 9109 - DNA, 992 bp, Homo sapiens
taattgcctatatacaacccttttttgtttgaaatatctagagtaatttctgttttcctatctggggtagtgtaacataagaagaaatatatatttggtctctgcccccagttcctaacacaaagctcctaaaacccttggaaattcctgaatgatggcggtgctaagagcattgtcctttgttaatttatcatttttcttttctcctaggtgttttttcctttttaaacttttcttttaggttagggggtacatatgcacgttcgttatatagctaaacttgtgtcatgggggtttgttgtacagattatttcatcacccaggtaccaagcctagtacccaatagttttttctgctcctctccctcctcccaccctccaccctcaggtagggcccagtgtctgttgtttatgagttctcatcattttgctcccacttaaaagaacatacagtatttggttttctgttcctgtcttagtttgctgaggataatggcctctagctccatctgtgttcctgcaaaagacatgatctcgctgttttttatggttgcacatcttttgttctaacatttggtccttaaacctggttcctgacacagagctcctaaatcccttggaattttctgggtgatagaagcgtcctttgttctcatgaggtgactcttggtgggctccttatttggggactggtcaccaaaaagacctatggttggaagcgttgtgctgtcagccccattccccatcctctggcgtggggagtagagctggagctcaatcatgcctacgtgataaagcctccagaaaactccttaaaagacaggacttggagagcttccgggttggcgaacacatccatgttccaggagagtggtgcaccccaactccacaaggacccttccaaacctcaccctgtgtatctcttcaactggcttcatcatttgtgtcctttaaaatatcctttgtaataaatcagcactagtaagaaaactg

SEQ ID NO: 9110 - DNA, 261 bp, Homo sapiens
gcatggcagtgagtatggtatgcctagaataaagatggttgggattagaattgggtgacagtgattagtagtttcagaagtatctcttcccaattcaaaagtctcactttgggctgaaagtacagaggaagaaggtagacttttaagaagtctgaataagcccccaacttctggagtccctttctcaattcctgttgggagtgggaaatattataaattactctgggcattaaaaatagtttaacctggattgcggagtta

SEQ ID NO: 9111 - DNA, 2269 bp, Homo sapiens
ggccgggcatggtggtgggtgcctgtaatcccagctattcgggaggctgaggcaggagaatcacttgaacctggaaggcagaggttgcagtcaaccgagatcacgctgctgcactccagcctgggtgacagagactgtctccaaaaacaaacaaacaaacaaaacacaaaaaaaaccccaaaacccaaaacaagccaggcgcggtagctcgcacctgtaatctcagccctttgggaggccagggcgggtggattacctgaggtcaggagttcgagaccagcctgaccaacatggtgaaaccccatctctactaaaaatacaaaaattagccgggcatggtggtgcatgcctgtaaccccagctactagggaggctgaggcaggagacttgcttgaacccaggaggcggaggatgcagtgagctgagatcgtgccattgcattccagactgagcaacaagagcaaaactccaccttaaaagaaaaaaaaaaagaaaaaaaaacaaacaaaactcctgaatttccctgtggataccttttctctggcagcctttttcaatgagggctaagttttctccaatactatatggcctgcagaccgctcagctttcattccagtgaaaacattccagaaaaaactctgaatcaatcccaggtgtttctccaatcagctcaggatgattgtgtgttacctgctgcccagccagtgacacctctccaggcctctgacttagctaggtctccaccatgtgactccaccatagactccccaccttcttcttttgcaaagcctcagacacccaaacacctaccaaaagtgggtagggcaccaggacactccaagtgtaagtggggctctccagcacacctggatgtggaggtgtgatgcagagtggtggctgctcgtgacactcatttcacccctttctgtgcaggtgccagaagcccaggaagcacacatcaaggctcacttgccagcggggtgctgccaataaaatgtagtcacgtggaatttggaatgtggaaaggaggtagaagtcatcctttcctcccccatagcagcaggtgtgcaggctctggtggtcagctggactccatactcccccaccagtcaccagcctggggaccgtggggctgcaaggacctcagcagcggtttcccaagtttcctgacttcttccatcctctggaaatcagctgtggtaaagtagcctgaaagccagtggtgcaaccccatccccacaaccttcaccacctctagcacctccagtgataagcactaattgcctatatacaacccttttttgtttgaaatatctagagtaatttctgttttcctatctggggtagtgtaacataagaagaaatatatatttggtctctgaccccagttcctaacacaaagctcctaaaacccttggaaattcctgaatgatggcggtgctaagagcattgtcctttgttaatttatcatttttcttttctcctaggtgttttttcctttttaaactttccttttaggttagggggtacatatgcacgttcgttatatagctaaacttgtgtcatgggggtttgttgtacagattatttcatcacccaggtaccaagcctagtacccaatagttttttctgctcctctccctcctcccaccctccaccctcaggtagggcccagtgtctgttgtttatgagttctcatcattttgctcccacttaaaagaacatacagtatttggttttctgttcctgtcttagtttgctgaggataatggcctctagctccatctgtgttcctgcaaaagacatgatctcgctgttttttatggttgcacatcttttgttctaacatttggtccttaaacctggttcctgacacagagctcctaaatcccttggaattttctgggtgatagaagcgtcctttgttctcatgaggtgactcttggtgggctccttatttggggactggtcaccaaaaagacctatggttggaagcgttgtgctgtcagccccattccccatcctctggcgtggggagtagagctggagctcaatcatgcctacgtgataaagcctccagaaaactccttaaaagacaggacttggagagcttccgggttggcgaacacatccatgttccaggagagtggtgcaccccaactccacaaggacccttccaaacctcaccctgtgtatctcttcaactggcttcatcatttgtgtcctttaaaatatcctttgtaataaatcagcactagtaagaaaactg

SEQ ID NO: 9112 - DNA, 2736 bp, Homo sapiens
gccaccatgcccggcctagattaaaaatttgaagacatattctctactatgagccaatgaaattactcattttgtttctatcccatttgctgtcccttgcttttggaattttgtgtcttagtgtgactgtgattctttctctccttttgtctttcagcaaacggggattcagcgtccgatcctttggaacagggactcacgtgaagcttccaggaccagctcccgacaagcccaatgtttatgatttcaaaaccacatatgaccagatgtacaatgatcttcttaggaaagacaaagaactgtatcccagcgggttgccctttaaaaaccccccgtgtggtcctccctggaaggtgttacgtgtggctcgggcacaggaggcgtgtcaccctgtgcagtgcacacactggctcctctgtctttgcgagagcttggtttctattcctggtgcacgtcggatcgtccacgggttagttccagtgccacccatggcagtaggcgtggtgaggcgcacagacacggtgtggggttcaccctgacgtggttcagcagagggtcgtgacatagcgtagaccagggatgcttaggtgaggaggtggaacccacaaaatcccattgcttttcacactgcagggctgccccgttatttcctttgcaggttggtgtgcgtgcgtgtgtgcgtgcgtgcctgatacacatggagccgggctgcttcacacatctggtgaggtcgttagaaggtcagataaagaagagggcggagcttgctaaccaagctgttagaagaaataatgggagagaacattccttcatttcaggaggacacagagcaggctaggtctgccgcgaagactcctatagagagaagagtattcttaaactagattctgatggacgcaacaccagttgcataatggttatgacaatcagtgcccgggtttttgaccaggcatttcatggtcacccccacgctaatggaaagtttctggatcttattttgttatagtgagtgatttgtagttttcagaacggaggccaggccaaacgtattccaaatgaaaagagaataggtgtcaaatgctaaaccttttatcttcgtgttggcactgttgccatccccgccctctcccgacatccccgcccttgaccagcatctctggccttgcccagcattgtctatgtattggcactcttgccatccccgccctttcccagcagagtctcactgtgtcaccccggctggagtgcagtggcgagatcttggctcactgcagactcactgcaacatccacctcccgggttccagtgattctcctgcttcagcctcctgggtagctgggattacaggcacgcgccaccacacctggctaatttttgtatttttagtagtcacagggtttcaccatgttggccaggctggtcttaaactcctgacttcaggtgatccaccctcctcgtcctcccaaagtgctgggattacaggcgtgagccaccatgctcagccctactcttgtattttttttttttttttttttttgagatggagtcagagtctcaccctgttgcccaaggtggagtgtagcggcttgatctcagctcactgcaacctccccctcccaagttcaagcgattctctgcctcagcctcccgaatagctgggattacaggcatccgctgtcatgcctggctaatttttgtatttttagtagagacgggggtttcaccatcttgaccaaactggtcttgaactcttgacctcgtgatccagctgcctcggcctctcagagtgttgggattacaggcgtgagccaccatgcctggcctcttggaatatttaataagctaaaaaattcttatacacaggtagattaattaggtagccaggagtggcccctgaaagtatgtctggcaaaacctagaactgcatcctagccatcactgtaccttctgccctccctgctgtctcctctgccagttacagttaaaaggttgtgggtgaggacgctgggcagagtcccaggcgtctgctgtcagctccccagcccggcctgcctgccgagccatctgggcgtcccacggtggagagtgtggtgcttgtgacgcggtggtgctgggagccatcctggtggcagatgtgggctctcactgcaagtcagtgtaagtccccagggactgtcagcagcacgtcctgctgcccctctctctgcagaagccctggtaacctgcgtttggaaaaatctctaaggatttctgaggagctgtcaggccatgtccttgtccaccctgtgtggggcacggcttcgacatggctctgctcccgtcgtgggctgagaaggagcaggtggggctgtgccttggaaaggaggccctcccgacatgcctttgtgcgaggtccctgtccatgctgtctccatcccggagccttacggcgatgggtggccacagagcctattccaagagtctggtttagggctgggtcttcccatcttcacctctgagtcttaggcgatgcgtgaccacgcagccccttccaggagtctggtttagggctgggtcttcccatcttcacctctgagtcttaggcggtgcatgaccacgcagccccttcccggagtctggtttagggctgcgtgctcaagagtctggtttggggctgggtcttcccatcgccctggaggaggcttttgtctcatctcatgattcacattaaactctgtgccatgaagcttagcctga

SEQ ID NO: 9113 - DNA, 277 bp, Homo sapiens
ctgtcgcccaggctggagtgcagtggtgctatctctgctcactgcaagctccgcctcccgggttcacgccattctcctgcctcagcctcccgagtagctgggactacaggtgcccgccaccgcgcccggctaattttttgtatttttagtagagacgggttttcaccgtgttagccaggatggtcttgatctcctgccttcatgatccgcctgccttcatgatccgcctgccttcatgatccgcctgccttggcctcccaaagtgctgggattacag

SEQ ID NO: 9114 - DNA, 5060 bp, Homo sapiens
ccgggattcgccctccggggagcgattggtcctcgggaggggcggggaggtggacgcgggtaccggcggtcgtcgggtcggcagcctttggtcagttggcagcggcaagcgcgctgcggttccggtggcgccatgtcgttctgcagcttcttcgggggcgaggttttccagaatcactttgaacctggttggtcctgcggcctctcgctgggagggcagcgcggcggggggcgcgcattagcgggggcgccgccgtcgtccgggggtgatgtctctcccaagccgggaatgggggcgaatgtggctgccggggagaagcgaacaggggtcaaaaggactgcggaggagtggggagcctgggggcgaggagagtggggtacccgaggagagggggccttggggctcaccgtcctggagggggcaggcctcgagtgtgaacgtgccgtttcgggggtgggtctaagggatcgggatacgtgggggtggtaccccttccctaccccctacactccaaagtgatggcgctgggggaattcgggttagggtcggggcttcggagaggccaggttcttgtccagggccagctcctgtggccggggcgccccttcgcgggtcatcccgcaggtgttaccctggcccttcccattcccccgagtccgggatctctgggaggagtctggcaagcatagaatgtccccttcagatcctaatgtgccggcccaggtgcctccccacctgcccagggactccaaattggggaaccaggagtgccaccaggcacctgccaacagcccgtgaagtttgaccaggcaggcaggatggggtggtttggggcatggccagccctccacactggccctgatgaatcccttctgggctgggctcgcctggtagtggactaatttggtaaaaacacatccacaggcaagtctgagtgcactggtctccttgggcggatctgctgggtggcacccctgtagcgggttgggctgtgacacaggaccatcccggcaaagcctcccccagcaagactctctggctttagatcccagttgtcctcaggctgctctgccaagccagaaactccacttccacagcagctgctggcttctctttgcttttttctccagttcctggaaaaggctgggtagtttacagtctccaggggaggctgtccccaggtgatgggtgagaggtgactcagcacccctggaggttcctgttttcagtccttaaaacagttctgcaagtcagttttgcaactttcccaccccctccactccaaagggatcctttgtgggtaggctgaaatctgttgtccccagccctctttcttcctgggctcctgtgtggcctggaggccttttctctgggactgttctcttcctgcctggagagcagagcagtgcctgggtatccagcttagggcctcgttgggcagcagggaggaccacttgagaaaggagagggaccaggtggttgggccacatcagggcccctgccctctatgttcctgggggaactaggggggcgagggggagctccgtgtcctcattggactacccaggttccttcacgctgcacacacttgtagctgagtgtctgcatcaccaagcaaagatggaaatgttaggatatgccccgtcacggggctatgagaagaatcaaggagataattgtgaaaggtgactcccctggtctctggcacatctactaaacgtgagctcagcacagcgcctcccgtggcgggtgcctggggaaggagcacagcctaccctcggaacgggggcagcgctgtctttgcctgggttggtggatttgggagcttgaccccggaaaggcgggagctgatgactccacatttgcctctccttccaccacaggcgtttacgtgtgtgccaagtgtggctatgagctgttctccagccgctcgaagtatgcacactcgtctccatggccggcgttcaccgagaccattcacgccgacagcgtggccaagcgtccggagcacaatagatctgaagccttgaaggtgagaggccacaggggtgggggagggacgggggcggccagggagagcagagagccagtcccaccttcctccctctgcttgccccacagctccaggggcttagaggcgtctattccaggcctgttgcctctgccagggagctgccaccccaggctatcgggagagcctggccttctggtgcaaatgtgggaaacaggacaggtttcctgtacgggctccaggacaaaggtcaacctcttatgtcggcggtcagcttgggaaataggcgtgtgggaagaaacaccatctgccagccccagtaagggccttcactgtggctgtatcatggccagaagctcacccagctgccttgtgatctttccaggtgtcctgtggcaagtgtggcaatgggttgggccacgagttcctgaacgacggccccaagccggggcagtcccgattctgaatattcagcagctcgctgaagtttgtccctaaaggtgagcttgctttgcacagctggggccaggcctgttggcctttgagcccaggctggggggcccagtgtttgtgcttgtccacttaccatgacaaggtatggggccaccaagtcacgctgcctgggaactgtccaggatcccccagaaaggtggctgcagcgcaggggcaaaggagctggtgttccgcttcctcgcttggttgatcatgactgtcccaaaaaggggcttcagcgtgagaatgtggcaaatggttttcctcagaggcctggcctttcccagaggctagagtcaggggcggggcaggcagagcctgaggccccagtctgtgcggctgtgtctcccactggctaggactgtggccttgcttcttagccgctcagagcctgcctcctcctctgcagagtggcggtggtagcagggctgtgaggacagctgcgtgtcacgtgcacctgggcctggcacacaataatagcttgatgaatcctcatcctttttttttttttttctgagatggagtcttgctctgtcgtgcaggctggtgtgcagtggcgcgatctcagctcactgcaacctctgcctcctggttcaagcaattctcctgtcttggcctcccaagtagctgggattgcaggcacgcatcaccacgcccagctaatttttgtatttttagtagatacggggtttcaccatggtggccaggctggtcttaaactcctgacctcaggtgatctgcccaccttggcctctcaaagtgctcgaattataggcatgagccaccacgcccagcccacacctggttaatttttaattttttttttttttttggtgacagagtcttgttctgtcacccaggctggagtgcaatggccaatctcagctcaatgtagcctctgcttcccaggttcaagtgattcttctgcctcagcctcccgagtagctgggattacaggctcccactaccgcgcctggctaatttttgattttttagtagagacggggtttcaccatgttagccaggctggtctggaactcctgacctgaggtgatctgcctgtctcaacctcccaaagtgccgggattataggcgtgagctaccgcacccagccaatttttaaaatttttatagagatgggggtctcactatgtggcccaggctggtcttgaactcctctgggccttggcctcccaaggtgctgggattacaggcttgagccactgcctcgcctgaaatggggctgttaacagcacacgcttgtggccatcaccgtgctgtggggttgagcgagcagcctgtcaggatctggtgcgtggtaaacctgcgatgttttcgtccttttgttgttatttgtcctccgtgtgagtggagggagaagagattctgggttctcctgtggatgtcagaacaaaatggggtacacagactcccctgagtcgggcatctggtcttttcagctcccctgtggcctgcaggccagggcagagtgtgaaagcgcagggaacggcacctgaagctctgccttgcagtgacttgctttctgcccctaccctggctttccaccgcccccgcgcccggctttccgcccctgcttgctttctgtccccgcatactttccgccccctctcctctctttcaggcaaagaaacttctgcctcccagggtcactaggcgggcagcccacacccaccccagacggccaccacactgaggccacacgttggccattccaccttggagttggaaccctgggcgtcgagacaggaaggcagggcgcagtggttgaaacatcaggacactcccaaggccccggctctgaacaagaccttttcgtttcttggaaaagagactcatttgctgatggttcatgccttctgctgggacaggcctgggctgtgcagccacactgtcggctgacttagccccctgctcactctaggtgcctccaggaggtgagccctgggtgcagctggtctctgaatgacgttacaccctcaccttcttttcctggccctgtctctggactctcccctgtgaggcccaattccaagacagactctcgtcctcaccgaagcttaggcccacatctcccaggctgcttaggagacagaatggaaacggaggccgcccctgccagccgccctggccctggtcactgcatgatccgctctggtcaaacccttccaggccagccagagtggggatggtctgtgacctgctgggaaggcaggctgatggggcacacccttggcctctcgtccacgaggggagaaacctaaaccctgtttcacaatctgtgcggaagtagcttgcctcacttctgcttaggaaagcggctgttgctccataactctaaccagcacagggctgaggcctgcagtgcacacctgcagggaggcccttcccaaggtgtggtgactgtgccttactgtacatgctcggaggcctggccatataggagggtgggtgatgctgaaatcaccccccatcttaagtaattactttctggagtaatcaggtggaaatccatagacaaatgaaacattcagatgta

SEQ ID NO: 9115 - DNA, 5060 bp, Homo sapiens
ccgggattcgccctccggggagcgattggtcctcgggaggggcggggaggtggacgcgggtaccggcggtcgtcgggtcggcagcctttggtcagttggcagcggcaagcgcgctgcggttccggtggcgccatgtcgttctgcagcttcttcgggggcgaggttttccagaatcactttgaacctggttggtcctgcggcctctcgctgggagggcagcgcggcggggggcgcgcattagcgggggcgccgccgtcgtccgggggtgatgtctctcccaagccgggaatgggggcgaatgtggctgccggggagaagcgaacaggggtcaaaaggactgcggaggagtggggagcctgggggcgaggagagtggggtaccctaggagagggggccttggggctcaccgtcctggagggggcaggcctcgagtgtgaacgtgccgtttcgggggtgggtctaagggatcgggatacgtgggggtggtaccccttccctaccccctacactccaaagtgatggcgctgggggaattcgggttagggtcggggcttcggagaggccaggttcttgtccagggccagctcctgtggccggggcgccccttcgcgggtcatcccgcaggtgttaccctggcccttcccattcccccgagtccgggatctctgggaggagtctggcaagcatagaatgtccccttcagatcctaatgtgccggcccaggtgcctccccacctgcccagggactccaaattggggaaccaggagtgccaccaggcacctgccaacagcccgtgaagtttgaccaggcaggcaggatggggtggtttggggcatggccagccctccacactggccctgatgaatcccttctgggctgggctcgcctggtagtggactaatttggtaaaaacacatccacaggcaagtctgagtgcactggtctccttgggcggatctgctgggtggcacccctgtagcgggttgggctgtgacacaggaccatcccggcaaagcctcccccagcaagactctctggctttagatcccagttgtcctcaggctgctctgccaagccagaaactccacttccacagcagctgctggcttctctttgcttttttctccagttcctggaaaaggctgggtagtttacagtctccaggggaggctgtccccaggtgatgggtgagaggtgactcagcacccctggaggttcctgttttcagtccttaaaacagttctgcaagtcagttttgcaactttcccaccccctccactccaaagggatcctttgtgggtaggctgaaatctgttgtccccagccctctttcttcctgggctcctgtgtggcctggaggccttttctctgggactgttctcttcctgcctggagagcagagcagtgcctgggtatccagcttagggcctcgttgggcagcagggaggaccacttgagaaaggagagggaccaggtggttgggccacatcagggcccctgccctctatgttcctgggggaactaggggggcgagggggagctccgtgtcctcattggactacccaggttccttcacgctgcacacacttgtagctgagtgtctgcatcaccaagcaaagatggaaatgttaggatatgccccgtcacggggctatgagaagaatcaaggagataattgtgaaaggtgactcccctggtctctggcacatctactaaacgtgagctcagcacagcgcctcccgtggcgggtgcctggggaaggagcacagcctaccctcggaacgggggcagcgctgtctttgcctgggttggtggatttgggagcttgaccccggaaaggcgggagctgatgactccacatttgcctctccttccaccacaggcgtttacgtgtgtgccaagtgtggctatgagctgttctccagccgctcgaagtatgcacactcgtctccatggccggcgttcaccgagaccattcacgccgacagcgtggccaagcgtccggagcacaatagatctgaagccttgaaggtgagaggccacaggggtgggggagggacgggggcggccagggagagcagagagccagtcccaccttcctccctctgcttgccccacagctccaggggcttagaggcgtctattccaggcctgttgcctctgccagggagctgccaccccaggctatcgggagagcctggccttctggtgcaaatgtgggaaacaggacaggtttcctgtacgggctccaggacaaaggtcaacctcttatgtcggcggtcagcttgggaaataggcgtgtgggaagaaacaccatctgccagccccagtaagggccttcactgtggctgtatcatggccagaagctcacccagctgccttgtgatctttccaggtgtcctgtggcaagtgtggcaatgggttgggccacgagttcctgaacgacggccccaagccggggcagtcccgattctgaatattcagcagctcgctgaagtttgtccctaaaggtgagcttgctttgcacagctggggccaggcctgttggcctttgagcccaggctggggggcccagtgtttgtgcttgtccacttaccatgacaaggtatggggccaccaagtcacgctgcctgggaactgtccaggatcccccagaaaggtggctgcagcgcaggggcaaaggagctggtgttccgcttcctcgcttggttgatcatgactgtcccaaaaaggggcttcagcgtgagaatgtggcaaatggttttcctcagaggcctggcctttcccagaggctagagtcaggggcggggcaggcagagcctgaggccccagtctgtgcggctgtgtctcccactggctaggactgtggccttgcttcttagccgctcagagcctgcctcctcctctgcagagtggcggtggtagcagggctgtgaggacagctgcgtgtcacgtgcacctgggcctggcacacaataatagcttgatgaatcctcatcctttttttttttttttctgagatggagtcttgctctgtcgtgcaggctggtgtgcagtggcgcgatctcagctcactgcaacctctgcctcctggttcaagcaattctcctgttttggcctcccaagtagctgggattgcaggcacgcatcaccacgcccagctaatttttgtatttttagtagatacggggtttcaccatggtggccaggctggtcttaaactcctgacctcaggtgatctgcccaccttggcctctcaaagtgctcgaattataggcatgagccaccacgcccagcccacacttggttaatttttaattttttttttttttttggtgacagagtcttgttctgtcacccaggctggagtgcaatggccaatctcagctcaatgtagcctctgcttcccaggttcaagtgattcttctgcctcagcctcccgagtagctgggattacaggctcccactaccgcgcctggctaatttttgattttttagtagagacggggtttcaccatgttagccaggctggtctggaactcctgacctgaggtgatctgcctgtctcaacctcccaaagtgccgggattataggcgtgagctaccgcacccagccaatttttaaaatttttatagagatgggggtctcactatgtggcccaggctggtcttgaactcctctgggccttggcctcccaaggtgctgggattacaggcttgagccactgcctcgcctgaaatggggctgttaacagcacacgcttgtggccatcaccgtgctgtggggttgagcgagcagcctgtcaggatctggtgcgtggtaaacctgcgatgttttcgtccttttgttgttatttgtcctccgtgtgagtggagggagaagagattctgggttctcctgtggatgtcagaacaaaatggggtacacagactcccctgagtcgggcatctggtcttttcagctcccctgtggcctgcaggccagggcagagtgtgaaagcgcagggaacggcacctgaagctctgccttgcagtgacttgctttctgcccctaccctggctttccacagccgccgcggccggctttccgaccatgcttgctttctgactcagcagactttccgccccctctcctctctttcaggcaaagaaacttctgcctcacagggtcactaggcggtcagcccacacccaccccagacggccaccacactgaggccacacgttggccattccaccttggagttggaaccctgggcgtcgagacaggaaggcagggcgcagtggttgaaacatcaggacactcccaaggccccggctctgaacaagaccttttcgtttcttggaaaagagactcatttgctgatggttcatgccttctgctgggacaggcctgggctgtgcagccacactgtcggctgacttagccccctgctcactctaggtgcctccaggaggtgagccctgggtgcagctggtctctgaatgacgttacaccctcaccttcttttcctggccctgtctctggactctcccctgtgaggcccaattccaagacagactctcgtcctcaccgaagcttaggcccacatctcccaggctgcttaggagacagaatggaaacggaggccgcccctgccagccgccctggccctggtcactgcatgatccgctctggtcaaacccttccaggccagccagagtggggatggtctgtgacctgctgggaaggcaggctgatggggcacacccttggcctctcgtccacgaggggagaaacctaaaccctgtttcacaatctgtgcggaagtagcttgcctcacttctgcttaggaaagcggctgttgctccataactctaaccagcacagggctgaggcctgcagtgcacacctgcagggaggcccttcccaaggtgtggtgactgtgccttactgtacatgctcggaggcctggccatataggagggtgggtgatgctgaaatcaccccccatcttaagtaattactttctggagtaatcaggtggaaatccatagacaaatgaaacattcagatgta

SEQ ID NO: 9116 - DNA, 1662 bp, Homo sapiens
agctccaggggtcagggagggggactcaggagggcttagctcagcagtgatgggcacagcatgtgcacaggctcagcacacatggggcctgccccaggccctggagggcacggaacaaggctccacaagaaatgcaccattttcccaatttatacccacagaaatccggggagcatgtgggagtggattttaagggtggatgtttcaccctgcagaacccacagctggcatcgccccaaaagcggtggccaggagtgccccaaagggcacaggatggccccaaagcattgcaagatggggccagttgggatctgaactaaggaacgctaaacgccagggtgagcactccagagcatttattagggggacttacagaaggccgcagcgtatccttgcaacaaaagcgagagagaagaggtgccctcccttgatatctctgcagcaaggggacacggtgtggagtggatatggaagtttaagggatttggctcagggctgggccagtttctttcagtgttttagcccacaacctagatttttttttttttttttttttttggagacagagtcttggtctgtcatttaggctggagtgcagtggtgagatctcggctcactgcagcctccgtctcacgcctgggttcaagcaattcttgtgcctcagcctcttgagtagctgggattacaggcgctcgccagtatgcctggctaatttttgtatttttagtagagatagggtttcgccatgttggcgaggctgatctcgaacactgcacccagcctagaattttttaatttaatttttaaaaaattagagatagggccttaccatctcacccaggctggtcttgaattcctaggctcaaacaatcctcctgcctcagtcccccaaagtgctgggattacaggcgtgagccacatgcctggctgcactttgtgattcttggtcaggacacagaaagaaagcaggggaggccaggtgtggtggctcatgcccgtcatcccagcactttgggaggctgagatgggtggatcacctgaggtcgggagttcaagaccagcctggccaacacggtgaaaccctatctctactaaaaatacaaaaattagctgggtgtggtggcgcatgcctgtaatcccagctacttgggaggctgagggatgagaatcacttgaatctgggaggtggaggttgcagtgagctgagattacaccactgcactccagcctgggcgacagagcgagactctgtctcaaaaaaaaaaaaaaaagaaaagaaaagaaaaaaaaagcagggggaaccaggagaccctacagtagggataatggggaaaggaacaaaaaattgggtcaggttgcgtttattgatacgggcccactaagcagaggttctggacctcgtgctaccactgctggggtttgactggttggttggtgagctacaacacagaccaaaaagtgacctacacaaagtgaggctgaaatgccaggcctgcctctctgcgtggcagaggatgggactcaaaggcttggggaggttggagtgtcagagtggatttatcttttgagacctactcacccacccctggagaggagagaggacacacctcttaccacccccacgagaaataaatttgtgaggggaacactcctccttcatga

SEQ ID NO: 9117 - DNA, 547 bp, Homo sapiens
agatcagatgagccagtttatcaatctggttggtgccagcagatccatcaagttgcagggtcggcaaaatatctcaagcactgatcttaggggcagcttagggagggtcagaatcttgtagcctccagatgcacgactcctaaaccataattcccaatattgtggctaatgttagtcctaaaaatgcaatctagtccccaggcaaggaggtggtctgctttgggaaagggctgttactgtctttgttttaaactataaactggctgggcgcggtggctcacgcctgtaatcccagcactttgggaggccaagatgggcggatcacctgaggtcgggagttcaagaccagcctggccaacatcgagaaacctcgtctctattaaaaatacaaaattagctgggcgtggtggcgcatgattgtaatcccatctactcgggaggctgaggcaggagaattgcttgaaccagcgagttggaggttgcagtgagctgagatcgcgctactgcactccagcctggaaacagagtaagactccgtctcaaaaga

SEQ ID NO: 9118 - DNA, 1662 bp, Homo sapiens
agctccaggggtcagggagggggactcagaagggcttagctcagcagtgatgggcacagcatgtgcacaggctcagcacacatggggcctgccccaggccctggagggcacggaacaaggctccacaagaaatgcaccattttcccaatttatacccacagaaatccggggagcatgtgggagtggattttaagggtggatgtttcaccctgcagaacccacagctggcatcgccccaaaagcggtggccaggagtgccccaaagggcacaggatggccccaaagcattgcaagatggggccagttgggatctgaactaaggaacgctaaacgccagggtgagcactccagagcatttattagggggacttacagaaggccgcagcgtatccttgcaacaaaagcgagagagaagaggtgccctcccttgatatctctgcagcaaggggacacggtgtggagtggatatggaagtttaagggatttggctcagggctgggccagtttctttcagtgttttagcccacaacctagatttttttttttttttttttttttggagacagagtcttggtctgtcatttaggctggagtgcagtggtgagatctcggctcactgcagcctccgtctcacgcctgggttcaagcaattcttgtgcctcagcctcttgagtagctgggattacaggcgctcgccagtatgcctggctaatttttgtatttttagtagagatagggtttcgccatgttggcgaggctgatctcgaacactgcacccagcctagaattttttaatttaatttttaaaaaattagagatagggccttaccatctcacccaggctggtcttgaattcctaggctcaaacaatcctcctgcctcagtcccccaaagtgctgggattacaggcgtgagccacatgcctggctgcactttgtgattcttggtcaggacacagaaagaaagcaggggaggccaggtgtggtggctcatgcccgtcatcccagcactttgggaggctgagatgggtggatcacctgaggtcgggagttcaagaccagcctggccaacacggtgaaaccctatctctactaaaaatacaaaaattagctgggtgtggtggcgcatgcctgtaatcccagctacttgggaggctgagggatgagaatcacttgaatctgggaggtggaggttgcagtgagctgagattacaccactgcactccagcctgggcgacagagcgagactctgtctcaaaaaaaaaaaaaaaagaaaagaaaagaaaaaaaaagcagggggaaccaggagaccctacagtagggataatggggaaaggaacaaaaaattgggtcaggttgcgtttattgatacgggcccactaagcagaggttctggacctcgtgctaccactgctggggtttgactggttggttggtgagctacaacacagaccaaaaagtgacctacacaaagtgaggctgaaatgccaggcctgcctctctgcgtggcagaggatgggactcaaaggcttggggaggttggagtgtcagagtggatttatcttttgagacctactcacccacccctggagaggagagaggacacacctcttaccacccccacgagaaataaatttgtgaggggaacactcctccttcatga

SEQ ID NO: 9119 - DNA, 547 bp, Homo sapiens
agatcagatgagccagtttatcaatctggttggtgccagcagatccatcaagttgcagggtcggcaaaatatctcaagcactgatcttaggggcagcttagggagggtcagaatcttgtagcctccagatgcacgactcctaaaccataattcccaatattgtggctaatgttagtcctaaaaatgcaatctagtccccaggcaaggaggtggtctgctttgggaaagggctgttactgtctttgttttaaactataaactggctgggcgcggtggctcacgcctgtaatcccagcactttgggaggccaagatgggcggatcacctgaggtcgggagttcaagaccagcctggccaacatcgagaaacctcgtctctattaaaaatacaaaattagctgggcgtggtggcgcatgattgtaatcccatctactcgggaggctgaggcaggagaattgcttgaaccagcgagttggaggttgcagtgagctgagatcgcgctactgcactccagcctggaaacagagtaagactccgtctcgaaaga

SEQ ID NO: 9120 - DNA, 2036 bp, Homo sapiens
ggattgtaacacatgacaaagtttgagaactactgacaggaagagtcctgctgctgagttctaggcccagttctgtcactggctcactaaatgacttcaggcatgtccctctcctattttgaacttcagttttctcttctgtgaaatgaaagccttggactaggcagcgtctaaaggctctgtcactccgtaattgtgtgactttggtaactttgtttgacttctccttgcttaagttttctcatatgggtatggtaaggaaaatacctacctcacaggattttctaacaattttgtgattattaagtatgatgactgatgactaatatatgacagccagctcttacacagtgctttctatatcctggactgttgtaagtgcttttaatccccgcaacaatcccatctccattttacaaatgaaaaatagaggtcacacggctaatacgtgtcagagtttggattaaaacccagaaaaatctgtccccagagacaatgattttaactagcatgcccttttgctcaataaatgttaattccctcaccctttccacacacacacagtctagctgaccattcatagacaataatcccactttcacagtccatccaacaagatcttaaaagaaccatgagaatctctaggtttcttttgcaaatagttttcaagcatttaaaaaaaaaaggtggggggcggggagggagtggccaagatggctgactagaagcagctaggatgagtggttctcatggaggggaaggaaaggggcgagtaaatacagcgccttcaactgaaacatccaggtacccacattgggtctaatcaaggaaacaactcgatccacagagaatgaagaaaagcaaggcaggatgacagcccacccaggagcaacatggagacagaggaacctcctccacccagggaagtcgtaagtgaatgtgcgatcctgggaaaccacgctcctcccatggatccttgcaacccttgggtcaggagatcccctggtgaacccactccaccagggccttcagtctgacacacagagatacatggagtctcagcagagtagccgcttgagcacgtgcagagacccagcagctttacatactccggccctgggtttcccagcaaaagtaactgcaactcctgcaaagcgggagattagacccctgtacatacccctaggaaagaggctgaatccagggggccaagcggcacgatctgcgggccccacttccactgcacctcacaggataagacccactggtttggaattccagccagccaccagcagcagtgttgcacctacctgggacggaggtcccagggggaagggcaggctgctctctgggacagagctcccagaagtggtaccccagaacagcacagcacagctgctcttcagaagcatggccagactgcttctttaagcaggtgcccaatctgttcctcctcactgggtgggacttttcaaccaaggcctccagcaacccctactggtgttctctggctgacagagatttgaattctccctgggacagagttcccggagggagggaggggccaccatctttgctgtttgggcgacttagctgttccggcctccaggctttggagagcccacaccaaccaggggtggaagcagtgccccagcacagcacagctgatctgtgaaagcatggacagactgcttctttaagcagttccctgatcccgttcctcctgactgggtgagacctcccaaccagggtctccagccttgtcctgcaggcgcatttgggctggcaacaggtctgtacctcgctgggccggagctcccagaggaagaggcaggatgacatctttgctgtttcacagccttcactggtgatagctccaggtactggaaaatccaaggagactaggaaatggagaagaagcccagcaaagtacagcagccctacagaaacatggccagactgtagaaagaaaaaaaaaatccaaaggtcagcaacctcaaagattgaaggtagataagcccacaaagtgagaaaga

SEQ ID NO: 9121 - DNA, 2632 bp, Homo sapiens
aggaagagtcctgctgctgagttctaggcccagttctgtcactggctcactaaatgacttcaggcatgtccctctcctattttgaacttcagttttctcttctgtgaaatgaaagccttggactaggcagcgtctaaaggctctgtcactccgtaattgtgtgactttggtaactttgtttgacttctccttgcttaagttttctcatatgggtatggtaaggaaaatacctacctcacaggattttctaacaattttgtgattattaagtatgatgactgatgactaatatatgacagccagctcttacacagtgctttctatatcctggactgttgtaagtgcttttaatccccgcaacaatcccatctccattttacaaatgaaaaatagaggtcacacggctaatacgtgtcagagtttggattaaaacccagaaaaatctgtccccagagacaatgattttaactagcatgcccttttgctcaataaatgttaattccctcaccctttccacacacacacagtctagctgaccattcatagacaataatcccactttcacagtccatccaacaagatcttaaaagaaccatgagaatctctaggtttcttttgcaaatagttttcaagcatttaaaaaaaaaaggtggggggcggggagggagtggccaagatggctgactagaagcagctagggtgagtggttctcatggaggggaaggaaaggggcgagtaaatacagcgccttcaactgaaacatccaggtacccacattgggtctaatcaaggaaacaactcgatccacagagaatgaagaaaagcaaggcaggatgacagcccacccaggagcaacatggagacagaggaacctcctccacccagggaagtcgtaagtgaatgtgcgatcctgggaaaccacgctcctcccatggatccttgcaacccttgggtcaggagatcccctggtgaacccactccaccagggccttcagtctgacacacagagatacatggagtctcagcagagtagccgcttgagcacgtgcagagacccagcagctttacatactccggccctgggtttcccagcaaaagtaactgcaactcctgcaaagcgggagattagacccctgtacatacccctaggaaagaggctgaatccagggggccaagcggcacgatctgcgggccccacttccactgcacctcacaggataagacccactggtttggaattccagccagccaccagcagcagtgttgcacctacctgggacagaggtcccagggggaagggcaggctgctctctgggacagagctcccagaagtggtaccccagaacagcacagcacagctgctcttcagaagcatggccagactgcttctttaagcaggtgcccaatctgttcctcctcactgggtgggacttttcaaccaaggcctccagcaacccctactggtgttctctggctgacagagatttgaattctccctgggacagagctcccggagggagggaggggccaccatctttgctgtttgggcgacttagctgttccggcctccaggctttggagagcccacaccaaccaggggtggaagcagtgccccagcacagcacagctgatctgtgaaagcatggacagactgcttctttaagcagttccctgatcccgttcctcctgactgggtgagacctcccaaccagggtctccagccttgtcctgcaggcgcatttgggctggcaacaggtctgtacctcgctgggccggagctcccagaggaagaggcaggctgacatctttgctgtttcacagccttcactggtgatagctccaggtactggaaaatccaaggagactaggaactggagaagaagcccagcaaagtacagcagccctacagaaacatggccagactgttaaaagaaaaaaaaaatccaaaggtcagcaacctcaaagactgaaggtagataagcccacaaagatgagaaagaatcagtgcaagaatgctgaaaactcaagaagccagagtgccctctttcctccaaatgactgcatcacctctctagcaagggttcggaattgggctgaggctgagatggctgaaatgacataagtagaattcagaatatggatagaaatgaacttcactgagttaaaagagtacattgtaacccaatgcaagcaagctaaaaatcatgataaaacattgcaggagctgacagacaaaatagcccatgtagagaagaatgtaaccaacctgacggaactgaaaaaacacactacaagaatttcataatgcaatcacaagtactaatagcagaatagacaaagcggaggaaagaatttcagagcttgaagactggctttctgaaataagactggcagacaagaatagagaaaaaagaatgaaaagcaatgaacaaaacctccgagaaatatgggatcacgtaaagagagcgaatctaagactgattggtgtccctgaaagagatggggaaaacggaaccaatttggaaaacgcatttcaggatatcatctatgagaaattccctaacctagctagagaggccaacattcaaattcaggaaatccagagaactccaggaagatactccacgaaagg

SEQ ID NO: 9122 - DNA, 2669 bp, Homo sapiens
  SITE (1309): n equals a,t,g, or c
  SITE (1310): n equals a,t,g, or c
  SITE (1480): n equals a,t,g, or c
ggattgtaacacatgacaaagtttgagaactactgacaggaagagtcctgctgctgagttctaggcccagttctgtcactggctcactaaatgacttcaggcatgtccctctcctattttgaacttcagttttctcttctgtgaaatgaaagccttggactaggcagcgtctaaaggctctgtcactccgtaattgtgtgactttggtaactttgtttgacttctccttgcttaagttttctcatatgggtatggtaaggaaaatacctacctcacaggattttctaacaattttgtgattattaagtatgatgactgatgactaatatatgacagccagctcttacacagtgctttctatatcctggactgttgtaagtgcttttaatccccgcaacaatcccatctccattttacaaatgaaaaatagaggtcacacggctaatacgtgtcagagtttggattaaaacccagaaaaatctgtccccagagacaatgattttaactagcatgcccttttgctcaataaatgttaattccctcaccctttccacacacacacagtctagctgaccattcatagacaataatcccactttcacagtccatccaacaagatcttaaaagaaccatgagaatctctaggtttcttttgcaaatagttttcaagcatttaaaaaaaaaaggtggggggcggggagggagtggccaagatggctgactagaagcagctagggtgagtggttctcatggaggggaaggaaaggggcgagtaaatacagcgccttcaactgaaacatccaggtacccacattgggtctaatcaaggaaacaactcgatccacagagaatgaagaaaagcaaggcaggatgacagcccacccaggagcaacatggagacagaggaacctcctccacccagggaagtcgtaagtgaatgtgcgatcctgggaaaccacgctcctcccatggatccttgcaacccttgggtcaggagatcccctggtgaacccactccaccagggccttcagtctgacacacagagatacatggagtctcagcagagtagccgcttgagcacgtgcagagacccagcagctttacatactccggccctgggtttcccagcaaaagtaactgcaactcctgcaaagcgggagattagacccctgtacatacccctaggaaagaggctgaatccagggggccaagcggcacgatctgcgggccccacttccactgcacctcacaggataagacccactggtttggaattccagccagccaccagcagcagtgttgcacctnnacggacagaggtccagggggaagggcaggctgctctctgggacagagctcccagaagtggtaccccagaacagcacgcacagctgctcttcagaagcatggccagactgcttctttaagcaggtgcccaatctgttcctcctcactgggtgggacttttcaaccaaggcnctccagcaacccctactggtgttctctggctgacagagatttgaattctccctgggacagagctcccggagggagggaggggccaccatctttgctgtttgggcgacttagctgttccggcctccaggctttggagagcccacaccaaccaggggtggaacgcagtgccccagcaacgcgacagctgatctgtgaaagcatggacagactgcttctttaagcagttccctgatcccgttcctcctgactgggtgagacctcccaaccagggtctccagccttgtcctgcaggcgcatttgggctggcaacaggtctgtacctcgctgggccggagctcccagaggaagaggcaggctgacatctttgctgtttcacagccttcactggtgatagctccaggtactggaaaatccaaggagactaggaactggagaagaagcccagcaaagtacagcagccctacagaaacatggccagactgttaaaagaaaaaaaaaatccaaaggtcagcaacctcaaagactgaaggtagataagcccacaaagatgagaaagaatcagtgcaagaatgctgaaaactcaagaagccagagtgccctctttcctccaaatgactgcatcacctctctagcaagggttcggaattgggctgaggctgagatggctgaaatgacataagtagaattcagaatatggatagaaatgaacttcactgagttaaaagagtacattgtaacccaatgcaagcaagctaaaaatcatgataaaacattgcaggagctgacagacaaaatagcccatgtagagaagaatgtaaccaacctgacggaactgaaaaaacacactacaagaatttcataatgcaatcacaagtactaatagcagaatagacaaagcggaggaaagaatttcagagcttgaagactggctttctgaaataagactggcagacaagaatagagaaaaaagaatgaaaagcaatgaacaaaacctccgagaaatatgggatcacgtaaagagagcgaatctaagactgattggtgtccctgaaagagatggggaaaacggaaccaatttggaaaacgcatttcaggatatcatctatgagaaattccctaacctagctagagaggccaacattcaaattcaggaaatccagagaactccaggaagatactccacgaaagg

SEQ ID NO: 9123 - DNA, 300 bp, Homo sapiens
tctagagtgaccaaccatcctcttgtgcccagaactacaggactttccattttaaaactaggagagtcccacacaaaccaggactgttggtcagtcaccgtaccttcttgctgctagatatgtaattttctttggttttcatcaccggttcccatttctttgaaagtgtttgtaggtcacacactgtgtagtccatgatgaaaagaacaaaagatgtatgaattatggtgtgttgtggtggttcccaaagtagggtccccagaccaccagcagtggcatcatttgagaactccttagaaa

SEQ ID NO: 9124 - DNA, 2666 bp, Homo sapiens
aaggaagcactaaatgtagaaaggaaagatggttaccagccactccaaaaacacactgaagtactcagaccagtgacactacagagcaaacatgtaagcaagtctgcaaaataaccagctagcatcatgatgaaaggatcaaatccaaacataccaatactaaccttaaattgtaaatgggctaaatgccccagttaaaagacacagagtagcaagctggataaggaactaagatccaatggtatgctgtcttcaagagaaccatctcacatgcaatgacacacataggctcaaaataaaaagatggatgaaaatctaccaagcaaacggaaaacataaaaaagcagcagttgcaatcctagtttctgacaaaacagactttaaatcaacaaagatcaaaaaacacaaagaagggcattacataatggtaaatggttcaattcaacaagaaaatctaactatcctaaatacatatggacccaacacaggagcacccagatttataaagcaagttcttagaggccttcacagagacttagactgccaggcaatgatagtgggagactttttaacaccccactgacaatattagacagatcattgagacagacagttaacaaagatattcaggacctgaactcagcactggatcaaatggacctggtggatatctacagaactctccaccccaaaacaacagaatatacattcttctgatcaccgcaaggcacttactctaaaatcgaccacataatcagaagtaaaacactcctcgacaaatgcaaaagaactgaaatcatgacaaacagtctcttgggccacagaagaatcaaatttgaaatcaagattaagaaattcactcaaaaccatgcaattacatggaaattgaataacctgctcctgaatgacttttgggtaaacaatgaaatttaggcagaaatcaagaagttctatgaaactaatgagaacaaagatacaaagtaccagaatctctgggatacagcaaaggcagtgttaagaaggaaatttatagcactaaatgcccacatcaaaaagttagaaagatctcaagttaataacctaacatcactactaaaagaactagagaagcgagagcaaacaaatcccaaaactagcagaagacaagaaataacaaaaatcagagctgaactgaaggagacagagacatgaaaaacccttcaaaaaatgaaagaatccagaagctgttttttttttctttgaaaaaaagtaataaaatagaccgctagctagacgaataaagaaggaaagagagaagatttgaataaacacaatcagaaatgataaggggaatatttatcactgaccccacagaaatacaaacaaccaccagagaatattgtgaacacctctgggcacataaactaggaagtctagaagaaatggacaaattcctggacacacacacctccccaaggctgaaccaggaagaaactgaatccctgaacagaccagtaatgagtttggaaattgaggcagtaataaatagcctaccaaccaaaaaaatcccaggaccagatggattcacagctgaattctaccagatgtacaaagaggaactggtagcattcctactgatactatttcaaaaaattgagaaggagggactcctccctaactcattctatgaggccagcatcatcctgaaaccaaaacctggcagagatacaacaacaaaagaaaacttcaggccagtatccttcatgaacatcaatgcaaaaatcctcaacaaaatgctggcaaactgaatccagcagcacatcaaaaagcttatccaccacgatcaagttggcttcctccctgggatgcaaggttggttcaacatatgcagatcaataaatgtgactcatcacataaacagaactaaagacaaaaaccacatgattatctcaatagatgcagaaaaggcttttgataaaattcaacatcgcttcatgttaaaaactctcaataaactaggtattgaaggaccatgcctcaaaataataagagccatctgtgacaaacgcacagccaacatcatactgaatggacaacagctggaagcattccccttgaaaaccggcacaagacaaggatgccctctctcaccactcctattcaacatagtattggaagttctggccagggcaatcaggcaagtgaaagaaataaagggcatccaaattggaagggaggaagtcaacctatccctgcttgcagatgacatgatcctatatctagaaaaccccgttgtctcagcccaaaggcctcttaagctgataaacaacttcagcaaagtctcagggtacagaatcaatgtgcaaaaatcactagcattcctatacaccagcaacagtaaagccgacagccaaatcagcaatgaactcccattcacaattgctacaaaaagaataaaatacctaggaatacagctaactagggaggtgaaagatctctacaaggagaactacaaaccactgctcaaagaaatcggagatgacacacaaaaaaatggaaaaacattccaagctcatggataggaagaatcagtattaaaatgggcatactgcccaaagcaatttatagattcaatgctattcccattaaactaccattgacagtcttcacagaacgagaaaaaaaaa

SEQ ID NO: 9125 - DNA, 300 bp, Homo sapiens
tctagagtgaccaaccatcctcttgtgcccagaactacaggactttccattttaaaagtaggagagtcccacacaaaccaggactgttggtcagtcaccgtaccttcttgctgctagatatgtaattttctttggttttcatcaccggttcccatttctttgaaagtgtttgtaggtcacacactgtgtagtccatgatgaaaagaacaaaagatgtatgaattatggtgtgttgtggtggttcccaaagtagggtccccagaccaccagcagtggcatcatttgagaactccttagaaa

SEQ ID NO: 9126 - DNA, 4591 bp, Homo sapiens
  SITE (740): n equals a,t,g, or c
  SITE (3998): n equals a,t,g, or c
aaggaagcactaaatgtagaaaggaaagatggttaccagccactccaaaaacacactgaagtactcagaccagtgacactacagagcaaacatgtaagcaagtctgcaaaataaccagctagcatcatgatgaaaggatcaaatccaaacataccaatactaaccttaaattgtaaatgggctaaatgccccagttaaaagacacagagtagcaagctggataaggaactaagatccaatggtatgctgtcttcaagagaaccatctcacatgcaatgacacacataggctcaaaataaaaagatggatgaaaatctaccaagcaaacggaaaacataaaaaagcagcagttgcaatcctagtttctgacaaaacagactttaaatcaacaaagatcaaaaaacacaaagaagggcattacataatggtaaatggttcaattcaacaagaaaatctaactatcctaaatacatatggacccaacacaggagcacccagatttataaagcaagttcttagaggccttcacagagacttagactgccaggcaatgatagtgggagactttttaacaccccactgacaatattagacagatcattgagacagacagttaacaaagatattcaggacctgaactcagcactggatcaaatggacctggtggatatctacagaactctccaccccaaaacaacagaatatacattcttctgatcaccgcaaggcacttactctancatcgaccacataatcagaagtaaaacactcctcgacagatgcaaaagaactgaaatcatgacaaacagtctcttgggccacagaagaatcaaatttgaaatcaagattaagaaattcactcaaaaccatgcaattacatggaaattgaataacctgctcctgaatgacttttgggtaaacaatgaaatttaggcagaaatcaagaagttctatgaaactaatgagaacaaagatacaaagtaccagaatctctgggatacagcaaaggcagtgttaagaaggaaatttatagcactaaatgcccacatcaaaaagttagaaagatctcaagttaataacctaacatcactactaaaagaactagagaagcgagagcaaacaaatcccaaaactagcagaagacaagaaataacaaaaatcagagctgaactgaaggagacagagacatgaaaaacccttcaaaaaatgaaagaatccagaagctgttttttttttctttgaaaaaaagtaataaaatagaccgctagctagacgaataaagaaggaaagagagaagatttgaataaacacaatcagaaatgataaggggaatatttatcactgaccccacagaaatacaaacaaccaccagagaatattgtgaacacctctgggcacataaactaggaagtctagaagaaatggacaaattcctggacacacacacctccccaaggctgaaccaggaagaaactgaatccctgaacagaccagtaatgagtttggaaattgaggcagtaataaatagcctaccaaccaaaaaaatcccaggaccagatggattcacagctgaattctaccagatgtacaaagaggaactggtagcattcctactgatactatttcaaaaaattgagaaggagggactcctccctaactcattctatgaggccagcatcatcctgaaaccaaaacctggcagagatacaacaacaaaagaaaacttcaggccagtatccttcatgaacatcaatgcaaaaatcctcaacaaaatgctggcaaactgaatccagcagcacatcaaaaagcttatccaccacgatcaagttggcttcctccctgggatgcaaggttggttcaacatatgcagatcaataaatgtgactcatcacataaacagaactaaagacaaaaaccacatgattatctcaatagatgcagaaaaggcttttgataaaattcaacatcgcttcatgttaaaaactctcaataaactaggtattgaaggaccatgcctcaaaataataagagccatctgtgacaaacgcacagccaacatcatactgaatggacaacagctggaagcattccccttgaaaaccggcacaagacaaggatgccctctctcaccactcctattcaacatagtattggaagttctggccagggcaatcaggcaagtgaaagaaataaagggcatccaaattggaagggaggaagtcaacctatccctgcttgcagatgacatgatcctatatctagaaaaccccgttgtctcagcccaaaggcctcttaagctgataaacaacttcagcaaagtctcagggtacagaatcaatgtgcaaaaatcactagcattcctatacaccagcaacagtaaagccgacagccaaatcagcaatgaactcccattcacaattgctacaaaaagaataaaatacctaggaatacagctaactagggaggtgaaagatctctacaaggagaactacaaaccactgctcaaagaaatcggagatgacacacaaaaaaatggaaaaacattccaagctcatggataggaagaatcagtattaaaatgggcatactgcccaaagcaatttatagattcaatgctattcccattaaactaccattgacagtcttcacagaacgagaaaaaaaaaactattttaaaattcatatggaaccaaaaaacaaaaaaagcccgaataccgaaggcaatcctaagcaaaaaggacaaagctggaggcatcatgctacctgacttcaaactatgctacaaggctacagtaacccaaacagcatggtgctggtacaagaacagacacatagacaaatggaacagaacagagaaccgagaaatgagaccacacacctacaactaactgatcttcgacaaacctgacaaaaacaagcaatggggaaaggattcccggttcaataaatggtgctgggataactggctagccatgtgcagaagatgaaaaccggctcccttgcttacactatatacaaagattgactcaagatggattaaagactgacatgtaaaacccccaactatgaaaactctgaaagacaacttaggcaatgccattcagggcataggcatgggcaaagatttcatgatgaagacgccaaaagcaattgcaacaaaagcaaaaaattgacaaatggggtctaataaaattaaagagctgtgcacagtgaaagaaactatcaacagagtaaacagacaacctacagaatgggagaaaatatttgcaaactatgcatctgacaaaggtctaatatccagcatctataaagaacttaaacaaatttacaggaaaacaaacaatcccataaaaaagtgggaaaaggacatgaacagacacttttcaagaggagacatacatgcagccaacattcatatgaaaaaaaaaggtcaacatcactgatcattagagaaatgcaaatcaaaaccacaatgagatcccaactaatattagccaaaatggccattattaaaaagtcaaaaaataacagatgctggcgaggctgtggagaaaaaggaatgcttatacactgtctgtgggattgtaaacaagttcagccactgtggaagacagtgtggtgattcctcaaagacctaaagacagaaataccattcaacccagcaatcccattactgggtctacacccaaaggactaaaaatcattctgttacaaagacacatgcatgtgtatgctcattgcagcactactcacaatagcaaagacatggaatcagcctaaatccccaacagtgacagactggagaaagataatgtggtacatatacaccatggaatactatgcagccgtgaaaaagaatgagataatgtccttcgcagggacatggatggagctggaggcccttatccttagcagaccaacacagaaagagaaaaccaaatactgcatgttctcacttataagtgagagttaaatgatgagaacatatgacacatggngggaacaacacacactggggccttttggaggatagagggtgtgaggagggagaggatcaagaaaaacacctaatgggtactaggcttaacccctgggtgatgaattaatctatgcaacaaatcccctatgacacaggtttccctatgtaacaacccggcctttgtccccctgaatttaaagttttaaaaaaaaaaaaaaagggagttggtggctaataacctctaaataaggcttttcaaacttaaaagcaaaatctagccgggtgccgtggctcacgcctgtaatcccagcacttttggaggccaaggcaggaggatcgcttgaggtcaggagtttgaacccagcctgagcagcaaagcaagcccccgtttctacaaaaaaatagaattaaaagaaaagttagttgggtgggagtcatgagtgcctgcagtcccagctactcgggaagctgaggtgggaggatctcttgagcccagcagttcaaggctactgtgagctatgatcaccccactgcactccagcctgggtaacagagcaagaccatgtctcaaaaaaaaaaaaaaaaaaaaaattcatcatttctaattttgcc

SEQ ID NO: 9127 - DNA, 1551 bp, Homo sapiens
ctccattaagaattgattactaatagcagaagattttaaactatctctgttggtagatgaagtgattcttgcatagatagagagagccatttgtcaccacagctggctaagtccccctccttccttcacttagtctgtattagtttgctagagctgccataacaaaatatcagagtctgagtagctttaacaacaggaatccactttctcacacttctggaggttggaaacccaagatcaaggtgctggcagggtgggtttcacagagagctttcaaggaaggatctgttctgggcctttctttttgacatgtagatggctgcccttttattgcctcttcatctgtgtctgtgtgctcctgatgtctctctctgtgtgtccaaacatcatcttataaggacaccagtaggaacggattaggtcctaccctaatggtcacattttttacttgattttctctttaaaggctttatatccaaatacagtcatggtctgaggtacaaggtgttagggcttcaaacatacgaatttgtgggagtcaattcagctcataacatagtccatgagcttgtactaattggaagtgaggattaggtttttagttgtttccttccttccaattactctagatctttctccacttccagttgaccaatcccttcatgctgccagccccacatttgacttgactgcctttacctacactctccagtctttgttattctttccttcctcacatccaaatgtaactctgccacaacccactagacctctattaggaatcatttgaaaactaaaaagtaaaacatctatttgacccccttgacccatgctttctggctgcatattaaaaataatagcaaaaatcatgattacttttgcaccaacctaatattaaaatcatctggggtgttttataaaaatacctatgtctgggccctaataccagatcttctggtttggttggtggagtgaggcccgtgttcctgatgatctgaccactctcatacatttctgtctgtgcttctcttagcctaaaatgctctgtgctttttttccaactcatgaattcttatctattcgaatttataggtggactgtcacttcctcaagaaagcctccatcagttaccccagggtagtgtattagggtcagtctagcagagcagtaggtaacgtgaactaaaggcatagagacctgagtgtgaatgtcttactttgatctttcttaaccaggggactttgaacattttcttaagcctgttgagcctcattgtggtaatcatgaaaagggaaagtcttaaagcatgtcacatagggttgatgtgagaattaagaaaattaccatatgtatgcttcctagctggtagtacatgtccatttaataatctctccttctggtggcgggcacctgtaatcccagctacttgggaggctgaggcaggagaatggcgtgaacccgggaggcggagcttgcagtgagccgagacagcgccactgcactccagcctgggcgacagcgagactccgtctcaaaaaaaaaaagaaaaaa

SEQ ID NO: 9128 - DNA, 121 bp, Homo sapiens
gataggtgccaagaagaaaaaaaaattaacagaaaagaaggatttgaaatatgaagaactagagaagccttggtgagaatgggacattggaaaaaggactggaagaaagtgaaggagctgg

SEQ ID NO: 9129 - DNA, 2200 bp, Homo sapiens
ttttttttttttgttgactgggctcaagtgatgctcccccctcaccctcctgagtagctgggagtagctgggactacaggtgtgtgtcaccacacctggctaagtttttttgtgtgtgttttttgagtagagatggggttttgccatgttgcctgaactggtcacactcctaggctcgagcagtcctcctgccttggcctcccaaagtgctgggattatgtgtgtgagccaccacacctagcctacattctttttaaattttttgtttttagttgacctataatacttgtagaaagacaaagaatacagtgtgatgtttcagtgcatatatgcattgtataaggatcaaatgagggtaattatatccatcactaagcatttatcatttatttgttgtggtaatattcaaaatcttctcttctagctgtcttgaaatgtctatcacattgttatttgctgtactcaccttactgtgtaatggaacaccagaacttattcttcctgtctgattgtaacttaatacccattgaaacaacttctcatggtcccccccttcccccatactccccagccataggtaaccactgttctattctctgcttctgtgaaatcaacttttaaaattcaagggtgaaattacacagtgtttgcctttctgtgccttgctatttcacttaacataatggcctttaggttcatccatattaccacaaacgacggaagaatattctgtttataatgttccattttgtgtgtgtgtatacacggacacacggcattttctttgttcattcatctgtagatgggtgtttaggttgattcatgtcttgactattgtgaatggcactgcagtaaacatgggagtgcaattatctcttcaatatactgatttcatttccctttggatatacacccaaaagcatagggaacaaaagcaaaaacagacaaatgggattacatcaaactacaaagcttctgcacagcaaaggaaacaaacaatatagatcgaagagacaacctgaagaataggagaaagtacttgtaaactttatgcatctgacaaagagttaatatccagaacatataaggaactcaactcaatagaaaaaaaattcagttaaaaaatgggcaaaagacctgcgtagacatttctaaaaagaacacatacaaatggctgacagatatatgaaaatatgcttaacatcactaattatcaggaaaatgcaaatcaaaaccacagtgagatactacctcaccccagtcagaatggctgttctcaaaaagacaaaggataacaaatgttgggaaggatgtggagaaaggggaactcttatgcacttttggtgagaatgtaaattagtacaactattatgggaaacagtatggaggttctcccgcctcccccagaggcaggttctctctctgttgcccaggctggagtgcagtggtgtaatcatagctcgcttggcctcaaacttatgagctcaagtcatcctcctgcctcagccttctgagtagctgggactataggtgtgtgccacgtcatctagttagttcttaattttttgtagagacagtgtcttgctatgtttcacaagctggtcttgaacttctggcctcaagcaatcctcctccattggcctcccaaagcactgggctttataagcatgagccaccctacccagctggaggttcttcacaaaaaaagattggctatatatccaaagaaaataaataatacattctttcatagcaaaagagaggatcagcatatattaaagagtgcttattttaccactgaacaagttgtaaaagtagacgttcttaagctcatgagcctgtggtaaatactaggtagtcactcaaaatgtgtagatttcaagcatactttggactttggaagtagacacatgagattgtagcacggaatcctaaaatcctaggccaaagaagacttttagaaatcatagttcatactgtttcttttatgcaggatttagctaatccatcttagaaaaaaaaagcaagactatttttaatatccagaaatacatattatagtcattggcgactggccttgagggggcataacaaaacatggttgtatgtcagtgatactgcaattgatgaaatgttgctatttagaaacagtaaaaggaagcccccagaagttaaaaatacctgttggacactaaaaaaa

SEQ ID NO: 9130 - DNA, 2200 bp, Homo sapiens; identical to SEQ ID NO: 9129

SEQ ID NO: 9131 - DNA, 234 bp, Homo sapiens
cagacctatctagctaagctgctgttgaattcttggaccatagagactatgagataatgaatatttattgttgtccagtgcagctaaaaattttggggtaagttgtttcatagcagtatataattctcttctgaagttgtgctgaaggggaaatttacacccaattcatgtattagaaagaagctgaaattcagtgatcacaagtgtatttctcaagaagttaggagaagaaca

SEQ ID NO: 9132 - DNA, 93 bp, Homo sapiens
  SITE (74): n equals a,t,g, or c
  SITE (85): n equals a,t,g, or c
gaggcaggagaatggcgtgaacctgggagacggagcttgcagtgagccgagatcgcaccactgcactctagccngggcgacagancgagactc

SEQ ID NO: 9133 - DNA, 7591 bp, Homo sapiens
acgcaacttctgcagctacagctgtgtggtagctttccaggtatggcttcaggaaccttcctcttcttcagtcagtgagtcacctactgtatgagtctgttcttgcactcctctaaagaaataccctagactgggtaatttataaagaaagaggtttaattggctcacagttccacaggctgtacaggtagcatggctggagaggcctcaggaaactttcaattatggcggaaggcgaaggggaagccggcacgtcttacatgatgggctcaagaggaagagagagaagcgggaggtgctacacttttaaacaaccagatagtgagaactcactatcaccagaacagcaggggagaaatccacccccatgatccagtcacttcctgccaggctcctcccccaacattggggattaccgactggacatgagatttgggcagggacacgaattcaaacctatcacctactatagtaatgcacatttattaggtgtttgctagggcctgggttgtataagtttctatatcattcctattaaacttggatttgtagttcattctgtatttggaatttaatttaactgccttctataaaattgaatggtacttttatcacccatattatctattgggaggatattatttttgaggaagattattagttaagttattttattttttcatcataaatgagactccccccattccgtaataagctgctcagaggcaggaacattgcctgttaacagatgtaccttacatgcctagaacggtgcttggcatatgtaggcacacaatacttctttgttttaacaaagattaaattgatactttttgttgttttgtttttccagaatttattcaacaaaccaactggaatgaattcttcagtagtgcccttgtctcagggccaagtaattgtaagcatccccacaggttccacagtgtcagccggaggaggtagcacatctgctgtttctcccacctccatcagtagctctgctgcagctggtctccagcgtctcgctgcccagtcccagcatgttgggtttgcacgaagtgttgtgaaactcaaatgtcaacactgtaaccgtctttttgccacaaaaccagaacttcttgactataaggtaaagtatagcatgttcatgataagattttgagtatacgtgggtctatttgtaaaattatttttaactttgcatctctcaaaatcataccatttgttttgaaagtaagggagataaggagttccataagacaaaccaaatgtttaattagtacttaatgattatttctttgcagggcaaaatgtttcagttctgtggcaagaattgttctgatgaatataagaaaataaataatgtaatggcaatgtgtgaatattgtaaaattgagaaaattgtaaaggagactgttcggttctcaggtgctgacaagtcattctgtagtgaaggtaaagacagaagattatcttacctactgagcatgttggttgttttaaagcagttgatgatgatttaagctttcactgtctaagttaatctgttttattgtttatgtataacgtaaatgccttttcgattcatttacacttagttcattcttttttgatctagttttcttatattatgtagctgttaaaatgaagtgaaagatttgcaaagtataatgcacgaagaagatgatgtgaaaaacatttaacatccttaggttccccattattaggttgatcgggacctcaaagagcttctagttcgtgtacttatttctaaatgggatgccttaaattatggtaacattctaagtttatacttttattgtcttaaacagccattatatttctgaatataaatggcttgaatatgcaaattaatatgtggaagattgttttccttagataactcttctatatgtttataatgttttattttactctaaagctgtattagccttctagagcaagggctttcaaaccttttgataacaccaaagaagaaatacatttacactgtgacccagtatattttcacatacctaaataaaagttttttttgtttttgtttttgttttttgagacagagtcttgctttgtcacccaggctggaatgccatggagcgatcttggctcactgcaacctctgcctcctgggttcaagcgattctcctgcctcaacctcccgagtagctgggactacaggcacccgccaccacacctggctaatttttgtatttttagtagagacagggcttcaccatgttggccaggctggtctccaactcctgacctcaggtgatccacccactttggcctcccagagtgctgggattacaggtgtgagccactacgcccagccccaaaagtttcatgaaataaaatcgatgcagtttaatattttctcttctgtgctatcctgtcttatatcatttaaaacaaaaacaaaaacaaagcaaaacaaaaactagtatagatactctaaaaaatcaagatactctgtgaactggtcaggacccaagtgtgaaaactttgtcctagaccacttatttttcttttttttgtttttgtttttatttgacatggggtcttgccatgttgcccaggctggtctcaaactcctgggctcaagcactcctcccgccagcctcccaaagtgttgggattacaggtgtgagccactgcaccgggcctgtcctaggccatttaaagttgcagaaaactaatacttctacctaatgttaattttatctttcctgatttttaggttgcaaattgctttataaacatgacttggcaaaacgctggggaaatcactgtaaaatgtgcagttattgtttacagacatctcccaaattggtacagaataatttaggagggaaagtggaagagttctgttgtgaagaatgcatgtccaaatatacagttttgttctatcaggtaaatagaattcacattcctgggtttttcattctagggcataaattattcccttttaaaatttcatgtcacataaaggacaatttaattatttaaaacttttaagtattaaatgttttatgccttctagcaattaatataagatttagaaagactttaatgttattgaagttttcttttgtttttaatttcctgtaggagacatatcagtcttaagacattaaaatatttaaacttataattttattcacttattatttaaataaagtgaatttgtcttctgaagtctgaggaagatagaccttatttttatttcactttgttttttaattgctatagagtgaagtctgtatgttacatgtgttttttaaaaaaaattagtataaaatcagctgggcgcggtggctcacgcctgtaatcccagcactttgggaggccgaggcgggtggatcatgaggttaggagatcgagaccatcctggctaacatggtgaaaccccgtctctactaaaaatacaaaaaaattagctgggtgtggtggcgggcgcctgtagtcccagctacctgggaggctgaggcaggagaattgcatgaacccaggaggtggagcttgcagtgagctgagatcacgccactgcactccagcctgggcgatagagcaaggctctgtctcaaaaaaaaaaaaaaatatatatatatatgtgtgtgtgtgtgtgtgtgtgtgtgtataatcattgataaagacaaactaattttttgatctaaattctaagttaatttcgtcacttgttatgtgtgtcttatttttattttgtcagaccacagataatttgtttcttactccttgactaccttcttctttttagatggccaaatgtgatgcttgtaagcgacagggtaaactcagtgagtccttgaaatggcgaggggaaatgaaacatttctgtaacctgctttgtatcttgatgttctgtaatcagcaaagtgtatgtgacccgccttcacaaaataatgcaggtaaaattaaccttaggtactgaatggagtctttggtcaatactaggaactactgttcttttacagatcaggaactgtgtaaacagttgtcattaatttcatgaaacctcagtttccttgtattctgtatcaataacatttagctttttttgttgaacaccttatttcactgtcgtccgtgtgaagagaccaccaaacaggctttgtgtgagcaacaaggctgtttatttcacctgggtgcaggcggtctgagtctgaaaagagtcagtgaagggagatggggtggggccgttttataagatttgggtaggtaaaggaaaaaggggggttgttctctggcgagcaggagtgggggtcacaaagtgctcagtgggggagctttttgagccaggatgagccaggaaaaggaatttcacaaggtaatgtcatcagttaaggcaggaacaggccattttcacttcttttgtgttggaatgtcatcagttaaggcaggaaccggccatctggatgtgtacctgcaggtcagaggggatatgatggcttagcttgggctcagaggcctgacaccttagattaaagctgagtaaaaatgagtttttgattaaatagatttctttgagaatattgaatcaaataaactctgtaagaacttaaatttatgggaaaggataacagttaatggtttgtaattgagtataattggcttccttaaaaaatcctttgagactacttataacaaaagacataaagtcaaaatcacatggccttttaaatataccatgtgcaggccagatgtgatggttcatgcctgtaatcccaccgcctttggaatgctgaggtgggaggacggcttgaggccaggagttcaggggtggagtgagcggtgaccacagcacagcaatcccagctggatgatatagtgagaccctgcctctaaaaaattaaaataaaataaaactatatgtcgtgggcgtgactagttggggccagtgtcacgggctgtaaaggaatttaccaagacagtcataggtaaaggcagatttattggagaaagtgtgaaaatatgttgcaaggttgcagtgagcagcacagcagagaaggggaagtctgcaaagacgcagcggcttgagggacgttttacatggtcctgctggaggggactgcttgcagaatgtagccgtgctcctggggctacctgtaggaggtcatctctcagagtaattactcattgttctcccccacctgggccccttcctctttgttgcttacttaccttgtcaggacttacttatcttatcaggactacacactatgtgctaggccactttatctcagaaaatttattatttaaaaacaacactagtatcatcctgaaagctagaagaatttaagtgtagtctccttacaaataaaagcaaaatctacaagagcctactccaaaacttaaaaaaaaattatttctatataaaggcaagatttaagaaaaacattaggctgaattgtccattaaatctaacctgtgatcttcattggtattgtgtgtttgaggatttgcattgttggtttttaagttggtttttaagttagactatttgttgccttttttatgtaaagataaagttaatagaaaactttcaagttttactaattaaaaagtagaaaaccagggtatggtggctcatgcctgtaatctcagcactttgggaggctgaggcaggcggatcacgaggtcaggagtttgagaccatcctggccaacatggtgaaaccccgtctctactaaaatacaaaaaattagctgggtgtggtgctgcgcacctgtagtcccagctacttgggaggctgaggcaggggaatcgcttgaacccgggaggtggaggtcgctgtgagctgatatcgtgccactgcactccagcctgggcagcagagtgagactctgtctcaaaaagaaaaaaaaaaagaagaaaaccaaaacccagttaatcctaaagtgactttttgctccaacagaaattactcaaacctgaaaacattgtttaacttccttgaaatggtttctgtgtaagtacatataaatcacgtgaggtttccttatttttgtttattttaatcagcaaatatttccatggttcaagctgcttcagcaggacctccatctctgagaaaagattcgactccagttatagccaatgtagtatcattggcaagtgcccctgctgctcagcctacagtgaattctaacagtgtcttacaaggtatggcttgattgggaagcatttatctagcctatttaggttgaatgcagtggtcccctaacttcctttcatcagggattattttcatacatttgacacattcaatattaggaatagtggcttgctgctcaagtttcatatctcatactttagattgctagtttcttccgttgagattaaaaaaacacatgttcttagtatgagggtttgtgtttatgtactgataatcagcttttaatgctaatgttaaaataattgtaaagatcataaatttatgttttaatttatatcaaggtgcagttccaacagtaacagcgaaaatcatcggtgatgtaagttttattacttttattggtattgtcactgtatttatttttcattttcatacagtataaatatgtgtgaactaatttgccctccttctttattatatgaaatagatttcattagctcatttaatctttgttcaggaataggattttctggctatttaaataggtcttttatgtactttaatatctttgaatgctggctatgtagttactgaaagtttttctttaattacacaaaattgaagtaaattgtacaggatttaggcctgaaagacttttggatgttttgtgatgtactcagattataaataaaatgtttatacaatgtagcttatcctccctctgacccattacagattatactgtaaaaaaaaattctttttttaacccattaatattttctgctttgtctcttaaaagaagaaaataaataatgagaaaaacttctgactggaacagtggcatttctaaggtgtttctccaggtttctgggataactttcacgttgtctttattcaagttacttaaatgatcataagtgattctgttattcctagttatcttgaatctctcaagtcctctgtgtcttaatcaggaagtaagaattctcattttaaacttagccagcattgttattgatcagcagtgtgttacaatagaaatagcatttttcttggtaaatagaaattgtgattagagacatgcagagtaatatatagttattaaaacattccttgattactattaatattttaggagtattgtatttcttatacatttggttgaatatttacttgctatgtcctccatgtaattccaatatgacatttcctttaatattataatatttcttataattacaatgagatttttaaaaatgtttttggtttctaatttgtttttttactaggcaagtactcaaacagatgccctgaaactgccaccttcccaacctccaaggcttttgaagaacaaagctttattatgcaaacccatcacacagactaaagccacctcttgcaaaccacatacccaaaacaaagaatgccagacag

SEQ ID NO: 9134 - DNA, 7595 bp, Homo sapiens
acgcaacttctgcagctacagctgtgtggtagctttccaggtatggcttcaggaaccttcctcttcttcagtcagtgagtcacctactgtatgagtctgttcttgcactcctctaaagaaataccctagactgggtaatttataaagaaagaggtttaattggctcacagttccacaggctgtacaggtagcatggctggagaggcctcaggaaactttcaattatggcggaaggcgaaggggaagccggcatgtcttacatgatgggctcaagaggaagagagagaagcgggaggtgctacacttttaaacaaccagatagtgagaactcactatcaccagaacagcaggggagaaatccacccccatgatccagtcacttcctgccaggctcctcccccaacattggggattaccgactggacatgagatttgggcagggacacgaattcaaacctatcacctactatagtaatgcacatttattaggtgtttgctagggcctgggttgtataagtttctatatcattcctattaaacttggatttgtagttcattctgtatttggaatttaatttaactgccttctataaaattgaatggtacttttatcacccatattatctattgggaggatattatttttgaggaagattattagttaagttattttattttttcatcataaatgagactccccccattccgtaataagctgctcagaggcaggaacattgcctgttaacagatgtaccttacatgcctagaactgtgcttggcatatgtaggcacacaatacttctttgttttaacaaagattaaattgatactttttgttgttttgtttttccagaatttattcaacaaaccaactggaatgaattcttcagtagtgcccttgtctcagggccaagtaattgtaagcatccccacaggttccacagtgtcagccggaggaggtagcacatctgctgtttctcccacctccatcagtagctctgctgcagctggtctccagcgtctcgctgcccagtcccagcatgttgggtttgcacgaagtgttgtgaaactcaaatgtcaacactgtaaccgtctttttgccacaaaaccagaacttcttgactataaggtaaagtatagcatgttcatgataagattttgagtatacgtgggtctatttgtaaaattatttttaactttgcatctctcaaaatcataccatttgttttgaaagtaagggagataaggagttccataagacaaaccaaatgtttaattagtacttaatgattatttctttgcagggcaaaatgtttcagttctgtggcaagaattgttctgatgaatataagaaaataaataatgtaatggcaatgtgtgaatattgtaaaattgagaaaattgtaaaggagactgttcggttctcaggtgctgacaagtcattctgtagtgaaggtaaagacagaagattatcttacctactgagcatgttggttgttttaaagcagttgatgatgatttaagctttcactgtctaagttaatctgttttatgtttatgtataacgaaatgccttttcgattcatttacacttagttcattcttttttgatctagttttcttatattatgtagctgttaaaatgaagtgaaagatttgcaaagtataatgcagaagaagatgatgtgaaaaacatttaacatccttaggttccccattattaggttgatcgggacctcaaagagcttctagttcgtgtacttatttctaaatgggatgccttaaatgatggtaacattctaagtttatacttttattgtcttaaacagccattatatttctgaatataaatggcttgaatatgcaaattaatatgtggaagattgttttccttagataactcttctatatgtttataatgttttattttactcaaaagctgtattagccttctagagcaagggctttcaaaccttttgataacaccaaagaagaaatacatttacactgtgacccagtatattttcacatacctaaataaaagttttttttgtttttgtttttgttttttgagacagagtcttgctttgtcacccaggctggaatgccatggagcgatcttggctcactgcaacctctgcctcctgggttcaagcgattctcctgcctcaacctcccgagtagctgggactacaggcacccgccaccacacctggctaatttttgtatttttagtagagacagggcttcaccatgttggccaggctggtctccaactcctgacctcaggtgatccacccactttggcctcccagagtgctgggattacaggtgtgagccactacgcccagccccaaaagtttcatgaaataaaatcgatgcagtttaatattttctcttctgtgctatcctgtcttatatcatttaaaacaaaaacaaaaacaaagcaaaacaaaaactagtatagatactctaaaaaatcaagatactctgtgaactggtcaggacccaagtgtgaaaactttgtcctagaccacttatttttcttttttttgtttttgtttttatttgacatggggtcttgccatgttgcccaggctggtctcaaactcctgggctcaagcactcctcccgccagcctcccaaagtgttgggattacaggtgtgagccactgcaccgggcctgtcctaggccatttaaagttgcagaaaactaatacttctacctaatgttaattttatctttcctgatttttaggttgcaaattgctttataaacatgacttggcaaaacgctggggaaatcactgtaaaatgtgcagttattgtttacagacatctcccaaattggtacagaataatttaggagggaaagtggaagagttctgttgtgaagaatgcatgtccaaatatacagttttgttctatcaggtaaatagaattcacattcctgggtttttcattctagggcataaattattcccttttaaaatttcatgtcacataaaggacaatttaattatttaaaacttttaagtattaaatgttttatgccttctagcaattaatataagatttagaaagactttaatgttattgaagttttcttttgtttttaatttcctgtaggagacatatcagtcttaagacattaaaatatttaaacttataattttattcacttattatttaaataaagtgaatttgtcttctgaagtctgaggaagatagaccttatttttatttcactttgttttttaattgctatagagtgaagtctgtatgttacatgtgtttttaaaaaaaaattagtataaaatcagctgggcgcggtggctcacgcctgtaatcccagcactttgggaggccgaggcgggtggatcatgaggttaggagatcgagaccatcctggctaacatggtgaaaccccgtctctactaaaaatacaaaaaaattagctgggtgtggtggcgggcgcctgtagtcccagctacctgggaggctgaggcaggagaattgcatgaacccaggaggtggagcttgcagtgagctgagatcacgccactgcactccagcctgggcgatagagcaaggctctgtctcaaaaaaaaaaaatatatatatatatatgtgtgtgtgtgtgtgtgtgtgtgtgtgtgtgtgtataatcattgataaagacaaactaattttttgatctaaattctaagttaatttcgtcacttgttatgtgtgtcttatttttattttgtcagaccacagataatttgtttcttactccttgactaccttcttctttttagatggccaaatgtgatgcttgtaagcgacagggtaaactcagtgagtccttgaaatggcgaggggaaatgaaacatttctgtaacctgctttgtatcttgatgttctgtaatcagcaaagtgtatgtgacccgccttcacaaaataatgcaggtaaaattaaccttaggtactgaatggagtctttggtcaatactaggaactactgttcttttacagatcaggaactgtgtaaacagttgtcattaatttcatgaaacctcagtttccttgtattctgtatcaataacatttagctttttttgttgaacaccttatttcactgtcgtccgtgtgaagagaccaccaaacaggctttgtgtgagcaacaaggctgtttatttcacctgggtgcaggcggtctgagtctgaaaagagtcagtgaagggagatggggtggggccgttttataagatttgggtaggtaaaggaaaaaggggggttgttctctggcgagcaggagtgggggtcacaaagtgctcagtgggggagctttttgagccaggatgagccaggaaaaggaatttcacaaggtaatgtcatcagttaaggcaggaacaggccattttcacttcttttgtgttggaatgtcatcagttaaggcaggaaccggccatctggatgtgtacctgcaggtcagaggggatatgatggcttagcttgggctcagaggcctgacaccttagattaaagctgagtaaaaatgagtttttgattaaatagatttctttgagaatattgaatcaaataaactctgtaagaacttaaatttatgggaaaggataacagttaatggtttgtaattgagtataattggcttccttaaaaaatcctttgagactacttataacaaaagacataaagtcaaaatcacatggccttttaaatataccatgtgcaggccagatgtgatggttcatgcctgtaatcccaccgcctttggaatgctgaggtgggaggacggcttgaggccaggagttcaggggtggagtgagcggtgaccacagcacagcaatcccagctggatgatatagtgagaccctgcctctaaaaaattaaaataaaataaaactatatgtcgtgggcgtgactagttggggccagtgtcacgggctgtaaaggaatttaccaagacagtcataggtaaaggcagatttattggagaaagtgtgaaaatatgttgcaaggttgcagtgagcagcacagcagagaaggggaagtctgcaaagacgcagcggcttgagggacgttttacatggtcctgctggaggggactgcttgcagaatgtagccgtgctcctggggctacctgtaggaggtcatctctcagagtaattactcattgttctcccccacctgggccccttcctctttgttgcttacttaccttgtcaggacttacttatcttatcaggactacacactatgtgctaggccactttatctcagaaaatttattatttaaaaacaacactagtatcatcctgaaagctagaagaatttaagtgtagtctccttacaaataaaagcaaaatctacaagagcctactccaaaacttaaaaaaaaattatttctatataaaggcaagatttaagaaaaacattaggctgaattgtccattaaatctaacctgtgatcttcattggtattgtgtgtttgaggatttgcattgttggtttttaagttggtttttaagttagactatttgttgccttttttatgtaaagataaagttaatagaaaactttcaagttttactaattaaaaagtagaaaaccagggtatggtggctcatgcctgtaatctcagcactttgggaggctgaggcaggcggatcacgaggtcaggagtttgagaccatcctggccaacatggtgaaaccccgtctctactaaaatacaaaaaattagctgggtgtggtgctgcgcacctgtagtcccagctacttgggaggctgaggcaggggaatcgcttgaacccgggaggtggaggtcgctgtgagctgatatcgtgccactgcactccagcctgggcagcagagtgagactctgtctcaaaaagaaaaaaaaaaagaagaaaaccaaaacccagttaatcctaaagtgactttttgctccaacagaaattactcaaacctgaaaacattgtttaacttccttgaaatggtttctgtgtaagtacatataaatcacgtgaggtttccttatttttgtttattttaatcagcaaatatttccatggttcaagctgcttcagcaggacccccatctctgagaaaagattcgactccagttatagccaatgtagtatcattggcaagtgcccctgctgctcagcctacagtgaattctaacagtgtcttacaaggtatggcttgattggaaagcatttatctagcctatttaggttgaatgcagtggtcccctaacttcctttcatcagggattattttcatacatttgacacattcaatattaggaatagtggcttgctgcacaagtttcatatctcatactttagaattgctagtttcttccgttgaattaaaaaaacacatgttcttagtatgagggtttgtgtttatgtactgataatcagcttttaatgctaatgttaaaataattgtaaagatcctaaatttatgttttaatttatatcaaggtgcagttccaacagtaacagcgaaaatcatcggtgatgtaagttttgttacttttattggtattgtcactgtatttatttttcattttcatacagtataaatatgtgtgaactaatttgccctccttctttattatatgaaatagatttcattagctcatttaatctttgttcaggaataggattttctggctatttaaataggtcttttatgtactttaatatctttgaatgctggctatgtagttactgaaagtttttctttaattacacaaaattgaagtaaattgtacaggatttaggcctgaaagacttttggatgttttgtgatgtactcagattataaataaaatgtttatacaatgtagcttatcctccctctgacccattacagattatactgtaaaaaaaaattctttttttaacccattaatattttctgctttgtctcttaaaagaagaaaataaataatgagaaaaacttctgactggaacagtggcatttctaaggtgtttctccaggtttctgggataactttcacgttgtctttattcaagttacttaaatgatcataagtgattctgttattcctagttatcttgaatctctcaagtcctctgtgtcttaatcaggaagtaagaattctcattttaaacttagccagcattgttattgatcagcagtgtgttacaatagaaatagcatttttcttggtaaatagaaattgtgattagagacatgcagagtaatatatagttattaaaacattccttgattactattaatattttaggagtattgtatttcttatacatttggttgaatatttacttgctatgtcctccatgtaattccaatatgacatttcctttaatattataatatttcttataattacaatgagatttttaaaaatgtttttggtttctaatttgtttttttactaggcaagtactcaaacagatgccctgaaactgccaccttcccaaccttcaaggcttttgaagaacaaagctttattatgcaaacccatcacacagactaaagccacctcttgcaaaccacatacccaaaacaaagaatgccagacag

SEQ ID NO: 9135 - DNA, 2043 bp, Homo sapiens
taagatgatagcagtaatgaagagaaatggaccttgagtttcagaaacttgtattctaatggaccttcaaaagatggcaagtattgtgtctggaattggtgggttcttggtctcgctgacttcaagaatgaagccacggaccctcgcggtgagtgttacagttcttaaagatggtgtgtctagagtttgttccttcagatgttcagatgtttctggagtttcttccttctggtgggtttgtggtcttgctggcttcaggagtgaagctacagaccttcacggtgagtgttgcagctcataaaggtggcgcggacccaaagaatgagcagcagcaagatttattgcaaagagccaaagaacaaagcttccacagcgtggtaaggggacccgagtgggttgctgccgctggctcgggcagcctgcttttattcccttatctgaccccacccacagcctactgattggcccattttatggagagctgattggtccattttacagagagctgattggtccattttgacagggtgttgattggtgcgtttacaatccctgagctagacacagagtgctgattggtgtatttacaatcctctagctagatgtaaaagttctccaagtcctcactagattaactagacacagagcactgattggtgtgtttacaaaccttgagatagacacagggtgctaattggtgtatttacaatcctttagctagacataaaggttctccaagcccccaccagattagctagatacagagtgctcattggtgcatccacgaaccctgagctagacacagagtgctgattggtgcatatacagtcctccagctagacataaaagttctccaagtcgtcacctgactcaggagcccagctggcttcgcctagtggatcccgcgccagggccgtgggtggagctgcccaccagtcccgcacggcgcctgcacttctcagcccttgggcagtcaatgggactgggtgccgtggagcagggggtgatgcctgttggggaggctcggtccatgctggagcccaccgccagggggctcggccatggcgggctgcaggtcccgagccctgccccgcggggaggtggctgaggcctggcgagagttcgagtgtggcacgggcagtctggcactgctgggggatccggcgctccctggcctgggtgctaagtccctcactgcccggggccggccggcttctctgagtgtggggcctgccaagcccacgcccacccagaactttcactggcccaagagcaacgcacgcagcccgggttcccacccgtgcctctccttccacacctccccgcaagcagagggggctggctccatacttggccagcccagagaggggctcccacagtgcagcagcggactgatgggctcctcaagggtggccagagcagacgccaaggccgaggaggcgctgagagcgagcgagggccgccagcacgttgtcacctctcagtatgagtgtgttgtagtgtatgtgtgaaagggagttttgcaatgggagtatgggatgatgtgttagtcatagttctacagagaaatagactatctatctatctatatctcagagagagagagagagagagattgagtgtaaggaattggctcatgcaattatggagaccaagtgccaagatatggagacggcaagctggagactcaggagagctgtggcgtagtagtttctgtccaagtccagaggcctgagaaccaggagagccagtagtataagttctagtctgaaagctggcaggcccaagaccaagaagagcccaagtttcagtttgagtcccgaagcaggaaaagactgatattccatttcaagcagtcagacaagtcttatggcagggtcagccttttagttctcttcaggccatcaactgattggataagggcgactcacattagggagggcaatttgcttccaattcagctgtttatctcatcaaaaaacaccctcacagacacacttggaataatgtttgaccaaatgtctggacactttgtgccccagt

SEQ ID NO: 9136 - DNA, 379 bp, Homo sapiens
gcactcagagactggactgtgttagctgggaaggatcacagtctgccaggaaatcagttctcaccttccaatgggacaggatttgagggtgggagttggggtaggagaaagggagcagagaggaaaaatttgtaactgtcatgcaaaaggccagttaagagaatctcaactactctgggcaccaaagagcagcttttagtagatagttgagttggagccgggagcagcagcatcaacaacagcaacagctgaaatagcttgtgcaggacattagagctcttcatgggtagagtgcaggaaggccatgacaatggaagcagtaatagaaatcatacagggaggaaaatgatgtgcagcttaatatggtgagatgcccagt

SEQ ID NO: 9137 - DNA, 301 bp, Homo sapiens
gggccgggcgcagtggctcacgcctgtaatcccagcactttgggaggccgaggtgggcggatcacgaggtcaggagatcgagaccatggtgaaaccccgtctctactaaaaatacaaaaaaaaaattagccgggcgtgatggcggacgctgtagtcccagctacttgggaggctgaggcaggagaatggtgtgaacccaggaggtggagcttgcagtgagccgagattgcgccactgcactccagcctgggcgacagagcgagactccgtctcaaaaaaaaaaaaaagagagagaaatgat

SEQ ID NO: 9138 - DNA, 2654 bp, Homo sapiens
ccgggcatggtggtgcgcacctgtaatcccagctacccgggaggctgaggcaggagaatcacttgaacctgggaggcggatgttgcagtgagctgagatcatgccattgtactccaccctgggcaacagagcgagactccgtctcaaaaaaaagacatgagaataaaacagtttactgcatataccaaggcatatcagatgtttaggaattgcatacaattttggaacacatatcaatacaactgtaactcaaagaaagctgaacactatttcttgtctgacagtgctttccatgtttgaaatttgatttgggggaactgtatcagatatcaaaggtttaaaacactagatatggccgggcgtggtggctgacacctgtaatcccagcactttgggaggctgaggcaggcagatcacctgaggtcaggggttcgagaccagcctagctaacatggtgaaaccccatatctactaaaagtacaaaaaaattagccgggcgtggtggcatgcacctgaatgtgagctacttgggaggctgaggcaagagaatcacttgaacccaggaggaggaggttgcagtgagccaagatcacgccagtgcgctccagcatgggcgacagagcagggctcccatctaaaaaaaataaataaataaatgtaaattaaacagatatcaagataagaaaggtttgaaatgctcagtgttaaaataagatcacaggtcattgtaaaacagtcatttaaacaaagtgataagtcagtgatttttaaaaagtcaaaacctgtgctctttgattagcaggagactccatcaaagagtaagtttgaggagactgtatcaaagagtaagactccatcaaagactcacttttccaaataagacctaataaaggcagcatgagctcaagaaaatctctctctccctccttttcttttgtagtttactcaaaagtaaacaaaaccttttactatctcctgttaacactacctgaaaatcttgttcaaaagagaaaacgaaatcctacctttgtatcagtatattattaatattaaacctaattttaataaaatcttacaataaacagatccatctgagcccagtcagctttgaccagataagattttcatgaatcttttataaactcttacaattttattttttctttctccaactttttagttttagctatatcatgtaaattttgaaacaatctttaacctctaaactaggcaaaattacttttcctttagcaaaactcacaccctcctctcttttttataactttcttcaccaaaaacacatcctactttcattgtatactttgcatacaagagtgtttcccatgtatctagtacttttaattacatatattaactacgattttaactcttagtagttctaatttcaagtgaaaaacctagaaagtaagtagtagttaactggtttatgtctgtatttgtagacaaatcatttcatggtttcgtagaaagatatttctataaaatataattgatgcctacttttttgtttattaacagatctaaagattattaacagatctaaatatatttagcttttttataccatgtaaaaacaaaataccaaattatgtaaactaaactaaaacatatctaataattaatgtttttgtatcttaatgtatgtagaaatgactcaaacattttatgattatctattactttattaaacctaacatgacttcaaaactttaaactactgaaaagaattttgaaactgcaacacagatacccttcctaatgtcttcctcagtcatactgagtcgcaactacccacgtggcacccaagtatgattatgaaggggcagggcctatctgagtcctgattttacacacccataatggagcccaggacagaggacagaactgtgaagataatgtctgactcttcccaccatagccaggagacaacagccaggccagagggagtaccacatatgtctgcagtcctcacttgttagagcccagaatctaatgagtctaatacataagctcacagacaagtcaaataagcatcaaacatatcacagaagcaatagttttatgagcttcagacatctagtagagaaagcctaaacctttctgaccagcagacccaggcaaaaatgtctgattgtgtttaaaactgacaagtctgaagacattctaattttattttaccaacaattaaaaagctaattttatttctcaaagattactaaaatcacattaacttgaaaaatatttgggattattaagctatgagcattaatttgtcagtttggtaccatgtaaacaatatacaaacagatctgtacacatatatacataaaaatacaaacataagtgaagatttcatagctttgatataaaaattctagccatgagacaagtaaaactcgctattttaaaaggacattggattcaaagttcataaatagaacaagttcaagtttattgtatatgcctgaagcccttaccaagttttaaataacaagtagcaaatttatatttcaagcacagagaatttaagctttccaaaaggccaattcaattttacgttatctttggcaaaaatcatgttaacagaatccaaaacagtaaaacataaaggcctttcttctacaaaaaaaaaa

SEQ ID NO: 9139 - DNA, 2655 bp, Homo sapiens
ccgggcatggtggtgcgcacctgtaatcccagctacccgggaggctgaggcaggagaatcacttgaacctgggaggcggatgttgcagtgagctgagatcatgccattgtactccaccctgggcaacagagcgagactccgtctcaaaaaaaagacatgagaataaaacagtttactgcatataccaaggcatatcagatgtttaggaattgcatacaattttggaacacatatcaatacaactgtaactcaaagaaagctgaacactatttcttgtctgacagtgctttccatgtttgaaatttgatttgggggaactgtatcagatatcaaaggtttaaaacactagatatggccgggcgtggtggctgacacctgtaatcccagcactttgggaggctgaggcaggcagatcacctgaggtcaggggttcgagaccagcctagctaacatggtgaaaccccatatctactaaaagtacaaaaaaattagccgggcgtggtggcatgcacctgaatgtgagctacttgggaggctgaggcaagagaatcacttgaacccaggaggaggagggttgcagtgagccaagatcacgccagtgcgctccagcatgggcgacagagcagggctcccatctaaaaaaaataaataaataaatgtaaattaaacagatatcaagataagaaaggtttgaaatgctcagtgttaaaataggatcacaggtcattgtaaaacagtcatttaaacaaagtgataagtcagtgatttttaaaaagtcaaaacctgtgctctttgattagcaggagactccatcaaagagtaagtttgaggagactgtatcaaagagtaagactccatcaaagactcacttttccaaataagacctaataaaggcagcatgagctcaagaaaatctctctctccctccttttcttttgtagtttactcaaaagtaaacaaaaccttttactatctcctgttaacactacctgaaaatcttgttcaaaagagaaaacgaaatcctacctttgtatcagtatattattaatattaaacctaattttaataaaatcttacaataaacagatccatctgatcccagtcagctttgaccagataagattttcatgaatcttttataaactcttacaattttattttttctttctccaactttttagttttagctatatcatgtaaattttgaaacaatctttaacctctaaactaggcaaaattacttttcctttagcaaaactcacaccctcctctcttttttataactttcttcaccaaaaacacatcctactttcattgtatactttgcatacaagagtgtttcccatgtatctagtacttttaattacatatattaactacgattttaactcttagtagttctaatttcaagtgaaaaacctagaaagtaagtagtagttaactggtttatgtctgtatttgtagacaaatcatttcatggtttcgtagaaagatatttctataaaatataattgatgcctacttttttgtttattaacagatctaaagattattaacagatctaaatatatttagcttttttataccatgtaaaaacaaaataccaaattatgtaaactaaactaaaacatatctaataattaatgtttttgtatcttaatgtatgtagaaatgactcaaacattttatgattatctattactttattaaacctaacatgacttcaaaactttaaactactgaaaagaattttgaaactgcaacacagatacccttcctaatgtcttcctcagtcatactgagtcgcaactacccacgtggcacccaagtatgattatgaaggggcagggcctatctgagtcctgattttacacacccataatggagcccaggacagaggacagaactgtgaagataatgtctgactcttcccaccatagccaggagacaacagccaggccagagggagtaccacatatgtctgcagtcctcacttgttagagcccagaatctaatgagtctaatacataagctcacagacaagtcaaataagcatcaaacatatcacagaagcaatagttttatgagcttcagacatctagtagagaaagcctaaacctttctgaccagcagacccaggcaaaaatgtctgattgtgtttaaaactgacaagtctgaagacattctaattttattttaccaacaattaaaaagctaattttatttctcaaagattactaaaatcacattaacttgaaaaatatttgggattattaagctatgagcattaatttgtcagtttggtaccatgtaaacaatatacaaacagatctgtacacatatatacataaaaatacaaacataagtgaagatttcatagctttgatataaaaattctagccatgagacaagtaaaactcgctattttaaaaggacattggattcaaagttcataaatagaacaagttcaagtttattgtatatgcctgaagcccttaccaagttttaaataacaagtagcaaatttatatttcaagcacagagaatttaagctttccaaaaggccaattcaattttacgttatctttggcaaaaatcatgttaacagaatccaaaagagtaaaacataaaggcctttcttctacaaaaaaaaaa

SEQ ID NO: 9140 - DNA, 463 bp, Homo sapiens
cataaaataagaatattcacaaatagttcccaaattctggagaaaatcaggtaaagaggaaggtaaatgtttcacttttccccacaaaagtatactttacctaattgctatgagctataaatggctcaaaaaaaatgtggactctggcaaaacaaatatgagaagaatcaacaatgtttcaaacaaaaagtgattaaaaaatcatttcagtcctctatcagttcagtcccatgtaattaattcctgttctgtttcatgttggcttagcaatcttcattaacacatcagttttttattcgaattttggaaatttttacctagtccaatggtatcatctccatagttatctgaaacctgtattcaagaatacttgaatatggtacaaactcgtattcaaagtcctttccacgaatttctttgaagacacacattttaggatttggagggaaacaaagctcttaaa

SEQ ID NO: 9141 - DNA, 157 bp, Homo sapiens
aggctagctatgtgtatatatatagctatgtgtatatatatatatgtatatatatatagctatgtgtatatatatatgtatatatatatagatagcctgaatgtcagcttttaattaagctaatttctggctatagacctctttcaaagaaaaaaaa

SEQ ID NO: 9142 - DNA, 463 bp, Homo sapiens; identical to SEQ ID NO: 9140

SEQ ID NO: 9143 - DNA, 157 bp, Homo sapiens; identical to SEQ ID NO: 9141

SEQ ID NO: 9144 - DNA, 184 bp, Homo sapiens; identical to SEQ ID NO: 5421

SEQ ID NO: 9145 - DNA, 147 bp, Homo sapiens; identical to SEQ ID NO: 5241

SEQ ID NO: 9146 - DNA, 143 bp, Homo sapiens; identical to SEQ ID NO: 5446

SEQ ID NO: 9147 - DNA, 170 bp, Homo sapiens; identical to SEQ ID NO: 5447

SEQ ID NO: 9148 - DNA, 171 bp, Homo sapiens; identical to SEQ ID NO: 5452

SEQ ID NO: 9149 - DNA, 141 bp, Homo sapiens; identical to SEQ ID NO: 5242

SEQ ID NO: 9150 - DNA, 162 bp, Homo sapiens; identical to SEQ ID NO: 5244

SEQ ID NO: 9151 - DNA, 193 bp, Homo sapiens; identical to SEQ ID NO: 5245

SEQ ID NO: 9152 - DNA, 98 bp, Homo sapiens
tgtgaacctgggaggtggagcttgcagtgagcggagatcgtgccactgcactccagcctgggtgacagagtgagactccatctcaaaaaaaaaaaagg

SEQ ID NO: 9153 - DNA, 153 bp, Homo sapiens; identical to SEQ ID NO: 5246

SEQ ID NO: 9154 - DNA, 202 bp, Homo sapiens; identical to SEQ ID NO: 5516

SEQ ID NO: 9155 - DNA, 166 bp, Homo sapiens; identical to SEQ ID NO: 5519

SEQ ID NO: 9156 - DNA, 190 bp, Homo sapiens; identical to SEQ ID NO: 5523

SEQ ID NO: 9157 - DNA, 193 bp, Homo sapiens; identical to SEQ ID NO: 5539

SEQ ID NO: 9158 - DNA, 195 bp, Homo sapiens; identical to SEQ ID NO: 5540

SEQ ID NO: 9159 - DNA, 2884 bp, Homo sapiens
gaggatgactcgtacgatgacgagatgctgtcagccattgaggggctcagctccacgaggtgaggtctgagacctctgtccacccccctctcctctccccctcggataggggtcccctatatgggcaggcccatctcataccccatgcctggtggcccagccttgttccttccccctgcctgctgccacctcctgagggaatggaccccttcccagcccccatctcaccgcagctgcccccgcccacaggccctgctgctccaagtccgatgacttctacacctttgggtccatcttcctggagaagggctttgagcgcgaggtgagggcccccagcagcctcctccgcagagggacggggtctccaggcctggggtagggtgggggacgcaggtcatggggcagcctgcgttcccaagaccggctaggggaggggcactgagaatccacagctgctcctgggcggggggcaggggcggggccagtgcagcaccagcctggctctctcctgtcggcttcattccatgacccaaatgcaccatcagagatttgcctccatgggtctgcaagacttttgctccgtccagtgccaaagccttagcagatcctggcatggatgcctcaggctgatgggcaccggccttgcaatgagacgagaacccaaagctcagttatcagtgtcctgtcttgctgctatgagctttttgtactgataacgaccatttctttactgagcgccttctgggttctggcagcatcctcggcacccacattatataatttaaccgtcacaacggccagcccaggggtgctgctataccacttcacagagaggaaactggctctcagaggcttcagagcctgtccccagcttcaggtgtggctccctgagttgggggcttcctaggtgaggtcacgaggaaacctgctggccaagtgacctggcagggtgtggccagtgtggccagggccgccgagcctgctttccttccctgcagcaggaacccttctggggctgtgatcctgcgatggtgcctgggtgggagtgggggtggggggcgggatggtctccctacctgccagcttcttggtttgaggtgaggacagccccggaagctcagacttggctcctgtccatgtacttggggccatgagctctgcagggaccttggaaagagagagacgggtggtgtagggcaggggaaggcattgtcttcaaacaggaaaaagctgagaatggaaacaggcgaaacttaccaagtgtaacatcacctggaactgaaggagggtgggaaggttttaattattttaaaaatagagatggggactcactatgttgcccaggctggtctcaaactactgggctcaagtgaacctccttcctcggctcccaaagtgctgggattacaagcgtgagccactgtcccagcagggaggtgttttttttaaagctgattcactggaggcagggtgggcaagtggcactgctggtggccacccctcacagtccctgctgcccccagtaccgcctggcacccatcccccgggcccgccacgactttgcctgcgccagcctgatcttcgtctgcatcctgctcgtccatgtcctgctcatgcccaggtcagttgcagggaggggtgtgggggtccggcctgctgggatccaggctggaaggtgactatgaacctgcaaggagctgtgtgatttgggctggaaggggtcggctgctggggtcctagcaactggaccaggggctgtggcagcacaccttgagttaccaacacttctttttaatagaatgtgtgttttctgccacaggcctccctactccctaacgtctctctcctcagccacctgtcatatgtgtggcctgcatgcattttggttgacagcccttgccttaggtgtttggagtgctaggaggatagactctgaaaactgtaggcgccatcctttttctcttatatatagggaaattggggcacagaggattaatgatttatccaaaactcactgagattcatgcttctggctctagggccctgctggtggggtatagggatgagggtgaagtcagagggaagggggatctaaggtcagctacttggtgctttctagaagagcagttaggccgaagcatcgaccaggattgtggttttggctatgcttactaaagacataatagggaggctgtgcgtggtgactcacgcctgtaatcccagcactttgggaggctgcggggcgaatcactcgaggtcaggggtttgagaccagcctggccaacatggtgaaaccccgtctctaccaaaaatacaaaaattagctgggcgtggtggctggcgcctgtaatcccagctactcgggaggctgaggcaggagaatggtgtgaacctgggaggcggaggttgcagtgagccgagatcatgccactgcactccagcctgggtgacagagtgagactccatctcaaaaaaaaaaaaaaaaaaaaacgaagaaagatgtaatagggaatgcgtttttacagttttttctgagtctaaaggctgcagagacattgctcatttcttatacacttggaccaaaaagagtgatatggtcttgacctcaatcttcataatctagctgggccctgtgtattgcccatggggcagctgggccacagttttcacaggtcccctttgctgtgggcagaataccaggtagggtggggacaggtggctgtgagccagaggattggtgggggcggtggtcctgggcagaaggccctaggcagaactgaggttcttccctcctctccaggacggcggcactgggtgtgtccttcgggctggtggcctgtgtactggggctggtgctgggcctgtgctttgccaccaagttctc

SEQ ID NO: 9160 - DNA, 136 bp, Homo sapiens; identical to SEQ ID NO: 5560

SEQ ID NO: 9161 - DNA, 202 bp, Homo sapiens; identical to SEQ ID NO: 5567

SEQ ID NO: 9162 - DNA, 153 bp, Homo sapiens; identical to SEQ ID NO: 5573

SEQ ID NO: 9163 - DNA, 150 bp, Homo sapiens; identical to SEQ ID NO: 5248

SEQ ID NO: 9164 - DNA, 142 bp, Homo sapiens; identical to SEQ ID NO: 5249

SEQ ID NO: 9165 - DNA, 181 bp, Homo sapiens; identical to SEQ ID NO: 5586

SEQ ID NO: 9166 - DNA, 147 bp, Homo sapiens
acgcctgtaagcccagctactcaggaggctgaggcaggagaatcgcttgaacccgggaggcggaggttgcagtgagctgagatcgtgccactgcactccagcctgggtgacagagtgagactccatctcaaaaaataaaaataaaaa

SEQ ID NO: 9167 - DNA, 166 bp, Homo sapiens; identical to SEQ ID NO: 5608

SEQ ID NO: 9168 - DNA, 268 bp, Homo sapiens; identical to SEQ ID NO: 5616

SEQ ID NO: 9169 - DNA, 368 bp, Homo sapiens; identical to SEQ ID NO: 5252

SEQ ID NO: 9170 - DNA, 2893 bp, Homo sapiens
caggttaccgaggagacctgcaccatcctccagggcctcgggtactcttgtgaatgccgtggcctgatcaacgtcaaaggcaaaggcgagctgaggacttactttgtctgtacggacactgccaagtttcaggggctggggctgaactgagggctcctgctggattccgaaaaggccgggaagccagtctccttccctgaagcaagcccaggagaagactctccgccccacgccaatcccaaaggcatgcagatggctgtgcatgttggcttctttggacctgcactggaggatttctcagacacatgcaccagattctggctcgaagcagccactgagccataatgcgcaggggaggccagaagctctgtgcctggtctgtaacagtttccaggccagctggagaatgttcactggttcggggctgactttgagatctttgttccctgaggtgccaggcaggcaactttagcacatgatgaaaacagacttccacctcagtggcctgtgggcacgcacaagtgaggtctgtttttctagacaccaagggggagtaagctgagctgtctagcacggattggagactccctctccctggtgggcctggcaatgacagcatttctcacagaggcattctggtaaatgaagctgaaaggggtgttttacatctgtaaacggtttcaaacaggtagagagaaaaacaccacaattaacactgttactttttgccttgtctggcatgtttgttttaaatgaatacattaatggggtttttatccttttgaatgacttttcagacactagacataaatctcttccctccagtgtatgctctgcctttttaaccactgacatgtaaggaggactactgtctagcatcagcttatggggtcagctggctgtggggatagagtcctgaggaatgtggtcacagcaagaagacggtgagcagcagagctttgcctttgaatgaggcagcttgtgaggcaagcattctggagagaggtgctttgaaagtaaggtgcggcctttcacctcttccttgattactcacacatctttgcgttctcccctgccgtccttcaactgtatcttacttttcttaccagaaaggaatggagtctgtttagagacaacttggacaacctgtgagtgcatctcttctttcctttagtcttcacagctaactctggagagcttcaaaactagaaggatctactccgcatgggtgcatgcagaggctcctggatctgggaagcccgccccctcacaaatgctgagccgttcttgctctgaaactgcgtgagtcaaggcaaatgcaaaaagccaggttttggggatgtgtcttactgtgcttcaacttcccaaggaattgaaagtcaacctaactgtaacaacagggtgagaaatgaccaaactgcccgtgactttttctgaatggacttcataaccggaagacttaaccggtggcctcatcaccagagcatcgccaggatttctaatgcactcagtttccctacatagcagggattcttagctaggtgtccccatgaaccccgtaaagttctacacaaagtcttgcatacaggagcctttacaagatgattatacagggttgcagattgggtgactgaccagacttgttggggtcctgggatgagttgccccgggctgcaaattaagagtacagctaagtgcgggggtggcggtggagggaacgaaaattgaacctgtctgcctgtgctgtgtcgtgtggctttatcagcccgaggaagggcaggtgtattctaatttgcacaaaggtgctgggtagactagtggcagctctcatgtgctgcacataagtggaatcagtatgaatagaagaacttgctgtataaaggaatttcatggcaacaatgctggtaagggcaattagcctcgcttaagttgccttttttacacaccaaaactttttacatgaagggctggtttcacatgaatactatactgaaatctgtgctctcaagatctagcagtgaccagggctgcccggcgggggctctcctggcaagtcaggaaggtttctgttgctaatataacatagaaacacattagtgcactgggcctctctgaggtcagcatatttgtactcttggaatatttgtttttttcttcagtaacaacagaaaccccagttgggagtttaacaaataactgactaccactcactcatgcatttttatttccaattaaagcaaagcactgtgctgtgctcagataataatagtttgtaagtaaaagtttttagttttcagtgttcaggttatagaatataactgaccataaaaattacctgcaggtattttctttttatgaacttgtttttaaattaccaagtaattactggtgtcattttgttttatgacagacacacgtatctaacaaacaaacaaacagtgaccttctccatgggtcaaggacttccttacaatttctcctgagttaacttttgtgaaaataatacctaaggttttctggcttattgaggaaatttcctaacaaacaaacaaacaaacaaacagaagagaagatcattaaccactgtatactttgtgtatataataggtcagtgtaaagaaatatgatttgaggtggtgcatgcaagtaactagggtttattctatataatgaatatttatagatctgtaacatttgtttcaaaatgctgtttcatttttataaagtaccagtgtttagctgctttttatacattaaattagcaatttgaaaaactcaaatatctgaaggtattttattttcgtggtcctcatgaactcactagagattaaaagtagactcaaacaacttgaaaatttgactcttttagcataagattttaagtcttttcagg

SEQ ID NO: 9171 - DNA, 1548 bp, Homo sapiens; identical to SEQ ID NO: 5628

SEQ ID NO: 9172 - DNA, 4704 bp, Homo sapiens; identical to SEQ ID NO: 5253

SEQ ID NO: 9173 - DNA, 1494 bp, Homo sapiens
gcctttgattccttccctctgaagacagacaaaatcctgacttaggcagtattttttaaaataccaagggtctcggaaacctagggttttataagtaagaggaacagatcaaattctaaatctcctttgtccacattgtcattctccagcttgttgttcttttcagtggtgaggtaagaatataactcctacttaatgttcctgttccttaggtgaaacactaccaccttttgttcaaaagttagatgctggggttgttgctgttgttgttttcttcttttcttcctttactttttagattttgatggagacgtggtaggaagtctgggctgggaaatgaggtgaaaaagaaaagcaattagtttgtctttatacaaaataaaaccttctaaaaaaccttattatcacaaaaaagagctctacaaatctagatagttgttttgaagaagagaagagaattgtgaaaaacatgtataatttgggagggctgggcacagtggcttatgcctgtaatcccagcactttgggatgctgaggcaggcagatcacctgagatcaggagtttgagaccagcctggccaacataatgaaaccctgtctctactaaaaatacaaaacattagctgggtgtggtaacacacgtctgtggtctcagctactttggaggctgaggcacgagaatcgcttgaacccaggaggcagaggttgcagttagctgagattgtgccactgcactccagctttggtgatagaacgagattccatctcaaagctaaacaacaacaacaacaacaataacaacaacaaaaacatgtataactgggaaaaaactgaaagagaatgcaggatcataaaaatatagcaaacaaagtgagtgggatttaaaattagtggaataagaaataatgggtaacaatgaagaacataatttaggtaatagtatagtatcttgggagccctcctggaagtatctagttatggacagtgagcagcagaaacaggatgtaactcaattcagcatacttgatggttgtggtaaccctagaaaatgactccaggaaataggtgagaatccaatcagattgagaggctaatgttcatgacaggggtgccctagcagacaggcaaagctgaatagaaattcaggaggagaggaattttggctatttagtaaaattatgagcagttggtcataggcaaattttatgagtaggtagcccttctgaagtcttaggcatataattaacctaggttggaattataattagacatgaaagtttaaacttttttatctgaaccgagatgcaaaagtaaattggttctgtgttctggagaattgtaaaagaattccttaattccttagcaaaatttggaagtcagtatcaagtggtgaggataggaaagttgaagagactgtggaccaggcaagaccttatcagttgatttaggaagcagcagtgacagaggccagacaggtaacaagagaaaagagaa

SEQ ID NO: 9174 - DNA, 2122 bp, Homo sapiens
gcggccgccgagggccggcgactcccggggcaccgggcggctcctggccgcgggctctgcgtcttccccgcgggcgccaggcggctctcggcgggctggccggttccacgccgccagccagccccgtgtggggacttcggtctagtatttggacccgaggagataattctgtgtggaaaattctctcccttcggttggaaacagtaacaaactggaaacggatgaggtgttatggacgtgcttggaaatgcaagaaaccttcagattacgagctgttgacgggaccagttgtatttcacgtttttcgaattaagctcagaatcagttttcagaatgacatgtgatgcgtggtgcgtggtgtgtgtgcctgtgtgtgtgtatggatataattcattcatttttgtggcgtcagaaaggttatgtcgagcgttgtagcggcttcttaatttacattcacggcatacaactgaagaggagccattatttattttttttcctagcatttgctgcgactacacactgccggagcgtttggaaatgttgtttgctgttaccctgtatttgtctataaaattcttactgtagggaatggccaagtggaccatcagttcgtcctgagatcttctcatgtctctcacgtctttgaaaatggcctgtgaacagactgcatcatatgtaggatgtctggcaaaatagtgtacagcgttcttttctcaaatgagaggaaatgtgtaccttttcgccgcgttgtgacaatgtaaatgttaagaattagtctaaagatgaaaattctttggccaaaacaagataagccttatcgatatgaaaactggaaaacatcacatgggactggaaatcctgtgagtgggtgctcatgacggaaaccctgacagaccttggattccagcatcgctggtgaaaatcagaccttatcatggataagggttaagatgtaaggtgtctcacccagacgccatctgttccagctgtcaatgcagaagccaggaaaggagagagagctggccagggagaattccagctttttttttttttttttttttttttttttgagacattcatgtgaatttctctgcgaggggaaagaagaccaattattttccttggatgctgtcccttcttttggaattaataagatggcttcactcagtgagaggctgtaaagacatttcactggaaacaggcagtaacagtggccagttgtttctgttaataccatcaaaatatccctactcttgtttgtgccttgaagaaagtccttcatttaactgagacatctgagcctgcgttgcggattctgattctctaaatactcctgcaagaatccctttaatttttcactgtgcaactcaagaaggacctttctagggtattgtcaggatacgtatgctaatgatattgtcaggttaggtgagaatgattgatcactcccttaaaatccttttttatgatgttaaagctgtactttaagaaagataaaactgccactgtggcgttgcaagtctgagctagctcaagcaaacaaaggaaattgcgttaaatttgcccaactctattttctcatcttcatatagcaagactctccaaacagcaagtgatctaacctatcaagtattatgcaatagctgaatttccttgcaatggtcagtttaaagaactgttaacttagcagaggcgacgtctcgtggccaaggcccttagggtccactccatggaatcaggaccccttgctgctgctttgcgagtgttcatggaggaagaaaaatcacttggtgttctttttttgcatggaagagtcataataactgacttcagatacagagaaagtgggaagagtgagaaagaaggaggtgaggccagaggatttggaaggctaccagagagaagcagccgaggcctgattgtggaaatgatgcttagacttgctttcagcaggagtgatgaagccagaatgagggaggcccagacgcccgggagaggtacaggggataggtgccatgtggtttgcaccaccgcagcaggctttgggtcccaaagacgcgaatggaaatagaagaaaatgcagttttaaatagaaaagaaaaaaaaaaccgagaaaatgtta

SEQ ID NO: 9175 - DNA, 669 bp, Homo sapiens
ggcccctgtgcacagtgaagggacatgccagaaaccagcagatacttgactgagacagaccaggacaggagcttgtggcaggaaggataaggaaaaatgcaaatctaccatcctgccctcagggtgctaacccttcgggggagaatactttctcccaccaggaagaaaccagaaagtaaaaatgtaggatgaaatgaattagtggattgtgtagaattctggaagcgtggtgggaatccaccataagggaaagagaaagtcttctgggaagcggcgttgagttgaggcccagtgtcaggaaagctctggtatagtggggccatctggtccctcttacagggccccctcccactttgttttggtaagatgggatctgacggcttgccatcctgtcactccttgccagtagatgcagtgctggccatgctgctggtcattgggtttccagttgggaagttgcatgtgctggcctttggctcttgccaggcagggccttttgtgactgggagctcatgtgggtcatgcatactgtactgtgaagggcatggtctgtggaggggaacagagcagcaggccctaacctgggtggcaccactttgctgtccctaccatttttcattgcaggttgaaagtctccaaagtggcaggggaaggggtgtaaatgttaaa

SEQ ID NO: 9176 - DNA, 19436 bp, Homo sapiens
gcgcgcaggcggctggctctgggcgcgcgccagcaaatccactcctggagcccgcggaccccgagcacgcgcctgacagcccctgctggcccggcgcgcggcgtcgccaggccagctatggcccccgacccggtggccgccgagaccgcggctcagggacctaccccgcgctacttcacctgggacgaggtggcccagcgctcagggtgcgaggagcggtggctagtgatcgaccgtaaggtgtacaacatcagcgagttcacccgccggcatccagggggctcccgggtcatcagccactacgccgggcaggatgccacggtgagcgcagccaggcgggggcacaggagagggcgggaccggaggctgagtgcaggggagacagagttacgcactccgagccaaacaccgactaattcggaggaaagcccggaggcgcctgatcatacctgttgcccggtgattgggtgtcctgcggatgcgggatgaaaaggcgggagagaggcctggagaagtggagtctggggagtggggatggaggccaacaacacgcacacacaaacaaagggtcccgcctccctgccgtgcattccatctgcagccccgagcctcaggtctctgggcggggacagaaccccgagctgggtaggctaggagggaggagagcaaggatgcaggccgcctggggagggagggggtcagtggccaggggagggagtcacatcctgtctcgatggctaggagaggcagcgcagccgcgtctggacctaggtgccggtctccactcgccagcaggagcggagagggagcaggaaaggagcccattctcgaggatggggctgaaacgggaagcttggggagaccgctgccttggggacccctgcgtcgtgtgaagactggaggacgcggaagggacagcgctggccggggagggcaagcggccgctggcgtacataagggattgggaatggcatacacttagcgaggacccccagagctgttctcgaatcgccggggaggccactgagccgcaggccagcgaggtcttcagctattccgcggagcggaccgctgtttacgctctggggcggtaggcccttcgcggggtcctgtcccttcttcccttggtctcactgcggggtcggcgcgcgccccagccccaggcctgctgcttccctttctagaccacagccctcagagctaaggccccggcgcctctctgctgggttggagtcctggggactcagtcctagggactcgaaagtcggggcgttcccttcaccgcgtttcccccttggcggccagaatggcgtcccctccccttgcatccccctctgatcccgtgccctgcagcgtgatgccctccactgtccctatccactaccctggcgtcccagagtgtgccgcgggtcaccaggttcccataacgtcgcagcagagcttagacgctgcggggcgaagacccgccccaccctctgacgcgaccagcctagtgggcgaggccagagcttgcgcgggtcaaccagagtgaccactcgggagccctgactgcggccaagggcgcaggcgtgtcccggcgcatgcgcagacgaaacaggcaccaacgctggagcttcccgcagtgtgatttggggccgggaatgccgcggcggggacggcgattggtccgtatgtgtggtgccaccggccgccggctccgccccggcccccgccccacacgccgcatcacttacagggcccggggctgccggacctgccaacgtgaatcttatcgccatggaccttaccttgcacaacccaaagtagctgccttggggcagggggtggccagagtgcttagggaaatgtggagccctacccagaacaacggtggagggaaagggaagaaacgcagaagtgccccagttcggacgtagggaagtcttcctcttcgtggtttttggagaaccctagctaagagaggaaagggacttattgaaagacccgcaagaagggacggaagtctcatagccctgagaggtgaagccagctggagttgatgggtcgaatggggacctagagaacttttctgtatctagaggtttgtaaaatgcaccaatcagtgctctgtaaaaacgcaccaattggcgctctgtagctagctagaggtttgtaaaatgagccaatcagcaggacgtgggcagggacaactaagacaataaaagctggccaccccagccagctgctgcaacccgctccagttcccttacaggctgtggaagcattgttcttttgctcgtcacactaaaccttgctgctgctcattctttgggtctgcaaagagtgttattcctttaagagctataacagcgggaaggtccacggctccattcttgaagtcagtgagaccatacccgccggaaggaaccaacgcccgacacagccccacccatctctcctgtttctcacctatactgaaattcttgggcaaaagctgtctgtggacacacccaggggaaaggccagcccaggcaggtgtttcttagtggttcccctcagccaatgcttcccattccttgatgcatccttctaactagagcagatactcggtgatcttaaactgtggacacctgggagcaccctcaaaaggcagctgggcctagggagatggcctgtgcttctgtgtcaggagttggttccttcaggtgggctcgtggtctcgctgacgtcaagaatgaagccatgaaccttcgcggtgagtgttacagctcttacaggtggcgtggacccaaagagtgagcagcagcaagatttattgtgaagagcaaagaacaaagcttccacagcgtggaagggtacccgagcaggttgccgctgctggacgttggggggtgtgagggggagcagccttttttttttttttttttttttgagacggagtctccctgtcgcccaggctggagtgcagtggcgcgatctcggctcactgcaggctccgccctcccccggggttcacgccattctcctgcctcagcctcccgagtagctgggactacaggcgcccgctacctcgcccggctaattttttgtatttttagtagagacggggtttcactgtgttagccaggatggtctcgatctcctgacctcgtgatccacccgccttggcctcccaaagtgctgggattacaggcgtgagccaccgcgcccggccgggagcagcttttattcccttatttgtccctgcccatgtcctgctgatttgtccattttatagagcactgattggtccattttacagggtgctgattggtccattttacctctagctagctaaagagcacggattggtgcattttacaaacctctagctacagaaaagttctccaagtctgcactcgacccaggaagtccatctggcttcacctctcacttcaacttgggtacagccttctggcgggcaggaggatggcctttggtgcgaacactgccggagtccagggggctggctccctcacctttcatcttctcccggcacttgcaggatccctttgtggccttccacatcaacaagggccttgtgaagaagtatatgaactctctcctgattggagaactgtctccagagcagcccagctttgagcccaccaagaatgtaagaccctgtgtttgctatgtcgcaactattggttgttgagggggacagagagggggtggaaggagagtctagatgggatcacagtcatagtaatcacagtcagtagtagctctggggagtcttgaggtccctgcttctcttgcatagtcatgaggtcacaggcccaagggagcatggctttgcaacctatggctcccccaaggctgccactaccatggctgccatcattgttatcatcattgttatcatatgagcacttactatgcaccaagcataaactcataactcttacacatttacagatgagataacaggctcagggaggttaagcaacacagccaaggatcacacagttagtaaatggcagagcaaggacttagtcccctgaactcttaggcactatcccatggcacctcctcctgtcatcctcattgtcgtggtatctttgcctaggactgtggacttcccacagctacctcagtgggaggtccttgagcctgagagggcccttgtctccagtagcattggggtgcagatgagaagaataacagctcctcttcctcttctgcagaaagagctgacagatgagttccgggagctgcgggccacagtggagcggatggggctcatgaaggccaaccatgtcttcttcctgctgtacctgctgcacatcttgctgctggatggtgcagcctggctcaccctttgggtctttgggacgtcctttttgcccttcctcctctgtgcggtgctgctcagtgcagttcaggtgagagcctttggcttgtcaagtgcacagcaatgctcagcatccctggggaaagctccttgggtgtttgaggaaggccaagagtgcctgccctccaagcagggcagatctgaaggtatgcaggagtgagtgcaggaacatgcattctgctgtcttgacctgtctgctctttagccacatggacatcttcatttctctcactgcctttttagctgcttctccaagggttctcttcttcctatgcggtttgttctctgccacagcccacctgtgccaggagccaagtttctggtttcttagcaaagcttggctccctccccaccactgacattgcccaatatgttaataatgattgagcgctaattcttgactgtcaggacccatttggcaagccttctgctcatgtttcagtcctttctgtattctagatgtcagtccatcataagtcatgagcttcaggccaggtgtggtgactcatgtctgtaatcctagcactttgggaggccaaggtggccggatcacttgatctcagttcaagaccagcctggccaacgtggtgaaacctctactaaaaatacaaaaaggccaggcacagtggctcacgcctgtaataccagtaccttgggaggccaagatgggcagatcatttgaggtgaggagttcaagaccacctggccaacatggtgaaaccccgtctctattaaaatacaacagttagctgggagtggtggtgggtgcctgtaatcccagctacatgggaggctgaggcaggagaattgcttgaacctgggaagcgaaggttgcagtgagccgagttggcaccattgcactccagcctgggcaacagagcgacactctcaaaacaggccaggtatggtggctcacgcctgttatcccagcagtttgggaggccaaggtgggcagatcacctgaggtcaggagttcgagaccagcctggctaacatggtgaaacctcgactcttactaaaaatacaaaaaaatcagccaggcttggtggcgggcacctgtaatcccagctacttgggaggctgaggcaggagaattacttgaacccaggaggcggaggttgcagtgatctgaaaccgcaccattgcactccagcctgggcaacaagaacaaaactgtctcaaaaaaaaaaagtcatgagcttcggagctggcgaaacagaagaacagagaagggatggtgatttgccccaactcacgtgtgagtcagtggcagaggcagaactaggacccatgtttcctgactcctgaggtgcatcacaggccttggcagatgaaggaagtgggagaggctgaaggaggcatcgaggtcagtgaaggcgacactggggctggtgggctgctctcagtgttgactcttctcacctaggcccaggctggctggctgcagcatgactttgggcacctgtcggtcttcagcacctcaaagtggaaccatctgctacatcattttgtgattggccacctgaaggtcagtgggatggggaggagctctctaaaactccaggcaatgaagggctgccttgggggaagcttttcatactcgtgtccctgcttttctgtagggggcccccgccagttggtggaaccacatgcacttccagcaccatgccaagcccaactgcttccgcaaagacccagacatcaacatgcatcccttcttctttgccttggggaagatcctctctgtggaggtgcgtggaggtatcagtggaaaggtcttggggaataggaggcagccaacataggggagttggggaagatgcccacgatgttgtcagtgtgggcaagacactggggctgggctggctggggcttttgccattttggaagttctggaaggcaacaggcaatagatgggggctgcccaggagggagtcaccatcctccctagagagttcagtcagcaaaccgttactgcataaaaggcacctcattttgcaaaggatccagcggatgaccagaaggatccaaatgatgagatagcctatccttgaaggtgctgatggcacctcctggaggtgcttttttgacactcttgccccaggcaagtattccccttgcactttgtatttctctcccacacttaggtatccttcttgtcacagtcttctctgtccagggctggactgtcttactcttctttcatgtccaatatctggaacattcattcactgagtacttcttcccaccctgctgatccccagcctgatttcctgggtggtcagcgttgggtttgagatgtcgtctgaagttgtaagcagaaataatgtagctgctgaaggaataatgcctgggggtggagatctggtgagcttttagtgagcattaggcaatggaaggttctaaaaggccagcagaattctttgaaaagttcatttaaagccctttgtcccaaggctgtaggctgcagagttcttccaggtccacctcctccactttgtgacatttcagcttgcgaggaattaaattgtcgttaaaacacatttcagttctaggcatgagttcaaggtagcctggcgttcctctcgcccctggccatgagaactttgaaagggctttggcagcactggttggcctggcatgaggagctcatagcttgaggctcatgccccacctgtccataatgttcttattttcccatcatgagcatggacttgggtttgttacatgtccgataccattatggtcagtactatgcagatgacgaagcagccctgtcccccgtctgactcccatggctgcttcaagggcagtgtggttatttgctgggcagtggcatggggcttgtgcatttctactgtcactacagagggtttaaaaaaaagacatgggcaggttaagtggaagggaacagtctcacaccactacctttattgcttcttggtacttgggttttcaggaaattcctatcagcagacatcaaaaacagagaatgaagggacgcagttggcatgtgcctgtggtcccagctacttgggaggctgaggtgggagcatcgcttgagcccaggaggtgaaggctgcagtgagtatgatcacgccactgcactccagcctgggtaacagcgcaaccctgtgtgtaaaaataataattttttaaaaagattaaaaccaaaaaaaaattgtaaacagagttcaacgtaacttacagattaaaaacagtaaaatatgacagaaactgagaggtagtcatgatcagatatggcctccttcgggtgccgacatctgaactgagacctgaatgatgaaaagggccaacactgcaaaaattcagggaaggaacatttggaacagagagaacagtcaagtacagaggctcccggatgttcagggacagtaagcaatgagagaatgagaagaccagaaaactagggaggggccagatcatgtagggccttagaaagccatggtaagggtgtggtaagaagtttgggttttattccaatagcaatggggagtcacaggagggtttctggtgggtacagcaatctgctttgcactttaaaaggcttgctctggctggaggtggagaggatgaattatagagggtaggtataatcacagatataacctcagtgaggcggctggagcgagtccagaccagaccacggaggagcaggtgaagccaatggatttgggatatgttttggaggcagtgtaagcaacgcttgctgaggacctggatgtggtggtgagaatcaccccatctcgagcaacattaactgaggaaaaaattgaaaaaggggcgcccttgcttgggggcttcctattgtggaactgttatggaaaggagccccatccattgcttcctccttgaatggcaaatgcctttatgatccctataacttgtcccattatgtttagacccttggtggtcagaagggttctatttagggcagtgtcccctgcccctccttgtcctccaaaaattttgggaggcactgacgtggatgtcatggggtcagcacaggcatcaacatccccagagggatggaaccaagcagcctattgcccaggcattcactaacaggcagcccatcctcagcctcatagctggccggggagaagaaaggctattttgggtcccagatctttttttttttttttgagacagagtctcgctctgtcacccaggctgaagtgcaatggtgcggtctcagctcactacaacctccgcctcccgagttcaagagattctcctgcctcagcctcctgagtagctgggactacaggtgcgtaccaccaagcctggctaatttttgtgcttttagtagggacgtggtttcaccatgttgcccaggttggtctcaaactcctgggctcatgcagtccgcctacctcagcctcccaaagtgctgggattacaggcatgagccactgcacccggtctctgtttacaaatttatcaccagcttcatcccctaaggttataagctccatgagggtgggaagtctgtattgttcacctctgtatcctaagcatctagaacatagcccggcacacagtaggtgctgaagaacttgaatctgttaatgtagaaaggatgtttcatctagctgaagtgtcttgtacagaataaactctcaataaatgaactgtggacacatggaagggtgagctagagctctgctcaggggttgagtgctcctcttgtgcccttgtggttgtctggttacctgaactaattggagtgcgatgcagacatagtcatggagtgagacagcagaactttgctgtcttgtttgtgagcccacatcaggggttctagactggctggttgacatggtggccccagcctgtctcttcagcagctcggcttataaaaaataaccaccacctactggggaaaactgctggaaccttcagattgccaaattgttcttggtgtcttttccagaaatatttgccaaactcgaattagccttcaggagatttgataaagctcatgtttaagtcaagagaccaaaagattttgatggggagaattaggggctggatatagagggaatacttaacctgtataggggcagatatggttgtccatggagattctggtgtgaaaaagtacgatggcggccgggcgcactgcctcacacctgtaatcccagcactctgggaggctgaggtgggtggatcacctgaggttgggagttcaagaccagcctgaacaacatggagaaaccccatctctactaaaaatacaaaattagctgggcgtggaggcacatgcctgtaatcctagctacttgggaggctgaggcaggagaatcgcttgaacccagggaggcagaagttgtggtaagccaagatcgtgccattgcactccagcctgggcaacaagagcgagactccgtctaaaaaataaacaaaaaagtacgatgggagaaaggggagagggcagtggggcctggaaacctcatgacaaagagaatgaacacaagagggcctgtggtcctgtagactctgtgctgtgcacatccctcatgtgagcatgggccatccagctgcaggccatggtgtgacacactctgcagattacagtctagggcttcatgttccatgtgctggaggtaaggctgggcctcttggagctttccaatagcaccaacaagctgtcagccctggaggaggcctaaacctccaagcaaggaaaggtcaagtcacagagggaggaatcactggtctccgaatgctcatgtgtttgcttttcttcacagcttgggaaacagaagaaaaaatatatgccgtacaaccaccagcacaaatacttcttcctaagtgagtgtccccatccaacacaggggagctgcctcaggagggaatgctgagggaatgaggaggatgtggctgtccaagggattatggtattttaaggaaaggggctagaggaagtaccccactcccacccccagttactccctgcatgacagcagtttgccatctcagctgagcgaagtgaagttaggctgatgattggttgaaggcaaactagttcttcccatccaaccccagtttccactgggaagctgggtgtttggggtgtagaggggcctcttgctttatcctcaaccttatctttttttttttttttttgagacggagtcttgctctgtcgcccaggccggactgcggactgcagtggcgcaatctcggctcactgcaagctctccgcttcccgggttcacgccattctcctgcctcagcctcccgagtagctgggattacaggcacccgccaccgcgcccggctaattttttgtatttttagtagagacggggtttcaccttgttagccaggatggtctcgatctcctgacctcatgatccacccgcctcggcctcccaaagtgctgggattacaggcgtgagccaccgcgcccggcccctcaaccttatcttaaactttgtcaagatgggccaaggtaacctggtagagcccagtccaacccccagaggaacaaaggtacagatagttctggaaggatgggtcctgaggagagaatggaagagctgttagaacgaagaagatctttctgatgactgccacatattcccagctttaaaagtctgtcccagctactaaggaaactgaggtgggaccatcctttgagcccaggaatttggggctgcagtaagctccgattgtgccactgcactccagcctgggcaacagagtgagatcttgtttcttaaaacaacaacaactctgctccataatgcctaaaatgagctttaaacgcctttaaattttcaaattttttaaagaaggaagggaaggagtccactgatcttattttagtttgaaggaattcatcctaactgcctatcaccaactatcacgaatagagaaaggcgatggggcagaagggtagagcagagacctctggaagaaatagttttagaatccatggcacatcaagatggaggagccatgggtgagcattgtcatgctaggagttatgggtagcatcaggtgccacagagaagggctacagaaaaggaaatgaggaagcatgtagaatgcaacacttcttcaactcccagttttctttcaagagaggcccctctgttccgtcccacagctgacctccagggcttcagattggggtggcacaagcccatctccctagtttaaggaagtgagcttcacagcctgtgaaggatccacagggtccctcccaacacacacacactttcctgctcctgccccttcacctgcatggtggagctgccaggaacaaagggcagatgactgtagggacagggctgtggccaaggtaagtaagagagtattagcacccttttaaaagtgtgggatccttggagtgtgtatgtagaaaagagaagaaaaatgaaaaataataaaggtgtgggagcagagcaagtcccatgcgtggggcctgagttcccaagcacctgtcactgaagagtgccactcgcacccctcaccttccctggcatcctcttgggagtttttgccttccccagacttggatttatgcccaccttcagtgcctgctggttccagtggattgcagagcactcaagcacctggaggggagacagaagggatggttggaagaggcagccccctgctagaggccatctctcccaacatcaactggccctttcatgaccttcctgtgctcatgcctcctctttgtctcggtttcctccccagttgggcccccagccttgctgcctctctacttccagtggtatattttctattttgttatccagcgaaagaagtgggtggtgagtatccatggcccaagaagcccacatccttgtctccagcacccagagtgggggataggggttccccaggggaaacttgagactgactctaggcctaatttagaacaaaataatagaaccagacacagatcctccttatctctaagtgggacgaaatgatttgagcttagcaggcagcctgattcccaatgtgtaatttcatgcggtcagtgtctccagaggttcttgtactgggcataatgccagggggctgagttgggaatggggaagatgaatgagagacaatacctactttcaaggaaacttctgatgaagcagaatgtggttattaatcagaaaagaggtacaggcaataggttctggggactccaaaaggggcctgactgcacctggctttgtgaagtcacttttctagctggccttgaggctgggcagggtttctgacaggcagaggtggagcaggggggatgaactctgagcagagaagctggaaatgaggggtaagtttgaccaccagacatattgtggaggactagtgtcaggggaagagtatggtgcttggttcagtgatgagagatttgatcagggcactggcatggactgagccatggtcctggcagattcatttggcggcatgctgaaggatttagattggctaggaagagctagaggcaaagagaccttgtaggccttggtacttttgaaggggacatgcaagaagggctggggggtgccaatgggaatggaagaaaggagcagtggcactagatactgcaggattggacccctgagaagctgaagatgagtgagtctggataaccaggagaatggctgcaccatgcaaacaaagagctgctgagaggaagaggaagagttgttcgtgactgttatgctcgctgcttttctcactataggacttggcctggatgattaccttctacgtccgcttcttcctcacttatgtgccactattggggctgaaagccttcctgggccttttcttcatagtcaggtagtattcggtgggggcggatagggactggtgaaggaaatgttggggagtgaccagtctggtctaggggccgtgctggggctttgggtaacagtgggtgtttcaggagttggcttgggaaagtagacaggctggagcagttatctgaggggggaatcagaattctgggctctgtgtgtactgtttttgtctgtgtaatacatctaacaggttcctggaaagcaactggtttgtgtgggtgacacagatgaaccatattcccatgcacattgatcatgaccggaacatggactgggtttccacccaggtaagggacagtcactcagaagactggagcataacacaactattgaaaaggatgcgtaggtgaaaacagcaaaaacaaaaagtcccccaaacagcattttctcattagcctgaggctcttgttctgcaaccatgtgaagggagtgaccaagacagtctcatgtcccttcctcagccagctttacctggagaatgctgggctggcctttccatctgatattcaacatgctctcccctgaccttttccgccagctccaggccacatgcaatgtccacaagtctgccttcaatgactggttcagtggacacctcaacttccagattgagcaccagtgagtagggagcctggggaagcagggtcctggggagggtgtaagtgttgggtacaggtgggagcagagaagcaggaaccactgactcccccgttctccctaaagtctttttcccacgatgcctcgacacaattaccacaaagtggctcccctggtgcagtccttgtgtgccaagcatggcatagagtaccagtccaagcccctgctgtcagccttcgccgacatcatccagtgagtatctgagaccaggaagatggctagtagggagggaagagggcagggcaatggaaatgatgacatgtagggtggggagtgaacagaaggtgttcccagtcgtgtgggatggagttcaccatggcaaaggcaggattctttattggacctgtggccaggtcaggcctttgccctcattggggttcccctcagtaccatggcccaagctagctttctctaaagtagaggggaggaaaacctccagatggaagaaggccttaacctcactgctccatctccggtgggttcaactctgcttgtctccctcactgtctgcccccattttgtccctgcagctcactaaaggagtcagggcagctctggctagatgcctatcttcaccaataacaacagccaccctgcccagtctggaagaagaggaggaagactctggagccaaggcagaggggagcttgagggacaatgccactatagtttaatactcagagggggttgggtttggggacataaagcctctgactcaaactcctcccttttatcttctagccacagttctaagacccaaagtggggggtggacacagaagtccctaggagggaaggagctgttggggcaggggtgtaaattatttcctttttctagtttggcacatgcaggtagttggtgaacagagagaaccaggagggtaacagaagaggagggacctactgaacccagagtcaggaagagatttaacactaaaattccactcatgccgggcgtggtggcacgcgcctgtaatcccagctacccaggaggctgaggcaggagaatcgcttgaaccggggaggtggaggttgcagtgagctgagatcacgccattgtactccagcctgggcgacagagcaagactccatttcaaaaaaaaaaaaaaaatccactcatataaaaggtgagctcagctcactggtccatttctcagtggcttctccatcctcatttgcaaacctcagagggataaggcagttgaacctgatgagcaagaattataacagcaaggaaacattaatgcttagaattctgagatccagcacaactcagtctgtgggagctcagctcgctgcccagggataggtatgacctatgtctgccttaggctgctgggagatgccattctccagtttcagaagcaggcagggcaaaggtcaagactgtggtattggggtcttttggctctgaaggatcctggaaccactgattttggtttattccctccagggtctaaagagaacaagaggtgctagctcttaccaaaacagatggtagagagagttgctggctatttaaaaagctctttcatcttttaattcacctcttcttttcacctctttaaccactcctcaggaacagaacacttctaggactgggggtcttttagctccataagcaagtgagcagatgggacaagttagtcttttctccctagaaacaaaggggatgcccagtggtttccctttgcttcccaacctaaaatttcaagtttaataaaatagcaattagcagaagtgaccaaattgggagataattatcagtcatgaggaaagacacagatttcggtcataaagaatgtaagggctataagtagaaactttctataacctaaatgatgttatagaattatttttgagcaggagcagaaagattaaatatgatcacttcatacttctaaatcagaaataggaagattaaaaccacagaacagtttgtgatttctattgctgtagctaggtatcttactctgtccactcttgttcaagtatctaactcttctggaaaccaaataggctttagaagagattatcctatattcctatcagtataatactaaaatgtaactttttaatcatctggtttttaaaagataaacagtttagcccatctctccagagagcaaacataggaatatgactcaggagcctcctagggcttatcatcagccctcacacccgcttccccctccaacccacagcctttgcttccaggtggcaggattactactttgcctcttcagcagcatctactctaggcatattgatcattttagacactgggagaagagaacctcaaactaggaggaaaagacagagcctccacttagttttgggaggggatggcagacagtcaaggagatgagcgtcctaaggcatgttgggatagggtcagatgcaccacccatggagaggtttgtcaacacaaagacatggaaggttagaggtttgtcaacaaaaagacatggaaggttaggtttgtcaacacaaagacatggaagattagaggtttgtcaacacaaagacacaggaagaatgggctgcagaagatttagatgttttccatttgggcacattttacttagctggagaactaggtttaaaacagcctgggtaggaaaattagaagcaagctggatgcagtggctcatgcctgtaatcccaacacttttgggaggtccaggcaggaggatcacttgggcccaggaggtcaagcctgcagcgagctgagatcacaccactgcactccagcctggggtgatagaacaagaccctgtctcaaaaaaaaaaaaaacaacaaaaacttagaattgaggagttgtacctccattggcttcctcactccaaaataggtgctgatccttcctattcctattctttgccaccttttgggtgtggtgtcaccagcctgtttagccaagtagctttgggcataggctgcccaatctgagcaaacaccagtgaggctctattgagccaagaccaagtcctcaaagcacctgaaccactgtggccttctcagcctacagcagtgtggtctcttacatggccacaaagggacacacagtgacaaaaggctcggaatgttacaatggtaaaatgagtgatctcaaatccactgacagatataaaataggcttagagaggaaaagctgcctctggtcaagtagatcatggcagcatgaattccaactcacttttttacaactccaacttctatgtttatctttgttactttcacttttttacaacctggccagaggcattttttaaatcaggcccaatatcagtattctttttgtgtgtgccaattttgttatcacatccctatgaagttgaaaaataaagttaattttgaccaaaagacttcatttgtaacccatgatgttcatctgtgtgtgcacaggattcctgagtgcctctgctacgagttactgttcacctctctgtgctcttaagttcttgaatcactagactcccctttgtattgggcagaggaagaaacatcaggaccctccagaaaacaccaaggcaagggtgaagtatggcaaggaagagcaaggcaaagtccttctgatgactcccgtgttcaaatgtgagattgtcaataatctcaccaagtttcacacgtatcacttcctcctattcatgaggcaatgcccttgcccttttgtccttcagctttccattttgaattattttctctttatttttacacttacttgttttgagacaaggtctggctctatggcccaggctggagtgcagtggtgctgccatcttagttcactgcattctctgcctcccggcctcaagccatcttcccacctcaggctaattttttttttttttttttttttttttttttttttttttgagaccagagtttcactcttgctgctcaggctggagtgtagtggcgtgatctcagctgattgcagcctccgcctcctgggtccaagcaattctcctgcttcagcctcccgggtagctaggattataagcatacaccaccgcgcccagctaattttttatttttagtagagacagggtttcaccatggtggccaggctggtcttgaactcctggcctcaggtgatccacccgccttggcctcccaaagtgctgggattacaggcgtgagccactgcgcctggcctctctttacttttaaactcatttctagtttccaaatagtctccctaagtcctatctgcctaaatcttcctctgcaagtgtgatccctcagagcttgactgcagagcagtgcctcttaaccatccaactagaacagctctgagcaaaaacatttgtaggcatcattaatcttccctgcagtgtgcacacagaaagtcagattaacaaaattctataggagacaaacttaccttcaaaagacaaaagaaaaccactacattcttgaccaccacagggtataagcccttaattattaagagctactgcactgaggcaataactcctaagaaatcttaacatttcgccaggcaaggtggctcatcctgtaatcccagcactgggagagaatggcacacgtaatcctagcctttaggaggccaaggcgggaggattgcttgagcccaggagtttaagaccagcctgggcaacagtgagatcccatctttacaaaaaattgaaaaatcatccaggcatggtggcctgtgcctgtaatcccagctgcttgggaggctgaggtgggagaatcacttgagcccaggaggctgaggctgcagtgagccaagatcgcactactgaactccagcctgggtgacagagcaagagactctgtctcaaaaaaaaaaaaaaaaaagaaatcttaccgtctttagttcctatcaccattactgcagatttagaagcaatctacctgaatcagaaaatagagctcaaataagttgtgtggcttggtataatctgggaaaatcagtttcaaaagttacctgcccttgggatagaactttttgtcaacaccagttttcaaaaagtaccctagttatgaggccgttgctgggtaaactttatcccattccagcttcaaccagaggaacctgtacatcctaaagtttcacataagattacacttgaagaataggtttctccattaaaagacttgaaaactactggtcttcaggctccctacctgtttaatctgtcaagacattgccagcttaaatttcggacagttacataagtgtccctgttaacttcaaatggccctgacaggaatgctaaaacgtcagacattcaaatgggccaagctttatcaggattataaaactttcaaagctcaaaaacatgccatctctatgggaaacagtatcttggatttgatgttacaaaaggaacaagaaaatggtttctgaatggcagctttcagtttacaagtagtggcaaagtaaatgcttggatgttatgaggtagttgatctaaattgtgaggctttcttaaaggcactcctttgatctcatggagtgagagactagaaatctattcaacgtattaaaactcctctcccagcaaaataaaataaac

SEQ ID NO: 9177 - DNA, 1222 bp, Homo sapiens
aaaacttaaagtataataaaataaaagatttacataaaacatttttccttgattctgtattaaaggaaagatgacattattttcaatgtctgcaaaatatttcactgatgggcatttagagtgtttccatttcccgctatcatagatactgctttaatgaatattttttgtttataaatagttttctttttttgtgtgtggatatagaatcttgctttgttgcccaggctggagtgcagtggcacaatctcggctcactgcaacctctgcctcccggattcaagcaattctcctgcctcagcctcccgagtagctgggactacaggcgcacgccgccacgcccagccgatttcttttgttcaggctggtcttgaactcctgagctcaggcaatccgcctgcctcgacctcccaaagtgctaggattataggcgtgaggcaccccgcctgacctataaatatttttctaagaacatttccttaggctatattcctaaacatggaattattgggaacatttttatttttctattttttttcatctcttcagtattcaaaacattcctaaattctggccgggtgcggtggctcacgcctgtaatcccagcactttgggaggccgaggcgggcagatcacgaggtcaggagatcaaagccatcctggctaacatggtgaaaccccaactctactaaaaatacaaaaacaaaattagctgggcgtggtggcgggcacctgtagtcccagctacttgggaggctaaggcaggagaatgccatgaacctgggaggtggagcttgcagcaagctgagatcaggccactgcactccagcctgggcgacagagcgagactccatctcaaaaaaaaaaaaaatcttaaatttctatataagttgtcaaactattttttccagtttaatcaacttacacttctaccagcagtatgagagcttttatcccactgcacagtcacataggaaaaatggtttatgtaaaggacctctcttctgttatttaatacccatgaatttcttatatagttgtaatcagcgaacccatactactttgggttctgcttatttcacggggaaggattctatatctatcaatatagttcacattctagccatttaaaatcattctttaattcttcattgtgttaacagatcccaataagcttggcgattttcttattgtcaggactcgggtttatttccagtttttg

SEQ ID NO: 9178 - DNA, 4443 bp, Homo sapiens
acattttggttacttttagaattttattgacttttttcttcataactttaaaacaaaaacagcgcatgaaaaccagtgtcttattccaaagtctcaactcagctgattgccaggtgaacatcaccatcttactcctctgaataactagacacaaattacatagcaagttcgagtttctgcccacccaagacacagccagtaatcagtcacaaacacagacacagccaactccaggggctccagctttctgcccatcttctctcagcagttcctcccatctgctaagatgcgccttcctggtggctctctctcaaggtgggtcaaggctgaacaagacagaaaagcacagtctaggtccaccatcacctcccactggccaccagttggccagccaggaaatcatttctgtacatcttttgtctcccccttttatctccctctctcttctccaaaacttgttgctatctatcactttcatgtaacaatggacttagtgtccattaaactgcctgagaagtggtttgagcctgacatattttcctgagctaaaaaaggaaaagtacctctgtggccttcttgccattaagatcaagtaaaaaagggactagcactactgaaaagggtcacgctagaaaagccttagaatcctctctccaccccgtgaaggtttctctagctgtagctcttaagggtacaagacggcaaatattctggggtgaaggaggtataatggggaaacacatttattttccccttttaaacttccctgctgccccagtctttgccttcttcttagtggatcccttgggttctggctccttgcgcttagctgaagagagtgagccggtcaccttgaagaaatcatccaggcggccctgggtgctgccttggcggctcttactcagcctcttgaccccactgcggattcgctcctcagagaactgcttttcaccacacatgaacttgatcagctcttcttcatttggctcgctccacttcagctccacagactctgggtccagcacctcaggttccaagaagagctggtgagcctccttgtggagccaattttctggcacagggtacttgttggggtcaagtcgccgcacgatctcctcgatgctcttgtgcttctggatgaggtccacagcccgcttgggcccaataccccggatactctcacagtagtcactgcctagcaggatgcacagatccacaaactgttcctggttcaggcccagctcctgcagaatccggctcaggtggaattcctggattggcagctttttggcttcactggcagtcaggtgtcgcattagcacagggctgccgaaggtgaggcagtccatgtcctcggtagccgcagcatagactttgccagccttcaccagggcagcacagctggcctctgcctcactgggtgcatcaagataagggatgcccatgaggctcagcagatgtttgcactcatcattgtgctgcttagtgaccttcaccagccgcttagtgaatttttccacctcctgctcggccccagcagcctgagcctgctgcagctgcttctctgcctcagcccgccgctcactgcgtttggccagctcgcctgacttgagctgtggcggcttgccatcaaagacatacacgggcttgatgccgttctccatcatgcgaatggtgcggtagaacatgcccatcaggtggctggtggtctcaccctcctcattctgcagcacatccccaccctggcgaacagcaatcaggaactgataaatgctcatagaggcatcaatggccaccttacggccaaagtagctcttgatgtcattctcccggatggcactgggggccacatcagcaattagtttggccaggccttgaattcccatggcaacacagaggagggatgactaaaaaagaaaggcaagtcagagacggaggaaaggagaaaggttataactggtgttatctcaccaacttcatgccttcaactaaattccacacaacaaaaaggacaccatgtcagcactgctaaagataaaaagatgaacaaggtccccattctcaaaaaactcagtctagcaggagaatttactcaatagtaaggctcaacgagtaccagaaattgaaccacgtgcttagagaaataagatactgttgatattctaaggtagcagcattatttattacacaaaaaaaacctgcaacataggtctccatcaaggaccacagaaggccaggatgcttggcctggcttgaggagtccagggaccataatggcagacctgaaagacaggcaaatacaccagctaaacaaacagatctgatttgttttgagtctctggagaaccctgactaataaggcagccttgaaaaaggattgcaaacatatctgaatggaggtgatgtggctttctcacaagcttctctaaactctcttcatcatcgcctcagcacataagagtttctacttttattataatgttgctagagtttcaagtctttccctttgcgttttctcgccaccactcagtctgaaatgttaactccatggctcctccccaggtcctgatttaggggtctggcatgctgtagtcactgggctcaaaagagtattgcacttcagagttcagtgtttcccagatagcagtgtttcccaaatcaccctcacgatttttgctacttccaactaaaacccgtactttcattcacttagaattttttttaaaaaactaaactggaaaactcataagcaataatatttgtgttctattagttatattttaatatgtattaaatgtataactattaaaaaggatttttagggggtgcaatttaaaatcatcttgccatcctggccaacacggtgaaaccctgtctctactaaaaatacaaaaaaaaaaaaaattagctgggtgtggtggtgtgcacctgtaatcccagctactcgggaggctgaggcaggagaatcgcttgaacccaggaggcagagaatgcagtgagccgagattgtgccgctgcactccagcctagcaagagagtgagactccgtctcaaaaaaataaaaaactcatcttgtgcccactgttggtatgtgtccaatactccaagaaatattctactggggccaggcacagaggctctgggcagtaatcccagcactttgggaggccgtggtgggaggatcacatgagcccaggagttccaggctacagtgagctatgattgtgccaccacactccagcctgggcaacagagcaagaccctgtcaagaaaagaaaagaagacaaaagaaaagagaaagaagaaacgaaagactccatcaggccttttcattgttcccactctttcttcacagggttctttctagagcatcaatgactgttcaattcttccttctaattcagtccaaacacttcagcatggcatcacgatctttcatgttctggttcccaacctaaccctacattctgggatctcaacagaaagctggaataaggcccgccttttcccacttttccttagctgtgccctcctctcgccatcctctcacgcgtccttccaggtccatccctggattattaatcaattaataattaattgacaatgaattattcatttgattaatatgaataattcccctgtgaactgcagcggcaaaagctctggccttgaatctaggcgcggcatttaccatccgtgtgacattaccaagccactgaggtttattttctcgtctacagaagaagaacgattaccatgcctgtctctcagggctgctgccagggttaactgagacaacagacagaaacctctaatgtcccctctccaggcctgttcaacccttcggctcttgcctcaagccggccgcgctgctggagtgtggactgaggaccagaccatgtagcccttgatcccctcacggcgtcccacagacaggtaggcaggaaaggggcctaaacaactcaagtgtcagaaatgtttctcgtccaaggtcttaggaaaaatacaacacgaccccataaggtggaacttattaccgcttttctacaatggaggaaagagaggctcggagcttacgcgactggcccaaggctcacagggggaaaagtggcgggacctcttgactgcgaatcccgcgcactccagaccccggctccccacggcccccagcgccaagcggaccccgtcgctcccggaggcgcttcccatggggtctcacctggcctttgggacacgcggcctcggcggctaaagcttggttcggggttgccccgggcaggcggtcctaagctcgctctcccttctcagcttagcggcgggtggcctgacgttcagccgccttccaaagcccgcgctcccgtcacgtgacctgctcgccacgcacagcctcttggggcgcgtagtgcaggctgcgtcccctcagacggctgctctcatggcaac

SEQ ID NO: 9179 - DNA, 6725 bp, Homo sapiens
ggtgattaaggctgcagaagacagtgcgttgcagtatatgaacttcatgaatgtcatctttgcagcacagaaacaggtgaactgagagcctgccgtttaaagtatttgtttcataacgaaggagtcaatttcattttttgaatgctctactctgaggtattctgactacgtaggcttatgaatgggcaaggaatccagaatctgtattatgttctagtcttttctctattttgggtcctggaccacttgagaatctgatgcattcccaaaacaatatgcactcaaccacagttttgcatagagtttcatggtattcaggtaacctttagcccatccttggaccccatgccaagaatccctggtttgacagtttgctgtataaaccttgcatcagtttctttatcttgttgctgtggcgaagctgtaaaaattcagtatttttactttgcaaagagctgaaatgttcagatgaagtataatacattttcttctttggtgtgtttatgaagaaagaaaacctccttaaaatttcagttttaatgtaaaatgctgctatagccatgcataatgttctctgttgtggagtggcagcatgatgtagtgaaaagagcctggactttggagacatgccgagtggggtgacagctttctcacccgctggctctgtgaccacagcccagccatgtcctgggtgcttcagctgccaaatgcaaatatctgccgtgcagagtcacgttgcatattgagtgagctattttaagcatagagtatggcatgtagtaggttctcagtatagggtaatcattattgttattattcctgtaatattttcaaaatgtttcttttagaatattttgattgatgcctgtgttttagactccgactcagggctcctccaacaggtatgttttaaaaccatgctttgtgtcggtggttatgacaattagtgatttttatattgattacaatttaaaatgaaagctttgggtatattgggttaaataaaatatgttattcagcctaattttatctatgtctttcccccttacgtatggagctactggaaaattttaaattacatattgcttgcgttatatttccgttgggcagcactaaaagacaaaaactgaattttactttaacccgaaagggaaacaaaaccctaaagtaagtctgaagaaattactgagtttttgttagatgttttttggccacaaatgttgtttcctaaaggatcagttacaagcacaaaactatgacaaaccctgaatttaggttactgctggggatgaaggatggggagagcgaggtccaatgggaaaatttacatgcttcaaaggctctgagattgtactgtttcttcagcttgatcgtaggtatatgatgttcattttattatttaaaccatacttacacattatgtatacagactcttgtacatattatatttcagtagtaaaaattcaaaaagtttgaattcattttttagcaacacatttcagtctacacattgtctattaactccaagacgatcttgtctctgccatgaattcacataccagctctacctcctcagccctcacattcatttttctagtccagtcccagactctcctgagttccagacttgcagaatcagccgtgtacgtagtacctcctcttggacgtctggcaggcatcttcagtgtcatgtgtcaaaagcagagagctcttggtttgtcctctcagcctcttcctgctccactggtagccccatctccctaagtggcagtgcagttcactcagcaactcaagcaaaaacctgactcttccttgtctcttctcttccctcctttcataaccatgagcaaatcctgttgattctgcctttaaaatatatcctggctgagctcagtggctcatgcctataatctcagcacttgggaggctcaggcgggtggatggcttgagctcagaagtttaagaccagcctgggcaacatggcgagacaccatctctataaacaatacaaaaaaattagcctatcatggtggtgcacgcctgtagtctcagctgttcgggaggtggaggcaggaggattgcttgagccaggagttcgaagctgcagtcagctacgatcatgccactgcactccagggaaaccctgtctccctcttaagaaaaaaaaatgtgaaagttggttctcagaacagctgtcagaatgaagctttcaaaatacaagattggtgcaaaagtaattgtggtttttgccttttttttttttaacagtaaacactgcaattacttttgcaccaacctaatataaattagaacctgttgctcacttgcttaaaaccctcccatagcctagcatcatacgttgactaaaacccagagtcagggcctgccagggccttccagatgctgcttgctgaggctcctgggaaccttttgccccgcatcttccacactctccctcttcagtccggccccaccgcccccttgctattgcctgaaacaggcctgcttcggccagaggggcgctgcactttctgttctctctgctcgcaagctcttcccgcaggtgtttgcatggcctactccctgcctgccttcacgtctctacttctgtgccacctcctcagagaagccttccctgaccaccattgttagtgttactccctctccccttagcctactttatttttcttcatagaaatgatcataacctataacattatttttgcatttacttacctgatttactctctgccttctccactagaaccttaacttcatgaggatggacactgtgatgtttactgctgtaaccctgcacagtgctctaaaacagttgttaaatgtgtaaatgaatctaacggaccaactgaaccaggactgtactatcagaggagcctcagggtcctaggatcggagctagggttttcagtgtaaatggaagcactgctgtgttaaagcgagaaagctgtgtttatgaaatgaatagatgaatgattgttgggaaaaactattaacatggacaggaaaccttagtgtcagcaaccaggagagcttgagtgttttgtgtctttggaaaactctgaagatagcaaaagtttggaaaaagaggaccaaattcaaaagagttttatttttattttattttattttatttttagacagagtcttgctcttgcccaggctggaatgcagtggcatgatcatggctcactgcagccttatcctccccagctcaaatgatcttcccactcagtctcccaagtatctgggaccactggcatgcactacaatgcctggctaattttttaattttttgagacagtttcactcttgttgcccaggctggagtgcaatggtacgatctcggtgcactgaaaccccaactcctgggttcaagcgattctcctgcctcagcctcccaagcggctgggattacaggtgcccgccactacgcccagctaatttttgtatttttagtagagacagggttttatactctattggttaggctggtatcgaactcctgacctcaagtgatccgcgattacaggcgtgagccaccgcgcccggcctaattttttaaatttattgtagagacagggtttcactatgttgctcaggctggtcttgaattcctgggctcaaacagtcctgaagccttggcctcccaaagtgctgggattacaggcatgagccactgcacctggacaaaaaagtgttatttcttaaagagaacagaataaagccatctcacagtttctttttacataataaaattaacaaaatacaatgaaaacaaatctcataaaaattaaaaatttttgtgcttccaagggcactatcaagaaagtaaaaagacaactgggagagatatttgcaaatgatgtatctgataaagggactagtattctgattatataaagaactcttaaaattcaaaaataagacaaataactcatttcaaagtgggccaaggattgaacagctatttctccaaagatctgcaaatggccaagaagcacatgaaaagatgcttaatatcattaccgaccagggaagtgcaaatcaaaaccacaatgagctattacttcactccactaggacacatgtaatcaaaaagtcagctaataataaatattggtgaggatatagagaaattggatccctcctacattgctgctggaaatgtaaaatggtatagccacttcaggaaacagttcagaacttcctcgaaaagttaagcatagaattaccatgtgactggggaaaccccgtctctactaaaaatacaaaaattagccaggcatggtggcgcatgctgtaatcccagttactggggaagctgaggcaggagaatcacttgaacccaggaggcagaggttggagtaagccgagattgtgccactgcactccagcctgggcgacagagcaagactctgtcaaaatataaaaataaaaataaaataataataatctgcagtgtcatatcctcctctgattttgtaggcccaaggcattgctcatgagaacctcattcctctggaaaccctaggtaagtgcgagtttggcagcaagccgcctgtgtcttgcaggcttgtgacatcacgggaggactgtacctgaaggtgcctcagatgccttctcttctgcagtatttgctggtaaggagacagcagcggcgaccctgatgcctggagggaaggatgacctctgtgtcctgggaaaggaatggaagcaagatggctggtgctagtactcaggagaagggaataaatggaggccttggagttccaaggcctagaagggtgggcttcatgttatttttttcccatgttttaaataaaagtttcttttgtttgtttgttttacagtgggtgtttcttcccgatcaagatcagagatctcagttaatcctcccacccccagttcatgttgactacagggctgcttgcttctgtcatcgaaatctcattgaaattggttatgtctgttctgtgtgtttgtcaagtaagttaatgtacctagtttttcttttttttctatgttggggggcaggaaaacagtttctcagctgtgttgtttttcagccaccctattgtttctttttttttttaatttacagtattctgcaatttcagccccatttgtactacgtgcgagtaagtatctttgagattgtgtgggtggctaatacttcacagctctagaacattaaaaaatgttttcctctctgtaatttcaggacagcctttaaaatttctctgcctccagtgctgaaagccaagaaaaagaaactgaaagtgtctgcctgaggataaaatattttccccatcttttagagctgttaatagaaattatatagcagattctttgttgggaagactgaaaaaaataaagataggtataggataatttttaatatggtgaccttacagaaaatatttcccaaacatccttttcatcctgtgcttctggaggactgatttgtttgagggaatcattctatgcattatatcctaaaatattctatgactggtttctgtccatgtttgtggctttcatttttttaatgggatgactattagtcaaagtcagcttgtcatgactcatcataggctttctaacctactccctgaatccgggtcctcattgtgaaatgcatgccatacgaaatttgaacgtagctttggaaaaagggactatttgtggagtaatggcattaatcaacatagaacatcttatttgaatcaacagttaacttcagtagtcatgtgaataaaattcttattgtctaaattgagacagcctcagatatttgcagatatttactttttgtctgatatcagtacatatttggacaaagtcatctaaataatagtttgtcaccaaataactacaaaatctcattttaaatgagtaaggagaacgtgtacagaagcaaattttcttcaaaatagttgtgggaagagcttatatgtgaaagcttatgactggttttgagggagaacttactggagaaaatggactctatgttaagtatggttttcagatagaattctttccttttttaatgaggaaaaaaaatccacattaatattgaaactgcacctgtaatcccagcactttgggaggctgaggacagaggattgcttgagcccaggagttcgagagcagcctgggcagcaaagtgagaccccatctctactaaaaatttaaatgtatttattaaaactgttctctagaagctttggactgaatcccaaaagtgtttataagttcaaaagcaaaagtatttgtaatttcaacaacaaaaaatgtatttctttatgtaatcttgaaattattaaaagtccttttagcttctagcacatatttgtacaaagagtttaaggaatggtggctggtttggtttgttttttaaaaatgtttactgacgaggccgggcgtggtggctcacccctgcaatcccagcactttgggaggccgaggcaggcagatcacaaggtcaggagttcaagatcagcctggccagtatggtgaaaccctgtctctactaaaaatagaaaaattagccatgcgaagtagcaggtgcctgtagttccagctactcgggaggctgaggcaagagaattgcttgaatccaggaggcagaggttgcagtgagccaagatagcgcctctgtactccagcctgggtgacagagcgagactctgtatcaaaaaaaa

SEQ ID NO: 9180 - DNA, 970 bp, Homo sapiens
gaaaactaaaattctgagagcgatagaagaataagtggagagccatattttgttcttggatgtcagttttcccaaaatcacactgtaaattcaatttacaatctcagtcagaatatcagggaggtttttttttttcctggcagggtggggagatttaaaaaagaaattcaaggctgagcacggtggctcactcctgtaatcccaacactttgggaggccaaggcgggtggatcacgaggtcaggagatcgaaaccaacctggctaacatggtgaaaccccgtctctagtacaaatacaaaaaatgtcgtgggcgcctgtagtcccagctactcgggaggctgaggcaggagaatggcgtgaacccaggaggcagaggttgcagtgagccgagattgcgccactgcactccagcctgggcaacagagcgagactctgtctcaaaaaaaaaaaaaagaagtgccaagtaacgagatattcattgtttgttgcttagcacaaatgaaaaagctggcagttcccagggttgatggtgatgttggggattgcttattctcatgggttgctgataggaggataaattggtaaaaatcttttctggggtgcattttggtaatctgtgtcaaaattaaatgttcatatactttagtaatcactgcttattttccggaggtaattagagagctgtgcagatggtatatgagggtatcatcagggtattgtttaaaactgagaactggaaactgcttaaatagtggaaatttatgaagtccgcaaggagcatagtatatattataattcattgacattagaatattttttcccacatatattgtggactgaaaaagcaggttgcagaatgctaagtaatcatcttgatacgtgtgagtgtgtgtattttggatgtgtgtgtattctggatgtgtgtatgtgtgtatattttggatgtgtgtgtgttttgggtgtgtgtat

SEQ ID NO: 9181 - DNA, 1521 bp, Homo sapiens
gaattctgtagtttcgtttttaaacatttgaggatattttaggtgatttaattcattgtagaacatagactgcatgatttcacttgttttagattgagattgttttgtagcccaggaaatgttttatcttggtgaatgttccatatgtacttgagaagaatgtgtattatattgttggttgtagtgttccataaaagtcagtttagctcattggtagtggggcctaaatcatctgtatcctaactgatagtgtgtggttgtgtgtctttgttttttctttgtcccatctgctttttgggttctttgattttcttcttttgtttcttcttctggattaatcaaggattttataatattcagatttatctcctctgttggggttttagctgtacctctttattttttaagaggctgttctagggattacagaatgcattctcaatttatcataaaatagcaagaatattataccaccttacatgtttcacatgtaataaaacatactttcatatactattttcatcctttgtgcttttattgtcataagttttgcttctaaatgtattatagttattgtattttgtgattatttgtgcttcagaaagttattctttgaagaaactaagaaatgagaaaaattaacatctacctgtatattcaacatctacatatatatttaccatttttgccattctttattcctacataaagatcaaagtttacatctcatatcattttctctcagtctgaagaacttgatttaacatttcttgtattgtaggtgtcttagtgacaaattctttcagcttctgttttcagcttttatctgaagatacctttattaatctttactttttctatatattttgtttgttcgtttagagataaggtcttactctgttgcccaggctggagtccagtggcctgatcataacccactgcagcctcaaactcctgggctcaagtgatcctcccacctcagcctcccaagtaggtgggactataggcacacgctaccgtgcctggctaattttttaatttttttggagagttggggtctcactttgttgcctgggctggtctcgtaccccagggctcaagcaatcctcctaccccagcctcctacggtcctgagattacaggtgtgagccaccatgcctggttatttaaaaaaatatgttttgaataatacagccaattctgtttttttaagctgtcactatgttctgtatagccaccaaaaacagggaattagcaaatactgaatcattgttcttaggggaaatacagacttggctcctgtaagcctcttgtcataatatttttgttaaccaatcagtatattaccttgttttatgtgtttttctatttaaagccacctggggtacaaaaatacagttggatagaaggaataagttctagtatttgatagtacagtagagaaattatagttaatgatttattctatatttcagaatagctagaagaattgtaatgtttctaacacaaagaaaagaaaaa

SEQ ID NO: 9182 - DNA, 1641 bp, Homo sapiens
cattccttactgtgaatagttgctttcatactacagcagcaatgttgaagagttgtgacaatgaccacatggcctataaggcctggaatatttgctgtctggctctacgcagtttaagtttgctgacccctgtgcaaacttcgtcaaaggtaactttgacttagtgcgtactcttgattagtacccaaactctctaaagttagatattaacttagaaaaaattgataagtttcaaaaaaaaatttctctttggtagggaaggtaactccaagagttaacggttttcttgccttgaagggcgttatccagttttgtatctatctctgcagtcttatttcccattgacattcttttttccattgactgcatgtgtcagtttctcatgtcctgctttgagccacccattgtcattctgcaggtcccttcattaatgaattaaataaatcttagacacacgctcactatatattccaatgagagtgtttattgtatggagaattatatgttgtctccttgaggcttggcagtgcctcttgaatgtagtcatttaaccctcttgggcctcaggtaacttctctgttaagtggaaataattatccccagtaccttagccaaattactgtctcacccaaataataattggacatagttttgtaatttaagttaaaagatgttatgtttatgaaagagttttgttagctgcaaagcgctatttgttggatattgcttcttgaaaaaatacagatcttaggtattaaagaataggtagaagcctgttaggtatgaattatgaacagatattcgattctttgacttctccattcagaatagttatttttaaaaagcaaatatgtaaagatctttctgctcttaagcctaaccactcatctgatgagtgtactgaaaatagaagtggtttattgcaatatgtcagagaagtattctactgataaccacccatacatgaaatcttaaagaagtagttatgagttggaaatttctaggttgtaatcagaagagggagcaaatgacagaatacagctgtgcattgtttggaagtgggctggaaagaattcattgcctctttaattgaagaaaagcaaagagtgacactaatcaaagtaaaagaagggaagtactcatagctgaaaatggaactataaattgtttgctttttagagcaacatcagttctttgaaacccatacagttccttataatattccaaaacaaactgccatatggaaacctgtttagaaaggaataatagcactctaccctcctccccagccactaaattgaaacatacgtgaaaatttaatgtagttttttaatcaagctcagaaaattttttttttttttgagacggagcctcgctctgtcgcccaggctggagtgcagtggcgcgatctcagctcactgcaagctccgcctcccggtttcatgccattctcttgcctcagcctcccgagtagctgggactacagcttggctagtttttttgtatttttggtaaagacagggttccaccgtgttagccaggatggtctcaatctctcctgacctcgtgatccgcccaccttggcctcccaaagtgctgggattaccagcgtgagccaccgcgcccagcccagaaaaaaaa

SEQ ID NO: 9183 - DNA, 1641 bp, Homo sapiens; identical to SEQ ID NO: 9182

SEQ ID NO: 9184 - DNA, 707 bp, Homo sapiens
tatttttagtagagacgaggtttcaccatgttagccaggctggtcttgcactcctgacctcaggtgatccacccgccttggcctcccagctcatgctgatattacaggcataagccaccacacctagccaagaaaccattctttgaacacaagcaaatatactttggagaaaaatttaataatcctggcagggctacattcaacataattctgttatgggggaaggcagcatgctttggctgctcagtgagctatgttctgtacaaccaagtgaaattgctaaaaaaagattctcctgtatacagtaacttaaagtgatgcagtctacttaagatcagatctgagttacaaaatcaaaagtgacagctcctatgttcttttaaagtccaatctctttttttcattgttgtgctccaaatgccttgagtacctgatgtagagtaggtggctaataaatattggttgaatttcttgaacgaatctgttatgaaaagatctactttgctcatctctgtgccccaatagcaggagcttgaggagaaggagaaaatattgggtcagagcttttgattaatatgtatgattctattaaacgggttcactaaaccaaaaaaggcaaaggaaaacagttaaaccaagagttcttgaggttaaagtcttgtgatgattaaaatcatcatcctaagatgatgatgacataaactttc

SEQ ID NO: 9185 - DNA, 414 bp, Homo sapiens
gaggaaaccgccttcaaatgagctgaatacaggtccctctgctagttttgatcttgtaggtcagtggttctgaggcatgagtgctaaaggtcctataggtggcacatggactccaccttcctgcatcacgtgtttccgttgtgatcattcctccagatgagtgctcttccatcactgggaagcacctggcctcatgcatttctgataggccttggtgatgtcttaccagtcttaggcttcccatggattctaatgaggattcctcaaggtatgggaaagggataggtggtccacagaatattctccccaagcaagcaagccaaagactgagaattacagaaaaacacttttcttagtatttttaaattttaatctttttctttcatacagctttatttgtttcttatctgaact

SEQ ID NO: 9186 - DNA, 414 bp, Homo sapiens; identical to SEQ ID NO: 9185

SEQ ID NO: 9187 - DNA, 707 bp, Homo sapiens; identical to SEQ ID NO: 9184

SEQ ID NO: 9188 - DNA, 1262 bp, Homo sapiens
agtaattatatcttgtagtagcaatttcatatctctacttatagttgggacaattaaggctcagaaaaatggcaaagctgagattaaaattcaggattttctgatttctagccaatgtcatgctcattttctgtgttaattttatggctcagggtccagttaaaaacgtctgaagggagtggtaagtacaagagagatgggagttgggggtggggcttgaaggagagcacacctggccccaggtgacaagactgggctccagccctgcctcatcacagttggacatgatggccctgggtcatttgacttttgaggacctcaggaaaatgagggagcttaaaaaattctatggttcctaatgaaatacttagggatgaaattacagttctgggatttgcttgaagacacaatcagccatggtttgtcactgttgatgctgagtaatggatatttggtgttctattgtgagtctttggtacatgtttggaattttccatgaaaaaaccttctgcttctaaaatgcacaccttgattcttcccatcgccctcctactggctggtcctgtgcagctcactcatttctcaggaacagcagcagactcactactctgaaggaaagaaagccctttgctttggtctgttcctaatgtacatattattagagacttttccgacaccctccccattttttatttcttaacagctaatacgatagctgtgctttcataataaattcaaaagctgctctctatttctcaccagtttgaattgtagaaaagagtacaaaagattagagtactttaaaataaatctcagctaattatacatacaactgcattcactaaatgtgaatattttcaggctttctttgctaccaagtgccacctgctcatgatttaaatgggcacaaatttagttccattaaacaaaatgcagcaactcttctcctatagcgcaaactcctttaggtcctattttgaaactgagaagctaattccagtgttctcttgttagctctcggtccatgtcaaccaccccacaaggttgtttacttgaatagtttgcagccttgctttaaaagttctagtaggcaaataggtttgttgatgatgaagtggtttgtgttttataagagtccttatggtctagatggcatttgaacttgtggttccagtgattaccaggaccctgaattgaagaatacatgctgtggccttttcagctcaggaaactttttactttctattgccaaaaaaaaaaaa

SEQ ID NO: 9189 - DNA, 2239 bp, Homo sapiens
gaaaattatctgaaattcaaatttcagtgtccttaagtaaagttctattggaacatggccacacatttatttatatatcttcttgtggctgttttctgctacagctgcagcgtcttatactaaacagactgtatggcccataaagcctcaaatatttactttatgggactcgatggaaactttactgacccctgatctcagtgtttcttttaagcattgcaaagatagtttgcaaaaatgctatgagagctctatgatggcattagatacctaaatgtagcagctgaaaaaaatttcctaaagtggtattaggcctaaaaaaaagtgattctagggctacttaaacaagaagtttttacagcaagagttacatcctctactcattttaatgtctaggtaagccagagctttaaatcctgtattaatttacctgtgaaaatatttcatattctcccttttgtgccgtgtgtgcgttggattccccagtgggtgtatagatgaatttataatttatgtggctggatggaagcctgggtaaatacaagcataaacaacatcaggcaatgccagtcgatagactgcgattccaggatgtgttctgtccaggcctgccgttcattccaaaggcctgcatttcaaagctgcaggcttggagctgggactgctgggaaggtggggggcagggttcagaactggttgggcttaggaaggtaccaggagagtgcaccttctagtacttgaaatgtccctccattttgaggacacaggagtggcctacctttcatctaacaaagacaagagaattgaacgctgattgtctttgtctttgaagggtttattgctttacctcttcacttcacctggctttggcacctctgtcatttcttcatttactgttttttctagcatacttttaacttctttctgtactttctctttccaactgctgtccacatgccacctgtgtatagaatcccaagaaaacataacccaccattagaattttagttgctaaactatataagaactttgagctgtagattaacatcctctaccttcctttggtgccatttgtttacccctttttccgaacaaaaaacaatacctgcccctgttccaaaggtgtcttactattccaataaagaatgcatgcctgggaataaaaagaagcttagactactgttccaatggagctaagtgttcaaagaaattcctgaattcatttcctgggggaaaaaatgtggttagtgacctggaaactactaacaacttataaaactcaatactctgatggcgactctgttcgctttacccctaagacatcttgaaaggaaagacttttgtcagagttgggcttctaaagttttaataggaaattgaggcactttctgtataattcaagccaaagatttttttttttctgggtttgaatgattggataattgcctcaattctctgttccatgtaattgagatcacttgactcttcttagtgctaataaagagatgttgggattcacggtttattaaccaaacttttcagtttgtggacctgtcattcaaaactgcaaacaaggctgatcccatgcaaaatagactactgcctttatgctgtactaagaatcagtccctcttaaaggatgcatttataacctttatgcaatgaggaaatttccaggtagccaattttctttatagtgctaccagccttcagcaagcttaaactctgccctgcaagcctgaaaccctgcttctctaagattctacataacaggagattaaacatccaaatgtgtataatcgcattctggacagtatgaagaagctgtcttggaatattgttaactattagaatacttaaagtgtgcacatcacccaatttaggatttcttggtaatagtagcctatactttagaaaattaaagaggaggaaggggccgggcacagcggctcacacctataatcccagcactttgggaggccgaggtgggcagatcacttgaggtcaggagtttgagaccagcttggccaacatggagaaacgccatctctactaaaaatacaacaaataattagccaggtgtggtggcctgtgcctgtaatcccagctactttggaggctgaggcagggaatcgcttgaacctgggaagcggaggttgcagtgagccaagattgcaccactgcactccagctagggtgacagagtgtgaccctgtctccaaaaaaaaaaaaaaaaaag

SEQ ID NO: 9190 - DNA, 2239 bp, Homo sapiens; identical to SEQ ID NO: 9189

SEQ ID NO: 9191 - DNA, 452 bp, Homo sapiens
gaggggcggtctccatttgcttggtacctagcccctggggtgagttagggcaatttctatattggcttggtgtgtgaaagttagataaaggggaaggttgcggctatgttcttgacaatagttagatatgctcagggctcagtcctttgctgtctccaagaattagctagtcctgggagtctcttccctgccagcaaaatttataagataccagaacatcataagatacagaaaaaaaaccgtgatgaatgcaacttcacaatattgcctcctttttccttgcactgcctttccctgatccctctaccactttggttattgtgacagcaacaagattcatctttcaaccatctacaccaggggtcagcaaactatgggctgatggccagatctagccagctgcttgttttgtatggcccacaaggtaacaatgctagaaaaaaaaaaagaag

SEQ ID NO: 9192 - DNA, 501 bp, Homo sapiens
ctgcttggagaaaatgaaagttagcaaaaatcacctttctccagatgaatcgttgtgggaaagtaagtttagcagaatgtgctgtcaacttggttgagataaggcagttggaggactggcattattaaattttctgtggtgcaattaggggtcctcctaagtgcaggtgagctgtggtgaggagttaatgtatgctcagtaaatatgtgctgaatgcatgagcaaggcagttattaatctggttatcattggggattcacaaatttcactttatatcttgtaacaaatctcaaattgtgcccctgaaacatctggattttgaaaagtgattccaatccattgtcatgggtggcactattcccagaaatcaacaaaggaaatccaagccactgagggtttttaaaaaattttgagtattaactagactgttatactcttctgtgtttatatgtagtaccaataatcaagacaataaatccatctttaacaataatataaaaa

SEQ ID NO: 9193 - DNA, 501 bp, Homo sapiens; identical to SEQ ID NO: 9192

SEQ ID NO: 9194 - DNA, 452 bp, Homo sapiens; identical to SEQ ID NO: 9191

SEQ ID NO: 9195 - DNA, 3690 bp, Homo sapiens
gccttcctgaccctagatgggctttgtaaaaagagcaagtcgtgtgtgccagcctgtgcagcagtgagggcacaggcagcaccagggtcccgggtgtgtgggtgctgccccagcttgcagtgtggtctcctcggtgctggccacagctgtgggtccccaggaatattgtgctgcaggtcttagacagatttgggtactactggttctctgttcagcgtggcctggacagtccacagatggtagtagaccatggggtgttgagatgcaaggagactctgccgttctttcacattctgcttttgctcctgacagcttaggaaagctctctttgaaactttggtatgtgtggacctgagattgaatgtatctgaaaggttgctaatttctcactgtccttgcttcccaggacgccaggaaagcatgtgcagatgcaactctctctcaggtaagagcccactgagtcacgcagagccatctgcctgtgaggaggctagcacggcacccacacctggagcctcgggagggctctgcttgcattctctgttgcgcagtgaggatgccaagccactgcttttattaagaagtcattctgatggtaggcataggaaatagaggggcttattgagataaaaatgagatatctcaagccttgaataatcatctacctgttacagagggtaatagttgtaaaatattgttattgtcttaagatattttgaagctcctctcctcaacagaatctgcctcagaacttctatttctaatatccaatttgataatacctcaaaaagttaaacatagaattattgtatgactcagcagttctgccattaaatatatgcccaacaggattgaacactgcttttcaaacacacacatgtacatagcagcaccattcacaatagccaaaatgtagaaacaaccaaaatgtgcataaatgaatgagtggagaaacaaattgtggtgtctctgtgccctggagtattatcagccattaaatggacgtcagtacagtcagaggctgcaacgtggataaaccccataaatattacgatagtgagagaagccaaacaaatggctatgtattgtttagttctatttatatgaaatatctagaatagtaacattcactgagacagagtggactagtggccagcaggggtgttaggggagagagggagaggaagtgaacagggagtgactgctgaatcaatgtctggtctccttttggaagatggtttggaactagatggtggcagtggttttacaacaatgagtgtactaaatgccactgaactgtagactttaaagtgattaattggatgttacgtgaacttcaccttattaaaaaaatgaagtccatcccagcactttgggaggccgaggcaggtggatcacttgaggtcaggagttcgagaccagcctaaccaacatggtgaaaccctgtccctactaaaatacaaaaattagccaggcatggtggcacacacctgtaatcccagctactcagggggctgaggcaggagaattgcttggacccgggaggcagaggttgcagtgagcagagatcgcaccactgcactccagcctgggagacagagcgagactccatcttaaaaaaaaaaaaaaaaaaaaaagataataaaaataaagtccaaataattggacagaaatgtgaaagaaaaactatattcctacttctactgaagatgattaagttttttacattgtctaaatgctttaggggatgtgctttaattgaggttaaattgtaagttaaagaaaaaaaaattaggctacatagaattacctgaatttcaattctgagaagcactttggactgtccgtttttaaaacccactattgtaatccacttactccgtttgccaacctaaactcattaacatcagtgtctatatgtaggatgggctcagcaggtgtgtgtacagctggtgctccaagtgatggtcgtgcagaagcaggtgtcatgcaggcccacacatagcctgacataggaaccagctattaaattgtggtgtgggacatctgtgtggtgtcataagaagagttgcgagatctcaaagaactcagagacctaggaggagatggtcctggatggacagggagaggaggaaggaagcaggaagggaacagcaagtgcttcaaggctggccatgttcgtgtgcgtgcattggagggcagggcacacaggttcctgatgaccagccagactgagacttggtaagaggtacggaaggggttcagtgcagaatgccacagtggaagccactggagaactgtgggaagggctgggaagaggtaggcacagtgggcgagccaacagccttgacaaggatgggtgatgaggagaatcgtttaatcacagatgttgatttacagaaatgtttttattttcaagatcacaaacaacatcgacccagtgggaagaatccaaatgcgcacgaggaggacactgcgggggcacctggccaagatctacgccatgcactggggcacagactccaggtaggcgtgggcatgagcaggatgctgcttgttacattcaggggctgctctgttgtcctaggggaaaagtacctgaacccatttgctgtgctgtgcagtgaagaaattaggaagttgaatcagaactctgggcacgcaaggtgcagcgttcacaggtgcatattccctgtccagttttccacttacctgggctgaaagaacactgccatttcttcactgtctgaatcacattaatacaagttctgatttttctttctcccttctcctgtctctttcagtttctagacctctgtcttcccagttctactgcatcctacttatgtgaactggggaagttacctctctgtgcctgtttctcaagggctggttggccctcgccctcttgtgatgtcagtgccctggctcaggaaatcacagaacctgccccgaggatcctgagggattaagtgtattgagccttagaacagcattgtgctgtgtgtgctttgctgcggcagacacacgggaatgcgctgtgagctgctctcaccattctctcatctggcctgtctgccctgccttcctttggtttaccatcccaagagataattcccttcatgggctcctatttgttcttttcttttctctttttttttttttttttaaagacggagtctcactgtgttgcccagcctggagtgcggtggggcaatctcggctcactgcaagctccgcctcccgggttcacgccattctcctgcctcaccctccctagtagctgggactacaggcgcctgccaccacactggctaatttttttgtatttttagtagagatggggtttcaccatgttagccaggatggtctggatctcctgacttcacgatccacccgcctcggcctcccaaagtgatgggattacaggcgtgagccactacgcccagcctctttttttctttttttttttttttttttttttgagacagggtctcactcagtcatgctggagtgcagtggtgtgatcatatctcactgcagcctcgacgtcctaggctccagtaacccttcctactcagcctcccaagtggcataggccacaggcatgtgccaccatgcctggctaatattttttggttttttacagagacagggtctccctttgttgctgacactggtctcaaactc

SEQ ID NO: 9196 - DNA, 142 bp, Homo sapiens; identical to SEQ ID NO: 5400

SEQ ID NO: 9197 - DNA, 1202 bp, Homo sapiens
aagaaaagaaaagaaaatataaggatgtaaaagaagcaatttgcttgcacatctgaatatccttcttgtgcctccattttcactcttgaaaactgaaagcaatttgacttttatttttgtttttctaaagaacagctaggtgaaaggaggttaagctgattgtcactctgcctgcccactacctactccccaccatggtgtttcatgaaacatccccaccacctgaagtgatctttttaatccttgtgatagtaaatgcattgataattaacaggaaaaacatgtttttaaataatctacaaatgagaacccaaatagtagtgttttgtttgacagaagtaaatcaaatattatggtttaaatataatgcaaaatttcaggacagttaatttggacttcccttaccctaagagggtttttcttataataaggagaagaggtgtggttcaaagaaaattaagagacaaaaccttcaggtacataatgcatgaaaatctttaaatgcctgcaaaaattaagttctgttataataccagccaattctgaattagccaatgccctaaaagcatctaacaatttaaggttatcttatgagtcctatgaaaacaattatttgttgctaaatttgagttttagctaccaacgccatgtttacgtgacaagaaattgttttggccctgtggtttatgacgtgctgctggataagcatttatgtaaaactgagtatttcaaagagaaccatttacaattggaatttccacctgtgtggctgtttgcagacctacctctgtcttccattttgcatcctgtcagtgctataattagtttgatcactttgtcttgtttttcagtgtctacaattatagcttattcactatgttctaactatttaaaaataatgggccgggcgcggtggctcatgcctgtaatcccagcactttgggaggccgaggtgagcagatcacaaggtcaggagatcgagaccatcctggctaacacagtgaaaccccgtctctactaaaaatacaaaaaaattagtcgggcatggtggcgggcgcctgtagtcccagctactcgggaggctgaggcaggagaatggcgtgaacctgggaggcagagcttgcagtgagccaagattgtgcccctgcactccagcctgggcaacagagcgagactctgtctcaaaaaaaaaaaaaaaaaaa

SEQ ID NO: 9198 - DNA, 184 bp, Homo sapiens; identical to SEQ ID NO: 5421

SEQ ID NO: 9199 - DNA, 143 bp, Homo sapiens; identical to SEQ ID NO: 5446

SEQ ID NO: 9200 - DNA, 183 bp, Homo sapiens; identical to SEQ ID NO: 5243

SEQ ID NO: 9201 - DNA, 175 bp, Homo sapiens; identical to SEQ ID NO: 5462

SEQ ID NO: 9202 - DNA, 162 bp, Homo sapiens; identical to SEQ ID NO: 5244

SEQ ID NO: 9203 - DNA, 193 bp, Homo sapiens; identical to SEQ ID NO: 5245

SEQ ID NO: 9204 - DNA, 1209 bp, Homo sapiens
aagaaaagaaaagaaaatataaggatgtaaaagaagctatttgcttgcacatctgaatatccttcttgtgcctccattttcactcttgaaaactgaaagcaatttgacttttatttttgtttttctaaagaacagctaggtgaaaggaggttaagctgattgtcactctgcctgcccactacctactccccaccatggtgtttcatgaaacatccccaccacctgaagtgatctttttaatccttgtgatagtaaatgcattgataattaacaggaaaaacatgtttttaaataatctacaaatgagaacccaaatagtagtgttttgtttgacagaagtaaatcaaatattatggtttaaatataatgcaaaatttcaggacagttaatttggacttcccttaccctaagagggtttttcttataataaggagaagaggtgtggttcaaagaaaattaagagacaaaaccttcaggtacataatgcatgaaaatctttaaatgcctgcaaaaattaagttctgttataataccagccaattctgaattagccaatgccctaaaagcatctaacaatttaaggttatcttatgagtcctatgaaaacaattatttgttgctaaatttgagttttagctaccaacgccatgtttacgtgacaagaaattgttttggccctgtggtttatgacgtgctgctggataagcatttatgtaaaactgagtatttcaaagagaaccatttacaattggaatttccacctgtgtggctgtttgcagacctacctctgtcttccattttgcatcctgtcagtgctataattagtttgatcactttgtcttgtttttcagtgtctacaattatagcttattcactatgttctaactatttaaaaataatgggccgggcgcggtggctcatgcctgtaatcccagcactttgggaggccgaggtgagcagatcacaaggtcaggagatcgagaccatcctggctaacacagtgaaaccccgtctctactaaaaatacaaaaaaattagtcgggcatggtggcgggcgcctgtagtcccagctactcgggaggctgaggcaggagaatggcgtgaacctgggaggcagagcttgcagtgagccaagattgtgccactgcactccagcctgggcaacagagcgagactctgtctcaaaaaaaaaaaaaaaaaaaaaaaaaa

SEQ ID NO: 9205 - DNA, 187 bp, Homo sapiens; identical to SEQ ID NO: 5506

SEQ ID NO: 9206 - DNA, 153 bp, Homo sapiens; identical to SEQ ID NO: 5246

SEQ ID NO: 9207 - DNA, 193 bp, Homo sapiens; identical to SEQ ID NO: 5539

SEQ ID NO: 9208 - DNA, 136 bp, Homo sapiens; identical to SEQ ID NO: 5560

SEQ ID NO: 9209 - DNA, 150 bp, Homo sapiens; identical to SEQ ID NO: 5248

SEQ ID NO: 9210 - DNA, 142 bp, Homo sapiens; identical to SEQ ID NO: 5249

SEQ ID NO: 9211 - DNA, 181 bp, Homo sapiens; identical to SEQ ID NO: 5586

SEQ ID NO: 9212 - DNA, 166 bp, Homo sapiens; identical to SEQ ID NO: 5608

SEQ ID NO: 9213 - DNA, 379 bp, Homo sapiens
ggatatgagcctatatagttgccttattgtgcaagcttctacatttttcatgaagtggtccatgaagtgggctgtgaaaagttaaagacatgtattgtaatccctagagtaaccactaaataaataatgcaaagaagaatggctaaaaaggcaatagtaaaatattttaattctaaaataatattcaaataatttgttaaaatgcagaagaacaaaaaaaaagctagtataattacaataataaaatgatagacccaaaccaaaccatataaaccaaagataaacctgataatttgttgccctgttaataacatttaaattgttatctgcttgggaattctactttttttttttttttttgagacattatcttactctg

SEQ ID NO: 9214 - DNA, 268 bp, Homo sapiens; identical to SEQ ID NO: 5616

SEQ ID NO: 9215 - DNA, 368 bp, Homo sapiens; identical to SEQ ID NO: 5252

SEQ ID NO: 9216 - DNA, 4704 bp, Homo sapiens; identical to SEQ ID NO: 5253

SEQ ID NO: 9217 - DNA, 1658 bp, Homo sapiens
tacacaagcctccacccagcttctaattgtctcactgagaacagacaaaactccagtagaatccttgaatgacagctaattgtctccagaaaaaatccaaaattgcctccctcccttaattgtagtgcagcatgattctgtttttctgctgggcccctatttgcttctttctgtgcaatgaatcattgaaagagtgaccaccacggacttggagaatctttgtagcttttagtctgtgtttgggtgtggctggagagacaaattaacacacagagccggaccttgaaggggaaggtcctcatttgtctcagattgggatcatttggggaatcagaaaatgtttatatcagaaaagaagagaagtcaatgtgtttcgcaggtttgtggttttttgaaggagaaacatctagattctagtcctgttcctctgcctccttcttaggtgatgttagacaaaataattcacctctctgagtcaatttgcttatctgaaaaatagcaataacaacagcactcattttactagggcatgtgaataaacagatttttttcccattgagtggcaggtatttattgagtgcctactatgtgccaggcaccatcctactctctggggatacagcagtgaacaaaacagacgcacacctagtgatgagggatggagtaaagcccttagccgatgccaggacagaggacatgagtcacctgtagtcgctgccactgctgctatttcatggctacattttgacccctgtggacccactgaaacctcctcactgcctcacaggcagaacaaggacagggtcttggccaccaagtttactcacttgagctgcatttagattattcttccagctaggccatgacagtaggtagtggcagctctctgtaaagatgaggggtccccagctcggacccctggtttcctccacctgcctggaccttacagtggtagccaggtgtgtcctgctgactgggaagctccttacctgggtgcttgaagtatggctccttagcatgtgtggagagaaggctattatgatagcaacctgcaggggtgggatgtgtaccagaccttcaccctggaactcccgaggaagtgcctgcagattgcctggcaggtcttattcgggtgatgtagagcagaacgctggggccaggttctgaagtcagacccctggactcaactcacgcacaactccttacctccaaactgtgtggccttggtcaggggaactgacttctctgagcttcattttcttcatcttaaaaaaaaaaggagaatcacaccacctaccccatggagttgttatgaggcagagagatgtgatataaagcatgtacttggccaggcacagtggctcacgcctgtaatcccagcactttgggaggccgaggcagttggatcacttgaggtcaagagttcgagaccagcctggccaacatggttgaaaccccatctctaaaacactaaaagtagctgagcatggtggcacacacctgtagtcccagctacttgggaggctgaggtgagagaattgcttgaacccaggaggcggaggttgagtgcaccgagattgtgccactgcactccagcctgggtgacagagcgagaccctgtctcaaataaataaataaataaataaataaataatgaa

SEQ ID NO: 9218 - DNA, 1659 bp, Homo sapiens
tacacaagcctccacccagcttctaattgtctcactgagaacagacaaaactccagtagaatccttgaatgacagctaattgtctccagaaaaaatccaaaattgcctccctcccttaattgtagtgcagcatgattctgtttttctgctgggcccctatttgcttctttctgtgcaatgaatcactgaaagagtgaccaccacggacttggagaatctttgtagcttttagtctgtgcttgggcgtggctggagagacaaattaacacacagagtcggaccttgaagggccaaggtcctcatttgtctcagatcgggatcattcggggaaccagaaaatgtttatatcagaaaagaagagaagtcaatgtgtttcgcaggtttgtggttttttgaaggagaaacatctagattctagtcctgttcctctgcctccttcttaggtgatgttagacaaaataattcacctctctgagtcaatttgcttatctgaaaaatagcaataacaacagcactcattttactagggcatgtgaataaacagatttttttcccattgagtggcaggtatttattgagtgcctactatgtgccaggcaccatcctactctctggggatacagcagtgaacaaaacagacgcacacctagtgatgagggatggagtaaagcccttagccgatgccaggacagaggacatgagtcacctgtagtcgctgccactgctgctatttcatggctacattttgacccctgtggacccactgaaacctcctcactgcctcacaggcagaacaaggacagggtcttggccaccaagtttactcacttgagctgcatttagattattcttccagctaggccatgacagtaggtagtggcagctctctgtaaagatgaggggtccccagctcggacccctggtttcctccacctgcctggaccttacagtggtagccaggtgtgtcctgctgactgggaagctccttacctgggtgcttgaagtatggctccttagcatgtgtggagagaaggctattatgatagcaacctgcaggggtgggatgtgtaccagaccttcaccctggaactcccgaggaagtgcctgcagattgcctggcaggtcttattcgggtgatgtagagcagaacgctggggccaggttctgaagtcagacccctggactcaactcacgcacaactccttacctccaaactgtgtggccttggtcaggggaactgacttctctgagcttcattttcttcatcttaaaaaaaaaaggagaatcacaccacctaccccatggagttgttatgaggcagagagatgtgatataaagcatgtacttggccaggcacagtggctcacgcctgtaatcccagcactttgggaggccgaggcagttggatcacttgaggtcaagagttcgagaccagcctggccaacatggttgaaaccccatctctaaaacactaaaagtagctgagcatggtggcacacacctgtagtcccagctacttgggaggctgaggtgagagaattgcttgaacccaggaggcggaggttgagtgcaccgagattgtgccactgcactccagcctgggtgacagagcgagaccctgtctcaaataaataaataaataaataaataaataatgaa

SEQ ID NO: 9219 - DNA, 161 bp, Homo sapiens
ccgcctggtggtcctggaccacccccaccactgcaacgtcacctacaacgtcaataatggcatccagtatgtggccagccaggcggagcagaatgcgtcggaagtaggctccccaccctcctactccgaggccttgctggaccagaggtgtgtgctggatg

SEQ ID NO: 9220 - DNA, 301 bp, Homo sapiens
cagctgtggagctactggcagtcttgatagaacagcagtttctaggtagtgaccagattgcctggaattagtacagtcgaagcggcacgtacaggacaagaattcaagatgcttgacagtggagcacaagggcattagcttgagggacagccagaataaatggaaacttcattatccatggattatgcacttggaacttaggtcctaggcaactctgatattagtaatttggccagcaggctcattaagctcttaagaaaagtgggcctagttaatgaattaacacaagatgacattttac

SEQ ID NO: 9221 - DNA, 160 bp, Homo sapiens
ccgcctggtggtcctgaccacccccaccactgcaacgtcacctacaacgtcaataatggcatccagtatgtggccagccaggcggagcagaatgcgtcggaagtaggctccccaccctcctactccgaggccttgctggaccagaggtgtgtgctggatg

SEQ ID NO: 9222 - DNA, 301 bp, Homo sapiens; identical to SEQ ID NO: 9220

SEQ ID NO: 9223 - DNA, 2673 bp, Homo sapiens
gagccgctgtgaaaaaggcctccaccagcctctcaccagaagagattgctcattggaacgcaatgccacctggtgggggacgaggacagtgcgagcaagcagatgttatttcctactgacctaatttagagaacattaaacgtaagagagggaacatttggggttggaagcctgtgcccaaaaccttaaagagtgcaggcagctggccataaaagcagcttgagcaaacccctcattcagccgttgaaatgtgtgtgtgaacactttaaaggtttcctctgtgcttttcctgcgtgcatttggtcatcacagctgtgaagtggggtgggaatgtttcccctcgttttctaggagagaaattttgggttcagtgagacgaagtgctgcagacaggcccatggtgatgctcaggcctctgcttgaagttggtgctcacttcctggcaccacttcctgcccccaccagtgcttctggcagagcccagggcagtggctttatggaactgtgtaaggtgataggaacccacaggtggaatggccgtgtggcctctggactgaggagggctggaccaggttgtgggcacgcctggaacacacgccacatcctatcccatagcgaggcctcttccttgtggctctcgaaggatttgaggacgcgggagggtgaaatgtttccagagaaatatccaggacttttagaactaggctttcaaaagcatttacctgtcagataaattcaagtggcatcaatgcagattttaaatgtgtacagatatctccactcgcacgctgagttgtgcttcacacaagttttgcgcacggagtattccattaaatctactgaagcagtggggcaaggagaaaggagaggtgactgctgatgtttttaaagctctgacagtcacatatagattgtcccaggtacccctgctgcccccaagacactccaaaggcaaagatggatggtgacaaagtaaccttcatgcagaaacaagaacagtcacccccaacaacaagccctgctgaaggtgaagaatgccaccaggctgcctggcagttactgagtgcttattcctgctagcctattggagtcacgtcatatttgttacatggtaacttaattgtgccttccacgccttcacaaaatcagttgtacaagagaaggcacccaccacagtccatgtgacctttctcggtctgatttacatagtggggatgatgacactcgcgttgtagagtagttgcacgattaaacctggcacacagacataaagcactcaatgtctgacacatagtggactctcaagaagtttgtcatgcaggggacacttgaatgcccagtatgggccagacagcatcagctcatttcagtcccacagccctgtgagggaggaactctgccctgttttacagttagggaaattgaggcacaaaggctaagaagtcgatatccaagggcacagaatgattgggtgacggtgagcccaggcagtgtgacaacaaggttgctgccccacgccacctctgtctttcgtgggtatgtcggtgtgaggtgtaggcagccctgcactggcattcagcaggcgggactcccgggcaggctcttctgcgaacactcatgggccaccagccccttttggaacttgccttttttttttttttttacctgaaagctacgtgaatcgttggtaaattggtgtaaaaatggaactgagtcatctcaaaagttcctttcagttctaaaattctgtgaattgaagcctactttttcactttaaatgatttattgggtttacagttctttacgctttctgattgaactgatttgaagttcttatttcgtgtgttggggaacacacccccaacccgtcacagcgtggccgtgggtgggagatggacgttaggctggccagtcactagggggcagcatcagcacgggtctggctgtccctggccttagggagcagtttctgcccctcctgccccgtcagaaagtctcggactcctctctgcttgcatgtgtaaagttttcattttcaggggccttttagtcaaaaaaaataaagctgtatgacttagtgctgaaggatatgaattaggcgtagctcttgggttggcagcataaaccaaggggcatcaacccaccaccgacaagctaagaatggtttttacatctttaaatggttgaaaaaggaaaaagaatgtttagtgacacgtgaaaaatacatgaaattcaaacttcagtgtctacaaataaagtgcattagcacacggtcgtcttgcttctctatgtgttgtctgtgggtgctttgtcttatcccagcaaagtggaataactgggatggagacgctatggccctcgaagcctaaaatatttaccgtctgtcccttacaggaaaagcttgccataatcagcctcatctgaagaaagatgcacttcgcattatcttgaaggtcctgattttctgggaggagggactcgtgccctccttttcgggctctgctttcttggcacagtcagtagtttctggcgcttaagaaggcacagacgctaagtgggtgcagtgagcccaggcagtgcgcggcactgagcggttaggaagttgctggttcttatgcacagtcattcagcaaaccttggctgggagctcagcctagcgaggggcatcctagc

SEQ ID NO: 9224 - DNA, 2673 bp, Homo sapiens
gagccgctgtgaaaaaggcctccaccagcctctcaccagaagagattgctcattggaacgcaatgccacctggtgggggacgaggacagtgcgagcaagcagatgttatttcctactgacctaatttagagaacattaaacgtaagagagggaacatttggggttggaagcctgtgcccaaaaccttaaagagtgcaggcagctggccataaaagcagcttgagcaaacccctcattcagccgttgaaatgtgtgtgtgaacactttaaaggtttcctctgtgcttttcctgcgtgcatttggtcatcacagctgtgaagtggggtgggaatgtttcccctcgttttctaggagagaaattttgggttcagtgagacgaagtgctgcagacaggcccatggtgatgctcaggcctctgcttgaagttggtgctcacttcctggcaccacttcctgcccccaccagtgcttctggcagagcccagggcagtggctttatggaactgtgtaaggtgataggaacccacaggtggaatggccgtgtggcctctggactgaggagggctggaccaggttgtgggcacgcctggaacacacgccacatcctatcccatagcgaggcctcttccttgtggctctcgaaggatttgaggacgcgggagggtgaaatgtttccagagaaatatccaggacttttagaactaggctttcaaaagcatttacctgtcagataaattcaagtggcatcaatgcagattttaaatgtgtacagatatctccactcgcacgctgagttgtgcttcacacaagttttgcgcacggagtattccattaaatctactgaagcagtggggcaaggagaaaggagaggtgactgctgatgtttttaaagctctgacagtcacatatagattgtcccaggtacccctgctgcccccaagacactccaaaggcaaagatggatggtgacaaagtaaccttcatgcagaaacaagaacagtcacccccaacaacaagccctgctgaaggtgaagaatgccaccaggctgcctggcagttactgagtgcttattcctgctagcctattggagtcacgtcatatttgttacatggtaacttaattgtgccttccacgccttcacaaaatcagttgtacaagagaaggcacccaccacagtccatgtgacctttctcggtctgatttacatagtggggatgatgacactcgcgttgtagagtagttgcacgattaaacctggcacacagacataaagcactcaatgtctgacacatagtggactctcaagaagtttgtcatgcaggggacacttgaatgcccagtatgggccagacagcatcagctcatttcagtcccacagccctgtgagggaggaactctgccctgttttacagttagggaaattgaggcacaaaggctaagaagtcgatatccaagggcacagaatgattgggtgacggtgagcccaggcagtgtgacaacaaggttgctgccccacgccacctctgtctttcgtgggtatgtcggtgtgaggtgtaggcagccctgcactggcattcagcaggcgggactcccgggcaggctcttctgcgaacactcatgggccaccagccctttctggaacttgccttttttttttttttttacctgaaagctacgtgaatcgttggtaaattggtgtaaaaatggaactgagtcatctcaaaagttcctttcagttctaaaattctgtgaattgaagcctactttttcactttaaatgatttattgggtttacagttctttacgctttctgattgaactgatttgaagttcttatttcgtgtgttggggaacacacccccaacccgtcacagcgtggccgtgggtgggagatggacgttaggctggccagtcactagggggcagcatcagcacgggtctggctgtccctggccttagggagcagtttctgcccctcctgccccgtcagaaagtctcggactcctctctgcttgcatgtgtaaagttttcattttcaggggccttttagtcaaaaaaaataaagctgtatgacttagtgctgaaggatatgaattaggcgtagctcttgggttggcagcataaaccaaggggcatcaacccaccaccgacaagctaagaatggtttttacatctttaaatggttgaaaaaggaaaaagaatgtttagtgacacgtgaaaaatacatgaaattcaaacttcagtgtctacaaataaagtgcattagcacacggtcgtcttgcttctctatgtgttgtctgtgggtgctttgtcttatcccagcaaagtggaataactgggatggagacgctatggccctcgaagcctaaaatatttaccgtctgtcccttacaggaaaagcttgccataatcagcctcatctgaagaaagatgcacttcgcattatcttgaaggtcctgattttctgggaggagggactcgtgccctccttttcgggctctgctttcttggcacagtcagtagtttctggcgcttaagaaggcacagacgctaagtgggtgcagtgagcccaggcagtgcgcggcactgagcggttaggaagttgctggttcttatgcacagtcattcagcaaaccttggctgggagctcagcctagcgaggggcatcctagc

SEQ ID NO: 9225 - DNA, 353 bp, Homo sapiens
tccagagacaggcaggggcaggcaggggctgcaggcacctgcttcaccgcgggagggagccaggagaagtgggtcccagaggaaaatcttcctgtacacgggctgcattagtggtacctgagggcatctggaagaccgtggttctccttgcaacagtcacctaatggccttcagtgaaaagacagactccttgactctctctttccccaaacacattcctacagagtggaagtttccagagaaaacagccatcaaagaaggttgagagtgagaattaagagacactggagaagatcaagagaatgtgccctgaagacaacaacaaaaatcaataaaagatttcaagaatgaaa

SEQ ID NO: 9226 - DNA, 353 bp, Homo sapiens; identical to SEQ ID NO: 9225

SEQ ID NO: 9227 - DNA, 2236 bp, Homo sapiens
  SITE (996): n equals a,t,g, or c
  SITE (997): n equals a,t,g, or c
  SITE (998): n equals a,t,g, or c
  SITE (999): n equals a,t,g, or c
  SITE (1000): n equals a,t,g, or c
  SITE (1001): n equals a,t,g, or c
  SITE (1002): n equals a,t,g, or c
  SITE (1003): n equals a,t,g, or c
  SITE (1004): n equals a,t,g, or c
  SITE (1005): n equals a,t,g, or c
  SITE (1006): n equals a,t,g, or c
  SITE (1007): n equals a,t,g, or c
  SITE (1008): n equals a,t,g, or c
  SITE (1009): n equals a,t,g, or c
  SITE (1010): n equals a,t,g, or c
  SITE (1011): n equals a,t,g, or c
  SITE (1012): n equals a,t,g, or c
  SITE (1013): n equals a,t,g, or c
  SITE (1014): n equals a,t,g, or c
  SITE (1015): n equals a,t,g, or c
  SITE (1016): n equals a,t,g, or c
  SITE (1017): n equals a,t,g, or c
  SITE (1018): n equals a,t,g, or c
  SITE (1019): n equals a,t,g, or c
  SITE (1020): n equals a,t,g, or c
  SITE (1021): n equals a,t,g, or c
  SITE (1022): n equals a,t,g, or c
  SITE (1023): n equals a,t,g, or c
  SITE (1024): n equals a,t,g, or c
  SITE (1025): n equals a,t,g, or c
  SITE (1026): n equals a,t,g, or c
  SITE (1027): n equals a,t,g, or c
  SITE (1028): n equals a,t,g, or c
  SITE (1029): n equals a,t,g, or c
  SITE (1030): n equals a,t,g, or c
  SITE (1031): n equals a,t,g, or c
  SITE (1032): n equals a,t,g, or c
  SITE (1033): n equals a,t,g, or c
  SITE (1034): n equals a,t,g, or c
  SITE (1035): n equals a,t,g, or c
  SITE (1036): n equals a,t,g, or c
  SITE (1037): n equals a,t,g, or c
  SITE (1038): n equals a,t,g, or c
  SITE (1039): n equals a,t,g, or c
  SITE (1040): n equals a,t,g, or c
  SITE (1041): n equals a,t,g, or c
  SITE (1042): n equals a,t,g, or c
  SITE (1043): n equals a,t,g, or c
  SITE (1044): n equals a,t,g, or c
  SITE (1045): n equals a,t,g, or c
  SITE (1046): n equals a,t,g, or c
  SITE (1047): n equals a,t,g, or c
  SITE (1048): n equals a,t,g, or c
  SITE (1049): n equals a,t,g, or c
  SITE (1050): n equals a,t,g, or c
  SITE (1051): n equals a,t,g, or c
  SITE (1052): n equals a,t,g, or c
  SITE (1053): n equals a,t,g, or c
  SITE (1054): n equals a,t,g, or c
  SITE (1055): n equals a,t,g, or c
  SITE (1056): n equals a,t,g, or c
  SITE (1057): n equals a,t,g, or c
  SITE (1058): n equals a,t,g, or c
  SITE (1059): n equals a,t,g, or c
  SITE (1060): n equals a,t,g, or c
  SITE (1061): n equals a,t,g, or c
  SITE (1062): n equals a,t,g, or c
  SITE (1063): n equals a,t,g, or c
  SITE (1064): n equals a,t,g, or c
  SITE (1065): n equals a,t,g, or c
  SITE (1066): n equals a,t,g, or c
  SITE (1067): n equals a,t,g, or c
  SITE (1068): n equals a,t,g, or c
  SITE (1069): n equals a,t,g, or c
  SITE (1070): n equals a,t,g, or c
  SITE (1071): n equals a,t,g, or c
  SITE (1072): n equals a,t,g, or c
  SITE (1073): n equals a,t,g, or c
  SITE (1074): n equals a,t,g, or c
  SITE (1075): n equals a,t,g, or c
  SITE (1076): n equals a,t,g, or c
  SITE (1077): n equals a,t,g, or c
  SITE (1078): n equals a,t,g, or c
  SITE (1079): n equals a,t,g, or c
  SITE (1080): n equals a,t,g, or c
  SITE (1081): n equals a,t,g, or c
  SITE (1082): n equals a,t,g, or c
  SITE (1083): n equals a,t,g, or c
  SITE (1084): n equals a,t,g, or c
  SITE (1085): n equals a,t,g, or c
  SITE (1086): n equals a,t,g, or c
  SITE (1087): n equals a,t,g, or c
  SITE (1088): n equals a,t,g, or c
  SITE (1089): n equals a,t,g, or c
  SITE (1090): n equals a,t,g, or c
  SITE (1091): n equals a,t,g, or c
  SITE (1092): n equals a,t,g, or c
  SITE (1093): n equals a,t,g, or c
  SITE (1094): n equals a,t,g, or c
  SITE (1095): n equals a,t,g, or c
  SITE (1096): n equals a,t,g, or c
  SITE (1097): n equals a,t,g, or c
  SITE (1098): n equals a,t,g, or c
  SITE (1099): n equals a,t,g, or c
  SITE (1100): n equals a,t,g, or c
  SITE (1101): n equals a,t,g, or c
  SITE (1102): n equals a,t,g, or c
  SITE (1103): n equals a,t,g, or c
  SITE (1104): n equals a,t,g, or c
  SITE (1105): n equals a,t,g, or c
  SITE (1106): n equals a,t,g, or c
  SITE (1107): n equals a,t,g, or c
  SITE (1108): n equals a,t,g, or c
  SITE (1109): n equals a,t,g, or c
  SITE (1110): n equals a,t,g, or c
  SITE (1111): n equals a,t,g, or c
  SITE (1112): n equals a,t,g, or c
  SITE (1113): n equals a,t,g, or c
  SITE (1114): n equals a,t,g, or c
  SITE (1115): n equals a,t,g, or c
  SITE (1116): n equals a,t,g, or c
  SITE (1117): n equals a,t,g, or c
  SITE (1118): n equals a,t,g, or c
  SITE (1119): n equals a,t,g, or c
  SITE (1120): n equals a,t,g, or c
  SITE (1121): n equals a,t,g, or c
  SITE (1122): n equals a,t,g, or c
  SITE (1123): n equals a,t,g, or c
  SITE (1124): n equals a,t,g, or c
  SITE (1125): n equals a,t,g, or c
  SITE (1126): n equals a,t,g, or c
  SITE (1127): n equals a,t,g, or c
  SITE (1128): n equals a,t,g, or c
  SITE (1129): n equals a,t,g, or c
  SITE (1130): n equals a,t,g, or c
  SITE (1131): n equals a,t,g, or c
  SITE (1132): n equals a,t,g, or c
  SITE (1133): n equals a,t,g, or c
  SITE (1134): n equals a,t,g, or c
  SITE (1135): n equals a,t,g, or c
  SITE (1136): n equals a,t,g, or c
  SITE (1137): n equals a,t,g, or c
  SITE (1138): n equals a,t,g, or c
  SITE (1139): n equals a,t,g, or c
  SITE (1140): n equals a,t,g, or c
  SITE (1141): n equals a,t,g, or c
  SITE (1142): n equals a,t,g, or c
  SITE (1143): n equals a,t,g, or c
  SITE (1144): n equals a,t,g, or c
  SITE (1145): n equals a,t,g, or c
  SITE (1146): n equals a,t,g, or c
  SITE (1147): n equals a,t,g, or c
  SITE (1148): n equals a,t,g, or c
  SITE (1149): n equals a,t,g, or c
  SITE (1150): n equals a,t,g, or c
  SITE (1151): n equals a,t,g, or c
  SITE (1152): n equals a,t,g, or c
  SITE (1153): n equals a,t,g, or c
  SITE (1154): n equals a,t,g, or c
  SITE (1155): n equals a,t,g, or c
  SITE (1156): n equals a,t,g, or c
  SITE (1157): n equals a,t,g, or c
  SITE (1158): n equals a,t,g, or c
  SITE (1159): n equals a,t,g, or c
  SITE (1160): n equals a,t,g, or c
  SITE (1161): n equals a,t,g, or c
  SITE (1162): n equals a,t,g, or c
  SITE (1163): n equals a,t,g, or c
  SITE (1164): n equals a,t,g, or c
  SITE (1165): n equals a,t,g, or c
  SITE (1166): n equals a,t,g, or c
  SITE (1167): n equals a,t,g, or c
  SITE (1168): n equals a,t,g, or c
  SITE (1169): n equals a,t,g, or c
  SITE (1170): n equals a,t,g, or c
  SITE (1171): n equals a,t,g, or c
  SITE (1172): n equals a,t,g, or c
  SITE (1173): n equals a,t,g, or c
  SITE (1174): n equals a,t,g, or c
  SITE (1175): n equals a,t,g, or c
  SITE (1176): n equals a,t,g, or c
  SITE (1177): n equals a,t,g, or c
  SITE (1178): n equals a,t,g, or c
  SITE (1179): n equals a,t,g, or c
  SITE (1180): n equals a,t,g, or c
  SITE (1181): n equals a,t,g, or c
  SITE (1182): n equals a,t,g, or c
  SITE (1183): n equals a,t,g, or c
  SITE (1184): n equals a,t,g, or c
  SITE (1185): n equals a,t,g, or c
  SITE (1186): n equals a,t,g, or c
  SITE (1187): n equals a,t,g, or c
  SITE (1188): n equals a,t,g, or c
  SITE (1189): n equals a,t,g, or c
  SITE (1190): n equals a,t,g, or c
  SITE (1191): n equals a,t,g, or c
  SITE (1192): n equals a,t,g, or c
  SITE (1193): n equals a,t,g, or c
  SITE (1194): n equals a,t,g, or c
  SITE (1195): n equals a,t,g, or c
  SITE (1196): n equals a,t,g, or c
  SITE (1197): n equals a,t,g, or c
  SITE (1198): n equals a,t,g, or c
  SITE (1199): n equals a,t,g, or c
  SITE (1200): n equals a,t,g, or c
  SITE (1201): n equals a,t,g, or c
  SITE (1202): n equals a,t,g, or c
  SITE (1203): n equals a,t,g, or c
  SITE (1204): n equals a,t,g, or c
  SITE (1205): n equals a,t,g, or c
  SITE (1206): n equals a,t,g, or c
  SITE (1207): n equals a,t,g, or c
  SITE (1208): n equals a,t,g, or c
  SITE (1209): n equals a,t,g, or c
  SITE (1210): n equals a,t,g, or c
  SITE (1211): n equals a,t,g, or c
  SITE (1212): n equals a,t,g, or c
  SITE (1213): n equals a,t,g, or c
  SITE (1214): n equals a,t,g, or c
  SITE (1215): n equals a,t,g, or c
  SITE (1216): n equals a,t,g, or c
  SITE (1217): n equals a,t,g, or c
  SITE (1218): n equals a,t,g, or c
  SITE (1219): n equals a,t,g, or c
  SITE (1220): n equals a,t,g, or c
  SITE (1221): n equals a,t,g, or c
  SITE (1222): n equals a,t,g, or c
  SITE (1223): n equals a,t,g, or c
  SITE (1224): n equals a,t,g, or c
  SITE (1225): n equals a,t,g, or c
  SITE (1226): n equals a,t,g, or c
  SITE (1227): n equals a,t,g, or c
  SITE (1228): n equals a,t,g, or c
  SITE (1229): n equals a,t,g, or c
  SITE (1230): n equals a,t,g, or c
  SITE (1231): n equals a,t,g, or c
  SITE (1232): n equals a,t,g, or c
  SITE (1233): n equals a,t,g, or c
  SITE (1234): n equals a,t,g, or c
  SITE (1235): n equals a,t,g, or c
  SITE (1236): n equals a,t,g, or c
  SITE (1237): n equals a,t,g, or c
  SITE (1238): n equals a,t,g, or c
  SITE (1239): n equals a,t,g, or c
  SITE (1240): n equals a,t,g, or c
  SITE (1241): n equals a,t,g, or c
  SITE (1242): n equals a,t,g, or c
  SITE (1243): n equals a,t,g, or c
  SITE (1244): n equals a,t,g, or c
  SITE (1245): n equals a,t,g, or c
  SITE (1246): n equals a,t,g, or c
  SITE (1247): n equals a,t,g, or c
  SITE (1248): n equals a,t,g, or c
  SITE (1249): n equals a,t,g, or c
  SITE (1250): n equals a,t,g, or c
  SITE (1251): n equals a,t,g, or c
  SITE (1252): n equals a,t,g, or c
  SITE (1253): n equals a,t,g, or c
  SITE (1254): n equals a,t,g, or c
  SITE (1255): n equals a,t,g, or c
  SITE (1256): n equals a,t,g, or c
  SITE (1257): n equals a,t,g, or c
  SITE (1258): n equals a,t,g, or c
  SITE (1259): n equals a,t,g, or c
  SITE (1260): n equals a,t,g, or c
  SITE (1261): n equals a,t,g, or c
  SITE (1262): n equals a,t,g, or c
  SITE (1263): n equals a,t,g, or c
  SITE (1264): n equals a,t,g, or c
  SITE (1265): n equals a,t,g, or c
  SITE (1266): n equals a,t,g, or c
  SITE (1267): n equals a,t,g, or c
  SITE (1268): n equals a,t,g, or c
  SITE (1269): n equals a,t,g, or c
  SITE (1270): n equals a,t,g, or c
  SITE (1271): n equals a,t,g, or c
  SITE (1272): n equals a,t,g, or c
  SITE (1273): n equals a,t,g, or c
  SITE (1274): n equals a,t,g, or c
  SITE (1275): n equals a,t,g, or c
  SITE (1276): n equals a,t,g, or c
  SITE (1277): n equals a,t,g, or c
  SITE (1278): n equals a,t,g, or c
  SITE (1279): n equals a,t,g, or c
  SITE (1280): n equals a,t,g, or c
  SITE (1281): n equals a,t,g, or c
  SITE (1282): n equals a,t,g, or c
  SITE (1283): n equals a,t,g, or c
  SITE (1284): n equals a,t,g, or c
  SITE (1285): n equals a,t,g, or c
  SITE (1286): n equals a,t,g, or c
  SITE (1287): n equals a,t,g, or c
  SITE (1288): n equals a,t,g, or c
  SITE (1289): n equals a,t,g, or c
  SITE (1290): n equals a,t,g, or c
  SITE (1291): n equals a,t,g, or c
  SITE (1292): n equals a,t,g, or c
  SITE (1293): n equals a,t,g, or c
  SITE (1294): n equals a,t,g, or c
  SITE (1295): n equals a,t,g, or c
  SITE (1296): n equals a,t,g, or c
  SITE (1297): n equals a,t,g, or c
  SITE (1298): n equals a,t,g, or c
  SITE (1299): n equals a,t,g, or c
  SITE (1300): n equals a,t,g, or c
  SITE (1301): n equals a,t,g, or c
  SITE (1302): n equals a,t,g, or c
  SITE (1303): n equals a,t,g, or c
  SITE (1304): n equals a,t,g, or c
  SITE (1305): n equals a,t,g, or c
  SITE (1306): n equals a,t,g, or c
  SITE (1307): n equals a,t,g, or c
  SITE (1308): n equals a,t,g, or c
  SITE (1309): n equals a,t,g, or c
  SITE (1310): n equals a,t,g, or c
  SITE (1311): n equals a,t,g, or c
  SITE (1312): n equals a,t,g, or c
  SITE (1313): n equals a,t,g, or c
  SITE (1314): n equals a,t,g, or c
  SITE (1315): n equals a,t,g, or c
  SITE (1316): n equals a,t,g, or c
  SITE (1317): n equals a,t,g, or c
  SITE (1318): n equals a,t,g, or c
  SITE (1319): n equals a,t,g, or c
  SITE (1320): n equals a,t,g, or c
  SITE (1321): n equals a,t,g, or c
  SITE (1322): n equals a,t,g, or c
  SITE (1323): n equals a,t,g, or c
  SITE (1324): n equals a,t,g, or c
  SITE (1325): n equals a,t,g, or c
  SITE (1326): n equals a,t,g, or c
  SITE (1327): n equals a,t,g, or c
  SITE (1328): n equals a,t,g, or c
  SITE (1329): n equals a,t,g, or c
  SITE (1330): n equals a,t,g, or c
  SITE (1331): n equals a,t,g, or c
  SITE (1332): n equals a,t,g, or c
  SITE (1333): n equals a,t,g, or c
  SITE (1334): n equals a,t,g, or c
  SITE (1335): n equals a,t,g, or c
  SITE (1336): n equals a,t,g, or c
  SITE (1337): n equals a,t,g, or c
  SITE (1338): n equals a,t,g, or c
  SITE (1339): n equals a,t,g, or c
  SITE (1340): n equals a,t,g, or c
  SITE (1341): n equals a,t,g, or c
  SITE (1342): n equals a,t,g, or c
  SITE (1343): n equals a,t,g, or c
  SITE (1344): n equals a,t,g, or c
  SITE (1345): n equals a,t,g, or c
  SITE (1346): n equals a,t,g, or c
  SITE (1347): n equals a,t,g, or c
  SITE (1348): n equals a,t,g, or c
  SITE (1349): n equals a,t,g, or c
  SITE (1350): n equals a,t,g, or c
  SITE (1351): n equals a,t,g, or c
  SITE (1352): n equals a,t,g, or c
  SITE (1353): n equals a,t,g, or c
  SITE (1354): n equals a,t,g, or c
  SITE (1355): n equals a,t,g, or c
  SITE (1356): n equals a,t,g, or c
  SITE (1357): n equals a,t,g, or c
  SITE (1358): n equals a,t,g, or c
  SITE (1359): n equals a,t,g, or c
  SITE (1360): n equals a,t,g, or c
  SITE (1361): n equals a,t,g, or c
  SITE (1362): n equals a,t,g, or c
  SITE (1363): n equals a,t,g, or c
  SITE (1364): n equals a,t,g, or c
  SITE (1365): n equals a,t,g, or c
  SITE (1366): n equals a,t,g, or c
  SITE (1367): n equals a,t,g, or c
  SITE (1368): n equals a,t,g, or c
  SITE (1369): n equals a,t,g, or c
  SITE (1370): n equals a,t,g, or c
  SITE (1371): n equals a,t,g, or c
  SITE (1372): n equals a,t,g, or c
  SITE (1373): n equals a,t,g, or c
  SITE (1374): n equals a,t,g, or c
  SITE (1375): n equals a,t,g, or c
  SITE (1376): n equals a,t,g, or c
  SITE (1377): n equals a,t,g, or c
  SITE (1378): n equals a,t,g, or c
  SITE (1379): n equals a,t,g, or c
  SITE (1380): n equals a,t,g, or c
  SITE (1381): n equals a,t,g, or c
  SITE (1382): n equals a,t,g, or c
  SITE (1383): n equals a,t,g, or c
  SITE (1384): n equals a,t,g, or c
  SITE (1385): n equals a,t,g, or c
  SITE (1386): n equals a,t,g, or c
  SITE (1387): n equals a,t,g, or c
  SITE (1388): n equals a,t,g, or c
  SITE (1389): n equals a,t,g, or c
  SITE (1390): n equals a,t,g, or c
  SITE (1391): n equals a,t,g, or c
  SITE (1392): n equals a,t,g, or c
  SITE (1393): n equals a,t,g, or c
  SITE (1394): n equals a,t,g, or c
  SITE (1395): n equals a,t,g, or c
  SITE (1396): n equals a,t,g, or c
  SITE (1397): n equals a,t,g, or c
  SITE (1398): n equals a,t,g, or c
  SITE (1399): n equals a,t,g, or c
  SITE (1400): n equals a,t,g, or c
  SITE (1401): n equals a,t,g, or c
  SITE (1402): n equals a,t,g, or c
  SITE (1403): n equals a,t,g, or c
  SITE (1404): n equals a,t,g, or c
  SITE (1405): n equals a,t,g, or c
  SITE (1406): n equals a,t,g, or c
  SITE (1407): n equals a,t,g, or c
  SITE (1408): n equals a,t,g, or c
  SITE (1409): n equals a,t,g, or c
  SITE (1410): n equals a,t,g, or c
  SITE (1411): n equals a,t,g, or c
  SITE (1412): n equals a,t,g, or c
  SITE (1413): n equals a,t,g, or c
  SITE (1414): n equals a,t,g, or c
  SITE (1415): n equals a,t,g, or c
  SITE (1416): n equals a,t,g, or c
  SITE (1417): n equals a,t,g, or c
  SITE (1418): n equals a,t,g, or c
  SITE (1419): n equals a,t,g, or c
  SITE (1420): n equals a,t,g, or c
  SITE (1421): n equals a,t,g, or c
  SITE (1422): n equals a,t,g, or c
  SITE (1423): n equals a,t,g, or c
  SITE (1424): n equals a,t,g, or c
  SITE (1425): n equals a,t,g, or c
  SITE (1426): n equals a,t,g, or c
  SITE (1427): n equals a,t,g, or c
  SITE (1428): n equals a,t,g, or c
  SITE (1429): n equals a,t,g, or c
  SITE (1430): n equals a,t,g, or c
  SITE (1431): n equals a,t,g, or c
  SITE (1432): n equals a,t,g, or c
  SITE (1433): n equals a,t,g, or c
  SITE (1434): n equals a,t,g, or c
  SITE (1435): n equals a,t,g, or c
  SITE (1436): n equals a,t,g, or c
  SITE (1437): n equals a,t,g, or c
  SITE (1438): n equals a,t,g, or c
  SITE (1439): n equals a,t,g, or c
  SITE (1440): n equals a,t,g, or c
  SITE (1441): n equals a,t,g, or c
  SITE (1442): n equals a,t,g, or c
  SITE (1443): n equals a,t,g, or c
  SITE (1444): n equals a,t,g, or c
  SITE (1445): n equals a,t,g, or c
  SITE (1446): n equals a,t,g, or c
  SITE (1447): n equals a,t,g, or c
  SITE (1448): n equals a,t,g, or c
  SITE (1449): n equals a,t,g, or c
  SITE (1450): n equals a,t,g, or c
  SITE (1451): n equals a,t,g, or c
  SITE (1452): n equals a,t,g, or c
  SITE (1453): n equals a,t,g, or c
  SITE (1454): n equals a,t,g, or c
  SITE (1455): n equals a,t,g, or c
  SITE (1456): n equals a,t,g, or c
  SITE (1457): n equals a,t,g, or c
  SITE (1458): n equals a,t,g, or c
  SITE (1459): n equals a,t,g, or c
  SITE (1460): n equals a,t,g, or c
  SITE (1461): n equals a,t,g, or c
  SITE (1462): n equals a,t,g, or c
  SITE (1463): n equals a,t,g, or c
  SITE (1464): n equals a,t,g, or c
  SITE (1465): n equals a,t,g, or c
  SITE (1466): n equals a,t,g, or c
  SITE (1467): n equals a,t,g, or c
  SITE (1468): n equals a,t,g, or c
  SITE (1469): n equals a,t,g, or c
  SITE (1470): n equals a,t,g, or c
  SITE (1471): n equals a,t,g, or c
  SITE (1472): n equals a,t,g, or c
  SITE (1473): n equals a,t,g, or c
  SITE (1474): n equals a,t,g, or c
  SITE (1475): n equals a,t,g, or c
  SITE (1476): n equals a,t,g, or c
  SITE (1477): n equals a,t,g, or c
  SITE (1478): n equals a,t,g, or c
  SITE (1479): n equals a,t,g, or c
  SITE (1480): n equals a,t,g, or c
  SITE (1481): n equals a,t,g, or c
  SITE (1482): n equals a,t,g, or c
  SITE (1483): n equals a,t,g, or c
  SITE (1484): n equals a,t,g, or c
  SITE (1485): n equals a,t,g, or c
  SITE (1486): n equals a,t,g, or c
  SITE (1487): n equals a,t,g, or c
  SITE (1488): n equals a,t,g, or c
  SITE (1489): n equals a,t,g, or c
  SITE (1490): n equals a,t,g, or c
  SITE (1491): n equals a,t,g, or c
  SITE (1492): n equals a,t,g, or c
  SITE (1493): n equals a,t,g, or c
  SITE (1494): n equals a,t,g, or c
  SITE (1495): n equals a,t,g, or c
  SITE (1496): n equals a,t,g, or c
  SITE (1497): n equals a,t,g, or c
  SITE (1498): n equals a,t,g, or c
  SITE (1499): n equals a,t,g, or c
  SITE (1500): n equals a,t,g, or c
  SITE (1501): n equals a,t,g, or c
  SITE (1502): n equals a,t,g, or c
  SITE (1503): n equals a,t,g, or c
  SITE (1504): n equals a,t,g, or c
  SITE (1505): n equals a,t,g, or c
  SITE (1506): n equals a,t,g, or c
  SITE (1507): n equals a,t,g, or c
  SITE (1508): n equals a,t,g, or c
  SITE (1509): n equals a,t,g, or c
  SITE (1510): n equals a,t,g, or c
  SITE (1511): n equals a,t,g, or c
  SITE (1512): n equals a,t,g, or c
  SITE (1513): n equals a,t,g, or c
  SITE (1514): n equals a,t,g, or c
  SITE (1515): n equals a,t,g, or c
  SITE (1516): n equals a,t,g, or c
  SITE (1517): n equals a,t,g, or c
  SITE (1518): n equals a,t,g, or c
  SITE (1519): n equals a,t,g, or c
  SITE (1520): n equals a,t,g, or c
  SITE (1521): n equals a,t,g, or c
  SITE (1522): n equals a,t,g, or c
  SITE (1523): n equals a,t,g, or c
  SITE (1524): n equals a,t,g, or c
  SITE (1525): n equals a,t,g, or c
  SITE (1526): n equals a,t,g, or c
  SITE (1527): n equals a,t,g, or c
  SITE (1528): n equals a,t,g, or c
  SITE (1529): n equals a,t,g, or c
  SITE (1530): n equals a,t,g, or c
  SITE (1531): n equals a,t,g, or c
  SITE (1532): n equals a,t,g, or c
  SITE (1533): n equals a,t,g, or c
  SITE (1534): n equals a,t,g, or c
  SITE (1535): n equals a,t,g, or c
  SITE (1536): n equals a,t,g, or c
  SITE (1537): n equals a,t,g, or c
  SITE (1538): n equals a,t,g, or c
  SITE (1539): n equals a,t,g, or c
  SITE (1540): n equals a,t,g, or c
  SITE (1541): n equals a,t,g, or c
  SITE (1542): n equals a,t,g, or c
  SITE (1543): n equals a,t,g, or c
  SITE (1544): n equals a,t,g, or c
  SITE (1545): n equals a,t,g, or c
  SITE (1546): n equals a,t,g, or c
  SITE (1547): n equals a,t,g, or c
  SITE (1548): n equals a,t,g, or c
  SITE (1549): n equals a,t,g, or c
  SITE (1550): n equals a,t,g, or c
  SITE (1551): n equals a,t,g, or c
  SITE (1552): n equals a,t,g, or c
  SITE (1553): n equals a,t,g, or c
  SITE (1554): n equals a,t,g, or c
  SITE (1555): n equals a,t,g, or c
  SITE (1556): n equals a,t,g, or c
  SITE (1557): n equals a,t,g, or c
  SITE (1558): n equals a,t,g, or c
  SITE (1559): n equals a,t,g, or c
  SITE (1560): n equals a,t,g, or c
  SITE (1561): n equals a,t,g, or c
  SITE (1562): n equals a,t,g, or c
  SITE (1563): n equals a,t,g, or c
  SITE (1564): n equals a,t,g, or c
  SITE (1565): n equals a,t,g, or c
  SITE (1566): n equals a,t,g, or c
  SITE (1567): n equals a,t,g, or c
  SITE (1568): n equals a,t,g, or c
  SITE (1569): n equals a,t,g, or c
  SITE (1570): n equals a,t,g, or c
  SITE (1571): n equals a,t,g, or c
  SITE (1572): n equals a,t,g, or c
  SITE (1573): n equals a,t,g, or c
  SITE (1574): n equals a,t,g, or c
  SITE (1575): n equals a,t,g, or c
  SITE (1576): n equals a,t,g, or c
  SITE (1577): n equals a,t,g, or c
  SITE (1578): n equals a,t,g, or c
  SITE (1579): n equals a,t,g, or c
  SITE (1580): n equals a,t,g, or c
  SITE (1581): n equals a,t,g, or c
  SITE (1582): n equals a,t,g, or c
  SITE (1583): n equals a,t,g, or c
  SITE (1584): n equals a,t,g, or c
  SITE (1585): n equals a,t,g, or c
  SITE (1586): n equals a,t,g, or c
  SITE (1587): n equals a,t,g, or c
  SITE (1588): n equals a,t,g, or c
  SITE (1589): n equals a,t,g, or c
  SITE (1590): n equals a,t,g, or c
  SITE (1591): n equals a,t,g, or c
  SITE (1592): n equals a,t,g, or c
  SITE (1593): n equals a,t,g, or c
  SITE (1594): n equals a,t,g, or c
  SITE (1595): n equals a,t,g, or c
  SITE (1596): n equals a,t,g, or c
  SITE (1597): n equals a,t,g, or c
  SITE (1598): n equals a,t,g, or c
  SITE (1599): n equals a,t,g, or c
  SITE (1600): n equals a,t,g, or c
  SITE (1601): n equals a,t,g, or c
  SITE (1602): n equals a,t,g, or c
  SITE (1603): n equals a,t,g, or c
  SITE (1604): n equals a,t,g, or c
  SITE (1605): n equals a,t,g, or c
  SITE (1606): n equals a,t,g, or c
  SITE (1607): n equals a,t,g, or c
  SITE (1608): n equals a,t,g, or c
  SITE (1609): n equals a,t,g, or c
  SITE (1610): n equals a,t,g, or c
  SITE (1611): n equals a,t,g, or c
  SITE (1612): n equals a,t,g, or c
  SITE (1613): n equals a,t,g, or c
  SITE (1614): n equals a,t,g, or c
  SITE (1615): n equals a,t,g, or c
  SITE (1616): n equals a,t,g, or c
  SITE (1617): n equals a,t,g, or c
  SITE (1618): n equals a,t,g, or c
  SITE (1619): n equals a,t,g, or c
  SITE (1620): n equals a,t,g, or c
  SITE (1621): n equals a,t,g, or c
  SITE (1622): n equals a,t,g, or c
  SITE (1623): n equals a,t,g, or c
  SITE (1624): n equals a,t,g, or c
  SITE (1625): n equals a,t,g, or c
  SITE (1626): n equals a,t,g, or c
  SITE (1627): n equals a,t,g, or c
  SITE (1628): n equals a,t,g, or c
  SITE (1629): n equals a,t,g, or c
  SITE (1630): n equals a,t,g, or c
  SITE (1631): n equals a,t,g, or c
  SITE (1632): n equals a,t,g, or c
  SITE (1633): n equals a,t,g, or c
  SITE (1634): n equals a,t,g, or c
  SITE (1635): n equals a,t,g, or c
  SITE (1636): n equals a,t,g, or c
  SITE (1637): n equals a,t,g, or c
  SITE (1638): n equals a,t,g, or c
  SITE (1639): n equals a,t,g, or c
  SITE (1640): n equals a,t,g, or c
  SITE (1641): n equals a,t,g, or c
  SITE (1642): n equals a,t,g, or c
  SITE (1643): n equals a,t,g, or c
  SITE (1644): n equals a,t,g, or c
  SITE (1645): n equals a,t,g, or c
  SITE (1646): n equals a,t,g, or c
  SITE (1647): n equals a,t,g, or c
  SITE (1648): n equals a,t,g, or c
  SITE (1649): n equals a,t,g, or c
  SITE (1650): n equals a,t,g, or c
  SITE (1651): n equals a,t,g, or c
  SITE (1652): n equals a,t,g, or c
  SITE (1653): n equals a,t,g, or c
  SITE (1654): n equals a,t,g, or c
  SITE (1655): n equals a,t,g, or c
  SITE (1656): n equals a,t,g, or c
  SITE (1657): n equals a,t,g, or c
  SITE (1658): n equals a,t,g, or c
  SITE (1659): n equals a,t,g, or c
  SITE (1660): n equals a,t,g, or c
  SITE (1661): n equals a,t,g, or c
  SITE (1662): n equals a,t,g, or c
  SITE (1663): n equals a,t,g, or c
  SITE (1664): n equals a,t,g, or c
  SITE (1665): n equals a,t,g, or c
  SITE (1666): n equals a,t,g, or c
  SITE (1667): n equals a,t,g, or c
  SITE (1668): n equals a,t,g, or c
  SITE (1669): n equals a,t,g, or c
  SITE (1670): n equals a,t,g, or c
  SITE (1671): n equals a,t,g, or c
  SITE (1672): n equals a,t,g, or c
  SITE (1673): n equals a,t,g, or c
  SITE (1674): n equals a,t,g, or c
  SITE (1675): n equals a,t,g, or c
  SITE (1676): n equals a,t,g, or c
  SITE (1677): n equals a,t,g, or c
  SITE (1678): n equals a,t,g, or c
  SITE (1679): n equals a,t,g, or c
  SITE (1680): n equals a,t,g, or c
  SITE (1681): n equals a,t,g, or c
  SITE (1682): n equals a,t,g, or c
  SITE (1683): n equals a,t,g, or c
  SITE (1684): n equals a,t,g, or c
  SITE (1685): n equals a,t,g, or c
  SITE (1686): n equals a,t,g, or c
  SITE (1687): n equals a,t,g, or c
  SITE (1688): n equals a,t,g, or c
  SITE (1689): n equals a,t,g, or c
  SITE (1690): n equals a,t,g, or c
  SITE (1691): n equals a,t,g, or c
  SITE (1692): n equals a,t,g, or c
  SITE (1693): n equals a,t,g, or c
  SITE (1694): n equals a,t,g, or c
  SITE (1695): n equals a,t,g, or c
  SITE (1696): n equals a,t,g, or c
  SITE (1697): n equals a,t,g, or c
  SITE (1698): n equals a,t,g, or c
  SITE (1699): n equals a,t,g, or c
  SITE (1700): n equals a,t,g, or c
  SITE (1701): n equals a,t,g, or c
  SITE (1702): n equals a,t,g, or c
  SITE (1703): n equals a,t,g, or c
  SITE (1704): n equals a,t,g, or c
  SITE (1705): n equals a,t,g, or c
  SITE (1706): n equals a,t,g, or c
  SITE (1707): n equals a,t,g, or c
  SITE (1708): n equals a,t,g, or c
  SITE (1709): n equals a,t,g, or c
  SITE (1710): n equals a,t,g, or c
  SITE (1711): n equals a,t,g, or c
  SITE (1712): n equals a,t,g, or c
  SITE (1713): n equals a,t,g, or c
  SITE (1714): n equals a,t,g, or c
  SITE (1715): n equals a,t,g, or c
  SITE (1716): n equals a,t,g, or c
  SITE (1717): n equals a,t,g, or c
  SITE (1718): n equals a,t,g, or c
  SITE (1719): n equals a,t,g, or c
  SITE (1720): n equals a,t,g, or c
  SITE (1721): n equals a,t,g, or c
  SITE (1722): n equals a,t,g, or c
  SITE (1723): n equals a,t,g, or c
  SITE (1724): n equals a,t,g, or c
  SITE (1725): n equals a,t,g, or c
  SITE (1726): n equals a,t,g, or c
  SITE (1727): n equals a,t,g, or c
  SITE (1728): n equals a,t,g, or c
  SITE (1729): n equals a,t,g, or c
  SITE (1730): n equals a,t,g, or c
  SITE (1731): n equals a,t,g, or c
  SITE (1732): n equals a,t,g, or c
  SITE (1733): n equals a,t,g, or c
  SITE (1734): n equals a,t,g, or c
  SITE (1735): n equals a,t,g, or c
  SITE (1736): n equals a,t,g, or c
  SITE (1737): n equals a,t,g, or c
  SITE (1738): n equals a,t,g, or c
  SITE (1739): n equals a,t,g, or c
  SITE (1740): n equals a,t,g, or c
  SITE (1741): n equals a,t,g, or c
  SITE (1742): n equals a,t,g, or c
  SITE (1743): n equals a,t,g, or c
  SITE (1744): n equals a,t,g, or c
  SITE (1745): n equals a,t,g, or c
  SITE (1746): n equals a,t,g, or c
  SITE (1747): n equals a,t,g, or c
  SITE (1748): n equals a,t,g, or c
  SITE (1749): n equals a,t,g, or c
  SITE (1750): n equals a,t,g, or c
  SITE (1751): n equals a,t,g, or c
  SITE (1752): n equals a,t,g, or c
  SITE (1753): n equals a,t,g, or c
  SITE (1754): n equals a,t,g, or c
  SITE (1755): n equals a,t,g, or c
  SITE (1756): n equals a,t,g, or c
  SITE (1757): n equals a,t,g, or c
  SITE (1758): n equals a,t,g, or c
  SITE (1759): n equals a,t,g, or c
  SITE (1760): n equals a,t,g, or c
  SITE (1761): n equals a,t,g, or c
  SITE (1762): n equals a,t,g, or c
  SITE (1763): n equals a,t,g, or c
  SITE (1764): n equals a,t,g, or c
  SITE (1765): n equals a,t,g, or c
  SITE (1766): n equals a,t,g, or c
  SITE (1767): n equals a,t,g, or c
  SITE (1768): n equals a,t,g, or c
  SITE (1769): n equals a,t,g, or c
  SITE (1770): n equals a,t,g, or c
  SITE (1771): n equals a,t,g, or c
  SITE (1772): n equals a,t,g, or c
  SITE (1773): n equals a,t,g, or c
  SITE (1774): n equals a,t,g, or c
  SITE (1775): n equals a,t,g, or c
  SITE (1776): n equals a,t,g, or c
  SITE (1777): n equals a,t,g, or c
  SITE (1778): n equals a,t,g, or c
  SITE (1779): n equals a,t,g, or c
  SITE (1780): n equals a,t,g, or c
  SITE (1781): n equals a,t,g, or c
  SITE (1782): n equals a,t,g, or c
  SITE (1783): n equals a,t,g, or c
  SITE (1784): n equals a,t,g, or c
  SITE (1785): n equals a,t,g, or c
  SITE (1786): n equals a,t,g, or c
  SITE (1787): n equals a,t,g, or c
  SITE (1788): n equals a,t,g, or c
  SITE (1789): n equals a,t,g, or c
  SITE (1790): n equals a,t,g, or c
  SITE (1791): n equals a,t,g, or c
  SITE (1792): n equals a,t,g, or c
  SITE (1793): n equals a,t,g, or c
  SITE (1794): n equals a,t,g, or c
  SITE (1795): n equals a,t,g, or c
  SITE (1796): n equals a,t,g, or c
  SITE (1797): n equals a,t,g, or c
  SITE (1798): n equals a,t,g, or c
  SITE (1799): n equals a,t,g, or c
  SITE (1800): n equals a,t,g, or c
  SITE (1801): n equals a,t,g, or c
  SITE (1802): n equals a,t,g, or c
  SITE (1803): n equals a,t,g, or c
  SITE (1804): n equals a,t,g, or c
  SITE (1805): n equals a,t,g, or c
  SITE (1806): n equals a,t,g, or c
  SITE (1807): n equals a,t,g, or c
  SITE (1808): n equals a,t,g, or c
  SITE (1809): n equals a,t,g, or c
  SITE (1810): n equals a,t,g, or c
  SITE (1811): n equals a,t,g, or c
  SITE (1812): n equals a,t,g, or c
  SITE (1813): n equals a,t,g, or c
  SITE (1814): n equals a,t,g, or c
  SITE (1815): n equals a,t,g, or c
  SITE (1816): n equals a,t,g, or c
  SITE (1817): n equals a,t,g, or c
  SITE (1818): n equals a,t,g, or c
  SITE (1819): n equals a,t,g, or c
  SITE (1820): n equals a,t,g, or c
  SITE (1821): n equals a,t,g, or c
  SITE (1822): n equals a,t,g, or c
  SITE (1823): n equals a,t,g, or c
  SITE (1824): n equals a,t,g, or c
  SITE (1825): n equals a,t,g, or c
  SITE (1826): n equals a,t,g, or c
  SITE (1827): n equals a,t,g, or c
  SITE (1828): n equals a,t,g, or c
  SITE (1829): n equals a,t,g, or c
  SITE (1830): n equals a,t,g, or c
  SITE (1831): n equals a,t,g, or c
  SITE (1832): n equals a,t,g, or c
  SITE (1833): n equals a,t,g, or c
  SITE (1834): n equals a,t,g, or c
  SITE (1835): n equals a,t,g, or c
  SITE (1836): n equals a,t,g, or c
  SITE (1837): n equals a,t,g, or c
  SITE (1838): n equals a,t,g, or c
  SITE (1839): n equals a,t,g, or c
  SITE (1840): n equals a,t,g, or c
  SITE (1841): n equals a,t,g, or c
  SITE (1842): n equals a,t,g, or c
  SITE (1843): n equals a,t,g, or c
  SITE (1844): n equals a,t,g, or c
  SITE (1845): n equals a,t,g, or c
  SITE (1846): n equals a,t,g, or c
  SITE (1847): n equals a,t,g, or c
  SITE (1848): n equals a,t,g, or c
  SITE (1849): n equals a,t,g, or c
  SITE (1850): n equals a,t,g, or c
  SITE (1851): n equals a,t,g, or c
  SITE (1852): n equals a,t,g, or c
  SITE (1853): n equals a,t,g, or c
  SITE (1854): n equals a,t,g, or c
  SITE (1855): n equals a,t,g, or c
  SITE (1856): n equals a,t,g, or c
  SITE (1857): n equals a,t,g, or c
  SITE (1858): n equals a,t,g, or c
  SITE (1859): n equals a,t,g, or c
  SITE (1860): n equals a,t,g, or c
  SITE (1861): n equals a,t,g, or c
  SITE (1862): n equals a,t,g, or c
  SITE (1863): n equals a,t,g, or c
  SITE (1864): n equals a,t,g, or c
  SITE (1865): n equals a,t,g, or c
  SITE (1866): n equals a,t,g, or c
  SITE (1867): n equals a,t,g, or c
  SITE (1868): n equals a,t,g, or c
  SITE (1869): n equals a,t,g, or c
  SITE (1870): n equals a,t,g, or c
  SITE (1871): n equals a,t,g, or c
  SITE (1872): n equals a,t,g, or c
  SITE (1873): n equals a,t,g, or c
  SITE (1874): n equals a,t,g, or c
  SITE (1875): n equals a,t,g, or c
  SITE (1876): n equals a,t,g, or c
  SITE (1877): n equals a,t,g, or c
  SITE (1878): n equals a,t,g, or c
  SITE (1879): n equals a,t,g, or c
  SITE (1880): n equals a,t,g, or c
  SITE (1881): n equals a,t,g, or c
  SITE (1882): n equals a,t,g, or c
  SITE (1883): n equals a,t,g, or c
  SITE (1884): n equals a,t,g, or c
  SITE (1885): n equals a,t,g, or c
  SITE (1886): n equals a,t,g, or c
  SITE (1887): n equals a,t,g, or c
  SITE (1888): n equals a,t,g, or c
  SITE (1889): n equals a,t,g, or c
  SITE (1890): n equals a,t,g, or c
  SITE (1891): n equals a,t,g, or c
  SITE (1892): n equals a,t,g, or c
  SITE (1893): n equals a,t,g, or c
  SITE (1894): n equals a,t,g, or c
  SITE (1895): n equals a,t,g, or c
  SITE (1896): n equals a,t,g, or c
  SITE (1897): n equals a,t,g, or c
  SITE (1898): n equals a,t,g, or c
  SITE (1899): n equals a,t,g, or c
  SITE (1900): n equals a,t,g, or c
  SITE (1901): n equals a,t,g, or c
  SITE (1902): n equals a,t,g, or c
  SITE (1903): n equals a,t,g, or c
  SITE (1904): n equals a,t,g, or c
  SITE (1905): n equals a,t,g, or c
  SITE (1906): n equals a,t,g, or c
  SITE (1907): n equals a,t,g, or c
  SITE (1908): n equals a,t,g, or c
  SITE (1909): n equals a,t,g, or c
  SITE (1910): n equals a,t,g, or c
  SITE (1911): n equals a,t,g, or c
  SITE (1912): n equals a,t,g, or c
  SITE (1913): n equals a,t,g, or c
  SITE (1914): n equals a,t,g, or c
  SITE (1915): n equals a,t,g, or c
  SITE (1916): n equals a,t,g, or c
  SITE (1917): n equals a,t,g, or c
  SITE (1918): n equals a,t,g, or c
  SITE (1919): n equals a,t,g, or c
  SITE (1920): n equals a,t,g, or c
  SITE (1921): n equals a,t,g, or c
  SITE (1922): n equals a,t,g, or c
  SITE (1923): n equals a,t,g, or c
  SITE (1924): n equals a,t,g, or c
  SITE (1925): n equals a,t,g, or c
  SITE (1926): n equals a,t,g, or c
  SITE (1927): n equals a,t,g, or c
  SITE (1928): n equals a,t,g, or c
  SITE (1929): n equals a,t,g, or c
  SITE (1930): n equals a,t,g, or c
  SITE (1931): n equals a,t,g, or c
  SITE (1932): n equals a,t,g, or c
  SITE (1933): n equals a,t,g, or c
  SITE (1934): n equals a,t,g, or c
  SITE (1935): n equals a,t,g, or c
  SITE (1936): n equals a,t,g, or c
  SITE (1937): n equals a,t,g, or c
  SITE (1938): n equals a,t,g, or c
  SITE (1939): n equals a,t,g, or c
  SITE (1940): n equals a,t,g, or c
  SITE (1941): n equals a,t,g, or c
  SITE (1942): n equals a,t,g, or c
  SITE (1943): n equals a,t,g, or c
  SITE (1944): n equals a,t,g, or c
  SITE (1945): n equals a,t,g, or c
  SITE (1946): n equals a,t,g, or c
  SITE (1947): n equals a,t,g, or c
  SITE (1948): n equals a,t,g, or c
  SITE (1949): n equals a,t,g, or c
  SITE (1950): n equals a,t,g, or c
  SITE (1951): n equals a,t,g, or c
  SITE (1952): n equals a,t,g, or c
  SITE (1953): n equals a,t,g, or c
  SITE (1954): n equals a,t,g, or c
  SITE (1955): n equals a,t,g, or c
  SITE (1956): n equals a,t,g, or c
  SITE (1957): n equals a,t,g, or c
  SITE (1958): n equals a,t,g, or c
  SITE (1959): n equals a,t,g, or c
  SITE (1960): n equals a,t,g, or c
  SITE (1961): n equals a,t,g, or c
  SITE (1962): n equals a,t,g, or c
  SITE (1963): n equals a,t,g, or c
  SITE (1964): n equals a,t,g, or c
  SITE (1965): n equals a,t,g, or c
  SITE (1966): n equals a,t,g, or c
  SITE (1967): n equals a,t,g, or c
  SITE (1968): n equals a,t,g, or c
  SITE (1969): n equals a,t,g, or c
  SITE (1970): n equals a,t,g, or c
  SITE (1971): n equals a,t,g, or c
  SITE (1972): n equals a,t,g, or c
  SITE (1973): n equals a,t,g, or c
  SITE (1974): n equals a,t,g, or c
  SITE (1975): n equals a,t,g, or c
  SITE (1976): n equals a,t,g, or c
  SITE (1977): n equals a,t,g, or c
  SITE (1978): n equals a,t,g, or c
  SITE (1979): n equals a,t,g, or c
  SITE (1980): n equals a,t,g, or c
  SITE (1981): n equals a,t,g, or c
  SITE (1982): n equals a,t,g, or c
  SITE (1983): n equals a,t,g, or c
  SITE (1984): n equals a,t,g, or c
  SITE (1985): n equals a,t,g, or c
  SITE (1986): n equals a,t,g, or c
  SITE (1987): n equals a,t,g, or c
  SITE (1988): n equals a,t,g, or c
  SITE (1989): n equals a,t,g, or c
  SITE (1990): n equals a,t,g, or c
  SITE (1991): n equals a,t,g, or c
  SITE (1992): n equals a,t,g, or c
  SITE (1993): n equals a,t,g, or c
  SITE (1994): n equals a,t,g, or c
  SITE (1995): n equals a,t,g, or c
tgcagggagctgagatcgcgccactgcattccagcctgggtgacagagtgagactccatctcgaaaaaaaaaaaaaaaagaatctgaggtttaattcaaggagcagtggaagccattcattccaaattgtcaggatctatgcaggtatgcccctccctgtcctctctgagcttagggtcaatgcctagaaatgtatgtgattgctaatagatttgctacatgccaggcactactctgagcactttattccttcctttctaatttgtgtgccttttatttcttttccgtgctttattgcattggctagggcctccagtacagcactgaataggcatggtgacagcacgcagacatcccttccttgttcctgatcttaggagaaaaacattccacttcccactcccaccaggaaggataagattcgctgtagttttgggtgttattattattatttttttggtttgcttgagacagagtcttgctctgttacccaggctggagtgcagtggcacaattttgactgactacaacctccacttctcaggttcaagcaatcctcctgcctcagcctcccgagtatctgggactacagtgtacaccaccacacccagctaatttttgtatttttagtagagacagggtttcaccatgtttgccagtctggtcttgaactcctgacctcaagtgatctgcccgcctcggcctcccaaagtgctggaattacaggtgtgagccactgtgcctggcctagttttgggtggttttttgtagatgtcttttatcaagttaagaaagtttccttctagttctagtttgccgagagttttcttttttaaaatcatgaatggatgttgaattttatcaaatgcttctacatttattgatatgataatatcatttttctctaataactatacatttatttaagcctcccaacagtcttatgaggtagatactgggttcacaccaatttaaaaaaaaaaaaaaaaaaggggnnnnnnnnnnnnnnnnnnnnnnnnnnnnnnnnnnnnnnnnnnnnnnnnnnnnnnnnnnnnnnnnnnnnnnnnnnnnnnnnnnnnnnnnnnnnnnnnnnnnnnnnnnnnnnnnnnnnnnnnnnnnnnnnnnnnnnnnnnnnnnnnnnnnnnnnnnnnnnnnnnnnnnnnnnnnnnnnnnnnnnnnnnnnnnnnnnnnnnnnnnnnnnnnnnnnnnnnnnnnnnnnnnnnnnnnnnnnnnnnnnnnnnnnnnnnnnnnnnnnnnnnnnnnnnnnnnnnnnnnnnnnnnnnnnnnnnnnnnnnnnnnnnnnnnnnnnnnnnnnnnnnnnnnnnnnnnnnnnnnnnnnnnnnnnnnnnnnnnnnnnnnnnnnnnnnnnnnnnnnnnnnnnnnnnnnnnnnnnnnnnnnnnnnnnnnnnnnnnnnnnnnnnnnnnnnnnnnnnnnnnnnnnnnnnnnnnnnnnnnnnnnnnnnnnnnnnnnnnnnnnnnnnnnnnnnnnnnnnnnnnnnnnnnnnnnnnnnnnnnnnnnnnnnnnnnnnnnnnnnnnnnnnnnnnnnnnnnnnnnnnnnnnnnnnnnnnnnnnnnnnnnnnnnnnnnnnnnnnnnnnnnnnnnnnnnnnnnnnnnnnnnnnnnnnnnnnnnnnnnnnnnnnnnnnnnnnnnnnnnnnnnnnnnnnnnnnnnnnnnnnnnnnnnnnnnnnnnnnnnnnnnnnnnnnnnnnnnnnnnnnnnnnnnnnnnnnnnnnnnnnnnnnnnnnnnnnnnnnnnnnnnnnnnnnnnnnnnnnnnnnnnnnnnnnnnnnnnnnnnnnnnnnnnnnnnnnnnnnnnnnnnnnnnnnnnnnnnnnnnnnnnnnnnnnnnnnnnnnnnnnnnnnnnnnnnnnnnnnnnnnnnnnnnnnnnnnnnnnnnnnnnnnnnnnnnnnnnnnnnnnnnnnnnnnnnnnnnnnnnnnnnnnnnnnnnnnnnnnnnnnnnnnnnnnnnnnnnnnnnnnnnnnnnnnnnnnnnnnnnacctgagtacagaagttcaacaccatcctggccaacatggtgaaacctgtctctactaaaaatacaaaaattagttgggcatggtggcatgtgcctgtaattccagctactggggaagaggcaggagaattgcttgaatccaggagacggaaattgcagtgagcccgagatcatgccactagcactccagcctgggtgacagagcgagactctatctcaaaaaaaaaaaaaaaaaacaagg

SEQ ID NO: 9228 - DNA, 957 bp, Homo sapiens
tttatttctgttgttgttctacttctgggagacttcttcaactttgtattctaatatttctctgaatggaaaacaacttcatatattattcacacaccacataattcacctatttaaagttcaatggtttttggtatattacattattagttttttaataattgtagtaaaacatataatacaaaacagttatcattctgaccacttttaagtgtaccattcagtggcaataacttagtgttgtgcaaccataaccacaaactatttccaaaactttttcattatcccaaacagaaactttaatcattaaacaataattatccatttctccactctgcaacctggcccctagcaacctctattccactttctgtccctatgaatttgccaattctatatacttcaaaaaagtataatcatacaatatctgtccttttcagtttggcttacttcacttatcataaggttttcaatgttcatttacatagcatgaataaggatgtcattcctttttatggtggaataatatcccattggatgaatataccactttttgggcttttgttatttttcattgacatatgataatcatgtggctggtgtctgcaatcccagcactttgggaatctcaggaggggggatcccttgagcccaggagtttgaaaccagcctgggcaacacagcaagatctcatctctacaagtaatttaaaaaattaggccaggtgcagtggctcacgcctgtaatcctagcactttgggaggcggaagcaggcagatgacctgatgtcaggagttaagagaccagcctggccaacatggtgaagccccgtctctactaaaaatacaaaaatcagctgggtgtggtggcgcacgcctgtaatcccagctactcaggaggctgaggcaggagaatcgctggaacctgggaggcagaggctgcagtgagctgagatca

SEQ ID NO: 9229 - DNA, 115 bp, Homo sapiens
gggcgcagtggctcacgcctgtaatcccagcactttaggaggccaaggtgggtggatcacgaggtcaggagatcgagaccatcctggccaacatggtgaaaccccatctctacta

SEQ ID NO: 9230 - DNA, 89 bp, Homo sapiens
tgagacagagtctcgctctttcgcccaggctggagtgcagtggcgcaatctcggctcactgcaagctccgcctcctgggttcaggccat

SEQ ID NO: 9231 - DNA, 2907 bp, Homo sapiens
  SITE (27): n equals a,t,g, or c
gatccagcgcactgggccctgaccctnggacctggtcatctttgcgtgtggaaaagatggcatttccagttattgacaggtggatgctggcctttagggaaaaaaaaatattagaattccctacagaataaaggatgaagatgagaggttaaggtttttctaaggcatgaagagctgtgggggcagctgcccttgttctttttgtcgtgtgtccttcacatgcagtaactctgttcacgcctcacaaaaaccctatgaggtggagacctgccatcaacccttcctgcccgggtgccactgaggccccaaggttaaatcatttcccagagtgtatcagcagaggcacagccacagagacacgtccgcacagagagctttccagatcaccagtaacagcgtgagatcatggtgcagaaggtcatgaggaggatggcaacgagcgagacacagccggttggtgctcacaaggacattggtagatctgactgagggccaggtcggctaggccttcccaggtgacaggagcccagtgccggccttggtgcacacagcgcgtccttgtgctttctcaggagagcttcactggggacactctgtgatgtttttggagggtcatttggtaatgtgttcaggagccaaaaaatatgcataatattcagtcttacaattacattttttgaatttatctcaaggaaatcccagggatctgtgtgaagctgcacatgctgctgctgctcagtgcgggactgtttataatatttgtaactcaaatgtccagaagaactgtacactctgtgcatgttttcagtaagttcatatttgtaagaaaaagtgggtgtgttgagagacaaatttttgtgtacatttacctggaaacaagcagtagtacacatatgcatgcatgaagtggtgttttcctgagtgttaagattgtgaatgttttattatgatcatttctactttttctattggaaaatactttgtgtaattaaaacatgaagatggagctaccatcaaaatggtgagcaatagagcactgttcctcctggggtggcctggtgggcctgagggactcaggtggtgatgaggagtggccttgagtccctttcctttccatgggacagtggggacgagagctagagtgatgaggcaggttaagtgtgtgcctacctccctgtggctggagcactgttgtggccaccccgggaccccctgagcctggtgtcgccctggcttgctggtcccagcctagggagtgggcccctatgggcagagggtgaggtggctgtgctggcactgcagctcaggcacacacacactggagtgttccaatgggtgatcaggttggatggagccttgaaattaagtcagtgatgtaatttttataatctgtttcactttaaaacaaaaatctttgcacacctggtccaagttttctcccctttcttcctgttgctgccatgatgaaagcagaagggaccaccctccagggagagcagcaggaagggaggtgcgggtaggggccctgggtcagcaggggcggtcagtccggaggtgcacccccatttattcctcgttctggaagagatttctagtcacatgcatgtggctcctgtgccacatgtgtcatgaggtgcccaggtgggtttggatttggatgagggcatctttgaggatgcaggggctttgtcataccctgtgggccccgtgtacacccctggggcagatgtggcctctaacaggggagggtgcatggatctctaagccggggaggaaagcagattgcagacttgccgaagtgggagctgtctgctcttgtgttttctttaggggcaggagaattttgcccagcagtccctcgtggctccctccacaccactgacccttacgcgtccaaggttggagccctggcaggtaaagggtgagcaaggtgcagttgcctgtgagcagctgtggaggggcctttcctgttgtacacttcctgtgagggtctcagaccccttgcagactctggacatcacttcctagaggggcctgggctcctttagtcctgtgagtaaagctttggttttgatgactgtctcagggaaaggtagaaaggtgcttggtggcagtgaacttcctgctgcagaagtgggtgtgaccccagtgctggagaatgggctgtgagccgagtttcccgcacctgcatgagtgagcgccatggtccttctccacagagcgtcctgctgtcactttggtttgtgttaactttgacgcctttcttgtttcttactctgctttcctgcatggagcacacagccccggctccctttcagtctgcatggcagacacctggcctctgcaggtccagttcattctgtgtcccctttcggtcgtccctatgttgccgtcaggtgattgagggtgaaggtcggccttggcagcccagtggaaagtcccttgactcctggccgtcagtggcaggtctccagcctttgggaggaggaaacttctatttaacaaagaaatggaattgactttgccacacacagccagagcgatgatttgtagagccaacctgctgagacattcaaagcatcagtcgtagggtcaggaccgccaggtgaggtgtggctccacctgcagcagcctggggcaggttgcctagcctctggctttagcatccccttctgtgaaatggggaaagtgatgggacctggctttgtagggtggttgtgaggacctacaggggtttttgcaaaatacttagcccagggctgactaaaagattcagagacgctgggcatggtggcacacacctgtagttccaggtactcgagaggccgaggcgggaggatcacttgagcccaggaattaaagtccagcctgggcaacatagtgagaccttatttcttaataaaaaaa

SEQ ID NO: 9232 - DNA, 4602 bp, Homo sapiens
cccagctcagctactcaggaggctgaggcaggagaatcgcttgaacccgggaggcagaggttgcagtgagccaagatcgcaccattgcactgcagcctgggcaacaagagcgaaactccttcgccaaaaaaaaagaaaaaaaataaaagctaattacaaatacaggaaaatggataggccatgtgtttataagtttgagctcttgagccagtgacttccctgcacgttcagctttctcctttgtgaaatggtaatagaagcacgctgcacaaaaaattcttgtggattacatgtgagggtcttagaaacacttgatgtgtaagccaactattatgtattactgtatatggaacacaagggatgtagccaaaactaaatgcaagtttgtgcctcagatgtcttcctatcagaacagagtcaaatccagattttgatgcttaaatgtgacagcttattcagatttagaaaaacttttggtatgggccaaagaaaacatatccttaaggggatatggcccctaggccctcattttccttttctgtctgagcaattaaaaaaagcattaagtaaattccacaaattctttggaatacctagagataaacagatatcatgttaactgtatgataataagttagaatacttgcaacaaaatgcagagttttctaggaaaacaagtaatcattcagaaataagaatatgaatagttcctcagttctccccctttgtggaatttgtgcagtaaatgctgctccaaagctctgtggaaaacagaagcttcccatgaaaaatctgacaagggtatctctcagaaagagagctgtaatcccagcactgtgggaggctgaggtgggagtattgcttgaggccaggagttcaagaccagcctgggcaacgtggtaagacccccatctgtaaaaaaaataataattagccacgcgtggtggtgcacacctgtggtcccaattactggggagactgaggcggaagaatcgcttgagcccaggagatggaggttgtcgtgagctaggatctgccactgcactctagcctgggtgacagtaagacccttgtctcaaaaaaaaaaaaaagaaaaactgcagattggtgactcttacgaagatagatggaaatgttctaaataaaacacacttaggatctggcaatatatatatttaatgtactattctgaccaaatggagcttaatcagatagcttgagaatgatttaatgttacgaaatctgttaattgcattatctcaataatagatcggtgaataactttattattctctcaacaaatcctgtatttgatttacaaaatggatgggaggtttcagggagagcagttggaagcctgtgtgctcacctgttaggaacgagagtggcaacagcagtggggaggagtgctcggctcctgcacctgtctcgatggcagagcccacaggcttggctgacagacgtgggatgaaggaaagagaagcctctcactcttcccacagcattgtagtgcgatttcatgcagaagtccaagcaggttccaggacaattgtgtaagaagctatggacaagaacgtctaagaaacggaaatgacatagaggatttgcactgtagctaagacttcacgcaaggctgtggccagctgaaagcatgttctggtgctggggctgcgtggcagagccaggagcccaggatccagcgcactgggcaccgacctgggacctggtcatctttgcgtgtggaaaagatggcatttccagttattgacaggtgaatgctggccttttagggaaaaaaaaatattagaattccatacagaataaagaatgaagatgagaggttaaaggtttttctaaggcatgaagagctgtgggggcagcctgcccttgttctttttgtcgtgtgtccttcacatgcagtaactctgttcacgcctcacaaaaaccctatgaggtggagacctgccatcaacccttcctgcacgggtgccactgaggccccaaggttaaatcatttcccagagtgtatcagcagaggcacagccacagagacacgtccgcacagagagctttccagatcaccagtaacagcgtgagatcatggtgcagaaggtcatgaggaggatggcaacgagcgagacacagccggttggtgctcacaaggacattggtagatctgactgagggccaggtcggctaggccttcccaggtgacaggagcccagtgccggccttggtgcacacagcgcgtccttgtgctttctcaggagagcttcactggggacactctgtgatgtttttggagggtcatttggtaatgtgttcaggagccaaaaaatatgcataatattcagtcttacaattacattttttgaatttatctcaaggaaatcccagggatctgtgtgaagctgcacatgctgctgctgctcagtgcgggactgtttataatatttgtaactcaaatgtccagaagaactgtacactctgtgcatgttttcagtaagttcatatttgtaagaaaaagtgggtgtgttgagagacaaatttttgtgtacatttacctggaaacaagcagtagtacacatatgcatgcatgaagtggtgttttcctgagtgttaagattgtgaatgttttattatgatcatttctactttttctattggaaaatactttgtgtaattaaaacatgaagatggagctaccatcaaaatggtgagcaatagagcactgttcctcctggggtggcctggtgggcctgagggactcaggtggtgatgaggagtggccttgagtccctttcctttccatgggacagtggggacgagagctagagtgatgaggcaggttaagtgtgtgcctacctccctgtggctggagcactgttgtggccaccccgggaccccctgagcctggtgtcgccctggcttgctggtcccagcctagggagtgggcccctatgggcagagggtgaggtggctgtgctggcactgcagctcaggcacacacacactggagtgttccaatgggtgatcaggttggatggagccttgaaattaagtcagtgatgtaatttttataatctgtttcactttaaaacaaaaatctttgcacacctggtccaagttttctcccctttcttcctgttgctgccatgatgaaagcagaagggaccaccctccagggagagcagcaggaagggagatgcgggtaggggccctgggtcagcaggggcggtcagtccggaggtgcacccccatttattcctcgttctggaagagatttctagtcacatgcatgtggctcctgtgccacatgtgtcatgaggtgcccaggtgggtttggatttggatgagggcatctttgaggatgcaggggctttgtcataccctgtgggccccgtgtacacccctggggcagatgtggcctctaacaggggagggtgcgtggatctctaagccggggaggaaagcagattgcagacttgccgaagtgggagctgtctgctcttgtgttttctttaggggcaggagaattttgcccagcagtccctcgtggctccctccacaccactgacccttacgcatccaaggttggagccctggcaggtaaagggtgagcaaggtgcagttgcctgtgagcagctgtggaggggcctttcctgttgtacacttcctgtgagggtctcagaccccttgcagactctggacatcacttcctagaggggcctgggctcctttagtcctgtgagtaaagctttggttttgatgactgtctcagggaaaggtagaaaggtgcttggtggcagtgaacttcctgctgcagaagtgggtgtgaccccagtgctggagaatgggctgtgagccgagtttcccgcacctgcatgagtgagcgccatggtccttctccacagagcgtcctgctgtcactttggtttgtgttaactttgacgcctttcttgtttcttactctgctttcctgcatggagcacacagccccggctccctttcagtctgcatggcagacacctggcctctgcaggtccagttcattctgtgtcccctttcggtcgtccctatgttgccgtcaggtgattgagggtgaaggtcggccttggcagcccagtggaaagtcccttgactcctggccgtcagtggcaggtctccagcctttgggaggaggaaacttctatttaacaaagaaatggaattgactttgccacacacagccagagcgatgatttgtagagccaacctgctgagacattcaaagcatcagtcgtagggtcaggaccgccaggtgaggtgtggctccacctgcagcagcctggggcaggttgcctagcctctggctttagcatccccttctgtgaaatggggaaagtgatgggacctggctttgtagggtggttgtgaggacctacaggggtttttgcaaaatacttagcccagggctgactaaaagattcagagacgctgggcatggtggcacacacctgtagttccaggtactcgagaggccgaggcgggaggatcacttgagcccaggaattaaagtccagcctgggcaacatagtgagaccttatttcttaataaaaaaa

SEQ ID NO: 9233 - DNA, 443 bp, Homo sapiens
gggagtttcatggcgatggccgtctaccctcatggctgtggccccagttcttcctgggtgggccctgctgtagttctgctatacgctgtccctgttctggactctggtgacgccacaccttccctagtccctccagccctaggggtggcagccccacgacgtgctggtctctggtgcttgcttcttagtgcatggccgtgccatgccctggtgcctgcccgggatgcctgtgtggaatgcccagagtgttctaggcagggtcccctctgtgattagctcctcaagggtggtgtctgtgtcacagacactttggggtcctgtcagtggcctctcgaggctcccagggtaccctgtactttctcaccccttgttgctcatctattgtgggtttgtctgtgtgctgcaaaatgcacggctgtactgagcgcaccagccagcagctg

SEQ ID NO: 9234 - DNA, 443 bp, Homo sapiens
gggagtttcatggcgatggccgtctaccctcatggctgtggccccagttcttcctgggtggcccctgctgtagttctgctatacgctgtccctgttctggactctggtgacgccacaccttccctagtccctccagccctaggggtggcagccccacgacgtgctggtctctggtgcttgcttcttagtgcatggccgtgccatgccctggtgcctgcccgggatgcctgtgtggaatgcccagagtgttctaggcagggtcccctctgtgattagctcctcaagggtggtgtctgtgtcacagacactttggggtcctgtcagtggcctctcgaggctcccagggtaccctgtactttctcaccccttgttgctcatctattgtgggtttgtctgtgtgctgcaaaatgcacggctgtactgagcgcaccagccagcagctg

SEQ ID NO: 9235 - DNA, 1936 bp, Homo sapiens
  SITE (1768): n equals a,t,g, or c
ttttttttttttgtatttttagtagagacgggggtttcaccgtattagccaggatggtctccatctcctgaccttgtgatccgcccgcctcggcctcccaaagtgctgggattacaggcgtgagccaccatgcccggcctcaacgatattgattctttgggctgtagtcagtattggattatgatcaatattatcaccatttattttgttgctacagttcttccagctgtggccaatccttcagttggattcttgttttccatcaacattctccatcctggctttttgttttgagcacttccttccttcctagcaccaccaggctcttgtattatccctgtccctgccctggaatcgactcctcctccagagagccctggtttcttttgttagaggatggtatatagaatccaacatgcagacactcggtggacttattgttactggggttttgttatactagggtttcagtggtcagtgctagtatttatgtatgttaacccacgctgtgctttggattcaggctatttcaaattttagataatatggtacatatattattaataccactagttactacattggtacttttcagcaaaatatatctaagtgggatcaaatgagactgtaaatagctttacatcagttcaggtcagttatgttgctaaattacttttggcattaagtttagggaaaaaaaattgggtttgggattttttggtttcaacatttgtgattgagagactatggacctgtaataagtccaagaacagcagttgcagtgtaacaggactgttaatggaatcgggtcatttagaaacagtcaagacttcgctgttgtgcatgtggttaggagccagtgcacacgtcagttcttaggaaatgtacagtctgagcaatagcatttgaaatccaagactcttcccattgtgttgctgttgagtgtagaaaataaaatgtgtgaatttctttatcttgagtattgagattctccccttagaataaaacaagaatttttctctcagtgtaaaaatgtcaagttttattcttgaaatgaatagcaaagttaagcttaaaaacgtgaacagcttcagaactataaatgggtatgtatacctttctgctgtctaagggcagagaagggaaagaaagtgtggtgcttatcagaggagacagcagcaagacacattgtgacagaaaaccaagggtatcctgtgtcacagtgaagtgtaatgagggcacctctcctttcaagagacgaagattgaatacatgggaagcacactctccgctgtgtgttgtctaggagaggtgcaccctgtatggaaatatttgggaaggttaagattaagacagggtaaaataaagcaaaggcaaatcacaaagcaagggctaatgttaatatgaaaagtgcagaattcaaggaaaaagcatggggacaaagaagatttttcctctttttggttgctgttcatgtgtagcctacaacagaactataagacctatagacatttatatgaatatttatttgaaaacgtataatatcaaacaatgtaaaagccaatagaaatctcagataattgaatgtatagaaactagcagtttgaaagtgattagttcattatttgctgatcaagcagaaaaataagcatatgaaagatatttaaaatgggattaataaagttgatttaacagatcctattccatgtcctttgaatatttatagaaattaaatggaacaaattagggcatcaggaaaactatacanaagtctttaccaaaaaaaaaaatatatatatatatgtgtagtactacctatatatatacataatatatagtactgcttatatatatatatgcctatatgtacacatatatatatacatgtataggcagtactatgttttctgatcataatatgttaaattagtaaaaa

SEQ ID NO: 9236 - DNA, 22689 bp, Homo sapiens
agagaaaggaaaaaattcttagcacagtacttattacaatctgatttcttttctttgtttttctgtcaccttttactaggatgtatgctccatgagagcagagcttcatggtcttgtttgcctctctgctgtctccacaatgactgcagcagtgtctggcacagagatgccaaacatttgctaaaggaatgagtagggaatcaggttctgttttgtcttacaccccccagtgcctaccactgtgcttggcccataacaagtgcccagaaactggtgggtactctgaggccactctgaatataattgctattggtagatctgtgttctcatcctagaatttagaatgggaaagcggtttagaactaagagtctttcaagtgtttcgagccaaactgcaaagcttttagaatattgtctctgcagcctgaaactgactattacacaggttcccccagttcccattcaagagcgaagtctagatgtttagaattctatgcctaaatagcagaacggaagcctcattttattttgattaaattcctattttaatacatacattgcatcagtcagtgagtcagtgagtatttattgagccccttcaggatacaaagtagtgctctggtagagctattgagtttgaaatattagtcacatttttaaaccaaaaccaaatccccaagtagttgaaagtgctgttcaaattgtcagagtgcagttcctgtagactgtattttgtgagatgggcttttactttatatgttcccacttgggcaggaacaaaagtttggtaaattactgaggtattacattttaccaaaatgaaattttgaagtgatccttcatcattagctttcttcctgtccaattgttgagggagtgtgtgataattacagcatcttttgagtaatttaagattttgggatcttgtgctgccaggacagggtaaagaataacacttgccttcactctttgacactagtgttcaaattgggcagggaaagaaggggtattattgttgcctcccagatcccaactctatccaaagtactgtctcctttacttctgtgagctgacagggttgcagaaacacataaaatcctagactatcttgacatcaccaaccgtagagtttgtgaaggtaacgtgtcctctacaaattctcatttgttttcattgtttgttactcttttttgttcagatttctctgttgacttctgcagtgaaccacctcaaagccaatgttaagtcagctgcagacttgattagcctgcctaccactgtagagggacttcagaaggtaggtgccatgtgtgggtacagagacttcagaaggtaggtgccatgtgtgggtactatttgccataattctagcttcttataagttttcattgaaagcctagcatttgaaatcagctgctccaagagggcagtaatggagtgtatcactgtgtcctaaagaattcagaacaattttgttttggtctggttagttaggcctttaatttgcaacaggttacctcagctgtgatttatatgggttcatacctttttatttggctctctgagtcccagaattgctctgctggcactcttgtgttagcatatatgggttcgcttttcagcttgctttttcagttcaccactcacaatatcttcatcaaagcagaccaattgtacatgatagttaccctaaatctctgttactttccataattaagaaagttaaaaaaaaaaaaaaaagatgacctggggaaatgcaaaaattaaaaattcaggaaacaagtgttggcaaggatatgtggaacgaaggaaattttcaaacactcctgctcctgctaggagtattaattggtaaaaatcactttggaggctgggcatggtagctcatgactgtaatcccaacgttttgggaggctgagccaggaggatcacttgaacccaggaattacagaccagcctgggcaacatagggagacctcgtctttacaaaaaattttaaagttagctgggcatggtggcacacaactgtagtcccagctacatgggaggctgaagtaggaagatcacttgagcctgggaggttgaggctacagtgagctgtgaccaaccagatgaatagtactcagggatccttagagatggacgggaagagtggataggggtaggaaggcagaagaggtgcctaattcgaacataaagaacatcatcccctgacacaggaaatggaagaagggattccccaaacggtggatatcaaatctaggatctttgaattataaaaatatgtgctaagtttggtcagattatgtgccagggtctatgagcatatgaattctttccacaaaggagcaagaaatttctaagccataagcgaagacaaaatttgctattttatagccacaccatctgtgtgtgctcagtctccataatttgctacttgtccaatgtggccatctacttacaaattcggggggaaaaaaaaggggtagggacaactctgatgaggccagattcttgccgttgttcctagggccaattcaggaaatgataggcttctgtagccattagtacagaagcagctctcacagtcttgcattagaaaaggaaactggtttattcttttttttattacactttaagttctagggtacatgtgcacaacgtgcaggtttgttacgtatgtatatatgtgccatgttggtgtgctgcacccattaactcatcatttacattaggtatatctcctaatgctatccctccccccaccccaaaacaggccccggtgtgtgatgttccccttcctgtgtccaagtgttctcattgttcaattcccacctatgagtgagaacatgcagtgtttggttttttgtccttgcaatagtttgctgagaatgatggtttccagcttcatccatgtccctacaaagaacatgaactcatcattttttatggctgcatagtattccatggtgtatatctgccatgttttcttaatctagtctatcactgatggacatttgggttggttccaagtctttgctattgtgaatagtgccgcaataaacataagtgtgcgtgtgtctttatagcaacatgatttataatcctttgggtatatacccagtaacgggatggctgggtcaaatggtatttctagttctagatccttgaggaatctccacactgtcttccacaatggttgaactagtttacagtcccaccaacagtgtaaaagtgttcctatttctccacatcctctccagcacctgttgtttcctgatttttaatgatcaccattctaactggtgtgagatggtatctcattgtggttttgatttgcatttctgtgatggccagtgatgatgagcattttttcatgtgtctgttggctgcataaatgtcttcttttgagaagtgtctgttcgtatccttcacccactttttgatggggttgtttgattttttcttgtaaatttgtttaagttctttgtagattctggatattagccgtttgtcagatgaggagattgcaaaaattttcttccattctgtaggttgcctgttcactctgatggtagtttcttttgctgtgcagaagctctttagtttagttagatcccatttgtcaattttggcttttgttgccattgcttttggtgttttagacatgaagtccttgcccatgcctatgtcctgaatggtattgcctaggttttcttctagggtttttatggttttaggtctaacatttaagtatttaatccatcttgaattaatttttgtataaggtgtaaggaagggatccagtttcagctttctacatatggctagccagttttcccagcaccatttattaaatagggaatcctttcccattttttgtttttgtcaggtttgtcaaagatcagatggttgtagatgtgtggtattatttctgagggctctgttctgttccattggtctatatctctgttttggtaccagaaaaggaaactggtttattcttgaatttattcattcaataaacatttgtggaacttcctccagtatgtaccaggcactttgctgttgatgggaatactagtttcagagttttgctccagagttcacatggctctgtcagttgcttccttaggggaaaaaagaaaagaaaaaaaaaatccttaaacaagagcttactatcttctggcatcccaatgggttcatacatccagccagtgaggattggattcacaaacagtaggtgtctttgaatgcctgtagcttttgcaacaggcattcagagcttacatagatagcaacagagcttacatagatagcaaaccagcttagatacttttacccagtgtgttgtctctttgcaaatctgtgtgtttatcatgccaggcactgtgtttctttcaagtggctcagttttgaagtggtaggtcatgccaaatacctaactttattgtatctcatgtaatttttattagtgtcatctcgtgttctcttggattcttggatatcagtgtaataaaaatgaccttggttaaaaatactaatgtggcactgtaaaactgtcagcatgtcttgaaaaggccaaaactcactgaatagtaacacccttttagatgttcccttaggacaggctttttttaaaacatggcttctgaattatatctccaagttccctgtccacttgggctttttagggctaatgaaagcaaagtaagccactactcatatccctattcagtggttgctgacaggattctacttttttttcatctctgcagtattgagtttcccaaagccagatatggttccctcccacttttgctcgaagtgtcctttgctcctaacaagtggcagtctactgtgttagctcggccatctgccttcccacagcagggattgacagaggcagtttgtgagagaaccttatccctgggttccagatttataaactaatattttttctttagggaagatttggttttcctctaggaaaaatcatttaaattaagaaaattacttgtttgattgatagagaaagagtcctgttaattatctcagtatacactacatgtaatcatagtttgaagatatttgaaataatcagaaacaccgattttcattagggcagtgtttcattagggcaatgtaaattaaaatcacaatatacacttccattagaatggctgaagttgaaaagaatgactgtaccaatattggtacaggattggtgaggatatggagtaacaggaactctcattccctgctggtgggaatgtaaaatggcataaccattttagaacattgttgggcagttttttaacaagtgaagcatagacctgccatatgatcagccattcacctgctaggtattatggcgattagaaagcatatgataaaggggaatgtctataagtccacatgaagacctgaacacgaatgtttatagcagcttcatttgtaatagtcaaatattgaacacagcctaaatgtccatgagcagggggagagataaactgtgatagagccacacaatggaatgctgctcggcagcctgccaagtagcctcaacatggatgaatcccaattctgctgagtagaagcagccacactttaaaaagcactacttgctcactggttctacttatataaaatctagaaaatgaagactgatttattgtgacagaaagtggatcagtggttgcctgggaacgatcggcaagggagtgattacagagagtcatgaggaaactttcagaggtgatgagtgtttattatcttgattgtagtactggtttcacaattgtttatgtgtcaaaacattcaaattatacatttttgaatatgtacagtttattgcatgtcagttgtctcttaaagcttttttacaccttcctatatgtttccattcagagtgtagcttccattggcaatactttaaacagcgtccatcttgctgtggaagcactacagaaaactgtggatgaacacaagaaaacgatggaattactgcagagtgatatggtaaggagacccagcaagtcagcatgctcctgctcacccttttttgtgtaagagtcatgttgccaactttccactaatctgaaaaggccctgctatgcatctgttcaaaagatctaataagcagtatacattgattgttctacaatttgttaataaagcaattatggtagataaaattaaaagccaaatcttttgcaaacatagtactggaggaggtaaggtaataagacacagttcctgaggatggaatgggtaggacagaaaatggaaaagaaggaaaggaagtggaaaagtgtctcattgtttattactacataacaaagcacccccagaagtttgtggcttaaaacaagtaattatttctcactattctgtgcatcaggaatttgagcaaggctcttagactcccaaatgctgaaacatgtgctcgtggatgaaaggcaggctgtctagcatgttccagctccagccaggctgtcagttaaatgcagcctacaacacatggaacagcaccacccccatccctcaacccccagctgagcccagtcaacccacagaatcatgagaaatacttaattgttgttgttctaagccacaaagctttgggataatttgttaggcagcaacagataactgacagaatcaaacccctgcagtgcctaggaattgttttcaaatatctctggatcacttagtgctgctgcagatgtaagctgtctgcagtcatttggaggccttaatcaatcacttaatgggtgacagccccgtgaaggatttatgaagagtaaaaaaaggatggtgcagcccttgccatcttgctggggagatgagttatatgtaactcatctgaaatcaggactattcaaggcacacaaaagttccctagtctctctgccaatttctggatctgccctcccacccccacctgctctttgcaagcttcagaatttcaagtttaaattgggaagtttgtaccaaggagacctgggctatattagagagctctagaagagagtttttttccattttcttcaggactggcacacctcactgttacttagtggggctaacccagaggaaaaaacattgatctgggtgtcaagacccttggttctggttctaactgccgctgagtaactgtgtgacccatagtaacaaagacccctctaattcagcaattcttttattattttaatatcttgattatgctctcaagtaattcactattttctaaaataatttttcctaactaaaaaatttcctgccttctagaaccatggattcccccctccttctctcctccttttctctttattgttgccttttggttttcttataaaaacagggttgatttcagatttcaaggaaaacaacttattttcaccagttgcattctgttataattaaatctacttcttttaaatttccatagctgccaatggtaatcctcctactgtcattctttgtgctagataagtcatagttatgggctctgaagggttaagccatgcaaagttttcctcactaaaggaaaagtgtatataaacatgttatacttcagtctctggaaagaaacttgagcagtgggaagggaatgggaaaggaaagataaccctcaaacataagtcttacttagcataatgctataagggaaaaactaataatgcacatgattggtggttatgctaaatgcccaagccagtggttacatgactggctgcctttttaatgtcaaagctcttgagtccagtggaaacaatgacactgtcccaggttgagaccgagttggtccctggaaagttacagtgatgctatagtttctctgggagcacaggcaatggggcaaaggagaaatggtttctagagagttcattcctttaagagattgagaaatagactaggaggatctcagttccctaatgtaatcttggtgctgctggcctagtgcatgctcaagctgggttctctcagaacctagcacaagactggttagcctgtacattccctggcaatacttactgattaatctgtggatgcattctgggggaggctagaatgttctaggacaatctcagatagttaagtagacctaataattccttgttgcctacactaaacttctttcctcttaacagaatcagcacttcttgaaggagactcctggaagcaaccagatcattccgtcaccttcagccacatcagaacttgacaataaaacccacagtgagaatttgaaacaggtgctttttatctctggcttaactccctgtgaccacagtgcactgcagaggcagccaaatagtttgggcttagtgtttggtgtctcagcaggtgcatcctgtatttatttgcctgcctgggagctgagcagagaggaatgtgtgttggtatctcggggatccatattgctgtcctttcccttctttggcactttgcagtttttccctgcatgtcagtcagtggagtaaattccttttcttatcttgaaagacatagaatgagcagattatcctgaaactctttatgaaaaaatagctatctgggcaggttaaagatgaatggatagctaagtaatccagagtgatggctattttgagccacagtaaattctaagaatgttagaaagcatatccttgaaaatcaggattttctaaagtctaaagacgaaaaggcaagagggggaaaaaagactttgagttcagaatcacattaaagagaatagaggaaatcttcactcagaagaattcctgtcctgagtttaatgccctttaaaacctatagttatcattctttttaaagtagcaatcagtactggaggatgtcagtaaaaataattgaatcttatactaaacaatgcactacttgttatggtattgttacatgagccaattcagtaatcggtattgttcctgaggtaggtttgttctgacaaattaggttaatggacctttcatttaataacccagcaagcctttcctccagcaggtgaggtaaacattggggaaatcaattcccaagctctcagctttctgggaccaaagagtgaatcatgtaggtagtcctcttccctctttccccctcctgtctagctgaggccaaacaattccaaaaggagcaatttagagtgcgagggacaaagcaaagacagacgattgatggtcaaaaccaggaaaaggagtttacttcagtacttgacatagtaatggttgttcggtgctgctggcctgcttgtctaatttacgtctttagtggattccataactttatttatttccactctaggatatcctgtaccttcacaactctttagaggaggtaaacagtgccctagtggggtaccagagacagaatgatcttaaactcgagggaatgaacgagacagtcagtaatcttacccagagagtcaacctgatagaaagcgatgtggttgctatgagcaaggtagaaaagaaagcaaacctgtccttcagcatggtaagccttttctgatcttttgtgacatgcagtgtgttttgtctgtgcatggataacattctaccaccttttgagaacagccttctggcatatttgagaggccacacatttgtgttgtgcttaatcctcacaatgtgttgtctcatttaatcctcacactagctgtgtgatgtgaatggccaggcagtgtttgtcctgatttggagagggagatgcggagaggtcgagtcgcttaccaaggcctcaccactagttgttggcagagatgacaaggctactgtcatgttaccagtgcgccatctggtagggaagtgctggcacgtatttccgagggccttttgggtcttttcttttttaagttattaggggtgggagccatgaaaatgatagtaaccaaaaatcttttatcatttctttaagcctgaacttggctttcatatttatcctgctgtctatatattaaggggaaccttttgcgtatgtcaggaaacagatcaggtcagatcagctccccaacttaagaggtcattgagttcacctcctcattttacatgtaaggaaactgacctactaagtcactgatgctggccgactgtgcacggcttactgattttcatattgttgtgaataaaatgtgcagtttcacataaactttgtgcagggatccacatggattctttttttaataactgcagcccccacccttaaagatttcatatagcaaagacacaggcatatatttaaaaatagaaaccaaatacaggaaattgtgccataaattcaagtaaccaccaaagctggaagtaagcccacaaataaagtcaaactctggttcatggaaagcagcatttgaactggctctgccacagtggagccttggcaagttgcctggacttggctttgaagggtggagttggaagacctgttccccctcctgctttacagagttgtataatttactacaaagctgtgaagattaaaggagctttattttacgaagcccttttgaactcagctaaactaggttggctaagaattttggatgatgagtattatgccttgaaagttttcaaggcttattgtgaaaacttaccactcctaaactctctttactgtctctgccctctccccctactttatatttctccagcagagaaaataggtaatagtatccatctgtcctactgtttcttagagcagtatcgtgctcagcatggtattttgagtaaaagttctaccaccttttatccttcaaagccttaaagtttgtgactgaaacagctagaagcactagtttcaacttcgtctctggcctttctccctctctcctcccatctcccactcctctgcaatttctgttgagagtgttctgagatcctttaaataagtttgacgaatttgtttaaaagtgctaggtgttcaagttttaatgtttgcctttaatcttccctttgtttgtttgtttttgttttgccctttaagatgggtgatagatctgccactctgaaaagacagtctttggatcaagtcaccaacagaacagatacagtaaaaatccaaagcataaaggtaaataatgggaggcttaccctgaagtaaaagtaaatgcagcagcatctctgtgcttttgatctactgctactttttcaaagggcgtacttttgttctcatgtgctgaaacttcaaaacaaagcaattagtaaattagtatgttagtgaataaatgaatacttttttaggcacctaccctgtgccaaacactttagtaggagctggggggaccatagtgagcaaggcagacatgtgacccctattgtggtggagctcaaagtcctgtcagtcagaaaatcgttaacacataattgaacaggtcatgaatcatgagtatgataagtattataaaggacaaatacaggatatgataagatcaagaaggcttccctaaggaaatgacttttacactaagacagtaagttatctgtactaatgatgggggacagaggcagagataatctaaaaatggtgtctaatctaaaatttatttcctatttttgtattgcaatctctatgtattcatagtccatttaaacctcagccagttcccttcaccttgtaccttccccttttttgttcttcctagacatactgtcaagacagcaatctatgatatgctttgatattccaggaaagaaagtgtgattacagtattctctgattagagtgttaaactctgggctaagataaaagaaaagccaggaagattatgaccaagtgactaaattaccatctcaaatgcatattatgtttgagaagttgggaggatctgaggttcagagaaaatgaacttgaactggaaccacacagtaaaggcagcttttgatgtaatgctttatatctttatttttcctaccttaatagttttatattatctagataaagtcacaatatattaaggttttaatgcatcataagctaagcttttgttgagttttctaactgcttctgcagattttttttaaacctcacctagagaagacagaaaaacttaagagccagatgtaaattttgagcacaaaaaaactaataggtggtttctattagaaagtagtagcaatttcagccacagttcacattttaacaataaatatcagaacacaccagtacacatgtatacataaatttcatcttggctttactttcaggccttttttgtttttaactgtcatcgcagggtatcagttcctttgtcctacctcatccaaacatcctaaccagatacaatttctccttaccattagttcttcaaacatttagtacctagttttcactacatatgttcatattttagctccctaaataaactgagtgaactactatacagtaactattagagtagaaataagatggggcaagagaagttaacaattacttatacaagaaaagtaaatcaataataaaataaatgtgtaatgagttggtgttctaattaaacataggatcaggacctttcacactcatctaagcagttagaaatgagcctcatagaaaccagatgtctctctttttataattaaatgtatttgtatatgccactcttgatactcctgggaatgaggcagggtatgggcgaaaaaacttttttaaaagatacgagcaagcaagactttgaattagaaatattacagctccttctttatgtcttaacagtttctgccaccagttgactcatcaccagggagaaacagaggaaagatcaggggaaaacttgtggtttgtttttgttcagttgcttctttttgtaaggtggtaagagcatgaaattctgcctaaagtggtctagtcacaaggtgaagcaagatatttcggaaagttatttagttagtgtgaaatagctcctagaaaacaagatcctgcttatttaggaaatgggtgtcgcataggcacctgagcaagggtacatttcctttactgctgacacatgcattccttcccccatcaaccaaatgttcacagtgaatcagatcatctgtagcataatgttcccttaatggtttcaaatccagcaagatacttatcagtgctgaggaccaaagacatcaccagtatatgttgattcattcttttattgtctttatagggaacctactgagggtcaaacactacatgctaaacaggctctgggaatacagtggacacttagatgaagtcttactaccaccttaaaccttctataatctttgttttgtgcagaaagaagatagttcaaattctcaggtatccaagctaagagagaaactccagctgatcagtgctcttacaaacaaacctgagagcaacaggcctccagagaccgccgatgaaggtgagagcagagccggcttcttaatatttcatggaggcttgagcagcttgcctctcacatggggagcagggaaggtgttccagcagtactgatcgcaccaagcgagtgatgcctgaacgcaccgagatgaagctgatacactttgctttcatttagaaaaggcccattttgtacatgatttgtactctagtctattaagggaagaattggtaatgtttagctggaaatagaattctccatgctgtctgcatccaattataggcaaaaatgttactgtcatagagtatattaagccagccctaaaagttgtttatgagagtcttttcctttctgtaagtgcataacatgtatttaaaaataaatattcgcccttctgaaaatcgttaacaaaaataatgatgggatctttgggttggaagggtctttggctttaggtatggacctgtctaatcaatattagcagatacatgagcctccactgatttagaccctgtgaggacataaccaaggcactggactgtgttagctttgaccttttcccccacacaagtatttttctattttagaaaagcagtacaaactctcttgaattctcctttagtaggagacagaactgtggtggaatgtcttgtcctaacattgtgctacatcatcttacggttgcactcttagcaccagcttagcgggtggcacatacccctagactgggtttaaagcacatctcccaggatgtcaagatctttgatatccagccactgttcttgccacttgacagcttaagctcttaccatctaaacatgtttaatgctagcttgtactgtaagatcttctaatgggactgctgctgcaaaccttaacgtaatataatactgattggtgttcccttgcccacaaatatgtctcaatccaagcctttaacttcacatagtcactatgctactttatcttcaaatgtttctctaaattaattgtatatccaattttcctaaaaggtgaccttcgatactagtttaatttggtgttagattcaataatactaaataaaaccttatgtatttgttacagagcaagtagagagtttcacatcaaagccatcagcattgccaaaattttcacagtttcttggagacccagttgagaaagctgcccaactaagacctatctccctaccaggagtttctagcactgaaggtaaatttttataccacggggtagtaatgggaatgttcaaagtaataactttttaatgtttattttcacttgtcaaaaatatatatgatctaacatttattgaggagatatcaagtgccagatactttatatgcattatgtcatataatcctgataaccatcccatgaacataagtatttatgtattatacccattttactgatagggaaactgcctaagtccacacagcaaataattggttgaaacagaatgcaaaccaagacagtctgatgccaaagcttgtgctttttttttagacccccaggctggagtgcagtggcacaatctgggctcacagcaacctctgcctcccagggttaagcaattctcatgcctcagcctcccaagtagctgggacaggtgtgtgccaccatgcctggctaattttttgtatttttagtaaagatagggtttcaccatgttggccaggctggtcttgaactcctgacctcaagtgacccacctgcctcagcctactgaagtgctgggattacaagcacaaaccaactcacctggccgaagcttgcacttttaaccagtgtactatattatctttctgttaatgttttttagggtcttcattcactgagtgcctcattaaacctagtgctaagcaataagaatacagtataagatatggtctcattttctttcttcaaggatattacagtctaatggagaaggcataaaagcaaatacaataccatgagattagtaaaataaagtaaaagttgaccctgtttgtcagggccctccaaaaatgaaggacccttttactgaaaatcagcaaaatattagtacaaaggatatgattcacagaaaaatgtgtttgcactgcttccagcagtgcatgttctatccctcatggtgatgtttagtgcctcccgattttgtattagctggctgcctggcaaatcacttgctcctgtccaccacaccttcctctggctcttctctttagcctagataccattctaccaggaacatttccttacctccagtgactggattaggctcctcctgtgtgctcttaaattttgtttgcccctgtttagcacatgtcactctgttggaatttcctggggagatacaaaatataacttcctatgggtaaggactatgtcttgtttactcccagcccctagcacagtacctggtactcctgaatatttgttaaataaatgaatgagttacctacacattgcaattaaatgcttaaagcatagaagacttaaatttttctatcaccatttaaatgtgattacttttcttccctgttcctgactttttttttttctgttttctggggaggaggggaagtgttgtgtttaatgggaacacaagcttcctgccactttccattgttaaatcaatatttgatgagaatgaatgggggaaagctattaggtcagagtaaggaatagcagtcttaacacttgtgcttcagtcctcagcataggccttaaatacttttggatgactatacttttggaatgacctgaggcagcaatcatatttttatttgaatactgctaccaagtgcgtagtgtagcatgttgtataaactcatgccacaaaaaaaaagaaaaaaaaaaacagaactcttcagctagccacttggtgtaaggcattgggaacaagtgtcccactgctttcctgcctttcagagagcttttgacattttattagctgcattgctgcacctattgtaggagtgagagtagggccctattcaggagcttgtttataggagctccttgatggactggaccttgcactgcaactgttttccctcccttcaagctatttttattcttcctgaataccaaacatcaagaggcctattttacctaggtatggtgtggaataaatgatgaaattaaaggagtttgggaagatttttaaagaaacataaagctcattgaccttctttggtattagatattaaatcttctatttgattatggggacacaagtattttttaaatgttatgtatatacggccaggtgcagtggctcatgcctgtaatcccagcattttgggaggccaaggcaggcagatggcttgagctcaggagttcgagaccagcctgggcaacacagtgaaatcccaactctacaaaaaatacaaaaattagccaggcgtggtagcgcacaccctgtaatcccagctactcgggagaatagcctgagcctaaaagtttgaggctacagtgagctgtgatcatgccactgcactctaacctgggtgacagagggagaccctgtctcaaaaaaaaaaaaaaagttatgtatataactgaccttcctaagtgtttgtgatgaggcccttgagaaaatgccagaagaaactattgatagacattctctaatcattttggctcaatattgccattgaaataaaaaagatacagatcaactggtaatattgctctttttctttttactgatttttaaaaagtagagagcatgcactttggagagataattcctctggttcttttttattgaaatacaattcacataccataacattcacctttttaaaatgcagtgtttttaatccagtgttttttagtgtattcacaaggtcatgcaaccatcaccactatctaattccagaacattttcatcacccctcacagaatctctgtacccattaaacagtcactcccagtcccctctcctgccagtctccagcaaccactagtctcttaatcactatctctatggatttgcctatttggggtgtttcacataaatggaatcatacagtatgtggccttgtgtgtgctttttctttcaatatgattctttcacttagcataatgtttttatggtctattcatgttggagcatgtatcagtacttcgttcctttttatggctgaataatattccattctgttgacctaacacattttggtctgttcatccgttgatggacatttcgattgttctcacttttgggctattaagagtaatgctgccatgaacattcatgtgcaagtttttatgtaaacatatgttttcatttgccttgagtatatatatacctaggaatggaattaatgggtcatatgatagccctaactttttgaggaactcctacacttttccagagtggctgtaccatgttacattcccatcagcaatgtgtgagggttcaatccactttctccacatcctccctaatgcttggtaaggcctgtctttttttattatagccatcgtagtgattatgacatggtatctcattacacttttgagtcactggttcttgagctgcttaatttctggatccagagagacaagtgtcacatagtagaaagagcactggactaggtaataagaaatttgtattctaggccaggtgtggtgtcctagcactttggggaggctgaggtgggcagatcatttgaggctaggagttagagacctggccgacatgatgaaaccgcatctctactaaaaatacaaaaattagccaggcctggtgatacacacctgtcatgccagctactaaggaggctgaggcaggagaatagcttgaacctaggaggcagaggttgcagtgagccaagatcataccactgcactccagcctgggtgacagagtaagactccaccaaaaaaaaaaaaaaaaaaaaaaaaaaaaaaacaggcgtggtggttcacgcctataatcccaccactctgggaggcccaggtgggcgaatcacctgaggtcaggagttcaaggccagcctggccaacatggtgaaaccccatctttactaaacattaaaaaaaattagctgggcgtgggggcgggcccctgtaatcccagctacgcaggaggctgaagcacaaaaatcacttaaacccaggaggcaaaggttgcagtgaaccaaaatcgccccactgcactccagcgtgggcgacagagtgagacttagcttcaaaaaaaagaaaagaaatttgtattgtattccacttaagagttacatgaccgtaggcaagttactttcctctttgagctttggatttcctgtcaaaactgagaaagctatgagtgtttgggattgttttatgggcttccaagtcattcctccagtctccactcagccatccaacaagaaatctcacaatatgccacagtctgttttatgagctagctcctatcacataactcattaggcctctgcattccttttcaccccttcaacataagaataaattcaggaaaatctaaagggaagacgctggacagagagaagatgagaccattcattctcctgcgattatctgtcactgcttctactttggcagtgtctcactgtgttgcccaggctggtctcaaattcctggcctcaagcaatcctcctgcctcagcctcccagagtgttgggattataggcataagccactgcacccagccttttttttttttttttttttaatatatttttaagggatcaaaaattagtcttcctgatttagtgaaatcctaaactttaccatttggaaacaaaatttgcggagtagcttttcttttagtgttttaaattcagttgagactacttttaactaaatttagctgtatgtttagacgtatacattttttgtaattcatttttgacagatcttcaggatttattccgcaagactggccaggacgtggatgggaagctgacctaccaggaaatctggacctccctaggttctgctatgccagaaccagagagcttgagagcatttgattccgatggagatggaagatactcattcctggagctaagggtagctttaggtatctagcttcatcaggcatattttagaaatggactgcctaatatctatttacctaacaacaaaacaacccttacttacccatcagtcctctagtcctccaaactactgtagcagatactttgccaccttttaacttgtttgaagaagctatataaaagttatttttttaaagaagaagaccattttacttatgatgttcagaaatctatgatttcctacaaccagtaagatcttacattttaaaattgccagaaaaaaaattaaagccctctttttttctctttcctttttttgaggggaggagaccttatcttttaaagctgggaaatgtatatagagagagaataagccacttttatatttcacttaaatttgccttaaattagctgcactttatagagactcagaaaatgtcttttctttaaaagataggccttttctgtttgtaaatatttaaatgaaagaaagcattgtgcatattgtgtggaaagtaggaagaatggttttgaacaggatatgaacaaatgacttattaaaaattgctgatctggtgtaggtggcagctgaaactacatccatgtctccataaggtatccctcaaaggcccaggcgctgccagggggtttgtcctggtagctggaggaaccgatttcagggagtagacactggagacaatactgactccaggcatggctcatggaagtaggattctggttctttgttcctattccctcagctaatcccaacctgggaatcagagaagtcttggggatttttctcatttttagtactatttcagggtttatgagcataaaaagttatccattggggagctccattttccctgctgagtgagctagattgccttccccacccacccacttaagtctgtcttaaagccgtagctggctcccaccaccagtaccatctccatttgaatggcagggctaaattcccccagccattatctcacactgaccacccagagctttagaagagagctgtgcttctaattttgacccagaaaaccataccccttgagattttacctagaggctaaccaagagcctaatatgtttctctgggggatgactaaagccaaaaaggctgtgagatgaaacatgtgaaataatattcagtttccttaccattaccagctcagaagtagctagaggctttctacccaaaggatgccaaagtatagcagggcaggcctggagctagggccttcacatggtggtagcaagtttttcaaatctaatacaatcaagtacaatacttcctttaaatgcttctgtggacctggcatgaaagatccctagattgaaaggaataatacctccatgtctcctgtatgttgagtctagaattgctgtgttgttcttagaagcagtctttgggcaacaacttgaaaggggaaaaaaaaactacaaaaacttaactttggtataggccaagtcagggagaaagtagagaaagctgtcatgccacagacttctttagtggagatcatttcctttttaactttgttcaggttgcccttcaccatggatacagtccggtacccttaaacatttaagggctgttttttttttctttacatgatgttcagcttggtattaaccaaacttaaattttttttccagaagtattaaaatttagttaaagcaagatgaagtcttttcccatgaatgtgtccccttatctcattatagcttatgctcagtttcactttcttggaaaggttaaaacaaattagcctggcactttaggtaacttgaaaataactctcacccttctgactgccttccatccactctcaccccacacctttttttaatatatatacacccttacagattttctaacaaccaaataaaattctagcaataaattgaattatactgctatatttgtatatactgtaccataaatagtatgtctgtacctggaaggtatttttttgagaactgatttatatgaaatatacttgagggtaatgtagcttgtcctttttagtttcaaattcttattcataggcagatactttgaagacaccttaactctttgttgtgtgtattttcccttgcatcagataactatacatggagaaatccattttgttttttggtttatcttctgttcttcctaccttgtgcttgtctgactagtatcacccctgagccagtatacagtaccatcctctccccctaccaagtttggcagaggtgtttatactgcattctcagatctatgaatatttttgtcatcctgcctgagaaagtacatcttccaggcaaaagtagggtatcttgaactcctttcttctgagttgagcagactcactggcttaagcatcccataagcctattatttagtgtgaatttgggacttttatttgtatgttgtcttaacttactaagcctgtgacttgtatttagctgtagtcaagcctcaccagccatatctcatctctgagaggaagactggatagtgagtttggttttggttttggttttaaacccttttaccttttcagtctggcagctcctactgctgctttcctaagttactcaaagcactgcttcttggtccttgttttcttttgccttgtactatcttgtataatgtttactaaaagagcctccccataaatcagagaggcaaaaaggtagcatataaaaagaagaaccaaaagaagagaaaacctgacttctagatgactgtggtgtcatctaaaaggcagaggtgcctgaccctcaggaatgtgtatgatgcaacagagctgaagaatgggttcccttcacctactgctggccattgtcccttctgttggagattcctttctttatggttgctgttcataaccccttcaacacccccccttgctggtcctgccggtcacagttgaggattttggctgtgatgggctcatactcataatggcctgttgagttgtttttagtgacaggttttgtttgctgcacacctcattggcttgcttaccaacaccagctagaagtggtccctctttcatatccaaaccagaacacatttgggtattcctgagactttatagagcgtgtattgtttgttatacgaacctaacctaccttgttgttttctcatattaagaaatttaaatctactttgttttagtgaagctattttggtaatgtataagcaattttggttctgtttagggagaattcagggtttccatgacttgatttgagctttgcatatttcaaataagtaacacagccattttaatttagctaaataaaaaaatttcttttttctctcaa

SEQ ID NO: 9237 - DNA, 1754 bp, Homo sapiens
cttttttttttttcttttaatgtttcatagcatgacatccaggtgggtcctgacctctgtcaataccaccttcctgaggttagttccatttcctactctgcacctgattcctgcagctcccaccttcagtgagaggaggctacagttctgaaggaaaaggcttggcattgaagctatggtcttcctgggccagattcaggagggaatggaagagaacattcctttcaggacaggtggccaaaggataggagacagagtggttcagcagggggggtaggttgcacaagggtggggcaaagggcacctcctgaaagatgggaagtgggaatggggatctggcctggggctgctgtggagccagctgcagtgcaggttgcaggggagcaggggcttccgccttggggttgctgtcttggtcagcatggctcctgccttcggggatgtccaaatcccacagaacatctggattctggacctcagtctcagtcttggtgacagcaggggcagggcccgtgttgatggctgcattcatgccgtagcgccgtcgcttgttaatccagtacaacaatgggctgtaggtgaatgtggcagctctcatcacctccacccactgctgggcatgctcttcccgcctcaagttcttcctccagtgcagaaagataatgcaccctccagttatcacagaacacagccccaggattccaaagtacaatgagacccacactaaggcagcaagaaagaaaaagaggcatgctggctgatagctgtagcttggggcctgagctgtttctcattcctctttcacttaacccatgcatcaatcgctccatccacttaactactctcaccgttccttccctcccttattgacttgcctcatcattcccttattcagtcaaagctagatttccagggagcttaagcaccacctttaactctttacagatcacaaaagctaggtctagcgggggcatgtgctgcccaggctcagtcaagcctctgattcctaacccaggacccatccaatccatcagactgagaagtttcactatgggcaagtccatcaagaagcaaaagttcaccagcactttgtgaggcccaggtgggcagatcacttgaggtcaggacttcaagtccagcctggccaacatggtgaaaccccgtctctactaaaaattttaaaattagccaggtgtggtggtgcatgcctgcagtcccagctacttcagaggctgaggcaggagaatcacttgaatccaggaggtggaggttacagtgagcctagattgagccactgcactccagccggggcaacagagcaaaacttcatctcaaaaaaaaaaaaaaaagtgaaagttcatcagttgacagagacaccaatgtcccatcccattccattcagctgtgatagtcctgggctattgatagtatcttctctggttgatcagagcatggtctttgccttaaaataattcttagttttctagagtagactatctcctaactgcttagctctcctccaggcagccaggcactgtcccatccatgcaaagggccttccctgagtgtttgtccccaagccctaaggcacaagtccagtgacagggactggaggagcacttactcccagggaagcgcaggtcctcctgttgggaatccatacagctgagctttggtacctggccgatggctctggggagagggaactcacccacccatctgcccagccagtcagcccatctgcccagccaatc

SEQ ID NO: 9238 - DNA, 6994 bp, Homo sapiens
ggcaatggtggcttgctatccgggaaatggaacaggttatgttcgccacgtggacaaccccaacggtgatggtcgctgcatcacctgcatctactatctgaacaagaattgggatgccaaggtacttttgaataatgggagtagagtgtggggttagaaactacaggaaaatgattcagataacttagaggagagtttatattgagttcatagttgccgtatctcccactgatgaaacatttctatttccatttcataacctcctgcgacaatggaattagtcctaaagttgttaagaagaaaacaatgaagttaatttggagtggggtaggtagggtgattattaaccctacctctgggaagggtggttgatgaagggaaggtaatttgatattaggattaaggattaatttttttcagtttaattcagagttgttctgactcaatgcagaataggatatacacttttccctcccagcagcagcattgagaaagttccacaaaaatagaactgtaggctataaaaccatccccaagagagatttcccacacagtcctctccctcggggtggtatgtctcattgatggctgcttgccatggcttactatggtttgtgaatgccaaaggctttgtggcttatttttgtattatagaacttatagatagatggagatatgaagcctggttccatgcttacagacattcatctggactctgtatgctttccgaaagttaagaatgatttaggagtctgggaagtcagataacttttcaagcttatttggcttttgaaccttctgcatctcaatttcctgttcattaggcaaatactggctgtcataaagcaataatatttatccagagtcagaaaaacgaaacttgggaaaccattgaatcagtgaaaaggcctatctcttctccctgtttggtaacatgactggaatacatccattaagtctcctttaaaatcttgagaggtgctgatagagacaagagaataaagttatcagactggtaataataaattgcaaggtctggaatcatttaacaaatatttgagttcctgctagtgtcaggcgttgtattatgaagaaacattgatgtgtgaggcctgaactttactctgaatatggttattctagtaggatgaaataggttgacatgtaaaaaaaataattcaaggaagagagtggtgtatgtcataaaaggtgcagattaggtggtctgagagttcagtaaaaagagcatgtaacttccaactaatgaggtcagataggagctaagggagttcagaagagctgtaaattctaattgaaggggaagttacatgtgatgattttcttagaaagttgttaatggttagatggaaccatgtgagatcactgggcatttttttttaagtcaaaaacactcaaatattggcaaatcggtatgattcaatctaatagtactctattttacgtccatgggctttatgactgtggggggtgggagtgctttttttggtttaaggtgaataaggagatatctctagctaagtttgatataaaatttggtacgaagtggctgggcgtggtggctcatgcctataatcccagcacttcaggaggccctagtgggcggatcacctgaggtcgggagttcgagaccagcctgaccaacatggggaaaccccgtctctactaaaaatacaaaattaactgggcatggtggtgcatgcctctaatcccagctactcgggaggctgaggcaagagaatcacttgaaccagggaggtggaagtggcagtgaaacgagatcgtgccattgcactccagcctgggcaacaagagtgaaactccatctcaaattggtacaaactatgaggttgaagtaaaaatctggggtaccatgcatttggagtggtggttagcagatggcatgtttctaaatggagctgaaatatggttgttgataaactacatgagaggtaagaaataatcccccttctttgtgtctttcagctacatggtgggatcctgcggatatttccagaggggaaatcattcatagcagatgtggagcccatttttgacagactcctgttcttctggtcagatcgtaggaacccacacgaagtgcagccctcttacgcaaccaggtaatagccggagccatgattcctcttccggagcttggtgtacaaaccctagttccagagaactctttaaacgtgtgtcctgtgcatgtgggggattgaccacaccccatagctgatagcaaacttgtttggagtctacaaaaattaaaggggaaactttgcgttctttagcatatcaaacctaacctcagtttgaaagtactattaacaagttgttttctattagatgagcatattggattccaatttctcaaaagtatttttctcttctctcctttcctcccttctcttatctctctttccctttttttaaaaaacctaatgttgaactatgcctagagaatgttggctgtcacatatcaggaattctgtctggttactttggatgagtttacaagctgctaattgcaagcagagaaagagccttgagaagagaaagagtaatttgttttgactttctctttttgtcttttccttggtttgaaattggcttgggcttgctgtatccatggtccaacagttggatgttttattaatcttttctttatcatgtgcacatgaagattctcagagtaactgaacaccttagtattgtttaggaccaatctagacaatcttgacaaaaaatcttcattctcaattctgcctctcatttacctttgtctgtgtctaaagcaataagccgggcagcattggagggctatggagtgcagcttatactgagactagcattcaggggcaggaggagagaattttggtaggatgatgattaaaccctaacaagcctaattaaattaagatcacatgtgccctcctccggaagtcacacagcttagccccaaacccagttatatattaactgccaaatcggaatgtcttctagatgagcagggaacgaattctaccactgaagtcagcttttgtgttttatggggtatgtaactaaaccctgttgtttgtggcagaagtctttggttattccccaatctcatgatgactggccttacagggaaaacattagcaaatgttgatgagaagtcccttgaaaaaaactcaagtgctatagaaattgttagctacggaagtagctaacaatcattacaaaatgaaactttaaaaaaaaaccaagcatgaaatggctcccattacagtctatccaatgaatgggataaagcaaattagtggggatgcagtagaaagctctggggcattattattattcaattgcaattttgcctcaatgtccaaaactaaagaaagcaagccaagagttttaaacatactgtgatttacataagtcgtttttcaaagcttcactcaaatgtcatctcttctctatgttctcgccaccaacttgggtctcccagtctttagcagaatgactcccttctagtcctttctgtagaggctatgtttacctgttgcattattgcaaaatcacctgtctcccctacttggagcctgagatcgcagaggaagatctgatcacagggtcatttgaattcctaatgcccaagataatttctggcacatacctggaattccttatgcattttattacattgaaatagaattaaaaccagagaagttaattttaaattaaaatcagcgtagacaggccgggcatggtggctcacacctgcaatcccagcactttgggaggccgaggtgggcaggtcaagagatcgagaccatcctggccaacatggtgaaaccccatctctactaaaaatttaaaaattagctgggtgtggtagcgtgcacctgtagtcccagctacttgggaagctgaggcaggagaatcgcttgaacctgggaagtggaggttgcagtgagccgagatcacgcctctgcctggcaacagagcaagactccatctcaaaaaataaataaataaataaataaataaataaataaataatcagggtagacttctaataatagagaaaactttaaaacttttaatgtgagatttataggacatttgtgtttctagtagtaccattaaatctctttccttatatctgcttatctttcacagatatgctatgactgtctggtactttgatgctgaagaaagggcagaagccaaaaagaaattcaggaatttaactagtatgtgtttgataattttctgtgacttttgatcaagttaatccttgacttttattcaattttatgtagttttaaacatgttctgttcaatctgttacggcttagctttatatataatgacatcttgatgggttttatcctgaaaccttggccttagggctcttagaaaaatcagaaacaatgcaaggggcttcccctgagaatgcccactgaatgtatgatggtttatgatagatgggaaatagttaactttttcctattaatgttaaccagtcaaatgtaacattaaattttgcccatgatttttggcatattgcaaaggaaatataatggaacccagttatgatggcaaaatttattatattgggtgagactgtgactctcagtataacagcagggctcatgtaatataaactgaatataacagcactactcctatcccttccaaccagtattagaaggcagcatttcccaaaatacgttgcattaaaacacaaatcctgccaatttggtaaattcctggtcccaaaaatgtgggaaatgttgcatgctgtatgcctgtcttaaaaagagtcacattgctcactagcatattaaattaaggcgctaagagatcctgcagtaaggaaacatatataatattgcctagcccataacccatttggactgtatacctctcaaataccaaagtggtctccaaattgcacccaggaaatctcagtttgttttctcttccagatggcctacactgcttaactctgatatgtgagtgaggctacacttcatacaacttatgctcagcattagcccaagaggtgccaatgctggatgtaaacccaaagttcctccacagtctgtgaggcatatgggaaagatcccattgcaaagtcaagagagaatcctttggcagagctctattaggaggcttatataagatgggaagtgtttactggaggctttttggtgacatttgtgacataaaactcatcagagctgactccataccctctttattctcctttctgtccccaacccagggaaaactgaatctgccctcactgaagactgaccgtgctctgaaatctgctggccttgttcattttagtaacggttcctgaattctcttaaattctttgagatccaaagatggcctcttcagtgacaacaatctccctgctacttcttgcatccttcacatccctgtcttgtgtgtggtacttcatgttttcttgccaagactgtgttgatcttcagatactctctttgccagatgaagttacttgctaactccagaaattcctgcagacatcctactcggccagcggtttacctgatagattcggtaatactatcaagagaagagcctaggagcacagcgagggaatgaaccttacttgcactttatgtatacttcctgatttgaaaggaggaggtttgaaaagaaaaaaatggaggtggtagatgccacagagaggcatcacggaagccttaacagcaggaaacagagaaatttgtgtcatctgaacaatttccagatgttcttaatccagggctgttggggtttctggagaattatcacaacctaatgacattaatacctctagaaagggctgctgtcatagtgaacaatttataagtgtcccatggggcagacactccttttttcccagtcctgcaacctggattttctgcctcagccccattttgctgaaaataatgactttctgaataaagatggcaacacaattttttctccattttcagttcttacctgggaacctaattccccagaagctaaaaaactagacattagttgttttggttgctttgttggaatggaatttaaatttaaatgaaaggaaaaatatatccctggtagttttgtgttaaccactgataactgtggaaagagctaggtctactgatatacaataaacatgtgtgcatcttgaacaatttgagaggggaggtggagttggaaatgtgggtgttcctgttttttttttttttttttttttagttttcctttttaatgagctcaccctttaacacaaaaaaagcaaggtgatgtattttaaaaaaggaagtggaaataaaaaaatctcaaagctatttgagttctcgtctgtccctagcagtctttcttcagctcacttggctctctagatccactgtggttggcagtatgaccagaatcatggaatttgctagaactgtggaagcttctactcctgcagtaagcacagatcgcactgcctcaataacttggtattgagcacgtattttgcaaaagctacttttcctagttttcagtattactttcatgttttaaaaatccctttaatttcttgcttgaaaatcccatgaacattaaagagccagaaatattttcctttgttatgtacggatatatatatatatagtcttccaagatagaagtttactttttcctcttctggttttggaaaatttccagataagacatgtcaccattaattctcaacgactgctctattttgttgtacggtaatagttatcaccttctaaattactatgtaatttattcacttattatgtttattgtcttgtatcctttctctggagtgtaagcacaatgaagacaggaattttgtatatttttaaccaatgcaacatactctcagcacctaaaatagtgccgggaacatagtaagggctcagtaaatacttgttgaataaactcagtctcctacattagc

SEQ ID NO: 9239 - DNA, 7005 bp, Homo sapiens
ggcaatggtggcttgctatccgggaaatggaacaggttatgttcgccacgtggacaaccccaacggtgatggtcgctgcatcacctgcatctactatctgaacaagaattgggatgccaaggtacttttgaataatgggagtagagtgtggggttagaaactacaggaaaatgattcagataacttagaggagagtttatattgagttcatagttgccgtatctcccactgatgaaacatttctatttccatttcataacctcctgcgacaatggaattagtcctaaagttgttaagaagaaaacaatgaagttaatttggagcggggtaggtagggtgattattaaccctacctctgggaagggtggttgatgaagggaaggtaatttgatattaggattaaggattaatttttttcagtttaattcagagttgttctgactcaatgcagaataggatatacacttttccctcccagcagcagcattgagaaagttccacaaaaatagaactgtaggctataaaaccatccccaagagagatttcccacacagtcctctccctcggggtggtatgtctcattgatggctgcttgccatggcttactatggtttgtgaatgccaaaggctttgtggcttatttttgtattatagaacttatagatagatggagatatgaagcctggttccatgcttacagacattcatctggactctgtatgctttccgaaagttaagaatgatttaggagtctgggaagtcagataacttttcaagcttatttggcttttgaaccttctgcatctcaatttcctgttcattaggcaaatactggctgtcataaagcaataatatttatccagagtcagaaaaacgaaacttgggaaaccattgaatcagtgaaaaggcctatctcttctccctgtttggtaacatgactggaatacatccattaagtctcctttaaaatcttgagaggtgctgatagagacaagagaataaagttatcagactggtaataataaattgcaaggtctggaatcatttaacaaatatttgagttcctgctagtgtcaggcgttgtattatgaagaaacattgatgtgtgaggcctgaactttactctgaatatggttattctagtaggatgaaataggttgacatgtaaaaaaaataattcaaggaagagagtggtgtatgtcataaaaggtgcagattaggtggtctgagagttcagtaaaaagagcatgtaacttccaactaatgaggtcagataggagctaagggagttcagaagagctgtaaattctaattgaaggggaagttacatgtgatgattttcttagaaagttgttaatggttagatggaaccatgtgagatcactgggcatttttttttaagtcaaaaacactcaaatattggcaaatcggtatgattcaatctaatagtactctattttacgtccatgggctttatgactgtggggggtgggagtgctttttttggtttaaggtgaataaggagatatctctagctaagtttgatataaaatttggtacgaagtggctgggcgtggtggctcatgcctataatcccagcacttcaggaggccctagtgggcggatcacctgaggtcgggagttcgagaccagcctgaccaacatggggaaaccccgtctctactaaaaatacaaaattaactgggcatggtggtgcatgcctctaatcccagctactcgggaggctgaggcaagagaatcacttgaaccagggaggtggaagtggcagtgaaacgagatggtgccattgcactccagcctgggcaacaagagtgaaactccatctcaaattggtacaaactatgaggttgaagtaaaaatctggggtaccatgcatttggagtggtggttagcagatggcatgtttctaaatggagctgaaatatggttgttgataaactacatgagaggtaagaaataatcccccttctttgtgtctttcagctacatggtgggatcctgcggatatttccagaggggaaatcattcatagcagatgtggagcccatttttgacagactcctgttcttctggtcagatcgtaggaacccacacgaagtgcagccctcttacgcaaccaggtaatagccggagccatgattcctcttccggagcttggtgtacaaaccctagttccagagaactctttaaacgtgtgtcctgtgcatgtgggggattgaccacaccccatagctgatagcaaacttgtttggagtctacaaaaattaaaggggaaactttgcgttctttagcatatcaaagctaacctcagtttgaaagtactgttaacaagttgttttctattagatgagcatattggattccaatttctcaaaagtatttttctcttctctcctttcctcccttctcttatctctctttccctttttttaaaaaacctaatgttgaactatgcctagagaatgttggctgtcacatatcaggaattctgtctggttactttggatgagtttacaagctgctaattgcaagcagagaaagagccttgagaagagaaagagtaatttgttttgactttctctttttgtcttttccttggtttgaaattggcttgggcttgctgtatccatggtccaacagttggatgttttattaatcttttctttatcatgtgcacatgaagattctcagagtaactgaacaccttagtattgtttaggaccaatctagacaatcttgaccaaaaatcttcattctcaattctgcctctcatttacctttgtctgtgtctaaagcaataagccgggcagcattggagggctatggagtgcagcttatactgagactagcattcaggggcaggaggagagaattttggtaggatgatgattaaaccctaacaagcctaattaaattaagatcacatgtgccctcctccggaagtcacacagcttagccccaaacccagttatatattaactgccaaatcggaatgtcttctagatgagcagggaacgaattctaccactgaagtcagcttttgtgttttatggggtatgtaactaaaccctgttgtttgtggcagaagtctttggttattccccaatctcatgatgactggccttacagggaaaacattagcaaatgttgatgagaagtcccttgaaaaaaactcaagtgctatagaaattgttagctacggaagtagctaacaatcattacaaaatgaaactttaaaaaaaaaccaagcatgaaatggctcccattacagtctatccaatgaatgggataaagcaaattagtggggatgcagtagaaagctctggggcattattattattcaattgcaattttgcctcaatgtccaaaactaaagaaagcaagccaagagttttaaacatactgtgatttacataagtcgtttttcaaagcttcactcaaatgtcatctcttctctatgttctcgccaccaacttgggtctcccagtctttagcagaatgactcccttctagtcctttctgtagaggctatgtttacctgttgcattattgcaaaatcacctgtctcccctacttggagcctgagatcgcagaggaagatctgatcacagggtcatttgaattcctaatgcccaagataatttctggcacatacctggaattccttatgcattttattacattgaaatagaattaaaaccagagaagttaattttaaattaaaatcagcgtagacaggccgggcatggtggctcacacctgcaatcccagcactttgggaggctgaggtgggcaggtcaagagatcgagaccatcctggccaacatggtgaaaccccatctctactaaaaatttaaaaattagctgggtgtggtagtgtgcacctgtagtcccagctacttgggaagctgaggcaggagaatcgcttgaacctgggaagtggaggttgcagtgagccgagatcacgcctctgcctggcaacagagcaagactccatctcaaaaaataaataaataaataaataaataaataaataaataaataaataaatcagggtagacttctaataatagagaaaactttaaaacttttaatgtgagatttataggacatttgtgtttctagtagtaccattaaatctctttccttatatctgcttatctttcacagatatgctatgactgtctggtactttgatgctgaagaaagggcagaagccaaaaagaaattcaggaatttaactagtatgtgtttgataattttctgtgacttttgatcaagttaatccttgacttttattcaattttatgtagttttaaacatgttctgttcaatctgttacggcttagctttatatataatgacatcttgatgggttttatcctgaaaccttggccttagggctcttagaaaaatcagaaacaatgcaaggggcttcccctgagaatgcccactgaatgtatgatggtttatgatagatgggaaatagttaactttttcctattaatgttaaccagtcaaatgtaacattaaattttgcccatgatttttggcatattgcaaaggaaatataatggagcccagttatgatggcaaaatttattatattgggtgagactgtgactctcagtataacagcagggctcatgtaatataaactgaatataacagcactactcctatcccttccaaccagtattagaaggcagcatttcccaaaatacgttgcattaaaacacaaatcctgccaatttggtaaattcctggtcccaaaaatgtgggaaatgttgcatgctgtatgcctgtcttaaaaagagtcacattgctcactagcatattaaattaaggcgctaagagatcctgcagtaaggaaacatatataatattgcctagcccataacccatttggactgtatacctctcaaataccaaagtggtctccaaattgcacccaggaaatctcagtttgttttctcttccagatggcctacactgcttaactctgatatgtgagtgaggctacacttcatacaacttatgctcagcattagcccaagaggtgccaatgctggatgtaaacccaaagttcctccacagtctgtgaggcatatgggaaagatcccattgcaaagtcaagagagaatcctttggcagagctctattaggaggcttatataagatgggaagtgtttactggaggctttttggtgacatttgtgacataaaactcatcagagctgactccataccctctttattccctttctgtccccaacccagggaaaactgaatctgccctcactgaagactgaccgtgctctgaaatctgctggccttgttcattttagtaacggttcctgaattctcttaaattctttgagatccaaagatggcctcttcagtgacaacaatctccctgctacttcttgcatccttcacatccctgtcttgtgtgtggtacttcatgttttcttgccaagactgtgttgatcttcagatactctctttgccagatgaagttatttgctaactccagaaattcctgcagacatcctactcggccagcggtttacctgatagattcggtaatactatcaagagaagagcctaggagcacagcgagggaatgaaccttacttgcactttatgtatacttcctgatttgaaaggaggaggtttgaaaagaaaaaaatggaggtggtagatgccacagagaggcatcacggaagccttaacagcaggaaacagagaaatttgtgtcatctgaacaatttccagatgttcttaatccagggctgttggggtttctggagaattatcacaacctaatgacattaatacctctagaaagggctgctgtcatagtgaacaatttataagtgtcccatggggcagacactccttttttcccagtcctgcaacctggattttctgcctcagctccattttgctgaaaataatgactttctgaataaagatggcaacacaattttttctccattttcagttcttacctgggaacctaattccccagaagctaaaaaactagacattagttgttttggttgctttgttggaatggaatttaaatttaaatgaaaggaaaaatatatccctggtagttttgtgttaaccactgataactgtggaaagagctaggtctactgatatacaataaacatgtgtgcatcttgaacaatttgagaggggaggtggagttggaaatgtgggtgttcctgtttttttttttttttttttttttttagttttcctttttaatgagctcaccctttaacacaaaaaaagcagggtgatgtattttaaaaaaggaagtggaaataaaaaaatctcaaagctatttgagttctcgtctgtccctagcagtctttcttcagctcacttggctctctagatccactgtggttggcagtatgaccagaatcatggaatttgctagaactgtggaagcttctactcctgcagtaagcacagatcgcactgcctcaataacttggtattgagcacgtattttgcaaaagctacttttcctagttttcagtattactttcatgttttaaaaatccctttaatttcttgcttgaaaatcccatgaacattaaagagccagaaatattttcctttgttatgtacggatatatatatatatagtcttccaagatagaagtttactttttcctcttctggttttggaaaatttccagataagacatgtcaccattaattctcaacgactgctctattttgttgtacggtaatagttatcaccttctaaattactatgtaatttactcacttattatgtttattgtcttgtatcctttctctggagtgtaagcacaatgaagacaggaattttgtatatttttaaccaatgcaacatactctcagcacctaaaatagtgccgggaacatagtaagggctcagtaaatacttgttgaataaactcagtctcctacattagc

SEQ ID NO: 9240 - DNA, 3844 bp, Homo sapiens
ggccaggcgggtctcaaactcctcgtctcaggtgatctgcttgcctcggcctcccaaagtgctgggattacaggcgtgagccactgcgcccagcctgagtttcattttttaagtcacatagcagtagtccttatttcagtgctagaccctttgaaatgcgatgaaagctatatggacccttcgctttgttatataacatatgcacacatacccagaattttgcacatatgttcagagattcctagacctgcagacctgcctctgtgtgtcccaatttaagaacctctgttctttcttcatgactggatttgcccaattttgtgttattttgggacttaatttgtccctctttgggacatttccttatttattgccctcttcagagagtagatgtagaaaataaagagaggaaacctagattacttaatttttattttaacattttctatagatagcataccacgccaagtgtgctctgtcttgatccccttctttctagcatctgccagacattgtagagtttcgcaagcagttgtaggtttgagctgcagccagtcatttcttttattctttaaaagtacatagatttgtctttttagggctttactgaaagtaaaatatcctgacatttaaactgacagatgtaggaggtaaaaaatagagttctgaaacatttgaatttatgtgacagctgaagtcacgagatgagggatgtatgtcccccagggaggatgcagaaagaagaaaagggtactggaaacagcatgtcagtggtgccagctgagggctggaggcagccaggagagttgggagcctgggtgctgggtggagagaggttaacagggaagacatgggaagtattgtgaaggctggtgtgagcaggggactactccagccctgttggaacatagagccatttggcagattgacaatgcagtgacagctgtatataataaatgtgttgaaaggaggaaggtgaggattttcttggtgggagtttatgctgttatttaacatattttgcttccaaaggggttaagatgttttacctaaatggaggtttctaggtcagtgctatacaatatttctaatctgtgttttatagtgtgagctacatatgtaattttaaaattttcaagtagccacataataaaggaaacaggtgaaatttaatgacatatttcctttaatacggtatatccaaaatattattatgtcaacctataatcagtataaaaacctgttactgaaatattttatagggcccatctcagttcagactagccacatttaagtgcttcatagccacatgtggctcatggccatccatatttggacaatgtactttagactattgcatctgtatactcttgtgccgtcagctggggggtggggtgtgtgtgcgtgtataccaaggcagtgagcatctgagctttgaacctcaaagaccaaaatgccctgcccattttcctgcttatcagctgaggaatctttacccacattgacacatgggcttgttctgacccaagtgcatgcaggcttccagagcagattcagaggcctaacttagtcctttagctttcctcccagcacagaactcccaaggttatctgcaagtaggccttgcctagagagactgagttttcaagttgtcagttttcccaaattgtcctcaagcatcttcctctggaatcaccttactgtttagtaaacattcagaggacttgctacacatctgggcagtctgcattgtaattcatatgtgtttacacatttgtgtcttcatctgctaaagcacctttgaaccatattgtaattcataatatctgaagcaattattatgaattgtagtaattcataatattgaagcgattcataatatctgaagcaatccccagatacgggttaggcatggccctgctctgagcaggatggcaaaagtggcagtccgtgacgcagcccttgttaccccaggctattactaaatggtggtggtggttttatcttaattaaaatgacatcaccaacaatgggccctttcctgtctgccaggaaaagttttctgtagtgacgcacgtgttgtgtgtgtatgtgtgcgtttgaggctatattactcattgctacggcagttcaaaatgacttggaaaaaaacaatgaacgctggtcattgatatgtatactgacatgtttaagggaagttactgtggtctgtaacttatgaaatacataaaaaatatgatgggtggagtgacggacacatggacagatatgaagcaagcactgtaaaatattagtggtagttttgtatgcccatactcacggcaccattattcacagtagctaagagatggaagcaatatgtgcccatcagtgggtgaatgatcaacaaaatgtggtatattcatacagtggaatattattcagcctctaaaaggaagatacgctgacatgtgctgcaacatggatgaatcttgaggacatgatgctaagtgaagtaagccagtcactggaagacaaatactctatgcttccatttatgtgaagtatctagagcagtcaaatgcatagaaacaagtagaatggtagttgccaaggactgggggaggaggaaatgaggagttgtttaatgggtatagtgtttcagttttgcaagataaaaagtcctgtggattggttgcacagttaagttatgtgaatgctgtatgccaactcaactgtacactctaaaatggttaagatggtaaatcttatctttattttaccacagttttttttaaagcatggtaaacaccatttcccaggatgtaaatcggtactaaaaaaaaagtgctccaaagtaagatatatttgggaaacacagggataactaaggttagataggtgttctttattgcaggaattctaagagcatttaacaaattaatttacactgggaattttcagtgtggagggtctggctcatagcatttcacaaacattatacttcagagtcccaaagcctttaaataaaatgttaatggtagaaactccttaaggggtgttcactgtacaattctttcaacttttctgcatgctgggagtttttttggtaacaacgtgttggggaaaatggccttggaatatttcattcaaattggagccaagctaacacaaagctgttgctgctagtgggaacagccctgatgtccatgtaacaagctgccctccccaactccctccttcctgtttctccctcctcggcacccacttctaggattaacaggcagggagacgggagagcccagctctgggtacagttgggccacagcagaaggagggccagggtagaggtttgggccttggctctgatgcttgaacataaacacacctagtcagaagtacatcagtacaaagtgggccctacaaaattatagggtcagaaaacaggtaagtggttaccaggggctgggaatggggagaggagtgactacagagggacctagattcttcaacaaatacattacaagaggaaaagggaagggaagggaagcctggagattgaaagatacttgagacgtgtgaatccagtgcaatgtgtgaaccttgtttgcctcttgatctgaactagccaatcaatcttgtaaaaatgtgcttaagggacaaagcaaatttgaactctggctggatatttgatgatattaaggaaacaacatttaaacatatgacagtggggctatggttatgattggttttgttttttttttctctagagactgggttttgcagtgttacctaagctggtcttgaactcctgggctcaagcagttctcccacctcagccttggtttaagaaaaaaaaaaaaaa

SEQ ID NO: 9241 - DNA, 3844 bp, Homo sapiens; identical to SEQ ID NO: 9240

SEQ ID NO: 9242 - DNA, 3854 bp, Homo sapiens
ggccaggcgggtctcaaactcctcgtctcaggtgatctgcttgcctcggcctcccaaagtgctgggattacaggcgtgagccactgcgcccagcctgagtttcattttttaagtcacatagcagtagtccttatttcagtgctagaccctttgaaatgcgatgaaagctatatggacccttcgctttgttatataacatatgcacacatacccagaattttgcacatatgttcagagattcctagacctgcagacctgcctctgtgtgtcccaatttaagaacctctgttctttcttcatgactggatttgcccaattttgtgttattttgggacttaatttgtccctctttgggacatttccttatttattgccctcttcagagagtagatgtagaaaataaagagaggaaacctagattacttaattttattttaacattttctatagatagcataccacgccaagtgtgctctgtcttgatccccttctttctagcatctgccagacattgtagagtttcgcaagcagttgtaggtttgagctgcagccagtcatttcttttattctttaaaagtacatagatttgtctttttagggctttactgaaagtaaaatatcctgacatttaaactgacagatgtaggaggtaaaaaatagagttctgaaacatttgaatttatgtgacagctgaagtcacgagatgagggatatatgtcccccagggaggatgcagaaagaagaaaagggtactggaaacagcatgtcagtggtgccagctgagggctggaggcagccaggagagttgggagcctgggtgctgggtggagagaggttaacagggaagacatgggaagtattgtgaaggctggtgtgagcaggcgactactccagccctgttggaacatagagccatttggcagattgacaatgcagtgacagctgtatataataaatgtgttgaaaggaggaaggtgaggattttcttggtgggagtttatgctgttatttaacatattttgcttccaaaggggttaagatgttttacctaaatggaggtttctaggtcagtgctatacaatatttctaatctgtgttttatagtgtgagctacatatgtaattttaaaattttcaagtagccacataataaaggaaacaggtgaaatttaatgacatatttcctttaatacggtatatccaaaatattattatgtcaacctataatcagtataaaaacctgttactgaaatattttatagggcccatctcagttcagactagccacatttaagtgcttcatagccacatgtggctcatggccatccatatttggacaatgtactttagactattgcatctgtatactcttgtgccgtcagctggggggtggggtgtgtgtgcgtgtataccaaggcagtgagcatctgagctttgaacctcaaagaccaaaatgccctgcccattttcctgcttatcagctgaggaatctttacccacattgacacatgggcttgttctgacccaagtgcatgcaggcttccagagcagattcagaggcctaacttagtcctttagctttcctcccagcacagaactcccaaggttatctgcaagtaggccttgcctagagagactgagttttcaagttgtcagttttcccaaattgtcctcaagcatcttcctctggaatcaccttactgtttagtaaacattcagaggacttgctacacatctgggcagtctgcattgtaattcatatgtgtttacacatttgtgtcttcatctgctaaagcacctttgaaccatattgtaattcataatatctgaagcaattattatgaattgtagtaattcataatattgaagcgattcataatatctgaagcaatccccagatacgggttaggcatggccctgctctgagcaggatggcaaaagtggcagtccgtgacgcagcccttgttaccccaggctattactaaatggtggtggtggttttatcttaattaaaatgacatcaccaacaatgggccctttcctgtctgccaggaaaagttttctgtagtgacgcacgtgttgtgtgtgtatgtgtgcgtttgaggctatattactcattgctacggcagttcaaaatgacttggaaaaaaacaatgaacgctggtcattgatatgtatactgacatgtttgagggaagttactgtggtctgtaacttatgaaatacataaaaaatatgatgggtggagtgacggacacatggacagatatgaagcaagcactgtaaaatattagtggtagtttttgtatgcccatactcacggcaccattattcacagtagctaagagatggaagcaatatgtgcccatcagtgggtgaatgatcaacaaaatgtggtatattcatacagtggaatattattcagcctctaaaaggaagatacgctgacatgtgctgcaacatggatgaatcttgaggacatgatgctaagtgaagtaagccagtcactggaagacaaatactctatgcttccatttatgtgaagtatctagagcagtcaaatgcatagaaacaagtagaatggtagttgccaaggactgggggaggaggaaatgaggagttgtttaatgggtatagtgtttcagttttgcaagataaaaagtcctgtggattggttgcacagttaagttatgtgaatgctgtatgccaactcaactgtacactctaaaatggttaagatggtaaatcttatctttattttaccacagttttttttaaagcatggtaaacaccatttcccaggatgtaaatcggtactaaaaaaaaagtgctccaaagtaagatatatttgggaaacacagggataactaaggttagataggtgttctttattgcaggaattctaagagcatttaacaaattaatttacactgggaattttcagtgtggagggtctggctcatagcatttcacaaacattatacttcagagtcccaaagcctttaaataaaatgttaatggtagaaactccttaaggggtgttcactgtacaattctttcaacttttctgcatgctgggagtttttttggtaacaacgtgttggggaaaatggccttggaatatttcattcaaattggagccaagctaacacaaagctgttgctgctagtgggaacagccctgatgtccatgtaacaagctgccctccccaactccctccttcctgtttctccctcctcggcacccacttctaggattaacaggcagggagacgggagagcccagctctgggtacagttgggccacagcagaaggagggccagggtagaggtttgggccttggctctgatgcttgaacataaacacacctagtcagaagtacatcagtacaaagtgggccctacaaaattatagggtcagaaaacaggtaagtggttaccaggggctgggaatggggagaggagtgactacagagggacctagattcttcaacaaatacattacaagaggaaaagggaagggaagggaagcctggagattgaaagatacttgagacgtgtgaatccagtgcaatgtatgaaccttgtttgcctcttgatctgaactagccaatcaatcttgtaaaaatgtgcttaagggacaaagcaaatttgaactctggctggatatttgatgatattaaggaaacaacatttaaacatatgacagtggggctatggttatgattggttttgttttttttttctctagagactgggttttgcagtgttacctaagctggtcttgaactcctgggctcaagcagttctcccacctcagccctggttttagaaaaaaaaaaaaaaagttctcttg

SEQ ID NO: 9243 - DNA, 4787 bp, Homo sapiens
gaatgtaatgatgcattttttaaaataccagagcaaatactttgttttatctttgccgatgaaactgtagtacatggctagaaaccttgcaaagagaaggctttacagtgtgtgatctgtctgtattaggtggttgtctggggtgagtgtgactccactgatgactgtattgagcacaacattggcccctgctcctcagtcctggacgtgggtggggctgtgacagctgtcagcgtctgcccagtgctccacccttctcaacggtcagtctctgtgtggggcttagttttaagaggaccacttggtttcttaatatgtagccctcatgtcatttcatttgtgaattctcctagcctctgagttactgtcttttttttctttttttttttttgttttgagatggagtctcactctgtcacccaggctggaatgcagtggcgtgatctctgctcactgcaacctctgccttctgagtttaagcgattctcctgcctcagcctcccaagtaggtgggattacaggcatgcgccgtcacgcctggctcctttttttatatttttaatagagatggggtttcaccatgttggtcaggcaggtcttaatctcctgacctcaagtgatccatctgcctcgtcctcccaaagtgctgggattacaggcgtatgccaccgtgcctggcctgagttactgtcttttgcaaaatgcttatgtttctcataataatttttaaattgatagaacctaatgattcagaatgtaaaatacaggttaggaatggggctcaaagattcttacttcaccaaatctaggactataatactttctctgtaacaagcatcttcagtggaacaagggtccctacagccagctggggaaacactggctcgtgggccttgccagcagaggacacagataaatctgtgtgcagcccctgtaaagaggaggctccttgaggacacaggagagcagtgcagcatgtcctgggctgatgcctgcagagtcttttgtaaggcagggacagttgggacactgtgaagaactactttagagcaatgacgaagataacaatttcatgctaagttaatcactgttgtccccctcccttaaaaacagatacgtggttgcagtaggattggagtgtggaaagatttgcttatatacctggaaaaagactgatcaagttccagaaataaatgactggacccactgtgtagaaacaagtcaaaggtatttctttcctatttttgtttccatcagattaactagaaattgtggggtctttcatggcaaattttatgccacattttcatggagagggacatatatctgtattcgtcgtgtctaccactttgttttgtggtaatctgaaattgatacatgtggtaatctgaaattgatatattgcacttgatttttaaaagtttgcttgaccaaattgcttgcatgcataatattatttttataaacaaccatttgagatgaaagtgatttccataatggtgtgttgtagaatttgactacagtagattcttaatttgattcaaaatgtttgtgatttttaaaaatattctggattgcactttggtagtcgtatccttatgattgagccctttacctcaaaagatcctatagtggagctttcaggcatagcaaggctcatgccctgggcctcatgcatttgccacctgagctggcatagagcacctgctgtttacaacctcctccccatcccacccacctagacagtagggatcacttttaatctacccttttacaggttttattctttttgtgtgtgtgtgagacagggtctcactctgtcacctaggctagagtgcagtggcaagatcccagctcactgcaacctccgcctcccaggctcaatcagtcttcctacctcagcctcccaaatagctgggactacagacacgcaccaccatgccaggctaattttttttgtatttttagtagagacggggtttcattgtgttggccaggctggtctccatatcctgggctcaagcaatcctcctgtcttggcctcccaaagtgctggagttacaggcatgggccactgtgcctggcccacattttattctttaaaaatgcctaaatgtggctgggtgtgttggctcatggtctctaccagtgagacccctggtctctaccaaaaataaaagaaattagccaggtgtgatggtgcatgactgtgggtcccagctacttgggagggtgaagtgggaggatcacttgagcccaggaggttgaggctgcagcaagccataatcacaccattgcactccagcctgggtgagtgagagcctgtcccccccaaaaaagtataaacattcagaaagctactaatatcattctgtgttatattttcttaggctttttcaaccttcgtatatctgtactgttgaaaatacaatttcaaatagcaatttcaaatgacaatatgatgagggtgagtgcttaatggagagagatttgtgagcaatgtcttaagatatttcatccagcagatcttgtctccatgtcagccaagcatgttagtgctcattataattatatttattaaaatgagatattgccatgcccccatggcttctctcctgcctctctgggctgggtttagcagttgaactagtttgtgctgttggcttgctgaagagggaagaagtctgttgaaattccatgcttcaggcatttgaaattttctctcttcctgggcaccctttccttccactttgcctgcccacagtgctcccttcacctctaacctggtgtgaagacctcttcaatggccaccatgtgggacactggtgggaagccccttagaaagtgcaggaagggaacacgtatagaatttgagttttttgtctgaaggggttgtttttttctttggtcattatggtgacttaggatttgcaagatggaactaatgcgtgacttaacatatattatttggattgctaatatttcagttaccacgttccaagtacctttcaaatgaaagcttttgctagtaataagatttacagaggtaatataagcaaacactaccctttaggttggtttgccaaactccctatcttcttaaatatgacatgttaatattctggatttaaaggacattaccaaaaaaagaaacccactatctcaaagcttacatagccaaacaagtatgttcctcaaagtagctcccttggaaagagttataccacatatgtttatttccgtgatttcactacttcaaatccttcttttaatgaaatgagataactctaatccataataattgagattccagtgatgttgctatcacttaaaatgttcttggaacttctctgtaggaattgtgttcagaactagcttactaatgatgcaagaaaacaaattataatgccttttataatattacctgtttcaatcatttcctctttttaaagcttgccattcatatctattaagcttgccatttatatttattataaagcttacttccaggtgctttcaacagtcagattcatcctcaaaggaacatgagctatcactgagagtactcaaatcatagtctgcataatatggaagcattttctctagaataatttcagaaaacagttgaggcacagcagtcagagtgactatttgtaagggcacgcagtcatcttgttgcataggttcaggaggactgatttttaaaatgggtttcgtgacttcattcttcccttttaatcatgagaatgcatctggtgacagggactgtcagcaaatgaaagtgtaatgtgtgtgctctggtattgttttcagtgtttattgccctaaaacctacttaggtttttcactttattcctttttggtttgggaagctaatttgcaggttaaatttatagaagatgttgtattttcatagagatttattcctaacatacgttggtaacactctgggtctgcctttttaaagggctggggaggtagggggtagggagcattaatacgatggtcttgcccaaggtcacgcagttagaggtcacactggagaccaagactctttcattgtgcagtacattaaatctgtcattgtctttctttacccagtagtaaaaatgcaattccatccacctcacagggatgtcaaaatagtaaaataatctagaatatattgtaaagttaaaattgttataaatttagtaatgttatctaaaagactaacttgaatatccatttcatgaaattccattgatcattaaaacaacattcatttaaaaaaattttattttttgtttttttttaaacaacatttgacagagattcattgtctgtgtcttgctcattttggtgatgttattgccagtgagtaagattaaaatttagtcttgcagttttaagtaaatatagtaaaatattttccaggttaaaataaaatggctaaaatgttaatgatgcgattttaaaacctgtacatttcaattttcaggttttaacttccattcatgtttacaccattaattggaaaaacatttcatgatttctctatctttgttttagccaaagtcatacactggctatcagaaaattatgctggaagaattgcagtggaaaaactgaacagaaggaagcagaaggtgctgagtggttacactttgcaagctgtggtgaagatcacactgtgaagatacacagagtcaataaatgtgcactgtaatggacttaataactacatgcttgcagtcactggtatcttaaaatattatcatgtaaacaggtcatctttaccttcataa

SEQ ID NO: 9244 - DNA, 98 bp, Homo sapiens
tgtaatcccagcaatttgggaggctgaggcaggtggatcacttgaggtcaggagttcgagaccagcctggccaacatggtgaaaccccatctctacta

SEQ ID NO: 9245 - DNA, 98 bp, Homo sapiens; identical to SEQ ID NO: 9244

SEQ ID NO: 9246 - DNA, 4786 bp, Homo sapiens
gaatgtaatgatgcattttttaaaataccagagcaaatactttgttttatctttgccgatgaaactgtagtacatggctagaaaccttgcaaagagaaggctttacagtgtgtgatctgtctgtattaggtggttgtctggggtgagtgtgactccactgatgactgtattgagcacaacattggcccctgctcctcagtcctggacgtgggtggggctgtgacagctgtcagcgtctgcccagtgctccacccttctcaacggtcagtctctgtgtggggcttagttttaagaggaccacttggtttcttaatatgtagccctcatgtcatttcatttgtgaattctcctagcctctgagttactgtcttttttttcttttttttttttgttttgagatggagtctcactctgtcacccaggctggaatgcagtggcgtgatctctgctcactgcaacctctgccttctgagtttaagcgattctcctgcctcagcctcccaagtaggtgggattacaggcatgcgccgtcacgcctggctcctttttttatatttttaatagagatggggtttcaccatgttggtcaggcaggtcttaatctcctgacctcaagtgatccatctgcctcgtcctcccaaagtgctgggattacaggcgtatgccaccgtgcctggcctgagttactgtcttttgcaaaatgcttatgtttctcataataatttttaaattgatagaacctaatgattcagaatgtaaaatacaggttaggaatggggctcaaagattcttacttcaccaaatctaggactataatactttctctgtaacaagcatcttcagtggaacaagggtccctacagccagctggggaaacactggctcgtgggccttgccagcagaggacacagataaatctgtgtgcagcccctgtaaagaggaggctccttgaggacacaggagagcagtgcagcatgtcctgggctgatgcctgcagagtcttttgtaaggcagggacagttgggacactgtgaagaactactttagagcaatgacgaagataacaatttcatgctaagttaatcactgttgtccccctcccttaaaaacagatacgtggttgcagtaggattggagtgtggaaagatttgcttatatacctggaaaaagactgatcaagttccagaaataaatgactggacccactgtgtagaaacaagtcaaaggtatttctttcctatttttgtttccatcagattaactagaaattgtggggtctttcatggcaaattttatgccacattttcatggagagggacatatatctgtattcgtcgtgtctaccactttgttttgtggtaatctgaaattgatacatgtggtaatctgaaattgatatattgcacttgatttttaaaagtttgcttgaccaaattgcttgcatgcataatattatttttataaacaaccatttgagatgaaagtgatttccataatggtgtgttgtagaatttgactacagtagattcttaatttgattcaaaatgtttgtgatttttaaaaatattctggattgcactttggtagtcgtatccttatgattgagccctttacctcaaaagatcctatagtggagctttcaggcatagcaaggctcatgccctgggcctcatgcatttgccacctgagctggcatagagcacctgctgtttacaacctcctccccatcccacccacctagacagtagggatcacttttaatctacccttttacaggttttattctttttgtgtgtgtgtgagacagggtctcactctgtcacctaggctagagtgcagtggcaagatcccagctcactgcaacctccgcctcccaggctcaatcagtcttcctacctcagcctcccaaatagctgggactacagacacgcaccaccatgccaggctaattttttttgtatttttagtagagacggggtttcattgtgttggccaggctggtctccatatcctgggctcaagcaatcctcctgtcttggcctcccaaagtgctggagttacaggcatgggccactgtgcctggcccacattttattctttaaaaatgcctaaatgtggctgggtgtgttggctcatggtctctaccagtgagacccctggtctctaccaaaaataaaagaaattagccaggtgtgatggtgcatgactgtgggtcccagctacttgggagggtgaagtgggaggatcacttgagcccaggaggttgaggctgcagcaagccataatcacaccattgcactccagcctgggtgagtgagagcctgtcccccccaaaaaagtataaacattcagaaagctactaatatcattctgtgttatattttcttaggctttttcaaccttcgtatatctgtactgttgaaaatacaatttcaaatagcaatttcaaatgacaatatgatgagggtgagtgcttaatggagagagatttgtgagcaatgtcttaagatatttcatccagcagatcttgtctccatgtcagccaagcatgttagtgctcattataattatatttattaaaatgagatattgccatgcccccatggcttctctcctgcctctctgggctgggtttagcagttgaactagtttgtgctgttggcttgctgaagagggaagaagtctgttgaaattccatgcttcaggcatttgaaattttctctcttcctgggcaccctttccttccactttgcctgcccacagtgctcccttcacctctaacctggtgtgaagacctcttcaatggccaccatgtgggacactggtgggaagccccttagaaagtgcaggaagggaacacgtatagaatttgagttttttgtctgaaggggttgtttttttctttggtcattatggtgacttaggatttgcaagatggaactaatgcgtgacttaacatatattatttggattgctaatatttcagttaccacgttccaagtacctttcaaatgaaagcttttgctagtaataagatttacagaggtaatataagcaaacactaccctttaggttggtttgccaaactccctatcttcttaaatatgacatgttaatattctggatttaaaggacattaccaaaaaaagaaacccactatctcaaagcttacatagccaaacaagtatgttcctcaaagtagctcccttggaaagagttataccacatatgtttatttccgtgatttcactacttcaaatccttcttttaatgaaatgagataactctaatccataataattgagattccagtgatgttgctatcacttaaaatgttcttggaacttctctgtaggaattgtgttcagaactagcttactaatgatgcaagaaaacaaattataatgccttttataatattacctgtttcaatcatttcctctttttaaagcttgccattcatatctattaagcttgccatttatatttattataaagcttacttccaggtgctttcaacagtcagattcatcctcaaaggaacatgagctatcactgagagtactcaaatcatagtctgcataatatggaagcattttctctagaataatttcagaaaacagttgaggcacagcagtcagagtgactatttgtaagggcacgcagtcatcttgttgcataggttcaggaggactgatttttaaaatgggtttcgtgacttcattcttcccttttaatcatgagaatgcatctggtgacagggactgtcagcaaatgaaagtgtaatgtgtgtgctctggtattgttttcagtgtttattgccctaaaacctacttaggtttttcactttattcctttttggtttgggaagctaatttgcaggttaaatttatagaagatgttgtattttcatagagatttattcctaacatacgttggtaacactctgggtctgcctttttaaagggctggggaggtagggggtagggagcattaatacgatggtcttgcccaaggtcacgcagttagaggtcacactggagaccaagactctttcattgtgcagtacattaaatctgtcattgtctttctttacccagtagtaaaaatgcaattccatccacctcacagggatgtcaaaatagtaaaataatctagaatatattgtaaagttaaaattgttataaatttagtaatgttatctaaaagactaacttgaatatccatttcatgaaattccattgatcattaaaacaacattcatttaaaaaaattttattttttgtttttttttaaacaacatttgacagagattcattgtctgtgtcttgctcattttggtgatgttattgccagtgagtaagattaaaatttagtcttgcagttttaagtaaatatagtaaaatattttccaggttaaaataaaatggctaaaatgttaatgatgcgattttaaaacctgtacatttcaattttcaggttttaacttccattcatgtttacaccattaattggaaaaacatttcatgatttctctatctttgttttagccaaagtcatacactggctatcagaaaattatgctggaagaattgcagtggaaaaactgaacagaaggaagcagaaggtgctgagtggttacactttgcaagctgtggtgaagatcacactgtgaagatacacagagtcaataaatgtgcactgtaatggacttaataactacatgcttgcagtcactggtatcttaaaatattatcatgtaaacaggtcatctttaccttcataa

SEQ ID NO: 9247 - DNA, 4788 bp, Homo sapiens
gaatgtaatgatgcattttttaaaataccagagcaaatactttgttttatctttgccgatgaaactgtagtacatggctagaaaccttgcaaagagaaggctttacagtgtgtgatctgtctgtattaggtggttgtctggggtgagtgcgactccactgatgactgtattgagcacaacattggcccctgctcctcagtcctggacgtgggtggggctgtgacagctgtcagcgtctgcccagtgctccacccttctcaacggtcagtctctgtgtggggcttagttttaagaggaccacttggtttcttaatatgtagccctcatgtcatttcatttgtgaattctcctagcctctgagttactgtcttttttttctttttttttttttgttttgagatggagtctcactctgtcgcccaggctggaatgcagtggcgtgatctctgctcactgcaacctctgccttctgagtttaagcgattctcctgcctcagcctcccaagtaggtgggattacaggcatgcgccgtcacgcctggctcctttttttatatttttaatagagatggggtttcaccatgttggtcaggcaggtcttaatctcctgacctcaagtgatccatctgcctcgtcctcccaaagtgctgggattacaggcgtatgccaccgtgcctggcctgagttactgtcttttgcaaaatgcttatgtttctcataataatttttaaattgatagaacctaatgattcagaatgtaaaatacaggttaggaatggggctcaaagattcttacttcaccaaatctaggactataatactttctctgtaacaagcatcttcagtggaacaagggtccctacagccagctggggaaacactggctcatgggccttgccagcagaggacacagataaatctgtgtgcagcccctgtaaagaggaggctccttgaggacacaggagagcagtgcagcatgtcctgggctgatgcctgcagagtcttttgtaaggcagggacagttgggacactgtgaagaactactttagagcaatgacgaagataacaatttcatgctaagttaatcactgttgtccccctcccttaaaaacagatacgtggttgcagtaggattggagtgtggaaagatttgcttatatacctggaaaaagactgatcaagttccagaaataaatgactggacccactgtgtagaaacaagtcaaaggtatttctttcctatttttgtttccatcagattaactagaaattgtggggtctttcatggcaaattttatgccacattttcatggagagggacatatatctgtattcgtcgtgtctaccactttgttttgtggtaatctgaaattgatacatgtggtaatctgaaattgatatattgcacttgatttttaaaagtttgcttgaccaaattgcttgcatgcataatattatttttataaacaaccatttgagatgaaagtgatttccataatggtgtgttgtagaatttgactacagtagattcttaatttgattcaaaatgtttgtgatttttaaaaatattctggattgcactttggtagtcgtatccttatgattgagccctttacctcaaaagatcctatagtggagctttcaggcatagcaaggctcatgccctgggcctcatgcatttgccacctgagctggcatagagcacctgctgtttacaacctcctccccatcccacccacctagacagtagggatcacttttaatctacccttttacaggttttattctttttgtgtgtgtgtgagacagggtctcactctgtcacctaggctagagtgcagtggcaagatcccagctcactgcaacctccgcctcccaggctcaatcagtcttcctacctcagcctcccaaatagctgggactacagacacgcaccaccatgccaggctaattttttttgtatttttagtagagacggggtttcattgtgttggccaggctggtctccatatcctgggctcaagcaatcctcctgtcttggcctcccaaagtgctggagttacaggcatgggccactgtgcctggcccacattttattctttaaaaatgcctaaatgtggctgggtgtgttggctcatggtctctaccagtgagacccctggtctctaccaaaaataaaagaaattagccaggtgtgatggtgcatgactgtgggtcccagctacttgggagggtgaagtgggaggatcacttgagcccaggaggttgaggctgcagcaagccataatcacaccattgcactccagcctgggtgagtgagagcctgtcccccccaaaaaagtataaacgttcagaaagctactaatatcattctgtgttatattttcttaggctttttcaaccttcgtatatctgtactgttgaaaatacaatttcaaatagcaatttcaaatgacaatatgatgagggtgagtgcttaatggagagagatttgtgagcaatgtcttaagatatttcatccagcagatcttgtctccatgtcagccaagcatgttagtgctcattataattatatttattaaaatgagatattgccatgcccccatggcttctctcctgcctctctgggctgggtttagcagttgaactagtttgtgctgttggcttgctgaagagggaagaagtctgttgaaattccatgcttcaggcatttgaaattttctctcttcctgggcaccctttccttccactttgcctgcccacagtgctcccttcacctctaacctggtgtgaagacctcttcaatggccaccatgtgggacactggtgggaagccccttagaaagtgcaggaagggaacacgtatagaatttgagttttttgtctgaaggggttgtttttttctttggtcattatggtgacttaggatttgcaagatggaactaatgcgtgacttaacatatattatttggattgctaatatttcagttaccaagttccaagtacctttcaaatgaaagcttttgctagtaataagatttacagaggtaatataagcaaacactaccctttaggttggtttgccaaactccctatcttcttaaatatgacatgttaatattctggatttaaaggacattaccaaaaaaagaaacccactatctcaaagcttacatagccaaacaagtatgttcctcaaagtagctcccttggaaagagttataccacatatgtttatttccgtgatttcactacttcaaatccttcttttaatgaaatgagataactctaatccataataattgagattccagtgatgttgctatcacttaaaatgttcttggaacttctctgtaggaattgtgttcagaactagcttactaatgatgcaagaaaacaaattataatgccttttataatattacctgtttcaatcatttcctctttttaaagcttgccatttatatctattaagcttgccatttatatttattataaagcttacttccaggtgctttcaacagtcagattcatcctcaaaggaacatgagctatcactgagagtactcaaatcatagtctgcataatatggaagcattttctctagaataatttcagaaaacagttgaggcacagcagtcagagtgactatttgtaagggcacgcagtcatcttgttgcataggttcaggaggactgatttttaaaatgggtttcgtgacttcattcttcccttttaatcatgagaatgcatctggtgacagggactgtcagcaaatgaaagtgtaatgtgtgtgctctggtattgttttcagtgtttattgccctaaaacctacttaggtttttcactttattcctttttggtttgggaagctaatttgcaggttaaatttatagaagatgttgtattttcatagagatttattcctaacatacgttggtaacactctgggtctgcctttttaaagggctggggaggtagggggtagggagcattaatacgatggtcttgcccaaggtcacgcagttagaggtcacactggagaccaagactctttcattgtgcagtacattaaatctgtcattgtctttctttacccagtagtaaaaatgcaattccatccacctcacagggatgtcaaaatagtaaaataatctagaatatattgtaaagttaaaattgttataaatttagtaatgttatctaaaagactaacttgaatatccatttcatgaaattccattgatcattaaaacaacattcatttaaaaaaattttattttttgtttttttttaaacaacatttgacagagattcattgtctgtgtcttgctcattttggtgatgttattgccagtgagtaagattaaaatttagtcttgcagttttaagtaaatatagtaaaatattttccaggttaaaataaaatggctaaaatgtataatgatgcgattttaaaacctgtacatttcaattttcagggtttaacttccattcatgtttacaccattaattgggaaaacatttcatgatttctctatctttgttttagccaaagtcatacactggctatcagaaaattatgctggaagaattgcagtgggaaaactgaacagaaggaagcagaaggtgctgagtggttacactttgcaagctgtggtgaagatcacactgtgaagatacacagagtcaataaatgtgcactgtaatggacttaataactacatgcttgcagtcactggtatcttaaaatattatcatgtaaacaggtcatctttaccttcataa

SEQ ID NO: 9248 - DNA, 1502 bp, Homo sapiens
catgattacactaatgcattccagccttggcagcagatcaagaccctgtctcaaaaaaataaataaaaataaaataattgctgtgaaatttctattaacgtttttgggaaaaccagaggcttctgtgtgacatgtgaatcacagaggagaaatcatgaatctttatagccttgtgttaacatgacttccttttgttgatagagtggtttattagtctcaagacctttgaaatggcacatgaattgcttggacagattatggagacatccacccttctttagagatttaagtaagtagaaccagttagtgtgcctcttctgtttctcaccttgctcaatgcagaatgaacttggtgtatatccaccagaagcacctgcttatctactgtttgctgtcgttgcaggtatctgttgagattagctgtaacgagttgtatgtaattttataactaactgaattaagaaaagcctttgtaagattcagtatctgcttcaggtcattgaaatgtaaaattagaaagtaagctgagggcaggggatttttttctgttttattccatttattccctcaccacctttgccatccaccaccaacagtttcttttaaatttagcatccagagtagacctttgacaacgcaaatcagatcacttcatttgttcattaaaaaccttcaacaggtttcacattattcttaggattatatttaacatccttatacagtaatctccaagcctctccttgatctggtaccctctttccatctctaatctcttctttaacactcctatacttacttactcagccccaggcacattggcatatttgctgttgcctgaacatgcaaattccttgaacttgctgtttccttgcctgaaactctctttcctcagatatctgcctggccttcctcttaacctccaagtcttgtctcaaatatcattttttcagtgaggccttgcttggccagccctttccctcactatatcctgctccccaacaattgatttttacttatccatataacttttatccccctgtgtgctatatattttacttatttcttggttcattggctgtctccaccaaaatgtaagtgccatgaggacaggaattttattaatatcagtttgttcatttctatacctttagtgctttaaacagtatttagcacacagtaagcattcaataaatatgtattggactgggcacagtggctcatgcctgtaatcccagcactttgagaggccgaggcaggtggatcacctgaggtcaggagttcaagaccagtctggccagcagggtgaaaccccatttctactaaagagaccaaaatcagccagtcatggtggcatgtgcctgtagtcccagctactcggtaggctgaggcaggaagatcgctagaatccaggaggcagaggttgcagtgagtcgagatcaggccattgcactccagcctgggtgacagagcaagactctgtcttcaaaaaaaaaaaaaaaaag

SEQ ID NO: 9249 - DNA, 645 bp, Homo sapiens
aaagatagcattcacagcttccagggattcagtgtgaatacttttgggggccattttttggcctgccagaagtataaacactatcaactctagtatataagaggcaaaacagtattatctgcacatgaccatgctgtttaagctctgtgcctacttgctctcctgcaaagcacagatatcaatagtacctatttccaaagattgttgtgaggattgatatgtaagtacccagtagtttctatgacataagtattcaataaatatcattacactgttaaacaatgcctactgaacatttcctatgtgccaagcttcgtcccaagtacatgtcatgccttagccaatttagtcctcacaacaatcctatgagtagagactgtctcttgctgaaggtcatatacctagtaagcggtggtgagattgaaacccagacactctgctccagaagtctgtgctcttaaccgctccagatgtggcctttctgaatgatgctactgttgttttaaaataattgctctaggctcggtgtggtggctcacacctgtaatcccaagactttgggaggctgaggcaggagaattgcttgagcccaggagtttgagaccagcttcagcaacatggtgagaccctatctctaccaaaaaa

SEQ ID NO: 9250 - DNA, 10286 bp, Homo sapiens
cttgaagaaaatgaaatcagccccagtctttatgctgccccctggttcctcacattgtttgcctctcagttttcattaggatttgtagccagagtttttggtaagagatacctgtaattaaatggaacagtattatttattccaaggactatacttctacttctagccatatgatgcccctattgttctatcatgtgttatacagaatagcaaattgctaatggaatttaataaatgtgcctggctgtgttctgacagtaacttaaaatcatacttgtcttacataaaattgaaattaaaaaggaaagaggaattgggctcctgtatttgagtcagctgtaatggagctcttattttcatttgtgcctaaaaatcagagagtatactcctaaaatctggactagggacagactgtgtataattttccagatttttatatacatgtttctacccccattgtcttcttcatcttgcattcaaaacacagagaaatatgttcttaactgtatcaatgttgtttctaatggcatttcttaacctgactttttgttgttaacagaataactttacatcctgtttcattgctcatgtgactcttctttcatgccaatgcagtgctgggggacagtctctaagactggtggctcagggaaaacactaagtacagtcagtagagctcagggcaagttactgagtaactgccttgctctaagcacagtgtttggcattgggaataaaaagagagtgtaacatggtttatgtcccctttggaggcccttaaatctattcacaagtctttatactagtctaagtctgttatttaaaaagcaaaaattaaaacaacaacaacaacaaccaactcttcatcagaggtttgttctaatgatgttgtttaggacctcagtagccttagaaagggctcccttaatttttatgttctgataatctatttagtagacatgggcaaagcagtcagtattcactcacaactgcacttctgttaaattggagctttttgtcaaattgtattggcgccattgtaggtcattgccagtgtttgaaaaaatgaaacagcatttagtgaagatattagggaatattacaaatagtaaggaaatatgttgtttggagaaatttgttttgaggatatatgtgtaatgtatatatataccagattacaacatatgatatctttcttattgagggctgtggtttaaaagttaaacactgcattagtgttactacaatttataaaatgcagcaaaagagtaaagtgaaaatgcgctgaatcaaatgttcaccagatttctcttgtttattgaatatacactattgcttttctacagtgacattttctctggagcttgggttcctattaatgggtattctataaatccttttgtttatatacatttttcttcccagagaatagtgtatcaaatcaaaatgatgtttcagggcacctctcttttacttacccttggaagcttgatatcaagagttcaagaaacaaatgtcctcagtatcagttttttgtcatgagaatacaaatgatgctgttggctatacaatagctgttcaactctcttctttgaatttataaaacaatggagactggcaggaaatggaaagatgcatgagcaagaagaattactatgaaataatgattctatggttccctcttcattagagactccctgttgtatattattgattaaagaatgacatagattgagagaaactttcataaaaaagtactaagtacttgatacttttatttctttctttttttatttttctaagactgagtcttgctctattgcctaggctggagtgcagggcacaatatcaattcactgcaacctctgcctcctgggttcgagcgattctcctgcctcagcctcccgagtagctaagactacaggcatgtgccaccacactcagctaatttttgtatttttcgtagagacggggtttcaccatgttgaccaggctggtctgtaactcctagcctcaagccatccacccacctcagcctcccaaattgttgggtttacagatgtgagccaacacgcccggcctagtacttgatacttttcaaaagtattgcatgtttgtatttgtaggaaagcagggcttagagttagggtagctcttatatttctctcctgattgaggttgtatgtttttcatttgttttaatttttctgttaatgtttttttttttttaatttcctggtgtggtatagatttaattacatagctggttcatttactttttattatggtaatgagagtttgaatagtactcattggttatgttaatttgtttttgtattcctgttgtgaagaaaaatctaaatatcaattgaataactgtccttgaggtttacctagtctccattaaatttggcattaaaaattacaagtagttcatggacagagatatatactttgtccttttttaccctggctttatctgagattcttaagaggaatattaaaacatctgcttatatgtttagttatattgcttttttaaaaaaaagctagatgcttttgaccagttttcttctgcaaaatacataaaacaagtaaacaaaaacctttagcacaaatagcgtgctttttacaagagtggatgcatagttttgatcatgaaaattatatctcttcttttagatattatttttcttcagggaactgaagttatattcaaggttgcactcagcctactgagcagccaagagacacttataatggaatgtgagagctttgaaaatattgttgagtttcttaaaaacacgctacctgatatgaatacctctgaaatggaaaaaattattacccaggtatgatttaaatgctaatagtattatatagcagttttctctactaaatatatattaaatgctttagcctaaaaatgtagctttgcttgacagatattttcatcagatacattttatttagaaaggggactattgtgaaatttctacactgtgacattttctatctggctatgcacaaaaaatgctgtttagtgctacgtaatgagtttttcaggaatcctttcaatttaaaccaatgctaaaactgaagatagaactgacagagtcaagaaggcctgagaataaaatcagatcctcttgcctttgttatattgttaattattttgtaaaataaacgaagaggacacgtggcaggagtacaggctttggaattagaaggtattgggtttgcatctacttctggctttttaattggttgtttggcttgcacacatcagcctaatcatccaaaccctagttgtccagaatgggacagtactggacaagttccagaatgggatgatactgatctgagaggttttatgaagcttcagtgaggagacttggtgtatcagtctttgtccctacaggaaacattctccctccgatgattcaaatgaaggaaccatctataaaggtgtgggtaggcgtaaggcaatccaacacagctgtccaggtgcgaaggaactagtaacatagggaagctgttcaaacccctgctgcagaggagctaagtggaggatataatagtgttactaggcccagggagagctggaaccgtggaggagggttctgtgctggttgttgtggtcttgttgaactaggcagagaaggatcagggaagaaatacccaacccttttctcctgccccttctgatcttgtgctggcatcttctatttgccaaagtgaaccagaagccagccagaaagtaagtgtggggaattgtctgcctgccagggtacaatagaatggatgagggcagagaattgatctgagaagcaaattgagagtaatctgcacaccgtatgtgtagtccttgactcttcatagggaccaggtgagtggtagctatatattgctgccgttcagatgcagtggacaagcttaagagcagcttgatagatttgacaattatgctttatgagcattgataaagtttaccactttcctgaaggcacttttgatggcagaaagacgatagggtttagagaaagggagtttggaaccttgttctggtgcccagccatttactagctgtgtacctatgggcaagttacaacctctctgagtctcaacctcttcctctacaaaatgggaataacaaaagtagattctattatagttttgtattattttaggagcaaatataaccaatatgttaaagtattttgtaccctgtaattcatactataatatgaactcttattatattaatacatgtaaaattttatttccattacatggaatctaaatcacaaatatctataaatagtttgtatttgttaaaatgctctgtaagctgaaaagtgtagcttttatttatatattcacttgtttataaatttttcagaaatatctttcttgactggaatcagatattatgcttttagagatctgaaatcagatatcacctcccttctaaaattaatgaggaaattgcctggctttatagattactattgggattaatgagtagaatttataggcaggtaaatttgaacttgatattggagagaatttcctaacaattagagttgattactgtggaatgaaatgctgatattaagggagactttgatgaactttatttatggacactggaaaaaaatgcaaataatgcagaaaatcacaagaaaataaaagtaactataaatctcaacatctagagataatctttgaaactttgtattacatgtttctttgcttatatatacatataaaaatatataaagttgtacataaatgaaatcatactatatatactattgtggaacctgatttataattaaaaatataaagtattagattttttccagtaactataaatccatattatcatttttaatggttgtataataatccattgtatccatacccactaagtaaggaaaagatgatggttatttgaggataaccagttagtctagaaattctcttattaaaattcgaatgtttgagtatctctattagtaagtagtagagtaagtcaggttttttgtggtttcttttctcttctcagtgttagtatagacaccattgcttgaatagcagctgttgtctctccttccccctaggaagtttggagtaactgtcctctagcttcaaagcaaacgaccttcctatttagtggtgacatgggagagcagtagcagccctaattaaaccttacagccctggacagtgctcacagtgtgcaattttgaggattctctgtgtggtacaatatgtaaatgactcttaagaggcttacagggaatagcaaatggatgcaaaattttattaagatctttctgctccattggcaaataaattagaaatgcttttggttgctttattacagtaataccctatgcaattttgcttactaatcagcagagattatctctaacataataattactcaataactaatgttgtttatctagtatactacattttgggagacagttactagattatgaatatcttagctgccaaatacacttggacattaatttattctagggacttagcttcatgagaatgtttcaattgcatagaaataatctatctgttctgtttttaaagaaaatcttctttcacagaaagagctatctgtttttatgttgacagtgtaaactatatctaatttattcttgtattgacagttacactttttttttgcttttttatgctttaatgttcttcattaataagtatttggaaatatacatgaaatataccaagataaacaggctgtatcttgttatacataccaaaggctagcctaacccatgatactttcatggcaggtttttgagatggatatttctaagcagttgcatgcctatgaggtggaatatcatgtgctacaggatgagcttcaggaatcttcatattcctgtgaggatagtgaaactttggagaagctggagagggccaatagccaactgaaaagacaaaacatggacctcctagaaaaattacaggtaaagaaataaagatttgagcaaataagtacttcaatgcctcctgcatgcacagaactacctcaggaatgaaagggatatgtgcgtggaatgaaccattgctaaccaagagcccatgtatcagactgtccaagtgctctggggctacaaatgacatgttaaattaaacattacttggaaaaaaatgcaccctcacaaaatagctaaatggcagttcaaagtggaatctgcttaaatacctgttgcatgttatagatatttggttaagttaaagggaggaggaattgaatgtaggaaattgatgaagttgtgaaggacctgggcttgagctggaatctggagggttggtggaagaaatgagtgaggagggtctttaagtcaggctgagtaggagggtggcatcaatcagaaggacatggcagagcagcaaagttagcctagtgtcaatttaagatagaggttggggagaggtagggtaaatatgatagaggcagaatcgtaagtgactttcagtgtcaagccaaagaacatggctttaatcctgtcaagagggaaatctctcaaagtttttgggccatgctgtagaaagatcaatctgggaaccttgacgaggacagattgagatgggagagaaggtaaggaggcctgctaaaagtcacttgtgaaaatctgttgcggatgatgagagttgtctagactaaaatggaaattggaagagagggagacatgtctaggtaaattgaatcccatgcaaatgttacatgtaatattaatacatcattcctgccatcagggagttcacaattatttgagaatataaaatactatatatctgtctctaagcgcacacttatacatgcaataagaaatttattataaagtcatattcggtatttgcaacttgtatgatgtgtgctatgtagccatgccctgaggggaggggcttaagagtgatcacaggatgggggctagcaggtgacccttctgaagtcttcggggagatgacttcaggggagtttcagtgtctaatggctcctcggtttccacttactcctcctctccatttccccaacaatgcacctggctacaaactggaaaacactaaaactctgcttctatatggtgagtcccctgtcaagaccagtcaagagagacaggttagaaatgagggatcgctaaagtagttgcttcccaagaatgggaacactaaacttccttcgctttctcttacattggctctggctcatagaaaatgtaaatctttttttctattcaaaaaagggcaacatactcttattttcaaaaagaaaactaaatggttagtatattgtccatttttagttggataggtcaatggcgattaattatttgccccttattagggaaggtgggtttgtacctgttttataatgattcgtctgaactgttgtagactttttcactgacagttcagtgtagtcatcatcagttacttggccacccctcacatctataaatactgatgaaagcccaagtgtatgtttagagaacgccgtatttcagtcagagaaggaaaatctcttttagcactgcaatagtgtcaggaatctcctgtttctccttcagccaggccagatcccactcactcaggggaacaccagtgggtgtagaataaggattcctactgttggtgaggggggtgatttagtattgaattattcgtgtgttcagtgagaagagatgaagcatggtagttccatagttacatctttgtgaaacctaataaatcatcgtttcctgtaggttttcagagtatttgcttcacataatattttattaagtaatttgaagtaattggttaatatgtgtaaggactgtctcctactataatgaatcatttgatttggaggatttttttcccccccaaacaggtagctcatactaaaatccaggccttggaatcaaacctggaaaatcttttgacgagagagaccaaaatgaagtctttaatccggaccctggaacaagaaaaaatggcttatcaaaagacagtggagcaactccggaagctgctgcccgcggatgctctagccaattgtgacctgttgctgagagacctaaactgcaaccctaacaacaaagccaagataggaaataagccataattgaagaggcacggcctcagcagaaagtgctccttagaatactacagagaggaagagcctgcatgtcgctggcccaaggctggaccctgaagctgatggaaccacctaatactggtgctgagctcctagtcacagcaggtggacctcgtgctcatcagagcatgccaatcctaagccattggacatatgtagactggtttttgttgttgctatgtacatataaatatatatataaaatgaacatagttcatgctttcagataaaatgagtagatgtatatttagattaatttttttagtcagaacttcatgaaatccacaccaaaggaaaggtaaactgatatttcccttggacatatgtgaaatctttttgtctttatagtgaaacaaagccagagcatctttgtatattgcaatatacttgaaaaaaatgaatgtatttttttctccaaagaacagcatgtttcactcaatggtgaaaaggtggaaacatttatgtaactttatgtgtatctgtcttgatatctactgacattgtctatatgaggaaaatgattactggtcatgctcctgtgagttttttgggaaggtagggtcatttctccctgcctgctttgtgccaactagcatgttgcatctacatgcattatgagtctggttaggcattactttaaacatacataaagagacagtaggacattgtggctgagtctacccagttcaaggtaaaggagaatgttgctaattttttagcaaactagaccagcattattactcaaactaaaaatatcacacctgaaaaatttaatttaggacctaaaatgtctagattagctttctgctttttttatttgaataactcattcagttgtgaatgaattcctctttatttggtgccacagtcaccaaatgacaaggatttgccactttcccaccaaattgtgagtgcttgtaatttaggtctctctaccttaaattcagtataaggaaacgtaattatgattgattttttccaaagatgacaagctgtgttgaaatacattttttcttttgaccaattgacagaatctaataagctttaataatcttccccttttatgtgaaaagttttgagaactgtgaaatgtttaggaacaaactgttgaaatccattggaagggaaaaaagaaagtggtaccagtgttaccagctcaactaaaacctgcaattctgcatttcaactcttcacttcctcagcctacaaatagctcattagatgacattcacgcatgctgggtataggcaaggaaagtaattttcaaagtacatttgcagttctctttttcagagatgattctatgatagtgcctctgaaagttgatgcagcatttttgcctttccaaaaagtatttatcctcactgctttttgcagtacttgtattttcacagatggattatctggggtaattttcttcaaagggagtttgttatacacagtgaaaatgtattatagagtagaatagtaaagctctaggggtttcagaaagctttgatgaacagatgacaaacatctgaaaccccctccgcactgttacccagtgtgtatataatgacttgttatagctcagtgtgcccttgaatccatacagttccttaaaagacaataaaatcttattaataaagttaatgtaacttctaagttctagaaaatgctgattctgtctgccccattcaattgggggctactaattgatttgttgcttggatttcctgagaatttctctatttgtaggaggggttttttctttttacggtctgttgatgacaattactttatgggtgtgatgcaccgatggtagccaaggaatctgttggggaagtttggaaagaaaccttttctttcttttattcagtttaaagtaaactttatcctggatgtttagaatcaacattaagagttatattatggtgttcagagattaagctgacttggatacaatattttcttttgaaaatgaattttctttttcatttgtgatttttaaaaaatgttgcaccagttatgcttcatgcatcgttacatcttcatcaggttaatgtaatgtctagttcctttgcaataaatatattgctgcagctttctt

SEQ ID NO: 9251 - DNA, 36352 bp, Homo sapiens
gtcgcccgggctggagtgcagtggctcaatctcagctcactgcaagctccgcctcccgggttcacgccattttcctgcctcagcctcctgagtagctgggactacaggcgcccgccaccatgcccggctaatttttttttttttttttttttttgtatttttagtagagacggggtttcaccgtgttagccaggatgaccttgatctcctgacctcgtgatccgcccgcctcagcctcccaaagtgctgggattacaggcatgagcaccgcgcccagcctactattacttttttaaaagcacattattttgaaattttaaattcagattaggcatccatttccaggaccactatcctgaattactgaaaacaggttactatttttaagcaggctgagaaaaaggagccaagatctttttaatagttggttagtagatttatttgcacataactgaaatgatagaggagagggaatgtgtgtattttttcttttacctcactttgaattaatttttcaaaatttaatgttatttcattgtttagtaaactataattttatataatgttatggtaatttttataacatctgcttattaaatattatcacagacatatttgttactttttacagtgcttctcaggttttaagcctgtgcttaaaaatttatttatgttgaaattcattgctcagaagtaaatgacagtcaaaaaaaagtaaatgatagatactacttctattcactgataaaacttttcaatgagaaaataaaatctttgatgatgaagtactttgtggtatagtttttgttctatatttctcttgtattcagtgaaaaaaaaaggtataattattcattgtggttcattattgaagtaaccttaccatgacttattgatgacttattggaatgccttttatcctgaatcctgatttggacatatttgtgtgtgctaattccattccttgttttcctgttgtaccagacaagacactgcttcagaatcaaggtgattagaggtctacgtatttttatttaaaaaaaattcacagattcttccaactgaacatcatccttagtttaaaaagcagttttgtttgtctcctgaatgcatgccatctttctgagtgctctgagggctatatagtagggaaaatgtgacccttggtgtaatcaaagaccatgaattaccatgtaaaatgttgattgcagacagaaatcctgtttctactctattccatgctgaaatttccttagagctgtgctgtggccttcaaccaaagcctaattttaattttaaattaatagaagtggatttgctagttagggggtacatatgtgcctaagtggagtttattccaaatgccaagaagatgcagaaatgagcatcctaaaagaaacgtactcacaaaattgaatctgcctttcaactgaagaggattattcgtctatttctgttcacctaaattcctgtcacgttggtcactttgagacactgctaaagccgttcagacctcccatttgtctggacacaggaaacacctagttccttattatggaagtttgaccacatctgtgttgacatctcttgactcacatgctttttttgtggtgaacatctagaatcactgctaacaaccactgcaaataactgtcctctgctttattccagtttctacatgttgcttttatcatgagcccagtgaaaaagatacatgcccatcttcctatttggggccactatttagatttctttgtagctagagtgaaaatataatattaagtatcgcactagactgagatgttcaaggagaaaaaatcctcagaaaattattttagcaacaattataagattaaaaagtgacttttttgagactggtaattggcaagtctcagtcatggttaggtgtaagaccatttaaataatacttcttacctattcttaaaagcctaatggaaatgttagttctgccttgtgtccttttaggtatggaattagctctgtttattactttagagttaatctagtctatgatttccttattttacacatggatagattgaactccaaaaaggttttatattttgcttgattttttttcagcttaggtcataaggatataaataaacatatgagatacccagagatgttttaaattccaatatactaaacttattttcttaaaatctgcagtgtgtagagtttaggaaataaaactctttgtttttctgcttctttcatctacacgttgttccactgactaatctatctcttttgactcataggtcaaatactatatattgatttccactagaatagtttaatctcaattttacttaattagtaaagattttccataggataacagacatgtatgcagttaaaagccagaacctatataaactgttagtgcacctgatgcaattatgagttaaattatactgtggatcctgtagaaaaaatatggtttcatttctatgaaatgaaattgttttacttagcatttcttaaggcttacaaagagaaagctttttcagctttcggttcaatagttgctatcacactaatgaagttttggtatctatcttatgttgaattcattgtgatttagatacagatttagacagtgttttgtcatttatttggacttcagagatagagtcttgctgtgtcattcaggctgaagtgcagatgctgggagtttcaactgggtgccagagggttgggggataggaggcaggttgctgctcagtataacaccacctttgcaagactggtcctgacagaagagtttgcctttgtgcaaagtatatctgtgttgccctggcaggaagtaaaatatgactacatccttcttaaagttgagtctctgtgagtggtcattagagcatctccattctgtacaatagtcaatgaattcttttaaagcaggcaagtagacattacaattctatgttaaaataagaagtgggatgttaatttaagagttgatctggtgaagactatacctgcttgttcaaggatatgttaaaagattatcttgaagctttgacaagttcatattatagcatttgatggatcctatatacaaaggacttggaaatagccttcctaccctatattgggggatatatgtaatacgggacattttctccccatatgaagtctgaatttgtgttcacaaactgtggttcttaattaactggtgagtggtaagagggagtatatatacaatataccagtcaaaaatgggtgggagttctccaagttatgtttccttcctagatattcattttttaactttgtcaatttctgatagaggtaatgctggcacagaatacttttcctgaatatgtatcttgggaaggagttttataatacacatgcttagattccaaaatacaaaagaagaaggaaaaaattctatggaaacataagggaatggttataacttgcttcatcatttaagaaatgtaaagatgattaaaataccagtgtatgtatattcaactatatttaggtgtttttttatttggtccttctatttacagttaaaagtgtatacattttggaatgtaattatttcaaagcaaagaaaaggaagtgagacatttacataaacgagcacctgatagtactctgaagttatttctctgttgatataaaattaatccattaaaaaatggaaagagaagtacccaatcaaaaggcttagtgctaattggagacttaatttttcaccagaaatgcagaggatcctgggggtcccaacagctttgtttttgtggtcctatagagctttgttcagaactaatgcaaggagtatttacactggcaggatcagctgcagtgcctaatgctggattctggaccacctaggtttgcatcctggttccttcactttattatccgtgtgactgtgggcaagttacttagcctctttctacttcagtattgcaccaaaaatggaagtagtaatgacatctaccttgcaaggttgctgtgaggatgaaattaattcatactcgtaaaatgtttagaacaatcgatacctggcatgaagtatgtgctgagagtcttagctttattattattacagtaaacaccacgtgttgttttatttttgtttttactcaaaaagtagacattatgctttcttacctaagtttaatcaaaggaaaagttaatgtgataactaatgttgtaataaaaacaaacaaacaaaccaaaagaaataaactccctccacccccatcccagtgtagtttccaagttgggttataggaattttgatgcagtgtttcatttggttttgattcttgcaattgccaccttaagaatgtcagattgctgactaaaagtaaatcaaacaggaaactgctataagttgcataatagcactgactgcttaaatgtttattgggaacttgacttctgaatacagatcttctcttattaaaagcagagctgcttttgccatatctcagcaaccaactactttttcaagatgtcgatttttagtacaagataaagggtcaatggtttgttatgtaagttcttcttttcagtatattattatcttctattttgactgctaattttttggcttattactagtcagtaaattccagacatgggagaaaaatttgtcattgggcagtttatattataggatttaaaattttaggtttatgaaatttttgaatatcagtgggctaatgtaaatactgtatgcgcctcttttataacatattgcccccaaaactttgtattttataggcaatcatgaaactgatatgggtacaactcagttttatttttagtacgttctaaacacttgatatgtcattagcagtgaattggaaggtgattcttaaaagctgttttaattccagcattaaaatataaacatttcggagtcctctgatttggtcaactctggtttgttagagcactaaaaaagtcaagctaaattaatatttgttgatcttttgccctgtggagcattgacatagtgcttttaaataagtatttcatttagctttcaaagcttaaagtataaattagatggctttatgtaggaaaggaataacacttactagaaaaaatatgctttttgttgtttattaacaacattgtcatggtcaatacctaccagtgccatcaacagttcagaacatactttagaaaaacaaagctattaggacttgactcccaataaagggttttaagaaggtagatcttttatttattcctgacatgttagcctagccagtatttttgtctgtttcacttaaacttctgagttaatatttcatttagttttataaaatattaatttattcagtagatattattcagtgcttattatttacctgttactacactacaagctagaaatatacctatgaactgggcatttagcaaataactgccatcaaggtcgtgttacaaaaatgaagataatgagtacttcaactgtatttattgggttgtaactattatatatagaacatttgaatcatatttttaaaagggaaatacttgcattaatgttttccaaagtgcaagtaaaagcaaatatatatatatatatgtgtgtgtatatatatatatatgtgtgtatatatatatgtgtgtgtgtgtgtgtgtatatatatatatatatattcaatattcaggaaggttttttgttttgttttgttttgttttttgggacagagtcttgccctgttgctcaggcaggagtgcagggatgcgatctcggctcactgcaacctttgcctcctgggttcaagcgattctcccacctcagcctcctgagtagctgggattacaggtgtgcaccaccacacctggctaatttttgtattttcagtagagacaggattttgcccatgttggccaggctggtctcaaactcttgacctcaagtgatctgcctgcctcggcctcccaaactgctggaattacagatgtaagccattgtgcccagcctcagggagtttttctaaaaaaaaaatttaattataattttattttgacatggagcctcgctctgttgcccaggctgaaatgcagtggtgcattctcggctcactgcaacctctgcctcccgggttcaagagaaccttgtgcctcagcctcccaagcaactgggattacaggcacctgtcactaatgcccagctaatttttttttttttttttgtatttttagttgagacagggtttcaccatgttggccatgctactcttgaactcctgacctcaggtgatccgcctgcctcggcctcccaaagtgctgggtttacaggtggtgagccaccgtgcctggccactgcctcaggagttttgaacaatggacacatattagggttatagtgttatccaggatgcataataaccagagtttgactatattgagatatatgtatcaagtactgtactttctaaagtatcacgtcataatacttactctctgcatagcagctcagaagtcttttttttaactttaatttagccaatccagaagtaatgtttccataaaatagatccagactagaatgaactgaattgcctgagtaaataaagatacgataggcagatgctgaattgctcttctcactattaattgcctcaacactattgagttcctttgagtatctgagagtggctgttctgtctgagctttatttctgacctcagcactgaccttttgattccatcaaaagtcttataccttcatttgttggtatcatcacctgtaaatattggtatccttattgttctctcaggcaaactcagactgtgaaacttaaaaatgtaagatattcctgccactaacagcaacaattattgtgaggtcttccagcagcaaatataattggtctcaaaaatgattttgagtcataccgacctttttttgcagataggcctagcataactcaaagtggtcttttttaggaaatgaaattttgacaatagaggagcattttcttatgcactaatatagaatgatgtgacactactccctgtcccccaaaaattgagggaggtgattctagaatcaattaatttcaataagttggggaatttctatacactgtttccctgttggagaggtacagtgcatgccagtgtattaacagtctctaacaagtactgctataaagaaatctgttaacattttttaacaggctgggtgtggtgcctcatgcctgtaatcccagcactttgggagctgagacaggagaattgcttgagtgcaggagtttgagaccagactggacaacacaatgggacccggtctctacgaagatttttttaaaaaaatagccaggtgtggcggtgtgcacctgtagtcccagctgcttgggaggctgaggtgggaggatctcttgagcctgggaggtcgaggctgcaatgagctgtgattgcgccactgcgctccagcctgggtgaaaaaatgagaccttatctcacaaaataaatgtcaataaaaatataaaaagatctattttttaacttagccatccaatcttatttgaccccagttttttcttagtatatcacctaccaataatcccaaggttgactgttctgcttatattcaggttatcatctgccatgattcaactgttggtagctgaccattcagagacacatcttaacagtcgtaggcaattagaaacagtctttattgacctgttctataagagctctaacaaaagctctttgtgaggcttttatggaatatttaccttgtttcaaataagctattcatgttatttccttagcaaagcatgaattcatgacttaagcaacctgtactcctccttataagtgcttctgttcctcagattagaactaggactggttggctgctaaggaatgagtagaaacaggggagcttctcttgactgggctgtggcctagattgctgtttccccaggatgtggtggcctgggtgactagtgtgcctggtgatgcattgctccatgttgcctgtggcttgtgcttgcccgtgacagaacttgtgaatggcttgtgctaccagttggttgtgaagtgccatgatgtgcagctctccttataagtgatatgtttatttgctttcaacagtgatggagaagggagaaaaaggacctcatctacctgcagcaatgagtccctaagtgtgggaggaacctctgtcactcctcgccggatctcctggcggcagcgcattttcctcagggttgcttctcccatgaacaaatctccctcagcaatgcaacagcaaggtctgtgttgcactccctaaggaatttatccctctgagtgtcagaaattagctaatggaatgcacgtgctgtgtataaagagatttaagtgattacagtgtagaaatatctttctgtatgtgatacagtggtttctctttcaggtatcattagaaaacattaggcattcaatacctgcttgttgaatgaatgaatgagtgagacagtttccaaaaacctgtacttgggcctactccacaaggtagacggaactgtgatagtgctaggaaagaagctgtatgtcctttttctttctttctttctttctttctttttttttttcccagagattgggccttgctctgttgcccaggctggggttgcagtggtgtaatcatagctcactgtagccttgaactcctgggctcaagcaatcatcttacctcagcttccaaagatctttttattattagaaaagcaacatagccttttataagagccacacataaaacaaactgacatagaaatattgagcaataaaggaatatatacaatatactaggcaaatactgagcaaaagagagcacaggcagctctctttgagtaattgacctattaaactaaagcaaaagcatccaaagaggcaagcacatgtaacagtaaacaaacagatagaacaatcatgagaacatacataatgatgtagctttgagagctagaaaataacacctaaaagaattctggagtgaaatcgataaattaatagctcctgtgggagattttaacatactcatctttagaaattaaatataaataatatttgagtaacacaaataaataagcttgacctaatatttatagagaacttcgcctcctatggagaaaactcattcatttttagcacacttggaacattcataaaatgtaattatgtacctgtccacaaagatttttaagtaaatctttttgaaatccaaataatcataatcatttatacaaatattctctgaccacaatgccaaaaaaagaaagaaatcaaggattagaagacaagtagaatgacatgtgtttgggaatagaaaactactcttagaagctagaaggaagaaaattcaatgcttagagccttacctattgaaacggatctagggagcagttaaaagccatgaatatattgatataaaatcaagaaggccaaaaattagttacactgagtgttcaactcaaaaagctagtaagagagccaggtattaaaattttaaaacaacaacagtaaaacgtatggaagtaaataataaaagtaaaggcagaggtcaatgaatatatataaaaaaagaagaaaatagaagaaaacaactggtattactaaagatgaagttaactctgcccgaggtggtcagaaaaagcttcacagaacaattagatgtttatttaaactcgttgctggaagaaccatgctttagaaggaaggaatgacgaagctctggagtcatttgagtgaactttgcagatcagagaatcatgagaaattcagcatgatgaatgcaaagaatagaagattgagatatgaggctggaaatctgagtggagaccagaatctgaaggaacttaaatgctagtcccaatttgttcttgcgatataagcaaccattgaaatgttttaagagatgtgattatggttgttaataggaaaatcattggcagtaggaagggagagaatgagtcacctgttaagggagtgttgcacatggaatactgcacagccatgaaaaataatgaaatcatgtcctttggagccacatggatgtagctggaggttattatcctaagaattaacacaggagcagaaaaccaaatactgcatgttctcacttataagcgggatctaaacattgagtacacatagaaacaaagaagggaacattagacaccgggacccccttgagggtggagggtgggaggaggatgaggattgaaaaactacctctcaggtactgtgctcactacctgggtggcgaagtcatttcatttgtacattgtaccccagagtcacgtaatttacccatgtagcaaacctgcacatggaccccttcaacctaaaataaaaattgaaaaagaaaaagaaaaaggtgttgcaggaggaatgagcagagggagtactgtgctcagccaggagaggcccagcattgctcagtggctatgctcctgacggattttgatgatcgatgtgaccctttgggagatccctgatacctagccacttaatctcgttcctcacagccagagaatatacgtaagtaaattgcagaagtgttggactcaggagaggccagttagttttggggcacctctcttacagagctctttgggtggaaagaagaagtggtgaaatgacctatgcttctgtttcatcatgacagggaaatctggaaggggaattcagtctagtgaatttacttaaatattagctgcagaaactaagttacagggaaagcggctttgtgacatttttaagtgtagaagatcagatgagaatgtgaattctacagaaacttgggtagtctgggttactgctaaggaatgcctctcactgtgttcttctctgcagatggattggacaggaacgagctgctgccactgtcccccctctctccaaccatggaggaggaaccgctggttgtattcctgtctggggaggatgacccagaaaagattgaagaaagaaagaaatcaaaagaactgaggagcttgtggagaaaagctatacaccaacaaatcttgttacttcgaatggaaaaagaaaaccagaaacttgaaggttagccattttaacagactaaatgctatgatgctatgattgaagggtgtatgttaaacctacctttctctccccatacatactatccgcactcagttttggactgtatgcacactttaagaagaatacctactgattataattgttgatttccattttgtgaggtggttataacatgggaaaggtcagcttaagatatttgtggttttgttttaaatgggtttgcattttaaatagatttaagacttaagaaactcttagagtatatttaggtaaaatagaatgtagataatatggaatcaatgtatttgatgtgtctgaaagttcattatcttagtgtcacttctaaaaaatccttaaatatgagaaagcaaattttcttttctttgaatgtgattttcaagtttcaggttaattacattcataatgggagaaatatgcctacctcaagtaaatcctacttacattgtattcaatttaactatttaattataattatctgttatcaagccaaacctattcctattttttgttaatgctttataaattttctatttaacaaagtcgtattcaaatcattatatttataatcaaataatttataatagattttgccccccttgtggtgccttattgctaagattatgattaccaaatgctttggaatgtgtttttcagcctttgaaagaatgatataatttactccagtactgatagaaccacatacaaggagatgctaagaaatccaaaaaaatgtataaatttcattattttgggaaaatcacttaacctgaaagggtctcatttttacacttgtaaaatgaaacatttaacataagtggtccgtttgacttttaagattattggcacaagtataatttagatatttctctcacttgcctttattttgtggtctttcatacagcttttttagtataggtattccacatttctgactttatcatctaccttaagattcttgttactacacctatgattcaatttaatttttttattttaacaatatatagtttgcaagagcacattttttaaaatcgctgttagcagagtgaaaagtacataggattttaaatatcctttggaaatacatcttcttttcttcaaaattaaaaatgctattacttgtcgttagcataattttaaaagttcagtttgataaatggtctgcccacttgaggtttcgcaggcttcaaaagaaattgaattcatatttgtaagcaagtagttatattttgaactaactcagaaaaagaggttgaaaaaaaggtggtcatcctttcctcaaaaaatttaatgcatgaaactgtatttcacttgggagtatgtacaaataaaatctgatattaaatatcaaaaggtggtttcagaatcatagactatttgaagtagaaatagccttagagattacttagctagattcttcattctacagtagaagtagtgactggcttgggaaaggtagagaattaacctaaggtcaaatagtgacatactggcagagcaagtaccaaaactcaggtttattcatcgtggttctcgggctttccccagcaccccacagtatttctcagctgtgtatgttaatataaggaaatggaatgttttacataaatggctgctgtgtattctgagatcagttatactatatgattttacaggttaagaaaggaggtgacatttagaatacattctcagaaaccttcatcggttctctgtttctctgcctacataacaaagataaaaaatagtttaacctatgaaaattctaaccaatggataattatttcttgatagttctttagtcttttctagttaaacagttaagggcagatattaactgtccctgttcaccattttatcctcagggtgtgcggctggcacataagcagatgctcgtgattattttaaatgatcaataatctagagaagattagagaaaaactctaaggaagtaattatgttttgtccatcatgaagaaaataattagtaaagttatatataggagtatatttgtttttagccttaataaagccacaccttttaaaaaattacttggttatcagagaaatataaagcaaatagccaaacagccaagctagacagtgttagaaagccatctgtggtatccggaaggaatagttttgtactgtgatttatctttagattatgtttggacttttaagtaggaatttttactgccttgcttgaataacagtttgttataagatattttaagtcttttgaaatggtttcaaacacactaagtaaagagtaactttcattctgctgttgtttttgtgctgtcgaggacttgggatgcatgacaaagatttgtgttgcaggaggtaaggtggccgagcgctgtgagcatgcatgaatacagattgctctgagatgttcctgtccaccgtgatcctaatgaagagaagaagtatactcttgtgtctgctcttccttctcttttgaaatcagtttttcatgataaagaacaaatcaagatactggttgcttttatagacatttcttttaatgagctctgggcggatatgttagaccatcaaattagagagaactctatattattttaaaaatagaattagtgttaacttcagtgaaaggaatttttctttttaagtttattacaaatgaacacaggagggctgggtgcagtggctcacacctgttatcccagctctttgggaggctgaggtaggaggattgcttgaggccaggagtttaagaccagcctgggcagcatagcaagaccccatctttacaaaaaagtttgtcaaattagccaagtgtagtggcgcatgcctgtagtcctagctacccaggaggctgagatgggagctcaggaggttgaggctgcagtgagctatgattgcaccactgcactccagcttggggtacagagtgagaccctgtctctaagaaacaaaagcaaaaacaaacgaaagagaaaataacgaacatgggaacacataagctagttttattagttattaagggcagtatggataactctggaaacagttataaaaatgtatcatgttatggtcatatatttttcaaatcaagatgagcatgagtctttgtcttctcatgtatggcacatataaaatattaacacttcagtggtgtcaaaaaatggaaaattatagaatgatcaacacggtttactttttatacttagcagagtcgccatatgtaagatacagagtaaaacctccttaggaggttattcctcattttttttctcacatgaaatgactcaaagcttgggaccctttcatgtatcctcaatttgttttaaattttctttttgagatacactaccagttgattcctgaaagtcatttggtatggttttacaaatacaatcaaacgtctaaagttttacatttgaaaaacacattggtcttacgtaaattgtttttttccttagcaagcagagatgaactccagtccagaaaagttaaattagactatgaagaagttggtgcatgtcagaaagaggtcttaataacttgggataagaagttgttaaactgcagagctaaaatcagatgtgatatggaagatattcatactcttcttaaagaaggtatttgggataatctcagtaatttttgttttttaaagaaaagcctgggggattttttttttttgtttgatttgtggagctcagattttgcttagtaattttgtccttgtgttttgcttagtaaaaaaagagaagtaatttgtttcttcctgtagtttagtgactgtctctgaggaggtagcacaaacctattttcagcatggtggtggtgtttaccaaggaagaagtgcatgcattgatacaaatctttgatcactgccataaaaatattaataattcagtctttcaaacttgactcattttcatcatttggtcagaagtattcatttacatatatgtgtatatttacatgactgtgtatatatacttgtatgtatttatatgtatagatttatattctggctaagtaatcaatcaattttctttcatccattcatttcttcactaattttggagaagttgcttttatttagccattatatcgcatttattcttttattgctgctatgccatataagatgcctgatatttaagaattttaaatttaaaaataaaactaataagtcaacttttagttgcagtttctgtgactcagattaaatatattaaaattagaatctccatagcctgcataaactgtgggtgtaaaataaaaattccaaaatacccaaagaaattctataatgattgttgttttaaaagcctatgctaatgtgtgagactgttgagccacagttaagtttaaattaagataagtgttattttgaaagctgctgcattgacaaacttaatatagtgttctttatccttgaagatatggaaatcctaaagatttttactgaatgctttatttgggagacacaataatggttaacagaatgtctatgagatgtagatcacaccattttttggcatgactttcaaagatattttaggagtgcttatcttcctatttcttattggatacagtttaaacttcttggccctgtgcccaaggcctttgtactagtccatttttaggctgctgataaagacaaacccaagactgagtaatttctaaagaaaaagaggttttatggactcacagttccacgtgtctggggaggcctcacaatcatggcggaaggtgaaaggtgtgtctcacatggaggcaaacaaaagagaatgagaaccaagtgaaaggggtttctccttaacaagccatcagatttcatgagacttactcactaccacaggaacagtatgggggaaactgcccccatgattcaattatgtcccaccgggtccttctcactacacatggaattatgggagctacagttcaagatgagatttgggtggggacacagccaaaccataccattgttctataatatctacttcctcctttctgatctcattttgttatctctccttaccttgtattgtgtgctctattttactttgagcactgatatgtcctttgctatttcttgcatggaatgttccagccctccctattctccttcttccttacttctctacattctcatttcccatctccctttctttccactccatcctcttctcactcctctttcttccgccctttcctctgcccgtctcagggcctttatgcggtcctctcctggagtgactgctgcctgcgctttaagcccagagcatcctattatccctcaggtccctcaaataccatttcctcagagcaccacccctgccccccgaccaaaatcagttcattgtactttatcattctttttcgtgatttattatacttaatcataatttacagtttaataattatgtgtgtatttgtttaatgtttttcttaccccaccactgcacacctagcacctaagacagtatcttgcactcattactagatgaatgaatggatgaatgaatgaatgagatgattttcctgagaatggatttattcatcactcaatgatgaggcatcctgactgccttgctttattctctgttacatactggatgctcaataaatgtttgtttgactggaatgaagttgctttttgtacatttattattggttggataataaaactgcccactcatgttatcagtgattcatttagtgggctgatagttaccttctaaaaatgacattttctatgctgtcattgattcattcaacaaatgtataagcagcaaggtatattcttggattttatcatacagagatgaaaatatgcttgctattctcaaggaccatttaagccgggaaaagagacaaaacttcaatatagagctaactgtaatctaatatggtaatgttacagtatgagtcaaatggtgtgtgaaaagggactgattacatctcgagatgttagggagagcttcaaaagaaaaggtgacactcaagctcattcatgaaagatgaatagacgtacaatgggaagtcaagcgagggagcttggaattccataaaggcaacaggaggtgcaagaaactggagaagtgaaaataaccacaagcgtctagtatacatcagggactgggaagtaatggtgcttaaaaaggtagtttggagctatattgtagaggcctcataagtcatgccaacgagcctcagtttcacctgtcggacaataatactttcagcttgtacaaactctggcaatcagtcagaagagattactgtcattaagcatttccttaaccagctggagcaaaggaacccattgccgattcaatgtgtccaaactgaaaactcttagtgagtgaaataaagttgcctgcactgtgcagaattgaattctgtccctcccagtgcttacttcatttcccttggcataaaaaacatagtcatagtgtccttgaactgcttgtgatacattttggtgttcaagcatactagagttaatgtttcattatatgtgctaagcattttcttttcaaagcccgaatgttgttctggagcatatcagttacgccttcttattgtttactacttatattatttcttttttttttagacagagtctcgctgtgtctcccaggctggagtgcagtggtgagatctcagctcactgcaacctgtgtcccccaggttcaaacgattctcctacctcagcctcgcgagtagctgagattacaggtgcatgccaccatgctcgctaatttttgtatttttagtagaggcagggtttcaccatgttggccaggccggtaatgaacacctgacctcaagtgacccacccaccttggcctcccaaagtgttgggattacaggcatgagccaccgtacctggcctattctttcatttttaatgcccatataagaatgctatttgattctctattataaagttacttgttgatgacaaatatttagagttgtaaattaggtttagcatttgttgctatcctcaagccagataaagagtgaaaataggcagtaatacactttgggatatcaggatttggcctctgaaaccagacttttggagttctaattctaaactgccacttcctagccatgtgaacttggggcaattacttcatctctttctgcctcagctttctgtctataaagtggacctaatagtaattgcctaccttatagttgagttgttttctgagtgcatgtgcttagtagctaggcaccctcaataaatgttttattaatgctcagtcagcaacgggtgatgttattgttaatattgtcattatcgtaagtgttgcgtgagggttttcttttgcaaggcatcaagagctataggattcagcttgtcaaaatatgcttctgtcaattatattgtgtggtcttagggtggcatgcagtacatacagctgcctgtttaccagaattatatagtgaatcagctgggatctatcaacttcattccagagttcaaggccttggttatttatctccttcattgtaggagttcccaaaagtcgacgaggagaaatttggcagtttctggctttacagtaccgactcagacacagattgcctaataaacaacagcctcctgacatatcctataaggaacttttgaagcagctcactgctcagcagcatgcgattctcgtggatttaggtatgtttgtcatgtggattataatttacaaaagtaaacagctgatccctctgttaagtttttttggtttttgtttgttcttggtgctgataaagagcacctgttggcatatgcagagccgttgactttgtcctttactgagggcaagttggccttatacctgattgacgatcccataaatgcctgcgtgttaaatgaagttttcaccccaaaactttgcctctgcaaagggagccatcttatatttaaattattataaaggtcatattatggggtgctctcagttactgcattttgaacaactgactttttagggcagatagttgtatcttaatcaatgctggttttgaaatagcttagaataggttaaaaatttaacaaaggtgtactaggtattcctggacacactgctgaaaacaatcctttatatgtcactttaaaaagcagcatgataaatggttatgttggtggaaattatgactatacacctatagggtgagtgaaacattagttgcactaatagtgtaggaatgggtactcatgacctggcggagaatttccagtgacagaatcataaagcagtcttttttttttttttgagatggagtctccctctgttgcccaggctggagtgcagtggcacgatctctgctcactgcaagctccgcctcccaggttcatgccattctcctgcctcagcctcctgagtagctgggactacaggcaccagccaccacgcccggctaattttttttttgtatttttagtagagatggggtttcaccgtgttagccaggatggtctcaatctcctgacctcgtgatccacccgcctcggcctcccagagtgctgggattacaggcatgagccaccgtgcccagccagcagtcttcttaaatgctgattttcaaataacttatggaaataaaaatgctttgatttttaaagattgtattgtctctaatttttctctaacatactttattatttaaaaatatctacattattagattaaatattatatattggcatttgaccactttatttgtactcctaaaagttgatatatgtcaggtggccagatatgttatttgggcccatttgggaaaatacaagattaccttatgtttggggtcatcttatattagggcatatgaaaaatcactagccaaaccctagtttttacctctgttccttttggatgacaaatggctcttactgggaaaggacccagctcagttaattatttttttgagcccagcggaattaaaaaggggattttacagagaaactgaaaatgagtttttgtgctgattgtgccactaattgtggtcttagacatattaccttccttctgagcgtccatcctctctactaagtggggacattgaacaaggcaatccctatgttcccaagcaaatctgtggttctctgaccataaattgatgatacaatcagggttagtcacgatgtcctattaaagagagaaaatgagatcatattacagtcagacaaaaatggagctagaatcaagttaatggatagaaagtgtatttatagttttccttagtaaaaattttaagtgagaaagtaaaaccataattttaaaaattgcttatttggctctgcttgtagccatctgtgtttcttcagcatgcaattgttattttctcatatcttcctcttactggctctgcagaattaatcttattggttcctagaaaaaaaaatcacttttaagcatatgtgggagaaaacattttaaaacctggcactcttgcaagttctaaatgacatgagtaatcatttcacaaggaagctaacatcccccttcatttttgtggccctagaaaaatgcccataccaatatagacagctttgatgtgaagacggatttgtttctgtgtatagaactctccttttagtgatgcaggactcacattgccagctcaagtgtctctgtggtaattttatacctagaggtatattttagaggggaatttatttgaaattgacttgaccctttattttccttgatatttttagatattgaaaaagaaaagtggtttacatggctcatggaggtattttaagagcagagagcgaacgatagttgaaaaagcagttttcttctgaatgacagtctgaatgtaaagtcaaacaaacccaaaaagtccctccagtgtcataagaaaagcagaaataaacctgtttatagactatgaagattttcttttaaataatataatatgtcttacagacttctggtttcatttagaaggtagtctttatatgaattagaatttgccttgctttatagtcagaataaaatttatattccattttcctggtatttctcctgggtacatcattggtttgtggatttttattgtatttttttttttttttttttttttttgctggaaagaagtactggttagcataaaatgtttcctcccatatcgtatatgtgaagatggtatggtggcctggcagaacttggggtgagagagggagagactcttagttacatggtgactctaagcaactctcactggtttgggaaagagtgtctgtttattcttggaggtcactgaattgcaatttcactgttgtctccaaggcatgaggacatttcaaaaaatattttccttcttttcctctgcaggaaggacgtttcctactcacccttacttttcagtacagcttgggccaggacagctgtcactgtttaacctcctgaaagcctattctttgctggacaaagaagtgggatactgtcaggggatcagctttgtggctggagtcctgcttctgcacatgagtgaagagcaagcctttgaaatgctgaaattcctcatgtatgacctcggcttccgcaagcagtacagacctgacatgatgtcgctgcaggtgaggcacttgtgcttcccgaggaaggtgtgagactattaccagaaatcctggccctcttctcaattattacagttcagatttaaagaaatgtagagccattgtcttagaacttgggtaaagattggggcatgttttagttcacttagtgtgggatttgctatttaggtaaacttctaagtgtatgagacccagaggcagaataccttttccataaaattcctgaagtaagtaaataagtaatttaagaaaggtaggtgatgaggacccagtcctttatgccctaagtctatgggttacatggagaaggtatcaaatcatctttattcactttttctcaacttctcagttgaaaaggctcacagatcttttgtttacaatctgaaagtatctttatccctttacttttgagtacacaaatagcagataccatgttatggttctttttgaacttatcattgatatctcccctcctttatcttcatgtaagataggcctttacagaggaaaaagtgtgaaagccagtggtgccttttcagtctgctttgtgtgtgtgtgtgtgtatgtgtgtgtgtgtgtgatggaatcttgctttgttgcccaggctggagtgcagtggcacgatctcggctcactgcaatctctgcctcccgggttcaagccattctgctgcctcagcctccccagtagctgggattacaggcaggtgccaccatgcctggctaatttttttgtatttctagtagagatggggtttcaccatgttggccaggctggtgttgaactcctgacctcaggtgatccgcccgcctcagcctcccagaatgctgggattacaggcttgagccactgagtctgcttttcttagcaggctctgaagaagcaccattaagattttccaggtattttgagtggggtattaactgccactgctgtctttagcctacctcagactccctgtttgcacatttctctcctagttttcacttctctaagtgggttggttgctaataagcagtttaaattttgtctatagatacttaaacaaccactgcctggcaatttaaagctttcagtggttaaaaatataaaagaagactttaaagaggattctcaggtttttcctcccttgaaatgaggtatgcatgactcccagttcatcataatactgtgctttagataagaagtaatagtttaaagatgcttttaaaatatactatttttttctgtttcccagagatgagttttttgcctttaatatctcagttgccaatgtataacaaaagaattgtatttttagtctgagcgttatagtaaatgatattttttgagagtatgaatggagatgaagtattccatttttctttactttctgaaggtaaaattttgactggggagatagggctttgctatcaacattaggttttctggtgtgagttcatatgatttgattcctcattgatgactattcgtaggtttaacaagtcaaataacaactgtggaaagttttattttttattcctaaagagtttacctgtatctttttatctttttatcgttttttttttttttggagacggagtcttgctctgtcacccaggcaggagtgcagtggcgcgatcttggctcactgcaacctccacctcctgggttcaagtgattctcctgcctcagcctcccgagtagctgggattacaggcatgcactaccataccctgctaaattttttgtatttttagtagagttggggtttcactgtgttgggcaggctggtctcaaacttccggacctcaggtgatccacctgccttgacctcccaaagtgctgggattacaggcgtgacccactgtgcctggtcacctgtatcttaatatcagataggaatcagatggtcttgtaaggaattcaataattctgattttcagaaacaacggtttggtagctattattagaatttcaaagatacagggaagtacctgtgagtagtgtttgatctgggtccacagataaaaggataatagctatcagtttaaaaatacaatgatatttcaacttaaaaattattcatcaatttgacattacaaaaattcatgtaaatcggatttatacattcatttaatatggactgtaagtaccaagaagtattttatgtctataattttgaaaatgcagatgtttaaaaatctttggtgacagcattgctgtaggccgcagtattggggaccttattctgggagagtaggtccttttgcattttaaagtgagatataacacttttccactttctagagcaggaggtactgttttgggtatagccaataggatgtttagaagtgtgcttaaatgcctcttgcagtgggtttggactcactccacaggatttctgatttcttgcttctctcttggtggcttgggtgctccaggcttcagttaccttatctgtaaaatgtgtaaaatcttgcttcagttaccttatctgtaaaatgtgggggttgaggtctttttcaactttaaatacatgtatcttgtcacgtttgtttctgctgctttctgtgttaagcataaagacattatatcttttcctctgaagtttttggtctctacttttttttcatcttctctcccctacccttatctctctctgtgcatctttccttctccagttcacctctttaatctgcaggtttgccttggtatctataaggtggaattgaagaattatttgttcttagaaaatagaattttatcattaaagctttctttgaaggaagcctgaattgtgttcttatttgcccaaatatcccttgatggaagaaactctcttaactcccatttgagtatgtgcggcagggtaggtgggaaataagattctctttaaaaaattacatgttgaagtattgcttctttttataatcacaagtgaacaagaacagtgtgcttttgatgacgtgctttctttttatgctgctaattagacttttttgatttttgtgcttaccaaaatactaactcttttgttgatagatgctcagaatttctcgtttctacgatgtaaatggtctaaaggaaatgtatgttttttttcaacatgattttttgagataataatctcattaaaaaaaaactttgactccagctaagcttcttattttatagctatgacttcctgtggctctttaactcccttttatttacagtttgtgtggaaacggagtttctaaagatatttgttgtggataaggattgaacaaacaattttttgtatttttgcatagtttttgatttttttccaaaggagtctgttgatttttagttctgtactctagaaataattgttgaattcacaacataattggttatttttatgtattgtcatagagctatttaagagtgatgttttaataatttcttctagtgaaagaagttctgctagatttaataaaacattttatacatttttacaccaaaatatcaagccaatataactgatcagggaaccatcacttatctcttaactgtgtggataaaaatttaaattaaaacacaattcacaaatttgtttgttacttactactgctttatctgtagtatcacagatatgagtttaaaagtttctgtatgctgtctttatgatgttttctgaaatgccaataaccaactcagtagccaaatgaaataattttttcttttagttctagaaatattcagaaacaactgcactttttgccttaatcacgtttgtcatgaaaaatatgctgctggaataacttgaatattagaaataaatctcaagcttctggccctgtaacattcgaagctttaattctctcctagcagtgcagattgtctggagagccagaactctttcataaatcacatgctggtctcagtaaatagaaataagcttctgcactgaacatggtagattctttagaatggaggcttttctggaattagtctgaaattagaagggattttctatgaggttcctgagccaggactgttctcattaaattccaaaagcaatgcctccctacagaagaaaaaattccatttctttgtatgtatgtgatgctcaaacacacgtgatagagaaacttgctcagtcttcttagatagactttcagtgacttgctttatgaattcagttaagtgaacttggattttagtatcaactttaaaatcataaaaataaagtaatactacttatatatgtgaatttgttattaaatattagaataaaattaaaatcagtgtgtttgatgcacatgcagataaatgcataatattttttttcttctccaaattaactttagattcaaatgtaccagctgtccaggctccttcatgactatcacagagatctctacaatcaccttgaagaaaatgaaatcagccccagtctttatgctgccccctggttcctcacattgtttgcctctcagttttcattaggatttgtagccagagtttttggtaagagatacctgtaattaaatggaacagtattatttattccaaggactatacttctacttctagccatatgatgcccctattgttctatcatgtgttatacagaatagcaaattgctaatggaatttaataaatgtgcctggctgtgttctgacagtaacttaaaatcatacttgtcttacataaaattgaaattaaaaaggaaagaggaattgggctcctgtatttgagtcagctgtaatggagctcttattttcatttgtgcctaaaaatcagagagtatactcctaaaatctggactagggacagactgtgtataattttccagatttttatatacatgtttctacccccattgtcttcttcatcttgcattcaaaacacagagaaatatgttcttaactgtatcaatgttgtttctaatggcatttcttaacctgactttttgttgttaacagaataactttacatcctgtttcattgctcatgtgactcttctttcatgccaatgcagtgctgggggacagtctctaagactggtggctcagggaaaacactaagtacagtcagtagagctcagggcaagttactgagtaactgccttgctctaagcacagtgtttggcattgggaataaaaagagagtgtaacatggtttatgtcccctttggaggcccttaaatctattcacaagtctttatactagtctaagtctgttatttaaaaagcaaaaattaaaacaacaacaacaacaaccaactcttcatcagaggtttgttctaatgatgttgtttaggacctcagtagccttagaaagggctcccttaatttttatgttctgataatctatttagtagacatgggcaaagcagtcagtattcactcacaactgcacttctgttaaattggagctttttgtcaaattgtattggcgccattgtaggtcattgccagtgtttgaaaaaatgaaacagcatttagtgaagatattagggaatattacaaatagtaaggaaatatgttgtttggagaaatttgttttgaggatatatgtgtaatgtatatatataccagattacaacatatgatatctttcttattgagggctgtggtttaaaagttaaacactgcattagtgttactacaatttataaaatgcagcaaaagagtaaagtgaaaatgcgctgaatcaaatgttcaccagatttctcttgtttattgaatatacactattgcttttctacagtgacattttctctggagcttgggttcctattaatgggtattctataaatccttttgtttatatacatttttcttcccagagaatagtgtatcaaatcaaaatgatgtttcagggcacctctcttttacttacccttggaagcttgatatcaagagttcaagaaacaaatgtcctcagtatcagttttttgtcatgagaatacaaatgatgctgttggctatacaatagctgttcaactctcttctttgaatttataaaacaatggagactggcaggaaatggaaagatgcatgagcaagaagaattactatgaaataatgattctatggttccctcttcattaaagactccctgttgtatattattgattaaagaatgacatagattgagagaaactttcataaaaaagtactaagtacttgatacttttatttctttctttttttatttttctaagactgagtcttgctctattgcctaggctggagtgcagggcacaatatcaattcactgcaacctctgcctcctgggttcgagcgattctcctgcctcagcctcccgagtagctaagactacaggcatgtgccaccacactcagctaatttttgtatttttcgtagagacggggtttcaccatgttgaccaggctggtctgtaactcctagcctcaagccatccacccacctcagcctcccaaattgttgggtttacagatgtgagccaacacgcccggcctagtacttgatacttttcaaaagtattgcatgtttgtatttgtaggaaagcagggcttagagttagggtagctcttatatttctctcctgattgaggttgtatgtttttcatttgttttaatttttctgttaatgtttttttttttttaatttcctggtgtggtatagatttaattacatagctggttcatttactttttattatggtaatgagagtttgaatagtactcattggttatgttaatttgtttttgtattcctgttgtgaagaaaaatctaaatatcaattgaataactgtccttgaggtttacctagtctccattaaatttggcattaaaaattacaagtagttcatggacagagatatatactttgtccttttttaccctggctttatctgagattcttaagaggaatattaaaacatctgcttatatgtttagttatattgcttttttaaaaaaaagctagatgcttttgaccagttttcttctgcaaaatacataaaacaagtaaacaaaaacctttagcacaaatagcgtgctttttacaagagtggatgcatagttttgatcatgaaaattatatctcttcttttagatattatttttcttcagggaactgaagttatattcaaggttgcactcagcctactgagcagccaagagacacttataatggaatgtgagagctttgaaaatattgttgagtttcttaaaaacaccctacctgatatgaatacctctgaaatggaaaaaattattacccaggtatgatttaaatgctaatagtattatatagcagttttctctactgaatatatattaaatgctttagcctaaaaatgtagctttgcttgacagatattttcatcagatacattttatttagaaaggggactattgtgaaatttctacactgtgacattttctatctggctatgcacaaaaaatgctgtttagtgctacgtaatgagtttttcaggaatcctttcaatttaaaccaatgctaaaactgaagatagaactgacagagtcaagaaggcctgagaataaaatcagatcctcttgcctttgttatattgttaattattttgtaaaataaacgaagaggacacgtggcaggagtacaggctttggaattagaaggtattgggtttgcatctacttctggctttttaattggttgtttggcttgcacacatcagcctaatcatccaaaccctagttgtccagaatgggacagtactggacaagttccagaatgggatgatactgatctgagaggttttatgaagcttcagtgaggagacttggtgtatcagtctttgtccctacaggaaacattctccctccgatgattcaaatgaaggaaccatctataaaggtgtgggtaggcgtaaggcaatccaacacagctgtccaggtgcgaaggaactagtaacatagggaagctgttcaaacccctgctgcagaggagctaagtggaggatataatagtgttactaggcccagggagagctggaaccgtggaggagggttctgtgctggttgttgtggtcttgttgaactaggcagagaaggatcagggaagaaatacccaacccttttctcctgccccttctgatcttgtgctggcatcttctatttgccaaagtgaaccagaagccagccagaaagtaagtgtggggaattgtctgcctgccagggtacaatagaatggatgagggcagagaattgatctgagaagcaaattgagagtaatctgcacaccgtatgtgtagtccttgactcttcatagggaccaggtgagtggtagctatatattgctgccgttcagatgcagtggacaagcttaagagcagcttgatagatttgacaattatgctttatgagcattgataaagtttaccactttcctgaaggcacttttgatggcagaaagacgatagggtttagagaaagggagtttggaaccttgttctggtgcccagccatttactagctgtgtacctatgggcaagttacaacctctctgagtctcaacctcttcctctacaaaatgggaataacaaaagtagattctattatagttttgtattattttaggagcaaatataaccaatatgttaaagtattttgtaccctgtaattcatactataatatgaactcttattatattaatacatgtaaaattttatttccattacatggaatctaaatcacaaatatctataaatagtttgtatttgttaaaatgctctgtaagctgaaaagtgtagcttttatttatatattcacttgtttataaatttttcagaaatatctttcttgactggaatcagatattatgcttttagagatttgaaatcagatatcacctcccttctaaaattaatgaggaaattgcctggctttatagattactattgggattaatgagtagaatttataggcaggtaaatttgaacttgatattggagagaatttactaacaattagagttgattactgtggaatgaaatgctgatattaagggagactttgatgaactttatttatggacactggaaaaaaatgcaaataatgcagaaaatcacaagaaaataaaagtaactataaatctcaacatctagagataatctttgaaactttgtattacatgtttctttgcttatatatacatataaaaatatataaagttgtacataaatgaaatcatactatatatactattgtggaacctgatttataattaaaaatataaagtattagattttttccagtaactataaatccatattatcatttttaatggttgtataataatccattgtatccatacccactaagtaaggaaaagatgatggttatttgaggataaccagttagtctagaaattctcttattaaaattcgaatgtttgagtatctctattagtaagtagtagagtaagtcaggttttttgtggtttcttttctcttctcagtgttagtatagacaccattgcttgaatagcagctgttgtctctccttccccctaggaagtttggagtaactgtcctctagcttcaaagcaaacgaccttcctatttagtggtgacatgggagagcagtagcagccctaattaaaccttacagccctggacagtgctcacagtgtgcaattttgaggattctctgtgtggtacaatatgtaaatgactcttaagaggcttacagggaatagcaaatggatgcaaaattttattaagatctttctgctccattggcaaataaattagaaatgcttttggttgctttattacagtaataccctatgcaattttgcttactaatcagcagagattatctctaacataataattactcaataactaatgttgtttatctagtatactacattttgggagacagttactagattatgaatatcttagctgccaaatacacttggacattaatttattctagggacttagcttcatgagaatgtttcaattgcatagaaataatctatctgttctgtttttaaagaaaatcttctttcacagaaagagctatctgtttttatgttgacagtgtaaactatatctaatttattcttgtattgacagttacacttttttttgcttttttatgctttaatgttcttcattaataagtatttggaaatatacatgaaatataccaagataaacaggctgtatcttgttatacataccaaaggctagcctaacccatgatactttcatggcaggtttttgagatggatatttctaagcagttgcatgcctatgaggtggaatatcatgtgctacaggatgagcttcaggaatcttcatattcctgtgaggatagtgaaactttggagaagctggagagggccaatagccaactgaaaagacaaaacatggacctcctagaaaaattacaggtaaagaaataaagatttgagcaaataagtacttcaatgcctcctgcatgcacagaactacctcaggaatgaaagggatatgtgcgtggaatgaaccattgctaaccaagagcccatgtatcagactgtccaagtgctctggggctacaaatgacatgttaaattaaacattacttggaaaaaaatgcaccctcacaaaatagctaaatggcagttcaaagtggaatctgcttaaatacctgttgcatgttatagatatttggttaaattaaagggaggaggaattgaatgtaggaaattgatgaagttgtgaaggacctgggcttgagctggaatctggagggttggtggaagaaatgagtgaggagggtctttaagtcaggctgagtaggagggtggcatcaatcagaaggacatggcagagcagcaaagttagcctagtgtcaatttaagatagaggttggggagaggtagggtaaatatgatagaggcagaatcgtaagtgactttcagtgtcaagccaaagaacatggctttaatcctgtcaagagggaaatctctcaaagtttttgggccatgctgtagaaagatcaatctgggaaccttgacgaggacagattgagatgggagagaaggtaaggaggcctgctaaaagtcacttgtgaaaatctgttgcggatgatgagagttgtctagactaaaatggaaattggaagagagggagacatgtctaggtaaattgaatcccatgcaaatgttacatgtaatattaatacatcattcctgccatcagggagttcacaattatttgagaatataaaatactatatatctgtctctaagcgcacacttatacatgcaataagaaatttattataaagtcatattcggtatttgcaacttgtatgatgtgtgctatgtagccatgccctgaggggaggggcttaagagtgatcacaggatgggggctagcaggtgacccttctgaagtcttcggggagatgacttcaggggagtttcagtgtctaatggctcctcggtttccacttactcctcctctccatttccccaacactgcacctggctacaaactggaaaacactaaaactctgcttctatatggtgagtcccctgtcaagaccagtcaagagagacaggttagaaatgagggatctctaaagtagttgcttcccaagaatgggaacactaaacttccttcgctttgtcttacattggctctggctcatagaaaatgtaaatctttttttctattcaaaaaagggcaacatactctattttcaaaaagaaaactaaatggttagtatattgtccatttttagttggataggtcaatggcgattaattatttgccccttattagggaaggtgggtttgtacctgttttataatgattcgtctgaactgttgtagactttttcactgacagttcagtgtagtcatcatcagttacttggccacccctcacatctataaatactgatgaaagcccaagtgtatgtttagagaacgccgtatttcagtcagagaaggaaaatctcttttagcactgcaatagtgtcaggaatctcctgtttctccttcagccaggccagatcccactcactcaggggaacaccagtgggtgtagaataaggattcctactgttggtgaggggggtgatttagtattgaattattcgtgtgttcagtgagaagagatgaagcatggtagttccatagttacatctttgtgaaacctaataaatcatcgtttcctgtaggttttcagagtatttgcttcacataatattttattaagtaatttgaagtaattggttaatatgtgtaaggactgtctcctactataatgaatcatttgatttggaggattttttcccccccaaacaggtagctcatactaaaatccaggccttggaatcaaacctggaaaatcttttgacgagagagaccaaaatgaagtctttaatccggaccctggaacaagaaaaaatggcttatcaaaagacagtggagcaactccggaagctgctgcccgcggatgctctagtcaattgtgacctgttgctgagagacctaaactgcaaccctaacaacaaagccaagataggaaataagccataattgaagaggcacggcctcagcagaaagtgctccttagaatactacagagaggaagagcctgcatgtcgctggcccaaggctggaccctgaagctgatggaaccacctaatactggtgctgagcgcctagtcacagcaggtggacctcgtgctcatcagagcatgccaatcctaagccattggacatatgtagactggtttttgttgttgctatgtacatataaatatatatataaaatgaacatagttcatgctttcagataaaatgagtagatgtatatttagattaatttttttagtcagaacttcatgaaatccacaccaaaggaaaggtaaactgaaatttcccttggacatatgtgaaatctttttgtctttatagtgaaacaaagccagagcatctttgtatattgcaatatacttgaaaaaaatgaatgtatttttttctccaaagaacagcatgtttcactcaatggtgaaaaggtggaaacatttatgtaactttatgtgtatctgtcttgatatctactgacattgtctatatgaggaaaatgattactggtcatgctcctgtgagttttttgggaaggtagggtcatttctccctgcctgctttgtgccaactagcatgttgcatctacatgcattatgagtctggttaggcattactttaaacatacataaagagacagtaggacattgtggctgagtctacccagctcaaggtaaaggagaatgttgctaattttttagcaaactagaccagcattattactcaaactaaaaatatcacacctgaaaaatttaatttaggacctaaaatgtctagattagctttctgctttttttatttgaataactcattcagttgtgaatgaattcctctttatttggtgccacagtcaccaaatgacaaggatttgccactttcccaccaaattgtgagtgcttgtaatttaggtctctctaccttaaattcagtataaggaaacgtaattatgattgattttttccaaagatgacaagctgtgttgaaatacattttttcttttgaccaattgacagaatctaataagctttaataatcttccccttttatgtgaaaagttttgagaactgtgaaatgtttaggaacaaactgttgaaatccattggaagggaaaaaagaaagtggtaccagtgttaccagctcaactaaaacctgcaattctgcatttcaactcttcacttcctcagcctacaaatagctcattagatgacattcacgcatgctgggtataggcaaggaaagtaattttcaaagtacatttgcagttctctttttcagagatgattctatgatagtgcctctgaaagttgatgcagcatttttgcctttccaaaaagtatttatcctcactgctttttgcagtacttgtattttcacagatggattatctggggtaattttcttcaaagggagtttgttatacacagtgaaaatgtattatagagtagaatagtaaagctctaggggtttcagaaagctttgatgaacagatgacaaacatctgaaaccccctccgcactgttacccagtgtgtatataatgacttgttatagctcagtgtgcccttgaatccatacagtttcttaaaagacaataaaatcttattaataaagttaatgtaacttctaagttctagaaaatgctgattctgtctgccccattcaattgggggctactaattgatttgttgcttggatttcctgagaatttctctatttgtaggaggggttttttctttttacggtctgttgatgacaattactttatgggtgtgatgcaccgatggtagccaaggaatctgttggggaagttcggaaagaaaccttttctttcttttattcagtttaaagtaaactttatcctggatgtttagaatcaacattaagagttatattatggtgttcagagattaagctgacttggatacaatattttcttttgaaaatgaattttctttttcatttgtgatttttaaaaaatgttgcaccagttatgcttcatgcatcgttacatcttcatcaggttaatgtaatgtctagttcctttgcaataaatatattgctgcagctttctt

SEQ ID NO: 9252 - DNA, 7513 bp, Homo sapiens
aggtttcatcgtccataacgaagagtgagactatttggaaacagagactgatcatctttgggggaagccctgcttcctgaaaacctgatattgcactgggatttgaatgtgtgtgtttccgtttaacttgtggtgaaggaagtgtgtgactcagcttggctgggaagtgctcctcacctgtgtggcccagatggctccaacaagcaaaaggaaggatgcagtgactcttgctgcccagaatgcacagcgatggtaagagacaccgtggatattcttcatcagaagctttaatcaaagaagatgagcagaagacaatcactggctccctgttaccagaaagccaaattttataatgcgggtgaaagaaaaatatagattaaaattgctgggcactgaaaaggggtgggagttggaaatcagaaagaaagagaaatatttcattatgttaatgaagaaaagagaaaattgaagcataaatgtatttttgaagtagttattcggtagctgagaacttattaagggatttaggaatttaacctcctgatgtggattcctcaaagacttgatcggagaatactcttgtttcaccattatgttggtacagtatagtaccattattttatgttgtgccagtgaatccagttgccagaaataagtctgaatgttttcatgcatctttttcttaaatgcaagagcttctactgactcttaacaagcatgcttacccaaattttgttgcatgcttttaagtagcattagctatgcacacttgacatttttaaatatccctttcctagtgtaccagccttcacaggataagaggactgggaataaagtcagatgtaatgtgaccctagaaaactgtagcaagcttcagaaataaatcttttgatctttccctatcttgattagatccaaagtcaaagcaaccatacttcacctagagaagacagtattggcaatcatgacacctgtaataaaaacttgaatccaaagtcaaaacttaagcaagatacaaatgtgctgcctgcagttagtcctgcatgggaataaggactagttatttttttagtgctgcatttttttaaagttggattgctgctatttaaaaaaaaaaaaaggacacagatcaaaaaaacacccaaaggcttaacagaacatggaaagttcccactaagttgtgtgtgaggaaatcctcatcttgtattttaagaatctgcagatggcatccatagatacagtacagtatttactgtcaatgcaaaagaatcagtgaggttaaagtagtggaagttttccctatgagcctacagtctgtattgtttacattaagaaactctctattattgtgttgctattttccatggagtcacaggcacactatgacttctgctcccaaatacatatgaccatatgtaaataccaccttgcatttcattgttcttcacaagtgctttgtgcccctttaattaaaaacacatgaaatgaataacaaaacaagacccaaatagagtttattttattctcagagtttggactacaattttctaagatgtttctggttcaagactgtcattttctatttcaaccgaaaagtaagcatttaacccggtgaataaatgtagatcctgccattcattggtattttaaagaaccacttgaaatcggatcattttatttaaaaataaaaaatgttaatgccagttggcctactataaaaagccaggaccatgttagaattaggaaaagtaaccagcattactgcacctcttgttagactctgtgcattaataaaacacacctagagtctgttgtcatttcactaataggataagacaaattttttgctttgaaaaaatttttctgcatgcccaggtgtctgtctctggctgaggttttgtctattttacagtgtttcaatccagccataaaaattaacttgtgattttttttttcccaaagtcatgcttttccttaattatatttttattttattattttagtgtcttgagaaaaataccaagagatataatgtttcttttaattgtctatgcttaatcatctttaaacactttttaaatttctaaccacaagacctctctataatggtaaatgtaagacatcaccattttatcactcaaagtatgttattgaaagtttctatttggttgataaaaggaacaattttttcccacttttgatgcctgtgatgcaattttttattgcctacaatgagatacacttagtacaaaaaatgaaaatctggtatttcaaaattgcatttcttgtataataggtcagatttattaactactcatactttttctttacactaatcgatacatttagaaaaaattttctaagttagagacaagtttaaaagtaaaaaaaaaaaaaaattagccactgctagtctactgtttaggtaatcggaatcaccaattattttattagaatgatggcttgagtaaaaagctgtggaaagaattaaaggattatgagctaagctgtattttgcagaatatggttctattttagtagagcagagatgagacatatccccaccggccacccagccagaggtctcctacctgggggccctaaagggatgcagaggtctggcccaccctccgtgcataggcacctctgtccaccaccagcgtttcagcaatccaaccagtaagcatatgctgtataggaaaaataaaagtgtgtgggaattggatttcttttgttgtaacacaattccaggtttttggctatttaaagtttgacattaggctgacatcgaggaagtaagtgggttttcctgagttcccaagatatgattaaggaagaaaacaaacccatctccaggaagatcccaggcaggaaagaactagacagatgtagaaaccaaagtgaccattttagtttttttattggagaataaaacattaatattagggtattaagaagatgctcagcaagcttgatcagaatcttcatggtcattaccaatcagtctgacaaaatagttctctggtagtcagcattcatttaaggcagcttgcctgataatttcctgtgttatgtgaagtgtcttgcactttcacatgttagctataattccttaaattacttaactgaaatctgtaatagagaaccattttggcatttgaacagctattttacatggagaaaaagcaaacacatctgtttgctttacccagaaaaactgactttctggtttcatcttcatattgtttagtagcataatgagagtagtcctttatctttctctaatgttagtaaatatattctgttagtaggaagttctgaaattgaagggaaaatatatttaaggaaataaaggaattcaatacacccttcaaaagtcaccaaatactgaaaataagagatgagtccttaaaacctgagtcaaaaaaggtccagttttacagcctgcaattaattcagggctgcgttggcattaaaaaagaaaatatatatatatatatatatatatatatatatatatatatatatgtatattatatatacagtagcttacacttaaaagaggaaaaatttgcattaacattgcatattctgatatgtaccatattaacacataacaggcattttatttatgcttcatagaatcagacagacacaactttcaaaaatcttactgtattcacaatagaaaagggtagtcttgtctaccacagaggagtatgtccacacttaataatgaaaactttcttcctttcctgcccaaaaatttcttcagtctgttattatttttaagtgccccttgctgcaaatttcaaacagagcaagaaatcttcctcagagtaggtggtatgaaattaaactagtacaatatatatgaattcatgtcatttacccctgagtatggtagaattgttaaagcattcttaaattccaattatatgaagcctatcattactaggaaaagtatattctttgggataagaattaatttcttcacactattagagcatgttgtgagtagtaaggaactacttagatgcaatttatttacagaattgtcccttgacctcttgaaatggctagatctttcactactgtgtaggtagtctctacttactggtaggatagattacattgctttactggacaaagcagaatgaacttatataactaaaatatgtcctatattggctgggtgcggtggcttacacctgtaataccagcactttgggaggccaaggtgggtggatcagttgaggtcaggagttcgagaccagcctggccaacatggtgaaaccctgtctctactgaaaatacaaaaaaaaaaaagtatctgggcatggtggcttgtgcctgtaatcccagctacttgggaggctgaggcagggaaatcgcttaaacccgggaggtggaggttgcagtgggcccagatcgtgccactccactccagcctgggagacagagcaagactccatctcaaaataataataatagtaataatgaataaaataaaataaaatatgtcctccagggaaaagcaatgacagagtaatcaccaaattaataggaacatctttctagagaaagtacatgcccagttagttcaaacccaggtttcaaagaagtagcactgggctctactgtaaaggcaggcagtgaccaagaggtggtggggagagaggtagagtaccctcaaatcattcccattttcacttccaatttcccttttgtaatcattaagcttaagctatgtatggaaatgcaaagcaccattagcatttctagaaagcagctggaaccttacccaccaatgcttttttgaagacagtatcatcccaaatttaaaaatcctattgtatatgttgtaaaatttctggcaaagaaatggaggatcctgtggcagctattcccacctaaagccaaccctataaggatgggtcattttttagccatgctaggatttactgcacacacaaaaaatgtcatttagcttgtcacattgctagcacagctgcacatatgagcaaagcactgttggtctgtgtttctcagtgggggtactcttggcatttggagctggataggtctttgctgtacagaatcatcccatgcattgccagatgtttaatatcccaggcccctgctgactaaatgtcagtagcattctcagtcattgtaaacaccaagaataaaaagcattcccccaggttcaaatgccctccctgggaggttggtatcacctcccctgaatgccactgtctactgcattttgaggacacagggagaaaaagtgcctatcctcaaacattgtctctgctgccttgcatttctttgggccctgaatggtttttctcccttcatttttcgagcctttctctcagtgcagctgttcttcagggaggaggttactgggcagccttggccattcagtgggcatggggacttggcctagtccctatatatatatacttaaagtccctatatatacttaaaggagagatcatacatgaagaaagcttttttttttttttttttttttgccttacaacttttctttagaaccacattattggtcataatccttgttactgtcatgaggattgttgcatgggttaaacacaaacacagactagcaatgcacttgaacaaacctggtggtctttggaaataaatcaccattagatttcacctggttatgctgcatcccataagttccaaatgaatcacctgcttatcctattaacgaagcatttaattcacacacaaatgcttgaatttcccctgtataaatgtagtcatgcgattcaacttttctaataagatttgtgaatgctgcatcatgatgaaaatgtggattaactgtgggttgcatgcctgttgttcatacttcagtgatggtcacacacaaaacaagatgagttttacttaggtgaaacattattaaactgtactaacaatacagaaacatattctctttgtcgctttttatcaccaaaactgaatggcaaatatgtcttgacattacttggatgaactgtggctagcaaaatggaattaacttagccactataattttttaaaacattaaagtttctaaattgtttttggggccgagtaacgcagagtcaataaaggtggttatattgtaagcttttagatggtgcttaagaattcttatctttttaaatagcagtattttttttttaagaataaattgtaaggagcaaataaggcagaatgccactctaccctcaggtcaattttatggtatatgaaaatgccagtaatatttgtgccacttgccaactcgggggaggaggggcttttcccttactggatacttttgttatagtttgactatgtcattatgttgtttagagagcctccacaatgagaagttgccactgcagggctaactcgccttcagaaataatcagaatgattcaagggtcaaaccactttcatcccttaaaatatagggactaatatttctttttcttttttttaaaaaaaacatttcttctgtggcttagaaatgtgccagtgtgttcaaaacatttacaccaatttcaccagatttaggacctattaaaaattcaaacaagtttcttttttttttttttttttctgtgtaacagggatttttaaataacggactatatgcattcttttgttatttcacacttcagttaaagtgataacaatggtaaactgtgatcattatcagactgactgaatgctttctgatttccagtgagtgatctagttctacgtattacacaggtgtaatatctgtgagtgtaaataactggaactgtacactgattaacatgacagtttctcttttgttgttcttatctgtactgtattatagtatgtgggtataaatatctacaagtatacacacatatgtacttgtattccactattgtaacctgaaagaaagactatgtattcccttttttaattccgtactggtatttgtgttatttaaaaagcaaaattctgctctatttagttgtataatattagaggatactttgctgtgcacaattccaagtgccttagaacattgtttagctttcctaagtatatataaatgcatatatgtataaaattgggaaaagttacctcaataaaatcattgggaaatccccagttttagtttgttccagtttctcttatatttggatagtgctcagcctttttaaatgaaaaaagaaaaaagagtaagacaacttccctaattgcctgttatttcagcttcacctaagtttttaacacctctttgtatgtaaggtcttgagacatgtaaggcctggtactttttatttaaaatgtctgtctaaagaattactgctcttaaaagaaacttccagtattttttttaacttgctatctttttatgtctgaggtatttgatattgatgtttttattgccattattatatgtaaacataaaagatagtccatttagagtttataatatagaaaataaacagacttcctcatt

SEQ ID NO: 9253 - DNA, 152 bp, Homo sapiens; identical to SEQ ID NO: 6129

SEQ ID NO: 9254 - DNA, 96 bp, Homo sapiens
cccgaaaaaaaaaaaaaaaaaaaaaaaaaaaaaaaaaaaaattaaaaaaaaaaaaaaaaaacaaacaaaattaaaaaaaaaataaaaaaaaaaaat

SEQ ID NO: 9255 - DNA, 130 bp, Homo sapiens; identical to SEQ ID NO: 5837

SEQ ID NO: 9256 - DNA, 116 bp, Homo sapiens; identical to SEQ ID NO: 5840

SEQ ID NO: 9257 - DNA, 151 bp, Homo sapiens; identical to SEQ ID NO: 5841

SEQ ID NO: 9258 - DNA, 202 bp, Homo sapiens; identical to SEQ ID NO: 6792

SEQ ID NO: 9259 - DNA, 158 bp, Homo sapiens; identical to SEQ ID NO: 8242

SEQ ID NO: 9260 - DNA, 125 bp, Homo sapiens; identical to SEQ ID NO: 5842
  SITE (33): n equals a,t,g, or c
  SITE (49): n equals a,t,g, or c
  SITE (61): n equals a,t,g, or c
  SITE (90): n equals a,t,g, or c
  SITE (91): n equals a,t,g, or c
  SITE (116): n equals a,t,g, or c
  SITE (117): n equals a,t,g, or c

SEQ ID NO: 9261 - DNA, 126 bp, Homo sapiens; identical to SEQ ID NO: 6134
  SITE (9): n equals a,t,g, or c
  SITE (10): n equals a,t,g, or c
  SITE (14): n equals a,t,g, or c
  SITE (20): n equals a,t,g, or c
  SITE (95): n equals a,t,g, or c
  SITE (107): n equals a,t,g, or c
  SITE (108): n equals a,t,g, or c
  SITE (110): n equals a,t,g, or c
  SITE (118): n equals a,t,g, or c

SEQ ID NO: 9262 - DNA, 151 bp, Homo sapiens; identical to SEQ ID NO: 5843
  SITE (4): n equals a,t,g, or c
  SITE (45): n equals a,t,g, or c
  SITE (89): n equals a,t,g, or c

SEQ ID NO: 9263 - DNA, 440 bp, Homo sapiens
agtgaacagcatgttcaaaagcaccgggctacaaaaatgcaaggaatgttcaggaactcacaaggagggaaaggaagccagctggctggctaacaagcataccgtaaaagtagtgccagcaaaagatggaactttaatgattccaagacaggcagttgaggcaggacttggtgactaataggaaatgctggatgagggagagaaatgaattgctaatctgaggtttctagaccaaaaatatttttaaagatagaatattaaataagacaaagtgcaaaggcaggttaacaaggaaagctttgtatagttgtggacatgcttagtatatacctgtggaacatctggggggaagcgccctgtgggcttttggaaattcaagtgtagaaagtagatttggagtcgtcagcaggagatgatgagaggctgaagctaatgaaaaa

SEQ ID NO: 9264 - DNA, 118 bp, Homo sapiens; identical to SEQ ID NO: 5844

SEQ ID NO: 9265 - DNA, 77 bp, Homo sapiens; identical to SEQ ID NO: 6798

SEQ ID NO: 9266 - DNA, 7411 bp, Homo sapiens
tattggttgaggggggcggggggattgaggaagacggaaagccgcgccgagtcgccgggttacctccggggtgaaccatgttgagtcctgccaacggggagcagctccacctggtgaactatgtggaggactacctggactccatcgagtccctgcctttcgacttgcagagaaatgtctcgctgatgcgggagatcgacgcgaaataccaaggtacggccgggtgatggatgggcgggggcggccgcctccttcccggcgggtccgggcgcgccgcggagccgggccggtcctgccgtggaccggaggaagcggccggctccgcagcggcggccctcggcaggggcaggaacaaaaggtctggagcgcctttgattcgccaaggtccttgtgtgcaaagcccgggacacggaggaggaaggaggcgcgagaggtctcgctgcaaggctgcgcgaccaaagcgctctttgtagtgaagtgatgaggcgggtgctgcgggggagggggcggcgggtccaagccgcgtcctctaggagggggtgcatattacggcgcgagatggagggatgtgccggcgcctggggctatagggcgccgagacggggctgcaggagaagggcggctgtgggccggggtttccgcggacccggtgcctcggtcccgggcaacgccgttcctctggcccttcttagtcgccccccactcagtcccgaatctgagtgttacataaagtaccgggtagtactccgctcggggtaggtcggccgcccccgcccagccccctccggccctcacttggagctggacaccgagtaggggccgactgcgaggggcgacgccgccggttgtagtttgcggaggacgagggcttttctctgtgtgccgtagggaagggaagggaaggggaggagcggaggcggggaaggcgcccatctgcgctgcgctcgggggggcgcgggcagatcgctggcttggagaggactgtggcaggtgagaggacctgtgcgtcgttctctgcagacctggccgccccgggtgtcagagagaggtggcgagttcgtgtccgccgggaattgttggctgttggggaaactttcctgcgaggtcagtcaaggctttgggggctctgttttgaatgtggatcaccactcggagtttactaatgtttacaaggctgcgcagtagggaaacggaagagttgggtgggggcaaaaaaaaaaattgaccgctatccccgaaagtactagacgcctctgccgggaaggcgcccctgcgcgttctatccgagacgtagcttcgcagcgaattttataggaacttcattagcatattatggaacgtcccgcctcagccccccagtagttggctgtgatgtccttcgtggaatgtccttatcattcccctgcggaacgattggtcgctgaggcggatgaaggcgggcctagcgcaataactggtatgggtctgtgtttccgctgtcttcttttttctttttcggggaggagcggggtggagggtggacgagttgatttgaacgtcttcgggtcgctcggcctccagccttggattggttcttctcgctgctggggcgggccgtgctcttccgccctgcggtgtggttggttctcctcctggcctccgccctccaaatcggcgattcccataggcggcggctctcggggtgcggggcgagtctcccgctggcctcctccccattggctggaggcctggcgggtgtcgcccctgcccctctccccgctcagcccggccactttcgggcgcggatttatagcagtagcagtgatcccgggcctgtgggctcggggccggggctgcagttcggaccgcctcccgcgacccgcggggccggctcggagacagtttcaggccgcatctctgctgacccgagggtggggccgcgcgtggccgtggaaacgtgagtgactggggctgcgtccacgagggggaccctcggcgcagaaacttttctggaaggtgctgtcctcgggccggacgggccccgtggggtgaccctggggctccggacggaaggaaggcaggggctgagaccactttgatcgttcgacgatagaaaaaagtagcgcggggcggggtgcagggttccagctgtccagacagcaaagttcatggagccactttgtcctcctgtcgttgctggggagagcctggcttgctgcttgcttcatgttcacctagggtgatgaactttttggcttcaggaaagatcacagtcctgcccccccgggagtactggagcggcgcagctgggagcgccgagaagcgagcgaatctgtcgcaagggtcacagctccttggacttcggtgtaaatgctgagctctgccgcgtagttctgaaagacttccacagacctactctgtaggaagtcaaacgtcttttgcttagtaggcatcagttgtatgttaattcataaacttggattataattagtttgtcgatttaaaatggtgtttgaggttgcttgaattatttttcaaacattatcataaaaatacccacccaccccctgggaagttcgcttcataaagaacttcagtgcaacccgtatgtaaaattaaaatacatttaaaataattggacaaaccaatttaaatgttgctacaaccccatttaatctgtaaattgcatgtgctgctgctttccatggtaatgttggtgtggaatatgtttggaaaaaaggcagtagtgtctgaagctgagttgctggcattgaaaaagcagagtgtctggaaggatggcttcctatttagcagtggtgttgttcctgtttataaatatttgtacttagtggctttgttgataaaatactttgcttggagtatcaaagaaatattaggtaacagaaatacttcttggtaattttgcgatgggatatctgtttctcttgcccacaaattaggcttcacctggatggaagcttgcttgtgatgtaaaataacttctgtgttattaaattttaaatttatatgatacagttttctgtgaaatgacaatattgtctttagaactttgattactgatgaaaagaagtgataccattttgtaaccctaaatccatttaaaaataaatggtacacatattttaacattatgataaataagttgaataaattggtattacttggatacgttgaacacagctatttatttttataattaattactatatgagactagggctttcctcctggtggcaggcagcctgcattgttcctctaggagtcttcaaagctgtctttagtttgagaatatactctggaaaatattaccatttagagaagcttcagcgttggcctgagttcttatgtttactctagtgttaggtatatgtcttataactatttggagataagatctggaaaggaagggggtaacattttagacaatccctcccactctcagcccctcccctagtttacaagtagtattgttggccaggcacggtggctcactcctgtaatcccagcaccatgggagaccgaggcgggcggatcacctgaggtcgagagttgggagaccagcctgtccaacatggagacaccctgtctctactgaaaatacagaattagccgggcgtggtattacatgcctgtaatcccagctactcgggaggctgaggcaggagaatcgcttgaacctgggaggcaggttgcagtgagctgagatcgcgccattgcactccagcctgggcaacaagagtgaaactccgtttcaacaacaacaaaaaaaggtagtattgttgccttgtttaaagagactgcaaaaaggttttaggagaataatctggtactgtttaatttaatggttactgtttgaggaaaaagaactctggaatttctgtgtatttaagtagcctttttagcaaggctgtttacttcaactagattttttaatagcttttgtttcttgagaaattgcctaattacacttgccaaattacactttaaaatcatatacactgtcctctaacatgcccaggaaggtttacatttaaatactgaagaggttttcttttgtttttgataacattttaaagtccattgactttaacagatgtgaagatgtttttgtttaagcagtagatgcaaaagtaaaacctaccagcttcgctttaaagcaaggctagtgcattcactgcagttaaaaaataataataatagcccatcacagtggtgcttctgtagtcccagctactcaggaggctgaggtgggagggtcccttgaacctgggaggtcgaggctgcagtgagccgagattgcaccactgcactccagcctgggcgacagagacggaccttgtctccaaaataataacaagtcgtaataataataaagcaaagctaggttttctggattattgtggcagaactgttcttgctgtcactaatacagagggataacatgctagaataaatgtggggactgaaactgaggacctaagtcacaaagtatcctggacctttactgttaacccggttctttaaatcatagagagctattatataaatttatacacattctctcatttaacagggtattctagatgttggtatattaaaataaagaaaataaagaccttttttatttgaaatattcaaataatttataatatattttattaatgtttgtatattgtgtataaatgtaataaataccatgtttatataatgttatatgtatattaataattgtattcaaatagaaacatttgagtaaaaatgatggcagtatagacatagtcattaatagaaagtattaataaatgttgggtcccgagcactgcacctcatttaaacgtttcctcttaatggcttcgggcgttgtcacccgtgcgtgcctgggaactgttctcaggttccctggggtggctggagcggctcctgccgctgtggaagctgggccggcatttgtgttgtgttgtgttgtgttgtgttgtgttgtggttagcacaggaacagataggcccgggagagcctgtggctggtgggctttgttctgggcaagccgtgcgctggcccctaggctccctgccagccctctccgtagacccgtccggggccgtgtgggttgtcccggtgtcctgctcgcgagtgacgcctgtccttcttgcccccagagatcatgaaggagctagacgagtgctacgagcgcttcagtcgcgagacagacggggcgcagaagcgggggatgctgcactgtgtgcagcgcgcgctgatccgcagccaggagctgggcgacgagaagatccagatcgtgagccagatggtggagctggtggagaaccgcacgcggcaggtggacagccacgtggagctgttcgaggcgcagcaggagctgggcgacacagcgggcaacagcggcaaggctggcgcggacaggcccaaaggcgaggcggcagcgcaggctgacaagcccaacagcaagcgctcacggcggcagcgcaacaacgagaaccgtgagaacgcgtccagcaaccacgaccacgacgacggcgcctcgggcacacccaaggagaagaaggccaagacctccaagaagaagaagcgctccaaggccaaggcggagcgagaggcgtcccctgccgacctccccatcgaccccaacgaacccacgtactgtctgtgcaaccaggtctcctatggggagatgatcggctgcgacaacgacgagtgccccatcgagtggttccacttctcgtgcgtggggctcaatcataaacccaagggcaagtggtactgtcccaagtgccggggggagaactaaaagaccatggacaaagccctggagaaatccaaaaaagagagggcttacaacaggtagtttgtggacaggcgcctggtgtgaggaggacaaaataaaccgtgtatttattacattgctgcctttgttgaggtgcaaggagtgtaaaatgtatatttttaaagaatgttagtaaaggaaccattcctttcatagggatggcagtgattctgtttgccttttgttttcattggtacacgtgtaacaagaaagtggtctgtggatcagcattttagaaactacaaatataggtttgattcaacacttaagtctcagactgatttcttgcgggaggagggggactaaactcaacctaacacattaaatgtggaaggaaaatatttcatttagcttttttattttaatacaagtaatattattactttatgaacaattttttttaattggccatgtcgccaaaaatacagcctatagtaaatgtgtttcttgctgccatgatgtatatccatataacaattcagtaacaaaggtttaaagtttgaagattattttttaaaaaggtaaatggttaaattttacatgacagatattttatctattggcctgttccccaaatggccattttaaaatgcttgggtacacttctcttaagtggtctagtcaaggaacctcaagtcatgcttttgctatcaccaatcatagtgtacccatctttaatttatatcaggtgtataaatgtacatttccaaatgaacttgcacttgttatattataattggaagtgcagtcagcagatgctgttgtgaagctaatgtcacaattatgtgcaaaggtgtgcttcctgctgtatgtgagctgtaaaaatgttacgtgaagaaataaatgaaacttggccagtttgttcctctagtagtatatttaattttgacataagtaacttttaaaatttgtcttaaaaatttatacaccagcaatttagacaaagccttaagcaaattttgtattattgttctcacttattattaataatgaagtagaagttacttaattgccagcaaataaatacgtgtcaaaaaagaatctgtattcagaccctgggtcaggaaattactgcccacttgtcaagttcagcccaccatctgtttgaagattatatgaagtttaaattctagtgtccataaataaagtttcagcggaacacagccgtgcttatgtgcgtatgtattgtctgactgcttttgcaaaacggcagagttcaatagttgcacctgaaaccatttgacttgacaagccaaaactattttctggccctctgcagaaagggtttgctgacctctgatttagactagcatctaacattgatttgcccacatattgaaagggtcagtggagttttcatttattattttttatttttttgagattgagttccaggctggagtgcaatagcgcactcttggctcaccgcaacctccgcctcccaggttcaagcgattgtcctgcctcagcctccccagtagctaggattacaggcatgcaccaccacgcctggctaattttgtattttcagtagagacgcggtttctccatgttggtcatggctggtctcgc

SEQ ID NO: 9267 - DNA, 8487 bp, Homo sapiens
gcggccgcagctcaaaggacaccgagagggtgccagtgcgcatgcgccgccacttccgcccgtgcccggccctccccttccttccgcctcccggaggacttgggtttctagtagtaagagtccggggggcattactcacggtctccccgcctcctcttcatcgtgattgggctgtcaaagtgatgttggcaagtagattggctactgcggttgccagttctgtttcgggccctacttatactgctctgtggggcggggacgaagagtcaggggctgaggagcgagttgcggtagttgctgtgtaccatggtctcggaggtttctgtcccgcggcccgttaggtcctggtcgggttttcagcgaagcaggccgctcccctgcgtttcccagcgggcgtgctgtgccgcccaacaggctctgcctccaagtgccaaaaactcctagtaaagtttgcgcctcgcccgccgtccacaccccagcggccctgacgctgtcccctccgcgaccctcgcctctggaaaaagtgacaggcaaggccacgcccccgcgagggccggcctggagcccgcagcccccagggcctgggacggtgaggggcgtgaatgcggcggggggcggggccgttgccgggggagggggccggggcgcatgcgcgctgcgcagcggggctgaatgtttcccaagtgtttgaaactggtatttgggttttccacgttggacaagtgcggctcggcggccagcggagcgcgccccttcccgctgcccgctccgctcctctcttctacccagcccagtgggcgagtgggcagcggcggccgcggcgctgggccctctcccgccggtgtgtgcgcgctcgtacgcgcggcccccggcgccagccccgccgcctgagagggggcctgcgccgccggccggggcgtgcgcccgggagccaccgccaccgcggcccgcgccctcaggcgctggggtccccgcggacccggaggcggcggacgggctcggcagatgtagccgccgggccgaagcaggagccggcgggggggcgccgggagagcgagggctttgcattttgcagtgctattttttgaggggggcggggggtggaggaagcggaaagccgcgccgagtcgccggggacctccggggtgaaccatgttgagtcctgccaacggggagccagctccacctggtgaactatgtggaggactacctggactccatcgagtccctgcctttcgacttgcagagaaatgtctcgctgatgcgggagatcgacgcgaaataccaaggtacggccgggtgatggatgggcgggggcggccgcctccttcccggcgggtccgggcgcgccgcggagccgggccggtcctgccgtggaccggaggaagcggccggctccgcagcggcggccctcggcaggggcaggaacaaaaggtctggagcgcctttgattcgccaaggtccttgtgtgcaaagcccgggacacggaggaggaaggaggcgcgagaggtctcgctgcaaggctgcgcgaccaaagcgctctttgtagtgaagtgatgaggcgggtgctgcgggggagggggcggcgggtccaagccgcgtcctctaggagggggtgcagattacggcgcgagatggagggatgtgccggcgcctggggctatagggcgccgagacggggctgcaggaggagggcggctgtgggccggggttcccgcggacccggtgcctcggtcccgggcaacgccgttcctctggcccttcttcgtcgccccccactcagtcccgaatctgagtgttacataaagtaccgggtagtactccgctcggggtaggtcggccgcccccgcccagccccctccggccctcacttggagctggacaccgagtaggggccgactgcgaggggcgacgccgccggttgtagtttgcggaggacgagggcttttctctgtgtgccgtagggaagggaagggaaggggaggagcggaggcggggaaggcgcccatctgcgctgcgctcgggggggcgcgggcagatcgctggcttggagaggactgtggcaggtgagaggacctgtgcgtcgttctctgcagacctggccgccccgggtgtcagagagaggtggcgagttcgtgtccgccgggaattgttggctgttggggaaactttcctgcgaggtcagtcaaggctttgggggctctgttttgaatgtggatcaccactcggagtttactaatgtttacaaggctgcgcagtagggaaacggaagagttgggtgggggcaaaaaaaaaaattgaccgctatccccgaaagtactagacgcctctgccgggaaggcgcccctgcgcgttctatccgagacgtagcttcgcagcgaattttataggaacttcattagcatattatggaacgtcccgcctcagccccccagtagttggctgtgatgtccttcgtggaatgtccttatcattcccctgcggaacgattggtcgctgaggcggatgaaggcgggcctagcgcaataactggtatgggtctgtgtttccgctgtcttcttttttctttttcggggaggagcggggtggagggtggacgagttgatttgaacgtcttcgggtcgctcggcctccagccttggattggttcttctcgctgctggggcgggccgtgctcttccgccctgcggtgtggttggttctcctcctggcctccgccctccaaatcggcgattcccataggcggcggctctcggggtgcggggcgagtctcccgctggcctcctccccattggctggaggcctggcgggtgtcgcccctgcccctctccccgctcagcccggccactttcgggcgcggatttatagcagtagcagtgatcccgggcctgtgggctcggggccggggctgcagttcggaccgcctcccgcgacccgcggggccggctcggagacagtttcaggccgcatctctgctgacccgagggtggggccgcgcgtggccgtggaaacgtgagtgactggggctgcgtccacgagggggaccctcggcgcagaaacttttctggaaggtgctgtcctcgggccggacgggccccgtggggtgaccctggggctccggacggaaggaaggcaggggctgagaccactttgatcgttcgacgatagaaaaaagtagcgcggggcggggtgcagggttccagctgtccagacagcaaagttcatggagccactttgtcctcctgtcgttgctggggagagcctggcttgctgcttgcttcatgttcacctagggtgatgaactttttggcttcaggaaagatcacagtcctgcccccccgggagtactggagcggcgcagctgggagcgccgagaagcgagcgaatctgtcgcaagggtcacagctccttggacttcggtgtaaatgctgagctctgccgcgtagttctgaaagacttccacagacctactctgtaggaagtcaaacgtcttttgcttagtaggcatcagttgtatgttaattcataaacttggattataattagtttgtcgatttaaaatggtgtttgaggttgcttgaattatttttcaaacattatcataaaaatacccacccaccccctgggaagttcgcttcataaagaacttcagtgcaacccgtatgtaaaattaaaatacatttaaaataattggacaaaccaatttaaatgttgctacaaccccatttaatctgtaaattgcatgtgctgctgctttccatggtaatgttggtgtggaatatgtttggaaaaaaggcagtagtgtctgaagctgagttgctggcattgaaaaagcagagtgtctggaaggatggcttcctatttagcagtggtgttgttcctgtttataaatatttgtacttagtggctttgttgataaaatactttgcttggagtatcaaagaaatattaggtaacagaaatacttcttggtaattttgcgatgggatatctgtttctcttgcccacaaattaggcttcacctggatggaagcttgcttgtgatgtaaaataacttctgtgttattaaattttaaatttatatgatacagttttctgtgaaatgacaatattgtctttagaactttgattactgatgaaaagaagtgataccattttgtaaccctaaatccatttaaaaataaatggtacacatattttaacattatgataaataagttgaataaattggtattacttggatacgttgaacacagctatttatttttataattaattactatatgagactagggctttcctcctggtggcaggcagcctgcattgttcctctaggagtcttcaaagctgtctttagtttgagaatatactctggaaaatattaccatttagagaagcttcagcgttggcctgagttcttatgtttactctagtgttaggtatatgtcttataactatttggagataagatctggaaaggaagggggtaacattttagacaatccctcccactctcagcccctcccctagtttacaagtagtattgttggccaggcacggtggctcactcctgtaatcccagcaccatgggagaccgaggcgggcggatcacctgaggtcgagagttgggagaccagcctgtccaacatggagacaccctgtctctactgaaaatacagaattagccgggcgtggtattacatgcctgtaatcccagctactcgggaggctgaggcaggagaatcgcttgaacctgggaggcaggttgcagtgagctgagatcgcgccattgcactccagcctgggcaacaagagtgaaactccgtttcaacaacaacaaaaaaaggtagtattgttgccttgtttaaagagactgcaaaaaggttttaggagaataatctggtactgtttaatttaatggttactgtttgaggaaaaagaactctggaatttctgtgtatttaagtagcctttttagcaaggctgtttacttcaactagattttttaatagcttttgtttcttgagaaattgcctaattacacttgccaaattacactttaaaatcatatacactgtcctctaacatgcccaggaaggtttacatttaaatactgaagaggttttcttttgtttttgataacattttaaagtccattgactttaacagatgtgaagatgtttttgtttaagcagtagatgcaaaagtaaaacctaccagcttcgctttaaagcaaggctagtgcattcactgcagttaaaaaataataataatagcccatcacagtggtgcttctgtagtcccagctactcaggaggctgaggtgggagggtcccttgaacctgggaggtcgaggctgcagtgagccgagattgcaccactgcactccagcctgggcgacagagacggaccttgtctccaaaataataacaagtcgtaataataataaagcaaagctaggttttctggattattgtggcagaactgttcttgctgtcactaatacagagggataacatgctagaataaatgtggggactgaaactgaggacctaagtcacaaagtatcctggacctttactgttaacccggttctttaaatcatagagagctattatataaatttatacacattctctcatttaacagggtattctagatgttggtatattaaaataaagaaaataaagaccttttttatttgaaatattcaaataatttataatatattttattaatgtttgtatattgtgtataaatgtaataaataccatgtttatataatgttatatgtatattaataattgtattcaaatagaaacatttgagtaaaaatgatggcagtatagacatagtcattaatagaaagtattaataaatgttgggtcccgagcactgcacctcatttaaacgtttcctcttaatggcttcgggcgttgtcacccgtgcgtgcctgggaactgttctcaggttccctggggtggctggagcggctcctgccgctgtggaagctgggccggcatttgtgttgtgttgtgttgtgttgtgttgtgttgtggttagcacaggaacagataggcccgggagagcctgtggctggtgggctttgttctgggcaagccgtgcgctggcccctaggctccctgccagccctctccgtagacccgtccggggccgtgtgggttgtcccggtgtcctgctcgcgagtgacgcctgtccttcttgcccccagagatcctgaaggagctagacgagtgctacgagcgcttcagtcgcgagacagacggggcgcagaagcggcggatgctgcactgtgtgcagcgcgcgctgatccgcagccaggagctgggcgacgagaagatccagatcgtgagccagatggtggagctggtggagaaccgcacgcggcaggtggacagccacgtggagctgttcgaggcgcagcaggagctgggcgacacagcgggcaacagcggcaaggctggcgcggacaggcccaaaggcgaggcggcagcgcaggctgacaagcccaacagcaagcgctcacggcggcagcgcaacaacgagaaccgtgagaacgcgtccagcaaccacgaccacgacgacggcgcctcgggcacacccaaggagaagaaggccaagacctccaagaagaagaagcgctccaaggccaaggcggagcgagaggcgtcccctgccgacctccccatcgaccccaacgaacccacgtactgtctgtgcaaccaggtctcctatggggagatgatcggctgcgacaacgacgagtgccccatcgagtggttccacttctcgtgcgtggggctcaatcataaacccaagggcaagtggtactgtcccaagtgccggggggagaacgagaagaccatggacaaagccctggagaaatccaaaaaagagagggcttacaacaggtagtttgtggacaggcgcctggtgtgaggaggacaaaataaaccgtgtatttattacattgctgcctttgttgaggtgcaaggagtgtaaaatgtatatttttaaagaatgttagtaaaggaaccattcctttcatagggatggcagtgattctgtttgccttttgttttcattggtacacgtgtaacaagaaagtggtctgtggatcagcattttagaaactacaaatataggtttgattcaacacttaagtctcagactgatttcttgcgggaggagggggactaaactcaacctaacacattaaatgtggaaggaaaatatttcatttagcttttttattttaatacaagtaatattattactttatgaacaattttttttaattggccatgtcgccaaaaatacagcctatagtaaatgtgtttcttgctgccatgatgtatatccatataacaattcagtaacaaaggtttaaagtttgaagattattttttaaaaaggtaaatggttaaattttacatgacagatattttatctattggcctgttccccaaatggccattttaaaatgcttgggtacacttctcttaagtggtctagtcaaggaacctcaagtcatgcttttgctatcaccaatcatagtgtacccatctttaatttatatcaggtgtataaatgtacatttccaaatgaacttgcacttgttatattataattggaagtgcagtcagcagatgctgttgtgaagctaatgtcacaattatgtgcaaaggtgtgcttcctgctgtatgtgagctgtaaaaatgttacgtgaagaaataaatgaaacttggccagtttgttcctctagtagtatatttaattttgacataagtaacttttaaaatttgtcttaaaaatttatacaccagcaatttagacaaagccttaagcaaattttgtattattgttctcacttattattaataatgaagtagaagttacttaattgccagcaaataaatacgtgtcaaaaaagaatctgtattcagaccctgggtcaggaaattactgcccacttgtcaagttcagcccaccatctgtttgaagattatatgaagtttaaattctagtgtccataaataaagtttcagcggaacacagccgtgcttatgtgcgtatgtattgtctgactgcttttgcaaaacggcagagttcaatagttgcacctgaaaccatttgacttgacaagccaaaactattttctggccctctgcagaaagggtttgctgacctctgatttagactagcatctaacattgatttgcccacatattgaaagggtcagtggagttttcatttattattttttatttttttgagattgagttccaggctggagtgcaatagcgcaatcttggctcaccgcaacctccgcctcccaggttcaagcgattgtcctgcctcagcctccccagtagctaggattacaggcatgcaccaccacgcctggctaattttgtattttcagtagagacgcggtttctccatgttggtcatggctggtctcgc

SEQ ID NO: 9268 - DNA, 307 bp, Homo sapiens
ggacgccggccgaccgggtgtctgcatactgtgggcggcctttccaagtgtggggagcggcctccgagaacggtgtccatgacacagggcgggaagagataaggcctagggaaggcgcccctcgggcctatccacctcttctggggctcggcactaggaagcagcttccctctcaggcccctttgtctccaagccgttccaaactgagtaccgggagacgacacaaagggagggcggtgacggatggcgcaggcgcgggagccgcctaggctgctgggagtggtggtccggccgcggaatgggtagg

SEQ ID NO: 9269 - DNA, 764 bp, Homo sapiens
tctgagatggagtctcactctgtctccaggctagagtgcagtggcccagtcttggctcactgcaacctctgcctctcgggttcaagcgattctcttgcctcagcctcccgagtagctgggactacaggtgcgtgccaccatgcccagctaatttttgtatttttagtagagatgggttttcaccatgttggccagtatggtctcgagctcttgaccatgatccgcccacctcggcctcccacagtgctgggattacaggcgtgagccaccgtgcgctgagtgatacgtggttccctttaacttcgcacatggtaaaatcagtttctttccatgatctgtttcacagtctctgtgaagctacctaccacaaagaagtagtgagtgatgactttctagaatctaagtatatggcatgtatttattataagtaaaacattaagtttgctgattgtttacttgtgataaacaattattgtgaactttatttgtgctggacataagtgtctgttttacagtgaaattccattatagagggttacttggtagagaaatgcaaattgtagttggtcatatactaaaatttgaactttttacatatcaatacttacaaataggtgtttattttcccacaaaactccagaacatttaagagtctcgggtgtttaaatttgatgagatttacccaaacaaatagtgaacaaaaggtttatgaaaataagttatgaaactaaaatacttaataaacatccagtgacaataaaaat

SEQ ID NO: 9270 - DNA, 1182 bp, Homo sapiens
ccagctccaacccacagcaattacacttctccccctggtgaaggaaacacttgcataagaataagaggttcttccacaggcattttaaaaccttttttctttcctcttctccacaatatcagcatttaagtttaagcaagtttttttatttctagaagacattttactaggcaaggaatgataagaatccctgtgtatattctctattaagctttaattgtgaaaaaggatttgtagggctagtcttgggctgtggccaatctggtatgcttcctgtgtctgtatggtttgtgctgtaagcctccatcttgttttacacatcctggggacatggcccacaactgcttgacaggactttgtttagcagtcctgccttaggggatcagccctctctggccaatatctgcatgttttcctactcctgtctcttaaagggccccacccagcgactggattttcttctgcctctctgtgtgggtactgtgtgtgatatctgtaaaaagtgcgctaattaatttggcctaaagaaagacaagaacttggatcaaattttttttaagggaagttaaaagctgtggtacctttcagttcacatgactttaatctctgagaaataaaaacagccctaaagactattggtaaaatgcaggtgagatgcaaggttttctaagtgttttgaggttaaaaactgctttttgggttttgagaactatttgacttgaaggcttcacaattggtaaggcctggggacatatggaaataaccacgctcttaattatgctgggagtcaaaccttggctgcacctagcacacaattaaacaacttaccaagtttttaccttaaaagttaaaaattgctaggagttactattccgagatgtaattgagactacaggaaatagatttatatgcaagatgtgtaagaacagtaaaatgtggtgaaattttgtaaaatattataagaaggcatggaaatgtatacttttgcttagggttaaaggattgtttaaattaggaaaaagctgaaggttcaaacaagtggtggagaattgtggaaattaatcttgcagaagaggttcaacatattaactaaattcaaaagggttataaggttataaaaggtttttgcttctgtgaaatttctgagtcatcctttcggcaaaataaataacttaatggcaa

SEQ ID NO: 9271 - DNA, 2766 bp, Homo sapiens
gagctgagaccatgccactgtactccagcctgggcaatagagcgagattctgtctcccaaaaaaacaaaaaacaacaacaaaacttgctaccacccagggattttctgctatttaaaaggtgaatttcttttctggtactaaactgtagctgcttaacttagtaaaggctgtgtttggccaggcctgtgccagaggctcacctggagtgctccacccactggcaggcaagtcctattcctattcacccaggatccccaaggctgggctgggatataaatgttgggataggaaagaaatatttcctttttagaggaaagcaagaagaaacattgcctgaaaggtgattttctagtcatttccaattagtacagaaatgttactgcctctgggtgcagtggttcacgcctgtaatcccagcactgtgggcggatcacttgagcccaggagtttgagaccaacctgggcaagatggcgagaccccatctctacaaaaaaatttaaaaattacctgggcatggtggcacacacctttattctcagctactcaggtggctgaggtgggaggatcccttgagcccaggtggtcaaggctgtggtgagctatgatcatgccactgcactccagcctgggtagcagaacaagaccctgtctcaaaaaaaaaaaaaccccaaaaactgttactactaggttggagtagcctaaggcagtagggcaaggaggtgggcccaggctggtctgtggggagctggagaatggtgactcgagtgaccagtggacaggcaggacccaggccagcattacaagcggggatgtcaggcaggagcaggggagcttctcgcttggcagctggtttatggtacacttttgaaaagtaagctcccagggcctggccctcacatgctcagtgaatatttgactgaagggtcccctcatagcttgggagtattcacaggcctaaatgttagttatactattagctaagcctggtcctttgttacgaaatttaaaaatgaaattgcaacattcttgtggaaattcaaagacatcattttctttcaacaaattcacacattcgttcatgcttcttctataccttttacccctaaagtcatccactcctgagttcctcctgctggtttcccaaactgcgcaatgactgccccatcataggcagtggtccgtggagtcggcctcactttcgcctttccccgcatctacttgtttccaaggccagtggtacttaactgggtcaagttgcctgtggaccttcaggaacagaattgccatgttcctcactgcctgcaggaaaggctccattccaagcccagtgaagatgtgtgcctatccagccgcccaccaaggatgtcatctgtagaatgggtggagggcaggggtttatttggtgtatatttttacattaaaatgcacttaatatcactttgtaaagcccagatgagtgcaaatgtgcctgtaacttcctcctttaatctgtccaggtagtatttagtctttagtcttacattttctttctccctttatttcatgaaattccttgagaaaacttcaacagtaaagaaagaaatttcattcatctcacaactcttccaaacgaggaaacttagtgaaatatttcagagcttctagatgtgaggtacaaaacttgggatcaaatggaatcttgattcactaaccaatttaagatctgacttctaattttaggaactttgggttatgaacgcttccattttatacctgtgtctagttagtttctgcctatctatccaagaagcttttatcaagggtccaccatgtgccagccactgaagtagatataaatacaaggatgtgtaaggtatggatgatggtatacgaactgtcatcttactggatttgtccgctctgttaaagatacggttccgaaaactttttaaagccctagagagggctttaaggcaatgtagcatcatatatagaggcatcaacctgttcatatctttctatttaacagaactgtgcacctgggcacaagggtgtgcacaacaggatgtgtacagcagcactgttaaagtgtagcacatccatactacaggatcttatgcaactgttggaaagaatgaagcgatgctgcactgtggtcatgcagtgatctctaagacatattaactagaaagcaaaaggtttaacaatgtatagcagctgggcgcagtgactcgcgcctgtaatcccagcactttgggaggctgagtagggcggatcacctgaggtcaggagtttgagaccaacctggccaatgtggcgaaacgctgtctctactaaaactacaaaaattagctgggcgtggtggcgcgtgcctgtaatcccagctactcggcaggctgaggcaggagaatcgctttgaactgggaggtggaggttgcagtgagccgagatcacaccactgcattccagcctgggtgacagagggagactccgtctctaaaaaacaaccccccccccccaaaaaaaaaaatgcatagcaagctgtaatgctctttgtgttttagaatagtagaggtctggaaagttgtttgcttttccccagtttttttttgctgtgttacctctgaagggaattgaggtagaggggagagttagaaggaatattcggcttttctattttatatcctcctaggtgaaatttttacaacaaacatgtactggtgtattttgaaatgtttttaaatttttgtatttcaaaataataaaatataaattcaaactgcaa

SEQ ID NO: 9272 - DNA, 513 bp, Homo sapiens
ctttgggaaggtaagcaacaaatttacatgcttacttttcctactgactactagaaaggcgtgagaattcttattttagcaccacgtgtggtagccagcatccaggatggcccctaacaacgcctgcttcccatcctcatattgtcctcccacagtgtaccagagttgttttgtgtgaacacagcagaagtgatggtatgtgacttccaagatgaagctgtaaaaggctagaacttccatcttgggctatctcttggaacaccactctgggggaagccacgtcacaagcagccatatggagaggcccagatgacaaggaactgaagcctcctacaaacaactatgagcttggaagcggatcttccagctccagtcaaatcttcagagactgcagccccagctgacagctgagagtccctgagccagaagtcccccactaaatcacttccagattcctgaccttcagaaattacgtcagataactgttttaaactaagtgttggggtgattaca

SEQ ID NO: 9273 - DNA, 14803 bp, Homo sapiens
ggagagaaggaggacgaggacgaggatgtgaagaagagaagggaaaagcaaaggagaagagacaggacgcgggaccgtgcagccgacaggtgaggcgcgggcacacgaccccacaggaggaggtggactcgtgcggtggaggcgctgccgagctcacctgtcctcgctccacaatgctgggggcctggtggcctgactcctctggccaaaccagtgggaggcaaaacagtaaacaattgggagtgcagaaaagaccatcactcgtgctcccagcacacgagctacctgtcttctaggatggctgggacgttgctttggtggttaggtttctgttcttgctttagaggattggtgtttgactcctgtgtctctattcctctggaatcccagccttgctggtgggtctgtgtggtccataactgctcagcagcgggctctgttactctcctgcaggcctgaggggcatccctgccccctagcctggtgtctggcatctcagacactgtcctgtgttcaccttatccaaatccagaccacccctggagtttgacacagctaggagacaggtagagagatgatcctaccatcaagattttgtcccacaatagaaaaggattgcaaaaatgttgagcccaaaggatgtcattgtgagcacaccatgtgcctgcctctccctgccaggagttaagtggcttctgactagaaactgaaatcaccagtgatcatgtgatgctggggaatccttgaccttaaggttcacatgggacagtgattttctttttgtttgtttgtttctgagatggagtcttgctctgtcgcccaggctggagtgcaatagcataatctcggctcactataacctctgcctcctaggttcaagcggttctcctgcctcagcctcccgagtagctgggattacaggcgcctgacaccacgcctggctaatttttgtatttttagtagaggtcgggattcaccgtgttggcaaggctggtcttaaactcctgatcttgtgatctgcccgccttggcctcccaaagtgctggtattacaagcgtgagccactgcgcccagtctgggcagtgattgtcgtgttcaaagaaatgcttagtaaaaggggccagatgccgtggctcacacatgtaattccagcactttggaaggctgagctggcggatcgcttgaggccgggagttcaagaccagcctggtcaatatggtgaaacccatctctactaaaattacaaaaattagccaggcatggtggcaggtgcctgtaatctcagctactcgggaggctgaggcaggagaatcacttaaactggggaggtggactttgtagtgagccaaggttgcaccactgcactccagcctgggcgacagagcaagactctgtctcaaaaagaaaaagaaacgggctgggggcagtggctcacgcctgtaatcccaccactttgggaggccaaggcaggcggatcacctgaggttgggagttcgagaccagcctgaccaacatggagaaacccagtctctactaaaaatacaaaattcgtccggcatggtggcgcatgcctgtattccccgctgctcgggaggctgaggcaggagaattgcttgaacccaggaggtggaggttgcagtgagccaagatcacaccactgcattccagcctgggcaacaagagcgaaactctatctcaaataaaaactccatctcagtgagccgagattgtgctactgcactccagcgtgggcgacggagcaagactccatctcaggaacaaaaaaaaaaaaagaaaatcactgttccatgtgaaccttaaatcaaggattcaaaaaaaaaagagagaaatgcttagcaaaacgaagccaggaaccaaacgcagaactgtttcttcttaagtggtacaggaacattgaaacccttgttattttaaacagataaatggatagagtagatgacttttcatgtcacatggaaactgagatgacattttctttttaattatttttaaacttaaataatctaataaagagataggggtctttctctgttgcttgggctgttgaactagcctcaagagatcttcctgcgttggcctcccagagtactgggagaagggtatagagatgacattttttttttactactttttgctttttttttttttctttttgcttttttttcatcttgtatgttcttccaatgaacaggtgactttttttaaaaaaaaaaaaagaaaccttcagagtgtgcgctagtgactgaggatctttttctttttttttttttttatcctttgagatggagtcttgctgtgtcacccatcctagagtgcagtggcacgatctcagctcactgcaacagtccacctcctgggctcaagtgatcctcctacctccgcctcccaagtagctggaattacaggcgcccgccaccacacccagctaatttttgtacttttagtagtgacggggtttcaccatgttggccagactggtctcaaactcctgacctcaggtgatccacgcaccttggtctcccaaagtgctgggagtacaggcatgaaccaccgcgcctggccatgactgaggatctcgaagggacttggaggaattctcacggggaggcagaggtgtagcagggaagcacacagctcatcagtagcttcctgacagtgctgtgtatgagccccgggagattgtcccctccccgcctacgtaggggctgtctgcagaagcggaggtgtcttcatgttgcttgtcagaggtcagaagccaggcatgtggagttggcagaggtgaagtcctgagtgccacagggcctgcacccctacaccagaaggggcaggagcctccaggagagagccagggagggagcaccccagtgtggtggcctgggggcctgcaggctgctctcccttgccatgcagcgtggttgcatttggggagactttgaaagcctgtgacaaagaagcctcactttttatctgtagaatttgatgtgacatgtctttacgtgtagtctcatggcagaactgatactgggttttgtgttttgaattgtgcgaggtgttttgtctgcacgtaaaatgaggttgccttatgtcatcccagttcctgcagagaggaactcatctgagaagctgtgaagctagatgctgggccccaagagctgccagccagagcctagggcgtccccagttccaagcagttgcagctttctggtgttttctcaggggctttggggccagaggggctgcagtgccagcagattactatgcgagtcattttcctgagatacctgcaagcctgtgttcccattcttcagctggggaagtttgggtaactgccattctgttgccctttgggaagtcggaactcttggttcagcagccactttccctggctgagtgcggtggcatgcacctctaatcccagctacttgggaggctgaggtgggaggatcgcttgagcccaggagtttgagaacagcctgagcaatacagtgaaatctcatctcgagaaaaagaaaagtctgggtgcggtggctcacgcctgtaatcccagcactttggggaggctaaggcaggtggatcacctgaggtcaggagttcgagaccagcctagccaacatggtgaaaccctgtctctactaaaaatacaaaaaaaaaataggctgggcgcggtggctcacgcctttaatcccagcactttgggaggctgaggtgggtcaatcacgaggtcaggagttcgagaccaacctagccaccatggtgaaaccacgtctctactcacaatacaaaaattaactgggagtggtggtgggcgcctgtaatcccagctactcgggaggctgacgcaggagaatcacttgaacctgggaggcggaggttgcagtgagccaagatcgcaccactgcactccagcctgggcaacagagggagactccgtctcaaaaaaataaataaataaaataaaataaaaatacaaaaatttagccaggcttggtggcgggcccctgtaatcccagctactcgggaggctgaggcaggagaatcgcttgaacctgggtgttagaggttgcggttagctgagatcgcaccattgcactccagcctcggcaacaagagcaaaactccatctccaaaaaaaaaaaaaaaaaaaggaaagaaaaaaaattactgaaaatcctgtttctttttttttttttttttgcccactgccaatttatttatttatttatttatttatttatttatttatttttattgatcattcttgggtgtttctcgcagagggagatttggcagtgtttgtgtccctgggtacttgagattagggagtggtgacgactcttggcatgctgccttcaagcatctgtttaacaaagcacatcttgcaccgcccttaatccatttaaccctgagtggacacagcacatgtttcagagagcacagggttgggggtaaggtcacagatcaacaggatcccaaggcagaagaatttttcttagtatagaacaaaatgaaaagtctcccacgtctacctctttctacacagacacagcaaccatccgatttctcaatcttttccccacctttcccgcctttctattccacaaaaccgccattgtcatcatggcccgttctcaatgagctgttgggtacacctcccagacagggtggtggctgggcagaggggctcctcacttcccagtaggggcggccgggcagaggcgcccctcacctcctggacggggcggctggctgggcgagggggctgacccccccacctccctcccggacggtgcggctggccgggcggggggctgaccccccccacctccctcccggacggggcggctggccgggcaggggggctcctcacttcccagtaggggcggccgggcagaggcgcccctcacttcccggacggggcggctggccgggcggggggctgacccccccccacctccctcccggacggagcggctggccgggcagagggtctcctcacttcccagtaggggcggctgggcagaggcgcccctcacctcccagacggggcggctggccgggcggggggctgatccccccacctccctcccggacaaggtggctgccgggcggagacgctcctcacttcccagacggggtggctgctgggcggaggggctccttacttctcagacggggcggctgccgggcggaggggctcctcacttctcagacggggcggttgccaggcagagggtctcctcacttctcagacagggcggccaggcagagacgctcctcacatcccggacggggcggcagggcagaggtgctccccacatctcagacaatgggcggctgggcagagacgctcctcacttcccagatgtgatggcggccgggaagaggcgctcctcacttcctagatgggatggcggccgggcagagacgctcctcactttccagactgggcagccaggcagaggggctcctcacatcccagacgatgggcggccaggcggagacgctcctcacttcccagacggggtggcggccgggcagaggctgcaatctcggcactttgggaggccaaggcaggcggctgggaggtggaggttgtagcgagccgagatcacgccactgcactccagcctgggcaccattgagcactgagtgaacgagactccgtctgcaatcccggcacctcgggaggccgaggctggcggatcactcgcggttaggagctggagaccagcccggccaacacagcgaaaccccgtctccaccaaaaaaatacgaaaaccagtcaggcgtggcggcgcgcgcctgcaatcgcaggcagtaggcaggctgaggcaggagaatcaggcagggaggttgcagtgagccgagatggcagcagtaccgtccagcttcggctcggcatcagagggagaccgtggggagagggagagggggagggggagagctgaaaatcctgtttctatttcagctctcctcagaggtgagctgatgccccctgcttcactcgctgatgctccctgcttcactcccctccttgttttccttctacagaattcagtttgcctgttctgtatgcaagttccgtagctttgatgacgaagagatccagaagcatctgcaaagcaaatttcacaaagagaccctgcggttcataagcaccaagctgcccgacaagaccgtggagttcctccaggtaaaggaaacctgggccccgtcaccgcgtctcttgcccatcccgcaggtgccggatcccttgaaggaggaagggaaatcagaggctatacttggccaaggtttcctttcccagatagagtagctgtgtaagtccctgagtcacagggacaaccgggagctccagccatcgtgctgtgctgccccacgcagctgctctgatagctgcctgcctagccctggcagttgagaaatgcccacatgcgcccacctctcattttactttatgccctctccaatcccacctaggaatacattgtaaacagaaataagaaaattgagaagcggcgtcaggaattgatggagaaagaaaccgcaaaaccaaaaccagatcctttcaaaggtgagttgtcatcccaggatgagtgctttcctggatggtagtaaggcatgtgacaggacccgtaaaacgtggcacgaggccgggcacggtggctcacacctgtaatcccagcactttgggaggctgaggcaggcggatcatgaggtcaggagatcaaggccatcctgtctgacacggtgaaaccccgtctctactaaaaaaatacaaaaaattagccgggcgtggtggcgggcacctgtagtcccagctacttgggaggctgaggcaggagaatggtgtcaacctgggagtcagagcttgcagtgagccaagattgcaccactgcactccagcctaggcgacagagcaagactctgtctcaaaaaaaaaaaaaaaaaaagtggcatgaagccagcccaagttggctgagaaggtgatgacgagacccgtgggaagagcgctcagcagcaatggaaagaaaccttcggatgtggccttgcatagattgcagcttatatcagtgacattaagcactttcatatcttttcctccttggtttgaaaagaaacaaccaggaggaacagaaaagctgaaaagtgcagaattcacagctatagaggccgatgtgctgacccatactccccatagaaaggcaggctgtgcccttctgattccttagagttgcagggagaaaacgtgggcccagatggggagtaggaggaaagcatcacttgctgtcccagatcctacaagacatgcgtttcctggcagggattggccaggagcacttcttcaagaagatcgaggctgctcactgcctggcctgcgacatgctaattcctgcacagccgcagctcctccagcggcacctgcactccgtggaccacaatcacaaccgcagggtgagtcttcctccccacactgcctggggtgctcattgcagggctgcggctcagagcctgctgtgtcttatggggaataacaacatctttaggggttcttgctatgtttcaagtctatcacttccatcgatgggtcgtaagattcgtctcaatttttataaaaatgtgagaaaatgtgttgcttagactcgattaaatgcagtagctgagattctcctgatagtgtttccacgttggtcagttttcccactagcggaaggcctgggggcttccataagctgagaccgaagggccattgaaagctgagtggcccaggggacttggactaaaggactggttctgtccttacctagctgctggggcttcaggctaaatgttgagcccaggggtcaagtgttgaagatgctggaaaaataccttattttgtaaagagtcagatcatgagtatttttagcattgcagaccatagaggccctatccagcaacagctctacctgctgtcagtgcagaaaagcagacagtgaagagtgcctgtggctgcgtttgctctgcagcctgtcactttctggccctgggttagcagctctctccttagtttactcagctattaaatggggaggtcaagagctgctcacccatctcacagtactgtgttttggttttggttttggttttggttttttggtttacgtttttgtttttttgttttttttttacggagtttcactcttgttgcccaggctggagtgcagtggcacgatctcagttcactgcaacttctgcctcccaggttcaagcaattctccagcctcagcctcctaagtagctgggattacaggcgcccaccacaatgcccggctaattttttgtatttttaatagagacggggtttcaccatgttggccaggctggtcttgaactcctgacctcaggtgatccacccgcctcagcctcccagagtgctgggattacaggtgtgagccactgcacccagccccagtactgttaaagatcagctgaaaagcagtatacaaacaagggaccattgtgcaaacaagtcaggctctaaaacagagacttggtgcagtcatggttgtgtgtttgttttttgtttttgtttttgtttttaattttattttttgagacagagtctcactccattgcccaggctggaatgcagtggtacaatctcagctgattgcaacctccatctcccaaattctcatgcctcagtctcctgagtagctgggattacgggtgtgcaccaccacacccagctaatttttatattttgtagacagggtttcaccatgatggccaggcttgtctcgaactcctggcctcaagtgatccacatgcctcagcctcccaacgtgctaggattacaggcatgagctgccacacccagcatattcatacttttgttgttgaacttatgaaatcaatgtaaccccaaaaactgaaaagaaagagcttgtccttttcctccactgagtccacacagcctttcatttgtaaatgctcttgtttcacccccaattctgcatgtgctacatgggtatcagtggtgcatctttgcatttatctcttaagattgcctagcttttccagtttgttagtcttggttgcacagtctctggagccttctattcttggaggctggcgttttgagattcgcttctctgcatagggctgatctcaggatgactcggcagagcctggctggtttattctcttccttaatctttgccatttttaagagctcacatttggttccctttgcagttggctgctgaacagttcaagaaaaccagtctccatgtggctaagagtgttttgaacaacagacatatagtgaagatgctggaaaaatacctcaaggtttgtgcttgcaagtaccacagacaggaaaagctttcaaaagggaagatgaaccccaggagcagggagttgaatccagagtgcagcatttagcatttctgagtcttttgacagttgagggacactggaatgcatcaagctcaggaacatgacaactgggatttctaatgagtcagtgcttgcctggggactctggggatgtggcgctgcttgattaatcagtgcgtaatggatttttaccatgaaaaatcctgattgtttagccttaaaattctgagcaaatgatggttaggtgattttttaagaaaaacccaaggctagccctactcgggaagctgggatgggaggattgcttgagcccaggaatttgaggctacagtgagtgatggtgttaccactgcacttcagcctgggtaacatagcaagactggtcttgaaaataaaggaaagcggggaaccgggaattatggctcatgcctgtaatgccaatagtttgggaggctgaggcaggaggatccctgagctcaggagttagaggagttaacgattgcgccactacactccagcccaggtgacagagtgagaccccatttcaaaaaaaaaaaaagaatccaaggtacatgagaattttccaggagagaagctaaaaagagatttcattgatagagccaactgacagtgaggttgaaggtgaggggtagtgaagaaccagagccttcatgatgggagcagcatatcgaagtcccaaagtgggtgctcatggagagaaggctggttggaagagctcccagttcttccttgtgaaacccattttgctcagtgttcatcccaggactttagcatttggggcaggtggctaagtcccagcccacaacctgacttcaggacctttgccctcctctcagttactaaacacttccatatttgacagttccatctattaaaggcacagaatctaaataaccaattgaagaaacatgactgggccgggcgtggtggctcacacctgtaatcccagtactttgggaggctggggtgggcggatcactttgagttcaggagttcaagaccagcccggacaacatggtgaaaccctgtctgtacaaaaaatacataaattagccaggcgtggtggcatgcgcctgtggtcccagctactcaggaggcggaggttgcagtgagccaagatcgtgccactgcactccagcctggatggcagagtgagaccttgtctcaaaaaaaaaaaaaaaaaaaaaaagagggaggaaacatgactgatgtatattttacctttgcagcttaagcaaggtaaaagtttccagagtcaagtgtgagctcaggcttctaagcgtctttttttttgagtcagggtcttgttctcttggtacccagccaagagattcctgcagagattctctgcagcctcgaattcctgagctcaagagatcctccccactcagcctgccaggtagctgggactgcaatagtacaccaccacacctggctaattttttttttttttttttttttttttttttgagatggagtcttgctctgtcacccaggctggagtgcagtggtgcgatcccggctcactgcaagctctgtgtcctgggttcatgccgttctcctgcctcagcctcctgagtacctgggactacaggcgcccaccaccatgcctggctaatgttttgcagggggatggggtggccgggcgtggtggctcacgcctgtaatcccagcactttgggaggccgaggcgggtgcatcacgaggtcaggagttcaagaccagcctggccaagatggtgaaaccccatctctactaaaaataaaaaaaaaattagccaggcgtggtggcgggcacctgtaatcccagctacttgggaggctgaggcagtgaattgcttgaatccgggaggtgcaggttgcagtgagccaagatcgcgccattgcactccagccttggcgacagaccaagactccgtctcaaaaaaagaaaagagagatggggtttcactgtgttagccaggatggtctccatctcctgaccttgtgatctgcctgcttccgcctcccaaagtgttggaattacagacgtgagccactgcacccggccacatgctggctaattttttaagacagtcttgctctgttgcccatgctggtctggcctcaagtgatcctcccgccttgacctcccaaattgctggggttacaggcgtgagcaccttgccctaagcatcatattttaaaacatgtttcctaatctggtaatgataacttttagtttgcttgttttagactacagatagttttctatcatatacttaggagaattttgacttctgagggagtcagacttggatttgaatcttgattcgccacgttgcccaggctggtctcgaactcctgagctccggcagtcctccagccccagcctcccaaagtgctgggattacaggcgtgagccactgtaccttaatgaaactaaaatattacgtagtgttaacttcctattacatgccctttattttattttattttatttttttgagatggagtctgactctgtcgcccaggctgccaggctggagttcagtggcgtgatctcgacttactgcaagctccgcctcccaggttcacgccattctgctgcctcagcctcccgagtagctgggactacaggcgctcgccaccatgcccggctaatttttttttttgtatttttagtagagatggggtttcactgtgttagccaggatggtgtccatctcctgacctcgtgatccacccatcttggcctcccaaagtgctgggattacaggtgtgagccatcacgcccggcctcatgcccttttttaaaaaacatcaagttaaggctgggcttgtgaacttttcctcgctggtacatgcttgattaaaaattgcaggccaggcacggtggctcgtgcctgtaatcccagcattttgggaggccaaggcaggcggatcacctgaggtctggagttccagaccagtctgcccaacatggtgaaaccccgtctccactaaaaatacaaaattagccgggcgtggtggctcctgcctgtaatcccagctactcaggaggctgaggcaggagaatcacttgaaaccaggaggcagaggttgtggtgagctgagatcgcgccattgcactccatcctgggcaacaaagcaaaactccgtctcaaaaaaaaaaaaattgcagaatgggccgggcatggtggttcacacctgtaatcgcagcgctttgggaggctgaggtgggtggaaaccccatctctactaaaaacacaggaggcggaggttgcagtgagccgagatcgcaccactgcagtccagcctgggcaacagcgagactccatctcaaaaaaaaaaaaaattgcagaatatctccccgaggtgttttctgaatctgtaggctctgagaacatgtaggattcactcctgtggcataatttacagaagtgtttcccttgtggactgctggttctgaaaagctgacatccccgcaatcatgggcctcctgagctctgcttacaccacgctgaccggtgtttcctctttggccagggtgaggaccctttcaccagtgaaactgttgatccagaaatggaaggagatgacaatttaggaggtgaggataagaaagagacacctgaggaggtggccgcggacgtcttagcagaggtgattacagcagcagtgagggccgtagatggggaaggagcgcccgctccagagagcagcggggagccggctgaggacgaaggccccacggacacagcggaggccggtagtgatcctcaagccgaacagctgctggaagagcaggtgccctgtggaacggcacatgagaagggcgtccccaaggccagaagtgaggctgcagaggctggaaatggcgccgagacaatggcagcagaggcagaaagtgcccaaaccagagttgctcctgccccagctgccgcggatgctgaagtggaacaaactgatgcagagtctaaagacgctgttcccacagaatgatgctcatttccctgttccagggaaggcgttgggatgatggatgcgttggtctttctcccttggtttgtaagcagtacaagggcgtgtgctcccagaatatgctgtaatctaattttggtgaagagacccagcgtttcctcctgagcagtgcctctcacggcttgtctcatgcagtcgtgtggcttcttgcccaggtttcaaagctgaagtacattgtccttagcggctgtaacatgtctcttgacagtagtgcacttggaataataaaggttgggtgattatatcttgatgatacattacttgttcaatacagccactgatggaatgcttccttttttatttttttccttaatttttttttttatttggttgggaacagctgaatactaggaatatatcttgctctatagaggatttttttttgtatgtttcaagcttcagcctttaacctatacctttgtagtgcaccatatggtgtgtgactttcacaggacttcgcagcacctggttcacatgtggcactgaccgcgtcacatccacgcactcccaaaggccagaagtatctgaccgacctacgccactggaaacacacccaccgcaacctcaagaaccagactgtgcagagggcattgcgtcccaatctttagtccttgctgaatcagttctctaatattttacctcatttgtgttccacctctagattacttcaggtttttttcctttaaaattagttactaccactcaaatgtatttacaaagagaatttggccaggcacggtgatgcatacctataatcccagcacttcgggaggccgtggtgagaggatagcttaagcccaggagttcaagaccaacctggacaacatagcaagaccccatctcttaaaaaaaaaggaaagaaaacttgatgtgattgccataggtggaataatccaacataaattgccatagatagaaggtatctgtaatatatatatatatatataaaatgaaatatatgtttcattttagagaaataactattactttagatctttccaaatctgagaaagggaggctagcatgtgttcaaggttagcacgcaacagaatttcctaaaatcagaagaattggaagatcctccccttttgaaatggccctgctgtgtcagtttccctgtggccttttgaactgtacatctcacatgttgggaaacgctggccactgggaaatcattagaaaggaggctgtagaatatttgccgagcctctactgtataccaggggctaactcaccaagcacattctaggaattgggccctgctcatgaggagccttagtggagattccaggtgaatatttatgaaaaagtcaacattagaactgaaaatggaaataaactgcttgaaaagacga

SEQ ID NO: 9274 - DNA, 217 bp, Homo sapiens
ggatactggcagctgcactgcacattgcttcgtgcctgcgagtgtgtgacagcagacacctgcggggtcgggagcacccaggcccactgggtctttgagaggcgggcgcccttcagcaggtctcttcatgtccaatgcaggagaccagagggtctgcagcaacagcagagcaggcttaaatccctcatggcagagcggcctgaggtgccgcggcctg

SEQ ID NO: 9275 - DNA, 1122 bp, Homo sapiens
gggtgacagagcaagactccgtctcaaaaaacaaacaaaaaaagattgaagtaatgaattttatttcagtggtatggggaaccttgtttctgacagtaggggaagctatcatgttcctggtaggaggttgcatcttatttcaagcggtgggaaaacaggacctggctttgcattagtaactgaagccaggtggtgaactctcagcatgtgtaaggagccggctgagaaggagctttgctcccatgatattaaattatctgattattgaaaacttttgtaaatggtcattagtgagcaaattgtctttttaaaaattctattatgaaagagttttaaacttaacagaaaataggcaagaacagtgccaagaactcctgtacactcctttgcccagagactattcctttagagcaaaggctacagcccagaatcacgcgcttcaccccattcatcacagctctcctttctgtccatctggtgccactcctcagttttcctgaacttccgcgattttggcgtttgtggaggttataggctgatcattttgtagaatgtctttcaatgtggattcgttgatgtttctgcatgattagaccccacctgtgtgtacttgaagcctgaatgtcacagactctgttctttttatcctattctgtgtctttctgtccagttactggtgaggttactgctgtcgccttgaagcacaaggtgttctgggtttgtcttgttttttcatgaccctgtaactggccacatcttcaaggagcgctgcttccatatagtggaggggggtgtttggaaatgagatctggttgctggtgtgcctatttccactagggtattgcagctcccagaccttctcataggatagagctaggggacttgtacatttatagttatttctgtatctgcgtcatatatcatgttcacacaaatgcatctaattccaatctaacatcacagagttgtcttttaaaaatatgacaagctggccatgcgtgatggctcacgcctgtcatcccagcactttgggaggccaaggcaggcggatcacctgaggttgggagtttaagaccagcctggccaacatggagaaacctcgtctttactaaaaatagaaaa

SEQ ID NO: 9276 - DNA, 191 bp, Homo sapiens
gatcgcaccattgtactccagcctgggcaacagagcgaaactctatctcaaaacaaaccaaccaaccaggattgaagtttctattttcctattttcacatacacattttcttcagccatattatatgtgtatgtatagcctacattggctaaatctgaggaacaccacaaacatcagataaatctctcatg

SEQ ID NO: 9277 - DNA, 1936 bp, Homo sapiens; identical to SEQ ID NO: 9235
  SITE (1768): n equals a,t,g, or c

SEQ ID NO: 9278 - DNA, 4602 bp, Homo sapiens; identical to SEQ ID NO: 9232

SEQ ID NO: 9279 - DNA, 166 bp, Homo sapiens
actgattcttttttttttgtttttttttgagatggagtcttgctctgtcgccccggctggagagcagtggcgcgatctcggctcactgcaagctccgcctcccaggttcacgccattctcctgcctcagcctcccgagtagctgggactacaggcgctgccgtgcc

SEQ ID NO: 9280 - DNA, 1936 bp, Homo sapiens; identical to SEQ ID NO: 9235
  SITE (1768): n equals a,t,g, or c

SEQ ID NO: 9281 - DNA, 4602 bp, Homo sapiens; identical to SEQ ID NO: 9232

SEQ ID NO: 9282 - DNA, 166 bp, Homo sapiens; identical to SEQ ID NO: 9279

SEQ ID NO: 9283 - DNA, 10719 bp, Homo sapiens
acagtccccactgacgggagcagcagaaatgaggtgagtcctcgcccttcctggcagggatcctggccccttcccccgggacagcttgcccacctggccctggccttggccccttcccagtctgcattctgtgtccagcctgtgctgctctgtggcctctccttgagggcatacagacagttgagaaccagcctcatgcaggccccacaccatgttctccaggaggaacagtcattgagcttctaagtctggacacctcaggagggtcagccacagggggcacccactggtcaggtgtataagttcatttagggctcgtagttcctagtgaagccgagcggtgccgttttgcacataaggaagcagtgacggggacagcacagtggcccatctgcctcttgccttgctcttcaccaggatgcctggtgtgtccctccatggccaggctttacagaacgcagtcccacctggagcagccactcggacccagcagccccccattgttgcctgctccaagcctcacatctaaccctagctgcggctgtctgctgggaagagccaagtccatagggccctttgggcacatggccaggcctctgaccctgtggctgctctctagttctcaggcccaggcaggatgtcagtgcaggatggagccccgccctaccaaaggcttccaggtgggcatgagctcacaggcaggccagggagtagggaaaggctgccctggaggaggccaccattggtgcagattcttggtcccctctacccccactgctccaagaaaaggtggcctaggggcattatagattgggaattgaggggttggagtgttagttcatgccctggcctgggaatgggaccgccctaccaggttcgtctccctgccaaccccagtcccttccagtgctctcctttctttcccaggagaccccagcagctccaacacccgccggcgccactggaggcagctcagcctggctagacagcagctctgagaataggggccttgggtcggagctgagtaagcctggcgtgctggcatcccaggtagacagcccgttctcgggctgcttcgaggatcttgccatcagtgccagcacctccttgggcatggggccctgccatggcccagaggagaatgagtataagtccgagggcacctttgggatccacgtggctgagaaccccagcatccagctcctggagggcaaccctgggccacctgcggacccggatggcggccccaggccacaagccgaccggaagttccaggagagggaggtgccatgccacaggccctcacctggggctctgtggctccaggtggctgtgacaggggtgctggtagtcacactcctggtggtgctgtaccggcggcgtctgcactagtgaagccctgggctcttcccaccacccatctgttccgttcctgcagtacacctggcccctctccgaagccccttgtccctttcttggggattgtggaggctgggtcagaggggagttaagggactgcaggcctggcagcaggacatgccttggctgaaccaagtcctgagagcagcatctctgtccccacggtgccttgtgtgggtccccgtccttggctttctgggtcctgggctgcccccagtgctccagaccttccccactggcaatccaggttatcatccatgtcctccagaggagcttcctcctccaggcctcagccctgttggcccaggtggagcaggagggaccactggaacatgtggtgcttgggaatgcctctcctgttgcattggtccctgaaggcctcagggcaggtatgtggtgtgtgggcgactccacaagacctgcctcccatcctggcagcccagcctgagaccgttgcattgaggcaggcaggagcggcagggtggctgctctccaggagcccaactgccttgagttcctgccccactgggccccctcccctgctgggcaatcctgggaaggtctggaggttcctgtggacctcagggaagccaggggcagctgtcaggcctgaggaagacctgtggagctcctctccagcctcctctttccctcccctctggtctccattctcttcagctccctacatgggctggggaggagacacctggtgggcagagctcaggcagaggtttggatttcagctccctcacttccggggctgtgtggctttggcagatgtcagacttctggtcttgcttctccacgtggacagtgagtatctggctcattcttcactgggttcttctgagattgaacctacaggtgtttgccaagtgcctggcccagagcaagtggccactgcttctcccatctctctcctgcccaacctggtagagctgagggcatgagaggcagagtgcacagtggtcaagggtgcagctctgcagcacaggcagcctaggcctgcgtcccaacctgcctctcaccagctctgtgaccttgggcaagggatttatctgtctgtcccttagttttctcacctgtaaaaggaggataagtatatatatatatttcccagtgttgtgaagattaaaggagtttatcgatgtaggtcttaggatgagtcctggcatttaccaagggttggatatatgttattatcactattaagtgttgagggtccaggcatgctgggcaacagggaccccatctctacaaaaaagtttaaaaaattagccaggcgtggtggtgcacctgtcgtcttagctacttgggaggctgaggtgggaggatcacttgagcccagaagcttgaagctgcagtgagctaggatcgtgccactgcactccaacctgggtgagagagcgagaccctgtctcaagaaaaagaaaaatgcagagaaacaggagtcttggctactcctttagaggcagactcagaccctcctgcctcacagctttatctttgtatttgccccttactttatcttgtgccttgagaaattgctggggagagaggtatgtccactgggcagctgtacaggatggaggatatagggcgtttccactcccagcagccaggttccctcaccccaagctcacccactgttggggagattatctacaataacaccagaaacacattggggtggattgggggtatccttatgggttcttttcagggaaccattgctggacaaggcacaggagccacctccatttctgagctctgcaagggacaagaactagagccatcaggggctgggctcactgtggccccaccccaagccgtcagcctccagggatctacaccctgccttggctgctacagctttttcactccactgccctaggggagttcagcaacctaatgatctctatctctgaacatctcttcatcccatgctccaagtccagcaacctgcaccctggaaccaggagtggaccctacccgagctgtctgtattaatccccatcccccaccaccaatcttaaaaagccctctgtccccctaccctaaaccccagttaggtacccatgctgggcaggtcagttaacaatttatgcacaggtactagttttattgtattaccgttccagggtagctttgaaaaaagtatctcaaaaaggcaacatgggccgagcgcagtggctcacgcctgtaatcccagcactttgggaggccaaggtgggcagatcgcctgaggtctggagttcaagaccagcctggccaacagggtgaaaccccgtctctacaaaaataagaaaattagccaggtgtagtggcagacgtctgtaatcccagctattcaggaggctgaggcacgagaattccatgaacccaggatgcggaggttgcagtgagccgagattgtgccactgcgctccagcctgggcgacagagtggtattctgtttcaaaaaaaaaaaaaaaggcagtatgtagccccgaagactgttgcccaagtggtagaatgttagcacactaccagcctaggtaaaaaatacaaaaagtaactgggcatggcggcgcccatctatagtcccagctacatgggaggctgaggtgggaagataagtcacttgagcccgccaggaggcggaggttgtagtgagctgagatcgcaccactgcactccagcctgggtgaccgagtgatactctgtctcaaagaaaaaaaattataattttagcacagtaaccagccatgatgggagataccctgggtaaggcatgtagaaagggttgagggaccttcccagtcccctagccccgcctcccatcctcccatctttttcttttttcttttttttagagaatcacccagcctggagcgaagtggtgcaatcataactcactgtatccttaaactcccgggcttaagcgatcctcctgcctcagccttctgagtaactaggacttcaggtacctgtcaccatgcctggctaattaaatttttttttcttttttttttttgagatggagtcttgctctgtcacccaggctggagtgcagtggcgcgatctcagctcactgcgacctccacctcctgggttcaggccattctcccgcctcagcctccagagtagctgggactacaggcgcctgccaccacgcctggctaatttttttgcacttttagtagagacggggtttcactgtgttagccaggatggtctcgatctcctgaccttgtgatccgcccgcctcggcctcccaaagtgctgggattacaggcgtgagccaccgcgcccagccaaattaaattttttatagagatgaggtcatgctgttatgttgcccaggttggcctcatgagatcttgccttagcctcccaaagtgctgggattacagatgtgagacactgcacccaaaccccaccacttttttttttcctttttctttttttgagacagtcttactccgttgcccaggctggagtgtagtggcatgatctcagctcactgcaacctccgcctcccgggttcaagcaattctcctgcctcagcctcccgagtagctgggattacagaggcctgccaccacacccgactaattttcgtatttttagtagagacggggtttctccatgttggccaggctgttcttgaactcctgacctcaagtgctccacctgcgttggcttcccaaagtgctgggatacaggagtgagccactgcgcctggctgatcccagcacttttcaaatgatgccgctcaaagccgtgacttggcctactttgaacagcaaacttgttgctgctgttgtcaacctgaaggcctctcaaatgccagcttcaagcagggtgtgaattggccagtgtcagatctcaggagtcctgtgttgagagtgtggctttcagctgcggggagctgcacttggtggggaaagccaggcaggtcaccctcacagccagataatgtggaggtcagaacccaaggaagggagtgagacctccactcccagtgggggacctggccacccatccttggggacctgagaaagcgtacttcaccttggggtgaaggctgggtggggccagagggaccagtgccctcctcagtgcttaggggcagagccacctgcagcaatggtatctgcatattagcccctctccaccttctttctcccgctgaatcatttccctcaaagcccaagagctgtcactgcttctttctccctgggaagaatgcgtggactctgcctggtgatagactgaagccagaacagtgccacaccctcgccttaattccttgctaggtgttctcagatttatgagacttcttagtcaaatatgagggaggttggatgtggtggcttgtgcctgtaatcccagcattttgggaagccgaggtgggaggatcccttgaagccaggagtttgagacaagcctgggcaacaaagcaagaccctatctctaaaaaaaaaaaaaaaaaaaaaaaaaaaaaaaaaaaaaaaaaatctaggagatgctctttaccctgcctggcctcaaactattaatagcttcctttgagcaacattatttattatgaactttcaaacacaaaaaagtagagagagtagaataacaaatccccatgagcccatcacccaacttcagtaattatcaattcatggccatcttgttcacccctgcctgcttccctgcttcccctcattctgcagaggttcttttcttttgagacagagtgttgctctgttgcccaggctggagtgcagtggtgcaacttcggctcactgcaacctccgcctcccaggttcaagtgattctcctgcttcagcctctcaagtagctgggattacagatgcccgccaccacacctggctaattttcgtatttttgttagagatggggtttcaccatgttggccaggctggtctcgaactcctgacctcaagtgatccgcccgccttggcctcccaaaatgctgggattacaggtgtgaaccacggtgcctggccactgtacaggttatttatagaagttggagagtgaagggttgagaaagccaaggggcagatgcgggtctggaggattttgtgcctaaggccctctctttgctcccagacagcatgaagtaacaatgaggcatccacctcttggttttgtggcctctgtggatgacgtctctcaccttgaaccagttcagagttggagtagcgcaggatcctgtcttcagaggaggggccgaagcgggttcctctgttgtcaagctctttggaggtgcctggctgctactactgtcccagagaggtgatgatgaatgatgggtgtgtccagtggcagtttgccccactgaggcaggggcttccactaggccctgacagagcccttccagcaggcagaaatccctgtgctaggcaagattcaaactccgtagcatgtctcctgctcccatctcttaggaatggagtccttcaggccttgagtcccacattttccatgatgctccattaagcagctgatagcacccccacctccagggaaagtgagttcagagtccttggtctaatgcatctgtgttgaaattgaggccttcccctgtgttcacctttctgctctttttcttttagcccaaggctatgaaggcctcattcggtgctgggcatggtcactcctagcattcctcactctgttgctaacagcaacagcaataataataagggttacaacttactccataccttactgtctgccaggcattaagctaagtgctttacatatattaagtcatttaatcctcataatgaccctatgaaagagataccatctcaacccaattgacagctggtttgcaagattaggagggatgaaggacccaggggacaatgcgagggaaaactctgaccccggggccccaggctggatgttctttatgcctgtgaaccacagcttatcacatgtctggagttagggaccccacttaaagtgagattttggctggaggtggtggatcatacctataatcccagcactttgggagaccaaggcagaaggactgcttgaggccaggagttcaaaaccagtgtaggtaacagctagaccctatctctacaaaaaatttaaaaattagctgggtgtggtggtatgtgcctcaagttccagctactcaggaggctgaggtgggaggatcacttgagcacaggagtttgaagttacagtgagctatgatggcaccactgcacttcagcctaggcaacagagggagaccctgtctttaaagtacatagaggtttttcacaccaacacatctctgcccagtgtgccaacatctgccacctgctataatagtactataacactcaatatgtaattaatgtagtctcagggatgttatgacaatatgattacaactatcacgtgtgtgcccagccaggctcaatgccccaggctgggcgaggtggggcaggggacacagcctaaaatgccaggcctcaggaagccatttggtttagcagacattgtttattaaaggagttacctatgccagatcgaaggcctaagatgattaagacactatgagtgccttcaagtggttggggacgttcatgattgtggtacagacaaataggctttcacatcattcttttatgtaatcatacaacagatatttgcacctacatgtgcagagcactgtgataggcctcagtgacacagaataatacggcaaagaccccacccgatgagccccctcccaccacccaccagtacagtagggggtggtttaatggagtgttcctggaatatgaagtgggggcaggcattaggggtggcaaagggacaagtgtttatctgatcagttatgtactgtttataataagtaaatcagcagagggggaataatacttagaacctatagagagtaaatctgacaagatgaaatgctgatgaaaatatggaggaaatgaaactctcatgggttttgcagggaatctaagtcagtgctgtgttgtgaatgtaggtgtaccctttgaattcatatgttgaatcctaacccccaaagcaatggcattaagaggtggggcctttggggctgggtatggtggctcatgactgtaatcccagcactttgggatgctggcagggggcagatcacttgaagccaggagtctgagatcagcctggccaacatggtgaaaccccatctgtactaaaaatacaaaaattagccaggtgtgatggcgtacatctgtaatttcagccactcgggaggctgagacaggagaatagcttgaacccagtaggtggagatttcagtgagccgagatcgtgccactgcactccagcctgggtgacagagcgagactccatctcaaaaaaataataaagatgtggggcctgtgggaggtggttaggtcatgagggtggagatcatgaatggggttagcaccttataaaacaggcttgagggagcccttctgtcccttctaccatgtgtggatgcagtgagaaggcaccgtatctctgaagcagagagcccgccctggacactggatctgctggcaccttgatcttggacttcccagcctctagaactgtgagaaataattttttgttgtttacaaattacccaggctaaggtgtttcattgtaacctgaatggaccaagctggtgtgaccctgttggaaaactggcagtatctaccaaaagccgaacatacgtataaactgatccagcagttccactcctgggtatgtacaccacagaaagctatgtccaccgagacattggcaagaatgtttctaaccacacgctgactgtagccccaaacctgaaacaacccaaatgtccatccaccaacccaaatgtccatccacagttgaagctacagtgaagtcacagggtcgaatactactgcacagcaacgaatatgaatgaaaatatcgctatgcacagcaacatggataaatttcacagacatgaggtcaagcaaaagaggtcagagtcctcatcatcaagagagaattcattgtatgattctcttcctacaaaaagtacagaaataagcaaaactgatccatggtgttagaagccaggggaacagttaacaggggagggatactggggaggggcatcctggagtgctggtctacctcatctgggtgttgatttcacgagtattgtcagtttgtttccagactccctgttggagatgtggaaataaaaaccacctaaacaagagcagagaggccatttggtcaaagtttgcaaaggagtcagccatgattgcttgtatttggcaggggtcaaaggcaggcagggactgtgaaatgttatagtggaaaaaaagggaaggctctgggtgtgctgtgattggagattgttggcatggggacagagcggactaactggaggggcatctttggttggttgggggggtatatttggctttctctggttggtctggagttggaagagggggtgtggtggctggggattgggaagaagctggcagccactaagttcagactgttctgggtccgattgctgctgaggctgtggtttggcttccttggcttcccaggctggtcatgggtttctggccagagtctattgtcatatgtggcctggccattgtccagttgtatgttcagtctcttggaaggaagggtattgactctgagaggggccaccatcgctggaatgggggacacacagtacttcctccagctgcctacacccccctagggtcagtggcgcctgcctgtgagggtgagcccaatggctagagggctctgctccaagtcattgcttactacacccacaaacattcttcgttctttaaggcctaacttaaagcccagatcctacaggaaaccttgattagacccctctctttattaagcttcctaagatcaaaccctgcttttgtgtaaatgctgacctccttgcctacattttaaaaacctagagctgggcatgatggccccagcctgtaatcccagtgattcaggagactgaggtgggaggattgctagaagccaggagttcgagaccagcctgggtaacatagctagaccacatctcttaaaataaaatagttaatttagccaggcatgatgatatatgcctgtagtcccaactacttggaaggctgaggtgtgaggatctttgagcccgggaggtcgaggctacagtaagctatgatctcaccactgtactccagcctgggtgacagagcgagacccagactcaaaaaataaaaataaaaaccctgaatatcttccttctacttcttcagtgctgtttttatt

SEQ ID NO: 9284 - DNA, 504 bp, Homo sapiens
atagactccctccctagacgggaggactgacaggcacagtgcagtggggctgggtggagatgagcgagataagtagggccatttttgcgctctgccaaagggactgtagggaacagccagggcctatagggcagtgggagagggacagtgaagggctgcatcagctgttggcaggggaacctttaggcactgtcttaccgcagagatctccagttcccagtgaatcatgaaaacttctcagtccccagaggaagtaaggtcttcatcatccagtggcctggactcaactccagatgtcagtgctccccctcagaaatatatagttgtccatctggacctctcaggccagcatgtctctttcctacttcccaaactattccacatgacgctggtgcccagtcagccctcagtgccctgggacagccacaagacacatgagcagttagaggctgggagacgtcatcttagtacttttgtcatccccaaactgctccaagcacctgt

SEQ ID NO: 9285 - DNA, 517 bp, Homo sapiens
caggcaaaatgaagggaagccctgggttcttgtcctgcatccgcagccagctcccactttcctcaccctccaggacctgtaaactgtgaggctggaccagttatgtcaaatctgtcctcccccagagctcagtccctctgcccttgggtgtccttggcacaaggcaggctaggctgcaccagcttcctccatctccgtcctgcctcccccatccccaggtgccattcccacaccatctgaatcactgatttcctcgcaatcagacgctatcttccagttaatcacttcgcttgtatttaacataagaaagaaaaaccctttcattatcacatacagctggaaatcggcttcttgcaggaggcgtatccaaaggaattggagaagagataaactggtaattggtgaaagaattactttaattttttttcctacttgctgtcatgatgatgtccttagaattgtgagcccgtggacacttctgtacaataaatctgctattattacttctagaactaca

SEQ ID NO: 9286 - DNA, 102 bp, Homo sapiens; identical to SEQ ID NO: 5404

SEQ ID NO: 9287 - DNA, 109 bp, Homo sapiens; identical to SEQ ID NO: 5415

SEQ ID NO: 9288 - DNA, 131 bp, Homo sapiens; identical to SEQ ID NO: 5432

SEQ ID NO: 9289 - DNA, 91 bp, Homo sapiens
cccgggaggcggagcttgcagtgagctgagattgcaccactacactccagcctgggcgacagagtgagactctgtctcaaaaaaaaaagaa

SEQ ID NO: 9290 - DNA, 98 bp, Homo sapiens; identical to SEQ ID NO: 5449

SEQ ID NO: 9291 - DNA, 135 bp, Homo sapiens; identical to SEQ ID NO: 5451

SEQ ID NO: 9292 - DNA, 125 bp, Homo sapiens; identical to SEQ ID NO: 5454

SEQ ID NO: 9293 - DNA, 108 bp, Homo sapiens
tggcgtgaacctgggaggcagagcttgcagtgagctgagattgcgccactgcactccagcctgggcaacagagtgagactccatcttaaaaaaaaaaaaaaaaatata

SEQ ID NO: 9294 - DNA, 101 bp, Homo sapiens; identical to SEQ ID NO: 6749

SEQ ID NO: 9295 - DNA, 87 bp, Homo sapiens
ccgggaggtggaggttgcagtgagctgagatcgcgccattgcactccagcctaggcgacagagtgagactccatctcaaaaaaaaaa

SEQ ID NO: 9296 - DNA, 116 bp, Homo sapiens; identical to SEQ ID NO: 5481

SEQ ID NO: 9297 - DNA, 162 bp, Homo sapiens; identical to SEQ ID NO: 5244

SEQ ID NO: 9298 - DNA, 129 bp, Homo sapiens; identical to SEQ ID NO: 5494

SEQ ID NO: 9299 - DNA, 616 bp, Homo sapiens
aagagacggagtctcactatgttgcccagtgcctaggctggcctcaaattcctgggctcaagtgatcctcctgcctcagccttcagagtagctgggattacaggcatgcaccacactgtgcctggctcatctcattttctagaatggatatattgacaaagaaaagagaagaaataagaaatgcaaaaaatgcaccttcaccatatggccctttagctaaaagctacaaagctaacaagggtgtgccatcagaactatccatgtacatgtacagagatgattttaacagctgccatgtgacatgtggcttaaagtcaccctgagtctactaaatggttgtgttgtcaatatatctaaatatggctacgtgctctccagagtgttcccatgatcaccacgtcctttgatcagtgccatctggaagagcagatgagtgcagccctcctctcatcctctctgtgctggctccgaacgcttgcttacagacccaccaacaaccaagaagctgcactggttggtacacactgcagcaaacaaggaaaacaagtagataaaaagtccaacatcaaaaagaaaaaaaaaccatagaaacaattgaagagagaatggctaaagg

SEQ ID NO: 9300 - DNA, 140 bp, Homo sapiens; identical to SEQ ID NO: 5978

SEQ ID NO: 9301 - DNA, 114 bp, Homo sapiens; identical to SEQ ID NO: 5508

SEQ ID NO: 9302 - DNA, 63 bp, Homo sapiens; identical to SEQ ID NO: 5511

SEQ ID NO: 9303 - DNA, 616 bp, Homo sapiens; identical to SEQ ID NO: 9299

SEQ ID NO: 9304 - DNA, 98 bp, Homo sapiens; identical to SEQ ID NO: 9152

SEQ ID NO: 9305 - DNA, 121 bp, Homo sapiens; identical to SEQ ID NO: 5518

SEQ ID NO: 9306 - DNA, 108 bp, Homo sapiens; identical to SEQ ID NO: 5529

SEQ ID NO: 9307 - DNA, 95 bp, Homo sapiens; identical to SEQ ID NO: 6151

SEQ ID NO: 9308 - DNA, 115 bp, Homo sapiens
ggctcaggcaggagaatggcatgaacccaggaggcggagcttgcagtgagccgagatcgcaccactgcactgcagcctgggtgacagagcaagactccatctcaaaaaaaaaaaa

SEQ ID NO: 9309 - DNA, 93 bp, Homo sapiens; identical to SEQ ID NO: 5558

SEQ ID NO: 9310 - DNA, 136 bp, Homo sapiens; identical to SEQ ID NO: 5560

SEQ ID NO: 9311 - DNA, 138 bp, Homo sapiens; identical to SEQ ID NO: 5564

SEQ ID NO: 9312 - DNA, 40 bp, Homo sapiens; identical to SEQ ID NO: 5585

SEQ ID NO: 9313 - DNA, 122 bp, Homo sapiens; identical to SEQ ID NO: 5588

SEQ ID NO: 9314 - DNA, 616 bp, Homo sapiens; identical to SEQ ID NO: 9299

SEQ ID NO: 9315 - DNA, 4802 bp, Homo sapiens; identical to SEQ ID NO: 5618

SEQ ID NO: 9316 - DNA, 368 bp, Homo sapiens; identical to SEQ ID NO: 5252

SEQ ID NO: 9317 - DNA, 453 bp, Homo sapiens
ctaggttcaaaagagagcagagaaacagacactctgaggtagcctttatggagagtaatttggccagatctcaaaatttaacacacacatgcactgaccaaataatcacacttctaggaaatatcccccatgtacctactgcagggattttcaatgcagccctatttatcagaacgactagaaacaacccaaatgcctactgggaacagccagttaaacacgattacaatgatagcctatgcagtcagcaaaaaaagaatgaggtgaccccataaatatggtaggaatgacctccaaattacactgttaagagacaaaagcagaagggtatctaccatcttgtgctttcagctgtgtgatgcatagaattcatacacaatatgaatgcatatatgtacacacacgtgcacatctgtttctgcatatgtgtatgggtatatgaggaagcaagtt

SEQ ID NO: 9318 - DNA, 158 bp, Homo sapiens
gcatgcctgtaatcccagctactcaggaggctgaggcaggagaatctcttgaacctgggaggcagaggttgcagtgagccgagatagtgccactgcactccagcctgggcgacagacggaaactctgtctcaaaaaaaaaaaaaaaaaaaaaaaaaaa

SEQ ID NO: 9319 - DNA, 2925 bp, Homo sapiens; identical to SEQ ID NO: 5990

SEQ ID NO: 9320 - DNA, 129 bp, Homo sapiens; identical to SEQ ID NO: 5626

SEQ ID NO: 9321 - DNA, 453 bp, Homo sapiens; identical to SEQ ID NO: 9317

SEQ ID NO: 9322 - DNA, 131 bp, Homo sapiens; identical to SEQ ID NO: 5630

SEQ ID NO: 9323 - DNA, 1090 bp, Homo sapiens; identical to SEQ ID NO: 5631

SEQ ID NO: 9324 - DNA, 453 bp, Homo sapiens
ctaggttcaaaagagagcagagaaacagacactctgaggtagcctttatggagagtaatttggccagatctcaaaatttaacacacacatgcactgaccaaataatcacacttctaggaaatatcccccatgtacctactgcagggattttcaatgcagccctatttatcagaacgactagaaacaacccaaatgcctactgggaacagccagttaaacacgattacaatgatagcctatgcagtcagcaaaaaaagaatgaggtgaccccataaatatggtaggaattacctccaaattacactgttaagagacaaaagcagaagggtatctaccatcttgtgctttcagctgtgtgatgcatagaattcatacacaatatgaatgcatatatgtacacacacgtgcacatctgtttctgcatatgtgtatgggtatatgaggaagcaagtt

SEQ ID NO: 9325 - DNA, 969 bp, Homo sapiens
gccagggcgcacccgtcggcggtaaaagctgaggggctggcgcgggggattggtgggcgacacttttacgtctacacgtgcctacccgtctgcacgtttctgagtccgcacggttgtcttctcttgctgaatggacataggtgttttgttttgtcccaagagatacaggcaagcagtacaggggtgatggagtgctccttgaccttagcggggctgaccctggcactccctgtaggtctccccgctgcgaagcactgagtctcttcactgcagtttctctccagttacccgccctgtctacggcccaaacggccatgctagtgaaaacctgccctggccgctaagcaagcctagcccaggctgtaacccatgtttctagggcttgttttcctctgcagtcaaatcagagattcggagttgaaggggatcttagaggtcaacatgcccaacctcttagcccgagtgagtgaatgtacgctttttacctgcacaccccgaaaatcgcccgttttctggaaacaacgttgattatgtagtcctggaactttcctgcatgcacattttattccttcgacaatatttattgctacctactgtgtgcaggcattgtaggccccggggatacgattaaaaccaatgaagaacgaaacgcacaagattgttgatctcggccgggcgcggtggctcacgcctgtagtcccagcactttgggaggcggaggtgggtggattgcttgaggtcaggagttcgagaccagcctggccaacctagcgaaaccccacctctactaaaaatacaaaaattggccgggcttggtggcgtgcgcctgtagtcccagctactcgggaagctgaggcaggaaaatcacttgaacctgggaagtggaggttgtagtgagccaagattccgcctgcattctagcctgggcaacaaaatgagactctgtctcagaaaaagaaaaaaaaaaaa

SEQ ID NO: 9326 - DNA, 265 bp, Homo sapiens
cacgtctgtaatcccaacactttgggatgccgaggtgggcggatcacgaggtcaggagatggagaccatcctggctaacacggtgaaacctcgtctctactaaaaatacaaaaaattagctgggtgtggtggcgggcgcctgtagtcccagctactcgggaggctgaggcaggagaatcgcttgaacctgggacgcggaggttgcagtgagctgagatcaggccactgcactccagcctgggcgacagagccagactccatctca

SEQ ID NO: 9327 - DNA, 921 bp, Homo sapiens
gatttctatgcattgtgtaatattcagtgatgttgagattttgcatgttgttacaggtgctctttcatatgtgtgtttggggggttgatgtggaattgttaaccactgctgctatcacttattggagttaaactgaaaaactgtgttaaaaggctgtgccagtcaacatttctatgtgtgacttaagtaactgtgtacttcattgtttaatattttgagccagcacttagtggcctctacagaaggaaatattgtagttgtcaaagtggtgccaaacttgaaaatcttgtgtcatgtttataattccaggccaggtcagcttttcttcaacactttccgagctctttgaaagcaaaaaacatttgcaaaaagagaaagaaagcaagaattctgaacttttctaatactctctcctctagaattttaaatatttttttcttttgatgtttgagtatcttacagaaaaatccaatcaaatgactagcggtagaatttcccttgatctggatatttttaggctgaacagtgtaatagcagaggactatgaggtgcatacattatttttgttggctatcatggcttattgtttgaatttcatttaataacaatattcaggctggaggtggtgactcacacctgcattcccagcactttgggagactgaggcgggcggatcacctgagatcaggagttcgaggccagcctggccaacatgacgaagcccagtctctactaaaaatacaaaaattagctgggtgtggtggctcacacctgtaatcccagctacttgggaggctgaggcaggagcattgcttgagcctgggaggtggaggttgtagtgatctgagatcacactactgcactccagcctgggtgagggagcaaggctccaacccccctaaaaagaaaaaaagaatattc

SEQ ID NO: 9328 - DNA, 921 bp, Homo sapiens
gatttctatgcattgtgtaatattcagtgatgttgagattttgcatgttgttacaggtgctctttcatatgtgtgtttgtggtgttgatgtggaattgttaaccactgctgctatcacttattgtagttaaactgaaaaactgtgttaaaaggctgtgccagtcaacatttctatgtgtgacttaagtaactgtgtacttcattgtttaatattttgagccagcacttagtggcctctacagaaggaaatattgtagttgtcaaagtggtgccaaacttgaaaatcttgtgtcatgtttataattccaggccaggtcagcttttcttcaacactttccgagctctttgaaagcaaaaaacatttgcaaaaagagaaagaaagcaagaattctgaacttttctaatactctctcctctagaattttaaatatttttttcttttgatgtttgagtatcttacagaaaaatccaatcaaatgactagcggtagaatttcccttgatctggatatttttaggctgaacagtgtaatagcagaggactatgaggtgcatacattatttttgttggctatcatggcttattgtttgaatttcatttaataacaatattcaggctggaggtggtgactcacacctgcattcccagcactttgggagactgaggcgggcggatcacctgagatcaggagttcgaggccagcctggccaacatgacgaagcccagtctctactaaaaatacaaaaattagctgggtgtggtggctcacacctgtaatcccagctacttgggaggctgaggcaggagcattgcttgagcctgggaggtggaggttgtagtgatctgagatcacactactgcactccagcctgggtgagggagcaaggctccaacccccctaaaaagaaaaaaagaatattc

SEQ ID NO: 9329 - DNA, 1548 bp, Homo sapiens
atttggacacattgctgatgaaattactgatttaattctaagactatcaaaactaattcgtcaaggtccccaccacctctttgcttaaaggaaaacaaaggcagattttaactgtgagcctcttctctagaatatgctgtagacatttgcccctccgtgaggtgataaagcaataaaaataaatttaattatgtgtggtctaaagaagttctacctctgtccattggcctccagagtcacacaaaattatttcttgattcctacatcagaggttttcaggcagagcctttgtaccaagaattccttttatattttggacaccaaagattatggcatgatatatcctgatgattaacaatttagcagtgggcacatttatttgagtcctgctcttggatttatttcccacctttgggtcttacgtacattttgtatttctgtcctgaggactttttgcctcaggcagtttttaaatcaaaaaaatatatatatatttattaggtttctaatttatagagtttccaatttctcccacaattttaaatgttttcactgccaaagttagcagtagatttgctaggttaatgccatggtcagtaatagtttgtaccttttatgttgtagcctgaaaatgtaactctaaccccgtaggcctgaaacctggtgggaagatgattgaaagtgttttagattcaacagattgactatgtatgacttatctattaaaatgaagaacttccatggtttaatagaatgaatgctgtattcaacaaggtcttccatccttcttataaatcttaagactgtgtttaagctttctttcacttttactctatcccttggaagttaattgggaataaaaagatttatcaatttagtcactataatttaaggccaggcatctgcttggaaatacaataaccacaattaatacttacagaaaattgtttcaacagattaactctgctattttaaaaactatagtagtgttctttgaggatgcatttacttttccccaaatttgatagatagttatttttatatattttttctggccacttggcttctaactgattaacatgaaaaacgcacgtgtgcctgtttcactcaaatcatattttacaactttttaaaagctgctacagttatagtttgtgaaagaggagaaaggtgaattgcaacagagggaaattactgttactgtgtcaaatatgtgactgatgcttttggtcagataatctgctgcctgtcaatatttgtaataacagaattttttgttaagagtactctcatctttattttgctgctcactgattttttacactaagatgttctcatctttgtcgactcactgtttttgcttcatatttgtctgtgtacttgtgctctaaataaaaatctagttttatgtctagtttattccattgtgtgtataatgtttgcctctgatgtagtgtaattttctattgtttttgatgtttgttggtacagcctaaaacttatggaaataagaaaagcaatccaataaagtcagctaatgagtgtcaa

SEQ ID NO: 9330 - DNA, 1548 bp, Homo sapiens
atttggacacattgctgatgaaattactgatttaattctaagactatcaaaactaattcgtcaaggtccccaccacctctttgcttaaaggaaaacaaaggcagattttaactgtgagcctcttctctagaatatgctgtagacatttgcccctccgtgaggtgataaagcaataaaaataaatttaattatgtgtggtctaaagaagttctacctctgtccattggcctccagagtcacacaaaattatttcttgattcctacatcagaggttttcaggcagagcctttgtaccaagaattccttttatattttggacaccaaagattatggcatgatatatcctgatgattaacaatttagcagtgggcacatttatttgagtcctgctcttggatttatttcccacctttgggtcttacgtacattttgtatttctgtcctgaggactttttgcctcaggcagtttttaaatcaaaaaaatatatatatatttattaggtttctaatttatagagtttccaatttctcccacaattttaaatgttttcactgccaaagttagcagtagatttgctaggttaatgccatggtcagtaatagtttgtaccttttatgttgtagcctgaaaatgtaactctaaccccgtaggcctgaaacctggtgggaagatgattgaaagtgttttagattcaacagattgactatgtatgacttatctattaaaatgaagaacttccatggtttaatagaatgaatgctgtattcaacaaggtcttccatccttcttataaatcttaagactgtgtttaagctttctttcacttttactctatcccttggaagttaattgggaataaaaagatttatcaatttagtcactataatttaaggccaggcatctgcttggaaatacaataaccacaattaatacttagagaaaattgtttcaacagattaactctgctattttaaaaactatagtagtgttctttgaggatgcatttacttttccccaaatttgatagatagttatttttatatattttttctggccacttggcttctaactgattaacatgaaaaacgcacgtgtgcctgtttcactcaaatcatattttacaactttttaaaagctgctacagttatagtttgtgaaagaggagaaaggtgaattgcaacagagggaaattactgttactgtgtcaaatatgtgactgatgcttttggtcagataatctgctgcctgtcaatatttgtaataacagaattttttgttaagagtactctcatctttattttgctgctcactgattttttacactaagatgttctcatctttgtcgactcactgtttttgcttcatatttgtctgtgtacttgtgctctaaataaaaatctagttttatgtctagtttattccattgtgtgtataatgtttgcctctgatgtagtgtaattttctattgtttttgatgtttgttggtacagcctaaaacttatggaaataagaaaagcaatccaataaagtcagctaatgagtgtcaa

SEQ ID NO: 9331 - DNA, 1672 bp, Homo sapiens
ataatttatgatttgattctttcctttgtccagcctttaacatacatgtttctgtaatttaaataaaaatttatgtactttttccattttagcaaatagtttctttaccgaaacaggttgcaccatagtccccatatggttttctactgttccacaaccactatttcacaaagattgacaaaacttgtatcaaagttaaatttatagacatcttaaggtatcttaggaaatatgtagtaaaaaagaatcaagtccacaaattatgaatattttgctaatacaccaaacaccaatttcagcaaatccaatctacttaacttgtatgtttaatgtggtaatttttctaacaaaatttaatgggggtatgaatgatatatttacacccttgacaaagatgacatgtgtgattttgttgtgacgaagaaaggagagtatgatttctggtgattattatattactctggctcatcaaagctcacagaatatgtaaggttctgccacatccaaaggtgttaggcaaacataatagaaggcacactaggctgacacacgttttcatcatacaaatcttccggtagttcctcttcatctccatcaggaaaatacgtagggaatggtagatttttaccgagatccttatatgcaggcagtttagaatctctgacccttactaagcaatttttatgtccaggtacagagccatttacatagattatgttgtgctttgtgtttattctccacactttcagtccatatactgttctatatatgtttcccatttttccaggcattttagttccaggccagactctgccaatgtcaccagttgaaatatctccaggtctcctgtgggttttcgtttgaccatgtgtagcaggctggcctttaaatccccatcttttcatgacaccttgaaaacctttaccaatagttttggctgtgacatccacatactgtcctggacaaaagtgagcagcataaagaggagtgcctggtttaattgcagcattatctgttacattaaagattataactgtctgttttgacggcaatccaagttctcggtaaaattccaatacaggtgtagctttatgaaaacgtgatacagtttgcctcctacagacagggctgccgtttttccattacggctttcctttgaagtatattttaggacatgacagtcttgtacctgaagtaatgtgaccacgtgcttttgaccatccttggtccataaaggcatcatgcccagcttcaaggccaactctaaaggaacctggttcccaaggatgcataggccatggttcatctttcagaggacacagtttacttgctaattgggttttatcttcatcagagaccaactgcttaatgaatgggacattttcttcagaaagatgctcatcccaccacgtaccactctttccatgaagacttctaacaaaaagccagatgtgtgttctgttccccgggcccagggcagcacccaggccatccccgacttgacccagcacctgggcgccgacctgcatcagcagcctccaacccgggatggattagcccgggaagactcaactcatgacttccgggtgcccagctgctctgctttcagggcgtccccacgccaccaccacgcggacgcagcagccatggggaagtcgctgcaatggccgcc

SEQ ID NO: 9332 - DNA, 1672 bp, Homo sapiens; identical to SEQ ID NO: 9331

SEQ ID NO: 9333 - DNA, 583 bp, Homo sapiens
aataaaaacttaaaaaaaagtggctacctttggatttaaagtgaaaaatgtgatacgaccaggatagtatatcacatggagatctaacactatgactaacaaacctattgggtgatgtgaattaacaatctggttcagaggaaatcaagtatttaagctgaggtctgcttatacacatggttaaacttatttgtcatgaacctgccattagtaaatacatgttaatttcatgcaattaaaaagaaacccagaaaccattagcattttgattaatacatgattaataaaagtttgttgaacatacaatcttaaatcattataaattctttttgaaaggtaggctgggtgcagtggctcacacctgtaatcctaacactttgggaggccacggagggtaaaaagattgaactcagaagttcaaggccagcctgggcaacatagtaggacgccatttttacaaaaaatacaaataatagccaggcatggtggtgggcacctatagtcccagatacatgggaggctgaggtggaaggatcacttgagctcagaaggtcttggctccagtgagccaagattgcaccac

SEQ ID NO: 9334 - DNA, 841 bp, Homo sapiens
caaaagaaactaccatcagagtgaacaggcaacctacagaatgggagaaaatttttgcaattgactcatctgacaaagggctgatatccagaatctacaatgaactcaaacaaatttacaagaaaaaaacaaacaaccccatcaaaaagtgggcaaaggatatgaacagacacttctcaaaagaagacatttatgcagccaaaaaaacacatgaaaaaatgctcattatcactggccatcagagcaatgcaaatcaaaaccacaatgagataccatctcacaccagttagaatggtgatcattaaaaagtcaggaaacaacaggtgctggagaggatgtggagaaataggaacacttttacactgttggtgggactgtaaactagttcaaccattgtggaagttggtgtggcgattcctcagggatctagaactagaaataccatttgacccagccatcccattactgggtatatacccaaaggattataaatcatgctgctataaagacacatgcacacgtatgtttatcgcggtactattcacaatagcaaaaacttggaaccaacccaaatgtccaacaacgatagactggattaagaaaatgtggcacatatacaccatggaatactatgcagccataaaaaatgatgagttcatgtcctttgtagggacatggatgaagctggaaaccatcatgctcagcaaactatcgcaaggacagaaaaccaaacatcgcgtgttctcactcataggtgggaattgaacaatgagaacacatggacacaggaaggggaacatcacacactggggactgttgtggggtggggggaggggggagg

SEQ ID NO: 9335 - DNA, 583 bp, Homo sapiens
aattaaaacttactaaaaagtggctacctttggattaaaagtgaaaaatgtgatacgaccaggatagtatatcacatggagatctaacactatgactaacaaacctattgggtgatgtgaattaacaatctggttcagaggaaatcaagtatttaagctgaggtctgcttatacacatggttaaacttatttgtcatgaacctgccattagtaaatacatgttaatttcatgcaattaaaaagaaacccagaaaccattagcattttgattaatacatgattaataaaagtttgttgaacatacaatcttaaatcattataaattctttttgaaaggtaggctgggtgcagtggctcacacctgtaatcctaacactttgggaggccacggagggtaaaaagattgaactcagaagttcaaggccagcctgggcaacatagtaggacgccatttttacaaaaaatacaaataatagccaggcatggtggtgggcacctatagtcccagatacatgggaggctgaggtggaaggatcacttgagctcagaaggtcttggctccagtgagccaagattgcaccac

SEQ ID NO: 9336 - DNA, 980 bp, Homo sapiens
caaaagaaactaccatcagagtgaacaggcaacctacagaatgggagaaaatttttgcaattgactcatctgacaaagggctgatatccagaatctacaatgaactcaaacaaatttacaagaaaaaaacaaacaaccccatcaaaaagtgggcaaaggatatgaacagacacttctcaaaagaagacatttatgcagccaaaaaaacacatgaaaaaatgctcattatcactggccatcagagcaatgcaaatcaaaaccacaatgagataccatctcacaccagttagaatggtgatcattaaaaagtcaggaaacaacaggtgctggagaggatgtggagaaataggaacacttttacactgttggtgggactgtaaactagttcaaccattgtggaagttggtgtggcgattcctcagggatctagaactagaaataccatttgacccagccatcccattactgggtatatacccaaaggattataaatcatgctgctataaagacacatgcacacgtatgtttatcgcggtactattcacaatagcaaaaacttggaaccaacccaaatgtccaacaacgatagactggattaagaaaatgtggcacatatacaccatggaatactatgcagccataaaaaatgatgagttcatgtcctttgtagggacatggatgaagctggaaaccatcatgctcagcaaactatcgcaaggacagaaaaccaaacatcgcgtgttctcactcataggtgggaattgaacaatgagaacacatggacacaggaaggggaacatcacacactggggactgttgtggggtggggggaggggggagggatagcattaggagatatacctaatgctaaatgacgagttaatgggtgcagcgcaccaacatagcacatgtatacatatgtaacaaacctgcacattgtgcacgtgtaccctaaaacttaaagtataataataataatt

SEQ ID NO: 9337 - DNA, 3489 bp, Homo sapiens
ggcaggtaaaagcagctgttaagtatgcccttagcgtaggctaccgccacattgattgtgctgctatctacggcaatgagcctgagattggggaggccctgaaggaggacgtgggaccaggcaaggtaaggactggggttgtaaatagaggtgggataagagaacttagaagctgaagctagggctggggcccagctggagggaatctggcatcagcttccttccagttcctctcccagagttgagggtgggtgagaccacgtgctcatggctcttctcactgtgggccctgccccctgcactaggcggtgcctcgggaggagctgtttgtgacatccaagctgtggaacaccaagcaccaccccgaggatgtggagcctgccctccggaagactctggctgacctccagctggagtatctggacctgtacctgatgcactggccttatgcctttgagtgagccttgccagagcctcatctggggaatcagggggttgagcaggatggtgttagtaacttattgtaagtcacagcagcagagcaggataggaacactcatttgcatgccaagctgaggagcttgacatgggatcttagcctcttctgctacagcagcttagctgtagctacaggagtttaactctggaaaaaggaaggcagtctcacatggtgtgtaccccagggtatgcacctgtaaccctcctgctccctttattcatttagaaaaggtgctgacttttctgttgagcacctggggttacagtaataagtaagtctcagcagaagatgtgagaagagctcaccattagtgccgtgccctgtgctggaagaagggtggataactccctgaggatgagttaaggaagacttcctaggggagaggagatatctacgtctaggaagaggagggggcataggcattccatgtaaacttaacacctgggttacgatctggaaggatgaaaaagcatggctttttttggccaggcgcggtggctcacgcctgtaatcccagcactttgggaggctaaggcgggcggatcacgaggtcaggagatcgagatcatcctggctaacacggtgaaaccccgtctctactaaaaatacaaaaaattagctgcgcgtggtggtgagcgcctgtagtcccagctactggggaggctgaggcaggagaatggcgtgaacccaggaggtggagcttgcagtgagctgagatagtgccactgcactccagcctgggcggtaaagcgagactccatctcaaaaaaaaaaaaaaagaaaaagcatggctttttaaaaattcttggccctttgtcctctctgggattggagtttgggacatagagtggctggatgggcaggtagggtagaagcctggcatttgtgtccacacttggtggggctgtctctcactcaggcggggagacaaccccttccccaagaatgctgatgggactatatgctacgactccacccactacaaggagacttggaaggctctggaggcactggtggctaaggggctggtgcaggcgctgggcctgtccaacttcaacagtcggcagattgatgacatactcagtgtggcctccgtgcgtccagctgtcttgcaggtaaggacagcaagcagatgagtggtttaggggttgtctgctcaagagcatgagggagcagacgatggatctgcttaagggagatagctagcaagttgtcagagtgttggtgcagaagtcctctgcataaaggtgggcattgaagcagtgggagagaatgaaattgccgatgggaaatggtgagaaaagcaggctgaaggggagtggaggagtcagcaatagggggtggtccagacatgcatgtctgggatgggccaagcaagctgggtgtcaccacttcatggtgatgggttattctttggctcaggtggaatgccacccatacttggctcaaaatgagctaattgcccactgccaagcacgtggcctggaggtaactgcttatagccctttgggctcctctgatcgtgcatggcgtgatcctgatgagcctgtcctgctggaggaaccagtagtcctggcattggctgaaaagtatggccgatctccagctcagatcttgctcaggtatggggcagtcttagggagagggccctgggttgggaggcaagggttaagggatttcttatttcagtgtctgggtgaggctgaggatcttgccttgtgatctggagggaggccactgtaggcatatttcccatttcagcagggctcaggtgctccaggagcttagggaagctgcatggggaacaaaatagtgcttatgaatactgaccccttttcctcatctgtctaatcccccaacttaggtggcaggtccagcggaaagtgatctgcatccccaaaagtatcactccttctcgaatccttcagaacatcaaggtacttggtaatgggttctatcttctttagctctttgggacattttcttggccctgactctacctggctaaaaaggcagtgttgtggaaccccagcttctgctcacaaagctggctttcttgaaccccactctccatcctcaggtgtttgacttcacctttagcccagaagagatgaagcagctaaatgccctgaacaaaaattggagatatattgtgcctatgcttacggtgaggatgtatcagcctcctagacttggggaatgtgagatttggggtgggattctggcccaggtgtgacctaaggcttgctggttgtgagaaggacacaatgttgtgggtgggattgctatgctggacatagtgccctcatttctctttattgagctcagggaagtagtatggctcagggataaggcatataacctgtgagtcccagtcctgcttcttgatatcttgtaacctagagcaagttattaaacttctccaagcctcagcttcctatgtgtaaaatgagcccagttcctgacatgtagtagattctcagtaaatgatatgaggagagcccagaaggcgttgttgacctcactcgagggattggggttgggagggaagtcggctgtacttagggaaataaatggttcctggcctcttgatctcagttcagactgcaaactcttaggggcaggggtagctacatatcaggctatgggtttggtgctagaatggtgttgatactgtggtgttctctgaggatggggatcccagccaatgccatctggcatagtgctgtacacaggtgagtttgtttaggaagatttggggaagatgcctggagtctttggaatggcaactcctgctgatggagtaatctatctgtctctctttccaggtggatgggaagagagtcccaagggatgcagggcatcctctgtacccctttaatgacccgtactgagaccacagcttcttggcctcccttccagctctgcagctaatgaggtcctgccacaacggaaagagggagttaataaagccattggagcatccatat

SEQ ID NO: 9338 - DNA, 3489 bp, Homo sapiens; identical to SEQ ID NO: 9337

SEQ ID NO: 9339 - DNA, 123 bp, Homo sapiens
ttgttgccgaggctgaagtgcagtggcacaatctcagctcactgcaacctctgcctcctgggttcaagtgattctcctgcctcagcctcctgagtagctgggattacaggcacctgccaccac

SEQ ID NO: 9340 - DNA, 134 bp, Homo sapiens
gatggagtcttgctctgtcacccaggctggagtgcagtggcgccatctcggctcactgcaacctccgcctccttggttcaagcgattctcctgcctcagcctcctgagtagctgggattacaagtccccgccat

SEQ ID NO: 9341 - DNA, 134 bp, Homo sapiens
gatggagtctcgctctgtcacccaggctggagtgcagtggcgccatctcggctcactgcaacctccgcctccttggttcaagcgattctcctgcctcagcctcctgagtagctgggattacaagtccccgccat

SEQ ID NO: 9342 - DNA, 123 bp, Homo sapiens; identical to SEQ ID NO: 9339

SEQ ID NO: 9343 - DNA, 8737 bp, Homo sapiens
tctagggagaaggtgctttattctgggatctgcgtaccaggctggctggggtgctggagtgggaaggggaatccaaggagcaaaccaagaaggtcctagggccagcctaggcctccacggcccggccgttgatgacgcggatgtggcggatgacgtcctggatggcttcagatgttgtgccctggcccccgatgtccggagtgtgcatctgtaggacacaggcaggctcggcacacaccaggccctgccaccccccgctgtctcctgtgacgtgcaggactgggattgccacaggagggaagtggcaccagctaagggccagaagatggggccagatccagtaccatcctcccctgggggctgtggtcagtgcatgaggcgggctacaggaggctgcagggggagactgggcggggcagcagggtagggtgcgaggggaacctcacattctcattgtccatggatgccaggacagccttacggatggaggtggcataggagtgcagcctagaggatgggacagccagccttcagtccctggggcccggagggctggccaggggcttgcggggcactgggagccactcacttgaggtggtccagcatcatgcagctggccagcagggtggccgtggggttggcgatgttcttattggcgatactcttgccggtgttcctcgtagcctggggaggcaagacgaaggagagtgggtggagggcagaaggatgccgggcagtgactctgctcctgtgacacgtccagaagaagccactccacagggacaaaagcccaccagcgggtgccaggggttgggggaaggtgtggggacagatagcttatggggacaggctttcctcgtggggtggtgaaaatgttctggaatgacctggtggtgacggcagtacaaccctggatatccaaaaaactactaaatcatgcattttgaacgggctaaccggatgggatgagtgtgcctcactaagtctgtgaacaggagaaaggcggcaagccgcggcactgccaccggcactcactgtttcaaacaccgcgtacacatggccatagttggccccagccacaaggcctgggcccccgaccagtcccgcgcagacattgttgacgatgttgccatagagattgggcatcaccatgacatcaaactgctggggccgggacaccagctgcgggacaaggagggggctggctgaggagcagattcggaagcatgggtgagagaagcccagggcactcagggcagggggacagcactgggcaggctaatacctgcatggtggtgttatccacaatcatgttctcgaaggtgatctgagggtagcgggctgccacctccctgcagcactggaggaaaagcccatcgcccagtttcctggtggggggttaggaataggacaccagcttggccatcgcaacagtcagccagagggacggggcgtgcagagggccccaggaggctggggtctgaattctaacctgtccctcaccagcaaaatggacagaatcccaccccacctcccctaagtgtgggttctggcaaggcctcgagggcaacagggcactcgcctagggtggcacctcggtgggtagctgggcttttggaccacaaatccctcagagcaggcccaagcaggccactgcagctgcttctggactgctcgcagagaggtcaggggacatacatgatgttggccttgtgcacggccgtcactttcttgcgcccgctctcctgcgccagcttgaaggcatactcggcaatgcgcagggacttggccttggtgatgatcttcaggctctccaccactcccgccacactctgaggagggcatggggagaagagacccatgtgctactgaagagcagcactggccaaacaagctggcgcgaccgggccaccgtgggaagcaaccctgtctgcctatttctggcttctccctcgggcacagcccctgccctctaagggtacacctgtccctggttccttaagctctccccttaatcttgacgctgggggggctcatctcgggccccccatgcacacctcatgctccaggctgctgtactcgccctctgtgttctcccggacaatgaggatgtctatgtccttgtgccgggtcaccacgcctggaaggctcttacagtggatgacgttggcatagaggtccaggctggtgctgggaggggacggagaaagaggctgctaggcctgacaggtggctgactggagccagactccactggctcaccccaccttagccccaccaagcccccagcccgcacacccggatctcaccgaaggatgttgtttcgagatttgtgcgacggtggcaggttatggttggtttcgatgttgcctacaaaacacaacacaggcttagtggcactgcccatccccgccccacctcagcagggcagctgaaggctgccggggtcagaagacttggggagcaaaaatgtttcctgaacactagaatgctagaatgcaacttccagcctaagccccacgaggctacacgctcagggatctcgaagggcacctggtgcagcaggtgctccatgaataacccctgaacgacggaatgaacaagtcaataaatgaataaaggctggcaaccagccaggcagccatgccattctccatccaggctctggagcaacagaaagtgaccactctttactaacaggttggccggccaggctggagctagcaaggtggccttggcggtgttactgccaagcccccgcatcaaggcaccacactcagaggcaggcgggggctgcctggagaaggccacggattggccggaccctaccctacgacccaggacacctggaggaagggaagcagaggccagtggccgctggagacagcagtcagagggcgccaagcagaggccgcctgctggtgagcggtaccccacccagactgctccactcacagcgcgggggtcccctgtggctggcacaaaggcccctctacttgactgccagggcctggggctccccctgggttcatctttgctcacacgctcctcacacagtgcaagtaatgggctgagtgtgcaaaatgagcaatggaagtagtttaaggacctcaagtgaagccccaagaatccctgcctgggctgtgccatccacctccaggctggctgcagccgaggagccaggcagagggtcggaactgcatctctgtgatacctggtttgtgaagaaagatgctgagggtcaaagctgaccccagcagagaggactgtctcaggagggaaggaggggtgggagggaacccatcagggagcccgtcactggacaggctcacacacagctgctctcactcgaatcccagcatcgcagcgcaaacaggcccgaggaggcgtccacccagtctccaagcacgagggtcctctctagccagacaagccctgaaatcagagccgtggggccccacaagagtcagctcagagggaggtaaaagaaatcacaggggctgggcacgacggctcacgcctgtaatcccaacactttgagaggctgaggcgggcagatcacgaggtcaggagttcaagaccagcctggccaacatggtgaaacccactctctactgaaaatacaaaaatcagctgggcgtggtggcgggcgcctgtaatctcagctactcgggaggctgaggcaggagaatcgcttgaaactggaaggcagaggttgcactgagccgagatcacaccgctgcactctagcctgggcgacagagcgagaccccatctcagaaagaacgcaagaaagaaagcaagaaagcaaaaaagcaagcaagcaagaaagcaggaaagcaagcaagaaagcaagcaagcgagcaagtaagcaagaaacgaaggaagaaagcaagaaagaaatcacacctagggccccatcctggcccctggccctggagctcacccttcagggccacgcggttccggcggatggccatgatggcattgcgaatgtcctcttcatcagcattggaactcacgtgcacctcttcaaagtccactggtacacatgcgtgcctgaggcacggcagggtcagggaggctggcccagacccccccgcacctcctccaggaagcctgcccaggctacctctctcctgttgctacctgccctgacctggctctgactgagaagggactgggcccaccttcactgactgatggggacacgcttgaactccacaatgcacactgtggcaggactggtgccaccttccccgagcccaggccagtctggcgggatcacaggccatgggacgcaaggcctgggcttacaggtcgtcttgccatggcctcaccgagtgcttctgggcgcaatgcccctcttggcacaaagtcctcagggccccctggctgaggacaaggcggggacccaggagctccatacctgaagacggacttgacatgcagcatgagctctggcccgatgccatcccctgggatcatggtcaccgtgtgccgcccgccatacttagcggacggaggctgtgggaggcagagggtgaaggtgggccttcggggatcccacatgcccccagctcggcccccatgggctcaagccaattcccttcttcccactggcgctgaccccacaggctgccccgtcacaaggtgccaacttggggcagccccgtcccagacagggctgctcatccagggctcctgggtcagcagcagcccacccccacctggaatttagttaaccccaaagcaactaagagccccccaaacctaacaggcagagaagaatactcacaattgtttgttcctagaaaggatgagaaaggaagaagacacaatcagccaaggttccaagagcaaggccgtgaccaggaaagtgggaccttttcccagggggatgctggctagtacaactcccagaagaggggtgggtagcccctggagaccacgtctcagaggacaggacacaggccgtgcacacacgcgcacaattgcggccacatggagaaagacacatgcgtgggcacgggcaggtacttactgaaaagatgttcctcgaggggacctcgtgggcgcctagaacctggcagagaccaaatgccagcggttggtttgatgtctaacccagaaagccaagttggaaggaaaaacggaccgtccccactgtgcccaggcaggtcccctgtctgtgcagcatggcccactgccaggggcacaatagataattagctccaaagcctcagtccccagggccggcccgctggagcacctggaaagtagaaggcgctccagcctcctgcctccttccgctcttcagaaaatttcttaaaaggcgtgtccctgccctccctcctcttttttgcttctgattatttttttggccagttattcccgctcagcgatgtttgtaacatgcaaaaactggcaaactaaccctggtacagcagggaaatcattacaacaaaccacagatccatgacaacagtcacgttatcacttcgccgatcactttttcttattacaaaagcagcatgtggtcgctacagaaaaagcagaatagggagataagaaggtagcacccagcctccggcctccctgagacaagcactgctggccccctggggaatggcccttcggcattagaaatcgaaaacaaatgtgtagggacatccagccatttctggaaggttgataacagaaacccaactctaggaaggccttcggaaaggactgctggatgccgaatgtccccaacgccctgactggaaatgccggacagcttcagagccaaagctgcctgagccaaatgtgccaggtgccaagtgacctgctgtcctggaagaagccccacctagaacacacctgagacggtggcagagccaaggtcttccctgtcacttggggatgccctgccacttgaccaccaggcagcagcaaagtgttccagccaatggcagaagcatcatagccattggccaaagagccatgccttccagctagaagtccagaaaggctcgggcggagtctgacctctccctgtctgtgtgtccctggccggcactcatcagtccaagccaggggctaggagagggtgcccacaaggaccagagccccgaggatagctcagctgatctgtgtggcacctggatctgcaagcacaggcacggtcgggacttttctgtcttctctctagcgcttatcaacgggtcgggacttttctgtcttctctctagcgcttatcaacatctgaaatcatcttatttgggggctcttgtaagcacgcagaaagcggcttcgatggaccttcctccagggagctttccctgatgccctaaggctactgagctgggaccctaaggccctacttacccccttccctaggttatcactgcattgctccctcctcaacccctgagcccgagaggaggggccaagtcagtgtggtccaatactgtcaccctaggacccagcacagtacctggcccagagctggcacataaggaacatttcctgagtgaacaagcacatcagaaaatgaaaaaagatctggagactagggaggcctcggtccaaatccaccatccactcttcttgagatggcttcatggcctcatctgaaattcacagaacggaggtacctactttccgtgactgttggaaagattaggggacaggaggtgtgtgagctgctcacagtagctagtgccacacagcacgcctgccccttcaccccactggcccctcaggtcagagttcaaggctggtgtccctgggaggtcacgggtggacccctgcagctcccagcagtagttcctcctgggcttcagctgtggcagcaagccaatctcctgagagcatggacctccctcacagatggcaacatcaccaccagggctgagctgaacctctctgccacccggtccctgtgccaggtgttcctttgggctttggcaaaagacccagagagcgctccagatggacttccctgaccttactgtacagatgcaggcaccttccttcaggaggtcgcaaaggctctgccttgtgccctgacttccctgtgaagccaccaatcaaaggagccaagtgtgaggcaggatgcaatatgtacacgcctcccgctctcccatcaccctttcatggttccatggaaagaaagaacatccacaccccacatcttatgcctgctgaggcttctgtctttggcatatttctgttggaccatgtgtcaatggtggctgcatgttttcctatggcgtccaaatcagtgggattcaagacctggggttcctctgtaagggttctcacacccaggacggtcagtctcagggcaaggcactgcccagctacccaccgttcactgtcccctactcccaccccaacgcacacacaggcacacacacaggggaggtcagggaggaggcacacatgtcttcaccaagagcctacaggagcccagttgctggagccatcagagcctctggaaagccactatatactgccgtcctttcagcagcaaggtgggagaagtcagcatcgtcaagagaatttcattaggcacaagcagtctcccccagaggtcagaaggagaaaacatggcaagtagagatgtccctggggagtggccgcaaagtcacggagttctggaaggtcagagttgacaggatcctttgagaacatgaagtctcctcccctctgggttccaaaggggaaactagaacccagagagaggaggaaatggcctaaggccacgcagtggctcagtgtgggagcatggcctagaggtcaaacctcttacccatcagggccaggtgctggctggcagctgcttcagatggtttccagcccacctaggacctaaattaacctcttcttaaataagtgtaaggaaagaagactcggacctgaatacgcaagaccgcacacggagaagagcagaagcaaaacccccgcagcctcagaaaccctagctccttcccattccaggcgcctcgaggggaaggcatctggggctctaagactgggggactatgggggatgactggcaaagtccggttctttgccaccgggataggtggcaaagcggtccacgagagaggaaaccgtggagaaatttgagtcccggaaccggattcccgaagcggtttgagaaaggcgggccgggatacgtgagtgactgcctcagaagggctccttcaaggacactaaggaggtgacagccgccgtggcccactctcccggcccgtccggagggccccccgccacccgatgcagaccccctgggggagccggtccagggccaacttcggccaatcccctcagtgacagcggaggcggccaatcaaccccggcgcgaagccctttccccgcccctggtggggcccctagccaatcggactccagactgcttcgggtgcggctaccccaccgctcccctgcgaccgctgccgcggtcccgtggctctttccctgctcacctcccagggacggcagagaagggctggcccgagcaccgccttcgcggcgctgccggcgacggtcgctaccttcagcgccatgacggaaagtgagagcctccgcacgtcccgacacgcagataccgctctcgcgagagttcgacggggtgcgaagtttcggggacaggcgcggacccggtactgcgcacgcgcgcggtcgcaccgattcacgcccccttccggcgcctagagcaccgctgccgccatgttgagggggg

SEQ ID NO: 9344 - DNA, 1886 bp, Homo sapiens
cagaggctggaggccatggaggctgccacccaggctgagggtgaggggccacagagggtgatgggccgtggagcgcagcaaaggctgcaagacatctgctcagcagctgcctccaccccgtctccccagactctggcttgagactagacgggggcagcggctccacatcctcttcaggctgtcaccccgggggcgccagagcaggtccctccccagcctcttcctcccccgccccagggggcggccgtagcctcagcgcgggctcacagacctcaggcttctccggctccctcttctctcctgcctcctgctccatcctctccggctcgtccaatcagcgagagaccgggggcctcctgtcgcctagcagtaagttgggtggcaagtggtgggcaggcagggctggcagtagtcggaccacttcagtctccctgctctgccttccccagcaccattcggtgcctcgaacctcctggtgaaccccctggagccccaaaatgcagataagatcaagatcaagatcgcagacctgggcaacgcctgctgggtggtatgagcaagtgtgggagagcagagtggggggccctgctccaagggtggaggcacagggccgctcttggggagccctaccccagtctgcagtgcacgtgaaccgtcggctgggtgggcactggtcctgcccagtcaacagcactggggccatggccaagggcaggggccactaggaagggatcagcctcagcctcacatcactgggcctgtccctcttggaggacctggggaccccgaggctcacagcaaaccccactgagctcctcgggtaggcggatcggggtggggcaggagtccgtgggggcaggacagccttggccccagcccgtccccagggctccccttgcttccagcacaagcacttcacggaagacatccagactcggcagtaccgggccgtcgaggtgctgatcggcgccgaatacggccccccggcagacatctggagcacagcctgcatggtacgcccgcccgggctgccctgtgcccagggccagcagcccaccagccagcagcctcacctcctcccccttccaggccttcgagctggccactggtgactacctgttcgagccgcattctggagaagactacagtcgtgatgagggtaaggggtgagggctctgggctcagcctcccggcctcccggcctgcctgcccccaacctcctctttctgcccacagaccacatcgctcacatagtggagcttctgggggacatccccccagccttcgccctctcaggccgctattcccgggagttcttcaaccggagaggtgagggcccgggcagcctcaggccatgtggctgcagggagggtgggacggggaccttggattctgcaacagagggaacactgggtcccaggagccagggcctaagcagaaggcaggtccagagacagggacagagcctgacgcccgctggcctgcccgcaggagagctgcggcacatccacaatctcaagcactggggcctgtacgaggtactcatggaaaagtacgagtggcccctagagcaggccacacagttcagcgcctttctgctgcccatgatggagtacatccccgaaaagcgggccagtgccgctgactgcctccagcacccctggctcaacccctaggcccggctgtggctccacctccagctctccgtgccttaagggaaaagcgggacagctcccaccaccctgctgggcgccagttctccacaaccacagggcagagagacgctggagccaggcccggctctcagagcgtgttctgcctgagacccccgtgagggctctcggagaaagtgtgtgtattcctttcttaataaagtgtggactgaa

SEQ ID NO: 9345 - DNA, 4005 bp, Homo sapiens
cgaccagctgggcccctggctcagggaggggccacgtcagtgctgccagagacgtcacaatgccggcccagccgttcggtgcgcgattggctgccgctgccacttacgcgtcgctcttcctcgtttgcccctcgtgttcatgggagctcgttttcttttcctctaggcagagaagaggcgatggcggcgatggcatctctcggcgccctggcgctgctcctgctgtccagcctctcccgctgctcaggtagcggcccagccggggcttctttcttgcgagcctctgacccacggcaggtggtgttgggggcaggagggatgcgggggtccggcctttcagggtccgtcgctgcgggccgggccttcccccgagaggcaggcggccttgggacggggggaccaaagcacctcgcgcacgtttaccggcagccaggcttttccttgtctgcccatacgaagaggagtccccgagcctccatggtgcgcccggcccccaagctgcagcacggaacgtgacacatgtcccggctcccgctccctgcggggtcggaccggagcgaagctctgtagcgctgagcgatcgcggccaaaaacggggctggaggagccacataagctaggaagggacctcagtgaggagagggagcaagagcggggcgagttagatggggagccaaaggtgcgcagggccttgagtgccaggccgaagactggcttttccggagggccctgccttacccttaccagagttttcggcagagccgaccaggggtcccgtcgatttgcattcgtgaggggctgaggtctgaactccagagtgtgtttaggaggtggctgcagcagccagccccgggcccgggggccaggactggacaggggcggctttctccacattcccttttctgccgtccttcaggccagtagccttgctgcctgcaacgttttggcagcctaactggcctccctttccgcacactcctcatctgcccctcaggaattccctgaactatagtcagggacgtatccagaggacaagcctggccataaaacccttcgggggctcccctgcgccacaggaagcaggcccaacttaggcaggacacagaagggctggcgggatctagcccctgagaactgcctccacgctgttcctagggatctgcctcctgtggtccagacccagagccttctctgacgtcctctgctgaagccatcgttctgccagggcaccacatttggacagcgggtggctgagaacattcccactttggggagcctttgtttcacaccctctgatgtaggcggcagccttcctttcctttgggcctctggttatggagaaggctaaggcaaggtcctttctctcacagctaacaagttgtgcttctggaaccagagtctctcccgtttacttcttcaggaaacgctggggccagtcttcaccttctgtcaactggccgggggcagagaccctttctctcatcttgaaagccccagtgcattgcctgcctgcagcccccacccccgatgtctctgctgaggatgccttcagtaactcgtccaggccgtttgtggctctgaattgaggctggcgtggcccccgggcctccgtgtcataggtccaagtgttggcatgtattgtccagtgaatccagcccccacctgtccccagttcgctcttcctgcacacctccagaaagccggccttgcccctccccagccttccttcacagccatcccgcctacgttgccattgcatttgtgaccgagcacttggatctgtctcgcatatcccacctggaaggggcaggaagagcgcatgggtccccagctgatccgtgctatgaggcagggccgggccatcctgccctcagaccgggatactcgagctggccttacccaggcatctctccctcttccccgcagccgaggcctgcctggagccccagatcaccccttcctactacaccacttctgacgctgtcatttccactgagaccgtcttcattgtggagatctccctgacatgcaagaacagggtccaggtgagacagtggggtttcagacaggagggcgggtggggggtgctcctcactgctagttgatgggggacctgtgtcgatagagggagaatcaagattccaactcttggggtgccggagagatcagggcacggtgatgccagatcctagccagtgttgacaggtcaccttcctcacctgctttgtgtgctgtgcctacacgaggtaaccctgggctcaccacccgctgtttcctgaatgagtatctggaccgggagaaagggccaggagtcagcccaccccggttgccattggccagtttgtctgtgtgggtgttttgtttttgtttttgttttttgtttgtttttttgagatagggtctcactctgttgcctcagctggagtgcattggcacgatcttggctcactgcagcctccacctcccgggttcaagcgattctcctctcagtctcctaagtagctgggatgacaggtgctcgccaccatgcccagctaagttcccataagtccaaagaaggaaatggggccttttttgggtatggccctcttagggtaaagcaccccttgggcagcccactgggcacccctgaccccagcacctcccttgtagactcaggaaatcactcagcccttttgatcatcccgcccctgctcacagtcaacagggttcctatgcgtccagttaggcccggccatggggatctggccttgtgcccccgtagggaagaccaatgcagagggccagtcacgggattggtgagtgttacctggtacctcctgccagggacactgcagcccccaactgggcctagcctgcccacctgcaggccgtgtgagcagcgcacagggctcctctgcccacacccagagggggcagaaggtgaccctgcctttgttccctcacccagaacatggctctctatgctgacgtcggtggaaaacaattccctgtcactcgaggccaggatgtggggcgttatcaggtgaggggccaatggttcccttgctagggggctccctgctcccgggtgtgacctgaagccccaggggtggccggtcaaccagggccaggggccgtgggctctggctgccggagtgctgcagtgtcggcactggtggtcagggtggcccctccgtgtccactctgcccacactctgctcaacacccaacccaggtgtcctggagcctggaccacaagagcgcccacgcaggcacctatgaggttagattcttcgacgaggagtcctacagcctcctcaggaaggtgaggactcctgtagcccactgtgctcccctgtccctggggagcaggatgggctgggttgggaggtgctggcagcaagtcctgagctgggtggcctttctgtgatcctgtcccttcctcagtgtctcttgcccatttctctcctttccttttctggggcttgggccggtgttcctacctgtctttcccctcccctccccacccccacacgccaggcacccctgaccccagcacctcccttgcacctcccttgcaggctcagaggaataacgaggacatttccatcatcccgcctctgtttacagtcagcgtggaccatcgggtgagtggcctggtccctcctcctttttggggttgttgggctgagtgaaggttatcctctccacagccccagctctgctgctgggccgtgattggccagcatgtcttggttcccctggcggaaggtgaccagggctggctggtctgctcacctgtactcccctgagctggcttgtgatctcctttttttcagggcacttggaacgggccctgggtgtccactgaggtgctggctgcggcgatcggccttgtgatctactacttggccttcagtgcgaagagccacatccaggcctgagggcggcaccccagccctgcccttgcttccttcaataaacatcacaggacctgggactgcacaggacctggggctgctg

SEQ ID NO: 9346 - DNA, 5569 bp, Homo sapiens
tctgggtgttgtttccagatgtctgtatggtaattgcatcagaaattgccgtggatattgtaaaacatgcctttattactaaattcaatgacattactgcagatgtatgtattttgatatgcacttcaatgtttaaagtttacttctgttgcttaatttttaaaagttgtagaataataggagtttgttaatactttaaggtcagaattgtaattttaagtttctaaaaattattacactattgaaagtattctgttttaatattaggcaatgataattccatattcttggggtagaagtatagaccagccagtagtcgaagtcacagtgtcactaactcaaaatcattctgatcagttaacactgtcataatctgtttaaagactttaaaatcacattgtttctattttaaaacttagaccatcaaaatttttctctctggctaggtttttaaaatattttatatttaaaagttgatttttttccacgattatgaataggttcctgctaagttttagaagacgagagcctacatttttctggtgaaagtgtttaaactttgagaaatttgttttatgttctaaccagatgttctggataatttctagaaatagatatgtggctatagatttattgcatataaaacataagaaagtttcctaatgtagttctcattcctgtctcagtcccaaaataaataatagttccacagttttctagattttactgggtagtacttttaataacagtctcacagtaatatttgttttgtttcaaaaggcaattatttaaaataaaatgcagttgcaacaactgtgattcaattatgagtttctgaatgttttaatatacttaaagtaaatacagttttgtacttttttgtaaagcattgataaagtaatttcaccatttactttctcagctttcttaatgcagaatgattcccttttcataggatcatttatttagcatctgaagtcaaaattaataggcttgattgagacacttgtgcactttttagtggtaatgatcattcacaagtgccttcatatttactatgttccctaacttagttttatgtctttttcagcattcatttttctcagaaggcattattggttagacaaacagtaatttttttaaactattcatttaatttaaaatttcaaaattattttatatacattacactacttaaaatagtcactcttccccaaattctaaactctcaggatcatagtcgttggatatttattcccctttaaagaaaaacctttagaagatctatgaatgttaacagttcggtggaattgaggttacattttacctttactgtaggaaaacaaataagaaattatgcccagatgtcagcttggttattagcacttgttcctggttaattattaaatgtttttattaataaagttgcagtctttccacattatatatttttactgtattacttgatatttcattcttgtttgtttttaggtctacagtgaatatagagccagtcttgcttttgaccttgttagcagccgacagaaaaatgtgagcatttatcaagggcgtagtctgaaattaacaaaggcatagtctgaaattaactgaataatgattaatttagcatgaaatattaactaaaggaaagctacataaactgcctactgatctctattctcaacactaaataaacatttacaaattaagaataatagtaatacttaacattaagtagtatatgctctttgcagcattttaagttattcaactttgtatttaagacttgtgaacatttggatttccacatcattttataagtgccaggttctgttcttgctccatagcctcacctgtttagaacatttgctggtaataagtgaatagtacttttaaaatgctgtttaaatcccataaatctgaatcttttgcttctttctctgttcaggcatacactgattacagtgactctgtagcacggaggatgggctttattcctctcccactagctgttttagtaagtgcatactttttaatgttttttgtaacaaagtagccatcattatagaatattaataaatggattattaatatgattgtttcaaaaggacttgatataaaaattaagggtaaataacttggaagaaaattttgttttaaattatagcagtagcttatatatccaaatatctattggttgagccatccaatagatgagtgacgcttagctgttttatgtaaatggctttcctaacaatgagaatactcttttttgcttattcatttagtaaaaaacattttttaatggaaatatctgagcatggtcattaacgtggccactgcaacacatattggtggaagtataaattaatccagtgtttctacaaggcaatgtgacagtatcatgctttaattcagtcatttcatttctaggaattatcctaaggaaatagttataaaagacacacaatgatttatgggcatggctttgcatttcagtgacatttgtaataataaaaagttagaaacaaacgaaataggttaaaaaattatggtatgcccaaatgaagacatattctctatcagtggtaattaatactttttaaaaattgtccaaactttttgcaatgaaaattcctgcttttatacccaagaagtatgtattttttttttactcgggaggctgaggcaggagaatggcgtgaacctgggaggtggagcttgcagtgagccgagatcgtgccactgcactccagcctgggcgaaagagcaagactccatctcaaaaaagaaagaataaaaagaaatatgtatttttttcaaaagcactactgaaacttactaaatcaaccctcaacaagtcatcaactttgaatattttaatgaattgcccacaacaggcttgcaaatagtttctagccaggttaggctataataatgttaattaagacgatttgtttagcctggcttagtggcatgcacctgtagtcctagctactcaggaggctgaggcaagaaaaaaaaatttgctggctgcacttgtatttgattatgttctttcttgactaccgattctaacatcgaaacagatgcaaccagctgggcacagtggctcacacctgtaatcccagcactttgggaagctaaggcaggtggatcacctgaggtcaggagtttgaaaccagcctggctaacttggtgaaaccccatctctactaaaaatacaaaaattagtcaggcgtggtggcaggcgcctgtaatttcagctacttaggaggctgaggcaggagaatcacttgaacctgggagggaaggttgcagtaagccgagatcgcgtcactgccctccagcctaggcaacaagagcaacactccatctcaaaaaaaaaaacaacaaaaacaaaacaaaacaaacaaatgcaactgtcttttttgccaaaggatatctagacttctatagctgcagtctcatgcaaatcagctaagaaatgtgtaaagaaagtgaaggtcataccagctatgttttagaccagcttccttgacttttttttagatgacagatgattaataggcttaatgctatttaaatttcagtgtgcctttacagacaaccacatccctaaacatttttaattatattaatagcttgcttattacatcataatatagctttcttttgcttcggaaaaggaactcctagaattttggaaaaatggaggcttctaaataataaaattgtttgttaaaggcttaagagattgataaaatagaatattaaatatttccgcatttgtttactacaactagaaatatgaaacatacaaatataaggataaacctacaaggcctgaatttttttttttttgtaaggattggtcagatggttggatttaaatatgatcctgctttgccaaataataattgacttatttgtctagtaacttgtcagaaaactcatagtatgaactttttttgatttagtatttaaaaatttttcttcaatccttgttttattctttaaatgagtttttatggctgttataccaaaatatttatgaataattaataattgacaaaacacttttggaacacctgcagtgtgctgaaagggggtcatatagttaggcagagatctagtgggcttccttccatagcactttgctcacagagcttcgtcgtgtgccacagctttggcgggcatccaggagccttgagaaatacatcgaggcctctgtgacaagttaattctttaattaaggcacaaggatggcaattttttcttctaagcgttacattgggtcgtaaaatgattttatatccgaaaaaaggaagaaaaaatgtgtattaaagtctcatggaaattagactgagtaaaagttaactgataatatgctaggtgaaagtatagttatttaagccttaaatgtgatcattggtttgcctttcatattaatgaataaaatcctggagtcatgttaacttcagtcacaattgcctatacagtagacattaccctgtagagactgtgacacggttgagggcttccattgtcacttttctcatagtgagagtttattgaacatatgacaagccattgccccagctcttcccaattgttcttttattaaaagcatttttaaatgtctttttaaatgtgtaccattatgatgtttatttaagataccctaatagactttggataacttgacattactagataagacgacttctccctaattctctatttctcttttaacatatgggcatagcagcacttgtaacatgtggacattttactttaactgattccaccagatttattcagcagacttccaaggataatgcttttattcctttatttctgtgaaagaagtaagaaaatggatagttaactgtatccaaaagagaaaactgtttcaatgtttaattaattttttaatagtgtttagtttttctaaatacaaaacttttaaggttccatttttcctgtgttccctgtgagttactgggggttcataaaagagtcaaagaagaaaggacggagggcaaaaaaagcaggaataaggaaacacccaccaaataattctagctttggtgtggacacgtgtagcaagatgaaatcatttgtactttgcagaatgatattttataaaaatcagctgctttgcatccctgtgaggtataagtgtgacattcatgacctaagtatagggccgaacttagagagtccacaggagtcaaactgttgcactagccacaggcatcccagatttgcttgaaccaatccaaatgtaccacagaaggtttcacaagcaggcagattttgatacaaatcaacaaatctgccttcttggatttttagacaaaggccatagatatatgcctaaaatgttaaagtcagcatggagaaatctttttaagtattaactaataactctgtggttgtgtgttctgtttgtgtgtttttgttgttttggtttgtttctggctagctcatcagagttgtaacaagctcaattaaagtgcaaggaatcctgtcttatgcctgtgtcatactcttctattttggg

SEQ ID NO: 9347 - DNA, 851 bp, Homo sapiens
gacatacaatgctgaactttcccccaccacacccagtttctcctctttccctccagactcactcttgccagctaaggtgggaggacttgccagcctctgccattactgctctctgcccagtgcccctcagggaatagctgcttagcagcagggcctgggcctgggctggtctagggcttggccaaaaagaagccagacaagtgccctgccttgatgtcacagaaattcccaacaacaaatagacaacaactagaaaaacaagtcactctattgacagttggtaggaatcattaggaagaaaagcacagtagtatgaggagatgaatgggagaggcagatacagctgccttagagggtggccagggcaggcctctctggtgagctggtgtttcagtaaggaagggagctgtgcagccacctgggaagagcgtaggctcagcagaagggcacggggacacaggcctgatggaggaacagcaggcaccaggcagctgcagtagtccatgagcagccatgggggaggagggcccggggacgggagactacgaaaggagctgagcagaagatggcatggtggctcatgcctgtagccccaggactttggcaggctgggtgggaggattgcttgagcccaagagtttgagaccagcctgggcaacatagcaagaccccatctctacaaaaaagaaaattagctgggcgtggtggcatacgcctgtggtcccagctgtgcaggaggctgaggtgggagattgcttaagcccaggagttcaaggctgcggtgagcgatgatcatgccactgcaccacagcctgggcgacaatgcaagactgcctcttaaaaaaaaaaaa

SEQ ID NO: 9348 - DNA, 2757 bp, Homo sapiens
gactaggaaggatgtcagggcttagaacagggttgaagaaagggacaaaaagtctaaaaacctgagaatttgtgtatcgttgaagggcagtaagtgatgtacatggcctttaccataataaaaaggaagctattcaaggaagatgctgaagaggtgtcaaggtgataaggataaagaactatggtgtgacaaacaggtatcagtaaccatctaaaaggatgggcatggcaccatgtgtaggtgcaaaggaccacatagtaagaccattgtgaagtagtttttaaaaaagtcaaaagacagagaacaagcaaaggaactaataactaaaggaacaaccaaaggaactagcagttagaaaggggaagatctggaactcttaaaactaagtcattgtttggcttatgggacaaaccaaacagatagaatggttgcagtccctattaagccaaaaggacatgaaaacataacttcgtcatttttctctgacaccattgcatcttagattgttaacctcttccatgatagaacactgtataaagttcatatttagagtgaaaatgctttctgtatccaaaccatgtaccagatccatgtcttgttatttattacgtttcaactttttatgggttcttttctctctttaagaaaatatccaaaattgcatcctaattataaaacaagttaaaagaaaaaaaacaccattaatagacagttcatgtatattcttccagtaatttttctcggttatcatatacataaaaacatgtatactttattgtgctttacataaactgaataatactaaatgtttaacctaatctaactgaagtttttccatgataatatgtggggtgatttttttaaaattgtatagcattctagcactaataaacatttccttattatacatttagattatttttagattttcattgtataaacaatggttcagtaaacatacctcaacctttatctttgaatactttaggaagtatatttttttaggatggtcacctaaaattagaatttctggataaaagggcatatgcatatttaagactagtgaatattgaccgggcagagtggctcacacctgtaatcccagcactttgggaggccaaggcgggtggatcacaaggtcaggagatcgagaccatcctggctaacacagtgaaaccccatctctactaaaaatataaaaaaattagccgggtgtggtggcggtcgcctgtagtcccagctgctcaggaggctgaggcaggagaatggcgtgaacccgggaggcggagcttgcagtgagccaatatagggccactgcactccggcctgggcaaaagagcgaggctccgtctcaaaaaaaaaaaaaaaaaaaaaaaaaaaaaaggcatactggatttttatcccttatccatagccttaccaatgctggctactgtccatcttttttaaatacttaccaaatggactaagagggatttttcactgttttaatatgatttatttaatttttggtgcagtcatactttcttgtaatttgtcatttgtatatctctcctgtgaattgcctatatatatttcatggccattttctcattaggatttctttttttcttaccagtttctagaaatgcattgtttattcctcttcccaacttggcatcaagtgtatcttatgtttttctttctcataaattagaatgtttcattttcagttatattaattttccttttttcttaagtacattaaaaaaggtacaacagtgaaattctcatttgtatttgtcactctgtttcttattggatgagtaatcaggatttttggggaaataactggatatttcatacagcaagcaaataattcaaagcatgggaagttaacatagaggtggtagtggggatgcataaaatcgtagtcagtaagttaacaatgagggaaataattaaatttcactcagtgtttacaaacattggaaaacattctgacctgatgggtctgatttcttttgttggaattgttttgtctgtttaaggataatgtgaattactgtgtgtgtagtataattagaatataccacagtatcttaaaattgtttagcatatactttaatcagttggatctgcttcaccctcttctccccatgaagaaaattatatgttaagtgctcataccatatctacttatcttcagtaactatatttagccttagcattacaccagccttacagccttattcattcatttagtttctaaacattaaaatcttaaatactttttgtttaaattagttattattttgtttttatttttttttaatttcattttttctttttatcttcttggttaccaagttttagtgagttaagtggctgtcagagtattggaagggggtctgtttgaggatgaatggtaggaattttacatttgatgttgtcttattttaatgagtcaatacagaaagtacttcagagtatttatgaaaagtgtaaatctaatgttacatgagaatgtggctaggactttatggtttttaaatttctccattctaaaattatgaagatcaatttatatgtaaatcttacgcattaagaacatgcttattgataaatctaaatctctattttagagcaatatactttgctgcttattcaaactgcaaggaaaagttgaatgatgtatttgatcctgattctacccaagtacatatgatttcagctgcaatggcaggtatgaatgtataatattaaaaaaaaaaaaaa

SEQ ID NO: 9349 - DNA, 268 bp, Homo sapiens
cccttatcgtattacaaattgtttttaaggctttttgtatttattaattgtcagttgattcactgaagctttaaaactggaagggacaatccaaaggtcaaaagagtgaaatacaatcatttaccaataaggaaaccttgggcaaattatgtaatttatgtgaacctctcttagcttacccatggaatgagtcaagtggtctacatagatttggattttgagaattagttctttcatttagtgttatagagattatcttgttacaact

SEQ ID NO: 9350 - DNA, 8062 bp, Homo sapiens
gctgacgtgtgcagaagtccttcttgtcctggtcgttgttcccgtctgagtaccagctccccactgccctgagggcgggccggcctgcggcggagggaaaaaggaagaggagaaggaaattgtcccgaatccctgcaggtcagtacctggaagattccataaagtcggggtgcttgagggcgtagggccgagaccgtcgcgggtactgaggcgcctccgtcgtctctcccactcgccgcccgctttccaagacatatgtcccgcttgcagcccatttcgatgctgcgaaacggtgagctgcggggtgtttggggaagagctcagagactgggaaatgggaatctgctgggagcctagggccgcaatccggaaagggagctgtggcctgggtgttggcccctagtccaccaggacagtgccggaggggaatggctggatatgggggcgggggtggtgagatgcaacgcgatatgtcagcagaaccccaagagaggtaataggggtgggaaacctctgacaaccaggcctccgaattagaaaagagttttgtgttctggggactagtccgtccaccaagcgctcagtggcggcagtttcccgtctttctgcctgtggctgtgtcttactgaccatggctctgtgtctagtgggtccaagcctctcccgggtggccagtctttctgtaggttgcggcacaacgccaggcaaaagaagaggaaggaatttaatcctaatcggtggaggtcgatttgagggtaagaccatctggggaccctaggagggacgggggtggcggcgggggtggggagaaggcagagaaggtaataatctaggtacatgtctgagtccgaatgtgtttcttgcactccccggactgtggcgaaatggcgtgctttgtgtgtctgtggttggggggaagtgggggaaatgacagcagggaaacctatcggatagtttgttcgtaatcctcctctctcaacagcacttactctccatgttttcgatctgtcatcctgcaggtctgctgtagcaggtggctccgcttgaagcgagggaggaagtttcctccgatcagtagaggtcggtgtgggcgtgggggctgcctggaatgggggaggggttagaaatcgccggcactttggacaggctcttccaatcctgctttattttccttacctccctcccatttcaggctagggagggggcagacctgtgcatgtctgggatagcataaagaggttaaaaacaaacctgataaccggaatggtgaatcaggaaagcaacgaatcaacagtcaacccatcaagtgctccattctcactggctctggtctctctgcagattggaaagattgttgggagtggcacaccactagggaaaagaagaaggggcgaactgcttgtcttgaggaggttagtgcaagggttctagtcaggtccctagggacatctgaggttgtggtgactgagaccccagcagagtctgtggattccattgacattatctaggctttgggcggggtgacctgggatggggagggaaaggctgaaatgagaggcatagagatttcgtcaacaatctacatttcctacctagcattcaattattattatcttgtccctctgtgcagctccctgcatggggcaacacaagcagaagagaaactcaaacccaattttcttcttccactcctaggtcaacccccagaatcagctcttgtggccttgaagtggctgaagacgatcaccctccacaggcttgagcccagtcccacagccttcctcccccagcctgagtgactactctattccttggtccctgctattgtcggggacgattgcatgggctacgccaggaaagtaggctgggtgaccgcaggcctggtgattggggctggcgcctgctattgcatttatagactgactaggggaagaaaacagaacaaggaaaaaatggctgagggtggatctggggatgtggatgatgctggggactgttctggggccaggtataatgactggtctgatgatgatgatgacagcaatgagagcaagagtatagtatggtacccaccttgggctcggattgggactgaagctggaaccagagctagggccagggcaagggccagggctacccgggcacgtcgggctgtccagaaacgggcttcccccaattcagatgataccgttttgtcccctcaagagctacaaaaggttctttgcttggttgagatgtctgaaaagccttatattcttgaagcagctttaattgctctgggtaacaatgctgcttatgcatttaacagagatattattcgtgatctgggtggtctcccaattgtcgcaaagattctcaatactcgggatcccatagttaaggaaaaggctttaattgtcctgaataacttgagtgtgaatgctgaaaatcagcgcaggcttaaagtatacatgaatcaagtgtgtgatgacacaatcacttctcgcttgaactcatctgtgcagcttgctggactgagattgcttacaaatatgactgttactaatgagtatcagcacatgcttgctaattccatttctgacttttttcgtttattttcagcgggaaatgaagaaaccaaacttcaggttctgaaactccttttgaatttggctgaaaatccagccatgactagggaactgctcagggcccaagtaccatcttcactgggctccctctttaataagaaggagaacaaagaagttattcttaaacttctggtcatatttgagaacataaatgataatttcaaatgggaagaaaatgaacctactcagaatcaattcggtgaaggttcactttttttctttttaaaagaatttcaagtgtgtgctgataaggttctgggaatagaaagtcaccatgattttttggtgaaagtaaaagttggaaaattcatggccaaacttgctgaacatatgttcccaaagagccaggaataacaccttgattttgtaatttagaagcaacacacattgtaaactattcattttctccaccttgtttatatggtaaaggaatcctttcagctgccagttttgaataatgaatatcatattgtatcatcaatgctgatatttaactgagttggtctttaggtttaagatggataaatgaatatcactacttgttctgaaaacatgtttgttgctttttatctcgctgcctagattgaaatattttgctatttcttctgcataagtgacagtgaaccaattcatcatgagtaagctcccttctgtcattttcattgatttaatttgtgtatcatcaataaaattgtatgttaatgctggaaagaaaaaaagaagaaagaaagaaaccatccctgtccttcagtttataatctagttggagagataagaaacgtacaaaccaaaagataacagaatatctgaagcatgtactcattgtcagatgttccctctgagagcacagaggaggcaaaagcttctgtgggatgtgctagtcggctaaagcttcacagaggaggtggcaattgaaaatgagtcctgaatggggtagggtggttagggaattccatgagacaagacaaggggggcatggtgtgagaaaggcatggaagtaggaaccctcttcctatgacaggagatcattctgcttagagtggagagtgtggagagtgggagtagataattttggaaagctgggtgaagccagttgtggagaattgtttgaatattatcccattgaatacccagagccactaaatctttttttactagaaaataattggggtccatatgaaagtctctattactgagtagtgtcaatgagggtgtggcaaaatggagcctttcacatcctagtggtggccatttggtaatacagatataagccttaaactatgtaaacccttgtcctaaggaagtaattgaataattgcccaaagattgtatgtatgaggctgttcatcccagcactgtctaagctagtaaaaattggaaacaatttaagtatctagcacattggattggttataaagcaaggaatgttcacacagtaggatattataagtatgctgatggaaatctatattgccaggaaaagctattcattatgcgttgtgaagtcagaaagtaaaaaagggtagatagaagtattcgaagtatagttccattttttgagactaataaaacatatgtttaaaaggacactaaaaactggagttatagatatccagatagaaacagtagttatctttgggtagaagaataatgagtgatctttacttttttactttttattcatctttgtgtttttatttatctaaaatgggtattgatttttaggacggttttgaaaaagaaaagtgttgggaatgaagcaagtgattgattggaaaacatactgaatggaagaaatatttagattaaaaatgaggtaggttgaagtttcttctctgaaatgatagataaatggtgaagataaggcttattgtgaggattcagtgaggtaatatatgcaaagtacttacaatgttctggcacatagtaattaattaagaaaatcgagcacccttaattacctagaatgcagggttgttagttttttggttgacttttgttttgctggggcattctgccatgttttagtgtcatttaataaataatagtaacaataaaggttaacatttattaagtgactactgtgtaaagttctatcattcctgcaaggcaactgttaaaataatttctcacaggagtagagttttctttctttcctaaaaatccaaagtgtttcctcagacatgatcacaccagcctccacaatatatttctagttgtttgggggatgttatcctgctttatatatgaggccaggaaagggtaaaatcctctattcacttacctggttttatacccaggtttccctgtatgtactgtaatggggtgatggaaaagtgaactaacattttttcttgttcctattgttaggtgagagagagagatttgtggggagatggagtggggaggattaattcctttaaaataaattcagtttgatgtacctgcgtgacactcagatggggatatcctattgtcatttgaatgattgatctggtgctcagaggagatgaacaggctgcaaataaggatttgagagccattggaggatggatgataatggagcacatggaagcagatgtggcccttcagagagaaggtgcagagtcagagtgaagggttgcaaaagaaatgtaagggactatgggcagctggggagagaagcacagaattgaaacaatgtatacccttccagacacttttactattcatatacttatatattctttacataaaattggatcatactattgaaaaattttcagtgcctgatttaaaacttttttcctcaaaaaaagaataatattcattggagatataatacttgaaaaaatagagttgatgagtacaaacttgtgccttgacccagatatgtagcttgaacatctaacaaaaatccagatcaagccatgttgaacttgagatgcggagcgacttttacacctggggtgaaaatgaggctaactcgagtagtaaaaatccccagtgaggcaggtataggcctgactagcacccatctgctcctttccccattcctttgttccttctcattcttctttccacttccttcctcctacttttctttattttatccttctgggagatcattggtggtagcctctctgggcttctctgatccttcaattcccatgacgccatgccatgtatcagtgggcatttaatacagaataataactgtcattgctctggtcataagttgaccctgggtgtgactggatgccaagaatttttggaacctttgttggacaaaaagagactgagaaggaactagtcttaacttgtcacggccacatgtgcactgcatgaatttttgatgtcctgtacccggtcttatttagactgaataacccggagtctgggaaaggtgtatgagatagatgtgtgactgcttggtccaggcagccaggtcacaggttgatgtcccaatgttttcacataggaggttgtcactctcaatccttttggaaggggcagagttctaggattgtagctgattatggcagcccattggcacatggaggaggcagtgtcttctctttagagaggatggcagcttctgggaaaccaaggaaaccagaaactcagaggatgtcctgctattttggttttgttctcatctaacagttttaggaatataagtggatctatcccagtgcaaacatgttcaaaggcgattttacaaaagtggagtgttgttctgttgtaaattgtcagccaatatacataatatttcaaggctcaggaaatggattttcttttttgaaaaattcacattttacctgtcttttttcaaaagagattccaagtgtaggcttagcaaattgatgtggttcaggcaaattttatgtttatggctctctttcattaatttctttgctaagttcccttgagaatggccttttagataatgattcatactattttcaatgctagctttttacatttattttgcatcgcatcccaggctgaagatttttttccggtttttctgtttaaaccatggctctttcttgcttttaagccagagccgtgtcaccatcatcctggggtcccttatctgccctgccccgagggtatggtattagcaggataagtaatatttacttatctgagtggcatagctcagtgcttgaccctctccactggggccctctcaggtattgtgctaagggcttgggcaatgtatgctttaggggatagatgggagaggagggagaggggagaagggagtgaaggaagccttatcagagaggtaactttattctgacagggtgccctcaaagtaggagaacttggtggatccatctccactgtgaggataaagttattgctgaaatccaattcttgtattcaagagatgcagcacatttctccctggacacaattataaattttgtctgcccagatgctcctttagcagaggtagagcatcggtgggtggtagttttatgactattaacatatatgatcaaattggctatcaaaaagagtttaagagaaatatacttttttttagcagtgtgattaattttttaaattatatttttaaaaaaatgacaaataataaaaagtatgtatttatggagtacagtatcatgttatgatacatgaatacattgtggaatgattaaaacaggcctattaacatacaacacctaacatactaatcttttgtggtgggaacacttaaaatctactttttaagcaattttggaatatacaatatgttattattaagtatagtccccatgcaatgaaataggctactagaacttaatccatttgtctaactgaaactttgtgccctttaagaaacatctctcctttccttgtgcctccccttacccccatcccgtggtaactaccattctactctacttctatgaattcgactttttaagattccacatataagtgagatcatgcattatttgtctttttgtgcctgacttatttcacctagtacaatgttttctagattaacatgttattgcaaatgttgcaactgacaaattttccttctttttttttttaagagacataagacataagagtctcattacgttgcccatgctggtatcgaactcctgggctcaagagatcctcccaccccagcctctgaattagctaggactacaggccagtgccagtacacccggctggctagaattttcttctttttaaaggctgcattgtttccattgtatttccatttgcatgtgccacattttctttatccatccaatgatggacacttaggttgattccacatcttggctattgtgaataatgctgcaatgaacatgggagtgaagatatctctttgatacactgatttcaattcctttgaatatatatgcagaagtgggattgctggataatatggtaattaaaattttagttttttgaggggc

SEQ ID NO: 9351 - DNA, 398 bp, Homo sapiens
cttttccaaaatggctgtactaatttacattcccaccaacaatgttcaaggatttcatattcttgacattcttaccaaaattgtcacagtttgtaaaaggtagtctaataagtggcctaagtgaatgtgacaacacttcattgaaagcaatcttaggtttttccaactatagtcaataataacttaattgtacattctaaaataactcaaagagtgtaattggattgcttgtaacttaaaggataaatgcttgaggggatggatgcctcattctccatgatgtgcttatttcacattgcatgcctgtatcaaaacattacatttatcccataatatacacacttactatgtaccccccaaaaataaacattaaaattaagttttcaaaaaaaaaaaaa

SEQ ID NO: 9352 - DNA, 1228 bp, Homo sapiens
ggctcaatgtctggattccgcccggccttaaaaggagcccttgtgaaacctgggaagcctcgtggccccgcggcgttggctcagctgcagccctggtcctaaaccttggagcgcagacttgaggcaccccctcctgcctgttggtgctgagggggttgggtgctgtgtcacttgatgacgtggctgactaccacccagggcagcggccgagcccatagtggcgtcagtgccgccggcgtccttggggtccagcggtcaaggctcagcccgctgaggggacccccccggagttggttccagcactggtccaggactggagagtttctcaaggaccttgaggaccccagaagcccttgcagcaggaaaggctgtaagggggggtcagcctagggcaggacctagggaggggaactttcttgatacatatttgccttttcatcccatctagcaagcacagtgttaattttagaaattatagaagaaaaaatcagcaaggagtgtgggaaaactgcatgccccaggcctcccccgccccagggtgaattggaagccctggaatgggccgaggcacaccaggcagctgatctgggtgcatgtgggccacagaccactctcacaaggttaaatctttaacaagagcctcatgtttgttaggagaaggtgggaccccagcccaagcacttccccattgcagcctggcatgaaatctttgccttttagtggggatcactcctgcccgagtcctggctgtggtggggactctgcaagttgctaacccagcgtccattctctttcctccgtactaacagaaccccggtgcctctgcccagttccaatagcgggcagacgagagccatgtcctgggctcccttgcagcccggggtgtgcagctgtggcgtggaggtgggtggtgctgggagagacttgcagggaagctcctgtgaaggggactcagctgccacatgcaggacccttcccctttgccttcttcctgcctggaacatggatgtgatggctggtgctgggacagctgtcctgagagcgtgaggaaagggtcacaccctaaggacagtggagcagaacacaggaaggaccctgggcctttgctgacgcagaacgcgggaaggaccctgggcctttgctgacataccagccccagactacttaaattcagctttttttttaatgtgagaaaataaatgcacccctctctggtttaagccactga

SEQ ID NO: 9353 - DNA, 4866 bp, Homo sapiens
gcaggacccagtgctgaacacacacagggtaaatggtggtgtgtgaaagaccgagaaagaagctgttaattctgggcttccaatggtcagaaatgcagagatgaagggaatttgagctgagtcttgaagggtttagtaaaagggtcactgtcaaggtgaagaaaagccagtattgagggtgctgtatttgggtgagccatgcagagttagaggtgggctgaggcagagtggcctccaggagaaggtgagaggcgtgcccaggtgccaggcttgatcggcaggctgtgctcaggcccatttttctgattcattttttcttttccgcccaccctactgctgctgctttgcaaacaacacataaatctccttaggttagctgggatcccctgaaggcagtgcccactgcggcatagagaatgaagcggtgggccttagagcatgggaatgcgttccccgggtggctgcaggtcacggctctgcagcatagttcagagctggtgtgcgctgggtggagtcttgtcctttcagtcgccgtcatcctttcttgcagaattaccccctctacattcgcagcacccctacggagaacgagctgaagttccactacatggtgcacacatctctggacgtggtggatgagaagatctccgcaatggggaaggccctggtcgaccagagggagctgtacctgggcctgctctaccccacggaggactacaaggtgtatctttcagggcagggtgtgtgtcagggaggacctacagttgcaagatgtactttaggatcagataacttgaaaccttttagaagaaaaagaggtgagagtttttagccagccagggaattagggtagcttgaggtgaatgaaggcctgtaactcttctctttcattggaagagccatttgggaaaagcaaggctagaattccccgtagaatgttttggtttgcacgtgtccgttgtctggtttgcagaggaagtgggacacttctgctttgtacctgcaaggatttctttctgtgcttttcagggggagccaccacctttgagcaggggataatagtttcatttatttcattaggccttgcctcttatgtcactagacactcgtctagtcccttgggacaaatcacttgaggccatggaattcaaagaccttcccaaaagtcatcatgtagcctgtccatggtgacatttgctagtagccactattttacaaaataatgtggcctctagagaggggatccgccttgttcacgaagcctctggttttgcagttaactttccgggccaggcattgattcatgaagagggtgaggtgttccagacagacagactcggagtctaggtggttcggctcctggagtgtgaactgggtaaggcttggctgcctgctcttcgcttctcctgcaaacaccagacgtcgccctagcaaagtatttaggcttgtacccagcacggccactgcaggaccagcccagcatgggcatttcctgtgattcaaggttgccacatttctccaaagtgagcccacagagggccctccaccggcagtccctgtgttacgagtgccttccctaaccagctgtgcagatacggctacgtcaccaactccaaggtgaagtttgtcatggtggtagattcctccaacacagcccttcgagacaacgaaattcgcagcgtaagtcagggagttagagggccacgcccgagtgggtgttttgtttttcctttttgactttgttttgaaatgctgagaaactaaaaatctggcagtggctgtgtgtatgtggcaaggtcatggtttgctgggtctttttcagatgttccggaagctacacaactcctacacagacgtgatgtgcaaccccttctacaacccgggggaccgcatccagtccaggtgggccctactttctgtgtcttgccaccttctttctgtaggacatgccttgccattttggttgccaaaatgcaaccatttggaaaataagggaggaaagatctttttaagctatgagcaccatccccctagggcagaggttttaaagccacaaagccccgtttctccacaccaactcttacacagatctccagcgcataaagtggatagagtgtgtgtggtgtggggagtagagcttgcccatttggcttcccaggtgtgcccagtgggtacctggggcacctgcaggactcagggccaagcacatgggcagtggctttcagggatcacacgtccttttgtagctacctgatcttttatgttgaatttggaacagtcaggaacctggtttgcaggtgtcttccgaatagtccacaaagtaaacagatttaacttttgaacatcatgagggaaatgtggggtccatgcccacattccagacttgctttcagtgagtccccagttccaagacataattccctgtggttggcagggaagaggacgctgcagtgatccaaggcaggcccctccctccaccaggacactgtcttggggccatcctggtcccagatgggagcaggcaggcgaatgtccacagtcttgcctcctgggctgcacagggccatccttgccacaccaccgctctgcctgcccatgctgctccctcctccaccccttcctggggccttgggaggctgcacagggaacttggaggcagcagatgggttctcagtgcccggtggggtgggactcctgtcctggcctctcagcggagttcacatttctggaccctggagaaggtcccgagcatcctgtggatggagccatgctgcccggcccgtctctgagcagaggggtggagggcctggctctcctctgagtgggtctgtttctcttagcagggcctttgataacatggtgacgtcgatgatgatacaggtgtgctgagtgagctgtgctgccagccatcgcagaggagcccgcgcacgactgtggtggggccgtcggtctgttctggttgcctcttcctgaatgggacgcctggggctttcagggcaggcagctgtgcatgttctctcaactaaaggtcttgtgagaggagatttggctttttccttccgtgtcagccaaggatttaattaagaagaattcaactaaggacttttctggggtgtgggcagaggtttgggatcagatggcgcaggtagcctgtcctcagttgtccaaaggggcagaggcaggggtgcctggagccaagagttcctgagcctgcaggacctgtgaccatgtgggtcacccactggctgaacaggtgggctggtctggagggggtggcctcctgagcccagaaccagcctaggatctaggggcacaaggggagccggcgtggcttcccacaggggagggccctcctctttctggacttggcctccattctttgcatctggctcaatgtctggattccgcccggccttaaaaggagcccttgtgaaacctgggaagcctcgtggccccgcggcgttggctcagctgcagccctggtcctaaaccttggagcgcagacttgaggcaccccctcctgcctgttggtgctgagggggttgggtgctgtgtcacttgatgacgtggctgactaccacccagggcagcgccgagcccatagtgcgtcagtccgccggcgtccttggggtccagcggtcaaggctcagcccgctgaggggacccccccggagttggttccagcactggtccaggactggagagtttctcaaggaccttgaggaccccagaagcccttgcagcaggaaaggctgtaagggggggtcagcctagggcaggacctagggaggggaactttcttgatacatatttgccttttcatcccatctagcaagcacagtgttaattttagaaattatagaagaaaaaatcagcaaggagtgtgggaaaactgcatgccccaggcctcccccgccccagggtgaattggaagccctggaatgggccgaggcacaccaggcagctgatctgggtgcatgtgggccacagaccactctcacaaggttaaatctttaacaagagcctcatgtttgttaggagaaggtgggaccccagcccaagcacttccccattgcagcctggcatgaaatctttgccttttagtggggatcactcctgcccgagtcctggctgtggtggggactctgcaagttgctaacccagcgtccattctctttcctccgtactaacagaaccccggtgcctctgcccagttccaatagcgggcagacgagagccatgtcctgggctcccttgcagcccggggtgtgcagctgtggcgtggaggtgggtggtgctgggagagacttgcagggaagctcctgtgaaggggactcagctgccacatgcaggacccttcccctttgccttcttcctgcctggaacatggatgtgatggctggtgctgggacagctgtcctgagagcgtgaggaaagggtcacaccctaaggacagtggagcagaacacaggaaggaccctgggccttcgtgacgcagaacgcgggaaggaccctgggcctttgctgacataccagccccagactacttaaattcagctttttttttaatgtgagaaaataaatgcacccctctctggtttaagccactgatttttgggttttctgttaggtgcagccagacccacctgtaagtactttttacatgagggcgttttcacaagccttgttaggcagcatccccattttaagcccaaggaaacagtgcctgatgaggcgctgttagtcgtggaatgctggagtcaggtgtgtgcacataagcagccttgggcttctgcggccgtgcatgcagccagggagcccgactggctgtgctttcagaggggacagtcgtcaaagtgcccagga

SEQ ID NO: 9354 - DNA, 5813 bp, Homo sapiens
gcctggcgccgagcctcccaagatggcggtgtgcatcgcggtgattgccaaggaggtgcgtacgcgcggcgtggggcgtccgggctcgcaccatcctcggctctccgctttctttctacttcttccctgggcttagaaggcaccttaggaaatgggacctggaggaggccttcgccgagctccagcggtcaggggcttcgcggtggacgagccgccaggcagaccctgactgagaccccagttccgcgctcgcccgtcccgctgctgaacgcacccctcggcgcagcaggtctcctccccgccaggacccaccagaaacctaggtggtcccgggcactacctccgtcctccgtcctcagcaggttctgcccgttctcccgtccagcgctggttccccgcggacggcggccccggccctcctgccagtctccccggagccgagttaaaaacaaatcggatcctgtcacgcctctgcctgagacctctgcagtggcttctcgttgccttaggatgctgtctgaataacctgctctgggatcctttccccccataacccttggcactctccgctccaaccaaacaattctgcagctccctggacatgctctgccctctcacctgtgggcctttgcacgcggaacacctctccccagctcccatcctctttactggcccacatacatttcaactggaaagcattttctgaaggctaagactgagctgggtggctgcccacacgctcctgctgcacggagccttcatttcctagccagggtctcccgagaccagactcgagaccgctccctgctgggcggtggctgctgctaagctgctcatgggcttccctcttggccaagatgatcatttgcttgtttgtgggtttattgactaggtatcactccccacgagggtagcgaggactcttgttcactgtatttgtgcaggacccagtgctgaacacacacagggtaaatggtggtgtgtgaaagaccgagaaagaagctgttaattctgggcttccaatggtcagaaatgcagagatgaagggaatttgagctgagtcttgaagggtttagtaaaagggtcactgtcaaggtgaagaaaagccagtattgagggtgctgtatttgggtgagccatgcagagttagaggtgggctgaggcagagtggcctccaggagaaggtgagaggcgtgcccaggtgccaggcttgatcggcaggctgtgctcaggcccatttttctgattcattttttcttttccgcccaccctactgctgctgctttgcaaacaacacataaatctccttaggttagctgggatcccctgaaggcagtgcccactgcggcatagagaatgaagcggtgggccttagagcatgggaatgcgttccccgggtggctgcaggtcacggctctgcagcatagttcagagctggtgtgcgctgggtggagtcttgtcctttcagtcgccgtcatcctttcttgcagaattaccccctctacattcgcagcacccctacggagaacgagctgaagttccactacatggtgcacacatctctggacgtggtggatgagaagatctccgcaatggggaaggccctggtcgaccagagggagctgtacctgggcctgctctaccccacggaggactacaaggtgtatctttcagggcagggtgtgtgtcagggaggacctacagttgcaagatgtactttaggatcagataacttgaaaccttttagaagaaaaagaggtgagagtttttagccagccagggaattagggtagcttgaggtgaatgaaggcctgtaactcttctctttcattggaagagccatttgggaaaagcagggctagaattccccgtagaatgttttggtttgcacgtgtccgttgtctggtttgcagaggaagtgggacacttctgctttgtacctgcaaggatttctttctgtgcttttcagggggagccaccacctttgagcaggggataatagttacatttatttcattaggccttgcctcttatgtcactagacactcgtctagtcccttgggacaaatcacttgaggccatggaattcaaagaccttcccaaaagtcatcatgtagcctgtccatggtgacatttgctagtagccactattttacaaaataatgtggcctctagagaggggatccgccttgttcacgaagcctctggttttgcagttaactttccgggccaggcattgattcatgaagagggtgaggtgttccagacagacagactcggagtctaggtggttcggctcctggagtgtgaactgggtaaggcttggctgcctgctcttcgcttctcctgcaaacaccagacgtcgccctagcaaagtatttaggcttgtacccagcacggccactgcaggaccagcccagcatgggcatttcctgtgattcaaggttgccacatttctccaaagtgagggcccacagagggccctccaccggcagtccctgtgttacgagtgccttccctaaccagctgtgcagatacggctacgtcaccaactccaaggtgaagtttgtcatggtggtagattcctccaacacagcccttcgagacaacgaaattcgcagcgtaagtcagggagttagagggccacgcccgagtgggtgttttgtttttcctttttgactttgttttgaaatgctgagaaactaaaaatctggcagtggctgtgtgtatgtggcaaggtcatggtttgctgggtctttttcagatgttccggaagctacacaactcctacacagacgtgatgtgcaaccccttctacaacccgggggaccgcatccagtccaggtgggccctactttctgtgtcttgccaccttctttctgtaggacatgccttgccattttggttgccaaaatgcaaccatttggaaaataagggaggaaagatctttttaagctatgagcaccatccccctagggcagaggttttaaagccacaaagccccgtttctccacaccaactcttacacagatctccagcgcataaagtggatagagtgtgtgtggtgtggggagtagagcttgcccatttggcttcccaggtgtgcccagtgggtacctggggcacctgcaggactcagggccaagcacatgggcagtggctttcagggatcacacgtccttttgtagctacctgatcttttatgttgaatttggaacagtcaggaacctggtttgcaggtgtcttccgaatagtccacaaagtaaacagatttaacttttgaacatcatgagggaaatgtggggtccatgcccacattccagacttgctttcagtgagtccccagttccaagacataattccctgtggttggcagggaaaaggacgctgcaatgatccaaggcaggcccctccctccaccaggacactgtcttggggccatcctggtcccagatgggagcaggcaggcgaatgtccacagtcttgcttcctgggctgcacagggccatccttggcacacccccgctctgcctgcccatgttgctccctcctccaccccttcctggggccttgggaggctgcacagggaacttggaggcagcagatgggttctcagtgcccggtggggtgggactcctgtcctggcctctcagcggagttcacatttctggaccctggagaaggtcccgagcatcctgtggatggagccatgctgcccggcccgtctctgagcagaggggtggagggcctggctctcctctgagtgggtctgtttctcttagcagggcctttgataacatggtgacgtcgatgatgatacaggtgtgctgagtgagctgtgctgccagccatcgcagaggagcccgcgcacgactgtggtggggccgtcggtctgttctggttgcctcttcctgaatgggacgcctggggctttcagggcaggcagctgtgcatgttctctcaactaaaggtcttgtgagaggagatttggctttttccttccgtgtcagccaaggatttaattaagaagaattcaactaaggacttttctggggtgtgggcagaggtttgggatcagatggcgcaggtagcctgtcctcagttgtcccaaaggggcagaggcaggggtgcctggagccaagagttcctgagcctgcaggacctgtgaccatgtgggtcacccactggctgaacaggtgggctggtctggagggggtggcctcctgagcccagaaccagcctaggatctaggggcacaaggggagccggcgtggcttcccacaggggagggccctcctctttctggacttggcctccattctttgcatctggctcaatgtctggattccgcccggccttaaaaggagcccttgtgaaacctgggaagcctcgtggccccgcggcgttggctcagctgcagccctggtcctaaaccttggagcgcagacttgaggcaccccctcctgcctgttggtgctgagggggttgggtgctgtgtcacttgatgacgtggctgactaccacccagggcagcggccgagcccatagtggcgtcagtgccgccggcgtccttggggtccagcggtcaaggctcagcccgctgaggggacccccccggagttggttccagcactggtccaggactggagagtttctcaaggaccttgaggaccccagaagcccttgcagcaggaaaggctgtaagggggggtcagcctagggcaggacctagggaggggaactttcttgatacatatttgccttttcatcccatctagcaagcacagtgttaattttagaaattatagaagaaaaaatcagcaaggagtgtgggaaaactgcatgccccaggcctcccccgccccagggtgaattggaagccctggaatgggccgaggcacaccaggcagctgatctgggtgcctgtgggccacagacccactttacaagggttaaattttaacaagagccctatgtttgttaggagaaggtgggaccccagcccaagcacttccccattgcagcctggcatgaaatctttgccttttagtggggatcactcctgcccgagtcctggctgtggtggggactctgcaagttgctaacccagcgtccattctctttcctccgtactaacagaaccccggtgcctctgcccagttccaatagcgggcagacgaaagccatgtcctgggctcccttgcagcccggggtgggcagctgtggcgtggaggtgggtggtgctgggagagacttgcagggaagctcctgtgaaggggactcagctgccacatgcaggacccttcccctttgccttcttcctgcctggaacatggatgtgatggctggtgctgggacagctgtcctgagagcgtgaggaaagggtcacaccctaaggacagtggagcagaacacaggaaggaccctgggcctttgctgacgcagaacgcgggaaggaccctgggcctttgctgacataccagccccagactacttaaattcagctttttttttaatgtgagaaaataaatgcacccctctctggtttaagccactgatttttgggttttctgttaggtgcagccagacccacctgtaagtactttttacatgagggcgttttcacaagccttgttaggcagcatccccattttaagcccaaggaaacagtgcctgatgaggcgctgttagtcgtggaatgctggagtcaggtgtgtgcacataagcagccttgggcttctgcggccgtgcatgcagccagggagcccgactggctgtgctttcagaggggacagtcgtcaaagtgcccagga

SEQ ID NO: 9355 - DNA, 542 bp, Homo sapiens
ctgactgagaccccagttccgcgctcgcccgtcccgctgctgaacgcacccctcggcgcacgaggtctcctccccgccagacccaccagaaacctaggtggtcccgggcactacctccgtcctccgtcctcagcaggttctgcccgttctcccgtccagcgctggttccccgcggacggcgccccggcctcctgccagtctccccggagccgagttaaaaacaaatcggatcctgtcacgcctctgcctgagacctctgcagtggcttctcgttgccttaggatgctgtctgaataacctgctctgggatcctttccccccataacccttggcactctccgctccaaccaaacaattctgcagctccctggacatgctctgccctctcacctgtgggcctttgcacgcggaacacctctccccagctcccatcctctttactggcccacatacatttcaactggaaagcattttctgaaggctaagactgagctgggtggctgcccacacgctcctgctgcacggagccttcatttcctagc

SEQ ID NO: 9356 - DNA, 9777 bp, Homo sapiens
attctgatgctcacagtaccacctcaagtgcctccccagctcaatctccttgttacagtaaccagtcagatgacggctcagatacagagatggcttctggttctaacagaacaccagttttttcctttttagatctcacttactggaaaaggtaaaagaaacaaagtatctctctaaccagcaaaccatcttaattatgggcagtatttttctacttccttagcaattaaatggcatttggcaaacagttggtaacacacgattgcagtggattaagcaggaattgagcagggaagtgggatttttgtatgttcttcctattaaaatttatttaaaataaaaatcacatcaaggtacctacattgcctattgctagataagtggagtagaaagacaatatgcagtggagagaatcagtaaaactaagagttggtccttcaaaaagacgtgaccaaaaatatactagagataaagtggatcaggaaaaggagataatacacataagcaattttaggaaagagaaaagagacttaggtatagataaagcagacatttaaaaaataataggatattatagacaacttgatgccaataaatttgaacatacaggtgaagcaggtacagtactagaaaaaagacatgttgctaaagctgtctcaagaaaaagtgaaaaacggagataatctcataataaattgattcaggccaggtgtgatggctcacacctgtaatcctagcattttgagaggccaaggtgaggggattgtttgagcctaggaggttaggtttgcagtaagctatttttgcaccattgcactccagcctggtgataaagcaagactctatttaaaaaaacaaacaaacaaacaaacaaaccacaataggcaagttgtactaaacatccaggaacagatgattggagcctatgcactggcttttccagactatggataaaatagggcataggccccaagcatttttaaggctgatataagtttgataccaaaacaaatatatcatcagccactagggttattctaggtatgtaagattggtttgaacatgagacgatcaactaatataatttaccacattgacagtttcttttttttttttttttttgagacggagttttgctcttgttgccaagctatagtgcaatggctcgatctctgctcactgcagcctctgcctcccgggttcagtgattctcctgccttagcctcccgagtagctgggattacaggtgcatggccaccacacctggctaaatttttgtatttttagtagaaaaggggtttcaccatgttggtcaggctggtctcgaactcctgaccttaggtgatccacctgcctcagcctcccaaagtgttgggattataggcgtgagccaccgtgcccagcccacattgatagtttctaaaggaaggtgttgtcttcttagtggtgcaaagaaggagtttgacaaatttgaacattcctttaaggtttaaaaaaaaaaaagttttagcaaaataggaatagaaggaaacttttttacttagacaacaggtatcttacaaaaaggacaaaagtacataatacataattgtgataaaatgaaagcattttctctatgatcaggaacaaatcaagagtgttgactatcaccatttctattcagcattatacagaaggttctaaccaatacaatattggtagtagtgtagtagtaaacactttagaacagtgcctagtgcatagtgtaagtactttaaagtactttaaaccactttgtttgcatttatttaatctttttttttttttttttgagacagagtttcactctgtagcccagactggagtgcagtggtgttatcttggctcactgcaatgtccgcctcctgggctcaggcaattctcccacctcagccgcccaaatagctgggtctacaggcacgcaccaccatgcctggctaatttttgtattttagtagagatggggtttcgccatattggccaggctggtcttgaacttctagcttcaagtgatctgcctgccttgacctcccaaagtgctgggattacaggtgtgagttactgcacctggccttatttagtctttatgacaattctgtgaagcattatgtgaaaacacaggtacaaagaggaagtactttgtttaaggttacatagtaagtagagcaggatttaaatctaggcagtttggcattagaatgatacattttatcatagtgttaggaaatataaaataatgtagtaaaatatcaaaagccctttggaggagttatgtaaaaatcatacaatattgtcgaataacatttatttatgtgtgtgtgtgtgtgtgtgtgtgtgtgtgtgtgtgtatgtatatatataaatatatgtctatgttgagagagagagactcactctgtcacttaggctggagtgcagtggtgtgatcttggctcactgcaacctccgcctcctgggttcaagcgattttcctgtctcagcctccggagtagctgggattacaggcatgcaccaccacaccctgctaatttttgtatttttagtagagattgggtttcaccatgctggccaggctgatagtgaactcctgacctcaggtgatctgctcgccttggcctcccaaagtgctgggattacaggcatgaaccactgcgcccggccgttgaataacatttaaagacacctaaataaattgagaggtatagcacattcatagatattattaaactgactgttagggagatgatcactttgtagattcagggtaattgcagtcaaaatcccaacatatttatggaactttacaagctaatttataatttatatagaaaagcaaagggcccaaaataggcatcttcagaagaaaaagaaagatgtggataaacttgccctaacagaaatcaagacatattatgaagccatggtaattaatgtgttttgggactaggaatagaaaaataaaccaatggaatagtatagagagcctggaaacaaggccacatatgtatatagcacttgttatgtgatacatgatgtgggggtgattggtgggcgaaaatggtctgttcaataagtgttgctaggatattaagaacaacatggttattcatgtggaaaaattgggcttgggttccctacctcacaccatagacaaacaccaattacagatgcattaaagtagaaaatagattatgacttttgagtgggaaaggatttttttatgacagagtacttaagcatttaaaaaaacctccaggtttaattacattataattatgaacttaaattcatcaaataataccataaagaaaatgaaatgatatccagcacatatatctgacaaaggattagtatctggaatatacagacaactcctacaatggaagaaaaagataaaccaacagaaaaatggacacacttagaaaggaatcatgaaataactcattaaatgataatgtgttcaaactttttgaaaatcaaggaaatacaaagtaaaatttcaatgagataccattttatactcattagattggtgaaaaaactaaaataaagtctattaccaaatgttggggagaaggtatggaatgatgagaacactgtcagttataggtgtaaatagttataaccatgtagataaatggccgtttttgagtaaagttgaagacgttcccattcctatatgccagcaatataaactagtaaaaacctttaagatgtgtccactgatttatacattaaaataagagtagataaataaaactgtgttatatattcacagggtagaatattatacatgttaaaatgaaataaagctctataacaatatgtatggatctcaacgttgactaaaacattgcagaatacattgtgattctgtgtgtgtgtgtgtgtgtgtgtgtgtgtgtgtgtgtaatggataactgtgcagtatgattagagatgccaacatacggtgaaaccatgaagtataaagaaaagggagtgataaacctaaaattaagtggggagaggatgagatgaggtaggatgggactgtggaggggcctgcagggggcttcataggaaatgatcttttttcccttagagtatgtggtctgtaggcattctcattgtgttgtcatttttgatgcctttgctaacacacacccttttttgtttttttttgagacagagttttgctctgtctcccaggctagagtgcagtggtgtgatttcggctcactgcaacctccacttcctgggttcaagtgattctactgcctcagtctcccaagtagctgggactacaggcacgtgccaccacgcctggctaatttttgcatttttagtagagatggggtttcgccatgttggccaggctgatctcgaactcctgacctcaagttatctgcccacctcagcctcccaaactgctgggattacaggtgtaagccaccacacccggcccacacatgtatttttatctactcagtatttaattaaaaattaccactcaagcacttaggagttgataaagaaaaaaaattaaatatatataaaaaattgctagctgcatcagcctgtttatggtggctgatttttttttcaagagttggtgattttggaggaaatagttaacaacatcaggggcagcctttgaaactgactgctgtctttcaaaatgccgtcttcctcaatatttgagaagattccagtgtggcctttaaggcaactgggtaattccccttctctagctaattggggttactctaggagccctttcacttggaatgtgcaagattgtagaagcacaactctttggttatattggactagttataatagtgagtagatttcttttgtattcctatttttcttccttattaatgtatcttgttctccattttttcttttagacagaagatatgttgtgggatcatctataaaggccgttttggggaagtcctcattgacacacatctcttcaagccttgctgcagcaataagaaagcagctgctgagaagccagaggagcaggggccagagcctctgcccatctccactcaggagtggtgactgaggtttttatgtagaaggggaacaaaaaaaaaaatatctgaattttgaaaaaccacaaagctacaaactgaccctcttttttttttgagacggagttttgctcttgttacccaggctggagtgcagtggcgtgatcttggctcactgcaacttccgtctcccgggttcaagtgattctcctgcctcagcctcccaagtagctgggtttataggtgcccgccaccagacccggctaattttttagttttagtagagacggggtttcaccacgttggccaggctggtcttaaatgaccctcttatttttaacttggatacctgctattctgccaaaagacaatttctagagtagttttgaatgggttgatttcccccactcccacaaactctgaagccagtgtctagcttactaaaaaaagagttgtatataatatttaagatgctgagtatttcataggaaagctgaatgctgctgtaaagtgctctttaagtcttttttttttttaatccccttctaatgaatgaaactaggggaatttcaggggacagagatgggatttgttgtatgataaactgtatgtagtttttagtctttctgttttgagaagcagtggttggggcatttttaagatggctggctactcttgttttccctcatgataataaatttgtcataactcagtaacatgaacttgcccctagaggtagttgttaataattttgaaatattaaggtcttgccaagcttctgatgattcacacctgtactactgattattaagcaggacagactgagctttctgttgcaaataccttggaggagaaagtaatttctaaatatacagagaggtaacttgactatatatgttgcatcctgtgcctcccttcatattaatatttgataaagattttaatttatgtaaaacttctaaagcagaatcaaagctcctcttggggaaatggcaagtctttaggataggcaagaccctgtatgaatagtaccaaagcattaccgcatggtagagaacacactcgattaaaaatgttaagctatctgaaaaataaaatgtgcaagtcttcaggatggcacaaaacaaaggttaatgcttcttggggcacatttcttagagggcttgctgagtgtgtaaatataatcgacttttgtttgtgttacatgacttctgtgacttcattgaaaatctgcacaattcagtttcagctctggattacttcagttgacctttgtgaaggtttttatctgtgtagaatgggtgtttgacttgttttagcctattaaatttttattttctttcactctgtattaaaagtaaaacttactaaaagaaaagaggtttgtgttcacattaaatggttttggtttggcttcttttagtcaggctttctgaacattgagatatcctgaacttagagctcttcaatcctaagattttcatgaaaagcctctcacttgaacccaaaccagagtactcttactgcctcttttctaaatgttcaggaaaagcattgccagttcagtcttttcaaaatgagggagaaacatttgcctgccttgtaataacaagactcagtgcttattttttaaactgcattttaaaaattggatagtataataacaataaggagtaagccaccttttataggcaccctgtagttttatagttcttaatctaaacattttatatttccttcttttggaaaaaacctacatgctacaagccaccatatgcacagactatacagtgagttgagttggctctcccacagtctttgaggtgaattacaaaagtccagccattatcatcctcctgagttatttgaaatgattttttttgtacattttggctgcagtattggtggtagaatatactataatatggatcatctctacttctgtatttatttatttattactagacctcaaccacagtcttctttttccccttccacctctctttgcctgtaggatgtactgtatgtagtcatgcactttgtattaatatattagaaatctacagatctgttttgtactttttatactgttggatacttataatcaaaacttttactagggtattgaataaatctagtcttactagaaaataaaaggagctgttttgtggctttgtttgacaggtcttcagtaagaataatgtttttggctttcacatatactcagtttaagtgcttagtattaataacaagccatgaagggaataaattcctcttcactgagacatagactttggaataaaagacattttaactgatgtgcacaattattaatctagtggataagatggatttaaaaggaagaacaaaatgttcccagtactttttactgtctgtggttttattactatctatgggcatagtgggaagcatcattgagactttagggaaactataaaagttggaagggtggtggcatcaggggttggatgctggttctcaagttcctagctctgccccttgttagtcatttgagttaaataattaatgggaatatctacttcacaggattatgaggaatcctaagaggtgtaatccatatcaaacttttagaaaccagttgttttattacctgggaaaggtaataaagggccagactttttatactactgttagtatttaaatttgggatagtctggatgccacctaatacagttactatgaaattaacaaggtaactaaggaagttgatagtaccagtattatctattgctatgtcctaaattaccatagatttagtggcttaaaacaaatgcgtctcagtttctgtctgagcatggtttagataggtcctttagaaagctcatggtctcatctgcattctcacctggtgatttgggaagaactcatttcagcctcactcggctggcagaattcagttcttgccactgcaggactgagtgtccagacctctcactggttgtcagctggaggcccccgcttagttccttgccagctgggtgctccctgcatggcctggctgctgactggaccactgacatgattactgtcactaccagcaagtgtcgagagccaagctgccagcaagaggggtcttttcaggtcctgcccatatccaaggggagaggctcatacgaaggattggataccaagaggtgcgggtggggctaatgggaaggcacctagagtttgtcacagctttttttttttttaactgaatctctttaaattggtcgtctcgccctacaatgcaaatgctttgtgtagcaagtaaaaagaaaaatggctctcacaatatgaaaaaccctggctgggcactgtggcttatataaacctgtaatcccagcactttgggaggcccaggcgggtggatcccttgaggtcaggagttcaagtccaaccaggccaacatggtgaaacaccgtctctactaaaaataaaaaaattagccaggcatggtggcatgcgcctgtggtcccagccactcgagagattgaggcaggagaattgcttgaacctgggaggtagaggttgcagtgagctgagttgggccactgcactccagtctgggtgacagagtaagactccacctccaaagaaaaaaaagaaaagacctactgttgggccagacacttttaaacattgtttaagtaaccctgcaaagtaaaaaaaaatctatttaccggtaagaggaggtgccaggaggtcatgtaacttgaatgaaagaatctgcttttcttatttgaaagcctttgttctctaaactgtctcctgtctgctgcagtaatgctgtcctaaccctcattggaaactattccctgggtctcttcttgcctcccttctttctgaaggctgaaatgaggggcaagtttaacttttgcagatacgttgatctttaacttaaatcaaattctgttttttaattttgataatgttcaaagtacctattatctgtctttttgtggagaaaactgctggaggtttagtgaaacgatatcttaaaacaattcatcaaggtggctgctctgcagtgaacaatagaaggtaccctgggagctcttctattcagcgtccctagaacagtttcctagtgccccagatttagcattgtagtggccaggcaatcatttttgtgtgatgttcagtgaactcggaagggaggagaaagccaaattagatcaaagatagataatttcacaggctcatgttctcaaagaaagggatctgcgggttctgtctaacaatttctcaagctgtggagtttggttactcattgtagtcatgagaatgctttaggtatcaaataccttacaccctggttagaaactgcttgttattgtatgttgactagggggtcttagacaaacttagttgcaagctttagcatgaaagaacttagtcattcagtttagagagagacaaaagatttttttgcgaaagcctgctctttatctgaaaggggaaaatgatttattctgttttacagcatttattctctaaacttctatggcttatattagcttaactgtgtctccaggtattggcttttttttttttttttttttcagacagagtcttgctcttgttacccaggctggagtgcaatggcgtgatctcggctcactgcaacctccgcctcctgggttcaagcgatcctcctgcctcagcctcccgagtagctgggattacaggcgcctgccaccacgcccag

SEQ ID NO: 9357 - DNA, 8672 bp, Homo sapiens
attctgatgctcacagtaccacctcaagtgcctccccagctcaatctccttgttacagtaaccagtcagatgacggctcagatacagagatggcttctggttctaacagaacaccagttttttcctttttagatctcacttactggaaaaggtaaaagaaacaaagtatctctctaaccagcaaaccatcttaattatgggcagtatttttctacttccttagcaattaaatggcatttggcaaacagttggtaacacacgattgcagtggattaagcaggaattgagcagggaagtgggatttttgtatgttcttcctattaaaatttatttaaaataaaaatcacatcaaggtacctacattgcctattgctagataagtggagtagaaagacaatatgcagtggagagaatcagtaaaactaagagttggtccttcaaaaagacgtgaccaaaaatatactagagataaagtggatcaggaaaaggagataatacacataagcaattttaggaaagagaaaagagacttaggtatagataaagcagacatttaaaaaataataggatattatagacaacttgatgccaataaatttgaacatacaggtgaagcaggtacagtactagaaaaaagacatgttgctaaagctgtctcaagaaaaagtgaaaaacggagataatctcataataaattgattcaggccaggtgtgatggctcacacctgtaatcctagcattttgagaggccaaggtgaggggattgtttgagcctaggaggttaggtttgcagtaagctatttttgcaccattgcactccagcctggtgataaagcaagactctatttaaaaaaacaaacaaacaaacaaacaaaccacaataggcaagttgtactaaacatccaggaacagatgattggagcctatgcactggcttttccagactatggataaaatagggcataggccccaagcatttttaaggctgatataagtttgataccaaaacaaatatatcatcagccactagggttattctaggtatgtaagattggtttgaacatgagacgatcaactaatataatttaccacattgacagtttcttttttttttttttttttgagacggagttttgctcttgttgccaagctatagtgcaatggctcgatctctgctcactgcagcctctgcctcccgggttcagtgattctcctgccttagcctcccgagtagctgggattacaggtgcatggccaccacacctggctaaatttttgtatttttagtagaaaaggggtttcaccatgttggtcaggctggtctcgaactcctgaccttaggtgatccacctgcctcagcctcccaaagtgttgggattataggcgtgagccaccgtgcccagcccacattgatagtttctaaaggaaggtgttgtcttcttagtggtgcaaagaaggagtttgacaaatttgaacattcctttaaggtttaaaaaaaaaaaagttttagcaaaataggaatagaaggaaacttttttacttagacaacaggtatcttacaaaaaggacaaaagtacataatacataattgtgataaaatgaaagcattttctctatgatcaggaacaaatcaagagtgttgactatcaccatttctattcagcattatacagaaggttctaaccaatacaatattggtagtagtgtagtagtaaacactttagaaaagtgcctagtgcatagtgtaagtactttaaagtactttaaaccactttgtttgcatttatttaatctttttttttttttttttgagacagagtttcactctgtagcccagactggagtgcagtggtgttatcttggctcactgcaatgtccgcctcctgggctcaggcaattctcccacctcagccgcccaaatagctgggtctacaggcacgcaccaccatgcctggctaatttttgtatttagttagagatggggtttcgccatattggccaggctggtcttgaacttctagcttcaagtgatctgcctgccttgacctcccaaagtgctgggattacaggtgtgagttactgcacctggccttatttagtctttatgacaattctgtgaagcattatgtgaaaacacaggtacaaagaggaagtactttgtttaaggttacatagtaagtagagcaggatttaaatctaggcagtttggcattagaatgatacattttatcatagtgttaggaaatataaaataatgtagtaaaatatcaaaagccctttggaggagttatgtaaaaatcatacaatattgtcgaataacatttatttatgtgtgtgtgtgtgtgtgtgtgtgtgtgtgtgtgtgtatgtatatatataaatatatgtctatgttgagagagagagactcactctgtcacttaggctggagtgcagtggtgtgatcttggctcactgcaacctccgcctcctgggttcaagcgattttcctgtctcagcctccggagtagctgggattacaggcatgcaccaccacaccctgctaatttttgtatttttagtagagattgggtttcaccatgctggccaggctgatagtgaactcctgacctcaggtgatctgctcgccttggcctcccaaagtgctgggattacaggcatgaaccactgcgcccggccgttgaataacatttaaagacacctaaataaattgagaggtatagcacattcatagatattattaaactgactgttagggagatgatcactttgtagattcagggtaattgcagtcaaaatcccaacatatttatggaactttacaagctaatttataatttatatagaaaagcaaagggcccaaaataggcatcttcagaagaaaaagaaagatgtggataaacttgccctaacagaaatcaagacatattatgaagccatggtaattaatgtgttttgggactaggaatagaaaaataaaccaatggaatagtatagagagcctggaaacaaggccacatatgtatatagcacttgttatgtgatacatgatgtgggggtgattggtgggcgaaaatggtctgttcaataagtgttgctaggatattaagaacaacatggttattcatgtggaaaaattgggcttgggttccctacctcacaccatagacaaacaccaattacagatgcattaaagtagaaaatagattatgacttttgagtgggaaaggatttttttatgacagagtacttaagcatttaaaaaaacctccaggtttaattacattataattatgaacttaaattcatcaaataataccataaagaaaatgaaatgatatccagcacatatatctgacaaaggattagtatctggaatatacagacaactcctacaatggaagaaaaagataaaccaacagaaaaatggacacacttagaaaggaatcatgaaataactcattaaatgataatgtgttcaaactttttgaaaatcaaggaaatacaaagtaaaatttcaatgagataccattttatactcattagattggtgaaaaaactaaaataaagtctattaccaaatgttggggagaaggtatggaatgatgagaacactgtcagttataggtgtaaatagttataaccatgtagataaatggccgtttttgagtaaagttgaagacgttcccattcctatatgccagcaatataaactagtaaaaacctttaagatgtgtccactgatttatacattaaaataagagtagataaataaaactgtgttatatattcacagggtagaatattatacatgttaaaatgaaataaagctctataacaatatgtatggatctcaacgttgactaaaacattgcagaatacattgtgattctgtgtgtgtgtgtgtgtgtgtgtgtgtgtgtgtgtgtgtaatggataactgtgcagtatgattagagatgccaacatacggtgaaaccatgaagtataaagaaaagggagtgataaacctaaaattaagtggggagaggatgagatgaggtaggatgggactgtggaggggcctgcagggggcttcataggaaatgatcttttttcccttagagtatgtggtctgtaggcattctcattgtgttgtcatttttgatgcctttgctaacacacacccttttttgtttttttttgagacagagttttgctctgtctcccaggctagagtgcagtggtgtgatttcggctcactgcaacctccacttcctgggttcaagtgattctactgcctcagtctcccaagtagctgggactacaggcacgtgccaccacgcctggctaatttttgcatttttagtagagatggggtttcgccatgttggccaggctgatctcgaactcctgacctcaagttatctgcccacctcagcctcccaaactgctgggattacaggtgtaagccaccacacccggcccacacatgtatttttatctactcagtatttaattaaaaattaccactcaagcacttaggagttgataaagaaaaaaaattaaatatatataaaaaattgctagctgcatcagcctgtttatggtggctgatttttttttcaagagttggtgattttggaggaaatagttaacaacatcaggggcagcctttgaaactgactgctgtctttcaaaatgccgtcttcctcaatatttgagaagattccagtgtggcctttaaggcaactgggtaattccccttctctagctaattggggttactctaggagccctttcacttggaatgtgcaagattgtagaagcacaactctttggttatattggactagttataatagtgagtagatttcttttgtattcctatttttcttccttattaatgtatcttgttctccattttttcttttagacagaagatatgttgtgggatcatctataaaggccgttttggggaagtcctcattgacacacatctcttcaagccttgctgcagcaataagaaagcagctgctgagaagccagaggagcaggggccagagcctctgcccatctccactcaggagtggtgactgaggtttttatgtagaaggggaacaaaaaaaaaaatatctgaattttgaaaaaccacaaagctacaaactgaccctcttttttttttgagacggagttttgctcttgttacccaggctggagtgcagtggcgtgatcttggctcactgcaacttccgtctcccgggttcaagtgattctcctgcctcagcctcccaagtagctgggtttataggtgcccgccaccagacccggctaattttttagttttagtagagacggggtttcaccacgttggccaggctggtcttaaatgaccctcttatttttaacttggatacctgctattctgccaaaagacaatttctagagtagttttgaatgggttgatttcccccactcccacaaactctgaagccagtgtctagcttactaaaaaaagagttgtatataatatttaagatgctgagtatttcataggaaagctgaatgctgctgtaaagtgctctttaagtcttttttttttttaatccccttctaatgaatgaaactaggggaatttcaggggacagagatgggatttgttgtatgataaactgtatgtagtttttagtctttctgttttgagaagcagtggttggggcatttttaagatggctggctactcttgttttccctcatgataataaatttgtcataactcagtaacatgaacttgcccctagaggtagttgttaataattttgaaatattaaggtcttgccaagcttctgatgattcacacctgtactactgattattaagcaggacagactgagctttctgttgcaaataccttggaggagaaagtaatttctaaatatacagagaggtaacttgactatatatgttgcatcctgtgcctcccttcatattaatatttgataaagattttaatttatgtaaaacttctaaagcagaatcaaagctcctcttggggaaatggcaagtctttaggataggcaagaccctgtatgaatagtaccaaagcattaccgcatggtagagaacacactcgattaaaaatgttaagctatctgaaaaataaaatgtgcaagtcttcaggatggcacaaaacaaaggttaatgcttcttggggcacatttcttagagggcttgctgagtgtgtaaatataatcgacttttgtttgtgttacatgacttctgtgacttcattgaaaatctgcacaattcagtttcagctctggattacttcagttgacctttgtgaaggtttttatctgtgtagaatgggtgtttgacttgttttagcctattaaatttttattttctttcactctgtattaaaagtaaaacttactaaaagaaaagaggtttgtgttcacattaaatggttttggtttggcttcttttagtcaggctttctgaacattgagatatcctgaacttagagctcttcaatcctaagattttcatgaaaagcctctcacttgaacccaaaccagagtactcttactgcctcttttctaaatgttcaggaaaagcattgccagttcagtcttttcaaaatgagggagaaacatttgcctgccttgtaataacaagactcagtgcttattttttaaactgcattttaaaaattggatagtataataacaataaggagtaagccaccttttataggcaccctgtagttttatagttcttaatctaaacattttatatttccttcttttggaaaaaacctacatgctacaagccaccatatgcacagactatacagtgagttgagttggctctcccacagtctttgaggtgaattacaaaagtccagccattatcatcctcctgagttatttgaaatgattttttttgtacattttggctgcagtattggtggtagaatatactataatatggatcatctctacttctgtatttatttatttattactagacctcaaccacagtcttctttttccccttccacctctctttgcctgtaggatgtactgtatgtagtcatgcactttgtattaatatattagaaatctacagatctgttttgtactttttatactgttggatacttataatcaaaacttttactagggtattgaataaatctagtcttactagaaaataaaaggagctgttttgtggctttgtttgacaggtcttcagtaagaataatgtttttggctttcacatatactcagtttaagtgcttagtattaataacaagccatgaagggaataaattcctcttcactgagacatagactttggaataaaagacattttaactgatgtgcacaattattaatctagtggataagatggatttaaaaggaagaacaaaatgttcccagtactttttactgtctgtggttttattactatctatgggcatagtgggaagcatcattgagactttagggaaactataaaagttggaagggtggtggcatcaggggttggatgctggttctcaagttcctagctctgccccttgttagtcatttgagttaaataattaatgggaatatctacttcacaggattatgaggaatcctaagaggtgtaatccatatcaaacttttagaaaccagttgttttattacctgggaaaggtaataaagggccagactttttatactactgttagtatttaaatttgggatagtctggatgccacctaatacagttactatgaaattaacaaggtaactaaggaagttgatagtaccagtattatctattgctatgtcctaaattaccatagatttagtggcttaaaacaaatgcgtctcagtttctgtctgagcatggtttagataggtcctttagaaagctcatggtctcatctgcattctcacctggtgatttgggaagaactcatttcagcctcactcggctggcagaattcagttcttgccactgcaggactgagtgtccagacctctcactggttgtcagctggaggcccccgcttagttccttgccagctgggtgctccctgcatggcctggctgctgactggaccactgacatgattactgtcactaccagcaagtgtcgagagccaagctgccagcaagaggggtcttttcaggtcctgcccatatccaaggggagaggctcatacgaaggattggataccaagaggtgcgggtggggctaatgggaaggcacctagagtttgtcacagctttttttttttttaactgaatctctttaaattggtcgtctcgccctacaatgcaaatgctttgtgtagcaagtaaaaagaaaaatggctctcacaatatgaaaaaccctggctgggcactgtggcttatataaacctgtaatcccagcactttgggaggcccaggcgggtggatcccttgaggtcaggagttcaagtccaaccaggccaacatggtgaaacaccgtctctactaaaaataaaaaaattagccaggcatggtggcatgcgcctgtggtcccagccactcgagagattgaggcaggagaattgcttgaacctgggaggtagaggttgcagtgagctgagttgggccactgcactccagtctgggtgacagagtaagactccacctccaaagaaaaaa

SEQ ID NO: 9358 - DNA, 8670 bp, Homo sapiens
attctgatgctcacagtaccacctcaagtgcctccccagctcaatctccttgttacagtaaccagtcagatgacggctcagatacagagatggcttctggttctaacagaacaccagttttttcctttttagatctcacttactggaaaaggtaaaagaaacaaagtatctctctaaccagcaaaccatcttaattatgggcagtatttttctacttccttagcaattaaatggcatttggcaaacagttggtaacacacgattgcagtggattaagcaggaattgagcagggaagtgggatttttgtatgttcttcctattaaaatttatttaaaataaaaatcacatcaaggtacctacattgcctattgctagataagtggagtagaaagacaatatgcagtggagagaatcagtaaaactaagagttggtccttcaaaaagacgtgaccaaaaatatactagagataaagtggatcaggaaaaggagataatacacataagcaattttaggaaagagaaaagagacttaggtatagataaagcagacatttaaaaaataataggatattatagacaacttgatgccaataaatttgaacatacaggtgaagcaggtacagtactagaaaaaagacatgttgctaaagctgtctcaagaaaaagtgaaaaacggagataatctcataataaattgattcaggccaggtgtgatggctcacacctgtaatcctagcattttgagaggccaaggtgaggggattgtttgagcctaggaggttaggtttgcagtaagctatttttgcaccattgcactccagcctggtgataaagcaagactctatttaaaaaaacaaacaaacaaacaaacaaaccacaataggcaagttgtactaaacatccaggaacagatgattggagcctatgcactggcttttccagactatggataaaatagggcataggccccaagcatttttaaggctgatataagtttgataccaaaacaaatatatcatcagccactagggttattctaggtatgtaagattggtttgaacatgagacgatcaactaatataatttaccacattgacagtttcttttttttttttttttttgagacggagttttgctcttgttgccaagctatagtgcaatggctcgatctctgctcactgcagcctctgcctcccgggttcagtgattctcctgccttagcctcccgagtagctgggattacaggtgcatggccaccacacctggctaaatttttgtatttttagtagaaaaggggtttcaccatgttggtcaggctggtctcgaactcctgaccttaggtgatccacctgcctcagcctcccaaagtgttgggattataggcgtgagccaccgtgcccagcccacattgatagtttctaaaggaaggtgttgtcttcttagtggtgcaaagaaggagtttgacaaatttgaacattcctttaaggtttaaaaaaaaaaaagttttagcaaaataggaatagaaggaaacttttttacttagacaacaggtatcttacaaaaaggacaaaagtacataatacataattgtgataaaatgaaagcattttctctatgatcaggaacaaatcaagagtgttgactatcaccatttctattcagcattatacagaaggttctaaccaatacaatattggtagtagtgtagtagtaaacactttagaacagtgcctagtgcatagtgtaagtactttaaagtactttaaaccactttgtttgcatttatttaatctttttttttttttttttgagacagagtttcactctgtagcccagactggagtgcaggggtgttatcttggctcactgcaatgtccgcctcctgggctcaggcaattctcccacctcagccgcccaaatagctgggtctacaggcacgcaccaccatgcctggctaatttttgtattttagtagagatggggtttcgccatattggccaggctggtcttgaacttctagcttcaagtgatctgcctgccttgacctcccaaagtgctgggattacaggtgtgagttactgcacctggccttatttagtctttatgacaattctgtgaagcattatgtgaaaacacaggtacaaagaggaagtactttgtttaaggttacatagtaagtagagcaggatttaaatctaggcagtttggcattagaatgatacattttatcatagtgttaggaaatataaaataatgtagtaaaatatcaaaagccctttggaggagttatgtaaaaatcatacaatattgtcgaataacatttatttatgtgtgtgtgtgtgtgtgtgtgtgtgtgtgtgtgtgtatgtatatatataaatatatgtctatgttgagagagagagactcactctgtcacttaggctggagtgcagtggtgtgatcttggctcactgcaacctccgcctcctgggttcaagcgattttcctgtctcagcctccggagtagctgggattacaggcatgcaccaccacaccctgctaatttttgtatttttagtagagattgggtttcaccatgctggccaggctgatagtgaactcctgacctcaggtgatctgctcgccttggcctcccaaagtgctgggattacaggcatgaaccactgcgcccggccgttgaataacatttaaagacacctaaataaattgagaggtatagcacattcatagatattattaaactgactgttagggagatgatcactttgtagattcagggtaattgcagtcaaaatcccaacatatttatggaactttacaagctaatttataatttatatagaaaagcaaagggcccaaaataggcatcttcagaagaaaaagaaagatgtggataaacttgccctaacagaaatcaagacatattatgaagccatggtaattaatgtgttttgggactaggaatagaaaaataaaccaatggaatagtatagagagcctggaaacaaggccacatatgtatatagcacttgttatgtgatacatgatgtgggggtgattggtgggcgaaaatggtctgttcaataagtgttgctaggatattaagaacaacatggttattcatgtggaaaaattgggcttgggttccctacctcacaccatagacaaacaccaattacagatgcattaaagtagaaaatagattatgacttttgagtgggaaaggatttttttatgacagagtacttaagcatttaaaaaaacctccaggtttaattacattataattatgaacttaaattcatcaaataataccataaagaaaatccaatgatacccagcccatatatctcacaaagcattagtatctgcaacacacagccaactcctccaatggaagaaaaagataacccccagcaaaaatggccacacttagaaaggaatcatgaaataactcattaaatgataatgtgttcaaactttttgaaaatcaaggaaatacaaagtaaaatttcaatgagataccattttatactcattagattggtgaaaaaactaaaataaagtctattaccaaatgttggggagaaggtatggaatgatgagaacactgtcagttataggtgtaaatagttataaccatgtagataaatggccgtttttgagtaaagttgaagacgttcccattcctatatgccagcaatataaactagtaaaaacctttaagatgtgtccactgatttatacattaaaataagagtagataaataaaactgtgttatatattcacagggtagaatattatacatgttaaaatgaaataaagctctataacaatatgtatggatctcaacgttgactaaaacattgcagaatacattgtgattctgtgtgtgtgtgtgtgtgtgtgtgtgtgtgtgtgtgtaatggataactgtgcagtatgattagagatgccaacatacggtgaaaccatgaagtataaagaaaagggagtgataaacctaaaattaagtggggagaggatgagatgaggtaggatgggactgtggaggggcctgcagggggcttcataggaaatgatcttttttcccttagagtatgtggtctgtaggcattctcattgtgttgtcatttttgatgcctttgctaacacacacccttttttgtttttttttgagacagagttttgctctgtctcccaggctagagtgcagtggtgtgatttcggctcactgcaacctccacttcctgggttcaagtgattctactgcctcagtctcccaagtagctgggactacaggcacgtgccaccacgcctggctaatttttgcatttttagtagagatggggtttcgccatgttggccaggctgatctcgaactcctgacctcaagttatctgcccacctcagcctcccaaactgctgggattacaggtgtaagccaccacacccggcccacacatgtatttttatctactcagtatttaattaaaaattaccactcaagcacttaggagttgataaagaaaaaaaattaaatatatataaaaaattgctagctgcatcagcctgtttatggtggctgatttttttttcaagagttggtgattttggaggaaatagttaacaacatcaggggcagcctttgaaactgactgctgtctttcaaaatgccgtcttcctcaatatttgagaagattccagtgtggcctttaaggcaactgggtaattccccttctctagctaattggggttactctaggagccctttcacttggaatgtgcaagattgtagaagcacaactctttggttatattggactagttataatagtgagtagatttcttttgtattcctatttttcttccttattaatgtatcttgttctccattttttcttttagacagaagatatgttgtgggatcatctataaaggccgttttggggaagtcctcattgacacacatctcttcaagccttgctgcagcaataagaaagcagctgctgagaagccagaggagcaggggccagagcctctgcccatctccactcaggagtggtgactgaggtttttatgtagaaggggaacaaaaaaaaaaatatctgaattttgaaaaaccacaaagctacaaactgaccctcttttttttttgagacggagtaatgctcttgttacccaggctggagtgcagtggcgtgatcttggctcactgcaacttccgtctcccgggttcaagtgattctcctgcctcagcctcccaagtagctgggtttataggtgcccgccaccagacccggctaattttttagttttagtagagacggggtttcaccacgttggccaggctggtcttaaatgaccctcttatttttaacttggatacctgctattctgccaaaagacaatttctagagtagttttgaatgggttgatttcccccactcccacaaactctgaagccagtgtctagcttactaaaaaaagagttgtatataatatttaagatgctgagtatttcataggaaagctgaatgctgctgtaaagtgctctttaagtcttttttttttttaatccccttctaatgaatgaaactaggggaatttcaggggacagagatgggatttgttgtatgataaactgtatgtagtttttagtctttctgttttgagaagcagtggttggggcatttttaagatggctggctactcttgttttccctcatgataataaatttgtcataactcagtaacatgaacttgcccctagaggtagttgttaataattttgaaatattaaggtcttgccaagcttctgatgattcacacctgtactactgattattaagcaggacagactgagctttctgttgcaaataccttggaggagaaagtaatttctaaatatacagagaggtaacttgactatatatgttgcatcctgtgcctcccttcatattaatatttgataaagattttaatttatgtaaaacttctaaagcagaatcaaagctcctcttggggaaatggcaagtctttaggataggcaagaccctgtatgaatagtaccaaagcattaccgcatggtagagaacacactcgattaaaaatgttaagctatctgaaaaataaaatgtgcaagtcttcaggatggcacaaaacaaaggttaatgcttcttggggcacatttcttagagggcttgctgagtgtgtaaatataatcgacttttgtttgtgttacatgacttctgtgacttcattgaaaatctgcacaattcagtttcagctctggattacttcagttgacctttgtgaaggtttttatctgtgtagaatgggtgtttgacttgttttagcctattaaatttttattttctttcactctgtattaaaagtaaaacttactaaaagaaaagaggtttgtgttcacattaaatggttttggtttggcttcttttagtcaggctttctgaacattgagatatcctgaacttagagctcttcaatcctaagattttcatgaaaagcctctcacttgaacccaaaccagagtactcttactgcctcttttctaaatgttcaggaaaagcattgccagttcagtcttttcaaaatgagggagaaacatttgcctgccttgtaataacaagactcagtgcttattttttaaactgcattttaaaaattggatagtataataacaataaggagtaagccaccttttataggcaccctgtagttttatagttcttaatctaaacattttatatttccttcttttggaaaaaacctacatgctacaagccaccatatgcacagactatacagtgagttgagttggctctcccacagtctttgaggtgaattacaaaagtccagccattatcatcctcctgagttatttgaaatgattttttttgtacattttggctgcagtattggtggtagaatatactataatatggatcatctctacttctgtatttatttatttattactagacctcaaccacagtcttctttttccccttccacctctctttgcctgtaggatgtactgtatgtagtcatgcactttgtattaatatattagaaatctacagatctgttttgtactttttatactgttggatacttataatcaaaacttttactagggtattgaataaatctagtcttactagaaaataaaaggagctgttttgtggctttgtttgacaggtcttcagtaagaataatgtttttggctttcacatatactcagtttaagtgcttagtattaataacaagccatgaagggaataaattcctcttcactgagacatagactttggaataaaagacattttaactgatgtgcacaattattaatctagtggataagatggatttaaaaggaagaacaaaatgttcccagtactttttactgtctgtggttttattactatctatgggcatagtgggaagcatcattgagactttagggaaactataaaagttggaagggtggtggcatcaggggttggatgctggttctcaagttcctagctctgccccttgttagtcatttgagttaaataattaatgggaatatctacttcacaggattatgaggaatcctaagaggtgtaatccatatcaaacttttagaaaccagttgttttattacctgggaaaggtaataaagggccagactttttatactactgttagtatttaaatttgggatagtctggatgccacctaatacagttactatgaaattaacaaggtaactaaggaagttgatagtaccagtattatctattgctatgtcctaaattaccatagatttagtggcttaaaacaaatgcgtctcagtttctgtctgagcatggtttagataggtcctttagaaagctcatggtctcatctgcattctcacctggtgatttgggaagaactcatttcagcctcactcggctggcagaattcagttcttgccactgcaggactgagtgtccagacctctcactggttgtcagctggaggcccccgcttagttccttgccagctgggtgctccctgcatggcctggctgctgactggaccactgacatgattactgtcactaccagcaagtgtcgagagccaagctgccagcaagaggggtcttttcaggtcctgcccatatccaaggggagaggctcatacgaaggattggataccaagaggtgcgggtggggctaatgggaaggcacctagagtttgtcacagctttttttttttttaactgaatctctttaaattggtcgtctcgccctacaatgcaaatgctttgtgtagcaagtaaaaagaaaaatggctctcacaatatgaaaaaccctggctgggcactgtggcttatataaacctgtaatcccagcactttgggaggcccaggcgggtggatcccttgaggtcaggagttcaagtccaaccaggccaacatggtgaaacaccgtctctactaaaaataaaaaaattagccaggcatggtggcatgcgcctgtggtcccagccactcgagagattgaggcaggagaattgcttgaacctgggaggtagaggttgcagtgagctgagttgggccactgcactccagtctgggtgacagagtaagactccacctccaaagaaaaaa

SEQ ID NO: 9359 - DNA, 110 bp, Homo sapiens
attacaggcatgtgccaccatgcctggctaatttttgtattttttggtagagacagggtttcgccatgtttgccaggctggtctcgaactcctgacctcaagtgatctgc

SEQ ID NO: 9360 - DNA, 160 bp, Homo sapiens
ttttttttttttttcagacagagtcttgctcttgttacccaggctggagtgcaatggcgtgatctcggctcactgcaacctccgcctcctgggttcaagcgatcctcctgcctcagcctcccgagtagctgggattacaggcgcctgccaccacgcccag

SEQ ID NO: 9361 - DNA, 160 bp, Homo sapiens; identical to SEQ ID NO: 9360

SEQ ID NO: 9362 - DNA, 2053 bp, Homo sapiens
ttttgaagcccttgaaatgaagtttagggaccactgatctagaattctctttatgctcctccactacccattaaccccactctatagtctgccttttcgctttcttctctcctcccttctaaacacttcgtagaacactatgttttctgttcatgattgaccttcaaattgccaaatcctttggccttataaaccgtatgtacttaaccaacactctgttgttaacaaatccttcaaaactgttttcttttgcttccgctctgtttttcctgtcatccacttatcacttttcttcatatgttttctttcttttgttcccagttgttattatgtggggttctggttctattttatgttctcactgtatattcagaatcagatttttagctaccatgtaccatcttaataatacctagcatttatttactctttcctaattgttatttcagtgcttcagtatttcagtattcatttaattcattcagtattcatttaaatctcaaaacaactcagtgaggttgatacaggtataattggtgtcttttttttcttttttctgacactggcatatcgaggcccaaaggttaagtaatctatgcaactaggaggcagtagaactgggatttaaacttagactgcctgtagaggccatgttcttaaccactactagatttttggcgtccagatgtcccttgtatttctaacttccgtttagtttttctacctcccattcaatacatccattcagttaatctcaagtgcctgcctctttcccttgacaaaacacacttgctcattctttattccttgccacattaaagttaacactatcctccccatcgctagtactatagaggtcattgaaccttccccctgcgtatggcctgtgagttttattgattccagcatgattatttggtgatatttgagtgcgattttgtgctagatcctgggtgtataatgatgtatgagacacagactttgtcctcagggagcttatactctagaaataatttttttttttttcaagagagcgtcctactctgttgccgaggctggagtgcagtggtgccaacatggcttactgtagcctcaggctcccgagctcaactgatcctcctgctgcagcctcccgagtaggtgggactacagacatggactatcacaccaagctgtttttatttttagttcaggtgggttctcagtttgttgcccaggctggtcttgaactcctgggctcaaatgattctcccacctcatcctcccaaagtccaagtattgggattacaggcatgagccatcatgcctggccaataaaatgttacaacaaattagcagaatgctgagagaataaatggtgataggaaacctgtatatgtaatggagtttcagataatacctaatatttattgagcactttctttttttttttttagagacagttttcactctgtcactcaggctggagtacagtggtgctatctcaactcactgcaacctccacttcctgggttcaggcagttctcatgcctcagtcttctgagtagctggaattacaagcacccaccaacacgcccagctaatttttgtattttttgtagagatggagtttcaccatgttggccaggctggtcttgaactcctgacctcaagtaatccgcctgccttggcctcccaaagtgctaggattacaggcatgagccactgcgcctgacctattgaacactttctatatggttgacattatttttggttcttcagtacatttaattctcataaagttcctaaatgtatacttctagatctgaagtatcgggaatacctaattgtacaaagaacatgccagttggaagctacagcatttagcagaagttctaaagtaggaaagagcttcatttaaactgtgaactggccaggtgtggtgtctcacgcttgtaatcccagcactttgggaggttgaaatgggaggatcacttgagcccaggagttggagaccagcctgggcaacagtgagaccctgtatctaaaaaagaaaaaaaaaaaaaaagaaaat

SEQ ID NO: 9363 - DNA, 2052 bp, Homo sapiens
ttttgaagcccttgaaatgaagtttagggaccactgatctagaattctctttatgctcctccactacccattaaccccactctgtagtctgccttttcgctttcttctctcctcccttctaaacacttcgtagaacactatgttttctgttcatgattgaccttcaaattgccaaatcctttggccttataaaccgtatgtacttaaccaacactctgttgttaacaaatccttcaaaactgttttcttttgcttccgctctgtttttcctgtcatccacttatcacttttcttcatatgttttctttcttttgttcccagttgttattatgtggggttctggttctattttatgttctcactgtatattcagaatcagatttttagctaccatgtaccatcttaataatacctagcatttatttactctttcctaattgttatttcagtgcttcagtatttcagtattcatttaattcattcagtattcatttaattctcaaaacaactcagtgaggttgatacaggtataattggtgtcttttttttattttttctgacactggcatatcgaggcccaaaggttaagtaatctatgcaactaggaggcagtagaactgggatttaaacttagactgcctgtagaggccatgttcttaaccactactagatttttggcgtccagatgtcccttgtatttctaacttccgtttagtttttctacctcaaattcaatacatccattcagttaatctcaagtgcctgcctctttcccttgacaaaacacacttgctcattctttattccttgccacattaaagttaacactatcctccccatcgctagtactatagaggtcattgaaccttccccctgcgtatggcctgtgagttttattgattccagcatgattatttggtgatatttgagtgcgattttgtgctagatcctgggtgtataatgatgtatgagacacagactttgtcctcagggagcttatactctagaaataatttttttttttttcaagagagcgtcctactctgttgccgaggctggagtgcagtggtgccaacatggcttactgtagcctcaggctcccgagctcaactgatcctcctgctgcagcctcccgagtaggtgggactacagacatggactatcacaccaagctgtttttatttttagttcaggtgggttctcagtttgttgcccaggctggtcttgaactcctgggctcaaatgattctcccacctcatcctcccaaagtccaagtattgggattacaggcatgagccatcatgcctggccaataaaatgttacaacaaattagcagaatgctgagagaataaatggtgataggaaacctgtatatgtaatggagtttcagataatacctaatatttattgagcactttctttttttttttttagagacagttttcgctctgtcactcaggctggagtacagtggtgctatctcaactcactgcaacctccacttcctgggttcaggcagttctcatgcctcagtcttctgagtagctggaattacaagcacccaccaacacgcccagctaatttttgtattttttgtagagatggagtttcaccatgttggccaggctggtcttgaactcctgacctcaagtaatccgcctgccttggcctcccaaagtgctaggattacaggcatgagccactgcgcctgacctattgaacactttctatatggttgacattatttttggttcttcagtacatttaattctcataaagttcctaaatgtatacttctagatctgaagtatcgggaatacctaattgtacaaagaacatgccagttggaagctacagcatttagcagaagttctaaagtaggaaagagcttcatttaaactgtgaactggccaggtgtggtgtctcacgcttgtaatcccagcgctttgggaggttgaaatgggaggatcacttgagcccaggagttggagaccagcctgggcaacagtgagaccctgtatctaaaaaagaaaaaaaaaaaaaagaaaat

SEQ ID NO: 9364 - DNA, 266 bp, Homo sapiens
ctgtcgcccaggctggagtgcagtggcaccatcttggctcactgcaagctctgcctcccaggttcacgccattctcctgcctcagcctccccagtagctgggactacaggtgcctgccaccacgcccagctaatttttttgtatttttagtagaaatggggtttcaccgtgttagccaggatggtcttgatctcctgacctcgtgatctgcacaccttggcctcccaaagtgctgggattacaggcgtgaaccaccgcgcccggcc

SEQ ID NO: 9365 - DNA, 191 bp, Homo sapiens
agcaccatggccctcatcttcgcattttacgctttttttgcaagtttatcaacaagctcaattaaaccaccaactgttttctgaaactggccagttttgtccgcaaagttcttgcactcttctttgagctctgtggtctgctgggtaacctctgagtccaacacccacagcttgttcaactcatcaaagtg

SEQ ID NO: 9366 - DNA, 191 bp, Homo sapiens; identical to SEQ ID NO: 9365

SEQ ID NO: 9367 - DNA, 155 bp, Homo sapiens
cctcccaggttcacggcattctcctgcctcagcctccccagtagctgggactacaggtgcctgccaccacgcccagctaatttttttgtatttttagtagaaatggggtttcaccgtgttagccaggatggtcttgatctcctgacctcgtgatc

SEQ ID NO: 9368 - DNA, 766 bp, Homo sapiens
cagaagtattaacttgttcaaatcgtacaaccaaggctcaagtccatgattgcccaactccaaagcccatgttctttctaccttattatgttggcattgttttcaatgtcagtttggacccatataaaaacgcccagctgtaccctatgaggaggatataaaaatgtgagatggtagttgacactcggaggacattcatatctccaaacccaaccttatgaagttggccacagcaagcatgttggaaactagaaccaggggtttcatatcaagccatttgcttaggtctgtatctcaaaagctttaaatacaactttttttggtgccctcttgataaggagtcttatactgagctcttcttctcttttatagctggtccatcagaaagattaaattaaacgtttggccacatggacagttaatccttagatcacccagttggatggttcattcctgctatgtttggtttgattttttatttttggaaaacaaatagtgagtcagtctgctttccctccctttctctgcctcaccactccttctggattctcttagatgctctggtcatactaggtaaacagtatttttcttaaaattttccttgagccatgacagaatcatgagagagctcccctggctctgatacttaatgcccccctctaaaaagaaaggtctatttgaggctattcacttttgtcatcttgaaagagtctctgagtcttacctagcaggaatattttgtttcttttcctaaaaaaaaaaaaaa

SEQ ID NO: 9369 - DNA, 6114 bp, Homo sapiens
ccacatcttatctaaatacataatacagaagcctgtgtgacttgggcaatgtggccaggagggcacagagactaacacatccacctcggcaaaaggacataaaatatgtcttatggtcagaaaaatcaacattttgtgtatttacttagtttatgagaagtactgaaaatgctattataagctgaatttgtgatttccttttgaaattctgagttatccttatttttcccattttgtttttgcaccaaggagactgtagtcaaataaaacagaactacacgcactcgtcggggcagccgtactgcagaagcacgttgatgcactcctggctggaggcctgccgggcgtaggtcagcgctgtgttcccgtgggcatctcgggccatgacgtccaccccgtaccagatcaggagctgcgccaggaccacattccccttgcggcaggccagatggagcgccgtgcagccgtctccctccccacaggtctcgttcacctcctcacgggagccatgtgccagcagcaggatggctgtctgcaggtcctcatcagcggtggcccgcagcagctgctggcccagggacagatcagtgcagggtagtggggccagaaagagcttctcctcatatttggaaaggatccaccgttccttttcttccctcgtggacttttctgagggttttgtctgtccctggctgctcccttcccagatgctgttggctaggtcattgccaatagatgacataaccttcctgagctcaactggccagtcatccagctccagagatcgcacacgggaaaggcgggtgccaagactgcggtggatacctgagcattcaatacacatgaggactcccaagttcaaactggcccacttaggattctgggtctcacagtccacacagtgggcgttcccacgcatgttttggatcgactgcagggccatggcctcgctctggctggtcagctgggacttgcttttactgctctcgcatgactgcaggctggccaggatctggctctggatggcttggacccaggcatcccgctcctcatatgtcgtggcttcaaagtgccacgtttggccagtggcagacacaatcataaagttgttggtgcttttcttctttaggtgtttctttttattggcatgaggagaggggggcgggttgagcttggggccggtggtgctggagatactggggctgaagcatatggagtcacccagcccggtgtccatgtccttggataggtcattgcttttagagctggagatgggtgcgcaggccgatgtggctagggatggccactttcctgggactttgatggtagatgtctgaaggtcaatctcttttttatgaatattcttcatataatcacctaagcttgaataataggtgagcacgccattggaacacagggtgacgtatttctttttccatgtcttcagccatttcccacttcgctttaagagcatgccctgtttaatggggatggctctgccgctcccgatggtgtcagcatgattctccggggctttcctctctttgtctgggtcactccctttctcagatgtaaacaggttggaccagcgcatggaccgcttgcaaacgggggtgggtgtgttggcagtgggaggaacactgaactgagggtcctcctggctggtgctgggagtcgatggaatggaggaggaatagttatttaaactcccacctccatttctgttcttcgtaatgtgcacggtggaaacctgtgtggaacagaaggaggaatggcttcaaaaattgggtagtggcttgcagggtcctatagacagctcacaattaccttttaaaaagatacattttctgggccaggcatggtggctcacacctgtaatcacagcactttgggaggccaacgtgggtggatcacgaggtcaggagttcaagaccatcctggccaacatggtgaaaccctgtctttacaaaaaaaaaaaaagaaaaaaaaattagctgggcatggtggcacatgcctgtaattccagttactcaagaggctgaggcaggagaattgcttgaacagggacctgggaggcagagcctgcagtgagccaagatcgcgcgattgcactccagcctgggctacagaaagagagtccataaaaaaaaaaaaaaaaaaaaaaaaagatacattttctgttgtttggatagaatatttactcatactagctcactaactaaacagagctgcagatcagttcttactccagcacattctttttacaacacttaagatgactaaatgcaacatgaaatggggaagatttaaaaaaagatggctttgacttcagcatgaaacagatacaagtgtacgatgaaaatacaacctcaataaaagtgccacttaccgcaaatgagtgtaactgttcatcaggtatgctcaaagatctatctgcatctctataaaataagaaagcgcgttacttcaaaaactgttaatatcttagtataatatttgtttagtaaaatactgcctcctgtgtgctttggtgtttaccaaagcagtttttacgaattcttctcctggatcctgacttgcagagggtttcctgacttcttctttctcagcacatcatggcctgtaccgtgaagtcttttatatgataaccagtcagaaatgcccgtgagtattgactctccctaacaggccatggcaataaaccaaacatattttcactcttctaaccacacattgaaacacaagaatgttctacaaagcagtagtagtaaactttaataaatgtaaatgtgattcagatttcctagcttcctttctctttagttctctgtagtatactctcatgatgtatttatgtactttctgttgtttgaatgacaaactcatctgcctttttaagacgccagtctttgatgaactttaaactttgtaaaactaatgcattgtgcctgtgtataaaccagtggttctccaaatgtgctgtgtggacctctcgggatcccgaagaccccttccagaaggcctaagaggtcataactgttcttttttttttttttttttgagaccaagttttactcttgttgcccaggctggagtgcaatggtgtgatctcggctcatggcaaccttcgcctcccaggttcaagtgattctcctaccccagcctcccaagtagcagggattacaggcacctgccaccactcctggctaagttttgtatttttagtagagatgtggtttcaccatgttggccaggctggtcttgaactcctaacctcaggtgatccgcttgcctcggcctcccaaagtgctgggattacaggcctgagccactgtgcctggccaacactgttctgaatcatactaattaaacctgagaaagctgatgaaaaattttaaaaatttgtgaaagtaatacaaagccattgcctgctctttcgttgacacttgccatgattatataaaagcaaaagtgggtacaatggctggtttctcagcataaatcaaggcagtggtaccaattacattagtagtcattctattcttcactgtcccctacaggtaaaaaacatagcctgaatttcttaagaatgtctttgatgaagcagtaaaaattaatgttgttaaatcttgacatgtctctaatattctgaataagtggaaagttaaccagaagcgcttttttttttgtttttaaagaatccgtgatttaactatgaactgaaaaatcacttttttcacagaacatcatttttatttaaaagtacaactgggccagcgcagtggctcacgcctgtaaaatcccagcactttgagagaccaaagcaggcagatggcttgagctccttcaggagttcgagaccagcctaggcaacataacgaaaccctgtcactgtcaaacatataagaaaattagcctggcgtggtgccacacatctgtggtgccagctacaaaggagcctgaggtgagaggattgcttgagctgagatcatgccaatgcactccagccaagtgacagagtgaaactcggtctaaaaaaccagttcaactatcattctcaaaaataaatgaagtgagaggttgtcacttcaagggaaatacgtatttgttcccaatgataaaatttaagctttcctgtggactttgaaaaacttgttccttctactgtaggcttggcagctattcaatacttaaaggcgtgttaaagtaagattggtggttaaactaaaagtgatttttgacacaataaaacataaaccgatatattccaagtaactaatgcatgatattataaatgcaagtatggagcaaaagatccatttactgtggaagaaagatcaatgagtactgatggaataaatttattaatatgtaaaatgccaccgtaactaatttaagaaaccaccacttgtgaagttttgatttagtgttaacaaatacccacaactgtctgaaaagtttaaaaatacaccttctaccaactacatatttgcatgaggttcggtcatcttattgcttctttttttctttttttgagacagagtctctctctgtcacccaggctggggtgcaatggcgagatctcggctcactgcaacctccacctcccaggctcaagcgattctcctgcctcagcctcccaagtaactgggactacaggcatgcaccaccacgcccagccattttttgtactttcagtagaggcgggttttaccatgttggtcgggctggtctcaaactcctgacctcaagtgatccacccacctcggcctcccaaaatgctgggattacaggtgtgaaccactgcgccccaccagcttattgctttttttgtttgtttgtttaggcagagtcttgctctgtcacccaggctgcagtgcaatagcaccatctcagctctctgcaacctccgcctcccaagttcaagcggttctcctgcctcagcctccagaataggtgggactacaggtgtgtgccatcatgcccagccaagtttttgtatttttagtagagacggggtttcgctgtgttagccaggatggtctcgatctcctgaccttgtgatccgcccgcctcagcctcccaaagtgctgggattacaggcgtgagacaccgtgcccaacctcttattgctgctttaaagcaaattgcaaagaaagctctagagaatccatttgtctcctattaagctcaacatgagagactttaaataatataaatacatgacgcactttttactcaactttttgttgtagaaaagttatttttcaatgaaaaaattctgttaacaatactgttctcaaggaatattttctgttgttataacctgggtcatgggttactactgatatctagttggtagaggccatgaatactgctaaactctctgcaatgcacaagacagtcctcacaacaaagcattatctagcccataatatcaacagtggtaaggctgtgaaatctaaactaaaaatagattttgaaaaaatttcaattgtataattctaccacactaaatatcaatataatcaatataaacacatactctttgagattctcaatcatttaagaattatgagagtcttaaggaacaaagaaaatacaaataatttgcttcaatattttagtaggcacaatacagcttatgatgtgcctaacactgagcttgatatcttgcaaagtacttagctagaataacaagacaggtttctaaaaagctcacctttgtgtgatatgatgaggtatctccaaggtcacactgtggaaggaaaaaaaattcataacaatagatgttaacatttgttaggcctgaagacattttttaaaaggggggcagaggaaactctcctagtggccctgaaattcaaatcttctagttcagaacagtaccataagggcactttgttttcatttctttgttttttacaaaaatatgagaaccaaaatgcaaggaaatatgccgttagaagacgcgtttctgttggtgattacaatatataaataataacagatttccttgttacatgcttttctacccacgaaacctttcgtcccatgcgatttattttatgtatttatttattttttgacccagagtctgtctctcttgctcag

SEQ ID NO: 9370 - DNA, 9122 bp, Homo sapiens
tgtacaaaaatcaatgcatatttatgaacttttttttcaaatatattttcacacattttatctaaatacataatacagaagcctgtgtgacttgggcaatgtggccaggagggcctgagactaacacatccaccttggcaaaaggacataaaatatgtcttatggtcagaaaaatcaacattttgtgtatttacttagtttatgaaaagtactgaaaatgctattactagctgaatttgtgatttccttttgaaattctgagttatccttatttttcccattttgtttttgcaccaaggagactgcagtcaaataaaacagatactacacgcactcgtcggggcagccgtactgcagaagcacgttgatgcactcctggctggaggcctgccgggcgtaggtcagcgctgtgttcccgtgggcatctcgggccatgacgtccaccccgtaccagatcaggagctgtgccaggaccacattccccttgcggcaggccagatggagcgccgtgcagccgtctccctccccacaggtctcgttcacctcctcacgggagccatgtgccagcagcaggatggctgtctgcaggtcctcatcagcggtggcccgcagcaggtgctggcccagggacagctcagtgcagggtagtggggccagaaagagcttctcctcatatttggaacggatccaccgttccttctcttccctcgtggactttactgagggttttgtctgcccctggctgctcccttcccagatgctgttggctaggtcattgccaatagatgacataaccttcctgagctcaactggccagtcatccagctccagagatcgcacacgggaaaggcgggtgccaagactgcggtggattcctgagcattcaatacacatgaggactcccaagttcaaactggcccacttaggattctgggtctcatagtccacacagtgggcgttcccacgcatgttttggatcgactgcagggccatggcctcgctctggctggtcagctgggacttgcttttactgctctcgcatgactgcaggctggccaggatctggctctggatggcttggacccaggcatcccgctcctcatacgtcgtggcttcaaagtgccatgtttggccagtggcagacacaatcataaagttgttggtgcttttcttctttaggtgtttctttttattggcatgaggagaggggggcgggttgagcttggggctggtggtgctggagatactggggctgaagcatatggagtcacccagcccggtgtccatgtccttggataggccattgcttttagagctggagatgggtgcacaggccgatgtggctagggatggccactttcctgggactttgatggtagatgtccgaaggtcaatctcttttttatgaatattcttcatataatcacctaagcttgaataataggtgagcacgccattggaacacagggtgacgtatttctttttccatgtcttcagccatttcccacttcgctttaagagcatgccctgtttaatggggatggctctgccgctcccgatggtgtcagcatgattctccggggctttcctctctttgtctgggtgactccctttctcagatgtaaacaggttggaccagcgcatggaccgcttgcaaacgggggtgggtgtgttggcagtgggaggaacactgaactgagggtcctcctggctggtgctgggagtcgatggaatggaggaggaatagttatttaaactcccacctccatttctgttcttcgtaatgtgcacggtggaaacctgtgtggaacagaaggaggaatggcttcaaaaattgggtagtggcttgcagggtcctatagacagcttacaattaccttttaaaaagatacattttctgggccaggcatggtggctcacacctgtaatcacagcactttgggaggccaaggtgggtggatcacgaggtcaggagttcaagaccatcctggccaacatggtgaaaccctgtctttacaaaaaaaaaaaaaaaaagaaaagaaaaaagaaaaaaaaattagctgggcatggtgtcacatgcctgtaattccagttactcgggaggctgaggcaggagaattgcttgaacagggacctgggaggcagagcctgcagtgagccaagatcgcgcgattgcactccagcctgggctacagaaagagagtccatcaaaaaaaaaaaaagatacattttctgttgtttggatagtatatttactcatactagctcactaactaaacagagctgcagatcagttcttactccagcacattctttttacaacacttaagatgactaaatgcaacatgaaatggggaagatttaaaaaaagatggctttgacttcagcatgaaacagatacaagtgtacgatgaaaatagaacctcaataaaagtgccacttaccgcaaatgagtgtaactgttcatcaggtatgctcaaagatctatctgcatctctataaaataagaaagtgcattacttcaaaaactgttaatatcttagtataatatttgttgagtaaaatacttcctcctgtgtgctttggtgtttactttaccaaagcagtttttacaaattcttctcctggatcctgacttgcagagggtttcctgacttcttctttctcagcacatcatggcctgtaccgtgaagccttttatatgataaccagtcagaaatgcccatgaatattgactctccctaacaggccatggcaataaaccaaacatattttcactcttctaaccacacattgaaacacaagaatgttctacaaagcagtagtagtaaactttaataaatgtaaatgtgattcagatttcctagcttcctttctctttagttctctgtagtatactctcatgatgtttttatgtattttctgttgtctgaatgacaaactcatctgcctttttaagaggccagtctttgaggaactttaaactttgtaaaactaatgcattgtgcctgtgtataaaccagtggttctccaaatgtgctctgtggacctctcgggatcccgaagaccccttccagaaggcctaagaggtcataactgttcttttttttttttttttttttttttttgagaccaagttttactcttgttgcccaggctggagtgcaatggtgtgatctcggctcatggcaaccttcgcctcccaggttcaagtgattctcctaccccagcctcccaagtagcagggattacaggcacctgccaccactcctggctaagttttgtatttttagtagagatgtggtttcaccatgttggccaggctggtcttgaactcctaacctcaggcgatccacttgcctcggcctccaaagtgctgggattacaggcctgagctactgtgcctggccaacactgttctgaatcatactaattaaacctgagaaagctgatgaaaaattttaaaaatttgtgaaagtaatacaaagtcattgcctgctttttcgttgacacttgccatgattgtataaaagcaaaagtaggtacaatggctggtttctcagcataaatcaaggcagtggtaccaattacattagtagtccctttcactgtcccctacaggtaaaaaacatagcctgaatttcttaagaacgtctttgatgaagcaataaaaattaatgttgttaaatcttgacatgtctctaatattctgaataagtggaaagttaatgagaagtgcttttttttttgtttttaaagaatccgtgatttaactgtgaactgaaaaatcacttttttcacagaacatcatttttatttaaaagtacaactgggccagcgcagtggctcacgcctgtaaaatcccagcactttgagaggccaaagcaggcagatggcctgagctccttcaggagttcgggaccagcctaggcaacgtaacgaaactgtgtctctatcaaacatataagaaaattagcctggcgtggtgccacacatctgtggtcccagctacacaggagcctgaggtgagaggattgcttgagctgagatcatgccaatgcactccagccaagtgacagagtgaaactcggtctaaaaaaccagttcaactatcattctcaaaaataaatgaagtgagaggttgtcacttcaagggaaatacgtatttgttcccaatgataaaatttaagctttcctgtggactttgaaaaacttgttccttctactgtaggcttggcagcttttcaatacttaaaggcgtgttaaagtaagattggtggttaaactaaaagtgatttttgacacaataaaacataagccaatatattccaagtaactaatgcatgatattataaatgcaagtatggagcaaaagatccatttactgtgcaagaaagatcaatgagtactgatggaataaatttattaatatgtaaaatgccaccgtaactaatttaagaaaccaccacttgtgaagttttgatttagtgttttaacaaatacccacaactgtctgaaaactttaaaaatacaccttctaccaactacatatttgcatgaggttaggtcatcttattgcttctttttctctttttttgagacagagtctctctctgtcacccaggctggggtgcaatggcgagatctcggctcactgcaacctccacctcccaggctcaagcgattctcctgcctcagcctcccaagtaactgggactacaggcatgcactaccatgcccagccactttttgtactttcagtagaggcgggttttaccatgttggtcgggctggtctcaaactcctgacctcaagtgatccacccacctcagcctcccaaaatgctgggattacaggtgtgaaccactgcgccccaccagcttattgctttttttgtttgtttgtttagacagagtcttgctctgtcacccaggctgcagtgcaatggcacaatctcagctctctgcaacctccgcctcccaagttcaagcggttctcctgcctcagcctccagaataggtgggactacaggtgcgtgccaccatgcccagctaagtttttgtatttttagtagagacggggtttcgccgtgttagccagaatggtctcgatctcctgaccttgtgatccgcccgcctcagcctcccaaagtgctgggattacaggcgtgagccactgtgcccagcctcatattgcttctttgaagcaaattgcaaagaaagctctagagaatccatttgtctcctattaagctcaacatgagagactttaaataatataaacaaatgacacactttttactcaactttttgttgtagaaaagttttttttcaatgaaaaacttctgttaacaatactgttctcaaggaatattttctgtttttataacctgggtcatgggttactactgacatctagttggtagaggccatgaatactgctaaactctctgcaatgcacaagacagtccttacaacaaagcattatctagcccataatatcaacagtggtaaggctgtgaaatctaaactaaaaatagattttgaaaaaatttcaattgtataattctaccacactaaatatcaatataatcaatataagcatatactctttgagattctcaatcatttaagaattatgagagtcttaaggaacaaagaaaatacaaataatttgcttcgatattttagtaggcacaatacagcttatgatgtctagagctgtgacctaacactgagcttgatatcttgcaaagtaattagctagaataacaagacaggtttctaaaaagctcacctttgtgtgatatgatgaggtatctccaaggtcacactgtggaaggaaaaaaaattcataacaatagatgttatcatttgttaggcctgaagacattttttaaaaggggggcagaggaaactctcctagcggccctgaaattcaaatcttctagttcagaacagtaccataagggcactttgttttcatttctttgttttttacaaaaatatgagaaccaaaatgcaaggaaatatgccgttagaagacgcgtttctgttggtgattacaatatataaataataacagatttccctgttatatgcttttctaccgatgaaacctttcgtcccatgcgatttattttatgtatttatttattttttgacccagagtctgtctctcttgctcagactggactgcagtggtgccatcttgactcctcacaacctccaccacccaggttcaagcgattctcacgcctcagcctcccaagaagctgggactacaagtttgcgccactatgcccagataattttttttggggggggtgggtgggtggagtttcgctcttgttgcccaggctggagtgcaatggtgtgatctcggctcaccacaacctctgcctcccgggttcaagagattctcctgcctcagcctcccaagtggctgggattacaggcatgtaccaccacgcccagctaattttgtagagtgaggctcaaaacaactgagggaaggtaaatctcaattctactaataggtctacacaatattagcactttttaaaaagcctgtaacattagcatgtgagatggatatgtctatagtgcttcaagtagttttcatctctgaaataattttaaaatcacagaatttaaagttacatgctggaaaggaccaatgaccttatgtgacatttaattcaacactcgttttacagatcagggaaacaaaccttaaaactgacttgcccaaggtcccaccaaataggagcagtttctcgtcctaaactcaaattaagcagtggctctcaaactttgctgcacattaaaatcgcctgagaagctttaatatctgcctcatcttccacatgagacattttaatttaattagtattgggtatggctttgggcatcaaggttcttggtaaacgtttcccaggtgatttcaatcagcagcaaagtttggaatgattgagctggggtgaaaatcagaatcttctgggatgcttttcttcacagaaagatgcctcacatccatcctgattttcctaaaaggcttctcagtgcctacagatagagggaaagtggagatgggaagatacatgtatttgcagacttgcattttgaaaaaaaccttgcataagtgatctcagcgagtgccacctatcccactgacaacagtgcactactgattcatgataaaacatttttcaaaatatcttcttgaagccaatttgccctattaatttgttcaataactttatttcaccaatagtgaatacaccaaatgattatttctcaaacttgctggtggcaaattaaaacttactatactctcaaaagtagacttctaaaaagtagaataatgaggaaaaaagcacgaaattagtttcagcaaaattaatcttcaaagctgcttttgaattatatgctaacttatcaaaatctttggaactcagaagaagccagggactctagtcaaagtaatttttgtgtatgtgtgctcaaagatttaagagacttggctgactacagacatttagtgattactcaataggtcccaaagctcaggacttgagacagagtttgagtccagtttttgttcgaaacacaatttcctctcaactattgttaaaagggagggaggaaagtgacattattatgagtgtaaacttgccacttttaattgaagtaaaagttattgacaattgaattagctaaaaaggctagtgcatctgaaacaaaattgtttataagctagttatgtttacagaatgaaaagttaaattaaagataaagacattaatattctaaattaggactttccaaactgtgttctaaaaatcaagactaataacccaaggagatgagaataatgtacactggacggcccctgtggagctggtggtggtgttggttgttgttccttttaaaataaacttcatctcagggtgctctcaaagcgcatctttgtggcccacgaggtgctcatgcacaatgggagaaattcaaatgcagatacactgtggtgccagaagaagaaaagctgttccttcttccaaggataatgtccaaagtagtgcacactgatttgggcctatgatgcattgaaaaactaagtttccacaaaaaacattcaataaagggaacctatccttctcactgtgttcaacattgtctaaaggcataaaggcatcaaaaagatacactgtttctgggtttgcttctttgctaactgatttttccttccaccacgacgtctaagattaaaagagaaactgatacttaatattgagaatctggatatcaatatatggttgactccaatttcttaagctgattgctgaagaggacaaccaaatggctgaaataatttccgaataaaggaatctgtccctcggcagcatagttgtactcacgatattattgtcattgtaagataatgctggctggctgtgctgtcatcaaggaatattgtcgaacacgagctgtattgttgactgaaacgctcagtagatacctgaaggggaagggaagtgtaagtcaaatttatcaaagtgtatttttttctcagttaaaatgtcaaatgacaaagcactaagatatgtcttacactccatgaactgcctgagtgtggtatcatgtgcactctatagaaaacccattggaggctctcaacttccagagatgatgtttaagatatgggttataaaatgctgcccttaatatggtacctgtcatcaaacctaacaaggattttatgaattaccgttaaaaataatgggaaaagtcggcttcgccgggcgcggtggctcacacctgtaatcctagcactttgggaggtggaggcgggcagatcacgaggtcaagagatcgagaccatcctggctaacatggtgaaaccccgtctgtactaaaaaatacaaaaaaaaaaaagtacctgggtgtggtggcgggcacctgtagtcccagctgctcgggaggctgaggcaggagaatggcgtgaacccgggaggcggaggttgcagtgagccgagatcgcgccactgcactccagcctgggcgacagagcaagactccatctcaaaaaaaaaaaaaaaaaaaaagacttagtatattttt

SEQ ID NO: 9371 - DNA, 23934 bp, Homo sapiens
  SITE (22909): n equals a,t,g, or c
tgtacaaaaatcaatgcatatttatgaactttatttcaaatatattttcacacattttatctaaatacataatacagaagcctgtgtgacttgggcaatgtggccaggagggcctgagactaacaaatccaccttggcaaaaggacataaaatacgtcttatggtcagaaaaatcaacattttgtgtatttacttagtttacgaaaagtactgaaaatgctattattagctgaatttgtgatttccttttgaaattctgagttatccttatttttcccattttgtttttgcaccaaggagactgcagtcaaataaaacagatactacacacacttgtcggggcagccgtactgcagaagcacgttgatgcactcctggctggaggcctgccgggcgtaggtcagcgctgtgttcccgtgggcatctcgggccatgacgtccaccccgtaccagatcaggagctgcgccaggaccacattccccttgcggcaggccagatggagcgccgtgcagccgtctccctccccacaggtctcgttcacctcctcacgggagccatgtgccagcagcaggatggctgtctgcaggtcctcatcagcggtggcccgcagcagctgctggcccagggacagctcagtgcagggtagtggggccagaaagagcttctcctcatatttggaacggatccaccgttccttctcttccctcgtggacttttctgagggttttgtctgcccctggctgctcccttcccagatgctgttggctaggtcattgccaatagatgacataaccttcctgagctcaactggccagtcatccagctccagagatcgcacacgggaaaggcgggtgccaagactgcggtggattcctgagcattcaatacacatgaggactcccaagttcaaactggcccacttaggattctgggtctcacagtccacacagtgggcgttcccacgcatgttttggatcgactgcagggccatggccttgctctggctggtcagctgggacttgcttttactgctctcgcatgactgcaggctggccaggatctggctctggatggcttggacccaggcatcccgctcctcatacgtcgtggcttcaaagtgccacgtttggccagtggcagacacaatcataaagttgttggtgcttttcttctttaggtgtttctttttattggcatgaggagaggggggcgggttgagcttggggctggtggtgctggagatactggggctgaagcatatggagtcacccagcccggtgtccatgtccttggataggccattgcttttagaggtggagatgggtgtgcaggccgatgtggctagggatggccactttcctgggactttgatggtagatgtctgaaggtcaatctcttttttatgaatattcttcatataatcacctaagcttgaataataggtgagcacgccattggaacacagggtgacgtatttctttttccatgtcttcagccatttcccacttcgctttaagagcatgccctgtttaatggggatggctctgccgctcccgatggtgtcagcatgattctccggggctttcctctctttgtctgggtcactccctttctcagatgtaaacaggttggaccagcgcatggaccgcttgcaaacgggggtgggtgtgttggcagtgggaggaacactgaactgagggtcctcctggctggtgctgggagtcgatggaatggaggaggaatagttatttaaactcccacctccatttcttttcttcataatgtgcacggtggaaacctgtgtggaacagaaggaggaatggcttcaaaaattgggtagtggcttgcagggtcctatagacagctcacaattaccttttaaaaagatacattttctgggccaggcatggtggctcacacctgtaatcacagcactttgggaggccaacgtgggtggatcacgaggtcaggagttcaagaccatcctggccaacatggtgaaaccctgtctttacaaaaaaaaaaaaagaaaaaaaaattagctgggcatggtggcacatgcctgtaattccagttactcaagaggctgaggcaggagaattgcttgaacagggacctgggaggcagagcctgcagtgagccaagatcgcgcgattgcactccagcctgggctacagaaagagagtccataaaaaaaaaaaaaaaaaaaaaaaagatacattttctgttgtttggatagtatatttactcatactagctcactaactaaacagagctgcagatcagttcttactccagcacattctttttacaacacttaagatgactaaatgcaacatgaaatggggaagatttaaaaaaagatggctttgacttcagcatgaaacagatacaagtgtacgatgaaaatacaacctcaataaaagtgccacttaccgcaaatgagtgtaactgttcatcaggtatgctcaaagatctatctgcatctctataaaataagaaagcgcattacttcaaaaactgttaatatcttagtataatatttgtttagtaaaatactgcctcctgtgtgctttggtgtttactttaccaaagcagtttttacgaattcttctcttggatcctgacttgcagagggtttcctgacttcttctttctcagcacatcatggcctgtaccgtgaagtcttttatatgataaccagtcagaaatgcccgtgagtattgactctccctaacaggccatggcaataaaccaaacatattttcactcttctaaccacacattgaaacacaagaatgttctacaaagcagttgtagtaaactttaataaatgtaaatgtgattcagatttcctagcttcctttctctttagttctctgtagtatactctcatgatgtatttatgtactttctgttgtttgaatgacaaactcatctgcccttttaagacgccagtctttgatgaactttaaactttgtaaaactaatgcattgggcctgtgtataaaccagtggttcttccaatgtgctctgtgggaccactcgggatcccgaagaccccttccagaaggcctaagaggtcataactgttctttttttttttttttttttttttttttgagaccaagttttactcttgttgcccaggctggagtgcaatggtgtgatctcggctcatggcaaccttcgcctcccaggttcaagtgattctcctaccccagcctcccaagtagcagggattacaggcacctgccaccactcctggctaagttttgtatttttagtagagatgtggtttcaccatgttggccaggctggtcttgaactcctaacctcaggtgatccgcttgcctcggcctcccaaagtgctgggattacaggcctgagccactgtgcctggccaacactgttctgaatcatactaattaaacctgagaaagctgatgaaaaattttaaaaatttgtgaaagtaatacaaagtcattgcctgctttttcattgacacttgccatgattatataaaagcaaaagtgggtacaatggctggtttctcagcataaatcaaggcagtggtaccaattacattagtagtcattctattcttcactgtcccctacaggtaaaaaacatagcctgaatttcttaagaatgtctttgatgaagcagtaaaaattaatgttgttaaatcttgacatgtctctaatattctgaataagtggaaagttaaccagaagcgctttttttttttttgtttttaaagaatccgtgatttaactgtgaactgaaaaatcacttttttcacagaacatcatttttatttaaaagtacaactgggccagcgcagtggctcacgcctgtaaaatcccagcactttgagaggccaaagcaggcagatggcttgagctccttcaggagttcgagaccagcctaggcaacataacgaaaccctgtcactgtcaaacatataagaaaattagcctggcgtggtgccacacatctgtggtcccagctacaaaggagcctgaggtgagaggattgcttgagctgagatcatgccaatgcactccagccaagtgacagagtgaaactcggtctaaaaaaccagttcaactatcattctcaaaaataaatgaagtgagaggttgtcacttcaagggaaatacgtatttgttcccaatgataaaatttaagctttcctgtggactttgaaaaacttgttccttctactgtaggcttggcagcttttcaatacttaaaggcgtgttaaagaaagattggtggttaaactaaaagtgatttttgacacaataaaacataaaccaatatattccaagtaactaatgcatgatattataaatgcaagtatggagcaaaagatccatttactgtgcaagaaagatcaatgagtactgatggaataaatttattaatatgtaaaatgccaccgtaactaatttaagaaaccaccacttgtgaagttttgatttagtgttaacaaatacccacaactgtctgaaaactttaaaaatacaccttctaccaactacatatttgcatgaggttaggtcatcttattgcttctttttttctttttttgagacagagtcgctctctgtcacccaggctggggtgcaatggcgagatctcggctcactgcaacctccacctcccaggctcaagcgattctcctgcctcagcctcccaagtaactgggactacaggcatgcaccaccacgcccagccattttttgtactttcagtagaggcgggttttaccatgttggtcgggctggtctcaaactcctgacctcaagtgatccacccacctcggcctcccaaaatgctgggattacaggtgtgaaccactgcgccccaccagcttattgctttttttgtttgtttgtttgtttaggcagagtcttgctctgtcacccaggctgcagtgcaatggcaccatctcagctctctgcaacctccgcctcccaagttcaagcggttctcctgcctcagcctccagaataggtgggactacaggtgcgtgccatcatgcccagccaagtttttgtatttttagtagagacggggcttcgctgtgttagccaggatggtctcgatctcctgaccttgtgatccgcccgcctcagcctcccaaagtgctgggattacaggcgtgagccaccgtgcccaacctcttattgctgctttaaagcaaattgcaaagaaagctctagagaatccatttgtctcctattaagctcaacatgagagactttaaataatataaatacatgacgcactttttactcaactttttgttgtagaaaagttatttttcaatgaaaaaattctgttaacaatactgttctcaaggaatattttctgttgttataacctgggtcatgggttactactgatatctagttggtagaggccatgaatactgctaaactctctgcaatgcacaagacagtcctcacaacaaagcattatctagcccataatatcaacagtggtaaggctgtgaaatcgaaactaaaaatagattttgaaaaaatttcaattgtataattctaccacactaaatatcaatataatcaatataaacacatactctttgagattctcaatcatttaagaattatgagagtcttaaggaacaaagaaaatacaaataatttgcttcaatattttagtaggcacaatacagcttatgatgtctagagctgtgacctaacactgagcttgatatcttgcaaagtacttagctagaataacaagacaggtttctaaaaagctcacctttgtgtgatatgatgaggtatctccaaggtcacactgtggaaggaaaaaaattcataacaatagatgttaacatttgttaggcctgaagacattttttaaaaggggggcagaggaaactctcctagtggccctgaaattcaaatcttctagttcagaacagtaccataagggcactttgttttcatttctttgttttttacaaaaatatgagaaccaaaatgcaaggaaatatgccgttagaagacgcgtttctgttggtgattacaatatataaataataacagatttccttgttatatgcttttctacccacgaaacctttcgtcccatgcgatttattttatgtatttatttattttttgacccagagtctgtctctcttgctcagactggattgcagtggtgccatcttgactcctcacaacctccaccacccaggttcaagcgattctcatgcctcagcctcccaagaagctgggactacaagtttgtgccactatgcccagataatgtttttttggggggtggggtggatggagtttcgctcttgttgcccaggctggagtgcaatggtgtgatctcggctcaccacaacctctgcctcccaggttcaagagattctcctgcctcagcctcccaagtggctgggattacaggcatgtgccaccacacccagctaattttgtagagtgaggctcaaaacaactgagggaaggcaaatctcaattctactaataggtctacacaatattagcactttttaaaaagcctgtaacattagcaggtaagatggatatgtctatagtgcttcaagtagttttcatctctgaaataattttaaaatcacagaatttaaagttacatgctggaaaggaccaatgaccttatgtgacatttaattcaacactcgttttacagatcagggaaacagaccttaaaactgacttgcccaaggtcccaccaaattggagcagtttctcgtcctaaactcaaattaagcagtggctgtcaaactttgctgcacattaaaatcgcctgagaagctttaatatctgcctcatcttccacatgagacattttaatttaattagtattgggtatggctttgggcatcaaggttcttggtaaacatttcccaggtgatttcaatcagcagcaaagtttggaatgattgagttggggtgaaaatcagaatcttctgggatgcttttcttcacagaaagatgcctcacatccatcccgattttcctaaaaggcttctcagtgcctagagatagagggaaagtggagatgggaagatacatgtgtttgcagacttgtattttgaaaaaaaccttgcataagtgatctcagcgagttccacctatcccactgacaacagtgcactactgattcatgataaaacatttttcaaaatatcttcttgaagccaatttgccctattaatttgttcaataactttatttcaccaatagtgaatacaccaaatgatcatttctcaaacttgctggtggcaaattaaaacttactatactctcaaaagtagacttctaaaaagtagaataatgaggaaaaaagcacgaaatttgtttcagcaaaattaatcttcaaagctgcttttgaattatatgctaacatatcaaaatctttggaactcagaagaagccagggactctagtcaaagtaatttttgtgtatgtgtgctcagagatttaagagacttagctgactacagacatttagtgattactcaataggtcccaaagctcaggacttgagacagagtttgagtccagtttttgttcgaaacacaatttcctctcaactattgttaaaagggagggaggaaagtgacattattatgagtgtaaactttccacttttaattgaagtaaaagttattgacaattgaattagttaaaaaggctagtgcatttgaaacaaaattgtttataagctagttatgtgtacagaatgaaaagttaaattaaagataaagacattaatattctaaattagcactttccaaactgtgttctaaaaatcaagactaataacccaagaagatgagaataatgtacactggacagcccctgtggagctggtggtggtgttggttgttgttccttttaaaataaacttcatctcagggtgctctcaaagcgcatctttgtggcccacgaggtgctcatgcacaatgggagaaattcaaatgcagatacactgtggtgccagaagaagaaaagctgttccttcttccaaggataatgtccaaagtagtgcacactgatttaggcctatgatgcattgaaaaactaagtttccacaaaaaacattcaataaagggaacctatccttctcactgtgttcaacattgtctaaaggcataaaggcatcaaaaagatacactgtttctgggattgcttctttgctaactgatttttccttccaccacgacgtctaagattaaaagagaaactgatacttaatattcagaatctggatatcaatatatggttgactccaatttcttaaactgattgctgaaaaggacaaccaaatgactgaaataattttagaataaaggaatctgtccctcggcagcatagttgtactcacgatattattgtcattgtaagataatgctggatggctgtgctgtcatcaaggaatattgtcgaacacaagctgtattgttgactgaaacgcacagtagatacctgaaggggaagggaagtgtaagtcaaacttatcaaagtgtattattttctcagttaaaatgtcaaatgacaaagcactaagatatgtcttacactccatgaaatgcctgagtgtggtatcatgtgcactctatagaaaacccattggaggctctcaacttccagagatgatgtttaagatatgggttataaaatgctgcccttaatatggtacctgtcatcaaacctaacaaggattttatgaattaccgttaaaaataatgggaaaagtcggcttcgcggggcacggtggctcacacctgtaatcctagcactttgggaggtggaggcgggcggatcacgaggtcaagagatcgagaccatcctggctaacatggtgaaaccccgtctctactaaaaatacaaaaaattagccgggcgtggtagcaggcccctgtagtcccagctacttgagaggctgagatggaagtattgcttgagccaggaaggtcaaggctgcagtgagctttgatcatgccactgcactccagcctgggcaacagagcaataccctgtctcaaaaaagaaaaaaatggctttgtttcactgtgcccttaagtgattctgtagctgggttatagaattcagcatcaattagttattttccaaagctcattgaagacatggcttcattggcctgtatctagtgttgctaatgaaattaatgaggaaaatctgatccttatttctttgaatttaaacaaattttttttttttttttttttatgctttggtagcttttaacatttttttctctattttcatagctttcttcacttttggggaatttttagctattaattaaatactactttctcccattctctctctgcctttggaattcctactagacgaaagcttgaatgcggtcacccagactttctggctcttaaccttttcacctttttctctttgttctttaacctgcaagactccctcaactgaatgctccattttgctaatggacccttcagtgtgtctctgctgttactcagcctatcttttgaggtttttctttcaataacttgggctttaatttttgagatctctaattggttctttttcataattgcttggttttattttcccctgttttgctgaaggtattaaatgtacttgctttaattgacctttggttgtagagaagatttttcatttgctctatttgttatttctctttcatagcagtgggcttcctcagacatctggcacttcttcaatgcacactagatttctggtttccaattctccacctgagtctcaggattctgcagcattcccaggtgggtgcagactcaggttacctgggccttggcttctcccatggcttcttaagaacttccttgtttatttctgtgatcccaagcactcccctttatgacttcaagcccaattgtatagtcagtaatttaatttctctatctgttctatcatttataagggcacagcatggaggggagggcctttcagatatttttcttgccccatcttaaatccctaaattacacttaaaaaaataccaccaaagcttttgtcttttatttaggaagaatagagtactcagacatgagtttggagtaggcgggtgtatgtgtgtatgtgtgcctatgcagtttaaacctgttctgtaatgtattgcaataaatgtttcagtgtcggtacagtgaacaattcaacttcataataggccaatctggaatctcccagaaaaatttactttgggtgttagtgctttttttttttttaatcattaatatctataggaagacctagtaggagtggctgacaaagtttaataaatctcatgataaaatgcttgtttttgatgtgaatgttgttcctcagtccatcctaaaatgaaattcacagggttgggttcgatgtcttcttccacacctctcattacaatctgccataggagtgcagaccgcccccatctgaggcctggatttaatgctcaaacaagacagatgccagcaggaaatatttgccctgccttcgctgtaaatcttgagtccttgtccatgatatcctaaaaggccaccagatggaaatgtgatgccgtgaaaagagatgcactaccctttgcaaagggggattgaccctgctgctctctcaaaagaaattgtccttattcaatgtaaaacaaggttttagaaatttttctttgttgaatgtagaataaagagggcattacatgaatgcctatgcatttcagctttggagaggaatccttacatccattctgacagcatggagataaaaagtctgtctttctgtattcatgttttgttgtcatttgctttcttttctcccttcttggtctgtgtgtaccacatcctctctatgtcttctctttctttcttttttttatttttgagacggagtctcgctctgtcgcccagactggagtgcagtggcgcgatctcggctcactgcaagctccgcctcccgggttcacgccattctcctgactcagcctcctgagtagctgggactacaggcgcccaccaccgtgcccggctaactttttgtgtttttagtagagacggggtttcaccgtgttagccaggatggtctcgatctcctcacctcgcgatctgcctgcctcagcctcccaaagtactgggattacaggcgtgagccacggcgcccagcccttctattatttatttactacgataaaatgtaatgtattaaataatcctgctacaagagcattttattgcagtgaatacaagactaatgcatttactaaattactaatcctaaatgtattatttcaggtgatattgttacaaaagaagtgtttcagattcagaggctctgtgtgtcagggctgctaggccaccaacaagtgaggaagccataggtttctctagtcctattttcttatgtggaggataaaaagagtatcacttacatattctctcacaccctgaaaacaaatgacaacttaaaaaatctaactttcacttcatgtttaaataagactgccaagacatgactcaaatgagactctcggagaatactttgcattcacttcaaaacttgatcaattgcattctataaatcatctgacctgcacctagccattttcctgctctacccctgctctctgcctagaatactgcttttctctttccttgcttcagcaagctcgactccatctaccctcttggatctctttgtcggcagccacaccaaaaaatgtatttttatacactaattagttgaattcaccactgcttacaagatgctaattcctgcagagtattccccttgtgagaaagtatgcctctccataagagtaagggagggcccttactcttcctacctccagctgctgagcatagaattttgagtaaatccaaaacttcgacaagtgtttgacaattcagttatcatttggaaggtaagtcttactacatttaattacagcaaaaacactactaacagtttactctttataggtattatttaaggtagtcacaaaatagaaacaaacactctaacgtcaggcagcataaatgagagtatgaaattttacaatatttaacaagaaatggaaggggttacttagtagttttaaggtttaatgacaaaaactagaaaataatcgtacctagtaatttagtaagtcaaaaccaaagccttaccatcaaaggtgcagtacccattggatgcggatgcccacgcactgacttcttctgctgtacctgctgcctctcattttaacccattaaaaatactaaagttgttttccttgtagacatctttcacctccttggttaggtctattcccaagtattttattttagtttagtttagttttgcagctatcagaaaaggggttgagttcttggtttgattctaagcttggtcgcttctggggtataacagagctactgatttgtgtacattaattttgtctcctgaaactttgctgaattcatttatcagttctaggagctttttggaggagtctttagggtttcctaggtatatgatcatatcatcatcaaacagcaacagtttgacttcctctttactgatctgcatgccttttattgttttctcttgtgtgattgctctggctaggccttccagtagtatgttgaatacaagtggtgagagtgggcatccttgtcttgttccagttctcggggggaatgctttcaacttttccccctttcagtatcatgttggttgtgggtttgtcatagatggcttttattatattgagctgtgacccttgtatgctgattttgctgagggttttaatcataaaaggatgctgcattttgtcaaatgctttttctgcatctgtttagatgatcatgtgattttttgtttttaattctgtttatgtggtgtatcacatttattgacttgtgtatgttaatccatccctgcatccctggtatgaaacccatttgatcatggtggattatcttttttttttttttgagatggagtctcgctctgttgcccaggctggaatatgcagtgtggtgatcttggctcactgcaacctctgcctccgaggttcaagcgattctcctgcctcagccacctgagtagatgggattacaggtgagcgccaccacacccggctaacttttgtatttttagtagagatgggatttcaccatgttggccaggctggtctcgaactcctgacctcatgatccgtccgcctcagcctcccaaagtgctgggattacaggtgtgagccaccgtgcctggcccgattattttttgatatgccgttgggaactacaaaacgttgctgaatgaagtcatggacacaaacaaatggaaagacaccccatgctcatgaatgggtagaatgaatattgtgaaaatgaccatactgccaaaagcaatctacaaattcaatgcaactcccatcaaaataccaccatccttcttcacagaactagaaaaaacaatcctgaaatttatatggaccaaacaagaaccggcacagccaaaacaaaactaagcaaaaacaacaaatctggaggcatgacattacctgatttcaaactatactataaggccatagtcgccaaaatagcatggtactgatataaaaataggcacatacaccaatggaacagaatagagaacccagaaataaactcaaatacctatagccaactgattttcaacaaagccacctaaaacataaagtgaagaaggtaaaccctattcaacaaatggtgctgggataattggcaagccacatgcgggagaatgaaactggatcctcaactctcagcttacacaaaaatcaactcaagatggatcaaggacataaatctatgacctgaaaccataaaagttctagaagataacattggaaaaacccgtctagacgctggcttaggcaaagacttcatgaccaagaacacaaaagcaaatgcaacagaaacaaataggtgagacttaactaaagagcttctgcacaggaaaaggaacaatcagcagagtatacagacaaccacagagtgggaggaaatcttcacagtctatacatctgacaaagggctattatccagaatctatgaggaactcaaacaaattacaattacaaaaatatggaaccagctcaaatgcccgtcaatcaatgagtggataaagaaaccgtgatatacatacatatatatatatatatgaggaataccacctcagccataataaggaataaattcatggcattcccagcaacctggatggaagtaagactattattctaagtgaaataactcagcatggaaaaccaaatatcatgttctctttcatacgtgggagctgagctatgaggatgcaaagccataagaatgatacaatggactttggggacttgggggaaaggctgggaggagggtgagggataaaagactacaaattgggttcagcggatactgctcaggtgacgggtgcacctaaatctcacaaatcatcactaaagaacttagtcatgtcaccaaatgccacctgttcccccagaaacctatggaaataataaataaataaataaagtacagcatttttctcagcaaacataaaataaaacaaagactaaagttcatatttttcactctccttttgggcaggacaaattttagataggtttttaaagaattagtaacttttttcctttttccgagacagggtctccctttgttgcccaggctggagtgcagtggtgcaattatagttaactgcagcctcaaactcctgagctcaagcgatcctctgcctcagcctcctgagtaggtaatacgaaaggcgcatgccaccaggcctggctaatttgttatttaacctttttgtagatatgaggacttgcgatgttgaccaggctaaaaatgaacaaatcttaattaacttaaatatttctaacactttgggcattcaggaaaacagctccatctatgttgtgaagtaatgggaagtatatggcagtggataaactttgaatgaaaatattaaacaaggccttaggagaaaagtgtaatatgcttattatagatacattaatttaaaaaattctctggcttaatatcattaattatactcaaattagactttgatttaaacacaggtcctaaatttggattaaatataatagattgaccacaaatttatttcgtctccctccggaagcctcatcagtcataaaataaaggttacacccatgaccagcacagaaggttgacagagataatttttaataaatgctgagacataaaaagtagataaaggagtggtaaataacacagaaacacaactttggtgcctacagaaagtgactggaacagaagcgagccagtttgtcttgcagaactaaaggcaggttgtgaacttacaggcaaatggcactttggaaagtagggtaaaatgtgaaaaaaaaaaaaaagccagcaaggtcagttgcaaatctctaactagagccccaagtccacctgtccttccatctgacaagaaacttagatgtgtgttctctggatatatcaaacctgagaatttctggctcagagataccatggcttaaacctgagatataaagaaaactgtacaccaaaaatggaactccaactttcttcgctaactctgcttttcctttccaggcctgcttttactttccaggcagaaaactgggagatccttctcagaagaaactgaaatgtcttcaaaaaagatccccagataatacactgaggtctcccaaatgaaaagctagtcaggcttctaaggcctcacactgagtgctatcagttaacagaaatcctgcttccaaataaagcaggccaggaaccaccacacattggagggaagcctccaagaaaagagatcaaaacaatagaaaaaaggaattgataggaccagtcaaaatcaggagcaaaactttaaaaaaaaatcttaaaacactctcaaaaaatataaaattcaatagaaatagtagaggataaagtcacagaatatcccagaactagaataaaaagacaaactgaaaaaaatacaaggggaaaaattaaaaatcaatgcaggcgtactggtctaagcagcctagcatctgaataacaagactatcagtaaaaaagtaacagagaaaataaaaaaaaaaattctcaagaagagatagtctgcaggtttagtagcctcaataaaatgaaaagatccccaacaagctgttataaaatttcagaaccttagagagagagattctaaaaagcttccgcagataactaaaacctggttgtaaataacatatcacacactggcaatagattcaagaacaacactgtaataagagcacaactgcaaaatgtcttcagaaccatacaatttagattcaacctagaggtgtactctctatcaaagaggagggattttaacatctccacacaggaaaatgtgttcaagtacaactagagacgataacaggacagaaggaaacacagaatctaggactcaggcgatcccacacaagacagcagttacatgagataccaaaagactttaaagagttagcccagaaaagcagacattgagcatatctagggaaacccacgctatattgaactaggatgacaaaaggccaaagaaagttgccccccacacaaacataaaaaggaacagatgtgttttcgcagatggaaaatatctttgaaaggcatgtgataaatgctacaatacttgggggaaaacagctgttagaaaacaggcaaatgaatatagtcagaaaattagcttcatgctaaaaaataatggatgtgaaagcaaacagagcacccagaggctacttaacgatatttggatagataaactaacgtaggctaggaaaaaagaagatccaggagaattgcagaagtgctcagatttcagaactgtttcagagacaggatgaaggacatggaatgcagaggcacagtgaaaacaccatatgacttagcagtgaataatatttgcagagtcataatcatgtaaatattactgatttaattaaaaagtgtgctacaattggaagaaacacagggagaaacataagatcatggtgtagcggggaaggtatgcttttacctgctgtgacagaaagtcaatagacagtgctggcaattaacttagctattctatttttgttctttcattaaaaataagattaaatatttaaggcaattttttttttttttttgagacagagttttgctctgtcgtccaggctggagtgcaatggcgcgatcttggctcactgcaacctccgcctcctgggttcaagtgattctcctgcctcagcctcctgagtagctgagattacaggcatgcaccaccacgcccagctacttttgtatttttagtagatacagaatttcaccatgttggtcagggttgtctcaaattcctgacctcagatgatcagcctgcctcggcctcctaaagtgttgtgattacagacgttagccaccatgcccagccttaaggcagatcttttgaaccggactattgaaatttaacttaaatgtcagaaatctttaaaaggtggacacgctaaactaagcacttttctggataaatttaatactcaggaaaatagaagagatttagaaaatccacaaaaagaggtccatgctaccaccaccaggtccacattgtaatttaaagaaatcaagagagacatccttttatgtcaaactatcaatttcttaactatttgagtgtttacttacatggtttgtacagttgcttcttcttatttctacaactaagaataaaaaaaaaaaaactggtcacttctgatacaaataccataaaataaaagtagttgttaacatcttactgattactcctatgaaaaatgagacaaaattccattaaaaaaaaaattttcaataacatataatttaaattatctggcatgattaatttcataagtcaaatctaaaaacttagattttcatttagtttactttttgtttctattacacacaaatgaaagaatcctcatgtacaaaagaaaagggcaaaaaaattaggccagatgaaaaatttagctaataaaaagtttaactgttgcatatatgagccatgatccattagtattctctcattctgcatttacacatagcttactttaattatcagactctaagagctaacagttctaaaaactacttcctgaccagacacctatctctagatgcaacagaatccctgtaagcatcttgaaccacacttagtggttatctactaatatgtcactaaaaacaaaacaaaattaaaaaatggtctttacacaactggaaagtaacctatcttaaatttgttttcttttttgagatggagtctcactctgtcacctaggctcgagtgcagtggcgggatctcagcgcactgcaacctctgcctcccaggttcaagcaattcttcagccttagcctccggactagctgggaccacaggcacgtgccaccatgcctagctaattgttttttgtatttttagtagagacagagttacactgtgttagccaggatggtcttgatctcctaacctcgtgatccacccacctcaacctcccaaagagttgggattacaggtgtaagccacagagcctggcctaaattttgatgttaaaataagtatacaaacctaattggacatggtgtctgcagcacaaaaaatcattttttttccctaaaaagaggccagaataataaaagccccaagagggacttgggccatgctttgtttcctacactgcctctgcctttgatgctgggagggccttgtaggcaaaagttactaccactgaagagtgagggacatggaatagcttttcttttactgcttccatgctctctaggtgtgagaagcccatgcctctggaaggaactgggaaatacaattctgatatgttttggatatgttgcccctccaagtctcatgttaacatgtgacccttaatgttggagacagggcctagtgggaggcgtttgggtaatggcagtggattccttatgaatggcttggtcccatccccatggtaataagcacattctcattatggtaatttaaaagactgtggtactggccaggtgcggtggctgaagcctgtaatcccagcactttgggaggctgaagcgggtagatcacttgaggtcaggagtttcagaccagtctggctaacatggtgaaaccctgtctctaccaaaaatacagaaattagccaggtgttatggtgcccacctatagtcccaactactcgggaggctgaggcaggagaattgcttgaacctgggagatggaggttgtagtgagccaagatcgtgccattgcactccagcctgtgcaacagagtgagactccatttcaaaaaaaaaaaaaaagagtgtggtaccttcccccttcccctctctcctccctctttcacggtgtggaaccacctgcttcccctttgccttttatcatgattgtaagtttgctgaggccctcaccagaagcagatgttaaagccatgtttgtacagcctgaaaatctttgagccaattaaacctctttttgttataaattacccagccttaggtatctctttatagtaatgtaaaaaatgaagacaaattctaaccagaaataactgactcaagatgggcaaagtctactcaaactataaaaacaaaggttacaaactcccgtgttttactgtgctgcattacttcgcacattataatagaaccctcacttgtgttcttgctgtttaagtcaactggaaaacttggctgtgtatggcttgttggcaaataaatgaggatttaatataacattaagggaaataagcaggagtaaggcatgtttaaatttacattatatcaaatgaaaaagttaataacctaaaacttttgagtagcgtaaacttggatgtggtaaatgaatgtggtcagaggactgtgtaagaggaggcccaaatcacagattcaatccctgatgataaacgactatgttttttaatttgtttaaatgaaaaccaagctgaagttctatcattcatctttaaaatgtactttttggagcaagggaaaagggattgtaaataaagatgaatccattaattataaataaagataaatccaagaattataaagagaaatccatgactcctccatcacatcacaaaataattgtgttgataaaaagatggcaaaatgtataaacaaaaaggttacacgttttcactaacatcatagcaactaaaggaaagtatatcacatattaaaataagacaagggaacatgtgaaaagatgaaaattttaaaccaatatgagtttttctaaatactttctataacctgatcaaacaagagcttttattctttctcttggtggaaaaaacaatgtcgtctcaccatctgtttgagagttcctctggaatattgtgcttgcctctggattggcagaagggttaaactccaaagctatatgcatagaggaagaaaagaaaaaaagatgtaatcattgataaaaatttatcaactcgtttattcgactgctgcatttaggctatttcactatctctactttgattcttatccattgaaatgaatgtatagacataagagagagccaggcaagatggcacatgcttgtagtcccagctactcaggaggctgagatgggaaaatcacttgaacccaggtcaggaagttgaggccagcatgagtaacataatgacaccctcctttatttaaaaaaaaaaaaaaaaagaagaggtaaattttggctttgagttgtgtaaaatcaactttgcataaaataaatcaagatggcagtaagttttaaaagacaggtctattttataggcaaaatataagatgtattctagagtttttaaaatttttaaaaagtaaattcatcatatctgtcacttccatttcattctgaggacacagaaccttagttctcttgagtagctgtcttccatagtcatgtgatatctctaagttttcatttcttcgttagcaacacatagggagaacatacacaggccttatttgtattggaaagggccaagtgagacatacataaactgtgttgtaatcctaaagaatgacaataaagagccatttttgggctctcatccaacactacccatctactaactggtgtgtaacatccatcaggctttccgaacatcaccaagcagagtataagtttacacaagtacttacatgctttgtgtataaaggtacaatcaattaattcacataatacatttgtttattctaaagcaatccttaaatatcttgaaatgtgaagatagtacttccaagttacaaagtcacactcataatgagtcttaattatcctacctctttaaaaattaagagcgcaaccaaagtttaaatagaagagctataagacatttcctctacagtgatgaaatctctggcatttaaatgaaaacaataagcctactggatgtaatatgtttatgatgcaatgttttctattttgaaaatttcagtttttattcaagaaccatattattacccagaattacttttacttagattcatctctttgcaaaattttagaggcaaacgaactaattgttttctcttttctaccggctcccatcccctgcctctgccagcagtgtagagactaaaaaactccaactttctttcctttttttttttgtgagacggagtctcgctctgtcacccaggctggagtgcattggcgtgatctctgctcactgcaacctccacctcccaggtccaagcaattctcctgcctcagccttgtgagtagctggaactacagtcatgtgccactacgcccagctaatttttgtattttttttttagtagagacagcgtttcaccatgttggccaggctggtctggaactcctgacctcaggtgatccgcctgccacggcctcccaaagtgctgggattacaggcgtgagccaccaagcccagccaaaactgtaactttcttatctttgaacaagatgctattgtcaggaggggaagggacaaagggggagccatggcaacaaacactcttacagggaaggtctgacattttaacctgcaatctttatattacacattgaaagtctacattgacgtttcatgtcttttgaaagttttgaccatgaaccaatccccacctctcttttagaacaaggaggtaaataaagtctgttaagtcaccagaataaatctggagacacattttctgttaaagtaagaactttaacagaaaagagcttcataggtaaactcctttgagaaaccccaaacacacacacacaaccatttttctgcagccccggctgtgacatttcacacctttcacaattattttaagcactctccttttttctttttccttctgtgttcaaattacagttagaagaaactaagcagcttctatcaaggtgacttaaagcagcccattaagaataccatatagcctctcccatggcaaactccattctgattttaaataagaaatccccaaatatttgaataggaactgtcttgagatttggctactttaacaaaggaaacaattaggcacttacctggttccttcacttaggtaccatctggataggtacaaagaaaaaataagatgggtactgaaaagttgggatatttgagtttttattgagaaaaggaagagaatagctcaaagaagcctaaacaaagtcccacaggataataaacagagctacagacactgttgtctcaccatctgtttgagagttcctctggaatattgtgcttgcctctggattggcagaaaggttaaactccaaagcntatatgtatagagggagaaaagaaaaaagatgtaatcatttataaaaatttatcaactcatttattcaactgctgcttattcgacaagagccataaataaatggtcccatgccagcctgggagaatgagatgagagagcaagaactgggcgattgggaggggaggcgaaaagaaactgactggactcggtggggaaatactaaggggtgggaattcaaggcagagccagcttttgttcctggccagctcccgggaaagctggctacaagcagaaaggagctcgaagtgggggatgcctcaaagggaaccttggggacagtagcagccagaggcaaaccgagggtagatggcacctatcacctcctcaccttcaggcatctcccggtcacgaacgtggtgcatgtggaggtcctcaccaacttcaacagtcacctcagcaggctgtacagcagcagccatgggcgctcctgccatcctgtccccagctcctgcctcatagatctcagattcagagggacacaccgacccctgctgctggtcaaactcgaggctgacgctagggtgcacacgacaggtcagtatgttccccatggggcgcctctactgtctgccaccacctgtgcctctgctcacagctttggccacgcactcccgctgtcctaggccgaggctatgctgcacttgcagagatggtcttcccgctcctcgcctgcccacctcacagcgcggccccgggcaccagccctggccctggccctggccccggccccggctagggctgcgggccaaggcccgcaccctgctgcctcccctgagttgacttgtctgggagggtgaagaccagccggcttatttaataggttgtgaacccaacaagtgctgagagacacaacaactgcctgaagagagaacagacggagctcctcctccttctgtagtcacctacagactgaagcccactggccccaggtgggagcccaggcatgtggcacacaatgccccaccccacacttcacaatgccctc

SEQ ID NO: 9372 - DNA, 8900 bp, Homo sapiens
tgtacaaaaatcaatgcaaatttatgaactttttttcaaatatattttcacacatcttatctaaatacataatacagaagcctgtgtgacttgggcaatgtggccaggagggcctgagactaacacatccacctcggcaaaaggacataaaatatgtcttatggtcagaaaaatcaacattttgtgtatttacttagtttatgagaagtactgaaaatgctattataagctgaatttgtgatttccttttgaaattctgagttatccttatttttcccattttgtttttgcaccaaggagactgtagtcaaataaaacagaactacacgcactcgtcggggcagccgtactgcagaagcacgttgatgcactcctggctggaggcctgccgggcgtaggtcagcgctgtgttcccgtgggcatctcgggccatgacgtccaccccgtaccagatcaggagctgcgccaggaccacattccccttgcggcaggccagatggagcgccgtgcagccgtctccctccccacaggtctcgttcacctcctcacgggagccatgtgccagcagcaggatggctgtctgcaggtcctcatcagcggtggcccgcagcagctgctggcccagggacagatcagtgcagggtagtggggccagaaagagcttctcctcatatttggaaaggatccaccgttccttttcttccctcgtggacttttctgagggttttgtctgtccctggctgctcccttcccagatgctgttggctaggtcattgccaatagatgacataaccttcctgagctcaactggccagtcatccagctccagagatcgcacacgggaaaggcgggtgccaagactgcggtggatacctgagcattcaatacacatgaggactcccaagttcaaactggcccacttaggattctgggtctcacagtccacacagtgggcgttcccacgcatgttttggatcgactgcagggccatggcctcgctctggctggtcagctgggacttgcttttactgctctcgcatgactgcaggctggccaggatctggctctggatggcttggacccaggcatcccgctcctcatatgtcgtggcttcaaagtgccacgtttggccagtggcagacacaatcataaagttgttggtgcttttcttctttaggtgtttctttttattggcatgaggagaggggggcgggttgagcttggggccggtggtgctggagatactggggctgaagcatatggagtcacccagcccggtgtccatgtccttggataggtcattgcttttagagctggagatgggtgcgcaggccgatgtggctagggatggccactttcctgggactttgatggtagatgtctgaaggtcaatctcttttttatgaatattcttcatataatcacctaagcttgaataataggtgagcacgccattggaacacagggtgacgtatttctttttccatgtcttcagccatttcccacttcgctttaagagcatgccctgtttaatggggatggctctgccgctcccgatggtgtcagcatgattctccggggctttcctctctttgtctgggtcactccctttctcagatgtaaacaggttggaccagcgcatggaccgcttgcaaacgggggtgggtgtgttggcagtgggaggaacactgaactgagggtcctcctggctggtgctgggagtcgatggaatggaggaggaatagttatttaaactcccacctccatttctgttcttcgtaatgtgcacggtggaaacctgtgtggaacagaaggaggaatggcttcaaaaattgggtagtggcttgcagggtcctatagacagctcacaattaccttttaaaaagatacattttctgggccaggcatggtggctcacacctgtaatcacagcactttgggaggccaacgtgggtggatcacgaggtcaggagttcaagaccatcctggccaacatggtgaaaccctgtctttacaaaaaaaaaaaaagaaaaaaaaattagctgggcatggtggcacatgcctgtaattccagttactcaagaggctgaggcaggagaattgcttgaacagggacctgggaggcagagcctgcagtgagccaagatcgcgcgattgcactccagcctgggctacagaaagagagtccataaaaaaaaaaaaaaaaaaaaaaaaagatacattttctgttgtttggatagtatatttactcatactagctcactaactaaacagagctgcagatcagttcttactccagcacattctttttacaacacttaagatgactaaatgcaacatgaaatggggaagatttaaaaaaagatggctttgacttcagcatgaaacagatacaagtgtacgatgaaaatacaacctcaataaaagtgccacttaccgcaaatgagtgtaactgttcatcaggtatgctcaaagatctatctgcatctctataaaataagaaagcgcgttacttcaaaaactgttaatatcttagtataatatttgtttagtaaaatactgcctcctgtgtgctttggtgtttaccaaagcagtttttacgaattcttctcctggatcctgacttgcagagggtttcctgacttcttctttctcagcacatcatggcctgtaccgtgaagtcttttatatgataaccagtcagaaatgcccgtgagtattgactctccctaacaggccatggcaataaaccaaacatattttcactcttctaaccacacattgaaacacaagaatgttctacaaagcagtagtagtaaactttaataaatgtaaatgtgattcagatttcctagcttcctttctctttagttctctgtagtatactctcatgatgtatttatgtactttctgttgtttgaatgacaaactcatctgcctttttaagacgccagtctttgatgaactttaaactttgtaaaactaatgcattgtgcctgtgtataaaccagtggttctccaaatgtgctgtgtggacctctcgggatcccgaagaccccttccagaaggcctaagaggtcataactgttcttttttttttttttttttgagaccaagttttactcttgttgcccaggctggagtgcaatggtgtgatctcggctcatggcaaccttcgcctcccaggttcaagtgattctcctaccccagcctcccaagtagcagggattacaggcacctgccaccactcctggctaagttttgtatttttagtagagatgtggtttcaccatgttggccaggctggtcttgaactcctaacctcaggtgatccgcttgcctcggcctcccaaagtgctgggattacaggcctgagccactgtgcctggccaacactgttctgaatcatactaattaaacctgagaaagctgatgaaaaattttaaaaatttgtgaaagtaatacaaagccattgcctgctctttcgttgacacttgccatgattatataaaagcaaaagtgggtacaatggctggtttctcagcataaatcaaggcagtggtaccaattacattagtagtcattctattcttcactgtcccctacaggtaaaaaacatagcctgaatttcttaagaatgtctttgatgaagcagtaaaaattaatgttgttaaatcttgacatgtctctaatattctgaataagtggaaagttaaccagaagcgcttttttttttgtttttaaagaatccgtgatttaactatgaactgaaaaatcacttttttcacagaacatcatttttatttaaaagtacaactgggccagcgcagtggctcacgcctgtaaaatcccagcactttgagagaccaaagcaggcagatggcttgagctccttcaggagttcgagaccagcctaggcaacataacgaaaccctgtcactgtcaaacatataagaaaattagcctggcgtggtgccacacatctgtggtgccagctacaaaggagcctgaggtgagaggattgcttgagctgagatcatgccaatgcactccagccaagtgacagagtgaaactcggtctaaaaaaccagttcaactatcattctcaaaaataaatgaagtgagaggttgtcacttcaagggaaatacgtatttgttcccaatgataaaatttaagctttcctgtggactttgaaaaacttgttccttctactgtaggcttggcagctattcaatacttaaaggcgtgttaaagtaagattggtggttaaactaaaagtgatttttgacacaataaaacataaaccgatatattccaagtaactaatgcatgatattataaatgcaagtatggagcaaaagatccatttactgtggaagaaagatcaatgagtactgatggaataaatttattaatatgtaaaatgccaccgtaactaatttaagaaaccaccacttgtgaagttttgatttagtgttaacaaatacccacaactgtctgaaaagtttaaaaatacaccttctaccaactacatatttgcatgaggttcggtcatcttattgcttctttttttctttttttgagacagagtctctctctgtcacccaggctggggtgcaatggcgagatctcggctcactgcaacctccacctcccaggctcaagcgattctcctgcctcagcctcccaagtaactgggactacaggcatgcaccaccacgcccagccattttttgtactttcagtagaggcgggttttaccatgttggtcgggctggtctcaaactcctgacctcaagtgatccacccacctcggcctcccaaaatgctgggattacaggtgtgaaccactgcgccccaccagcttattgctttttttgtttgtttgtttaggcagagtcttgctctgtcacccaggctgcagtgcaatagcaccatctcagctctctgcaacctccgcctcccaagttcaagcggttctcctgcctcagcctccagaataggtgggactacaggtgtgtgccatcatgcccagccaagtttttgtatttttagtagagacggggtttcgctgtgttagccaggatggtctcgatctcctgaccttgtgatccgcccgcctcagcctcccaaagtgctgggattacaggcgtgagacaccgtgcccaacctcttattgctgctttaaagcaaattgcaaagaaagctctagagaatccatttgtctcctattaagctcaacatgagagactttaaataatataaatacatgacgcactttttactcaactttttgttgtagaaaagttatttttcaatgaaaaaattctgttaacaatactgttctcaaggaatattttctgttgttataacctgggtcatgggttactactgatatctagttggtagaggccatgaatactgctaaactctctgcaatgcacaagacagtcctcacaacaaagcattatctagcccataatatcaacagtggtaaggctgtgaaatctaaactaaaaatagattttgaaaaaatttcaattgtataattctaccacactaaatatcaatataatcaatataaacacatactctttgagattctcaatcatttaagaattatgagagtcttaaggaacaaagaaaatacaaataatttgcttcaatattttagtaggcacaatacagcttatgatgtgcctaacactgagcttgatatcttgcaaagtacttagctagaataacaagacaggtttctaaaaagctcacctttgtgtgatatgatgaggtatctccaaggtcacactgtggaaggaaaaaaaattcataacaatagatgttaacatttgttaggcctgaagacattttttaaaaggggggcagaggaaactctcctagtggccctgaaattcaaatcttctagttcagaacagtaccataagggcactttgttttcatttctttgttttttacaaaaatatgagaaccaaaatgcaaggaaatatgccgttagaagacgcgtttctgttggtgattacaatatataaataataacagatttccttgttacatgcttttctacccacgaaacctttcgtcccatgcgatttattttatgtatttatttattttttgacccagagtctgtctctcttgctcagactggactgcagtggtgccatcttgactcctcacaacctccaccacccaggttcaagcgattctcatgcctcagcctcccaagaagctgggactacaagtttgtgtcactatgcccagataatttttttttggaggggggcggtgggtggagtttcgctcttgttgcccaggctggagtgcaatggtgtgatctcggctcaccacaacctctgcctcccgggttcaagagattctcctgcctcagcctcccaagtggctgggattacaggcatgtgccaccacacccagctaattttgtagagtgagcctcaaaacaactgagggaaggcaaatctcaattctactaataggtctacacaatattagcactttttaaaaagcctgtaacattagcaggtaagatggatatgtctatagtgcttcaagtagttttcatctctgaaataattttaaaatcacagaatttaaagttacatgctggaaaggaccaatgaccttatgtgacatttaattcaacactcgttttacagatcagggaaacagaccttaaaactgacttgcccaaggtcccaccaaataggagcagtttctcatcctaaactcaaattaagcagtggctgtcaaactttgctgcacattaaaatcgcctgagaagctttaatatctgcctcatcttccacatgagacattttaatttaattagtattgggtatggctttgggcatcaaggttcttggtaaacgtttcccaggtgatttcaatcagcagcaaagtttggaatgattgagttggggtgaaaatcagaatcttctgggatgcttttcttcacagaaagatgcctcacatccatcccgattttcctaaaaggcttctcagtgcctagagatagagggaaagtggagatgggaagatacatgtgtttgcagacttgtgttttgaaaaaaaagcctgtgcgatagagctgattgctgcaggcgaggtttgccagcctatcccactgacaacagtgcactactgattcatgataaaacatttttcaaaatatcttcttgaagccaatttgcccaattaatttgttcaataactttatttcaccaatagtgaatacaccaaatgatcatttctcaaatttgctggtggcaaattaaaacttactatactctcaaaagtagacttctaaaaagtagaataatgaggaaaaaagcacgaaatttgtttcagcaaaattaatcttcaaagctgcttttgaattatatgctaacatatgaaaatctttggaactcagaagaagccagggactctagtcaaagtaatttttgtgtatgtgtgctcagagatttaagagacttagctgactacagacatttagtgattactcaataggtcccaaagctcaggacttgagacagagtttgagtccagtttttgttcgaaacacaatttcctctcaactattgttaaaagggagggaggaaagtgacattattatgagtgtaaactttccacttttaattgaagtaaaagttattgacaattgaattagttaaaaaggctagtgcatttgaaacaaaattgtttataagctagttatgtgtacagaatgaaaagttaaattaaagataaagacattaatattctaaattagcactttccaaactgtgttctaaaaatcaagactaataacccaagaagatgagaataatgtacactggacagcccctgtggagctggtggtggtgttggttgttgttccttttaaaataaacttcatctcagggtgctctcaaagcgcatctttgtggcccatgaggtgctcatgcacaatgggagaaattcaaatgcagatacactgcgttgccagaagaagaaaagctgttccttcttccaaggataatgtccaaagtagtgcacactgatttaggcctatgatgcattgaaaaactaagtttccacaagaaaacattcaataaagggaacctatccttctcactctgttcaacattgtctaaaggcataaaggcatcaaaaagatacactgtttctgggattgcttctttgctaactgatttttccttccaccacgacgtctaagattaaaagagaaactgatacttaatattcagaatctggatatcaatatatggttgactccaatttcttaaactgattgctgaaaaggacaaccaaatgactgaaataattttagaataaaggaatctgtccctcggcagcatagttgtactcacgatattattgtcattgtaagataatgctgatggctgtgctgtcatcaaggaatattgtcgaacacaagctgtattgttgactgaaacgcacagtagatacctgaaggggaagggaagtgtaagtcaaacttatcaaagtgtattattttctcagttaaaatgtcaaatgacaaagcactaagatatgtcttacactccatgaactgcctgagtgtggtatcatgtgcactctatagaaaacccattggaggctctcaacttccagagatgatgtttaagatatgggttataaaatgctgcccttaatatggtacctgtcatcaaacctaacaaggattttatgaattaccgttaaaaataatgggaaaagtcggcttcgcggggcgcggtggctcacacctgtaatcctagcactttgggaggtggaggcgggcggatcacaaggtcaagagatggagtaccatcctggcaaacatggtgaaaccccgtct

SEQ ID NO: 9373 - DNA, 221 bp, Homo sapiens
ggtgggtggagtttcgctcttgttgcccaggctggagtgcaatggtgtgatctcggctcaccacaacctctgcctcccgggttcaagagattctcctgcctcagcctcccaagtggctgggattacaggcatgtgccaccacacccagctaattttgtagagtgagcctcaaaacaactgagggaaggcaaatctcaattctactaataggtctacacaat

SEQ ID NO: 9374 - DNA, 413 bp, Homo sapiens
gagacagagtcttgctctgtcgccaagattggagtgtagtggtgcgatctcctccacctcccgggttcaagcaattctcttgtctaagcctcccgagtagctgagactataggcatgtgccaccatgcccagctaattttcgtatttttatagagatggggttttgccatgttgatcaggctggtcttgaactcttgacctcaggtgatccacccatctcagaatcccaaagtgctgggattacaggcgtgagccactatgcccggcctcctactatttgtaataggagatagggtcagataagggaataaaagcaggctgccccagccaggggcagcaaccagctcaggtccccttccacactgtggaggctttgtttttttgcgctttgcaataaatcttgctgctgctca

SEQ ID NO: 9375 - DNA, 12562 bp, Homo sapiens
gtcctaagaaaagcaaagggtagttcattacttgaagccatcttcctctatgagttctatacaaagcctcagtagagtgggtccaattagcaaccaagttgaacaacttttatttgctgactaaatatagatacacctgaattgttgactgcttttgtaactaaacactcctctcctgtcttccaacgagtggtcatttttgtccgcaacttgaccacagcaatccctggggccctagctctactctcaataaagagttatggctgtgtgttttgaatgacaccttaggacccatcctgcctccacctccttctccataaaatagaaacctaacttgcccctccaagctctgaaatgctgaaacttaccaactcccttttctccccgctatttcttccttccgtggcagggactttcaggttttctttcttttactaacaaggcactaagcatgattttctcatacaaaatcgagagccataaagtggcttaccacagtcctatttcaataaagatgaatactcgacatctggcaagtagtgtgtgcctgacagtgtccccactgtgctatgctcatttaaccctcagaaacaatctcatgttacagattttgcagaagttgttgagacggagaaggtaagcaacctccccaaggtcacatgactgctaagggtggggccatagtttgatcccagctagtctgaattccccagttgcttaagcatgattatcagaaagtatagcagtctgttttcacactgatataaagaaatacctcaggttgggtaatttttaaaggaaagaggtttaactgactcagtttcacatggctggggaggcctcaggaaacttagaatcatggcagagggggaagtccttcaggaaacttacaatcatggcagaagggcaggtccgacttccatggtggccgcacagagagtgggaacatgtgaaggagcaactgtcaaacatgtataaaaccatcagatctcagctgggcacggtggctcacacttgtaaccctagtactttgggaggccaaggcaggtggatcaactgaggtcaggagtttgagaccagcctagctaatgtagtgaaatcctgtctctactaaaaatacaaaaattagctgggtgtggttgtgcatgcctgtaatcccagctactcaggaggctgaggcaggagaatcactggaactcaagaggcagagactgcagtgagccaagatcgtgccatggcactcctgcctggacaacagagcaagactccatcccaaaaaacaaaacaaaacaaaaccctataagatctcatgaggacttactgaatatcacaagaacagcatgaggataactgcccccgtgatccaatcacctccccctaggcccctccctcgacacatcaggattatggggattataattcatgatgagatttgggtgggggcatggcaaaaccatatcagaaagtaaaggtagaagtcaagcttggatgggaaatgacattgtagatgatgatgatgatgattattattattattattattattattttgagatgaagttttgctcttgttgcccagtgaaattgtttctctaatttcattttcagattgtgtcttgtagatgtatagaaatacaattgataaatgattctggctattaaccttttatgcttcaaccttgctgaacactattttttttttttttgagacggagtttctctcttgttgcccaggcaggagtgcaatggcatgatcttggctcactgcaacctccgcctcctgggctcaagcgattctcctgcctcagcctcccaagtagttgggattgcaggcatgcgccaccatgcccagctaattttgtatttttagtagagacggggtttctgcacgttggtcaggcccgcctcagcctcccaaagtgctaggactacaggcatgagccaccgtgcccagccagattcgtatatttttaaaagaattttttttttattttttttgagacagagtctcactctgttgcccaggcagtggcacaatcgttgctcactgcaacctccacctcctgggtccaggtgattctcattcaagtgcctaagcctcccaagtagctgggattacaggagcccaaccccatgctcagctaatgtttgtattttagtagagatggggtttcaccatgttgctcaggttgatctcgaactcctgacctcaggtgatccacctgccttggcctcccaaagtgctgggattgcaggcgtgagccaccactcccgaacagaacaacatttttttgatgtggattttaaaatgcctccccttctttcaacattgattaagtcccttctacatgccaggcactgtatgtgtgaaatagtcccaactctcaatgagtgtaggcagatacacaaacaaagccttaaggaggtcagttttctgagaccatactgctggacagtatatgaacctgggatacaaacccacctctatttgacctcaaatttgatgctggggtggttttaattttattctgggaatttcagtcattgaaccatgaaaaggtgaaaagtctctgtcagatgtgtgtgtagtggtctgtataataaggactgaaggaagcaaccaaacaaattaagagactttctctaaaggcagagtaatgctaagggcagtggcagtgacaaaagcggaggaaaaagtctgtgatcatttgggagacagaataggaagtgcttggtcatgagatgtgaaagaagaggggaagtagaaggaaaacagagctgctcaggctctgctggggaagactgggtatgtagcagtgccttcctcctggccaagaatgtaggaagagaaataggtaaggaggaaaagacagttttttactctcagtgtcacattaaaatggaactctctggtcaaaagttgaatataaatctctgtaggctaagtccatttgtgacatcccaacatatgttttcaaaaataacatacatactaaatcaagccattaagcgtaactggggaaatttcctaaaatttacatgctaaaaaatcaccatttttcatttattagtttcatggagcaactttgaatctatggttacagcaattgaggcaccttgtataaaataaagctaatacatgaaaaaaaaaagccatttaaaattctgttgttctcagagaatggagaaagcaattgaagccatgggtgtggaggtgactgccctgagaagctgtgtatagtaaggagaactgggaagaaagaagacctggagaatagggtgatttgcacggcattaagtgaagcttgcaaaagtgagcactgagactcaagagacctgcatatgaatcaggaatggctgctcctgtgagttgttagaaaggagatgatgccttcttttcatatctataacagcagcacctagcacagtgcctgttcaataggtactcaacatgtattatcccaatgcagagtcaaattttgccaggagggcaggaaagccacaaattagctatggcaacttagtgattgggcttgtgtgtgtgtgtgtgagcgagctggatgtcaggcagtgggtaaagtagtgaactggaggtgagaaaacaatgacacaaactcagggcttctcttcccaagtatttggctgagaagagagatgtagtattaaagggagatatgtggtaaaggaagacttttattccaagattcaacaaaagcgtgagtatacttctatgttaaagggaaagagccaacagagaaaacacatttttgaggttagaagagaaggaagaactaatgcagaagggccccaaaaggcacaggtgcctgcaatctggatcagggacagattagctttggactcctacaaaagcaagaagggagaaaggaccatgtgactctagagatatttctggtaaaggaaaggtttaggaaaagatcttttgatgacctttattttaacagactttttttttctttttgagatggagtcttgctctgtcacccaggctggagtgcagtggcacgatctcggctcactgcaacctctgcctcctgggttcatgccattctcctgcctcagcctcctgattagctgggactacaggcacccgttaccatgtccagctaattttttgtatttttagtagagacggggtttcaacgtgttaggcaggatggtctccgtctcttgacttcgtgatctgcccgcctcggcctcccacagtctgggattacaggcgtgagccactgcacccggccagactttaaaaaaaaaaaaaaaaaaaaaaaaaactactgtgggaaaaaggatattatgtatagaaaagtctacacttcttgatacaactaactaaaaaaagcctgatacactaaacaaaacccaaataatgtcttccctaaaagtgggtaacttgaaaagcaatttgagcaaaaatcaaggagttcaattataaataagtatatcaacaaagtgaaagatgggtttaatttttcccacaaaaagttaaaagaaataacagcaggtttagaggaagaggaaaaaataataagaaaattatatgcagttgcaaaatgtgtgactatttacaaactctaacatataactacaaaatggaccagaagaatcattatcataggaagcaaagggtcatttcaaaaatcagaggagggatgattcatatttaatttaattctgtggaaaaaatttaagtaatgtttgaggacaaaaataggtgatgtgttgaaatgcgggaaaccacagtggaaggaaaaataattcaagaaagctcagtttcagtaaccagtatctagtaaaatcttcaggacctagaggctacaatctgcattaatagtgtctgaagacctagaaatgtcattaaataccattttggataattcttgtagacttgagatgatgtctatttaaagttacaaaatagtgcccatatttctgtattcattacagaaaacaattggatatggaaaagaaactaacatgctatgccacaatctctaaagaaagattagggaagtttcagcttaaagcaagaataatcacaataaagttttacaaccctttgcaagcatatatgaaaaacttacaaaaagtctgtaatgatcttttcttaagctaagagaacagaaaaaatgagaaaaattaaattataaaatgaaactttggtttagaggtaagaaacatttgatgacagtcaagagatcagggttgtacagtgtattatgtgaatgttgtgactcattggtttcatcttggatatcataacttgacattttgtaaaagtgatttttcatgggagtttcttcaggtgccctatgaagtcctgtccctttagaagcgaataatagtcttccacattcttgagatatcttaatgaataacatcttctacagtcttccattgtttagaccttggagagacacgcattagtgactgttaaggtacctgggttattaggtgcctgtagactatgcccagtgatatgtgcattaggtacatgctccctagctgtgctgacactgactgaagctgtgaggtttcacaatgacatgtcagccaaatacatatgctcagatttaccatttatcaagaggtcttcacactatcaattgtgcaattatcattctacacacaggcagcgataaagggagtaaaaaaacacagccatggatcgggagaccaaggtacctccagaggagtccagtgggtccagaagccctttggatgttggtcagaagctcctcttgggcagagatcacagcagcagccaacaggtctggagaagaccttacagttctcatggacaaagtttgtgaaggcatcttagacaagatcttgtctttgctggttttatgatcctctgcagatgggtctattctcattacctcagccacctttcacttcctatcagttcagttcaggtctctcatgatcccaggcagcagtagttgttatcacgtaagttcattcatatatgtttatctctggggatggggggacaacttcactgtggacttaattctactggagatgagtgaccccattttaagacaacaggatcacaaattattatcacatatcagcagggcagacaatagctacgacctggggctgaaagcaggtaactctatttattctgcaaaaattctgtcttgattatggtgccagttgctgtgagggatttcctttctagaacctgtttttcacaaggtttgagtctgaactgttaacattctactgatttctgggtgaagggactgactgcaccatcctagcctgtcagagcacttgccccaatacttccactttaagagttttccaccttgtccagaactacagtccactaatcccctcattttctctcttaagagaataaacaggccaggtgcggtggctcacgcctgtaatcccagcactttgggaggctgaggcgggtggatcatctgaggtcaggagttcgagaccaacttcgcctacgtagtaaaacctcgtctctactaaaaaaaaaatcacaaaaattagccgggcgtggtggcaggcacctgtaatcccagctactcgggaggctgaggcaggagaatcccttgaacctgggaggcagaggttgcagtgagccaagactgtgccacagaactccagcatgggcgacagagtgagactccctctcaaaaaaaaaaaaaaaaaaaaaaaaagagagaaaaagagagagacagagaataaacaacccatgtcaagtacacacccacatccctcttatcccaaataccaaacacacaaaaatccaatctgtctccttctacctaagcaattgcagatagtcacattcccataattaccttaagctccctgacttgctgctcgtcctttctctggcaaaatctcatccttggatgagcccgactttgtgtttgctcaatgacaccactcacctgaaccagaaaaaatatcaaaaagtggtcagagatatcatcataaattcaaattacttacataaaaaattggccctaaatgtttccagaaatcaataaaagttttgtttctccaaagacatcatttcttcagaaacccaacgtgtataacctattttttctatgttcttctaacattcattcaacttctctcatctgatatcttgccaaatcattcaaagagaaaatatatcccattagtcaagagccaaccatattcccatcacctgagaaaatcatatgcacaggatgcgcccacctcacctttctctgcctcatgtcagaaaaagtacccctccttttgtcacaaggcaaacctgagataaaagatttagatggcctgtaattccagcactaagggaggccaatgcatgcagattatttgagtctaaaaaagaagcctaagcaacttagggaaactgcatctctcaaacaaatacaaaccattagcctagcatggtggtgtggtggcacatgcctgtagtcccagctactcagggtggggagcactgaggtgggaggatcacctgagctggaaggttgtggctgcagtgagccgtgatcacgtcactgcactccagccagggtaacagatattttttaaaggatcttctctgttaaaaataatcaaataaacaggtggccatgaggctgaggtggctgcagtgcactcaattcctccttaaataacccaaaacttgactcagtgtaaataataaaaggaaacttaagtttaaccagtcagaaaccaccaactaacatctaactagagaccttccactgtaatgttccaaatgaggccactgctccacttcacccaatcaagtattttctttttcttccacattcaccatataaaattcttcccccaccctccctaagcctctctgtgggacctctgagctgcttgcagtctggggctgcctagtttatacatttctgaatgctcaaatatattttctaatgtttcaaagtggctctggtgtaggaggttgttggtggagtgacccgagagtatacaggaattgaggccatatgagatctctggaccctgtactccattttgctgtacactcaatactactctaaaataataatatatctttaaaaatctataactatcacgtagcccttttcaagtctccaactggttggagccagttcgattaaagctcagaaaaaactggttaataagctagttctgacccaactggcaagaagcggcaggaaagacccaggccaggggagcatattgcacatgcatgcaccaggaaactggaggaagcttggaggccctttagcctggtcctgagcccgctgaaactgcagttacaggcacagatgcctggggcaccaatctgaatctgccaacatccaaggccacatgaacacaaatgcacagtctcctctgcgatcggtagctaaggatgttaggccatgattggactaggatgggagatgaactgagaactctggattctgtaggttgttgttgtctcttcccacccccaagcaacaagtgatgaacacacacacacacacacacacacacacacacacacacacatcccgtagtgactaacaggatctccctccaggggatttgcaggaaggggagcagaaaacatcccaggggcctttcacagctacttccttgagccccctttcagacagtgctgtctagacctgtctcagcccaagcatcaccaccctgatacgcagaagctggcatccttacctgaaattcaacatcaagaaatgatctcttctactcaacactgatagaaatacctctaagcaacgtcctcattggcaggggtggagtgggggagtttcttaaaaagtgaggcctctgcctaccacctagagaacctggaaatttccatctgtgccacaaagtccaaatcactggccactgccccagtgtatggcagattagaacatctctccattggatctgggtttctattccattgagtgaaatgccttttctactacaggaacagaataagggatcaaaagggtcttacaactgaactccagtgtacagtctgcacagacactaggcttgtgcaaatatgacacagcgaggccccaggacccttaagccagctgaatgtactgagtttcaggaaacagtgagatacattcagcaaaacagtgggcttcatgctgaaagaagtcaatccaagtaaacacacatctcacacacacacacacacacacacacacacgcacgcacgcacgcagacaccctagtggccaataggtcctctcaccaaaaacctgcgatcaggagagcagaaagcctcccagggctccaccactgccctttctgtagccccttatcagacggccagcctcaggacagcactgtctgatcctggtccagcccaaaccgccatcaccctgtgatgtgggagcaggccacttcaccagaacctctgtggcagaaaaatttctttcttttaaaatgatgagggggaaccttcagacagtgtcctgattagggtgggtggagaggggggtttcccagaaagtcaggcagggcagggcagaagccctctgggttaactgtgtgcttttgatatgaaggcaggtaagactggacaggtgggggtgttagtgaggggatggtgtagggtgctgaagaactccacttgggctctgcgcaccagggaaaatgaccacaaaacatcccatcttcactgctcagagaaggctagatctgctgtgagctaggaagccatgtgggggcagctgatgagtcatcaaatgggagaaatctgagagccatgtgttccacaggcctctggtccttgttcaggcagcagggcactgtgagatgtggctccttggccctttccagccaccaccttgattgcctgctgcaaggaaagagactgaagcccaagaatggggtcttgctcaccataggatgatggctcagtgtgcagagctgagctatggcccaagaggcaaaaggtggggatgacccaggctgagctgggggatccaactgaacatgcacttgctaagaagctgtgggctatgatgccttgggaccccagtctgggtcgagaattgtagcaaaacaggctactggtaaaagttcttgggaagccaactcacttttgctttcatccgtgggcaaacaaacctctgatcaaccacaccacaatggtgtcactctgtaaggcacaggcagacaaggcatccagccttgcacactccagggcccacacatgtccagaatacaatggttcttgttgagactccactcttccaactcagacagaagctccccaatctcctcagccactcccaacaactggaggtctgaaaactttcatgcatgccgctatggtctaaaccactcgtggtggttttgattttcattttcctgataatcagtgatgctgagcacctttccatatgccttttcaccaactggatatcttctgtggctaaatgtctattgaaatccattgcccatttacaaatctgcttttttgtgggcttcttgatgtttttctttttttttttcctatttatttatacaagttccttagatattttggatatttttaaaaatgattttcaattccattgccccagttataaatcttttttttttttttttttttttttgagacagagttttgctgttgttgtccaggctagagtgcaatggtgcaatcttggttcacagcaacctccacctcccaaagtcaagcaattctcctgcctcagcctcctgagtagctgggattacaggcatgtgccaccatgcccggctaatttttgcatttttagtagaggcagggtttctccatgttggtcaggctggtcttgaactcccggtctcaggtgatctgtccaccttggcctcccaaagtgctgggattacaggcatgagccactgtgcccggccaattatccctttttgtggtttttttttggggggggtggggggaagaacagagtctcgctctgtcacccagtctggagtgcactggtgtgatctcggctcactgcagcctccgcctcccagattccagcaattctcctgactcagtttcccgggtagctaagattacgggcgcgcaacacatgcccagctaatttttgtatttttagtagagacggggtttcaccatgttggccaggctggtctcaaactcctgacctcaggtgatccacccacctcccaaagtgttgggattacaggcgggagccaccactcccggccccattttgtgttttaacatcagtcgacactcgtattttaaaataataacaatgaatggcggtaccttagaacaaggtaattatacatctttctcttgtcctagtgcagacattttgtctataaaatgttattcacagatgaattcatgaaaacattactgtgaattttaaatccatatacaagtgtatgcttgttcatgaatacttcaataaaataaaactaatagcaaaaaagaattccagagttgaagcagtttcaggaaaaaggagttggcagtatgaagtaaaatagaaaaaaatgggtttttttttaaatgggtatatttgtgtctacaacttttttttaattatagcattagacaatgtgtatatatatatacatatataaagcaatggaagtggcattgttttcatactagtctaggatattaaaatatatgtaatatgtgattggcaaaataatggccccccaaagatgtccacagattcctagaaccttacatgaaaacggtacatcatgcatgtgattcaggtaaagaccttgacatgaggagactaccctggtgctatggaatgaacgttgtgttccgtcaatgttcatgtgttaaaatcctaaccctcaaggtgatggtattaggaggttaagccttacgggagactctgccctcatgactgggattagcaccttattacaggcacaagggagcttgtttgttcctctcaccatgcgaagacacagcaagaaggaagcctctatgagaaagcaggccttcaccagacaccaagactgccggcaccttgatcttgcatttctcagcctccaggactgtgagaaacgaagttctgttatttataagctacctggtctaatgcatttccttgtagcagcctgtatggattaggacagtgggctcatgtggatgatgacggtgtgtccattcaggactaagtaagcacatgagtccttaacagtggaagagaagggggaaggaaagagccacagagacatgtggccacagaagaagggtccatgggatgcaaggttgctaatggtgagagtggagaagagcccaaagccaaaaaatgcaggcagactccagaatgtggaaaaggcgagaaaaaagatcccctagagcctctagagatgaaggtagcctttccaccacctagattttagcccagtgagatccacatcatactctgacatacaggagtgtaataaatttgttttatgccctgacatagtggtagtttgttgtagcagcaatggactagtaatatataaatatatatatacacacacacacacaaacactacccccccacca

SEQ ID NO: 9376 - DNA, 474 bp, Homo sapiens
tttgagatggagtctcactctgttgcccaggctggagtgcactggcacaacctcagctcactgcaaaatccatctctcaggttcaagcgattctcctgccccagcctccctagtagctgggatcacaggcgtgcaccaccatgcctggctaatttttgtatttttaatagagatggggttccaccatgttggccaggctggtcctaaacttctgacctcaggtgatccacccacctcagcctcccaaagtgttgggattacaggcgtgagccaccgtgcctggtcaaatttactttcttgataggtgtcagaaaataaggaaagtctgaagaaaaaaaaattgtctaaaatggctgcatcttggccatatgggtaatagaaaccgggcctatgaacgaaagctgaacctcacctgcaaggccagagtctgtcaaatatcacactgacaggcaccgattacaacctgcctattgg

SEQ ID NO: 9377 - DNA, 1349 bp, Homo sapiens
gtatgacataaattttccttccttttactttcagccttcaaatatttgaattcagtttcttgttcacatttgggtcatgtttgttgctgtttttttgttttgctttgttttttgtaaatttcactctgccatctctgtttttaattagtatatttagagtgcttatatttaatgtaattattgatatcttagggtttatatttgccattttatttttcttttctttttttacctctgtttcttatttctctttttataatcctgctttcctgtggattacttgaatatacttttaaattccattataatttatctatagtgttttatatgtatttctttgtaggctttttttagtagttgttcttcatattacattatagataacttattgccatctattggcatctgatcataccattgtctgtgaagtgaaaaacacttaccttcttgcagattcttttggtcttttttatttagaagataattatcttaaatatttcatctttatatatttagttatataatctttgcttcaaccattaggtatgatttagaaatctcaaaagaagaagaaacctactgtgtttccccatagttaaactcactctgatcttcttttcttcctgatcttccaagatatcctcttttattgttttctttctgtttagagatgtttctttaactgttctcttaggataagtgttttggttacaaatctcagaactcttagggtttttgtttctttcttttttttttttttttagttttgttttaaacgtgaagatttcttgatttccccttcattcttaaaggatattttcatgatagaattctgaatggactgcccccttgcctactttttttttttgctatacttgaacaatattatgccacttatcctggaacttcacagatatttatgagaaatctactctcatttgaattcccatttttctatcattgcctctaagatttttttaatccaataaaaaatacaaagttttagcaaaaacatggtaaattccagcaagaaatagaagatacaaatttgtttttattaggagttattatatatttatggcatgttcatcctgactagggaaatcgcaaatcctcctttaatatccatcagccatcaaaattatttaatatataaaacaaaattatttaagatataaaagagaatcacatggatattttcaaattataaatatgataactgaaataaaaaatctaaaggagggctcaaaagcaaaatgtaggtgatagtgagaagaagcaaagaacttgaaaacataaaaattacccagtatgatcaacagagagaaaataaaccagaaaaaaaccaa

SEQ ID NO: 9378 - DNA, 302 bp, Homo sapiens
tttttttttttttttttttttttgacagagtcttgctctgtcgtccaggctggagtgcagtggcgcgatctcggctcactgcaagctccgccttccgggttcacgccatcctcctgcctcagcctcccgagtagctgggattacaggcgcccgccaccacgcccggctaattttttgtatttttagtagatacagggtttcaccatgttagccaggatggtctcgatctcctgacctcgtgatccacccgccttggcctcccaaagtgctgggattacaggcgtgaaccactgtgcccggcc

SEQ ID NO: 9379 - DNA, 10364 bp, Homo sapiens
cccctactcgcccttccgcatccatgctctgcccactggggatgccagcaagtgcctcgtcacaggtgggtgcccacccgctgcccgtgccctgctcaccacccagcccctcaaagcccctccagaacctggcctggtccccaggggtctgctggtcggagagcacacatgccctagccctggcccctccctccctcacccccgcccaatgccccagcccacgttgagcaccgcctggcctcacactcttctctctttccagtgtccattggaggccatggcctgggtgagtgccctttctctcctcttcttggtgtgggccagggtggttggcggtagggggcgggcagcgggaacagagagggctggctccagcccaccagctccctgagcaggatctcccgcatggcaggtgcctgcctgggccctcgaatccagattgggcaggagacggtgatcacggtggatgccaaggcagccggtgaggggaaggtgacatgcacggtgtccacgccggatggggcagagctcgatgtggatgtggttgagaaccatgacggtacctttgacatctactacacagcgcccgagccgggcaagtacgtcatcaccatccgcttcgggggtgagcacatccccaacagccccttccacgtgctggtaagttctgtagccacagcaagactagatggctggggaggggggcctggcccttttagcagcagcagggatcccagataactgtccccaaggaatcccacttctctgagggctcctggggccagagtgctccaggatggagccttaactttccccacagcacccccgaagtgggaggagagcatggccctgccccctgcccagtgctgtcagctgtctctggaggaacccgctgtgctctccaccatccccagctccatctccccagaggctgccctgcaggaggatgaacacccaaattatcacccagcatttcaggttcctgggccattctctgagtcagcccctaggcctgtgaggctgccacaccctgtgcccccgtgccttgcctccccaggcgtgtgaccccctgccgcacgaggaggagccctctgaagtgccacagctgcgccagccctacgctcctccccggcccggcgcccgccccacacactgggtactgcgcctcccaccaggcgatgtcctcctcctcctccccttccttcatttcttctctctactcctctgcagccagggcggggacatggtctgggggcctcttggggagcaggcaagagttaggctgggcagatggaaccccacttgggcacagcactccttctcttgcagctgacgcacctctcctgccacgctggtttcatgattaactaccttgttctttcctcactctccagcttcagtcatagcatgggtcaaactcctgggccttccccagtcactgactgttccctctcacctgctgcaggccacagaggagccagtggtgcctgtggagccaatggagtccatgctgaggcccttcaacctggtcatccccttcgcggtgcagaaaggggagctcacaggtactgccctgtggctcccaggcatgagggctgaggggagaaaccctcttccaggcccagtcctgtgtcttaatgatgaaaacaaaggcccagagagaggaagtgagctctacccagggtcacacagcaagttgggcagagccagaactcaggtgcaagccatctgtccccagttcagggctcaggccactgccacaggctgtctcttgatgcctggcttctcgggtggcagcagaagcactcaggaccaggcctgggacagcagggaggttgcagtgggggaaaccagggtctccacgtaactgtgtctgccctgcaggagaggtgcggatgccctcggggaagacggcacggcccaacatcaccgacaacaaggacggcaccatcacggtgaggtatgcacccactgagaaaggcctgcaccagatggggatcaagtatgacggcaaccacatccctggtgagttaggggctgggctgggctggggcttgggtgagaggagcaggccgtagcttcagtcctgccttccctctttcaacaaatatttattgagcacccgctgtgtgcagacaccaggcgaggccccagggaggcttataccctggtgggaagcagacctccaccagctgggtccctacggcacagacggagggggttggcagggaggctgctggaaggtgctggggccaaggtgggctcagataatccctgatgctgacccagccccctttttctctgtatccccagggagccccttacagttctatgtggatgccatcaacagccgccatgtcagtgcctatgggccaggcctgagccatggcatggtcaacaagccagccaccttcactattgtcaccaaagatgctggagaaggtgagggagctgcaggtcgcaggctggggtggagactcaccaggggcaggggtgagggcaggacctctgatcttggccacacctccacctacagggggtctgtcactggccgtggagggcccatccaaggcagagatcacctgtaaggacaacaaggatggcacctgcaccgtgtcctatctgccgactgcgcctggagactacagcatcatcgtgcgcttcgatgacaagcacatcccggggagccccttcacagccaagatcacaggtgaggcgggtgtatgggcatgtacagcccatgaggcacacacaccgcatacagtgcactcatgtgcaagcccagcccgttcaagtcactcgtgacattagggcagaggcccttcaaggtgtgaggggtcatattttgataaatgtaaaaacactctgttctccacggcagctaagaagcagtcagccactccttgtgcctgaaaacacattgcctcatttagtctttgaagtcatttgttttgtttttgtttttgagagggagtcttgctctgtcacccaggctggagtacagtggcacgatctcggctcactgcaacctccgcctcccgggttcatgccattcttctgcctcagcctcccaagtagctgggactccaggcgcccgccaccatgcctggctattttttgtatttttagtagagacagggtttcaccgtgttagccaggatggtctcgatctcctgaccttgtgatccacctgcctcggcctcccaaagtgctgggattacaggtgtgagccaccacgcccagcatgaagtcactcttaagaagttagggcacggataatccttttgatagataaggaacccctgtcccagagaggccaagcaacatgattacagccacacagcgaggaaggggtctgggcggtccagtctagtgttttgttatcacaacatcatgtgactcagggttaaaatgcaggaggtttcctttagggatttagcccacaaggactgaggcagccacagtggaattggggtacaggcccctcttagtctctggcagctcacatgtgagtgcagactgcactttccaggccttgggcctccgtgcacctgggagtggccccccgtgtctgttgagtccagggggggctgctcaggagggttcctgagccctgtgagggcagggcctgcctggagtcatagcagcctgatgccccaactcccccaccaggtgatgactccatgaggacctcacagctgaatgtgggcacctccacggacgtgtcactgaagatcaccgagagtgatctgagccagctgaccgccagcatccgtgccccctcgggcaacgaggagccctgcctgctgaagcgcctgcccaaccggcacattggtgagcgtggggcctcacggggacctcaggggtgggggcccacaggatgctctgcctaacacccactttccacagggatctccttcacccccaaggaggtcggggagcacgtggtgagcgtgcgcaagagtggcaagcatgtcaccaacagccccttcaagatcctggtggggccatctgagatcggggacgccagcaaggtgcgggtctggggcaaggggctttccgagggacacacattccaggtggcagagttcatcgtggacactcgcaatgcaggtacctcctgccccagagagcccccattccagcgggtgcctcccacaggcacttgtcctcgtcctgcccagcacccccttggccgcactctctcctccctgaaacttcctgaccagtctgcgtcaggattcgcattctggggccccttgcgggaaagtgaatggccccgcatcagttctctcccttttaagagaaagctcagctgtcctgagtttctgtccctcccttgctcactggaatccaagaggcttaccttagggaattttccagaccgcctgtcccgtggtgcccccgctcctcccactgagccatttttgttagtggtcactacacacatcggtgcccattctgggtggagcctgcagtctggggagaggaaagcattgtggcttggccagcctaggactgagggagatgtgttccttgctttcccccaggttatgggggcttggggctgagtattgaaggcccaagcaaggtggacatcaactgtgaggacatggaggacgggacatgcaaagtcacctactgccccaccgagcccggcacctacatcatcaacatcaagtttgctgacaagcacgtgcctggtaaggctctgggcagaggtcggtggcgagagacagggaggccaggaggctggggctctgaggttcctgacccaccctttgtccccacttcaggaagccccttcactgtgaaggtgaccggcgagggccgcatgaaggagagcatcacccggcggagacaggcaccttccatcgccaccatcggcagcacctgtgacctcaacctcaagatcccaggtagaagcctggaggaccctgggtggggcgggtggtgggagagggctggcccgggccagagcccacctgtcgggcctccaccctgcttcctcacccctcgcttccctccctcaccctggctcccttgaccacacaggaaactggttccagatggtgtctgcccaggagcgcctgacacgcaccttcacacgcagcagccacacctacacccgcacggagcgcacggagatcagcaagacgcggggcggggagacaaagcgcgaggtgcgggtggaggagtccacccaggtcggcggggaccccttccctgctgtgtttggggacttcctgggccgggagcgcctgggatccttcggcagcatcacccggcagcaggagggtgagcaccgcacactgggccggccgggtcctcacggcgggatgggagggtgctgcggaccaggcttgatgctggcagactggccccgaaggccagggcaggtctgagcagaggaggaggtttaactgatgggggagggaagggccagggctaggaggaatcccagtgttgccctgacatcccccaaaccctgcaggtgaggccagctctcaggacatgactgcacaggtgaccagcccatcgggcaaggtggaagccgcagagatcgtcgagggcgaggacagcgcctacagcgtgcgctttgtgccccaggaaatggggccccatacggtcgctgtcaagtaccgtggccagcacgtgcccggcagcccctttcagttcactgtggggccgctgggtgaaggtggtgcccacaaggtgcgggccggaggcacagggctggagcgaggtgtggccggcgtgccaggtaaggggcaggtggccaggagtggggatgaagtcagggcagccagtgtgaggggcgatgatgctgaagtccactaccttgcctgtccccagccgagttcagcatctggacccgggaggctggcgctgggggcctgtccattgctgtggagggtcctagcaaagcggagattgcatttgaggatcgcaaagatggctcctgcggcgtctcctatgtcgtccaggaaccaggtgggcgtccacactggcagtggggctgggcctgcctgaccttccagactgggtttctgcccactggccaggcaggagatgcttggggccacagaactcccctccccggagccccctgctcttcctctgccccgtctccctctaccccacaccctcagaaacatgtgtctgcctccagatctgagcgctgaccacagagcctttcctgggataaggccagggtggggaggctcccgccctgccaacctccatcccggaacctgtgctgactggtctctctccccaggtgactatgaggtctccatcaagttcaatgatgagcacatcccagacagcccctttgtggtgcctgtggcctccctctcggatgacgctcgccgtctcactgtcaccagcctccaggtttgtgcccagggtgggggtggagggtttctgctatctgagagatgggcaggagttgaggacagcaggtccatggggccagggatttagcagtgaccttggaagggccagttaggagtcccttctcataaggcacgaggcagggcccttggggacggtgggctcccaccctgggggcttgcccgtgcactcaggcatgccacgcctcgttctgcctttctcagggtgtgtctgcctgtcctactgccacctgccatttcttgttacagtttgttccaccttctgttgtaagaatgctagatgacaacatttataagaatgagagcataaaatctatacaaactaagagtaaaccagtttgcacagagggtgtgagaggctcctctaaagggaatgcctatgggctgcagagcctgggctgcatcctcttcaggccgctgggggcctggcttgctttctcttgctgctgacttctagagatgtggtgtgttcctttcattctgtcacagcggacatgtgcaaggaaggctttcagcaagtcacactgaaacatgcaaaccagggggccaggtgtccaggggacacattgtaaaggagcttctgcataaggcgcacagaatgggcttcaccccacctccttctcccacgcgcctcctggctgcccctcagggtggtcacattggcccatccagagtccttgtgcatctcctcctcccactcctgaactgggctccccgatgcaggctccaatccctcccccagagcccttctgtgcttcttctggtcctccctgttggtccaccttctccaggaagctctcccaggccaggccagtgaaactcagcttcctacctcagagctctctggcacccccagcccacacagcccatcaggcacttgccctccgccctcagcctgcttcacacagagtggggcccttccttcctcagccaggacagggcacatcgtctgtcatctcccacacaccaagcacagctaggatagcaggtgcacacatagggttgcataccggaccctggctcctcctgctcccaggctgggctggcaggcaggggccaggctgggcatggggtggcagcagcctttgggctgggcttacagtgagcaccgtgtggggcttcagagaagactgctccagccccggcctcccaggagtctgagcatcctccgtggcctttgcaggagacggggctcaaggtgaaccagccagcgtcctttgccgtgcagctgaacggtgcccggggcgtgattgatgcccgggtgcacacaccctcgggggctgtggaggagtgctacgtctctgagctggacagtggtgagctggccctgcccctgccaactcccttccgggctggggccttctggggaggggaaggatggaggctaagccaccaaccctttatccacagacaagcacaccatccgcttcatcccccacgagaatggcgtccactccatcgatgtcaagttcaacggtgcccacatccctggaagtcccttcaagatccgcgttggggagcagagccaggctggggacccaggcttggtgtcagcctacggtcctgggctcgagggaggcactaccggtgagtgcctggagctggggaacagggtgacttctgggggtgcttggccactagtctggtgctgctttgctccagaggtaggggccctgcttcctaagccaggagtccccacagaggctgtccagggagctggggcccagtccctcttgggccacaagcccttcctgccctcagccttgctacctctggcccccaggtgtgtcatcagagttcatcgtgaacaccctgaatgccggctcgggggccttgtctgtcaccattgatggcccctccaaggtgcagctggactgtcgggagtgtcctgagggccatgtggtcacttatactcccatggcccctggcaactacctcattgccatcaagtacggtggcccccagcacatcgtgggcagccccttcaaggccaaggtcactggtgagtgccagtttgggggaggtccacccagcctgcagcccagcccagcctggagggctccggtggccacgcacatctaggccatagtctgcccccagacatcatggtcagtttaccagggctagaggtgggcctggctctacacagtacacgttctgtggagtcgggcatgatcacgtaaaaatgccattcttcctctccatcgtggcccctcactccttcagctctggcctgcgctggctcctcaggctctagcaccactttcttccctcctggcttcccatattcctccgctccaagaagacacagtcggtattgagcaagcttcccctcttgaggctgtctgtaggatgagttgggtgggtgttcctttgtaaagtggctcttaccctgtgagttagcctgagttcccagacaaagcctgcaaggatgagggacgcagcatctgaggccccagccctagggtggagcaccagttggagctggcagctcagggccctggctgggaatgaggctgtgctcctagagtggcccttggaggaatttgagggggagcctcaaatgcaggcagtgagtcccacagggtggcagtgctggccgagggtcccctgcctggggaagaacaggaagcccttctgactaggtttgtgccccctccacccacccctcaggtccgaggctgtccggaggccacagccttcacgaaacatccacggttctggtggagactgtgaccaagtcctcctcaagccggggctccagctacagctccatccccaagttctcctcagatgccagcaaggtggtgactcggggccctgggctgtcccaggccttcgtgggccagaagaactccttcaccgtggactgcagcaaagcaggcaggtggcggggggagggcgtctcccggggtgtgagcaagaagccgtcagggagcagggtgtgggtcacagtaggggactccctggtgtgagcctgtccctctgcctccctctccaggcaccaacatgatgatggtgggcgtgcacggccccaagaccccctgtgaggaggtgtacgtgaagcacatggggaaccgggtgtacaatgtcacctacactgtcaaggagaaaggggactacatcctcattgtcaagtggggtgacgaaagtgtccctggaagccccttcaaagtcaaggtcccttgaatcccaaaagtgcctccccagcctcagcccccacctccagccacacacacattacacacacacacacacacacacaaatgtgccacacccagacacgcacagaatcagacactacaaacacctgccttgggggtgaagtgaaggcccagcctccccaccccaccgcgccccaggggttggaggaccttgtctgtgtcaggacagtgtccctccctgggaatgtgacatgagggccgactggggccaggctcaggggcagaggctgggacacaaggggctggcgagggctgcgaggccagggaagccctgagtttctggcggggctgagcagtgggggagcattgtgttgtgggtgtctgtgtgtgaggtcaccctcaaactgcaccgccggccagataccctcctgaccccgaggacttggtctggtctctctggtggctacaaccccagagttttaaggacttggaaaggaaagcacaatcagagaagaaaacagcccccgaaccagcaggagtggcctggcacatggaccggcctgagcgatgtgcactccacccaagccaggctcccagggggcctgatttctctctcactgtctctttttttaaaatggttgcacggctctgccccatggggggccttttttacacactgcgaggcccagctttctaggggacttttgcacatgtcatgcagctcagctgggagctgcttaggtggaaaactccaaataaagtgcggctgtcgcagagggttggc

SEQ ID NO: 9380 - DNA, 6673 bp, Homo sapiens
cacagctgaatgtgggcacctccacggacgtgtcactgaagatcaccgagagtgatctgagccagctgaccgccagcatccgtgccccctcgggcaacgaggagccctgcctgctgaagcgcctgcccaaccggcacattggtgagcgtggggcctcacggggacctcaggggtgggggcccacaggatgctctgcctaacacccactttccacagggatctccttcacccccaaggaggtcggggagcacgtggtgagcgtgcgcaagagtggcaagcatgtcaccaacagccccttcaagatcctggtggggccatctgagatcggggacgccagcaaggtgcgggtctggggcaaggggctttccgagggacacacattccaggtggcagagttcatcgtggacactcgcaatgcaggtacctcctgccccagagagcccccattccagcgggtgcctcccacaggcacttgtcctcgtcctgcccagcacccccttggccgcactctctcctccctgaaacttcctgaccagtctgcgtcaggattcgcattctggggccccttgcgggaaagtgaatggccccgcatcagttctctcccttttaagagaaagctcagctgtcctgagtttctgtccctcccttgctcactggaatccaagaggcttaccttagggaattttccagaccgcctgtcccgtggtgcccccgctcctcccactgagccatttttgttagtggtcactacacacatcggtgcccattctgggtggagcctgcagtctggggagaggaaagcattgtggcttggccagcctaggactgagggagatgtgttccttgctttcccccaggttatgggggcttggggctgagtattgaaggcccaagcaaggtggacatcaactgtgaggacatggaggacgggacatgcaaagtcacctactgccccaccgagcccggcacctacatcatcaacatcaagtttgctgacaagcacgtgcctggtaaggctctgggcagaggtcggtggcgagagacagggaggccaggaggctggggctctgaggttcctgacccaccctttgtccccacttcaggaagccccttcactgtgaaggtgaccggcgagggccgcatgaaggagagcatcacccggcggagacaggcaccttccatcgccaccatcggcagcacctgtgacctcaacctcaagatcccaggtagaagcctggaggaccctgggtggggcgggtggtgggagagggctggcccgggccagagcccacctgtcgggcctccaccctgcttcctcacccctcgcttccctccctcaccctggctcccttgaccacacaggaaactggttccagatggtgtctgcccaggagcgcctgacacgcaccttcacacgcagcagccacacctacacccgcacggagcgcacggagatcagcaagacgcggggcggggagacaaagcgcgaggtgcgggtggaggagtccacccaggtcggcggggaccccttccctgctgtgtttggggacttcctgggccgggagcgcctgggatccttcggcagcatcacccggcagcaggagggtgagcaccgcacactgggccggccgggtcctcacggcgggatgggagggtgctgcggaccaggcttgatgctggcagactggccccgaaggccagggcaggtctgagcagaggaggaggtttaactgatgggggagggaagggccagggctaggaggaatcccagtgttgccctgacatcccccaaaccgggcaggtgaggccagctctcaggacatgactgcacaggtgaccagcccatcgggcaaggtggaaaacagcagagatcgtcgaggaaaaggacagcgcctacagcgtgcgctttgtgccccaggaaatggggccccatacggtcgctgtcaagtaccgtggccagcacgtgcccggcagcccctttcagttcactgtggggccgctgggtgaaggtggtgcccacaaggtgcgggccggaggcacagggctggagcgaggtgtggccggcgtgccaggtaaggggcaggtggccaggagtggggatgaagtcagggcagccagtgtgaggggcgatgatgctgaagtccactaccttgcctgtccccagccgagttcagcatctggacccgggaggctggcgctgggggcctgtccattgctgtggagggtcctagcaaagcggagattgcatttgaggatcgcaaagatggctcctgcggcgtctcctatgtcgtccaggaaccaggtgggcgtccacactggcagtggggctgggcctgcctgaccttccagactgggtttctgcccactggccaggcaggagatgcttggggccacagaactcccctccccggagccccctgctcttcctctgccccgtctccctctaccccacaccctcagaaacatgtgtctgcctccagatctgagcgctgaccacagagcctttcctgggataaggccagggtggggaggctcccgccctgccaacctccatcccggaacctgtgctgactggtctctctccccaggtgactatgaggtctccatcaagttcaatgatgagcacatcccagacagcccctttgtggtgcctgtggcctccctctcggatgacgctcgccgtctcactgtcaccagcctccaggtttgtgcccagggtgggggtggagggtttctgctatctgagagatgggcaggagttgaggacagcaggtccatggggccagggatttagcagtgaccttggaagggccagttaggagtcccttctcataaggcacgaggcagggcccttggggacggtgggctcccaccctgggggcttgcccgtgcactcaggcatgccacgcctcgttctgcctttctcagggtgtgtctgcctgtcctactgccacctgccatttcttgttacagtttgttccaccttctgttgtaagaatgctagatgacaacatttataagaatgagagcataaaatctatacaaactaagagtaaaccagtttgcacagagggtgtgagaggctcctctaaagggaatgcctatgggctgcagagcctgggctgcatcctcttcaggccgctgggggcctggcttgctttctcttgctgctgacttctagtagatgtggtgtgttcctttcattctgtcacagcggacatgtgcaaggaaggctttcagcaagtcacactgaaacatgcaaaccagggggccaggtgtccaggggacacattgtaaaggagcttctgcataaggcgcacagaatgggcttcaccccacctccttctcccacgcgcctcctggctgcccctcagggtggtcacattggcccatccagagtccttgtgcatctcctcctcccactcctgaactgggctccccgatgcaggctccaatccctcccccagagcccttctgtgcttcttctggtcctccctgttggtccaccttctccaggaagctctcccaggccaggccagtgaaactcagcttcctacctcagagctctctggcacccccagcccacacagcccatcaggcacttgccctccgccctcagcctgcttcacacagagtggggcccttccttcctcagccaggacagggcacatcgtctgtcatctcccacacaccaagcacagctaggatagcaggtgcacacatagggttgcataccggaccctggctcctcctgctcccaggctgggctggcaggcaggggccaggctgggcatggggtggcagcagcctttgggctgggcttacagtgagcaccgtgtggggcttcagagaagactgctccagccccggcctcccaggagtctgagcatcctccgtggcctttgcaggagacggggctcaaggtgaaccagccagcgtcctttgccgtgcagctgaacggtgcccggggcgtgattgatgcccgggtgcacacaccctcgggggctgtggaggagtgctacgtctctgagctggacagtggtgagctggccctgcccctgccaactcccttccgggctggggccttctggggaggggaaggatggaggctaagccaccaaccctttatccacagacaagcacaccatccgcttcatcccccacgagaatggcgtccactccatcgatgtcaagttcaacggtgcccacatccctggaagtcccttcaagatccgcgttggggagcagagccaggctggggacccaggcttggtgtcagcctacggtcctgggctcgagggaggcactaccggtgagtgcctggagctggggaacagggtgacttctgggggtgcttggccactagtctggtgctgctttgctccagaggtaggggccctgcttcctaagccaggagtccccacagaggctgtccagggagctggggcccagtccctcttgggccacaagcccttcctgccctcagccttgctacctctggcccccaggtgtgtcatcagagttcatcgtgaacaccctgaatgccggctcgggggccttgtctgtcaccattgatggcccctccaaggtgcagctggactgtcgggagtgtcctgagggccatgtggtcacttatactcccatggcccctggcaactacctcattgccatcaagtacggtggcccccagcacatcgtgggcagccccttcaaggccaaggtcactggtgagtgccagtttgggggaggtccacccagcctgcagcccagcccagcctggagggctccggtggccacgcacatctaggccatagtctgcccccagacatcatggtcagtttaccagggctagaggtgggcctggctctacacagtacacgttctgtggagtcgggcatgatcacgtaaaaatgccattcttcctctccatcgtggcccctcactccttcagctctggcctgcgctggctcctcaggctctagcaccactttcttccctcctggcttcccatattcctccgctccaagaagacacagtcggtattgagcaagcttcccctcttgaggctgtctgtaggatgagttgggtgggtgttcctttgtaaagtggctcttaccctgtgagttagcctgagttcccagacaaagcctgcaaggatgagggacgcagcatctgaggccccagccctagggtggagcaccagttggagctggcagctcagggccctggctgggaatgaggctgtgctcctagagtggcccttggaggaatttgagggggagcctcaaatgcaggcagtgagtcccacagggtggcagtgctggccgagggtcccctgcctggggaagaacaggaagcccttctgactaggtttgtgccccctccacccacccctcaggtccgaggctgtccggaggccacagccttcacgaaacatccacggttctggtggagactgtgaccaagtcctcctcaagccggggctccagctacagctccatccccaagttctcctcagatgccagcaaggtggtgactcggggccctgggctgtcccaggccttcgtgggccagaagaactccttcaccgtggactgcagcaaagcaggcaggtggcggggggagggcgtctcccggggtgtgagcaagaagccgtcagggagcagggtgtgggtcacagtaggggactccctggtgtgagcctgtccctctgcctccctctccaggcaccaacatgatgatggtgggcgtgcacggccccaagaccccctgtgaggaggtgtacgtgaagcacatggggaaccgggtgtacaatgtcacctacactgtcaaggagaaaggggactacatcctcattgtcaagtggggtgacgaaagtgtccctggaagccccttcaaagtcaaggtcccttgaatcccaaaagtgcctccccagcctcagcccccacctccagccacacacacattacacacacacacacacacacacaaatgtgccacacccagacacgcacagaatcagacactacaaacacctgccttgggggtgaagtgaaggcccagcctccccaccccaccgcgccccaggggttggaggaccttgtctgtgtcaggacagtgtccctccctgggaatgtgacatgagggccgactggggccaggctcaggggcagaggctgggacacaaggggctggcgagggctgcgaggccagggaagccctgagtttctggcggggctgagcagtgggggagcattgtgttgtgggtgtctgtgtgtgaggtcaccctcaaactgcaccgccggccagataccctcctgaccccgaggacttggtctggtctctctggtggctacaaccccagagttttaaggacttggaaaggaaagcacaatcagagaagaaaacagcccccgaaccagcaggagtggcctggcacatggaccggcctgagcgatgtgcactccacccaagccaggctcccagggggcctgatttctctctcactgtctctttttttaaaatggttgcacggctctgccccatggggggccttttttacacactgcgaggcccagctttctaggggacttttgcacatgtcatgcagctcagctgggagctgcttaggtggaaaactccaaataaagtgcggctgtcgcagagggttggc

SEQ ID NO: 9381 - DNA, 10368 bp, Homo sapiens
cccctactcgcccttccgcatccatgctctgcccactggggatgccagcaagtgcctcgtcacaggtgggtgcccacccgctgcccgtgccctgctcaccacccagcccctcaaagcccctccagaaccctggcctggtccccaggggtctgctggtcggagagcacacatgccctagccctggcccctccctccctcacccccgcccaatgccccagcccacgttgagcaccgcctggcctcacactcttctctctttccagtgtccattggaggccatggcctgggtgagtgccctttctctcctcttcttggtgtgggccagggtggttggcggtagggggcgggcagcgggaacagagagggctggctccagcccaccagctccctgagcaggatctcccgcatggcaggtgcctgcctgggccctcgaatccagattgggcaggagacggtgatcacggtggatgccaaggcagccggtgaggggaaggtgacatgcacggtgtccacgccggatggggcagagctcgatgtggatgtggttgagaaccatgacggtacctttgacatctactacacagcgcccgagccgggcaagtacgtcatcaccatccgcttcgggggtgagcacatccccaacagccccttccacgtgctggtaagttctgtagccacagcaagactagatggctggggaggggggcctggcccttttagcagcagcagggatcccagataactgtccccaaggaatcccacttctctgagggctcctggggccagagtgctccaggatggagccttaactttccccacagcacccccgaagtgggaggagagcatggccctgccccctgcccagtgctgtcagctgtctctggaggaacccgctgtgctctccaccatccccagctccatctccccagaggctgccctgcaggaggatgaacacccaaattatcacccagcatttcaggttcctgggccattctctgagtcagcccctaggcctgtgaggctgccacaccctgtgcccccgtgccttgcctccccaggcgtgtgaccccctgccgcacgaggaggagccctctgaagtgccacagctgcgccagccctacgctcctccccggcccggcgcccgccccacacactgggtactgcgcctcccaccaggcgatgtcctcctcctcctccccttccttcatttcttctctctactcctctgcagccagggcggggacatggtctgggggcctcttggggagcaggcaagagttaggctgggcagatggaaccccacttgggcacagcactccttctcttgcagctgacgcacctctcctgccacgctggtttcatgattaactaccttgttctttcctcactctccagcttcagtcatagcatgggtcaaactcctgggccttccccagtcactgactgttccctctcacctgctgcaggccacagaggagccagtggtgcctgtggagccaatggagtccatgctgaggcccttcaacctggtcatccccttcgcggtgcagaaaggggagctcacaggtactgccctgtggctcccaggcatgagggctgaggggagaaaccctcttccaggcccagtcctgtgtcttaatgatgaaaacaaaggcccagagagaggaagtgagctctacccagggtcacacagcaagttgggcagagccagaactcaggtgcaagccatctgtccccagttcagggctcaggccactgccacaggctgtctcttgatgcctggcttctcgggtggcagcagaagcactcaggaccaggcctgggacagcaggggaggttgcagtgggggaaaccagggtctccacgtaactgtgtctgccctgcaggagaggtgcggatgccctcggggaagacggcacggcccaacatcaccgacaacaaggacggcaccatcacggtgaggtatgcacccactgagaaaggcctgcaccagatggggatcaagtatgacggcaaccacatccctggtgagttaggggctgggctgggctggggcttgggtgagaggagcaggccgtagcttcagtcctgccttccctctttcaacaaatatttattgagcacccgctgtgtgcagacaccaggcgaggccccagggaggcttataccctggtgggaagcagacctccaccagctgggtccctacggcacagacggagggggttggcagggaggctgctggaaggtgctggggccaaggtgggctcagataatccctgatgctgacccagccccctttttctctgtatccccagggagccccttacagttctatgtggatgccatcaacagccgccatgtcagtgcctatgggccaggcctgagccatggcatggtcaacaagccagccaccttcactattgtcaccaaagatgctggagaaggtgagggagctgcaggtcgcaggctggggtggagactcaccaggggcaggggtgagggcaggacctctgatcttggccacacctccacctacagggggtctgtcactggccgtggagggcccatccaaggcagagatcacctgtaaggacaacaaggatggcacctgcaccgtgtcctatctgccgactgcgcctggagactacagcatcatcgtgcgcttcgatgacaagcacatcccggggagccccttcacagccaagatcacaggtgaggcgggtgtatgggcatgtacagcccatgaggcacacacaccgcatacagtgcactcatgtgcaagcccagcccgttcaagtcactcgtgacattagggcagaggcccttcaaggtgtgaggggtcatattttgataaatgtaaaaacactctgttctccacggcagctaagaagcagtcagccactccttgtgcctgaaaacacattgcctcatttagtctttgaagtcatttgttttgtttttgtttttgagagggagtcttgctctgtcacccaggctggagtacagtggcacgatctcggctcactgcaacctccgcctcccgggttcatgccattcttctgcctcagcctcccaagtagctgggactccaggcgcccgccaccatgcctggctattttttgtatttttagtagagacagggtttcaccgtgttagccaggatggtctcgatctcctgaccttgtgatccacctgcctcggcctcccaaagtgctgggattacaggtgtgagccaccacgcccagcatgaagtcactcttaagaagttagggcacggataatccttttgatagataaggaacccctgtcccagagaggccaagcaacatgattacagccacacagcgaggaaggggtctgggcggtccagtctagtgttttgttatcacaacatcatgtgactcagggttaaaatgcaggaggtttcctttagggatttagcccacaaggactgaggcagccacagtggaattggggtacaggcccctcttagtctctggcagctcacatgtgagtgcagactgcactttccaggccttgggcctccgtgcacctgggagtggccccccgtgtctgttgagtccagggggggctgctcaggagggttcctgagccctgtgagggcagggcctgcctggagtcatagcagcctgatgccccaactcccccaccaggtgatgactccatgaggacctcacagctgaatgtgggcacctccacggacgtgtcactgaagatcaccgagagtgatctgagccagctgaccgccagcatccgtgccccctcgggcaacgaggagccctgcctgctgaagcgcctgcccaaccggcacattggtgagcgtggggcctcacggggacctcaggggtgggggcccacaggatgctctgcctaacacccactttccacagggatctccttcacccccaaggaggtcggggagcacgtggtgagcgtgcgcaagagtggcaagcatgtcaccaacagccccttcaagatcctggtggggccatctgagatcggggacgccagcaaggtgcgggtctggggcaaggggctttccgagggacacacattccaggtggcagagttcatcgtggacactcgcaatgcaggtacctcctgccccagagagcccccattccagcgggtgcctcccacaggcacttgtcctcgtcctgcccagcacccccttggccgcactctctcctccctgaaacttcctgaccagtctgcgtcaggattcgcattctggggccccttgcgggaaagtgaatggccccgcatcagttctctcccttttaagagaaagctcagctgtcctgagtttctgtccctcccttgctcactggaatccaagaggcttaccttagggaattttccagaccgcctgtcccgtggtgcccccgctcctcccactgagccatttttgttagtggtcactacacacatcggtgcccattctgggtggagcctgcagtctggggagaggaaagcattgtggcttggccagcctaggactgagggagatgtgttccttgctttcccccaggttatgggggcttggggctgagtattgaaggcccaagcaaggtggacatcaactgtgaggacatggaggacgggacatgcaaagtcacctactgccccaccgagcccggcacctacatcatcaacatcaagtttgctgacaagcacgtgcctggtaaggctctgggcagaggtcggtggcgagagacagggaggccaggaggctggggctctgaggttcctgacccaccctttgtccccacttcaggaagccccttcactgtgaaggtgaccggcgagggccgcatgaaggagagcatcacccggcggagacaggcaccttccatcgccaccatcggcagcacctgtgacctcaacctcaagatcccaggtagaagcctggaggaccctgggtggggcgggtggtgggagagggctggcccgggccagagcccacctgtcgggcctccaccctgcttcctcacccctcgcttccctccctcaccctggctcccttgaccacacaggaaactggttccagatggtgtctgcccaggagcgcctgacacgcaccttcacacgcagcagccacacctacacccgcacggagcgcacggagatcagcaagacgcggggcggggagacaaagcgcgaggtgcgggtggaggagtccacccaggtcggcggggaccccttccctgctgtgtttggggacttcctgggccgggagcgcctgggatccttcggcagcatcacccggcagcaggagggtgagcaccgcacactgggccggccgggtcctcacggcgggatgggagggtgctgcggaccaggcttgatgctggcagactggccccgaaggccagggcaggtctgagcagaggaggaggtttaactgatgggggagggaagggccagggctaggaggaatcccagtgttgccctgacatcccccaaaccctgcaggtgaggccagctctcaggacatgactgcacaggtgaccagcccatcgggcaaggtggaagccgcagagatcgtcgagggcgaggacagcgcctacagcgtgcgctttgtgccccaggaaatggggccccatacggtcgctgtcaagtaccgtggccagcacgtgcccggcagcccctttcagttcactgtggggccgctgggtgaaggtggtgcccacaaggtgcgggccggaggcacagggctggagcgaggtgtggccggcgtgccaggtaaggggcaggtggccaggagtggggatgaagtacagggcagccagtgtgaggggcgatgatgctgaagtccactaccttgcctgtccccagccgagttcagcatctggacccgggaggctggcgctgggggcctgtccattgctgtggagggtcctagcaaagcggagattgcatttgaggatcgcaaagatggctcctgcggcgtctcctatgtcgtccaggaaccaggtgggcgtccacactggcagtggggctgggcctgcctgaccttccagactgggtttctgcccactggccaggcaggagatgcttggggccacagaactcccctccccggagccccctgctcttcctctgccccgtctccctctaccccacaccctcagaaacatgtgtctgcctccagatctgagcgctgaccacagagcctttcctgggataaggccagggtggggaggctcccgccctgccaacctccatcccggaacctgtgctgactggtctctctccccaggtgactatgaggtctccatcaagttcaatgatgagcacatcccagacagcccctttgtggtgcctgtggcctccctctcggatgacgctcgccgtctcactgtcaccagcctccaggtttgtgcccagggtgggggtggagggtttctgctatctgagagatgggcaggagttgaggacagcaggtccatggggccagggatttagcagtgaccttggaagggccagttaggagtcccttctcataaggcacgaggcagggcccttggggacggtgggctcccaccctgggggcttgcccgtgcactcaggcatgccacgcctcgttctgcctttctcagggtgtgtctgcctgtcctactgccacctgccatttcttgttacagtttgttccaccttctgttgtaagaatgctagatgacaacatttataagaatgagagcataaaatctatacaaactaagagtaaaccagtttgcacagagggtgtgagaggctcctctaaagggaatgcctatgggctgcagagcctgggctgcatcctcttcaggccgctgggggcctggcttgctttctcttgctgctgacttctagagatgtggtgtgttcctttcattctgtcacagcggacatgtgcaaggaaggctttcagcaagtcacactgaaacatgcaaaccagggggccaggtgtccaggggacacattgtaaaggagcttctgcataaggcgcacagaatgggcttcaccccacctccttctcccacgcgcctcctggctgcccctcagggtggtcacattggcccatccagagtccttgtgcatctcctcctcccactcctgaactgggctccccgatgcaggctccaatccctcccccagagcccttctgtgcttcttctggtcctccctgttggtccaccttctccaggaagctctcccaggccaggccagtgaaactcagcttcctacctcagagctctctggcacccccagcccacacagcccatcaggcacttgccctccgccctcagcctgcttcacacagagtggggcccttccttcctcagccaggacagggcacatcgtctgtcatctcccacacaccaagcacagctaggatagcaggtgcacacatagggttgcataccggaccctggctcctcctgctcccaggctgggctggcaggcaggggccaggctgggcatggggtggcagcagcctttgggctgggcttacagtgagcaccgtgtggggcttcagagaagactgctccagccccggcctcccaggagtctgagcatcctccgtggcctttgcaggagacggggctcaaggtgaaccagccagcgtcctttgccgtgcagctgaacggtgcccggggcgtgattgatgcccgggtgcacacaccctcgggggctgtggaggagtgctacgtctctgagctggacagtggtgagctggccctgcccctgccaactcccttccgggctggggccttctggggaggggaaggatggaggctaagccaccaaccctttatccacagacaagcacaccatccgcttcatcccccacgagaatggcgtccactccatcgatgtcaagttcaacggtgcccacatccctggaagtcccttcaagatccgcgttggggagcagagccaggctggggacccaggcttggtgtcagcctacggtcctgggctcgagggaggcactaccggtgagtgcctggagctggggaacagggtgacttctgggggtgcttggccactagtctggtgctgctttgctccagaggtaggggccctgcttcctaagccaggagtccccacagaggctgtccagggagctggggcccagtccctcttgggccacaagcccttcctgccctcagccttgctacctctggcccccaggtgtgtcatcagagttcatcgtgaacaccctgaatgccggctcgggggccttgtctgtcaccattgatggcccctccaaggtgcagctggactgtcgggagtgtcctgagggccatgtggtcacttatactcccatggcccctggcaactacctcattgccatcaagtacggtggcccccagcacatcgtgggcagccccttcaaggccaaggtcactggtgagtgccagtttgggggaggtccacccagcctgcagcccagcccagcctggagggctccggtggccacgcacatctaggccatagtctgcccccagacatcatggtcagtttaccagggctagaggtgggcctggctctacacagtacacgttctgtggagtcgggcatgatcacgtaaaaatgccattcttcctctccatcgtggcccctcactccttcagctctggcctgcgctggctcctcaggctctagcaccactttcttccctcctggcttcccatattcctccgctccaagaagacacagtcggtattgagcaagcttcccctcttgaggctgtctgtaggatgagttgggtgggtgttcctttgtaaagtggctcttaccctgtgagttagcctgagttcccagacaaagcctgcaaggatgagggacgcagcatctgaggccccagccctagggtggagcaccagttggagctggcagctcagggccctggctgggaatgaggctgtgctcctagagtggcccttggaggaatttgagggggagcctcaaatgcaggcagtgagtcccacagggtggcagtgctggccgagggtcccctgcctggggaagaacaggaagcccttctgactaggtttgtgccccctccacccacccctcaggtccgaggctgtccggaggccacagccttcacgaaacatccacggttctggtggagactgtgaccaagtcctcctcaagccggggctccagctacagctccatccccaagttctcctcagatgccagcaaggtggtgactcggggccctgggctgtcccaggccttcgtgggccagaagaactccttcaccgtggactgcagcaaagcaggcaggtggcggggggagggcgtctcccggggtgtgagcaagaagccgtcagggagcagggtgtgggtcacagtaggggactccctggtgtgagcctgtccctctgcctccctctccaggcaccaacatgatgatggtgggcgtgcacggccccaagaccccctgtgaggaggtgtacgtgaagcacatggggaaccgggtgtacaatgtcacctacactgtcaaggagaaaggggactacatcctcattgtcaagtggggtgacgaaagtgtccctggaagccccttcaaagtcaaggtcccttgaatcccaaaagtgcctccccagcctcagcccccacctccagccacacacacattacacacacacacacacacacacaaatgtgccacacccagacacgcacagaatcagacactacaaacacctgccttgggggtgaagtgaaggcccagcctccccaccccaccgcgccccaggggttggaggaccttgtctgtgtcaggacagtgtccctccctgggaatgtgacatgagggccgactggggccaggctcaggggcagaggctgggacacaaggggctggcgagggctgcgaggccagggaagccctgagtttctggcggggctgagcagtgggggagcattgtgttgtgggtgtctgtgtgtgaggtcaccctcaaactgcaccgccggccagataccctcctgaccccgaggacttggtctggtctctctggtggctacaaccccagagttttaaggacttggaaaggaaagcacaatcagagaagaaaacagcccccgaaccagcaggagtggcctggcacatggaccggcctgagcgatgtgcactccacccaagccaggctcccaggggggcctgatttctctctcactgtctctttttttaaaatggttgcacggctctgccccatggggggccttttttacacactgcgaggcccagctttctaggggacttttgcacatgtcatgcagctcagctgggagctgcttaggtggaaaactccaaataaagtgcggctgtcgcagagggttggc

SEQ ID NO: 9382 - DNA, 276 bp, Homo sapiens
gagagggagtcttgctctgtcacccaggctggagtacagtggcacgatctcggctcactgcaacctccgcctcccgggttcatgccattcttctgcctcagcctcccaagtagctgggactccaggcgcccgccaccatgcctggctattttttgtatttttagtagagacagggtttcaccgtgttagccaggatggtctcgatctcctgaccttgtgatccacctgcctcggcctcccaaagtgctgggattacaggtgtgagccaccacgccc

SEQ ID NO: 9383 - DNA, 819 bp, Homo sapiens
gaagtaaggcaaaactgagactcatgggtgtggtctttgacagtgaaatcttttagctcttgcaagatcacatagaaaatttcaccaagttctaacatccagcaaaatggagaacatgtactggggacctttgggtttaaccagtgagactgtcttgtttatcctgttgcatttagccttccagcttatggaaaaatacaaaattcaaattctaacactgctggatttatgatatttaaggtttctattatatcagctgcctggatggagcacagaaacagcgtagtacaatatgctatgggtatattcatgaccaaagtttacaatgtggaaggagaatagaaatgcaagaggtcagttggggaattagctgcttgtgttatataactccttaaaagtggaaaatgatcacaagtaaatgtgagtagtgacagttctcttccatttcctttcttcaggtaaggaaaacacacttaatatttttgagtgtctttaaagatcttcctaaccatccaaaagagaagatgtcttatttatgtgtatatgtcgtgttgttgactgatttttttgctttttactcctgatgtgttttgtgggtgagaaggcaagcatgtaactaagatacagaaaagaccaagatgtagtggggcacagtggcttgacgcctataatctcaactactcagaaggctgaggtggaaggattgcttgaggcgaggagtccaggctgcagtgggctatgattgcaccgccacacttgctgcactctacccttgggggacagagtgaagctctgtctcaaaaaaaaaacaaaaaacaa

SEQ ID NO: 9384 - DNA, 819 bp, Homo sapiens
gaagtaaggcaaaactgagactcatgggtgtggtctttgacagtgaaatcttttagctcttgcaagatcacatagaaaatttcaccaagttctaacatccagcaaaatggagaacatgtactggggacctttgggtttaaccagtgagattgtcttgtttatcctgttgcatttagccttccagcttatggaaaaatacaaaattcaaattctaacactgctggatttatgatatttaaggtttctattatatcagctgcctggatggagcacagaaacagcgtagtacaatatgctatgggtatattcatgaccaaagtttacaatgtggaaggagaatagaaatgcaagaggtcagttggggaattagctgcttgtgttatataactccttaaaagtggaaaatgatcacaagtaaatgtgagtagtgacagttctcttccatttcctttcttcaggtaaggaaaacacacttaatatttttgagtgtctttaaagatcttcctaaccatccaaaagagaagatgtcttatttatgtgtatatgtcgtgttgttgactgatttttttgctttttactcctgatgtgttttgtgggtgagaaggcaagcatgtaactaagatacagaaaagaccaagatgtagtggggcacagtggcttgacgcctataatctcaactactcagaaggctgaggtggaaggattgcttgaggcgaggagtccaggctgcagtgggctatgattgcaccgccacacttgctgcactctacccttgggggacagagtgaagctctgtctcaaaaaaaaaacaaaaaacaa

SEQ ID NO: 9385 - DNA, 311 bp, Homo sapiens
gaagggtctactgaaaataggttgctaacattgacaacaaagtattttaagtcattgcagtaaggaattactggaaattgagtagacaaagaaaattaatatgagttccattttgatggttacttagcaagttgaacttatgagagtctttgaaatagttgcagtatgagaattgttctattgaacagcgaaacaacccaatcaggtaatagtttttccagagagtgacttgctataagggacagaagttagagacttagattctttcaaaataaaggattttttttaattgcttgaagaaggatttttgg

SEQ ID NO: 9386 - DNA, 86 bp, Homo sapiens
tttgtttttgttttttgagatggagtctctctctgtcacccaggctggagtgcagtggcgcgatcttgtctcactgcaagctccgc

SEQ ID NO: 9387 - DNA, 86 bp, Homo sapiens; identical to SEQ ID NO: 9386

SEQ ID NO: 9388 - DNA, 6943 bp, Homo sapiens
agggtacttgacatgtccacttggatgtttgataatcatttcaaacttaacatattcaaaacagaactcttaatttctacccacgccctaacctacacaaacactggaaactgtccatctcccaattattcttatctcaataaatgaaatgacaccaccagccatcaaccagggatcctgtacctcaccttccacatccaaactatcaaaagctcctcctgttttatgcccaatcagatatcgagtcatttcacctctttctgtctcctctgctacttctctcagacatgttgcttcaatttctcacctgaactactacattagcctcctacctggctctgctttcattcctgcctccctgcagttcattcttacagagaatctagaaaaagctcttcaaaagcaacaatcagatgtcactctcctactttctaaaaacttttaaagaggacctcttcttctgccagtataacagactttgtactccaaaggatatctctgttgcattttagaactcctaggaagtaatgaaaatatctaagaaaaaaaatacaagtagctaagtgcatatatgtcaacagtaaacaagccagaaaaggcagaattggccatcccttgtgtttgtgtgtgacggtcatgtgggggtgcaaatggggaccgtactgcaactcccagtttaagcctgggattctagaagggagataaaatagcccaggttggtagtaccactaaattccagataaagcaaatgtaatttaggcttctagttttttttcacagattgggatcttgagctttcaaaaaagattatcaaacaaggaaacaaaccaccgtgagtgaaaatcagcaaaactagcgttaatatattaattactccttccccaccaagggctttagatgtttgaagtatcagataagaagaaactagactaccttatataaagaaaaattaacttaaatatagactacaaaaatggtgaatggtgaacaacaatggtctctcacaatcaccaggcacttctgaaaaagagctaaagaaaaccttcagtaataaaaaaaaattatcaaaaaatttagtggataagcttttttgtaatggactaattaatgaactggaaaataaaactaaaatagtttcatgcaatggagcacagacaaagagatggaactataaggaagagaggttaataagtttggagggcagaataagcaagcctaactaaagcctatttagagcgtgaaaggcaacaaaaatatgcagaatggagatgagacaatgtttaaagagattgtggctcagaatttttctttttttttaagtgaagagttttatcttttgtgttttttgtttgtttgttttctttgtttttttttttactgttattatactttaagttttagggtacatgtgcacgacgtgcagcttcgttacatacgtatacatgtgccatgttggtgtgctgcacccattaactcgtcatttagcattaggtatatctcctaatgctatccctcccccctccccccaccccacaacagtccctggtgtgtgttgttccccttcctgtgtccatgtgttctcattgttccattcccacctatgagtgagaacatgcggtgtttggttttttgtccttgtgatagtttgctgagaataatggtttccaacttgatccatgtccctacaaaggacatgaactcatcattttttatggctgcatagtattccatggtgtatatgtgccacattttcttaatccagtctatcattgttggacatttgggttggtaccaagtctttgctattgtgaatagtgctgcaataaacatacgtgtgcatgtgtctttatagcagcatgatttataatcctttgggtatatacccagtaatgggatggctgggtcaaatggtatttctagtcctagatccctgaggaatcaccacactgacttccacaatggttgaactagtttacagtcctaccaacagtgtaaaagtgttcctatttctccacatcctctccagcacctgttgtttcctgactttttaatgatcgccattctaactggtttgagatggtatctccttgtggttttgatttgtattcctctgatggccagtgatgatgagcattttttcgtgtgtcttttggctgcataaatgtcttcttttgagaagtgtctgttcatatcctttgcccacttgttgatggggttgtttgtttttttcttgtaaatttgttggagttcattgtagattctggatattagccctttgtcagatgagtagcttgcaaaacttttctcccgttctgtaggttgcctgttcactctgatggtagtttcttttgctgtgcagaagctctttagtttaattagatcccatttgtcaattttgtcttttgttgccattgcttttggtgtttcagacatgaagtccttgcccatgcctgtgtcctgaatggtaatgcctaagttttcttctagggtttttatggttttaggtctaacatttaagtctttaatccatcttgaattaatttttgtataaggtgtaaggaagggatccagtttcagctttctacatatggctaaccagttttcccagcaccatttattaaatagggaatcctttccccatttcttgtttttgtcaggtttgtcaaagatcagatagttgtagatatgcggcattatttctgaggactctgttctgttccattgatctatatgtctgtcttggtaccagtaccatgctgttttggttactgtagccttgtagtatagtttgaagtcagctagtgtgatgcctccagctttgttcttttggcttaggattgacttggcgatgcgggctcttttttggttccatatgaacttgaaagtagttttttccagttctgtgaagaaagtcattggtagcttgatggggatggcattgaatctataaattaccttgggcagtatggccattttcacaatattgattcttcctacccatgagcatggaatgttcttccatttgtttatatcctcttttatttcactgagcagtggtttgtagttctccttgaagagctccttcatatcccttgtaagttggattcccaggtattttattctctttgaagcaattgtgaatgggagttcactcatgatttggctctctgtttgtctgttattggtgtataagaatgcttgtggattttgtacattgattttgtatcctgagactttgctgaagttgcttatcagcttaaggagattttgtgctgagacagtggggttttctagatatacagtcatgtcatctgcaaagagggacaatttgacttcctcttttcctaattgaataccctttatttccttctcctgcctaattgccctggccagaacttccaacactatgttgaataggagtggtgagaacgggcatccctgtcttgtgccagttttcaaagggaatgcttccagtttttgcccattcagtatgatattggctgtgggtttgtcatagatagctcttattattttgagatacgtcccatcaatccctaatttattgagagtttttagcatgaagcattgttgaattttgtcaaaggccttttctgcatctattgagataatcgtgatttttgtctttggttctgtttatatgttggattacgtttactgatttgtgtatgttgaaccagccttgcatcccagggatgaagcccacttgatcatggtggataagctttttgatgtgctgctggattcagtttgccagtattttcttgaggatttttgcatcaatgttcatcaaggatattggtctaaaattctctttttttgttgtgtctctgccaggctttggtgtcaggatgatgctggcctcataaaatgagttagggaggattccctctttttctgttgattggaatagtttcagaaggaatggtaccagctcctctttgtacctctggtagaattcggctgtgaatccacctggttcctggactttttttggttcgtaagctattgattattgcctcaatttcagctcctgttattggtctattcagagattcaacttgttcctggtttagtcttgggaggatgtatgtgtcgaggaatttatccgtttcttctagattttctagtttatttgcgtagaggtgtttatcatattctctgatggtagtttgtatttctgtgggattggtggtgatatcccctttatgattttttattgcgtctatttgattcttctctcttttcttcttgattagtcttgctagcagtctatcaatgttgttgatcttttcaaaaaaccagctcctggattcattcattttttgaagggttttttgtgtctctatttccttcagttctgctctgatctcggttatttcttgccttctgctagcttttgaatgtgtttgctcttgcttttctagttcttttaattgtgacgttagggtgtcaattttagatctctcctgctttctcttgtgggcatttagtgctataaatttccctctacacactgctttgaatgtgtcccagcgattctggtatgttgtgtctttgtcctcgttgatttcaaagaacatctttatttctgccttcatttcattatttacccagtagtcattcaggagcaggttgttcagtttccatgtagttgagcagttttgagtgagtttcttaatcctgatttctagtttgattgcactgtggtctgagagacagtttgttataatttctgttcttctacatttgctgaggagtgctttacttccaactatgtggtcaattttggagtaggtgtggtgtggtgctgaaaagaatgtatattctgttgatttggggtggagagttctgtagatgtctattaggtccgcttggtgcagagctgagttcaattcctgggtatccttgttaactttctgtctcgttgatctgtctgatgttgacagtgggatgttaaagtctcccattattattgtgtgggagtctaagtctctttgtaggtcactcaggacttgctttatgaatctgggtgctgctgtattgggtgcatatatatttaggatagttagctcttcttgttgaattgatccctttaccattatgtaatggccttctttgtctcttttgatctttgtttgtttaaagtctgttttatcagagactaggattgcaacccctgcctttttttgttttccatttgcttggtagatcttcctccatccctttatttggagcctatgtgtgtctctgcacgtgagatgggtttcctgaatacagcacactgataggtcttgactctttatccaatttgccagtctgtgtcttttaattggagcatttagcccatttacatttaaagttaatattgttatgtgtgaatttgatcctgtcattatgatgttagctggttcttttgctggttagttgatgcagtttcttcctagccttgatggtctttacaatttggtatgtttttgcagtggctggtaccagttgttcctttccatgtttagtgcttcctgcaggagctcttttagggcaggcctggtggtgacaaaatctctcagcatttgcttgtctgtaaagtattttatttctccttcacttatgaagcttagtttggctggatatgagattctgggttgaaaattctttctttaagaatgttgaatattggtccccactcttctggcttgtagagtttctgccgagagatcagctgttagtctgttgggcttccctttgtgggtaacctgacctttctctctggctgcccttaacattttttccttcatttcaactttggtgaatcttgacaattacgtgtcttggagttgctcttctcgaggagtatctttgtggcgttctctgtatttcctgaatctgaatgttggcctgccttgctacattggggaagttctcctggataatatcctgcagagtgttttccaacttggttccattctccccgtcactttcaggtataccagtcagatgtacatttggtcttttcacatagtcccatatttcttgaaggctttgttcgtttctttttattcttttttctctgaacttctcttcttgcttcatttcattcattttgtcttccatcactgataccctttcttccagttgatcgaatcggctactgaggcttctgcattcgacatgtagctctcgtgccttggttttcagctccatcgggtcctttacggacttctctgcattgattattctagttatccgttcgtctaattttttttcaaagcttttaacttctttgccattggttcaaagctcctcctgtagctcagagtagtttgatcatctgaagccttcttctctcaactcagcaaagtcattctccatccagctttgttccattgctggtgaggagctgtgttcctttgaaggaggagaggcactctgatttttagagtttccagtttttctgctctgtttttttcacatctttgtggttttatctacctttggtctttaatgatggtgacttacagatgggtttttggtgtggatgtcctttccgtttgttagttttccttctaacagacaggaccctcagctgcaggtctgttggagtttgctagaggtccactccagaccttgtttgcctgggtatcagcagcggtggctgcagaacagcagatattggtgaaccacagatgctgctgcctgatggttcctctggaagttttgtctcagaggagtacccggctgtgtgaggtgtcagcccgcctctactggggggtgcctcccagttaggctcctcgggggtcagggacccacttaaggaggcagtatgcccgttctcagatctcaagctgtgtgctgggagaaccactactctcttcaaagctgtcagagagggacatttaagtctgcagaggttactgctgtcttt

SEQ ID NO: 9389 - DNA, 1607 bp, Homo sapiens
agggtacttgacatgtccacttggatgtttgataatcatttcaaacttaacatattcaaaacagaactcttaatttctacccacgccctaacctacacaaacactggaaactgtccatctcccaattattcttatctcaataaatgaaatgacaccaccagccatcaaccagggatcctgtacctcaccttccacatccaaactatcaaaagctcctcctgttttatgcccaatcagatatcgagtcatttcacctctttctgtctcctctgctacttctctcagacatgttgcttcaatttctcacctgaactactacattagcctcctacctggctctgctttcattcctgcctccctgcagttcattcttacagagaatctagaaaaagctcttcaaaagcaacaatcagatgtcactctcctactttctaaaaacttttaaagaggacctcttcttctgccagtataacagactttgtactccaaaggatatctctgttgcattttagaactcctaggaagtaatgaaaatatctaagaaaaaaaatacaagtagctaagtgcatatatgtcaacagtaaacaagccagaaaaggcagaattggccatcccttgtgtttgtgtgtgacggtcatgtgggggtgcaaatggggaccgtactgcaactcccagtttaagcctgggattctagaagggagataaaatagcccaggttggtagtaccactaaattccagataaagcaaatgtaatttaggcttctagttttttttcacagattgggatcttgagctttcaaaaaagattatcaaacaaggaaacaaaccaccgtgagtgaaaatcagcaaaactagcgttaatatattaattactccttccccaccaagggctttagatgtttgaagtatcagataagaagaaactagactaccttatataaagaaaaattaacttaaatatagactacaaaaatggtgaatggtgaacaacaatggtctctcacaatcaccaggcacttctgaaaaagagctaaagaaaaccttcagtaataaaaaaaaattatcaaaaaatttagtggataagcttttttgtaatggactaattaatgaactggaaaataaaactaaaatagtttcatgcaatggagcacagacaaagagatggaactataaggaagagaggttaataagtttggagggcagaataagcaagcctaactaaagcctatttagagcgtgaaaggcaacaaaaatatgcagaatggagatgagacaatgtttaaagagattgtggctcagaatttttctttttttttaagtgaagagttttatcttttgtgttttttgtttgtttgttttctttgtttttttttttactgttattatactttaagttttagggtacatgtgcacgacgtcgagcttcgttacatacgtatacatgtgccatgttggtgtgctgcacccattaactcgtcatttagcattaggtatatctcctaatgctatccctcccccctccccccaccccacaacagtccctggtgtgtgttgttccccttcctgtgtccatgtgtctcattgttcattccacctatgagtgaga

SEQ ID NO: 9390 - DNA, 516 bp, Homo sapiens
gacgtacaaaacctaagggagtttaccaccagcagacttacactgaaggaacttgaaagaatatacttcaggctgggtatggtgacacacacctgtaatcccagcattttgggaggtcaagccaggaagattgcttgaggccagttcaagaccagtctgcacaatacagtgagaccctagctctacaaaaataaataaataaattagccaaatgggtggtgtatacctgtagtcctagctactcaggaggctgaggcgggagaatcactagagcacaggagttgaagactgcagtgagccttgatcacaccactgtactccagcttggatgacaaagtacaaccctgtctctaaataaaagaaaaaaaaagcgtatacttcagaaagaagaaaagagatagcaaaaggtctgaaaaatagaaattgtaagcaaagaaattggtaaacatgtaggcaaatctaaacaaatattgctggtttaaaatactgtgtaaaactccctatatatgaggaagg

SEQ ID NO: 9391 - DNA, 1370 bp, Homo sapiens
gcttttgtcggacatctttaaagcatttttctttttatagaatttcacttaatgtccaatactgatttaatgagcttgggtttacacattatctcttgaagaaaacaaatgaacctttgtgttccaaagcaatccatgtttaaagggaaaaaattatgcataactctgcccagcttcacagtaacctttggcaggtgccttaggtcctctgggactcttttccttatctgaaaaatgaaggacttggatcaggtgaatggttcccagctctgcaacttatgtggctcctcagaggcacacaagctcttttccattatttgccaaataatggaggccctgtctttaactgcagtacaactacacaaaatacttgaaactacagtcttcctggtttttggttggaactgaatcagtgcactctagcaacacttatttcttgctgttcgtaggcttcattatgtgtttggttaattttttaaaacaacaataacatattccataataattacagcttaattggcagactgtttcagtctataggatctgcaggaaggaggagtaataaagggatttttgactgagctcttatggaacagagtctctctaggcccctgtcatatctgcccttctgggccctggggaaaagttggcatccccagttgtggtgctctccaggtgccctcaggctgtggtggagggagcttcccattctctccttcagcccactcaattcagaggctaggggctgaaagaagcttctctacaactggctgttcactgggaggttaagggatgaccatccagccaggccttcctcaggacatgggagggcttatgctttaacatgtgtaaatccactgcaataatgactggttcttttaccccataaggttgagaatttacctgtaaacatttttgtctgaagaatttggatgtaagtgagggctgggcctctatcttatctcacttggcttctctcagcacagcaccttgcctgcttgttcttacacatcctagatgcacagtaactatttcctaattattagaaatctattagaatcaattgatttcagctgggcttggtggctccttcctgtaatcccagcactttgggaggccaaggctggaggatcacctgagtccaggagtttaagaccagcctgggcaacatagggagaccctgtctctacaaaaaataaaaaattagccaggcatggtggtgtgcacctgtagtcccagctactcaggaggctgaggcaggaggatctcttgagcctgggaggtcagactacagtgagcaatgattgtgccactgcactccagcctgggtgacagagtaagactctgtctcttaaaaaaaaaaaaaaaaa

SEQ ID NO: 9392 - DNA, 346 bp, Homo sapiens
gacctggattatggctggcattcaataaatagtagctgttaattgatagctaagctagaactctgaagtctaccatggcaacttcttaagtggtctgagaacccagttgtgttctgtggcaaaacacagcttagggatccatacccagccctcctgtcagctgttcaccttccagttcttcagagacatgtgtggcagtgactttggccacatagctggctgtgccctttaaaggcattccttgacacagatatgtggactggtgacgttgctctccagccaggtgttcttcccagcaggctggcctggctgtctcctgcatgcctgtacttgtttgtctccctgc

SEQ ID NO: 9393 - DNA, 1031 bp, Homo sapiens
aggttgcagtgagctgagactatcctattgcacttcagcctgggtgacagtgcgagactccatctcaaaaagaaaaaaaaaagggagcaagttctagtactgggtggatattttattgcaccaatttaggcttctccccagagatttcttaaaacagaaaggcagttgtaataccaagtattgctgtatcaggccacctgctactccaaagccatgaattaacttgttctaagccctcaaggaaagaaaagaggaaacagaggtttattccctatcaagacagtccacttgagaaagttctgtcttggttgtaacttcaggtttctttcttacacaggcattttattaatgcttttacgagttagaagagttgggataatttgccatctggagtttctctgccttgctgatctgagctcagacctgccaatttaccagagataattgataacaccctgtaacagctgagtaagtagattcttctgttttactgcttttaaaaaaagtttaaagttttaaaatagtataaactttaattgggttctttaaattttgttgttgaataatgcaattattatgatattttgtgaatatttgtaaataatgggattctggaataaattaatccccgatgatagaaaagagttaatgaacactttctccatacataacactttagcattcaagaaacataggacttaaatacatatattaaaaatttaggccaggtgcagtggctcacgcctgtaatcccagcactttgggaggctgaggcgggcagatcacctgaggtcaggagtttgagaccagcctagccaacatggtgaaatcccatctcggctaaaaatgcaaaaattagccaggcatggtggcaggtgcctgtaatcccagctactctggaggctgaggcaggagaatcacttgaacctgggaggcagaggttgcagtgagctgagactgtgccactgcactccagtctgggcgacagagaggctctgtctcaaaaaaaaaaaaaaaaaaaaaaaaaattt

SEQ ID NO: 9394 - DNA, 1031 bp, Homo sapiens; identical to SEQ ID NO: 9393

SEQ ID NO: 9395 - DNA, 129 bp, Homo sapiens
ggtgcggtggctcacgcctgtaatcccagcactttgggaagccgaggtgggtggatcacctgaggtcaggagtttaagaccagcctggccaacatggcgaaaccccgtctctactaaaaatacaaaaat

SEQ ID NO: 9396 - DNA, 551 bp, Homo sapiens
tacaatatgtagtatattagaaagcaatgagtgctttggagaaatgtaaggcaggcaagagtaagggctgaagagttgactggtaaagagaatgtttagggaaggcctcagtgagaagttgtgaagaagttgatggaaagagcctgtgggtgtttgggggaagagtgttgtaggcagagaggatagcaaatgcaaagaccttgaggcagaagcatgcctggcttgtttgaaaataggaggaggctagtgaatggagtggagtgagtgaaggggctgtaatcccagcactttgggaggccaaggccaggtggagcacgaggtcaggagatcaagaccatcctggcgaacatggtgaaatcccgtatctactctaaaatacaaaaaattagccaggtgtggtggtgggtgcctgtagtcccagctactcaggaggctgaggcaggggaatcgcttgaacctgggaggcagaggttgctgtgagctgagatcgtgccactgtgctctagcctggcgacagggcaagactctgtctccaaaaaaaaaaaaaaaag

SEQ ID NO: 9397 - DNA, 549 bp, Homo sapiens
tacaatatgtagtatattagaaagcaatgagtgctttggagaaatgtaaggcaggcaagagtaagggctgaagagttgactggtaaagagaatgtttagggaaggcctcagtgagaagttgtgaagaagttgatggaaagagcctgtgggtgtttgggggaagagtgttgtaggcagagaggatagcaaatgcaaagaccttgaggcagaagcatgcctggcttgtttgaaaataggaggaggctagtgaatggagtggagtgagtgaaggggctgtaatcccagcactttgggaggccaaggccaggtggagcacgaggtcaggagatcaagaccatcctggcgaacatggtgaaatcccgtatctactctaaaatacaaaaaattagccaggtgtggtggtgggtgcctgtagtcccagctactcaggaggctgaggcaggggaatcgcttgaacctgggaggcagaggttgctgtgagctgagatcgtgccactgtgctctagcctggcgacagggcaagactctgtctccaaaaaaaaaaaaaaa

SEQ ID NO: 9398 - DNA, 1693 bp, Homo sapiens
tggcctcaggactcatctctgtcttctccaaccccagctggcctccatgtcccctgggggctttctgctgctgaccagcttgggccctactataggttttcttgctgggcttaggagcctgagagaggtagccatttccaaaagaaaagatttctatctcagattatctgggaaagaggctgagtaggtcccttctctgaggaaacaggcagcaggacataggatggggcagtgggaggaaaagggtctgcactatggggtccttgggctgtgcactcctgaccttatcacttcacagttcccaccagatctgacttgacctccgggccatgacccagtccctcccccactctggaaacctctgtgtcccctcctgctcctttcactcccacctgggaggctctgagcaggccagggtccctctctccaggcctgctcctccctttctcctcctgtccccccagccatccccccagccaggctctcccacctctggccccacctcacctcttggccttcttctttccctcgggcgatgggagcctggtttggctgcccagggaagattgtatctgaccacaggagggagggctgagggcactgctgggtgagctgaggcctccttaggttcttgctgtagtctgagttcaagtcatttagaatgagtgacttgaggaagagggagctgggagcccttttcaccagcagggggactggaggagtcgaatggggtggggtcttctcgttttgattagcttctggtggaggtcccaggctttggcgtgctcaagcttggagtggcagggagcaggcctggcttgaccttctttccttcctgctccctctcctcacccctccctgcagctctttcactccgtctctctctctacagatgggacccaggtgagcccgggtgcccactactgcagccccactggcgcaggtaagagtcaaacccgggggagtccatggtagggagtggaagatgaggggtggaaaggctgtaagaacgcgagaagctgaggggttagagaagcagggtcgctggctgatctgccagagagccaggaggtggcggctccagggaggggcgaggagccggggtaagagaggcagctctggatgctggctgggcacagtgctaggaaacacaacaggaaaaggaaacacaggatgcccgtcttgtccttgctgggagcagtgaaacaggaaggaaagtaagaagctaatatttatactgagacccctaccccatgtcaggcaccaggcaaggtgtgttcttgtgtgtggactcggtcctcacaccggctctgcaaggtgggcatggcagcccttgcaggactgctctgctggaggggaagtgttctctcactgtctgcgcctcctccctctgctggcccgagcctcctctgctgctaggctgccctggggaaggactggacttcctgctgctgctttggtttaggacatgcccatggggccaggtctggactagacgcggtctgcccttcctttagtgtagccagtatcaaccaagggcctactgagtgcaagatatacagcctgatgcctaataattccatatagcagggagaaatggaacccaggtatcctccttgcttcagtcctggctgttgaaaagctaacaggcaggttagggaggaagcacacacaaatacaaagcgaaaaaaaa

SEQ ID NO: 9399 - DNA, 595 bp, Homo sapiens
ttttttttttcaggctgaccccaaattagtagtaacagccctcggagagaggcagtgatgggaaaagaggtcccacactcaagccagaactgggaggcaggatgttcatgctctggcttcagttcagctactgacggggtgccagtagatacctttcctctctctaggacacaaagagagctgttcctgggtcttaatctctgtcgctctgcgctcttctgaacttgatggccctcagcacggggccagggagcgggggaaaagcagaactttttccaggaattgctattggaagcagccccgttgccaacacgcatgcacacatgcacacagcttttctggacagaccttatattatggattatcaccacaaaacatccctttggggcctggtagcccacaccacagaattcagggtcattaatttttctcctatccagagagtgcatggtgtccggaatctgtggttaccaggggagcaaggcacagagaacctggctctgctcccaagcatgaatgctgctgaccagcccctgggtagggactggggaggtgggacagaattcccaggaggcaggggactcagcctgacaca

SEQ ID NO: 9400 - DNA, 399 bp, Homo sapiens
aaagccccttgaggggaggtgaattcctgaaagttggtgggaaactggagtacctgccttggtaggaccagaacccatgctagctctgcccctagcagggtgactttggacagggcccttcacctccgagcctcggtttccttatttaggataacaagatagtaatgactaccccccggggccagtggcttgatgtagctgctcatgcacaagtgctgtagatgtaaagattgtggttaggagtggccagcttgggcctggaggctatgatttctgactcctggactggtactttgccacaggcctttccagccctcctcagccccaatccctgaggacagtctgtggctgccccactgggagatgcccagcgttggaattgctgaaggaggcctctcc

SEQ ID NO: 9401 - DNA, 1521 bp, Homo sapiens
aatcccttgagggcctgaataaaataaaagacaaagagagagcaaatttgtactcagcttgagcttggatatccctcaggccctccctcaggccttctcatcagactgagatttaacactattagctctgtcggcctccagcttgcacacggcagactgtgggactttctagcctccataattgcatgagccaatccctcataataaatctgtttctatgtatctatattttgttggttctctctggagaaccctgactaaatacactgtttaagaaaggagtaaaacttgcactgagatgtttagagcagctttattcatagtttatcaaaatgtggaagcaatcaaggtgttctccagtaggggaaggaataaataaactgtggtatctccgtaaaatggaatgttattccacactaaaaagaaatgagctatcaaccatgagaatacatggaggaaccttaaatgcatattactaggcaaagaagccattctgaaaaggctatatactgtgtgattccaacttcatgacattctggaaaaggcaaaactatggagacaataaaaggatcagagatgccaggggttgggaaggagggtaaattaataggtggaacacaggatttttagagcagtgaaactattctgtatgatataacaatggtggatacatatcattattcatttgccttaacccacacaatgtacagtaatgaaagtgtactgttaggtaaactgtggactttagatgatgatgtgtcactgtaggttcatccattggaataaatgcaccactcttgtgtgggatattgatagtgggaagactgcccaattaagaaatctgtactttctactcaattttgctgtacatttaaactgctctaaaaaataaactctgttttagcctgtaaccccagcactttgggaggctgagggggtgtatcacttaaggccaggagttcctgaccagactggccaacatggtgaaaccttgtctctactaaaaatacaaaaattagccgggtgctgtggtgcatgcctgtaataccagctatttaagaggcatgagaatcgcttgaacctgggacgggggttgcagtgagccaagatcctggcactgcacttcagcctgggtgacagagcgagactctgtctcaaaaataaatacataaatacataaataaactctgtttttaaaaatgagcaaaaggccaggcacggtggctcacacttgtaatcctagcactttgggaagccgaggcgggaggatcacttgaggtcaggagttcaagaccagcctggccaacatggcaaaaccccatctttactaaaaatatcaaaattagccaggcatggtggcatatgcctgcagtcccagctacttgggaggctgaggtgggagaatcgcttgaactcgagaggtggagaatgcaatgagctgagatcacaccactgtactccagcctgggcaacagagcaagagtccgtctcaaaacaaacaaacaaacaaaaagagcaaaa

SEQ ID NO: 9402 - DNA, 1570 bp, Homo sapiens
cctctccctctctttccacagtctccctctccctctctttccacggtctccctctgatgccgagcggaagctggactgtactgctgccatctcggctcactgcaacctccctgcctgattctcctgcctcagcctgccgagtgcctgcgattgcaggcgcgcgccgccacgcctgattggttttcgtatttttttggtggagacgggatttcgctgtgttggccgggctggtctccagctcctaaccgcgagtgatccgccagcctcggcctcccgaggtgccgggatggcagacggagtcgcgttcactcagtgctcaatggtgcccaggctggagtgcagtggcgtgatctgggctcgatacaacctccacctcccagctgcctgccttggccccccaaagtgcggagattgcagcctctgcccggccgccaccccgtctgggaagtgaggagcgtctctgcctggccgcccatcgtctgggatgtgaggagcctctctgcctggctgcccagtctgggatgtgaggagcgtctctgcccggccgccccatctgagaagtgaggagaccctctgcctggcaaccgccccgtctgagaagtgaggagcccctccgcccggcagccacaccgtctgagaagtgaggagcccctccgcccggcagccaccccgtctgggaagtgaggagcgtctccgcccagcagccaccccgtccgggagggaggtgggggtcagccccccgcccggccatccacctcgtccggaagggaggtgggggggttaggccccagcccggccagccgccccgtcctggagggaggtgggggggtcagccccccgcctggccagccaccccgtccgggagatgaggggcgcctctgcccggccgcccctactgggaagggaggagcccctctgcccggccaccaccctgtctgggaggtgtactcaacagctcattgagaacgggccatgatgacaatggcggttttgtggaatagaaaggggggaaaggtggggaaaagattgagatatcggatggttgccgtgtctgtgtagaaagaggtagacatgggagacttttcattttgttctatactaagaaaaattcttctgccttgggatcctgttgatctgtgaccttacccccaaccctgtgctctctgaaacatatgctgtgtccactcagggttgaatggattaagggtggtgcaagatgtgctttgttaaacagatgcttgaaggcagcatgctcgttaagagtcatcaccactctctaatctcaagtacccagggacacaaacactgtggaaggccgcagggtcctctgcctaggaaaaccagagacctttgttcacttgtttatctgctgaccttccctccactattgtcctgtgaccctgccaaatccccctctgcgagaaacacccaagaatgatcaatttaaaaaaaaaaaaaaaaaagagcaaaagacttaaacagatacttcacaaaataagatctcaaaatacccccaaaatgtgaagaaaaccctagaattgctaaaataaaaaagtactaacaataccaa

SEQ ID NO: 9403 - DNA, 1426 bp, Homo sapiens
aggcaacattatctgcctttgaaacaccacctccgtggattaccatttggcccaatgggagggtctggataatgcccattatattatcctaattccctgctacctcagaggttgttaaggggcacttctgctgtttccctctgagtgacctctggctgccactctcttgcagatgctccttttcctctcagggatgagtcggagctgggactgggaaaggcagccctcttgtttctgttcaagttggccaggaatgcccaggaatgatgattctgttttgccagcttcttgccgtgaggctggggttgctgtgtttacagcacaaccaaccctaaagtcagtgcaattcactgtggatttattgagcacctgctagtatgtgcgtgtgttgggggtggtatatgaaaatgatggaggcaggtctctgccttaaatgagggagggtgggcaaacagctcccacggtcggcggttgaaccagttcctattctttctcataggaagtgtccataaacattgtcttgtctcatttgcatggttgttgagaggtttgaatgtagtggtaatgaattgagagtgcttctaaaggtattaagctcttgatttatgtaaaactttcttcagtattactaggcaggctgataataaaagctaacatatattgaatgctttctatttgccaggcactgccctaagtgctttctatatattagcttatttaatctttatagcaactttgaagtagattgcttgtgtacccacttaaaagaggattaaaaaaacttgccgaggatggcacagcaggtaagtagcagagccaggcagtctgaacgtttggccaaacactggccactgtaaagatcttgtggaagtcagggagtagaggtggtctctctcccccaagtgaaggcagcagccaggacctaccgtcagagaccagcaaggagcagagaaaggtcaggctggtgcctcagaaagcatcagcatttctgcacaacttaattaaattactgaaaccttttctgagcttggagccatctttcttggagagtaatacaattgaaacagataatttaagccaaggaggaaggacagaattggtgagctcacatatgtagatggacatgtaatgacgtctgactaaaacacagaggaaaaaccttaaagtgaatcatgtttattcaatttccaaacaagtgcaaagacccaggcagcgtgcttcatgtttggactcttgaagaacacacatggaaaaaaaaaaagaaaaaaacctcttcccctctcaacccttttctaagtttttattaagaatatattaatttgagcattaatatgcaatgtatccatctttgtcagttattttccagaaaaatctagctcattttttgaggcaacttctagccaagttgtttcagttgtggagaatt

SEQ ID NO: 9404 - DNA, 111 bp, Homo sapiens
ttacaggcacctgccaccacgcccaggtaatttttggatttttagtagagacggggtttcaccatgttggccaggctggtctggaactcctgacctcaggtgatccaccca

SEQ ID NO: 9405 - DNA, 363 bp, Homo sapiens
cttggataggttatttagcccttctgcttctgttttttgttttgttttgttttgcctaaaacggatataacagtacctaccttttaaggttgttgcaaggattaaataagatattagatgtaaaatgcttacatctgtgcgcagtgactaagcactcaaatgccagttaataataataattctgtgattatcctgaggtttcatgtttctggagtaggattatgaccacaacatttacagaatgaagtcctgcaggatgacaaaacatccctgtccccattgacacagccccaagtcacgggcttgcaaaagaatgtttgccatccctaggaagcctaacacagggcgctgggaaatgcttgc

SEQ ID NO: 9406 - DNA, 11838 bp, Homo sapiens
agcctaggcaacagagcaagactctgtctttaaaaaaaaagaaagaaagttatgtttttattctgtaactgcttctaaatattcttcagtaccccattcaacccgagaaactactgtcacagctgacaggagttattaacctctctaaatttcagggggaaaatgtataaatatgtcatgtatttgataaatagttttccctttttttaatgaaaagattatctgattggattgacctgcctactaatttttgctattaactttttcattcttaggcaataagcaacaaagaccagcatagcatatcatatactttatctcgggcccagactgtggtggttgaatatactcatgacagcaacaccgatatgtttcaggtattacaacatcttaaattttttttcttaagaaacgaaaaagttaaaaatctattgttggtgacttttgctgaggtcagaggattatcagatttttatattgtattttattaaaatatagattgattgctaacccttataaatagaagtcaatctagcatggttgagatgggctccagaataagaattactggtaaatattacataaccattatatgcctcagtttcctcctctgtaaagtgcagataatagactctcccctatgactgttaagaggcttaaatgatctagtacatgtagagtactcagcactgtgccaggcacttagtaaaaacacttagtgaatagtagctattatccaaaaaagaaaacagtaaatactctgcatacatttatgactttttctaccactacctcccaccttcctctctagacaataaacaatccaggcacttgctaactatttgtattatctatgtgaaatcaaacctttttctcagcatgtatttggtcaatgctactcatgcaataaaagtatttttctcttactttttgtaccaatccagtgctgatattttataaactgatagattttaggacagtcagttccaaagatgtaaatagaatccttgatcttctcccttaatattgagctctctgaagcttaggctttttaaaaacaaacttaagtacaacataaattgcctgataatgttgcttttataattattgtcacattgacttccatttttctttattttacaaggcaaataaaagtgaaaagacctggaaatatatttaatttcagtcaatagtgaaatatttctttgaagccactccctctgcccaacccttttaatgagatgagatactgaatttcttttctctagttaatattagaatgtgggcatttattatgttttcctcacttttaccaaaaataaataagatctttaaggaagattaatgtttagatccaagaaaaaccgaacacaaagctttaggatgatttttcacattttgtttcactgacaagcagtgaaaatgaatgagcttagcttttttttaaaatcaagatgctactaggcctgtagtctcagttactcagggggctgaggtgggaggatagcttgaggccagcctgggcaacatagtgagacttcgtctctttaataaaatatagataaatatatatgtgtgtgtgtgtgtgtgtgtgtgtgtgtgtgtgtgtatctccaagatatttggtcacaggctagaattttagcttcagaaagtacgttatatttatttgtttaccgcttatcttttgtagatgaggttaactgaaatcttgtgagttaaagatgatagagttacttgggggcaaaactgaaattaaaccaggcatcctgaattctgaaacaatgtcttcaccatctaatgaaggcccttgaataagttttaacagtttgggttttgtctttttcataaagtagagaattttccccagtatcataaactgattatgccctttctacaggtattatacctttggaaaatccaaacatttctgcatcaaaaagactgtgatgtatcagaaactaccttgataaactagccagtctttgaggaattgtactggaaacattctaggattgtctaccctgtaaactgaacaagaacatttattgttcaagtcatcagatattccaactccaactctatgccttgtttgtcactatgaagtacataagggagacattacaagctgattacatgcctaggtgctgtactgaccctgtaaatcttaagcacattgattgtgttgaagaaggatggagaaaagactttacactggtgccttttcatgtagatctttttatcaggttaagtaggatttttgccagcaaccggtagaaaagcattctagcaaaagagatggcaaagaagcaaagaagtagtacacagtgtggtgaaagattgacgaataagctgttgtagcttgtatacacaaatagcaggaaattcggctggattggtagatgggaggcaaatcttgagtcagtttctaactattatcagaaataataaactacaaattttggataagctataaggaaccattgagttttctcatgagggtaagggagagtaacaaaagagctgtatttttaatgctaataatagcaggggaagaattattaacaatcatattttggcatctgatcacattcatggtggtttttttctctttatagatacttaagtttcttccttctcattgtcattacaaatattgcttcagtgtcttaaatattctcttccaagacccagttgaaatgtcagctctctggaacagtctctttccaaataagtgctacttctgttgattctgaatattagttcaatccttggcctatatcttttagcttttaaagagcctttttatttgggggaatattttttgtttcaaagatctgaggccatttaaggtatctttatttttaagaataaagaaaaggaatatccaatcttatatttgttaactagtttccctctaaaactatccaatctaaataaaaagactttatacttgacagttggacaaaaacactaaagaggtttatctgaaagtgtgccgatatgaggaacttgaggctaaaatatgtaaagaatgacttttaagagtctttatctttgtagagggtcagtattttttctcagtacccacattcttcaattttatggtactactttataacaaatacattcatgaactgataatttccaaatgtttgctttaaagccccgtgacacttgtcacttttgtcatctccccattgatttccttttttctttcaactttcaaaatgaaattaacttatttactagctagtacctctgaagatatttttaaatctctgacacctcactcatccagaactcttatctgggaaccttgtctctctgaaatatccctaagaaccaggaagagtatatatataaaataaatgccacaaagttgatgtagtgaaattccttttctattctccctagaggatcccttaggctctcaccagaaccttttgaaatacttttctctgaaataggttatttgatttctcaacccataacagagtaagagtagccagttaaaagaggggcttgttgctggaaacaagcatgaccaaaaacaaggagtgatagctgacaacctgacagaaaagaaacaagaaaatatatgaagtatacataagacctcaaagcaaggctgtgtaagcccttgacataaggaccagcagccttgtatacctcttgtagcacctgaagacatcactgcatttcagcttaacgtaagtggtatttatagtgtaatgttctgcagtcatcctaaaagatttacttatatatgttcactatattctgttaaataaggtagaatatctctttaaatatctctaaagagaaaaaaactacatgatacacatatttccatccaaaagggttaaaattaaaatctgcagccatctagaaatctcagccgttcctgaattcttcattccctaagggtttcgtatattattgtaagttctcatttaattccatgctctaagtgattacttcatcagagacagtctgactgattagttttcaagagtatagatgcccccagcgttaagtatggtaaacttcaactttagaaatttcagagacctaatgttctctccttattgtgcccttcttgaatggattttccactgtgctctttgaatgggtttataggtatttttttttttccctcagattggccggtcgactgaaagccccattgattttgtagtaactgacacggttcctggaagtcaaagtaattctgatacacagtcagtacaaagcactatatcaagatttgcctgcagaatcatatgtgaacggaatcctccctttacagcacggatttatgctgcaggatttgactcatcaaaaaacatctttcttggggtaaaaagctttttttctaaatgatgctttcttttatactagctttcattccaagttacaagttacaagttggaagctcactgctattatttctactaggagaaggctgccaaatggaagacatcagatggacagatggatggcttgaccactaatggtgttcttgtgatgcatccacgcaatgggttcacagaagactccaagcctggaatatggagagaaatatcggtgtgtggaaatgtatttagcctacgtgaaaccagatcggctcagcagagaggaaaaatggtaaatactgaatggtattttcttaattagctacaataaacacataggatgagtagaactgaatgcattacatacattccagaaaactcttaaatctattgccaacacagaatactaagtctatcaaacactgactaccaaattctatactagaggacagtctctttaatatttcgtttagtagccgggcgcggtggctcacacctgtaatcccagcactttggaaggccgaggcagatggatcacctgagatcaggagttcgagaccagcctgagccacatggagaaaccctgtctctactaaaaatacaaaataagccaggcatggtggcgcatgctgtaatcccagctactcgggaggctgaggcaggagaatagcttgaacctggcaggcagaggttgcggtgaccaagattgcgccattgcactccagcctgggcaacaagagcatttagtaactctggaagttcattcttctgtcatatcatgttaatatattttaaaacctaagctttcttaaactaaacagcactccctctgatcttttctgttgccatctgtatatcttaaaccatatttacctcattaaaaatattagacttattgattagccagatgttttaatcataagttgtctttaccataaggctaaaaagaaatatgttaatgtttgatattttatccttgattttcaaacttaacatttttcataactactgtcagtttcttgaatatttagtgaaaatcctaggaaacctcatttcttgagtaaggagtacttaaaaccaaaacacttatgtaaaaatccaaaacagagtggtgaatatgtttttcaactcttgtctcctctaggtggaaattgaaaccaatcagttacaagatggctcgttaattgacctctgtggtgcaacattgttatggcgtactgcagaaggcctttcccacactcctaccgtgaagcatttagaagctttaagacaggaaatcaatgcagcacgacctcagtgccctgtagggttcaacacactagcatttcctagtatgaagaggaaagacgttgtagatgaaaaacaaccatgggtatatctaaactgcggccatgtacatggctatcataactggggaaacaaagaagaacgtgatggaaaagatcgtgaatgtcctatgtgtaggtctgttggtccctatgttcctctgtggcttggatgtgaagctggattttatgtggacgccggccctccaacccatgcgtttagcccgtgtgggcatgtgtgttcagaaaagacaactgcctattggtcccagatcccacttcctcatggtactcatacttttcatgcagcctgtcccttttgtgcacatcagttggctggtgaacaaggctacatcagacttatttttcaaggacctctagactaacagaccattgtcttgcaggactacattataaatttataagctaagtgagttgggttttcgaacctgttgtccacgtcacagtttttctgctctggtcatttgcattaagatgaagaattttttaaaacatttataataaatagtagcaatttctgagcaaaaatctgggaaactcaagcaaaggaatttctgaaagtatcagtcttctgaattctgagttttgaaaatatattttgaggagaaaaagacatagtctaatttgatgccttccttttagtgtttttgaatcacctatcctcagtgctgaaattgttttgtataactgagggtactgttggttcaaactatgttagtttacagtttgttgcaaacattgtaaaatacagcgacatgtatattaacttttttctatttatctttattatagaaaataccttagaatgttcttgatagagtagcatggtaacgatggtgtcacacccttggtgtgaatggtagcttagtgagcaacctagctcaaggatttgcaaagttaggaagaaggacgagagagcctctctccccaccccaatctaaatatggaatttggtaaattagaatactttgtaatttgtaagaccaaattcatactaattacccgcgtgaaaggtgtttgtttttaacaacattgaagataatcaggaaagattttttcttaatgtttctctcgagcgtagtactataacaaaaacttaatgctaagaaacattttatatgctcctttggatatgcaatttaatctagattatctatttttctcccatgataactaatctgtttttagtatcagcagcatttggcaagtttattttttggatataaactgtggttcatctgttcactgtttctagaaaaaaatcattgccataagaaaaagtataaattagcaagaaaggagagtgacttgatttgcttttggaaaaagaaatgcttaattaattattctgtatttggccttattcgggcattaggaaatctagagatctaaagggttgaatgacaatagtgcccccgtttttagcagaccagccttaactctgggtttgaatcctaaggagattgccacagtgagacttaaggaaatgtttggttggcagatgagcaccaatgactgcagcgtggagtgacgcactgcatggtctgtttattctctaattccaatatgtcttttgcttccagaagcaagaaaagtttcttctctcccctccttcccacccttttttcaaaggcaccacaagtatagacagttgcactacatcaaatctttttttgacacttgtagaaaccagtacacttttagattagacagtatcttcttttaatattttgatttgttttcctttagtttgaaaagttgtataatacttaactgactgtagcaaagttttatatgtggtagcatacctttaatttatcctattacaaaactgttctgaattttcttttggtttttaaaaaacaaaacttgttgcttagaagccatgaattattttattttacttcaactgtcgaaacttccttgttttaaaaaatgatcatttgggttcactcaggaaatgcatgtcaggaaacttgtattataagtttattagttgtgatgtatcagtaactgctgttacccctttttcaaagaaatgtaattgattttgaagttttctagattgtcacatgctttgtgactaatgcaagaaagcaagtcctgtgttgtatttgttctagtcatttttattcaggctatatattgtagcttaatttttatttgcaattaatttatttaaactaagtaaatacttttcaaaatacataattgaattcgtctctgtgagttcatttttgcataatcgagaatgagaaaccagaagtgaaaactgtgaacaactctattccacactccaaaaatactcatttgaaatagatgaagagtttgcatttaatgtaacactttaaagtatctggttcttttttaaaagcatctcttactaataaaggaactttgttagtggttgaataattgaggccttttctaagttaagccttgctagggagttggcacctgtaagttgcatgttagactatttaaatagtggcttcgtaaccataaaagttgcacgtccttcccaaagttgcctgcattttcttctaacaggtaaaaacaatctcttctaacagggaaaaacctggctcattttctatcaaattcaagttttaaaaattcaggcaatttaaatgatcagttgggtgtttgctgttcaagcagaactgttattttgtcatggcctaatagaacacttttacttagttgtattaagggaatgtcagtattctggccaaggaggagaaaaagttgtatttaggtcttctaaatgcattctcaagaaagataatctttatggcttaactcttttatcaaagtaatctttatatttaaatgctacttaatttgttcaaggaattaaatttccctttatctaaaatgttagggtaatgaagcaagacatgaagggaagccattcagacatcagagttcttttactaggttatcctcttgcaaccttctttgcttacttccctcatgtaaaagtcttctagtacatgtaaagcagggtaggaataaataataatgtaagtatgtaattacttcttctttttttttttttttttgagacggagtctcactctgtcgccaggctggagtgcagtggcgtgatctcggctcactgcaagctccaccttccgggttcacgccattctcctgcctcagcctcccaagtagctgggataacaagcgcccgccaccatgcccagctagtttttgtatttttagtagagacagggtttcaccatgttggtcaggatgctctcgatctcctgaccttgtgatccgcccactttggcctcccaaagtgctaggattaattacttctaacatttgagtgtcccacttcactcttcccgtctgacccagactgagggcactggtgaaagtccacttattatgtctctaaggttataagctcaacataactctaacactttggcccttcgttgcaatggatcatcttgtgctaccacttctttttttgtttaagacagggtcttgctctgttgccgaggctggactgcagtggtgcaatcacagctcaccacagcctcaacctcccaggctcaagcaattcttccacctctacctcctgagtagctgggactacagatacacaccaccattcctggctaatttttttcattttcagtagagacgccgtctgactagatttcccaggctggtctcaaactcctgctcttaagcaatcctcctgcctcagcctcccaaagtgcttggattacaggtgttgagccaccacaccctgctgtgctaccacactttagagaccactggttaataaacctatgttccattcccttctctgttttctctaagcactgccctatagcaaatcagaacagcaaaactctgcatcactgaactctgttattctgtctgtcacccccactttcagaattactcttatataagtattctttaatgttttatcctcaaattttatctacttttttttttttttttttttttgagacggagtttcattctgtcgcccaggctggagggtagtggtgtgatctcggctcactgcaacctctgcctcccggcttcaagcaattctccctgcctcagcctccccaagtagctaggattacaggtgccggccaccacacctggctaatttttgtatttttagtagagacggggttttgccatgttggctaggctggtctcgaactcctggacccaagtgatccacccacctcggcctcctaaagtgctggatttacaagcgtgagccaccacgcccggcctctgctttcttaaaacagatttttgtatacccactgtgtgccaagccctgtcctaaaccgggtgatatagcaggaaaaaaaaaatccctgccttcatcgtgtttgtattctagtgtacaagatagaaataagcaagaaaaagtaaatatatgtatatatacaatatgatagtgaactgtgctgagggggcaaataaagtagaaagaggagatgcagatgcaaaatgtcatatgctggggcaggaggagaagtgtttgcaatatcaaacaggaaggctagggaaagccccactgggaaggtggtatttgaataaagctctaaaagagctgaagagagaagggagtggccacttagaggggcatttaggcagagagctctacaaggcccttgcaagggccctgaaatagaagcatgtctgggatatttctacaatagcaaagaggcgtgtgatgccaagtggtatgaatcaaggaagagtagcaggtaaggtcaaagaagtaaaacgacagaatttaagtgacagatggggatgacaatagattatggagagccccctgggatttatggctttaattctgaatgagattgggacattggagggttttgagcaggtgagtgacttgatgtgacatatttaataggatctgaatacactgaaggtgggatcagggagaacattgcagtaatcctggagataaatcatggtttggataaggtggtggcagtggaggtggtttgaaaagtgatcagattctgaatgtgttttaaaggcagacctgacagcatttgctagcagatcagctacagggtttgaaagaagagggatcaaggatgactccactcaatcagcctcagcaactggaaggatggaactgccatttgttgaagtagagattataggaagaactgtttaggggatgaggctcactggtggaggaatcaggaactccgtcctgagtgttagactgaggcacctgtcagacgacatttgccaaaggaaggacaactccacttataactactatcaaagttctcaaccattatgatcagtgttctctgtataccccacgctagcttagaaacaaacaaaaaagtatccctcctgatgaatggtgaatttcctttcattgaaatagagagttgggacacgtctcatggttctctctttgctttggcttccctctaaggaaatgaagttttgttttcaactataatcgcttcatttagcgaaagcattctgataaagtttttcttcctcctcgccatatacacctttttccttggctcttgcctttaaaaaaaaaaacaaaaaagagtcttcagttttcctgaatcttaatattttgctgcttcaaatcctttttggcagtggcagagcacaagttgtgctttgcttttaaagtttttgaaaaaatatttgagtgcttatggaaaacagaattcttaaacctataagttcagattttaatgtccagtttccctgaaggaaataggcctgtatttgataattatcaacaaaaaaaagtaataagatcgagttttccaggccgggcgcggtggctcacgcctgtaatcccagcactttgggaggccgaggcaggcggatcacgaggtcaggagatcaagaccacggtgaaaccccgtctctacgaaaaatacacaaagttagccgggcgtagtggcgggcgcctgtagtcccagctacttgggaggctgaggcaggagaatggcgtgaacccgggaggcggagcttgcagtgagccgagatcacgccactgcactccagcctgggcgacagagcaagactccgtctcaaaaaaaaaaaaaaaaaaaaaaaaaaaaggatcgagtttt

SEQ ID NO: 9407 - DNA, 16092 bp, Homo sapiens
gaaaaagaatctcattttgtttcacacactggcacctggtatggagatcaacagttgctcaaaggaattttaaataattataatgtgttaatagataattaattgggaattgattctgcaaggcaaagtcaaacatttgttttataattgtgcagttcttgcaagagatcacctatactttttttcccccatcaggtataatgggtctctcccaaatggcgatagaggaaggaggaaaagtaggtttgctttgtttaaaagacctaaggcaaatggggtgaagcccagcactgtgcatattgcttgtactcctcaggctgcaaaggtaaaaaaaaaaaaaaaaagctacataaattaacttggagaatttgaaagacttttatgtgttgtttgtattctctagcattccccttacatttctatttcagaaattgccttttgtttggattggagaagagactttggagacatggtatttgaagagctgccatatggaaggggaattggacttttaaaaaaaaaatgacaaaccaggatcagtgggtggaaattagaaggaaacactctgtttccttattaaaagaggtgggatgggggacagggctttatctagtacttagaattatgcagctgtctgccctgagaagtgggaagttcccactctgttactagaggggtctccctggactggatgaagaatgtgatgtataatatgtgtattcaggtattagaagcacatttggatgaggtaatttttaaactaagggtctttacttaagattctttgtattggttgtattcatttttggtttataacttcatatatttgagcatagtaccttgcacaaagtagacctcaataattattaagttgaatcaaagctatgaaggcaatatccaactgcatctacaatataacttctcaaccccctagcctatttcatgcttctagcccccttgtattcttctaacaaaatttccagaagctggaccaccatttcaggatacttgggcttttcctagagtgacagacaaggagggggaatttcacatctttatattttctgtgaattcatctgcctccaattttataacactgactttgtgttacaaagaatttaatattgtaatgagcaaataagaaaaattagaaagagttctttgactcctggaagtacctgtatctttagctaagtagccctaggatgtacattaatattataccatctgaagcatatctttgtaaattaaataaacaagagacagaaaaattggcatatgatgtggttttaggttgcagcttcagtgtctgaaggtaattggcttttcagctttgttttatatccagtttgatttgtgaaagaatccttaggccttgactaggactcctctgttactatttgggagccagttggtgcagaaaagggacagtttctttttgctcctttggcgagaaggaatatactaagcaggtggtggaagtaaacctcagattgattgaatctgaggagcttcttacagtagctccccccggagtgctcttgacattttgggtatgccactttttcattgttcagtactttcccacatactacaggacatttataggtccttcacccacaaaatgccatttgagcctgcaaatcctcgtaacagccaaaaaatgcacagcatattttcagatgccccttagactgctaatactacctctggttgaaaaccactatcagggaaaatatttctaatccctgcctctgtaataccatattctgtacttttcttcctattttactctgccatgccctcatgttttcattgttatctctttttcatctttcatctttactaggcaataagaatcttagggatcacagattgactcttggctgggtgcggtagctcacacctataatcccagcacttgagaggccaaggtgggcggatcacttgagctcgggagttcgagaccagcctgggcaacatggtgaaactccatctccaccaaaaatacaaaaaattagccaagcgtggtggcatgccccgaagtcccagctacttggcaggctgaagtgggaggatcacttgagcccgggaggcagaggctgcagtgagctgagatcatgccactgtactgcagcctgagtgacagagtgagaccctgtctcagttaaaaaaaaaaaaaaaaaaaagattgactcctcctctttaaattttggaggaatgtatttgtgaggtcatgatgaaaattaagcatttagtctggcagtcatctgggatgagtagttaaaaccctgcgttctaggccagtgagactcaaacgtaacttgacatagtttttattctcagtcttagagtaggtttaataactaacaaacaaagattacaatttcaaagcacataaaaaccaatgttttaaaatctctttagccactaagaattaattttcaaaatactgagtaattgtttcattgaaaagtgagctgtttaacggggcacagtggcacatgcctgttagtcccagctccttgggaggcagaggcaggaagatcacttgagcacaggagtttaaagctgtagtgtgccattttcctgcctgtaaatagccactgcacttcagcctctgccacatagcgaaacctggtctcttaaacatatatatatgtatatgtgtgtgtgcgtgtgtatatatatatgtatatatatgtttaaaacttgtaaaacaattatatagtatatatgaatacctaaatgtgtagaaagaaatatgtaaaacatgcatgtaaatgatctacactgcattcttgaggttggatacctctgtagagaaaagggaactgggagagacatgtaggcagcctcaattgtatctgtagtttaattccttaaaaaaatcagacgcaggccaggcacaatggctcacgcctgtaatcccagcactttgggaggccgaggtgggtggatcacgaggtcaggagttcgagaccagcctggccaacatggcaaaaccccgtctctactaaaaataaaaaattagccgggcgtggtggcatgcacctgtaatcccagctactcaggaggctgaagcaggagaatcacttgaacctgggaggcggaggttacagtgagccgagatagcaccactgcactgcaacctaggcgacagagcgagactctgtctccaaaaaaaaaaaaaaaaaaatcagaagcaaaagtggcagtattaagctttgataaagctgagtcgttagtataatctcttctatatttggaaatagggtatttctgtattctctttgtatatttggaaatttgacagtcttaaagctgttgttttaaggctttatctattacagattagttgcaaattgaaaccaagtaaaagcttatgatgccaaacttctaattaagaaggattttttcatttagcttctttgctgtatataattattctcttctttgtgtctgttttatgcagcccatttctacttcctttgtgtgatgactagatttttcccctcctttgatattatcttcaactcatatacatagaaaacacttgaaaacaaaactgaaaagttctttttagcaatgtttttagtttgagataaatcagaagtacagtcataagcattacatccctttcctttggtaatgtttaatcattctatgaatgtttcttttgttttttttttttaaatttttttcttttatctcctgggaccaaatcccaaatgcatttttctgtatctcacccagcatatggccaacatttgtcatctgtagagtcacaaaatggttagaaaaccagttaacttggcttatgagtgaactttatagctctctgaatgacttcaaaaataagattcctcttattttgcaagattttcttatcagagcagtactattgttttctgtttttatgtgggatttggttttgattataatttaaaatacttaataagggagtctagtggtttgataaaagaaaattatgggccgggcgcagtggctcacgcctataatcctagcactttgggaggctgaggcaggcggattgccttagctcaggagttcaagaccagcctgggcaacatggtgaaatgccgtctctactaaaaatacaaaaaaaattagccaggcgtggcagcgtgcacctgtagtcccagctgcttgggaggctgaggtaggagaaccacttgaacctgggaggcggcggttgcagtgaaccgagattgcaccactgcactccagcctaggcaacagagcaagactctgtctttaaaaaaaaagaaagaaagttatgtttttattctgtaactgcttctaaatattcttcagtaccccattcaacccgagaaactactgtcacagctgacaggagttattaacctctctaaatttcagggggaaaatgtataaatatgtcatgtatttgataaatagttttccctttttttaatgaaaagattatctgattggattgacctgcctactaatttttgctattaactttttcattcttaggcaataagcaacaaagaccagcatagcatatcatatactttgtctcgggcccagactgtggtggttgaatatactcatgacagcaacacagatatgtttcaggtattacaacatcttaaattttttttcttaagaaacgaaaaagttaaaaatctattgttggtgacttttgctgaggtcagaggattatcagatttttatattgtattttattaaaatatagattgattgctaacccttataaatagaagtcaatctagcatggttgagatgggctccagaataagaattactggtaaatattacataaccattatatgcctcagtttcctcctctgtaaagtgcagataatagactctcccctatgactgttaagaggcttaaatgatctagtacatgtagagtactcagcactgtgccaggcacttagtaaaaacacttagtgaatagtagctattatccaaaaaagaaaacagtaaatactctgcatacatttatgactttttctaccactacctcccaccttcctctctagacaataaacaatccaggcacttgctaactatttgtattatctatgtgaaatcaaacctttttctcagcatgtatttggtcaatgctactcatgcaataaaagtatttttctcttactttttgtaccaatccagtgctgatattttataaactgatagattttaggacagtcagttccaaagatgtaaatagaatccttgatcttctcccttaatattgagctctctgaagcttaggctttttaaaaacaaacttaagtacaacataaattgcctgataatgttgcttttataattattgtcacattgacttccatttttctttattttacaaggcaaataaaagtgaaaagacctggaaatatatttaatttcagtcaatagtgaaatatttctttgaagccactccctctgcccaacccttttaatgagatgagatactgaatttcttttctctagttaatattagaatgtgggcatttattatgttttcctcacttttaccaaaaataaataagatctttaaggaagattaatgtttagatccaagaaaaaccgaacacaaagctttaggatgatttttcacattttgtttcactgacaagcagtgaaaatgaatgagcttagcttttttttaaaatcaagatgctactaggcctgtagtctcagttactcagggggctgaggtgggaggatagcttgaggccagcctgggcaacatagtgagacttcgtctctttaataaaatatagataaatatatatgtgtgtgtgtgtgtgtgtgtgtgtgtgtgtgtgtgtgtgtatctccaagatatttggtcacaggctagaattttagcttcagaaagtacgttatatttatttgtttaccgcttatcttttgtagatgaggttaactgaaatcttgtgagttaaagatgatagagttacttgggggcaaaactgaaattaaaccaggcatcctgaattctgaaacaatgtcttcaccatctaatgaaggcccttgaataagttttaacagtttgggttttgtctttttcataaagtagagaattttccccagtatcataaactgattatgccctttctacaggtattatacctttggaaaatccaaacatttctgcatcaaaaagactgtgatgtatcagaaactaccttgataaactagccagtctttgaggaattgtactggaaacattctaggattgtctaccctgtaaactgaacaagaacatttattgttcaagtcatcagatattccaactccaactctatgccttgtttgtcactatgaagtacataagggagacattacaagctgattacatgcctaggtgctgtactgaccctgtaaatcttaagcacattgattgtgttgaagaaggatggagaaaagactttacactggtgccttttcatgtagatctttttatcaggttaagtaggatttttgccagcaaccggtagaaaagcattctagcaaaagagatggcaaagaagcaaagaagtagtacacagtgtggtgaaagattgacgaataagctgttgtagcttgtatacacaaatagcaggaaattcggctggattggtagatgggaggcaaatcttgagtcagtttctaactattatcagaaataataaactacaaattttggataagctataaggaaccattgagttttctcatgagggtaagggagagtaacaaaagagctgtatttttaatgctaataatagcaggggaagaattattaacaatcatattttggcatctgatcacattcatggtggtttttttctctttatagatacttaagtttcttccttctcattgtcattacaaatattgcttcagtgtcttaaatattctcttccaagacccagttgaaatgtcagctctctggaacagtctctttccaaataagtgctacttctgttgattctgaatattagttcaatccttggcctatatcttttagcttttaaagagcctttttatttgggggaatattttttgtttcaaagatctgaggccatttaaggtatctttatttttaagaataaagaaaaggaatatccaatcttatatttgttaactagtttccctctaaaactatccaatctaaataaaaagactttatacttgacagttggacaaaaacactaaagaggtttatctgaaagtgtgccgatatgaggaacttgaggctaaaatatgtaaagaatgacttttaagagtctttatctttgtagagggtcagtattttttctcagtacccacattcttcaattttatggtactactttataacaaatacattcatgaactgataatttccaaatgtttgctttaaagccccgtgacacttgtcacttttgtcatctccccattgatttccttttttctttcaactttcaaaatgaaattaacttatttactagctagtacctctgaagatatttttaaatctctgacacctcactcatccagaactcttatctgggaaccttgtctctctgaaatatccctaagaaccaggaagagtatatatataaaataaatgccacaaagttgatgtagtgaaattccttttctattctccctagaggatcccttaggctctcaccagaaccttttgaaatacttttctctgaaataggttatttgatttctcaacccataacagagtaagagtagccagttaaaagaggggcttgttgctggaaacaagcatgaccaaaaacaaggagtgatagctgacaacctgacagaaaagaaacaagaaaatatatgaagtatacataagacctcaaagcaaggctgtgtaagcccttgacataaggaccagcagccttgtatacctcttgtagcacctgaagacatcactgcatttcagcttaacgtaagtggtatttatagtgtaatgttctgcagtcatcctaaaagatttacttatatatgttcactatattctgttaaataaggtagaatatctctttaaatatctctaaagagaaaaaacctacatgatacacatatttccatccaaaagggttaaaattaaaatctgcagccatctagaaatctcagccgttcctgaattcttcattccctaagggtttcgtatattattgtaagttctcatttaattccatgctctaagtgattacttcatcagagacagtctgactgattagttttcaagagtatagatgcccccagcgttaagtatggtaaacttcaactttagaaatttcagagacctaatgttctctccttattgtgcccttcttgaatggattttccactgtgctctttgaatgggtttataggtatttttttttttccctcagattggccggtcgactgaaagccccattgattttgtagtaactgacacggttcctggaagtcaaagtaattctgatacacagtcagtacaaagcactatatcaagatttgcctgcagaatcatatgtgaacggaatcctccctttacagcacggatttatgctgcaggatttgactcatcaaaaaacatctttcttggggtaaaaagctttttttctaaatgatgctttcttttatactagctttcattccaagttacaagttacaagttggaagctcactgctattatttctactaggagaaggctgccaaatggaagacatcagatggacagatggatggcttgaccactaatggtgttcttgtgatgcatccacgcaatgggttcacagaagactccaagcctggaatatggagagaaatatcggtgtgtggaaatgtatttagcctacgtgaaaccagatcggctcagcagagaggaaaaatggtaaatactgaatggtattttcttaattagctacaataaacacataggatgagtagaactgaatgcattacatacattccagaaaactcttaaatctattgccaacacagaatactaagtctatcaaacactgactaccaaattctatactagaggacagtctctttaatatttcgtttagtagccgggcgcggtggctcacacctgtaatcccagcactttggaaggccgaggcagatggatcacctgagatcaggagttcgagaccagcctgagccacatggagaaaccctgtctctactaaaaatacaaaataagccaggcatggtggcgcatgcctgtaatcccagctactcgggaggctgaggcaggagaatagcttgaacctggcaggcagaggttgcggtgagccaagattgcgccattgcactccagcctgggcaacaagagcattttagtaaactctggaagttcattcttctgtcatatcatgttaatatattttaaaacctaagctttcttaaactaaacagcactccctctgatcttttctgttgccatctgtatatcttaaaccatatttacctcattaaaaatattagacttattgattagccagatgttttaatcataagttgtctttaccataaggctaaaaagaaatatgttaatgtttgatattttatccttgattttcaaacttaacatttttcataactactgtcagtttcttgaatatttagtgaaaatcctaggaaacctcatttcttgagtaaggagtacttaaaaccaaaacacttatgtaaaaatccaaaacagagtggtgaatatgtttttcaactcttgtctcctctaggtggaaattgaaaccaatcagttacaagatggctcgttaattgacctctgtggtgcaacattgttatggcgtactgcagaaggcctttcccacactcctaccgtgaagcatttagaagctttaagacaggaaatcaatgcagcacgacctcagtgccctgtagggttcaacacactagcatttcctagtatgaagaggaaagacgttgtagatgaaaaacaaccatgggtatatctaaactgcggccatgtacatggctatcataactggggaaacaaagaagaacgtgatggaaaagatcgtgaatgtcctatgtgtaggtctgttggtccctatgttcctctgtggcttggatgtgaagctggattttatgtggacgccggccctccaacccatgcgtttagcccgtgtgggcatgtgtgttcagaaaagacaactgcctattggtcccagatcccacttcctcatggtactcatacttttcatgcagcctgtcccttttgtgcacatcagttggctggtgaacaaggctacatcagacttatttttcaaggacctctagactaacagaccattgtcttgcaggactacattataaatttataagctaagtgagttgggttttcgaacctgttgtccacgtcacagtttttctgctctggtcatttgcattaagatgaagaattttttaaaacatttataataaatagtagcaatttctgagcaaaaatctgggaaactcaagcaaaggaatttctgaaagtatcagtcttctgaattctgagttttgaaaatatattttgaggagaaaaagacatagtctaatttgatgccttccttttagtgtttttgaatcacctatcctcagtgctgaaattgttttgtataactgagggtactgttggttcaaactatgttagtttacagtttgttgcaaacattgtaaaatacagcgacatgtatattaacttttttctatttatctttattatagaaaataccttagaatgttcttgatagagtagcatggtaacgatggtgtcacacccttggtgtgaatggtagcttagtgagcaacctagctcaaggatttgcaaagttaggaagaaggacgagagagcctctctccccaccccaatctaaatatggaatttggtaaattagaatactttgtaatttgtaagaccaaattcatactaattacccgcgtgaaaggtgtttgtttttaacaacattgaagataatcaggaaagattttttcttaatgtttctctcgagcgtagtactataacaaaaacttaatgctaagaaacattttatatgctcctttggatatgcaatttaatctagattatctatttttctcccatgataactaatctgtttttagtatcagcagcatttggcaagtttattttttggatataaactgtggttcatctgttcactgtttctagaaaaaaatcattgccataagaaaaagtataaattagcaagaaaggagagtgacttgatttgcttttggaaaaagaaatgcttaattaattattctgtatttggccttattcgggcattaggaaatctagagatctaaagggttgaatgacaatagtgcccccgtttttagcagaccagccttaactctgggtttgaatcctaaggagattgccacagtgagacttaaggaaatgtttggttggcagatgagcaccaatgactgcagcgtggagtgacgcactgcatggtctgtttattctctaattccaatatgtcttttgcttccagaagcaagaaaagtttcttctctcccctccttcccacccttttttcaaaggcaccacaagtatagacagttgcactacatcaaatctttttttgacacttgtagaaaccagtacacttttagattagacagtatcttcttttaatattttgatttgttttcctttagtttgaaaagttgtataatacttaactgactgtagcaaagttttatatgtggtagcatacctttaatttatcctattacaaaactgttctgaattttcttttggtttttaaaaaacaaaacttgttgcttagaagccatgaattattttattttacttcaactgtcgaaacttccttgttttaaaaaatgatcatttgggttcactcaggaaatgcatgtcaggaaacttgtattataagtttattagttgtgatgtatcagtaactgctgttacccctttttcaaagaaatgtaattgattttgaagttttctagattgtcacatgctttgtgactaatgcaagaaagcaagtcctgtgttgtatttgttctagtcatttttattcaggctatatattgtagcttaatttttatttgcaattaatttatttaaactaagtaaatacttttcaaaatacataattgaattcgtctctgtgagttcatttttgcataatcgagaatgagaaaccagaagtgaaaactgtgaacaactctattccacactccaaaaatactcatttgaaatagatgaagagtttgcatttaatgtaacactttaaagtatctggttcttttttaaaagcatctcttactaataaaggaactttgttagtggttgaataattgaggccttttctaagttaagccttgctagggagttggcacctgtaagttgcatgttagactatttaaatagtggcttcgtaaccataaaagttgcacgtccttcccaaagttgcctgcattttcttctaacaggtaaaaacaatctcttctaacagggaaaaacctggctcattttctatcaaattcaagttttaaaaattcaggcaatttaaatgatcagttgggtgtttgctgttcaagcagaactgttattttgtcatggcctaatagaacacttttacttagttgtattaagggaatgtcagtattctggccaaggaggagaaaaagttgtatttaggtcttctaaatgcattctcaagaaagataatctttatggcttaactcttttatcaaagtaatctttatatttaaatgctacttaatttgttcaaggaattaaatttccctttatctaaaatgttagggtaatgaagcaagacatgaagggaagccattcagacatcagagttcttttactaggttatcctcttgcaaccttctttgcttacttccctcatgtaaaagtcttctagtacatgtaaagcagggtaggaataaataataatgtaagtatgtaattacttcttctttttttttttttttgagacggagtctcactctgtcgccaggctggagtgcagtggcgtgatctcggctcactgcaagctccaccttccgggttcacgccattctcctgcctcagcctcccaagtagctgggattacaagcgcccgccaccatgcccagctagtttttgtatttttagtagagacagggtttcaccatgttggtcaggatgctctcgatctcctgaccttgtgatccacccactttggcctcccaaagtgctaggattaattacttctaacatttgagtgtcccacttcactcttcccgtctgacccagactgagggcactggtgaaagtccacttattatgtctctaaggttataagctcaacataactctaacactttggcccttcgttgcaatggatcatcttgtgctaccacttctttttttgtttaagacagggtcttgctctgttgccgaggctggactgcagtggtgcaatcacagctcaccacagcctcaacctcccaggctcaagcaattcttccacctctacctcctgagtagctgggactacagatacacaccaccattcctggctaatttttttcattttcagtagagacgccgtctgactagatttcccaggctggtctcaaactcctgctcttaagcaatcctcctgcctcagcctcccaaagtgcttggattacaggtgttgagccaccacaccctgctgtgctaccacactttagagaccactggttaataaacctatgttccattcccttctctgttttctctaagcactgccctatagcaaatcagaacagcaaaactctgcatcactgaactctgttattctgtctgtcacccccactttcagaattactcttatataagtattctttaatgttttatcctcaaattttatctactttttttttttttttttttttttgagacggagtttcattctgtcgcccaggctggagggtagtggtgtgatctcggctcactgcaacctctgcctcccggcttcaagcaattctccctgcctcagcctccccaagtagctaggattacaggtgccggccaccacacctggctaatttttgtatttttagtagagacggggttttgccatgttggctaggctggtctcgaactcctggacccaagtgatccacccacctcggcctcctaaagtgctggatttacaagcgtgagcaccacgcccggcctctgctttcttaaaacagatttttgtatacccactgtgtgccaagccctgtcctaaaccgggtgatatagcaggaaaaaaaaaatccctgccttcatcgtgtttgtattctagtgtacaagatagaaataagcaagaaaaagtaaatatatgtatatatacaatatgatagtgaactgtgctgagggggcaaataaagtagaaagaggagatgcagatgcaaaatgtcatatgctggggcaggaggagaagtgtttgcaatatcaaacaggaaggctagggaaagccccactgggaaggtggtatttgaataaagctctaaaagagctgaagagagaagggagtggccacttagaggggcatttaggcagagagctctacaaggcccttgcaagggcctgaaatagaagcatgtctgggatatttctacaatagcaaagaggcgtgtgatgccaagtggtatgaatcaaggaagagtagcaggtaaggtcaaagaagtaaaacgacagaatttaagtgacagatggggatgacaatagattatggagagccccctgggatttatggctttaattctgaatgagattgggacattggagggttttgagcaggtgagtgacttgatgtgacatatttaataggatctgaatacactgaaggtgggatcagggagaacattgcagtaatcctggagataaatcatggtttggataaggtggtggcagtggaggtggtttgaaaagtgatcagattctgaatgtgttttaaaggcagacctgacagcatttgctagcagatcagctacagggtttgaaagaagagggatcaaggatgactccactcaatcagcctcagcaactggaaggatggaactgccatttgttgaagtagagattataggaagaactgtttaggggatgaggctcactggtggaggaatcaggaactccgtcctgagtgttagactgaggcacctgtcagacgacatttgccaaaggaaggacaactccacttataactactatcaaagttctcaaccattatgatcagtgttctctgtataccccacgctagcttagaaacaaacaaaaaagtatccctcctgatgaatggtgaatttcctttcattgaaatagagagttgggacacgtctcatggttctctctttgctttggcttccctctaaggaaatgaagttttgttttcaactataatcgcttcatttagcgaaagtattctgataaagtttttcttcctcctcgccatatacacctttttccttggctcttgcctttaaaaaaaaaaaacaaaaaagagtcttcagttttcctgaatcttaatattttgctgcttcaaatcctttttggcagtggcagagcacaagttgtgctttgcttttaaagtttttgaaaaaatatttgagtgcttatggaaaacagaattcttaaacctataagttcagattttaatgtccagtttccctgaaggaaataggcctgtatttgataattatcaacaaaaaaaagtaataagatcgagttttccaggccgggcgcggtggctcacgcctgtaatcccagcactttgggaggccgaggcaggcggatcacgaggtcaggagatcaagaccacggtgaaaccccgtctctacgaaaaatacacaaagttagccgggcgtagtggcgggcgcctgtagtcccagctacttgggaggctgaggcaggagaatggcgtgaacccgggaggcggagcttgcagtgagccgagatcacgccactgcactccagcctgggcgacagagcaagactccgtctcaaaaaaaaaaaaaaaaaaaaaaaaaaaagatcgagtttt

SEQ ID NO: 9408 - DNA, 265 bp, Homo sapiens
gttttatgcagcccatttctacttcctttgtgtgatgactagatttttcccctcctttgatattatcttcaactcatatacatagaaaacacttgaaaacaaaactgaaaagttctttttagcaatgtttttagtttgagataaatcagaagtacagtcataagcattacatccctttcctttggtaatgtttaatcattctatgaatgtttcttttgttttttttttttaaatttttttcttttatctcctgggaccaaatccc

SEQ ID NO: 9409 - DNA, 1477 bp, Homo sapiens
tagtgctgatgaggtgtgacaggggctagcaagaaagaaagaaaaagagttccctaagtaagctcctactgggtgtcctccactcacatggagacagggccctgccttttaggcacttactcttccagtgtctattgcataatatgttcaggaaggatcccagattcaaagatttatagaattagagttaaaagggatagatatcttgtttgaccctgaaaaaattaaggaatatgcttgagatattcaatggcagaggctggaatagattttcccaaatctcctgatgtgaagttctgtgtttgtcaaacatgactgtgtaaaaagattaatttaaacttaatgacatgttgtattcatagaagttctttgggtttctgtggaaacctcctcttgctagcttaagcagaaatgggggatttattggaaggaagctgagatattgcaccaaactgcacaaaattgaatgaagagctgactaagcaaggctgcactgagaaggaaccagggtggtctgggctgtggtagcggcagcagcagcttgcagatctcccagcgctgatgctggctcgactcagacaggtctccactctctgctgtctgtctctggctcagacaggacactttgtgtggctgtttccttccacaaggcctcagtgggagcaagccagcctcccacaggcctctgagacagaccaccccattcctccctctcctgttaacctgcctttatttccttaattgcacttatcaccatgcagaagcctatgtgtttgttcccctgtggagatgtaaaaacactgatgcccaggcctaactcccagagactctgattgaactggtctgggctatggagccgggacatttgcatttttcttacaagctctaatgtgcagccaggattaagaatcattgccttctgcatcaacaggacaaatacaaaatgtgcagcaaaatatatgtttaagtgaatcaagaagacagatctagaaacgattgttaaggaataataatgcattttgtccatcaccacacataagtgatgttgaccagagccctcccagattgagtggtgccaggtgttcggggttgtctcggttaatccttactatggccttgcggggtagggggcagtgtcctcattgtccaaatgagtcactgaggctgagggattcaggctcagtgtatgcccacagttctttggcaaaccccaccactgggccagccaactacacggggattctgatcgggtcctgatgggtgcccatgatgggctgtgcaaaagtggtggtgagatttctccaccttcacggaggtggtacccaggggaggtggacttcagcagcgagaatgggctgggtgcagtggctcacagctgtaatcccagtgctttgggagttcgaggcaggagaattgcatgagctcagttgttcgagaccatgggagaccctgtctctacaaaaaaaaaaaaaaaaaa

SEQ ID NO: 9410 - DNA, 1474 bp, Homo sapiens
aaactgcagtttaaaagtgtttatatcctggatacactaacagcattttgtccaacttgtggagtggagggagtagggaaggggaggatagtgctaatgaactgtgacaggggctagcaagaaagaaagaaaaagagttccctaagtaagctcctactgggtgtcctccactcacatggagacagggccctgccttttaggcacttactcttccagtgtctattgcataatatgttcaggaaggatcccagattcaaagatttatagaattagagttaaaagggatagatatcttgtttgaccctgaaaaaattaaggaatatgcttgagatattcaatggcagaggctggaatagattttcccaaatctcctgatgtgaagttctgtgtttgtcaaacatgactgtgtaaaaagattaatttaaacttaatgacatgttgtattcatagaagttctttgggtttctgtggaaacctcctcttgctagcttaagcagaaatgggggatttattggaaggaagctgagatattgcaccaaactgcacaaaattgaatgaagagctgactaagcaaggctgcactgagaaggaaccagggtggtctgggctgtggtagcggcagcagcagcttgcagatctcccagcgctgatgctggctcgactcagacaggtctccactctctgctgtctgtctctggctcagacaggacactttgtgtggctgtttccttccacaaggcctcagtgggagcaagccagcctcccacaggcctctgagacagaccaccccattcctccctctcctgttaacctgcctttatttccttaattgcacttatcaccatgcagaagcctatgtgtttgttcccctgtggagatgtaaaaacactgatgcccaggcctaactcccagagactctgattgaactggtctgggctatggagccgggacatttgcatttttcttacaagctctaatgtgcagccaggattaagaatcattgccttctgcatcaacaggacaaatacaaaatgtgcagcaaaatatatgtttaagtgaatcaagaagacagatctagaaacgattgttaaggaataataatgcattttgtccatcaccacacataagtgatgttgaccagagccctcccagattgagtggtgccaggtgttcggggttgtctcggttaatccttactatggccttgcggggtagggggcagtgtcctcattgtccaaatgagtcactgaggctgagggattcaggctcagtgtatgcccacagttctttggcaaaccccaccactgggccagccaactacacggggattctgatcgggtcctgatgggtgcccatgatgggctgtgcaaaagtggtggtgagatttctccaccttcacggaggtggtacccaggggaggtggacttcagcagcgagaatgggctgggtgcagtggctcacagctgtaatccca

SEQ ID NO: 9411 - DNA, 5584 bp, Homo sapiens
atcgttatgattggtttgccagcccggggtaaaacctacgtgtccaagaaactaacacgctacctcaactggattggagtccccaccaaaggtaagtgtggctcattccctaggaaagacaattattagttcctgggcctcacaggtctctgggagacttattcttcctggcatcaatgctatagggtgcttttggcagaaatagcagttgctttctggtttactggagttattctctattcccagacttgtctcctcctggcgtgggtggattggcctagttttgagggaatgcctttgataggactgttaagatttagatgagcatagggctgtaccttttcagaagccttacatggacatcatcttatataaccctagcagtgtctctgtgaaatagacagagtggctgaggaaattgaaacctcagacagcttaagacttgtccaaggtctagaaagtcagggcttgaacccaactcttttgactcttaatctgatattgttcccaacctaccatgctgccgcttttttcatccccttggtcactccgacattaggccaagaaacaagtcccatttggtggggccatcatattattttgctgctgaaggatttgggtgtcttctacagtgtttaatcttggggtgtatcggcgtgaagcagtcaagtcctataagtcctacgacttctttcggcatgacaatgaggaggccatgaagatccgcaagtgagtcttgtttaaggcctgatctccaggtcagctctttcttggccgtcatgagacttggtgtgacagggcttggtttcatctcagtaaatatcttaaggggaagttaaatggaagttatctgatgggcaagtgaccttgggcttgggtggtcagaagaacagggctcagggtgattgatacctgtgtgcttgtaggagaagtctaaagagggctaagatctgtgcattggggcaggggcaggaaggggttataggatggtgtgaaaaccctcagtgagaaagttgaaagatctagttagagaaaggttttgaacagtgggaaactaagtgggcagggatgtgacttctgtagccacccgaatgtttgtgtctctgactgtttgagcttagctctccttgctggtttcatttgctcttatggcagacagtgtgctctggtggcgctggaagatgttaaggcgtatctcactgaggagaatggtcagattgcggtaagctttatctgctgcttcttctttctggtccccacccttgcagcagcctggctacccagccccaccttgagtctgccctggtggggttctgtttctctgttcctgctcatttaccttgtgtactttcttcacaggtgtttgatgccaccaatacaacccgggagaggagggacatgattttgaactttgctgaacagaattccttcaaggtaggatctgactccatgttggaggaaaagggatgagtagaggtggggagtcaggctacaggcatggatctctcactctagtgggtgaggacaggatgggatatctgaatctcttctctcagagcattcccccagtccttgagtgttttcattcaggtcctttctcagactgttagcctgtatgtttgaggcccaggggctgtggtaagagctatgaggaggacttgagggccactttcatgaagaaaatcctgggagatgtggtggctgggtggggtagatgagcatgtgctcttaattaacagcctggcatttttgacttgcttatcactgccttctctccatggccaggtattctttgtggaatccgtctgtgatgatcctgatgtcattgctgccaatattctggttggtgacacccctacatatcatctcctcttcaccttttgtgctgtgtgtgttgtggggtgtgtgtgtgtgtgtgtgtgtgtgtgttgttgggaaaggggtcctctttcctaattgaaaagaagaatagacatgtttaacatcacaaagagatcttttctatctgccagagccccatctggtacttctacactcttctcttgggagaggaaactgaggctttaaggaatcaagtaagaattagctgttgaattgaaaccagggtttaggttgtaggattcttggccctgtgctctacgtattatctggatgttgagacctagatgttggaatagatcagccgggcacggtggctcatgcttgtaggctcagcactttgggaggccgaggcaagtggattgcttgaacccagaaggatcaccttagcctgggaggttgaggccacagtgagccgtgattgtgccactgcagtccagtcttggtgacagagtgagaacatgtccagggaggttgaggctgcagtgagccatgattgtgccactgcagtccagtcttggtaacagagtgagaacatgtctcaaaaaagaaaaaaaaaaaagaatagatcagactcttcgtttcaggacttacctacaggaaggttatctccccagcaattgtccaaagttctcgtcagtgttctatacattgagctccttattccctgtggggtcacaatgtaagccagtccccattggatgggttgtgctctgctggaccgagtagatatctgaacatggtcttatgcaggtgctctcccagccgtaggaacttgggatcatctgaggaagagccatctggtcccaagtcaggcactggggtcatgcaccctattctgagtggtaatagggaaacattggagcctgttctgttttctcaggaaagtacataaagggattggggcccaggagcagctttggctgcgtgactgcctctgtccttcagccaagtgcaggcacatgactccccagttgtcttaacttttttggttgccagggtcacaggacggggcggggcggggcggggggtactcaatgagtggagtgccaatgttccagtgaaaggcgacatttatggacttctttttcttttttttagcagtggctatttgtaggaggactgttacgggcagacctctgatgaggcctttactggttcctatgatttcaggaggttaaggtatcaagccctgactatcctgaaaggaacagagagaacgtgatggaggacttcctgaagagaattgaatgctacaaagttacctaccgacctcttgacccagacaactatgacaagtaaggtttaaggccatggtttgaagggcccaaggcaaaggtctcatctgggaaaataacctttctccctgagttctctaacttccttctgataatctagatctacagtgttaacatcatcccagagaaataaggtatggatttgtggcttttatgtggattgcatcttgtacatgaaaaattgaagtggttggttttgttttgttttgagacagggtctcactctgtcacccaggctggagtgcagtggcaaaatcagggcccactgcaactgctgcccccggggctcaggtgatcctcccacctcagcctcctgagtagctgggaccacaggtgtgcgccaccatgcccggctatttttttttttttttagtaaagatagagtttccccatgttggccaggctggtcttgaactcctgagctcaagtaatccacccgcctcggcctcccaaagtgctgggattacaggtatgagtcactgcgcctggctggaagtgttttttatcatcaattttttctctccagtctctagagcatgatttcctcaatctcagtattattggcactttgaactgggtaattctttgttgtaggacctgtcctgtgcattgtaggatgttcagcagcttccctgggctttgcccactagatgccagtaacacctccaacctgtgacaaccaaaatgtctccagacatgtcagaggttccccggggggcacagttatccctggttgagaatcactgctccatatctgaatgggggtgttgtaggataccctttggagatgtgtcatcagtttttaaagtttatatatattatatgatattttacatatattaatgcttgtgtgtatatcatgcatattatagcataacatatatattacatattgcatatttttatatctatctctctctatatataacatgcaaagccctcaagaacatgcctgactcagagaaatgtctgatcaatgccagctgttgttactatggaagcatttgttggcagtatggtgtagactatagattaacttgtcatgtgtgaggtatatgagccataacaaaaccaagtctatgttgaagaaagatggtgtacacatggaaatctgcaagaatgtggcctcatgaaagagcatgcattcagggcagttaacagctctattcacataatacagacctgcagccaagcaaatggcacatttaatgtgcatggcacacttaatacagtggtctgtttaatgttttgagcctttcagttccttcaagtgggtttcccagaatccccttaattcagaggctgaaaaccacctctagatatggcataaaagtattcttcagttggaacaaagtcccacctagaaaaacatacagaagatctacatatatatacatgtgtatgtttgtatatgttatctctggtagtagggtgatgcgtgatttgcatccttccatcattttttctgattttttgatttaaaataagcacttatgactttttttttgagatggagtctctcgctcttgttgcccaggctggagtgcagtggcacgatctcggctcactgcaacctcccccttcctgggttcaagcaattctcctgcctcagcctcctgagtagctgggattacaggcacccgccaccacgcccggctaatttttttatttttagtagagatggggattcaccatgttggccaggctgttctcaaactcctgatctcctgatctacccaccttggcctcccaaagtgctaggattacaggcatgagctaccgcatccagccacacttatgacttttataaagagaacaatctcatgttggcctcaaagcaagcaatgtctgaaagtgtctttgagagaagcatgattaggtagatgcagggagtatatagacatttctgtctgtgcttctgctgcctcttcccttcccctcgttgctcgtcgtgccatattctggccaggtcttaactgcctcaaaaggggcctattcttctcaccaaattttgggcttagcaaaatcttcaggtcacctagtctagcccctgatgggaaggctgaattctgtttatcctatttatctacattacttgtcacactacaggcactgaggaaatggtacaaacttactagaagttcaggaaattgtacttcatcttggttttaaggagtaattaatctcctaccatttggttccataaacgtgggtgtgacagaggaggggaggaagagcagctgtgagcctgcaagtccctgtagaaatccttttccctctgattcttattctcagatcttcttacctagggaattttttttttcctttcctgtcccagggatctttctttcatcaaggtgataaacgtgggccagcgatttttagtcaacagagtccaggactacatc

SEQ ID NO: 9412 - DNA, 4151 bp, Homo sapiens; identical to SEQ ID NO: 6576

SEQ ID NO: 9413 - DNA, 691 bp, Homo sapiens; identical to SEQ ID NO: 6577

SEQ ID NO: 9414 - DNA, 4151 bp, Homo sapiens; identical to SEQ ID NO: 6576

SEQ ID NO: 9415 - DNA, 691 bp, Homo sapiens; identical to SEQ ID NO: 6577

SEQ ID NO: 9416 - DNA, 6135 bp, Homo sapiens
cagttgaaaaacccttagtcactttgacacatctgctctttacactggtattttcttggtttaagtgacgacatactgaaatgactgggtcaaatcaacaaatcagatattgcaaaaccagtatttttccaaaaattgactgtatatataaagtcagccagtgctgacttcgtatttttagatagtaagtgcagaaatataacttcctcttctttctgtctctagtttttactgttgacctatccctatgctcctcaactggacgctagtctcttgtaggaaataaatctctttaagaaagatgaaagaggttggtatgtatgccaggcacttgctagccttatactccctacgtccctaattttgaccttcatataaccacagatttacacagttaaaagctgggaataaggcagcatagcagtcctttttttttttttttttttttttttttgtggcagggtcttaccctattgcccatgctggagtgcagtagcatgatcatagctcactgtaacctcaacctcccaggcttaagtgatccttctacatcagcctcttttttaaaaaaattatttatttatttttgagacaaagttttgctcttgttgcctggggtggagtacaattgtgccatctcagctcaccacaacctctgcctcccaggttcaagtgattatcctgcctcagcctcccgagtacctgagattacagatgcctgccatcacacccagctaatttttgtatttttagtagagatggggtttcgccatgttggccagtctggtcttgaactcctgacctcaggcgatccacctgcttcagcctcccaaagtattgggattacaggcgtgagccactgtgcccagcctcctcggcctcttaagaactggtgtgcaccaccatacccagctaattagaaaaaaaaatttgtagagataaggtctcactatgttgcccaggcttgtttcaaactcctggtctcaagcaatcctcccacttcaacctcctaaagtgctgagattacaggcgtaagccactgccctcagccctcaaagcagtattaaagctagtctagactatattatggtacagaaagaacaagaagttgattgagtcaagcatttgattgatttattgctcgattttatattggcaaccataagggttgctgttaattgttactagtatcaaagtttggaaaattctgcccagttattgttcaatctttgaagactgaggaacaagccatgttcctcttaagcatttaatgacgttcttgcaattttattattttctttcctttaatccttctccaaatatacattttttgcctcttcctttttagccttcatctactccttgcagattgctttgtggcaaggattgcttgtttcaactaggctgtctttcctttggcctaagagtccacaggcaaacctgagctgtgcccacttgctaggcttgctatagggacctgaatttgcaaaggaaggggaacagtagagaataaataatgggagacagtgagcctatggctatgtcttttcagatgccttctgcctggtttgttttagattgccattgcctcagtcccctctgtgggataggccaagacttgtgtgctgtcttgacccatgtggcagctacttaattcccactgtgggtctcagctctcgtgtgctggggcagccaagaagggaggcagttaagaagttagggtgcttagcagtgttctaagtttagcccgctaaggaagcatttcagatagttctgttctccttttttgtgtggaaaataaatagctgtccaagccaggcacggtgcctcacgcctgtaatccctttgggaagctgaggtaggcagatcacgaggtcaggagttcgagatcagcctggccagcgtggtgaaaccccgtcgctactaaaaagacagaaatttggccgggcatggtggggcgtgcctgtaatcccagctacttgggaggctgaggcagaagaattgcttgaacccgggaggtggaggtctttgggcttgtatgttgatggtgatatttgtagagcattaactaagttctagtcactgttctaaaaattttacatctatgcactcatctaatcctcataacatttctggggtttaggctctattattgtcttcatcctacagatgtgggaatcctagagtataaatccttgcctaaacagcaagtacgttttcacaaacccaaataatcttattaaaataattgtttaaataaaagtatattttattgtttttcttgttttttaaaagaaagcttgttggtactactagattattttttgagggcatagtattctcaatatcctccttttatacagcaaaaatattttaaatggatgagatggaatggtagtactagaaagaaaggtaaaaaatttaatgacaaatctcaacacctagaattaaattgctagcttcactggggtttcctaataataaaaactttttttttttttttttaatctcacagcaaactttgaaacaaaaatgggtggagtacagatctctgcagttacaggaacatcgtctgcttcatggtaaatgcaatttcctgttcagaaaccacactaacattacttctttcagtatttctgcctcaaagttggtttaagattatcatcattataagaaaaatttgtctagtgctggtcaaggaaatgggtctgtgtttctttggcatgagctttggaatggctgtatttggaggaggggtaaggcaagtcagatccactactgcgtatcatgacgcagatgcacatgcacacagatgcacatgctcgaaaacaggcacctggagattttagaaaatcattggggaagattgcctaactttccttctacttcagtgaatgaattacatttctgaaaacaatcacggctaaggggctgtatagtttttagaagctattaaagctggaatggttgcacacttattgggtagagctcctgtcttttgtttaaattgcataagttgcatttatgcagagaaattctttttcatggcccccaagacaaagacataaatgcgtaagatgaatacaacagtaaatgcatagctcttgccattgagtgcatttttaagggaagggttgagtttaaaatgtgttaattcgctatttgttgtatgatagatgtaaccaaaggaatgaacttttgtgtacaaataattcactgaaaccactacgtgggtgtgaaatatagcttatctcttctttaaatagcaccaagcttaagtctgtaacctagaatatctgttaaaagtgataatcaatttgtttaccaaaaaagataacaatttaatccttaactagtcactaatttatggcttagagttctggtatgaacttctgtttttttttttttaaattgaagtgtttgaaacttatgtacaagttacttctcttttttatgtcttcatttaatatttttaaaaaattcataatagttcttttgggtagtgaagtttgttagagaggcagaaatatttaatacaaaaacttctttatggccttgtaaattcagccacctccttgctttctttagacatgagggctttttagcctcatttccacttctggagcatcctgaatggcccagtgaatataaattcttgctgttctatagaaacagccttgtatagacaacattgttaggtcaggatcctcataaagtcattgttgtacatattttttgagcaattgaaggagttctgctttttctagatgtatagtaaacatccagggcatgtgattctataaggcaattgctctccaatcaaaagaaattcatcacttattgcaagatgaaatgaagtaggttgtattagcaaaaaggaaagcattatgactagtcaccatggggctggctgtactcaaccttgcaaatcatctgaaagaacagtttctttttatattgtcaaccgaggacaaaagacagcagcagtggagataatcagtacaaaataaaaccattttagagtgtacagtattctattattttttctgaagcatagtcacttactgattacgtttttccaaggctggtattacaagttctctctctctctctctctctctctcacacacacacacacacaagataccaaccaactcagttagtgtggaagcagggagggtcatattggtatgtgattaacattagagtttgaagagccagatgtacgttgttaaggatcaatgaaaaaaatttagccaagcagataaaattcaatttcttcaaataaattattacttacttgaggacaaggatgatttctgggtacagtatcattccagagaatttaagtattccaaaacgaaactgggaatattgaggttggaagatacatttgatctcacaaatcctttctctaagaaacacttttgaattacctgttccataactgttttctatttacttcaaatggttttataataattttagaattatttttaaaagacagtacctaagaatcagagaaactaagtggagaaaatcatgatagtatttccccaagtgtattctatggaaccccatttctgtgagaattttaataaaaggtttcagggttatttaaatttaagaaatgatcattttggaggttcagatgccacactggtagactgtcaattgggctgaactgttctcatatgaaacatcttgtttaaatttattctaatattataatttttgtgaccatggaaccttggtctatgaacaatagttcaggaaaccctactataaggtttatcaaatggtctcataaacagttacttattcaagcacgccaaagctcagtgaaaagtatttttcacccttactctttctcgtgtcattcaaagagaagttttgatgtagtgtatttatttgtagggagtaatgaacagatccatttcacagtagactttgtgctctaggtgatgcagctaattgccccagtttggaaaacatggacttggatgaattgtctttgtttggacccctgcctgggccaggcccagcccttgtggaccggaatcgattatccagtgagagcagctgtaagagctggctgagctccatgacgatggacagtgaagatggctaccagacgtgtgtgtctgaggactccagcaggggtgccttcagtcggcagacgagtacagatgatgagtgctttatccccaaggagggggatgattttctgaggaggtcatcttcaaggaggaaccggagcatcagtaacaccagcagcggatccatgtctcccttgtgggagggcaacttatcaagcatgtttggaccctgccccggaagagcagaaagggaagtgtccgaaagcaactcttgaaatttatccctggccttcatcgtgctgtggaagaggaagaaagtcgcttttgacggattgtggtgtcctttcaaattagcttatttcacaaatatctctagactcacccagatcccagcttggtgggaaagtgcagaagaattgcaaaactgacatcccatttcacagcaatagtgacctttatttaaattgttgtgttatagtttatgcttcttaaatcatttttcaacctaaacagccaatttctaagcagacaggaaaactaaataataagttaattaatataacaaagatgcaggttcctgctcattccagtaatgtctttgaaagcaaaactaatatttattttctagattatccctgtgaataattgagaactttttggagtcaagtatgaataaaggtgtggcagaatataataatctggactattttctataggataattgctgggttataaaatcttaggtttgcttatgcccagtagctcctgcggaggcttaataataggcaattttgaatttgttcaaacctgtaatggcttgtaaacaaagatgaccatcagctgtttctcacatctatagtgacaataaagcgggaagtataagatttaataggaggggttaaggttcatgagaaccatggaaagatgtggtctgagatgggtgctgcaaagatcataataaagtcatttttatagacagtctaaacaaaatgggtggggatgtcgtgttttttgcccaattcagcttttgttctgc

SEQ ID NO: 9417 - DNA, 6487 bp, Homo sapiens
cagttgaaaaacccttagtcactttgacacatctgctctttacactggtattttcttggtttaagtgacgacatactgaaatgactgggtcaaatcaacaaatcagatattgcaaaaccagtatttttccaaaaattgactgtatatataaagtcagccagtgctgacttcgtatttttagatagtaagtgcagaaatataacttcctcttctttctgtctctagtttttactgttgacctatccctatgctcctcaactggacgctagtctcttgtaggaaataaatctctttaagaaagatgaaagaggttggtatgtatgccaggcacttgctagccttatactccctacgtccctaattttgaccttcatataaccacagatttacacagttaaaagctgggaataaggcagcatagcagtcctttttttttttttttttttttttttgtggcagggtcttaccctattgcccatgctggagtgcagtagcatgatcatagctcactgtaacctcaacctcccaggcttaagtgatccttctacatcagcctcttttttaaaaaaattatttatttatttttgagacaaagttttgctcttgttgcctggggtggagtacaattgtgccatctcagctcaccacaacctctgcctcccaggttcaagtgattatcctgcctcagcctcccgagtacctgagattacagatgcctgccatcacacccagctaatttttgtatttttagtagagatggggtttcgccatgttggccagtctggtcttgaactcctgacctcaggcgatccacctgcttcagcctcccaaagtattgggattacaggcgtgagccactgtgcccagcctcctcggcctcttaagaactggtgtgcaccaccatacccagctaattagaaaaaaaaatttgtagagataaggtctcactatgttgcccaggcttgtttcaaactcctggtctcaagcaatcctcccacttcaacctcctaaagtgctgagattacaggcgtaagccactgccctcagccctcaaagcagtattaaagctagtctagactatattatggtacagaaagaacaagaagttgattgagtcaagcatttgattgatttattgctcgattttatattggcaaccataagggttgctgttaattgttactagtatcaaagtttggaaaattctgcccagttattgttcaatctttgaagactgaggaacaagccatgttcctcttaagcatttaatgacgttcttgcaattttattattttctttcctttaatccttctccaaatatacattttttgcctcttcctttttagccttcatctactccttgcagattgctttgtggcaaggattgcttgtttcaactaggctgtctttcctttggcctaagagtccacaggcaaacctgagctgtgcccacttgctaggcttgctatagggacctgaatttgcaaaggaaggggaacagtagagaataaataatgggagacagtgagcctatggctatgtcttttcagatgccttctgcctggtttgttttagattgccattgcctcagtcccctctgtgggataggccaagacttgtgtgctgtcttgacccatgtggcagctacttaattcccactgtgggtctcagctctcgtgtgctggggcagccaagaagggaggcagttaagaagttagggtgcttagcagtgttctaagtttagcccgctaaggaagcatttcagatagttctgttctccttttttgtgtggaaaataaatagctgtccaagccaggcacggtgcctcacgcctgtaatccctttgggaagctgaggtaggcagatcacgaggtcaggagttcgagatcagcctggccagcgtggtgaaaccccgtcgctactaaaaagacagaaatttggccgggcatggtggggcgtgcctgtaatcccagctacttgggaggctgaggcagaagaattgcttgaacccgggaggtggaggtctttgggcttgtatgttgatggtgatatttgtagagcattaactaagttctagtcactgttctaaaaattttacatctatgcactcatctaatcctcataacatttctggggtttaggctctattattgtcttcatcctacagatgtgggaatcctagagtataaatccttgcctaaacagcaagtacgttttcacaaacccaaataatcttattaaaataattgtttaaataaaagtatattttattgtttttcttgttttttaaaagaaagcttgttggtactactagattattttttgagggcatagtattctcaatatcctccttttatacagcaaaaatattttaaatggatgagatggaatggtagtactagaaagaaaggtaaaaaatttaatgacaaatctcaacacctagaattaaattgctagcttcactggggtttcctaataataaaaacttttttttttttttttttaatctcacagcaaactttgaaacaaaaatgggtggagtacagatctctgcagttacaggaacatcgtctgcttcatggtaaatgcaatttcctgttcagaaaccacactaacattacttctttcagtatttctgcctcaaagttggtttaagattatcatcattataagaaaaatttgtctagtgctggtcaaggaaatgggtctgtgtttctttggcatgagctttggaatggctgtatttggaggaggggtaaggcaagtcagatccactactgcgtatcatgacgcagatgcacatgcacacagatgcacatgctcgaaaacaggcacctggagattttagaaaatcattggggaagattgcctaactttccttctacttcagtgaatgaattacatttctgaaaacaatcacggctaaggggctgtatagtttttagaagctattaaagctggaatggttgcacacttattgggtagagctcctgtcttttgtttaaattgcataagttgcatttatgcagagaaattctttttcatggcccccaagacaaagacataaatgcgtaagatgaatacaacagtaaatgcatagctcttgccattgagtgcatttttaagggaagggttgagtttaaaatgtgttaattcgctatttgttgtatgatagatgtaaccaaaggaatgaacttttgtgtacaaataattcactgaaaccactacgtgggtgtgaaatatagcttatctcttctttaaatagcaccaagcttaagtctgtaacctagaatatctgttaaaagtgataatcaatttgtttaccaaaaaagataacaatttaatccttaactagtcactaatttatggcttagagttctggtatgaacttctgtttttttttttttaaattgaagtgtttgaaacttatgtacaagttacttctcttttttatgtcttcatttaatatttttaaaaaattcataatagttcttttgggtagtgaagtttgttagagaggcagaaatatttaatacaaaaacttctttatggccttgtaaattcagccacctccttgctttctttagacatgagggctttttagcctcatttccacttctggagcatcctgaatggcccagtgaatataaattcttgctgttctatagaaacagccttgtatagacaacattgttaggtcaggatcctcataaagtcattgttgtacatattttttgagcaattgaaggagttctgctttttctagatgtatagtaaacatccagggcatgtgattctataaggcaattgctctccaatcaaaagaaattcatcacttattgcaagatgaaatgaagtaggttgtattagcaaaaaggaaagcattatgactagtcaccatggggctggctgtactcaaccttgcaaatcatctgaaagaacagtttctttttatattgtcaaccgaggacaaaagacagcagcagtggagataatcagtacaaaataaaaccattttagagtgtacagtattctattattttttctgaagcatagtcacttactgattacgtttttccaaggctggtattacaagttctctctctctctctctctctctctcacacacacacacacacaagataccaaccaactcagttagtgtggaagcagggagggtcatattggtatgtgattaacattagagtttgaagagccagatgtacgttgttaaggatcaatgaaaaaaatttagccaagcagataaaattcaatttcttcaaataaattattacttacttgaggacaaggatgatttctgggtacagtatcattccagagaatttaagtattccaaaacgaaactgggaatattgaggttggaagatacatttgatttcacaaatcctttctctaagaaacacttttgaattacctgttccataactgttttctatttacttcaaatggttttataataattttagaattatttttaaaagacagtacctaagaatcagagaaactaagtggagaaaatcatgatagtatttccccaagtgtattctatggaaccccatttctgtgagaattttaataaaaggtttcagggttatttaaatttaagaaatgatcattttggaggttcagatgccacactggtagactgtcaattgggctgaactgttctcatatgaaacatcttgtttaaatttattctaatattataatttttgtgaccatggaaccttggtctatgaacaatagttcaggaaaccctactataaggtttatcaaatggtctcataaacagttacttattcaagcacgccaaagctcagtgaaaagtatttttcacccttactctttctcgtgtcattcaaagagaagttttgatgtagtgtatttatttgtagggagtaatgaacagatccatttcacagtagactttgtgctctaggtgatgcagctaattgccccagtttggaaaacatggacttggatgaattgtctttgtttggacccctgcctgggccaggcccagcccttgtggaccggaatcgattatccagtgagagcagctgtaagagctggctgagctccatgacgatggacagtgaagatggctaccagacgtgtgtgtctgaggactccagcaggggtgccttcagtcggcagacgagtacagatgatgagtgctttatccccaaggagggggatgattttctgaggaggtcatcttcaaggaggaaccggagcatcagtaacaccagcagcggatccatgtctcccttgtgggagggcaacttatcaagcatgtttgggaccctgccccggaagagcagaaagggaagtgtccgaaagcaactcttgaaatttatccctggccttcatcgtgctgtggaagaggaagaaagtcgcttttgacggattgtggtgtcctttcaaattagcttatttcacaaatatctctagactcacccagatcccagcttggtgggaaagtgcagaagaattgcaaaactgacatcccatttcacagcaatagtgacctttatttaaattgttgtgttatagtttatgcttcttaaatcatttttcaacctaaacagccaatttctaagcagacaggaaaactaaataataagttaattaatataacaaagatgcaggttcctgctcattccagtaatgtctttgaaagcaaaactaatatttattttctagattatccctgtgaataattgagaactttttggagtcaagtatgaataaaggtgtggcagaatataataatctggactattttctataggataattgctgggttataaaatcttaggtttgcttatgcccagtagctcctgcggaggcttaataataggcaattttgaatttgttcaaacctgtaatggcttgtaaacaaagatgaccatcagctgtttctcacatctatagtgacaataaagcgggaagtataagatttaataggaggggttaaggttcatgagaaccatggaaagatgtggtctgagatgggtgctgcaaagatcataataaagtcatttttatagacagtctaaacaaaatgggtggggatgtcatgttttttgcccaattcagcttttgttctgcctgaacattaatggcaagtctagaactctccgaatcctacagctttgtaattttttttctacaaatgtctaacatccaaaactgagggttgggaaaaggacttccctcctgtagtttttttcatattacttctcactttatatcttatattctaaatagctatcacctcagcagtcttttgcctattggttatgttagtatcacattacttctagcctttcaattactccatgttttatttaatatccattgaagtctatgaattctctgttctggtggcacagctattcataacctatattctagagtagacaatctggactatgtaataaatagtctgctgattttaagt

SEQ ID NO: 9418 - DNA, 139 bp, Homo sapiens
tttttttttttttgagacagagtttcgcccttgtcacccaggctggagtgcagtggcatgatctcggctcactgcaacctccacctcccgggttcaagggattctcctgcctcagcctcctgagtagctgggattacag

SEQ ID NO: 9419 - DNA, 139 bp, Homo sapiens; identical to SEQ ID NO: 9418

SEQ ID NO: 9420 - DNA, 2399 bp, Homo sapiens
ccctgctgagaatggatttgtttgtgttctataccttggtgtcatgaagtccgataattaatgtaaaattctcaatttcccgcctagcccaaaataagtactcagcaatgttggttgactgtgtcctatttaataatatttttatggcaccatgctccattaaactcagaacaatttgtagaagtcttctaatttatcttcgactatagattccagaactctttgacttacatttgactaagtaaaaagatgtctttctgcctctagaagacagtttttcctagaaacattgattctgatgcctaattttctttacccattaattcatggacttatttttattgtttttcacacatcctcacaatctttgccaggaacatggtgagcaggaatacttacctttcagggcagggagaaaggtcagagcctcaggtggcctctgagtgacctcagtgctagagctgtccacctgtttatactcctggctatcacacctttatcccatcacagaagcttacaaaaggagtaattattagagtttgctttgtaaagcctaattttggatttccatttaataattaaagctggttttagggaagcccctaaaccaacctgagttttcttgaaatactaacttgtgtcttgctgttatctgagtcacacttttatcctaatttttagatacggacggcctgaccctctgctccggagagaacacgacattcgcgtgagcctccggatggcctctgtgcagtatgtgcatactcagcgtttccaggcagaggtggtggccttcattcagcatttcactcagctgcaggatgtcttagggcgccagcgagctgctattgaggggcagacggtaggtagcctgggccctccaagctgcttttccagtttgactgatcagtagaacttttaggcctctagagatgaatctggaagagtaaaggtaagttatccttgctaatatgttctccgtgtagattagctacagacatctttgtgtaattgaagagctttgttccttatttattgtatctcacttaaattaccttcaaactttagctttcactttctgtaaaaaaagataagggaggtttacaaagaacacttaagacttctggtcccttttaggacttcagtggggatgtttctcttggaaagtggtaggttttttctaaatgcagtagatcagaagttctaaactgagttcgtggcccccgtggggtcctggtagtttattcatggcacatcctaggccaaaggaaacacctaatggtatttccgtttacaaagtaagtcagtctaaacaacaagtacatatgtcctaacaacttagtaggtgtttgaaaaaataataacacataaatggaaagaataatattttatttaattcttaagtaaccacaatgactggtaggaggtatgtgcctgttaggtattgcataacttctcaaacttggaatcaggttggacattacaaccctcacttcctgtccacatttatcttcttatggtacttgctttttctcacagcaaccgctgaagacccagcttcgcaaagataataccttactgaaaggagtatagaatgatctattattgaatgccaactaccacaagctactagttagtgcagtgtctggcagatgttgtttttccttcaaaaatttaaaatgtcctggcagccgggtgtggtggctcacgcctgtaaatcctagcactttgggaggccgaggcgggcagatcacgaggtccagagatcgagaccatcctggccaacatgacgaaaccccgtctttactaaaatacaaaaattagctgggcatggtggcacgtgcctgtagtcccagctattcgggaggctaaggcaggagaatcgcttgaacctgggaggcggaggttggagtgagccgaggtggcgccactgcactccagtctggcgacagagcgagactccgtctcaaaaaaaaaagtcctgacagctgcaagcctttgccaccctgtggtgtctcagtgcagtttgggaaccatagaaaataacaatgtacttttgtaacaacgtgttatttttccttttttaaaaaaactttatggccaggcgtggtggctcacacctgtaatcccagcactttggggggcgaggcgggcaaatcacttgagctcaggaattcgtgaccagcctgggcaacatggtggaattctgtctctacaagaaatacagaaattagccgggtgtggtgaggcatgtgtctgtagtcccaggtacttgggaggctgaggtgggaggatggcttgagcccaggaggtggaggttgcagtgagctgagatcatgccacctgcacttcagccttggtgacagagccaccatgactcaaaaaaaaaaaaaaaaaac

SEQ ID NO: 9421 - DNA, 7134 bp, Homo sapiens
gaacaagctgttactaatgtactggagtttctgtgcaaactgtctaccataaaccatgaaaggattcaaagttcatagttccttctttgttcctttgttaatcactgacttctgactagtgggaggtgcctcccaagtttgctaatgcattctttttggataaggatgacgcacagattgtcctaataaggacttagattgagaaagaccgccccctctgagaagaggggacaagtcagagagagggcgggcagtttcttttttaactagggatgacacaagcataagtcatttccttattaattggttcaaaccagttcttacaggaactagtggtgataaatgtgggacttctgagaagtcattcattttattctttgtgccataccagagtacagtatcagctgagctgaccttactctgaggactaactcttttgctggaagcggtttctgatttacagctcttggtttctcccagacatgttggtgggagagattttggtttttaaggggttgttagatggagtaaattttctttttttttttttttttttttaactaaaaaggggtcacagaatttcagcagttctctgatttttatattttattcctcttcctatccaatccctgccttttgagtccaggtggtaagtacattttctttaacgtttttcctgcttttcttcccaaatgtgtctttttctttgggctactgtaccctgcttccagtgctgtccccggcataggtccatctctgcagaagccatttcaggagtacctggaggctcaacggcagaagcttcaccacaaaagcgaaatgggcacaccacaggtaagactttaatccggtttcttctcccctctgggaagtttcgggctgaaattacattcacagctctcactcacatttttaggcaaataagtgaagttggtttgccagtgttccttgacagaagttgagcgtctgtgtatgctctactgggaaatttgtctttgtcttagactagaaagtgtaacttctgtacatcttctcctaaaaacaagggtagagccaatggaaagtaatggttctgttacatagaatgagttgttgccttgatcttaaatgatgtattggtagatatacttcccaagtggattaaaaagttaaaacttacagcataacaaagtattagacttactgaggtgacttgaatatctccttttgattttcactctatttttcttttcacccatgggaaaatgataattttttaataaaccaaggctcttaccatagctgaactttaaaacttagactgtcttttctgtaaacgattctgaggcaaagggaaatgactagaagaggatgagtaaacaataacctgaaatgggaaactcgagggaagcacaggttttttttgttttgttttgtttggttcgttttttgttctttggggtttttttgagacagaatttcgctctcgttgcccaagttggagtgcaatggcgcgatcttggctcactgcaacctccgcctcccgggttcaagcgattctcctgcctcagcctcccaagtagctgtgattccaggcacgtgccaccacaccagctaattttttgtattttaatagaaacagggtttcaccgtgttagccaggctggtctcaaactgacctcagatgatccgcccgccttggcctcccaaagtgctgggattacagatgtgagccaccgcgcccggccagagcactgttttttttaatggccttgcactcttcttatggacctttgctgccctcagttgaccaaacatgacatcagaaacagatacatttgtgtgttttaaaaacagctcctaatactggaacaaaaatatttaactgtcttgacaatactcatgagtatctgcatggcgacttcagagttgagtttaatcaaagagtttattcttaggtcctagtagaagagctaacctcacactcatcccattctaaactatgtgattcaacactgattttacatccaacaaagtgaaatcttgatagttgggtgtaaaaaggagagtaatggagatttcagagtagttggggttgcttacttttcatttttaattctttaggttttgtaagttacacacttcaagcattatagatgatcctctttttactactgaactaatgaagcctttttcattgcattgttctgcatttatttctacagggagaaaactggttgtcctggatgtttgaaaagttggtcgttgtcatggtgtgttacttcatcctatctatcattaactccatggcacaaagttatgccaaacgaatccagcagcggttgaactcagaggagaaaactaaataagtagagaaagttttaaactgcagaaattggagtggatgggttctgccttaaattgggaggactccaagccgggaaggaaaattcccttttccaacctgtatcaatttttacaacttttttcctgaaagcagtttagtccatactttgcactgacatactttttccttctgtgctaaggtaaggtatccaccctcgatgcaatccaccttgtgttttcttagggtggaatgtgatgttcagcagcaaacttgcaacagactggccttctgtttgttactttcaaaaggcccacatgatacaattagagaattcccaccgcacaaaaaaagttcctaagtatgttaaatatgtcaagctttttaggcttgtcacaaatgattgctttgttttcctaagtcatcaaaatgtatataaattatctagattggataacagtcttgcatgtttatcatgttacaatttaatattccatcctgcccaacccttcctctcccatcctcaaaaaagggccattttatgatgcattgcacaccctctggggaaattgatctttaaattttgagacagtataaggaaaatctggttggtgtcttacaagtgagctgacaccattttttattctgtgtatttagaatgaagtcttgaaaaaaactttataaagacatctttaatcattccaaaattgtgtccgttttcttgagcgttttgattttttacttttagcttataccagctgaatggcagccttgcctaatccacctacaacaagaatttcttaagctttcttttatttgcatgagagagccactaccaaggcatgttttgttatgctgaaactgggctgctgcatactgctaaatggcacctctgggattggcctacctggggatttcttggtttgtgaaaacaggagaggagaaatatctcatacaagtgaaaggatactggagagagaaattacccatttctaaaaaaaaaccacactctgtcgtatctgtgttaatgttttctagcatgtactctggtttcaacagacacaaatttatatgttaacccagttttcttgccgttctgtaagtgttttattcttagtgtgatttttttccattgggatgtttttgattgaacttgttcattttgttttgcttgggaggaaaataaacaattttacttttttcctttaggagcattatgagcattatgtcagaatagaatagaattggggttcgatcttaacaggccagaaatgcctgggtttttttggtttgtttttgtttttgtttttttatcaaatcctgcctgactgtctgcttgttttgcctaccatcgtgacatctccatggctgtaccaccttgtcgggtagcttatcagactgatgttgactgttgaatctcatggcaacaccagtcgatgggctgtctgacattttggtatctttcatctgaccatccatatccaatgttctcatttaaacattacccagcatcattgtttataatcagaaactctggtccttctgtctggtggcacttagagtcttttgtgccataatgcagcagtatggagggaggattttatggagaaatggggatagtcttcatgaccacaaataaataaaggaaaactaagctgcattgtgggttttgaaaaggttattatacttcttaacaattctttttttcagggacttttctagctgtatgactgttacttgaccttctttgaaaagcattcccaaaatgctctattttagatagattaacattaaccaacataattttttttagatcgagtcagcataaatttctaagtcagcctctagtcgtggttcatctctttcacctgcattttatttggtgtttgtctgaagaaaggaaagaggaaagcaaatacgaattgtactatttgtaccaaatctttgggattcattggcaaataatttcagtgtggtgtattattaaatagaaaaaaaaaattttgtttcctaggttgaaggtctaattgatacgtttgacttatgatgaccatttatgcactttcaaatgaatttgctttcaaaataaatgaagagcagctgtccttctttcctcttttaagtgttcagctgtggcatgctcagaggttcctgctggattccagctggagcggtgtgatacccttctttttcagctgttcgtgccttcctttcttgtatccaccaaagtggagacaaatacatgatctcaaagatacacagtacctacttaattccagctgatgggagaccaaagaatttgcaagtggatggtttggtatcactgtaaataaaaagagggcctgggaattcttgcgattccatctctactttgtataagtctcattttgtgccttacacatctgcagtatttatcatgttccaacttggtgactgtcaggcagtgcaatacatcagcagtttatcaccgaagagctgaggaatacctcccttaaaacagacaatgtcggccgggcgcggtggctcacacctgtaatcccagcactttgggaggccaaggcgggcagatcacctgaggtcaggagtttgagaccagcctggccaacatggcgaaaccccatctctactaaaaatataaaaaattagccgggcgtggtggtgcacgcctgtaatcccagctattcaggaggctgaggcaggagaatcccttgaacgcaggaagcagagtttgcagtgagccgagatggcgccactgcactccagcctgggtgacagagcaagacaaaaaaaataacagatgatgtcatatgaaaatgtgcaatgtccagttttcccatagttttctgtattctctgtgtgcataatctggagtatgagtctgggaagaaaaaggtttttagtttcatttggatagtggccacctctccattccctacgaatgctagaatgaagttactttttttttttttttttttttttttgagacagagtcttgctccgtcgcccaggctagagtgcaatggtacaatctcggctcactgccacttccgcctcccaggttcaagcgattgtcctgcctcagcctctggagtagttgggattccaggcgcccaccaccacaccaggctagtttttgtatttttagtagagacggggtttggccatgttggtcaggctggtctcgaactcctgacctgaggtgatccacctgcctcggtctcccaaagttctgggttcacagacgtgagccaccatgcccacgtagaatgaagtttcttaaatacactagttaattattgaaacatatgcagtattgagtgctcctacacaaacacgctcagcctctgcccccagtgtgctctgtgctatccacagccttagtagaacatgaggctttttgtcatttcaccagtcattcaataatgactcatttgagtatggatcatgcactagctaaataaccagttgcgctcatgtaccctgaagcaaattgtttagcctgacccatgtgtaagaagatcacagagattcccaacctttcagtgtcaaaaagcctttccatatatattactttaaaacccattttcccccatgtgtaatagtctatgttaatgacggttcgggtttcttctacattgtttgtgacctgagaaagtttaaaagagcctcagtttctttcatctataaaaataaaagagatagaaggacagtttacctaaggaataaatctggtaacatgtaaagtactgaaataggctgggtgcagtggctcatgcttataatcctaatactttgggaggccaaggcaggaggatcccttttaggccaagagttcaataaatagggccgggcatggtggctcacgcctgtaatcccagcactttgggaggccaaggtgggcagatcacctgagttcgagaccagcctaaccaacatggcgaaatcacatctctactaaaaatacaaaaatgtagcaggcacggtggcacatgcctgtaatcccagctactcgggaggctgaggcaggaatcgcttgaacccaggaggcagaggttgcagtgagccgagatcttgccattgcactccagcctgggcaacaagagtgaaactccgtctcaaaacaaacaaacaaaaaagagttcagtaaaagtacagcaataaaagttatccacctccaccaccccagcttttttttttttttttttttttttttgagagtgaggttttactgtgtcacccaggctggagtgtggtggcacagtcatggctctttacagccttgacctcccaggctcaagaaattctcctacctcagcctccctggcaaggaccagcatgaaccaccatacctgggtaattttttaattttttgtaaagacagggtctcaatattttgcccaggccagtcttgaattcccaggctcgagcgatcctgccgtggcctcccaaagtgctgggatgacaggtgtgagccaccatgctgggcattcccaatgaaagactgaggccaggcacagtggctcacgcctgtcatcccagccttttgggaggccaagacaggatcacttgaggtcaggagttcaagaccagcctggccagcatggtgaaaccctatctctactaaaaatacaaaaattagccaggcgtggtggcgtatgcctgtaatctcagctactcgggaaacaggcaggagagtcacttgaacccggaaggcagacgttgcagtgacctgagatcgtgccactgcactccagcctgggcaacagagcaagacaccatctcgcaaaaaaaaaaaaaaaaaaaaaaaaaaa

SEQ ID NO: 9422 - DNA, 4284 bp, Homo sapiens
ccttactttgaggactaactcttttgctggaagcggtttctgatttacagctcttggtttctcccagacatgttggtgggagagattttggtttttaaggggttgttagatggagtaaattttctttttttttttttttttttttaactaaaaaggggtcacagaatttcagcagttctctgatttttatattttattcctcttcctatccaatccctgccttttgagtccaggtggtaagtacattttctttaacgtttttcctgcttttcttcccaaatgtgtctttttctttgggctactgtaccctgcttccagtgctgtccccggcataggtccatctctgcagaagccatttcaggagtacctggaggctcaacggcagaagcttcaccacaaaagcgaaatgggcacaccacaggtaagactttaatccggtttcttctcccctctgggaagtttcgggctgaaattacattcacagctctcactcacatttttaggcaaataagtgaagttggtttgccagtgttccttgacagaagttgagcgtctgtgtatgctctactgggaaatttgtctttgtcttagactagaaagtgtaacttctgtacatcttctcctaaaaacaagggtagagccaatggaaagtaatggttctgttacatagaatgagttgttgccttgatcttaaatgatgtattggtagatatacttcccaagtggattaaaaagttaaaacttacagcataacaaagtattagacttactgaggtgacttgaatatctccttttgattttcactctatttttcttttcacccatgggaaaatgataattttttaataaaccaaggctcttaccatagctgaactttaaaacttagactgtcttttctgtaaacgattctgaggcaaagggaaatgactagaagaggatgagtaaacaataacctgaaatgggaaactcgagggaagcacaggttttttttgttttgttttgtttggttcgttttttgttctttggggtttttttgagacagaatttcgctctcgttgcccaagttggagtgcaatggcgcgatcttggctcactgcaacctccgcctcccgggttcaagcgattctcctgcctcagcctcccaagtagctgtgattccaggcacgtgccaccacaccagctaattttttgtattttaatagaaacagggtttcaccgtgttagccaggctggtctcaaactgacctcagatgatccgcccgccttggcctcccaaagtgctgggattacagatgtgagccaccgcgcccggccagagcactgttttttttaatggccttgcactcttcttatggacctttgctgccctcagttgaccaaacatgacatcagaaacagatacatttgtgtgttttaaaaacagctcctaatactggaacaaaaatatttaactgtcttgacaatactcatgagtatctgcatggcgacttcagagttgagtttaatcaaagagtttattcttaggtcctagtagaagagctaacctcacactcatcccattctaaactatgtgattcaacactgattttacatccaacaaagtgaaatcttgatagttgggtgtaaaaaggagagtaatggagatttcagagtagttggggttgcttacttttcatttttaattctttaggttttgtaagttacacacttcaagcattatagatgatcctctttttactactgaactaatgaagcctttttcattgcattgttctgcatttatttctacagggagaaaactggttgtcctggatgtttgaaaagttggtcgttgtcatggtgtgttacttcatcctatctatcattaactccatggcacaaagttatgccaaacgaatccagcagcggttgaactcagaggagaaaactaaataagtagagaaagttttaaactgcagaaattggagtggatgggttctgccttaaattgggaggactccaagccgggaaggaaaattcccttttccaacctgtatcaatttttacaacttttttcctgaaagcagtttagtccatactttgcactgacatactttttccttctgtgctaaggtaaggtatccaccctcgatgcaatccaccttgtgttttcttagggtggaatgtgatgttcagcagcaaacttgcaacagactggccttctgtttgttactttcaaaaggcccacatgatacaattagagaattcccaccgcacaaaaaaagttcctaagtatgttaaatatgtcaagctttttaggcttgtcacaaatgattgctttgttttcctaagtcatcaaaatgtatataaattatctagattggataacagtcttgcatgtttatcatgttacaatttaatattccatcctgcccaacccttcctctcccatcctcaaaaaagggccattttatgatgcattgcacaccctctggggaaattgatctttaaattttgagacagtataaggaaaatctggttggtgtcttacaagtgagctgacaccattttttattctgtgtatttagaatgaagtcttgaaaaaaactttataaagacatctttaatcattccaaaattgtgtccgttttcttgagcgttttgattttttacttttagcttataccagctgaatggcagccttgcctaatccacctacaacaagaatttcttaagctttcttttatttgcatgagagagccactaccaaggcatgttttgttatgctgaaactgggctgctgcatactgctaaatggcacctctgggattggcctacctggggatttcttggtttgtgaaaacaggagaggagaaatatctcatacaagtgaaaggatactggagagagaaattacccatttctaaaaaaaaaccacactctgtcgtatctgtgttaatgttttctagcatgtactctggtttcaacagacacaaatttatatgttaacccagttttcttgccgttctgtaagtgttttattcttagtgtgatttttttccattgggatgtttttgattgaacttgttcattttgttttgcttgggaggaaaataaacaattttacttttttcctttaggagcattatgagcattatgtcagaatagaatagaattggggttcgatcttaacaggccagaaatgcctgggtttttttggtttgtttttgtttttgtttttttatcaaatcctgcctgactgtctgcttgttttgcctaccatcgtgacatctccatggctgtaccaccttgtcgggtagcttatcagactgatgttgactgttgaatctcatggcaacaccagtcgatgggctgtctgacattttggtatctttcatctgaccatccatatccaatgttctcatttaaacattacccagcatcattgtttataatcagaaactctggtccttctgtctggtggcacttagagtcttttgtgccataatgcagcagtatggagggaggattttatggagaaatggggatagtcttcatgaccacaaataaataaaggaaaactaagctgcactgtgggttttgaaaaggttattatacttcttaacaattctttttttcagggacttttctagctgtatgactgttacttgaccttctttgaaaagcattcccaaaatgctctattttagatagtttaacattaaccaacataattttttttagatcgagtcagcataaatttctaagtcagcctctagtcgtggttcatctctttcacctgcattttatttggtgtttgtctgaagaaaggaaagaggaaagcaaatacgaattgtactatttgtaccaaatctttgggattcattggcaaataatttcagtgtggtgtattattaaatagaaaaaaaaaattttgtttcctaggttgaaggtctaattgatacgtttgacttatgatgaccatttatgcactttcaaatgaatttgctttcaaaataaatgaagagcagctgtccttctttcctcttttaagtgttcagctgtggcatgctcagaggttcctgctggattccagctggagcggtgtgatacccttctttttcagctgttcgtgccttcctttcttgtatccaccaaagtggagacaaatacatgatctcaaagatacacagtacctacttaattccagctgatgggagaccaaagaatttgcaagtggatggtttggtatcactgtaaataaaaagagggcctgggaattcttgcgattccatctctactttg

SEQ ID NO: 9423 - DNA, 392 bp, Homo sapiens
ccaaatgactcagaggacctagagggagggcttgaacacactccagcactgtttctacaatttagcctttatttgcattggaaaccacattcctgaattcttgagggggcaggctctggcttattctgggcaactgacttcaagtgggacccctgagctacctatgtaagcaaagagtcagccatctctggagagttaccagggaggaggatctttctgtgaacttgctttgatgacctccacccaaagccctttgaggaacagttttgtttattcaaggagcccttggcaggtcactcctcccctaccacaaatctaatccaaatgcgacattttcctttgaggccatctatcccttttgggggacaaaacacatcagcttttcccttcag

SEQ ID NO: 9424 - DNA, 300 bp, Homo sapiens
gcattaggcagtgttgcaagtacatatcggaatctctttggctggctctaagaaagagtttgaacttatttacctccttagccctatgtaacaggtaagaaactaaaaggtacagaaaatagagatgtttgatttttctaagttgccccaagctaccgtttttaaaaacgcctgcaagcatgtctaaaacaggagcctgttagctacagttgccaaaccggtttaacagcactgcctccatgtattctgggtaagaaggagctccgagtacataaatttatcaaagatcactatcccaat

SEQ ID NO: 9425 - DNA, 106 bp, Homo sapiens
ggccgggcgcggtggctcacacctgtaatcccagcactttgggaggccaaggcgggcagatcacctgaggtcaggagtttgagaccagcctggccaacatggcgaa

SEQ ID NO: 9426 - DNA, 10053 bp, Homo sapiens
gcccgcaggttgaaggttcctggggccacatctgggccgagaggcatggtccttggaggtaggtagctgtgccctgtatacctgccgtctgggccgtgcatggcctcagctgcccaggaggaggtttgctcgtttcctcatttccgctttcctggcagatcctgaggccggcagggtctgggccaagttctaaaaggcaaccctaacatggtctcagggccactcgtggccagtgctgagtccgcgggaagtgggtctgcctggcccagctgtggtgggaaccccgccttccagcacttcctgctgtcttgctggggtttcctgccaggaacacagacatggagctgggagaccctctcagggcctgcttcctgggctggccggtaggagacggtgcagggctccagtgccaggccctgcctgtctgtgtggcatctggggaatgggcacagcagctcatgcccacactggtgggtcagacaagggatgccggaagccccaggcaggtcctagcatatggtggggtagaagaggggtgcctgattttcaggtcgccccaccatctgccaatgcctgctgagtccaagggttagggccagtgagcaggacaggctgcgagcagccaaggtgtagactgggaccccccaggcacccagggcaggcacctcgtccctgttgtccccctgggtcctgctcagcacaggagaacctgtgccccaggctgtcctttctttgctgtgtgactgttttgtgagcctgttcagctgcttttgagtcagtggagttggtcggggaggcagagtctttcaaaacagtgagagccaggcatcaaggaaaacagccctgccacccactgccatgcgctccaccagccacggggcatctgagaccaccccattcagtcccctccacatccttgtctacccattttacaaatgaggaaactgaggcatagagtggtcagtgttgaggcaggactcggggggtaaaggaggtgctgtggcagcttccagccctactcctcacaggcccctggaaagggcgactgatatgcatcaccacatttgtgggcccacagccccgaccctgtctcctcccatccaagccctgggtgagccagaacacccattatgctatggccagagccaggccggtggatgcagcaagcctggttcatatcccacttctgtgccagcccctcctgcctgagctgaggatgctcactgaagtggccctaggaccgaccgtgtggcccagccccaacatgtgcagcctgcagtggggaggccgaccgtccacagaaggttgcatgaggagccagccacgcccctacacagagctgacctcctcaccaagcctccctcctagctttcagaggaaatatatctggcctggccccaggccccgagtgctgctgaggttctgggaatctattaaccagggtgtttattccctgccctgcccaagccatgggcactggtctcagcagggcttagctcctggcagctcctgctggctggtcaggaccacagggctccctcacctgtggtagctgggtcccccggccaccctcaggcccatcccaagatagaggcaagtgcccaggactgggggagagtgggatcgtcctccctgggaccctcctgtgtggtggtcagctcagggctccaaggcccagagtaccaaggttagggacagggaagcagactgtccctgctgccctcccctccacatgatgctcccaatgtggcctgctgcctggggtggttgccagctatgctgtatcctggggcagccctatgctttgggacacacagtcctgggagatggctctgggaaaacctcctctgagctgcaatctgctggtctgtagaatgggagaggaacacagcctctcccttggtaagcaggagtttcccaggtgcaaccctagatatacggagggggagactgaggccaacggagggggagcttgcgtcagggccacgggctgggctgtggtgagccagggcttgacctgcatgcagaagcttccctagctgcaggttggacaggaagcagatggccggatgggctggaagtgcccttcaccagcaggggtgcatggtcagggcatttgctggccactcggggctcagaggccatcctggggcatctgctccacagcctcgtggtacacatggaagactgaggcacaaagtggggctagttgtccggacacagctggagcctgaagcagggagccattgagagttcagcccctaagggacaatggcatcagctaccagagcttctgagccccggggcctgggttcaaatcctagccaagccctcacttgctatgtggctttgggtaaggaaccgcctttgctgggcttcagtttacccaccttaagtgggcatgaggacagcaggggcacaggctcctcgtggctgggggtgctgagagctgaggcttggggagctggaggctctgcgcggatggtgctttttaatggatctgagtgttcctcgtgactgcatggctgtgaaatatttaaatggttctgcagagctcagaaaaaaagggaattcttcctcctgcccagaggccaacacagttagcctgggcttgtgtgtctgtttatgtacgtgtgcatatgtatgtatgtgcatgtgtatttgtgtgtgcgtattgtgtgcacatgtgtgtctcacgtctatgtgtgtctttctgggggatgtgtgtttctgtgcttttgtgactaggaacacgcacatatatgtgtagatgcccccagaaggtggaaatcctcacggggtctgcacttggccttctcccagcaccaagtcctgggatggagacccgaatgagcataagggtggccttgaaggaaggcactttggcacttgaggtttgtgaaacttaggagcacatgcccactgtggccagcagcccctgggacactgcaccttgcggagcacacgtgtgatggggtgtggcccactgggcagcttcgcaagagcagaactggagacgacctcagtgccaggcacaggcccttgtgtccgggctgtcctcacccagaccctgggcagcctgggaggaagcccctaagtggacagtggtgggacagggacacacagtcctgggaggtggctctgggcaaacctcctccaagctgcaatctgctggtctgtagaatgggagaggaacacagcctctcacttggtgagtgccctggctgtgctggggcctgggggaatcccagggagtgcagcgtcaggcccagggtgggagaggcaaagtagacaccccatagaggcttcggggtatgcatggagtgacccgagagcacaccagggccccagggacagcgctgctgggtggcccaggtaaaggcggctgtccctgtgcgcacatgtgtccacgtgaacttgctacttagagagcagctgatgctgaaggcaggttgttggaattcccaggcccaggtgtaagcagcagagcccaccagtgtcccctgacgcccactctcttcctcctgggcacataattttagatgaaactgaaaaacacgcagcatgaaagcaaggcccctgccctctgctggttctgtattggctgcctcgtgtatttttccagcctgcagaaagtcgaggcctggatggataccatgtccgcccctccctgtggccctgcggcaccccggcctcccggcctgcatctttcatgagtctggaaacaggatctcccagagagggccccaggaggttggctgccagcagtgggttctcacagctgcctccaagcaggtgaccagtcctgggaggctgtggtctagggcctggcaactcaggggcgcctgtggacaaagggccgggccaaggggctggcaggtttgtcctgagtgactgaagagggccccaccagggcagcttgagaggggcagactcttgctccagagaaagaggaagtttggtacttagcttggaatgaagggccagccctagagaggaccttcctgtggcaggagagagggccatgtcctgccaggggaagtcctgggaggcttcctggaagcagtggcctctgtgtggggccttggagcttgagagtgtctggcaccagggaaaggcattgggggcttcgagagaactgcagggggccctgaccagataggcccctaaggcaaagaggattccatcagaactcgcattcccattttattactctgggaagtaatgtggaagctaagctccactgtatgtcgtatgctgaggcatctgttgagcctctgctgtgtcggggccgggctctgggtggcccacctcagtgaagtcttgctgctaatggccgaatagttctgcaaggcctgtgctgaggcctggaggcgagtggcctgttgggccccaaggctgggaggttgggaggtggcaggggcgatctctgcccttaggtccggcccaggaggacttgcttcttgcctgggccggtgtgcacagatctgtccgcccacacgtcacttcctttcctggcatcaggagctcagactctgaggggagggggagaggaggccgggggcacagaccggtaggggcaggcagggaggagcagccccgcctatggcaggagtgggaggatcgggcaatgctttccagtggaaaatcagagtgcgtgtgctaaggttgctatgtcgtttcctttctctccaggaccgtattcctaggggaggttttataaaggctgagcacatgctcgcagcctctccttagggtaataagcacttctgtctgagcacttaccaggggtgggggcaagggaagccctcacctgcagggcccggtgacccccagagcccgactcaggcacagcccttgcccccctcccccacccgccttgctgaccattcccctccctgcagccggcccgctggggctggaggcacgggcccatcaacgtgaaccattacgccagcaagaagagcgcagccgagagcatgctggacatcgcgctgctgatggccaacgcgtcccagctgaaggccgtcgtggaacagggccccagcttcgccttctatgtgcccctggtggtcctcatctccatctcccttgtgctgcagatcggcgtgggggtgctgctcatcttccttggtaggtccccaggtgggggcagccaggccacctgctcaccttgctggcatctgctcgcatcgcctgggacaggtgcccaccaccttgcacacttggctctcaaggagctgccgagttcctggccctcatcacccagacatgcagtccaggaagtggcaccccccctccccccaccctgcactttggtttttgttttgttttgttttgttttttgaaacaaggtccccctctgtcacccaggctggaatgcagtggcgcagtctcggctcactgcaagctgcatctcctgggctcaagcgatcctcccacctcagcccccaaagtaactgggattacaggcgctcatcaccatgcccggctaatttttgtattttttgtagagatgaggttacgccatgttgcccagtcgaatttttgagctcaagtgatccaacagcctcagtctcccaaaatactgggattacaggcatgagtcaccacgctcagccttgttttgttttgttttgttttgtttttgaaaccgggtcttgctgtgtcttgatcacagctcactgcagtctcaacctcccaggctcaagcgagccttctgcctcagcctcccaggtaggctggaccacagctatatgccatcatgccagctaatttttttatttttggtagacacggggtcttgctatgctgcccaggctggtctcaaactcctgggctcacgtgatcctcctgtctcggcctcccaaagtgctgggattacaggtatgaaccactgtgcctggccccaccctgcactttgaaagagcacagagtggggtcagggcctggcctgtgggcattagggcaggtgtttcaccgggttcttgttgacccatgccatgagatggcctcagtcatgccagtcctaccttctgggcccagggtccccttcatggctgcgtaaccttgggcaagtggctgaacctcccgggcctcacttataaaacaggcatcataatagaactgcagcttgtggcaggaatcactagattaaggcacgcaaagggctcagtgcatttgcccaaacctggcctttggttgacgtccatagcttcaattcgtataaggaaaatatgggggctacagaaggtggggtcatagaccgtggggttgcccaagccaggggcgctgttgtccatgtttcagcaaaacagatgtatttttctctgggcgacaaaactcatcctaaatgcgactgagagccctgtaatgtcccaggacagcttgaccgctggggtgggtccccttccactgtcccaggctggggcgctgcgtctgggctgcccttggcaccatccactcctctctcgcccacagtcaagtacgaccttaacaacccggccaagcacgccaagctggacttcctcaacaacctggccacgggcctggtgttcatcatcgtggtagtcaacatcttcatcacggccttcggggtccagaagcccttgatggacatggcaccccagcagtaggacacccaggtgagctgggagatggggcgcgaggcctgcagtcctggggttgctcgctgttggaggctcttgcagtgtggtgagtccctggccggccagccttggacaccttcctaggccatgggcatcctcgtccacacctacaaggccaatgcctggccactgccttgaggccagccctgccactggtgctggccacctggggtcctgtggtcacagtgtttagatggaatgtgtgtaggagccaccatttgaacatcctggagaactcacttaaacgtaagatttctatacattcagaatgtctgtccgataaaaaaaaaaagatttctgggtcaggcgcggtggctcatgccggtaatcccagcactttgggaggctgaggcgggcagatcacttgaggtcaggagttcgagaccagcctcgccaacagggtgaaaccccgtctctactaaaaatacaaaaagtggccaggcatggtggcacatccctgtagtcccagctactcaggaggctgaggcaggagaatcgcttgaacccaggaggcagaggttgcagtgagctaagatcgtactactgcactccagcctgagcgacagagtgagactctgtctcaaaaaacacccaaaacccaaagatttccggcttctcttgataagtcaggggctctgcaccccttatcagctccacttagcaggtgaagcttcctcccagccctcgtctgagaaaaagggaccttggtatgaccgcctgcctgacatgcccacctcactgtgccactctgaccaggacggtgggattcaggatcttgtcacgtggagcccttgtgactcttcaagtctgccccttgccgggcctcgcagaatctgttagctgcctgccttaggctggaccctggctgtgtgcaggatgcagactgaggctgtctctacaggacgaggcacccagtgtaggaagacttctcacaccacatacagcctctccctgtgtccttgctcagagagggtgagcgtctgcccagtgacacagcctgggagcaggatccacaggaaggcctgggatgcagccatggccagggccacatggtgcacacactacagtccatgcagccaggccagggccacacaccacagtccccgcgaccttaggcctaggggtcacccctccggtttgtagcagaggtggaggtgagttgctaagggaggggtgggcactcctggcaggtggccatctctccaccagtggtggcccatggcagagtagacaggagcagtgctcttggggcagagcgcctgtgtgtcaaggatatataaaaatttccccaggccaggcacggtggctcacacctgtaatcccagcactttgggtggctgaggcaagcggatcacctgaggtcgggagcttgagaccagcctgaccaacatggagataccgtgtctctgctaaaaatacaaaattagccaggcgtgatggcgcatgcctgtaatcccagctactcaggagggtgaggcaggagaatcgcttgaacctggaaggtggagattgcagtgaactgagatcacgccattgcactccagcctgggcaacagtatgagactccatctcgggaaaaaaaaaaaattccccaagagggcatagtgaggatgaggtggggcgctggggccagcagctgggttgggagcaccctgcatccacctggcctcacccctccccacacgggggccaacgagtgaccgctgctcgtagtggcccatggcctctcaagctcccctaccacacccaaggccattcccccagtgggatcacgccagcccccaatgtcccggccgtggagcctgaagtcaccctcctgaaaggacctggatctgggcggccccatgtggggtccgagtcactgtccagatgctgcctccagtttgtagttaagttgtcctcttccagaacacctagatgtcagctgctccctggcttgggcatgtggccaggccatttattaatcacctgctgtgtgtgctgaatgcagtccctaactctcccaagcatgagttatctgcctgccgggaagagggtgctgcgtctgtgggccacgtggggacccagcagtggaccttaaagctgtcctcagaggctcggaggccaaagctgctgtgtgtcctgcgtggagcagtcagagaggtctcaggcttcgtgggtggctatggtcacagctgcccaacccgagccccccatgctgggccaggcctctaagtcctggcagtaacccagccatgctatattcattccattttcagaggggaaactgaggcatggagtactttgacacctctcatgtcagaatcaggctcttctccttcctgagtccgggtgtgcaaatggccctgacactcggggcttgtcacagcctggctcagagcctctcctctccctccttccaggctcagagcctctcctctccctccttccaggctcagagcctctcctctccccccttcccaggctcagaccctctcctcttcctccttccaggctcagaccctctcctctccctccttccaggctcagaccctctcctctccctccttccaggctcagaccctctcctctccctccttccaggctcagagcctctcctctccctccttccaggctcagagcctctcctctgtctcctttccaggaccctggatgttgcctgccctgcaactcagctgcccgaccccaggagtcgccatacctgtgaggtgtccacctccctgcacatggcactacccagactgccagagcccaggctggcctcatctgcaccatgtccccggaccagcccttgctctgactgcggccaagcaccacgcaggaggccactcttgtctctcagcagctgttcccaggaggcagctccctcctggcacatgggggctggccacaatagcccagagggtcagaactggacagctgcagagacctgtgcccagagaagggtctcgacccactcaaggacacacagcaggtccgtggatgggctggatgagtgaccagggccagcctctgtctcaggacattccagaaggacaaggagatgtctctccctctcccaaagcaccagcgtccctgcctcccgtgggccctgtccgggttgccctggtgaccccagcctctgtccacttcctaacccagggaccctgcacagccagaactgcctttggccctacggatggccactggctctggtcttaagtgcctgggcttggtggccatcaagagggagccagtcaggcctgtgagggccgtagaccttgtatataccctgcaccagcagtgaccgggcagagcccaaccccctccacgggggtcccagcacccacttttctaatcatgaatgaacaataaagcccacgctctttgtcaggctccacatgcc

SEQ ID NO: 9427 - DNA, 141 bp, Homo sapiens
tagcattggccgcaggttgcgtggccagcgctgactcagatgcatgccgcccagcgcttggtccctgatttggccatggcctgcagtgtgggctggctggcagccaggcaggagggagggccccctgtgtgcctggcctca

SEQ ID NO: 9428 - DNA, 986 bp, Homo sapiens
tttctttctttttatttgagagaagggggggttgagagtagagtgggaatggcaagaagtagtatgacagagcttcttctctttttttcccctctttaccaggaagttaactagaagtcttcatgcatgtttttaaaacaaagttggtaattagcataacctagttagttacctttacacagagtgacagaattaaaaagttgacaagcccatcagacctcagccaggaggtactgaaaggagggagaccagtgagtctagaccaataggtgggttaggcctcctgaatgccagcctagaagtttagacttgattctataggctctagggtacctacaagtttgtagtcgcagccttgggaattgaatgttacataggaactttcactggttccagctagccttggctgttagcaattatttttatctactttaacaggggggacagagtaggggggcaggaaactaagctggcattatggtcacaggaaagaacagactgatttggagcctttcaaactgcagacctttgttactgaccgatgcttaatttggtttctgggttttgttagttttttcccctgcccttacctcatttaccttaacgacagctcccccctctagagctcagctagggcaggctgccactgtggattggggggccaagaggcccagtgcaagaagaaagtgggttgaaagcagagttctgtttaaagaattttctgctggaaactagcccagagggagtaaagaggagctttaatgaggagcagctgcagtgccgacgcaacccacatgagacttttttttccccttcgttccacattctgtatagtttttttaaaaatcatgactttgaaatagctgttttgtaaagcatgcctctctttttcttcttgtatgtggtgggattttgctttgttgttgttgttgttgtttcttgaatggccaaatcctcgttttaaaaaaaaaaaaaaaaaaaaaaaa

SEQ ID NO: 9429 - DNA, 986 bp, Homo sapiens
  SITE (488): n equals a,t,g, or c
  SITE (580): n equals a,t,g, or c
  SITE (656): n equals a,t,g, or c
  SITE (667): n equals a,t,g, or c
tttctttctttttatttgagagaagggggggttgagagtagagtgggaatggcaagaagtagtatgacagagcttcttctctttttttcccctctttaccaggaagttaactagaagtcctcatgcatgtttttaaaacaaagttggtaattagcataacctagttagttacctttacacagagtgacagaattaaaaagttgacaagcccatcagacctcagccaggaggtactgaaaggagggagaccagtgagtctagaccaataggtgggttaggcctcctgaatgccagcctagaagtttagacttgattctataggctctagggtacctacaagtttgtagtcgcagccttgggaattgaatgttacataggaactttcactggttccagctagccttggctgttagcaattatttttatctactttaacaggggggacagagtaggggggcaggaaactaagctggcattatggtcacagngaaagaacagactgatttggagcctttcaaactgcagacctttgttactgaccgatgcttaatttggtttctgggttttgttagttttttcnccctgcccttacctcatttaccttaacgacagctcccccctctagagctcagctagggcaggctgccactgcgganttggggggccnaagaggcccagtgcaagaagaaagtgggttgaaagcaaagttctgtttaaagaattttctgctggaaactagcccagagggagtaaagaggagctttaatgaggagcagctgcagtgccgacgcaacccacatgagacttttttttccccttcgttccacattctgtatagtttttttaaaaatcatgactttgaaatagctgttttgtaaagcatgcctctctttttcttcttgtatgtggtgggattttgctttgttgttattgttgttgtttcttgaatggccaaatcctcgttttaaaaaaaaaaaaaaaaaaaa

SEQ ID NO: 9430 - DNA, 980 bp, Homo sapiens
ttctttcttttttttttgagagaagggggggttgagagtagagtgggaatggcaagaagtagtatgacagagcttcttctctttttttcccctctttaccaggaagttaactagaagtcctcatgcatgtttttaaaacaaagttggtaattagcataacctagttagttacctttacacagagtgacagaattaaaaagttgacaagcccatcagacctcagccaggaggtactgaaaggagggagaccagtgagtttagaccaataggtgggttaggcctcctgaatgccagcctagaagtttagacttgattctataggctctggggtacctacaagtttgtagtcggagccttgggaattgaatgttacataggaactttcactggttccagctagccttggctgttagcaattatttttatctactttaacaggggggacagagtaggggggcaggaaactaagctggcattatggtcacaggaaagaacagactgatttggagcctttcaaactgcagacctttgttactgaccgatgcttaatttggtttctgggttttgttagttttttcccctgcccttacctcatttaccttaacgacagctcccccctctagagctcagctagggcaggctgccactgcggattggggggccaagaggcccagcgcaagaagaaagtgggttgaaagcagagttctgttcaaagaattttctgctggaaactagcccagagggagtaaagaggagctttaatgaggagcagctgcagtgccgacgcaacccacatgagactttttttccccttcgttccacattctgtatagtttttttaaaaatcatgattttgaaatagctgttttgtaaagcatgcctctctttttcttcttgtatgtggtgggattttgctttgttgttgttgttgtttttttttgaatggccaaatcctcgtttttaaaaaaaaaaaaaaaaaa

SEQ ID NO: 9431 - DNA, 468 bp, Homo sapiens
agactgtaaactggaagataaggatgtttgtaaagttcttgtataaataaagcatggtttctcattgcagtggttactgatttcatagtctgagtgaagatgaatgatgctgtgaatcaacagctttaaagtccgtaccacttcagcttctttttggtttaggtttcttaaaatcagtgtgtatttaatgctttattcagatgagggggtgaaaaacctaacacatgtaaactaagtgaggtggggtttcagagataattcccagcctcacaattcctcatgaagttcttttcctgtgggaaacttttaatttggaagcatgcaacctaatgtgggaaccaagattaacattttctgaaatacttctacaagaaaagcagaaatggtctgtccaggaagctgaatttacatagtagaaaaatgagctgccctgcagtatttggtagtctttgtgtattggttgtgata

SEQ ID NO: 9432 - DNA, 468 bp, Homo sapiens
agactgtaaactggaagataaggatgtttgtaaagttcttgtataaataaagcatggtttctcattgcagtggttactgatttcatagtctgagtgaagatgaatgatgctgtgaatcaacagctttaaagtccgtaccacttcagcttctttttggtttaggtttcttaaaatcagtgtgtatttaatgctttattcagatgagggggtgaaaaacctaacacatgtaaactaagtgaggtggggtttcagagataattcccagcctcacaattcctcatgaagttcttttcctgtgggaaacttttaatttggaagcatgcaacctaatgtgggaaccaagattaacattttctgaaatacttctacaagaaaagcagaaatggtctgtccaggaagctgaatttacatagtagaaaaatgagctgccctgcagtatttggtagtctttgtgtattagttgtgata

SEQ ID NO: 9433 - DNA, 468 bp, Homo sapiens
agactgtaaactggaagataaggatgtttgtaaagttcttgtataaataaagcatggtttctcattgcagtggttactgatttcatagtctgagtgaagatgaatgatgctgtgaatcaacagctttaaagtccgtatcacttcagcttctttttggtttaggtttcttaaaatcagtgtgtatttaatgctttattcagatgagggggtgaaaaacctaacacatgtaaactaagtgaggtggggtttcagagataattcccagcctcacaattcctcgtgaagttcttttcctgtgggaaacttttaatttggaagcatgcaacctaatgtgggaaccaagattaacattttctgaaatacttctacaagaaaagcagaaatggtctgtccaggaagctgaatttacatagtagaaaaatgagctgccctgcagtatttggtagtctttgtgtattagttgtgata

SEQ ID NO: 9434 - DNA, 22680 bp, Homo sapiens
agtgaacagcggagccggacggggatcgccggcgggcggcaagcggaggcggcccaggcccggcggtctccgagatgtcacgatggctgtggccatggtcaaactgtgtgaaagagcgggtctgccgctacttgctgcaccactacttaggtcacttcttccaagagcacctcagcctggaccagctcagcctcgatctgtacaagggcagcgttgccctgcgagacatccacctggaaatctgggtgaggagccaggcccgagtccaggaaggtgcggagggtgggagcgcagcgacctgaggctccctgcggcaggatcgggctgggggatcaggcaccgggcgtagagaggccaggggaatcttgccctctcccaggcgtcagaggcaccccggctagcctcttcagttccttaccagagccagaaactgagcgggaaggggtttctgtctccacgggaggagaaactgaggctggagagggcaagatcacctgtctggagaatgcaagacaaactcgtcgagtttgggggctgagttaaggaggttggctctcgggctgaggaggggctggggagggagcgtaggaactgagctgggccagggcagtgacagacttgggcctgcgcagctggtgggggaagctggtaggggtccggagccctggcgaggacacctgtggatcatgtgccctgacctcttgaccccacggtcctgagcccgtaggtgggatcaacaaaccaccggatgtgtatgtcaacaaccgcgtcagtacgtcagtaccagtgttgatcaacacctcgtgtgcctgggtcgctgcctacttcctgcttttgggagagtgggatgggccaagtgggtgtctagggagggactggatggcccccacccacatctcccaccgacccccccggctcagtgtccctgcctggagggaggccctggaggaaaggtggggagatctggcttcaagccgggaggaggccaagggagatgctagggaggccaagaggtgtaaggtcagaggcttgaggctgggaacggtgaggagccctgactcacagctcagctgacctggggagctttgaaggagccaccaattagaggcgcgtcctggtcgatccaccaggtccagagcagcaggggtgggcatggaggcagggacttctcagttttgtggctggactcagggggctgctaatctgggcagaagagctaggctttgggggtaggccaggccctggtgagcaaatgtggggtaggataatcgtgggccctgaactgggggcaccccccagtggcctgctgtctgtgaattctggtgtaggaagccctctctgacctctaaccttagcctcagcctctaaggccgtctctaggctgccccttttttatttttatagagacaggatttcgctatgttgcccaggctagccttgaacccctgaagggatcctcccacctcagcctcccaaagtgctgagattataggcatgaaccaccatacccagccctaggcttcccctttttactttcagctccagaaaacgcccctactcctgttccctgccctcttgttggggattgaattggcttctctagggccctggtggaatgcaggcgctttcttgataaccagcccctcctccctcccagctcagcctgcaggccccgccttgaaggcccccaaagaaactgagtatctggggcctctgaagtggcatgaaaagagagaggcccgcatcccagtctcagtccctgttgtatactgggtgactagattagtcctgtctctaggcctcagtttcccgagctgtgggtctctgggtgaggaatttggactcccatctgctctgccatgtgcttttttattcttggatccaaccagtttactgaggccctttctgggtggcacctggggtgacgggggaggcaggtggggtacagccctccaggagcttccaggttggcaggggtacaactccagcatggacattttagccaggggctcagccttgtgcctcacagagaggcacagctacactaggtgtttggggttggtggggggggggggtcccatctggcattaggtcagcccctctcttggacactgtccctttgaactctgctcatccagggtgaacatgggtattctggactctgccatacatgtgcccatgttgtcctgtgcctgcaacacaccaccttctaccagcgcctatcccccctccctttattcttcagcttgcccctcctctgacggcccaggctgggttaggcgtcttccccacggcccccccaccagccccctcaccacccccaagcacctgctcacctcttgagtttcatcctagttgctctgagtccctggctggagcctagcttggctggggaatgaagacattttatttacccatctagtctcagtgtcagcatgtagaaagtgctcggtaaatattatcttgaattaagtggtgagggaaacatctgctctggcttgaaggattaggcacctttgggtgacggggtaggggggctggcctgtagtaggggacagcatgagcataggtgggaccttgtagataacacgtggagggacagggcaagccaagggtgctctccaaggcactatggccagataaggctgtgccagcctgtgggatttggggtttccctgagctggttttgtctcttgcttgctcccagtctgtgaacgaggtgctggagtcaatggagtcaccgctggagctggtggaaggcttcgtgggctccatcgaggtggccgtgccctgggctgctctgctcaccgaccactgcacagtgcgcgtgtccggcctccagctcaccttgcagccccgccggggtccaggtgagggcagggcgaggctgggggcaggcaagtggggagagtgggctggggcgtccaggacctgactgggcctgcctgccttgagaccctgtttctccctacagcgccaggggctgccgactcacagagctgggcctcatgcatgaccacaagcctgcagctggcccaggagtgtctgcgggatgggctaccggagccctctgagccaccacagcccctggaggggctggagatgtttgcccagaccattgagactggtgagcaggcccctcctggccgccctgtctcctgcccttcagtggcacacagaacaggggctccagacaacggcacggccaccctggtgcccagatgggaaattctgcctcccctttgctgctctacctgacctgagacccctccccaactcctcagtgcttcggaggatcaaagtgaccttcctggacactgtcgtgagggtggagcactctccgggtgatggggaacgtggtgtggccgtcgaggtccgtgtgcagaggtaagggcaggccgatctggggtggactggtgtgaagatggggagtgggggctgctggatggtccccacccgcagcctaggttcctgggaagaggcagggtggatctggatgggcctcggtggtggtagggttggggaggtgggctgcatcgtgagcccggactggtgtccagaggccaggtgatacaggcccagagtggccgaggccccaagaaccaagttagatgctgagggtctgaggagcaagggctggcctgagcctccgggctggacatggtggttcaggacggcctaggtgtgatggggcagctctgcaggctaggctccctgaccccgtgcccctagagcagagcactgtgtggagagaggggctccaggcctggggtggccagggcacgggctgaccctacactctccagactggagtactgtgatgaggcagtgcgggacccaagccaggcgccgccggtggatgtgcatcagccgcctgccttcctgcacaagctgctgcagctggcaggggtccgcctgcactacgaggagctcccggcacaggtgagcgggctctgattcccacagcccctgtctcctctcccttgagcccattgagcccctcccatcctttctgaccatctctgactccattttctcaacctttccctcttgtatcctcccgtctcccaggaagagcctccagagccccccttgcagatcggcagctgctcagggtacatggagctgatggtgaagttgaagcaaaatgaggccttccctggccccaaggtgggtccccaggcccctggggagggggtgagtaccccatctcaagactcctcctcctcagcaaggctgattatctacagcccacagtggggatgtcaagtgggggatttacttccttcttggcagctaaagaaactgaggctgtaggccaggcacagggttcacacctgtaatcccagcactttgggaggccaaggtgggtggatcatctgaggtcaggagttcgagaccagcctggccaacatggtgaaaccccgtctctactaaaaatacaaaattagccaggcgtggtggcacatgcctgtaatcccagcttcttgggaggctgaggcgggagaatcgcttgaacccaggaggcagaggttgcagtgagccaagattgcaccactgcactgcagcctgggcaacaagagtgaaactccatctcaaaaagaagaaaaaaagaaactgaggctgagaggtcaagttgtggcctggttcatagagctagttggtaacagagtttagtttggtagccagcatcctgctttcccagggcgagggcaggcgggtggtagctcttagaggagctgggtggtgggcctaggctccatggctgcctccttggcccccagttggaggtggcgggacagctgggctccctgcacctgctcctgaccccgaggcagctccagcaacttcaggaactgctcagcgccgtgagccttacaggtgaggcccctgggtggcatgggggtggggtggctgggagggccagccagcccagactgaagtctcctcccctgcagaccacgagggcctggctgacaagctgaacaagagccgcccgctaggtgccgaagacctgtggctgattgagcaggacctgaaccagcagctgcaggcaggggcagtggctgagcccctcagcccagacccccttaccaacccccttctcaacctggataacactggtgggtgtggggtcagaccgtggttggaggggcagctagtgtgggtgcagcagcctaggggctggggtcggctgtccctgacactcctcacttcacccacagacctcttcttctccatggctggcctcacaagcagtgtggcctcagccctctctgagctctccctctccgatgtagacctggcctcctctgtgcgcagcgacatggcctcccgccggctctctgcccaggcccacccagctggtgagttggagcaccctgggggtactccagggacaggaaggactggaagaggccttagtgccgtgggctgtcagaggcacacaggaaatccccagcgatgcctggatatctaccatctgtgacttggttccctggggaccaaacaaggtgggagctggtgatagagtggacagagcctaggtttttcagtcattgatcttagtcaagcacttgaactctctgagactcagcttcctcttccataggaagagaagggtgagatcagcctttgccaggctgtatatctgggttcatgtttattgagagcttattgtgtgtgggtgctaggctgggtgctttatcacatcctgtccttccagcaccctgaggagggttcagttgagcctgggcagagggcctggtctactggaggcaccagtgtcacccctgcctgaccaagccttctgccagagccacatggtggggcagacctggcctcccaacccccagcctggtggcaaactattgctccacctggggtacccggaatctgttgggagcccctgctgaagcctctgtcccctcaggcaagatggcccccaaccccctcctggacaccatgcgccctgactcgctgctgaagatgaccttggggggtgtgaccctgaccttgcttcagacgtctgccccatcttccggaccacctgacctcgccacgcactttttcaccgagtttgatgccaccaaggatgggcccttcggttcccgagacttccatcaccttcgaccacgcttccagagggcctgtccctgtagccatgttcggtataagcccgaggccagggcctgaggagagaccatcagagccccctaagtgcaccttctgacgcctgtcctcttccccgcaggctaacgggcacagccgtgcagctgtcctgggagctgcggacgggcagtcggggccggcggacaaccagcatggaagtgcacttcgggcagctggaggtgctggagtgtctgtggccccggggcacctctgagcctgagtacacggaggtgagggcagaggcagaatgtgtacgaggcggggtctggaggtttgggtggctgtggggccaggcctgaccctgtgtgcctcccgggtcccatcccagatcctgacctttcctggtacgctgggctcccaggcctcagctcggccctgcgcccatctgcgccacacacagatcctgcgccgtgtgcctaaggtaacccacccgctccaggccaccaggctgtccccatggcgtgttgaccccaccctggcctctgccagggcctcctctgctgcccagccctgtccctcttcccctgtgctccacatctctccatgctggggccctcaaatacctgcctggcccttcctatgccagtctctgagcctggtcatgcccttgccctatctcaatatggccccctggctggcctctgttgctaagagtggcgcatgtcgggtggcttttataagtaaacaagcacattgtgcgcgtcgggcaaaggtggggcaggccttcttagtgctctcgtggcccctgccccagctcttctcccactaccagagagggccttcctgtcccacccgctgagtaccactcagccctcactgacctgaacgccctcgccctcagagccgaccccggcgctcagttgcctgccattgccactcagaactggccctggacctggccaacttccaggcggacgtggagctgggggccctggaccggctggccgccctactgcgcctggccaccgtacctgctgagcctccagccggcctgctggtgagaggcccctgccagggccaggccgggggtgggtgcagggcctgggtccttcggctcttggtcacagtgggaggggctccgacggctgctctgacccccaatcctcctgcagacagagcccctgccggcgatggagcagcagacggtatttcggctctctgcaccccgggccacgctgcggctgcgcttccccattgccgacctgcggcctgagcgggacccctgggcgggccaggccgtgcgggctgagcagcttcggctggagctgagtgagccccagttccggtcagagcttagcagtgggcctggtcccccagtccccacccacctggaactcacctgctccgacctacatggtgagagcccccgagtgacagaacttggggcaagaggcctggcttctgggagagatgggcttggggctatggaaggggcccagtcacaacccgagcagtccctggcccaggcctttaccagctcttggggtcccagcactgcctgtccccggcctcctcaccgacaagtagggtggaccctttgtctctggctttctctgcccaccaaggtgtgtgtggagtcgggggcacagctctgagccgacctgggcattggggaagaaataggaaaaggcagcagtgatgacccccctaattccccatccccctccaggtatctatgaagatggagggaagccacctgtcccttgcctgcgtgtctccaaagccctggaccccaagagcactgggcgcaagtacttcctgccccagtaagtaggggctctggactgggcccaggagaggagggttctgctgggggtggcagggggccagtttggaactgggtgccgggggccctgcaggccagtaacaggcctgtgccccggcagggtagtggtgactgtgaacccccagtccagcagcacacagtgggaggtggccccggagaagggagaggaactggagctgtcagtggagagtccctgtgagctgcgggaacctgagccctcgcccttctcctctaagaggaccatgtatgagacagaggaggtgagacttggccccacctcttcccaggaccccctcccgcccaccgcccgggttcctgccgtaggagccacctgtgtggctgtgggccagggcagcacgaccacctggggtgggcatgagctgacccaacaccagtgaggatttcggctcttccattctttccagccagtcagagagtctttctgaaacggcactggtgagggcaggcccctggggagcatgggtcctcgattggaaagatcaggtcctgccccacctgacccgtggatcagcactgtacacttagaaaggcagttaagggccaggctctgccacttggtgactgtgtcatcaccctggggagttatctgaccttgaagagttacctatagatgagtttcttcccctggaaaatgggcaccatgacctgtctttctctctttttttttcttttttttttgagatagagttttgctgtgtcgccgaggctggagtgcagtggcatgatctcggctcaccgcaacctccgcctcccaggctcaagcgattctcctgcctcagcctcctgagtagccgggattacaggcgcgtgccaccacgcccggctaatttttatatttttagtagagacggggtttcatcatgttggccagactggcctctaactcctgacctcaaatgatcacccacctcagcctcccaaagtgctgggattataggcatgagccaccgcacctggcctaattttgtatttttagtagagacagggtttcaccgtgttggccaggctggtctcgaactcctgacctcaagtgatctgccctcctcactctcccaaagtgctaggattacaggcgtgagccaccgcgcccagcctaaccataacctgtgtcacaggcctgttgtgaggatgaaagaagttaacatacctgaagcccttagaacagcacaggtgtgccatcagcactgtatctgtacggctatcatgcatccccagtagagaagggctcctatgaatgaatgaatgatgaacgacaggagggcaggactgagaccagagacaggccccagccagcgtctctaagatgactctcctgctctttccacctcaccctgtccagatggtgatccctggagaccctgaggagatgaggacgttccagagccggaccctggcactgtcccgctgcagcctggaagtgatcctgcccagtgtccacatctttctgcccagcaaggaggtctacgagagcatctacaacaggtggagacccggggccagcagggcgggactggacactgggtgggcctggcctcccttacctgctgtccacccgcctatctcaggatcaacaacgacctgctcatgtgggagcctgcagatctgcttcccacccccgaccccgccgcccagccctcgggcttccccggcccctcaggcttctggcacgacagctttaagatgtgcaagtcagccttcaagctgggtatgagaggtgctaacgctgggctagagggaggacccccaggtctgggaagggccaggctagcccttcgcggtctccttcccagccaactgctttgatctcaccccagactcggactcggatgacgaggatgcccacttcttctcagtgggggcatcaggtggcccacaggccgctgcccctgaggccccaagtcttcacttgcagagcaccttctctacactggtgacagtgctgaaggggcggatcacagccctctgtgagaccaaggtgagtgcagccccgggcaggcgggccccaaacttcagagctcccattggcggcagagcaagaccagcgcgagcagctccaggtcaagaatgtggagagcaggaggcctgagtgggcagcgccagcccacccacgccagcctgcccaccctgtcacagcccatcagctccttctgaccccctgctgtatgtaaagcaccatgctaggggtcgggatgggcatggagcacccactgttcccactccgagcgggcagacccggcagagattatttttctcctggcaaaagaggcaagtgccatccagggcctccagcagcgtccatggtggaaactggagctgacccccttaggccagggctccaggagccgccaacccccagagggcttgagggttgctgagtgcagctggggaagccaggctgtgtgctccttctgcaggatgagggtgggaagcggctggaggctgtgcacggggagctggtgctggacatggagcacggtaccctcttcagcgtctcccagtactgtggccagccaggacttggctacttctgtctggaagctgaaaaggcaacactctaccaccgaggtgtgaggcctgggggcaggtcaccactggggtccagggttgggggtggagggctttcaggacggatgtgggccctgggtggagtgggtagccagttggcttggcagggggctcatgagacccctccccagcggccgtggatgactacccgctgcccagtcacctggaccttcccagtttcgctcccccggctcagctggccccaaccatctacccatcggaggaaggggtgaccgagcggggagcctcgggccgcaagggccagggccggggaccccacatgttgtccactgctgtgcgcatccacctggacccccacaagaatgtgaaggtatgggcttgcctaccatccacccctcctgctagcctgggctgcagccccggtgtgcggtgggaccccagtgcgcggtgaggccccagtgcacggtggggctggcctccccactgccctgactgcgcccccaccctcaggagttcctggtgacactgcggttgcacaaagccaccttgcgccactacatggccctgcccgagcagagctggcattcccaggtgagcgtgggtggtgggaagccacatggcccagtgactctggacttctgttttgggcaagcaggtctctaggtgggaggaggccggtgggaggaacatggactgggccacagctgaccttgtccggagctcctgggcaaggggtgtggcagacagctagtgggcagaaggtgaggtgccaggcaggggccaggacagggaggggttagaggagggaggacaccacctgatcctcactgcttcctcctgccctggcctctgaagttgttggagttcctagacgtgctggatgaccctgtgctgggctacctgcccccgacggtcatcaccatcctgcacacacacctgttctcctgctctgtggactataggtaccaggctgggtgggccaggggctggggacggggatgggctctcaggtgtaaggagccggccccagcccgagtatcacccccaggccactctacctcccagtgcgtgtcctcatcaccgcggagaccttcactctctccagcaacatcatcatggacacctccaccttcctgctcaggtatgcaggccgccccacactgggccatcccaccctcgccgggccgaagctgcctgccagctgtgtgtcctctggtgctctcggtcttaatgtacacccgggtgatagtctcattctcaggaatgtggattgtttccgcctttctagagggcagttggagcctcctgatgagacccttataagcatttgtgctctctgacctgtaatctcatgtctgagggttgtcctaggatatgcgaataagagaggtgggatttaatgcttatggagtataagttaaaacagccaaaacgtatcagttaaatcacaagcctcacaacctgagcaaataagcatggcccacctagtaggtagaaaaccatgcagggattaaggtgaagctgaagaatcccttcaaaatataagaagatggagggtgcggtggctcacacctgtaatcccagcactttgggaggctgaggcaggcagatcacaaggtcaggagttcgagaccagcctggccaatatggtgaaaccccgtctctactaaaaatacaaaaatgagccgggggtggtggcaggcgcctgtagtcccagctacttgggaggctgaggcaggagaatcacttgaatctgggaggcggaggttacggtgagcgaagattgcgccactgcactccagcctgggtgacagagcgagactccgtctcaaataaatacatagatagatagatagatagatagatagatagatagatagatagataaaataaaaaatatagaaagatgccacagtacagtgtttactcaaataacattggatacaggactgcgtacgttttaaaatcagtttatgaaggggtgtttatatgtctcggcgtgcagctgcagagaaagtttggaaggagatgtgtatggtggttttctcagaattagggattaggaatgatgaatgatttttattttctttattctaaaatatcttaaaggagttttcattatgttacccttaaaataaagacttttttatttattttttttttttgagacagagtctcgctctgtcagcaggctggagtgcagtggcgcaatctcagccgactgcaacctctgcctcctgggttcaagcgattctcctgcctcagcctcccaagtagctgggacaacaggcacccaccaccacacccagctaagttttgtatttttagtagagacagggtttcaccttgttggtcaggctggtctcgaactcctgacctcgtgatccgcctgccttggcctccaaaagtgctgggattataggcatgagccaccatgcccagcccttattattatttctttttgagatggagtctcactctgtcgcccaggctagagtgcagtggtgtgatctaggctcgctgcaacccctgcctccctagttcaagagattctcctgcctcagccttccaagtagctgggattacaggcacccgccaccatgctcggctaatatttgtatttttagtagacatggggtttcaccacgttggccaggctggtctcaaactcctgatatcaggtgatccgcctgcctcagcctctccaagtgctgggattacaggcgtgagccaccgcgccagccaaaaataaggacttattttagaagaaccacaaatgcagcagggagaaaaatggacaccccttcccaggactgtcatgaggccccattgaggtgtcggaactgcaggcactttgagagctgcaagtgctgcccgcttcccactgcctgctgtctgggccttctccccattgtgcaggcaggaacgctgaggctggaggggcctgtccataccacctcctgtgggcttgggacccctctgctcggctcccgtggagctgccccctgcagcggtgcccgggcccttctcagccctgttcccccccaggttcatcctcgatgactccgccttgtacctgtccgacaagtgtgaggtggagaccctggacctgcggcgaggtgggcagggccgggactgggctccctcccctctgagggaccaccgccccggccacacccagagcagccaggtgtctccccgcagctgctggccgggtccttagctcccacacgtagcccgcacagcagggactacacctggatcaaccggatccttcccccaggtgctggggccggggccgggtggaagggggccacaggacctttctctcgcctctgctgcagattatgtctgtgttttggatgttgacctcttggaacttgtgattaaaacctggaaagggagcaccgagggcaaactggtgagtgaggctgtcactctggctcctggagccacagcaggtgcaggggccaagggagtcttcaggggctgctgctccctcacgtgcctgggctccggacacagttcatgcctgcccttcctgggctgcagttagcgcccctcctgcaaagggccatagtacagccctggtgggggtgtcccttgatgctggctgaatgaatgaatgggtttcagccctgccaccagaggacgcggcagccagggcaccagcgaggccctgggaatcagccacctttgtaggtccccggattcatctcctgtaagatggagataacctgccctgcctcgctaggcatgcagagcccttcacggggagtggggtagggtgggtgggcacactcctgcttccttggatggccctgggccaagcccctttcaccctctgggtgaacagtttgttcatctgttcagtggagttactgggcaggtcatccactccaggagagaccatccctgttctgcctgtggcaggatcagaactgcggtgccctcccagcgagcgggtggggccagcaggcagtggcccctgtgttcacatagctgctccccccaccccgcccctgcagagccagccactattcgagctgcgctgctccaacaatgtggtacacgtgcacagctgtgccgactcctgtgccctgctggtcaacctgctccagtacgtaatgagcacaggcgatctgcaccccccaccccggccccccagccccacggagatcgccggccagaaggtacaggtgaggcctggccacacaggctaccagagctcggccaggcccctcccctgccatggccctcgggcctggggttgggggagctctgtcctgtctcactcattgctcctcccctgcctggcccagctctcggagagtcctgcctctctgccctcgtgccccccagtggagacggccctcatcaaccagcgtgacctggccgacgccctcctggacaccgagcgcagcctacgggagctggcccagccttcaggtgaagtgggggtgctgtggggacagcagacacagtcaggcacccactgtgggcgcctctccaaactggcctctctcctataggtggccacctccctcaggcgtcgcccatctccgtctacctattcccaggtgaacggagtggggccccacccccttcaccacctgtcgggggccctgctggcagcttagggtcatgctcagaggagaaggaagatgaaagggaagaggagggcgatggagacaccctggacagtgatgagttctgcatccttgatgctcccggcctgggcatcccggtgcgtggtgggaggggtggaccagtttgccgtccaggcaggtgtgtttggagcggggacggaacactcaggggtggttgcctggccatctggagctcccgtggtgagagaagcaggcaggaggtggttgccatcacctcgggggtggtgctaggtctgtgccaccctagggaggcagccctgatgctgggctttgatggagtagggggatttccagaggaagaggaggcctggtgttttgggcagagggactgggaaattcaagggatggaggaagaggagagggcagttagcaagagggatggagaaccatgtggctgcaagggccagtgggaatgtctgaactcacccaggtcttaggaggcagggctggcaggagcctggcattctcaggctcctcttggacagaccactcaggcatagactcgggtgatagcaacccaggagtgtcatctttcatcaaaaacagggaggaggccaagcatggtaggttacgcctgtaatcccagcaatttgggaggtcaaggtgggagaattgcttgagtccagcaatgagagattagcctgagcaacatagtgagaccccgtctctacaaaaaataaaaataaaattagccagatatggtggcacatgtctgcagtccctgctactcaggaggctgagaatggaggatcgcttgagcctaggaggcagaggttgcagtgaactgtgattgtgccactgcactccagcctgggtgaccgaacatgacccgaccctgtctataaaaaaaaaaaaatgaaaaagaagtgaggccaggttgctggggctgggggcagctgggctggatcgaacatctgtgtcacacgtctacctggcctccctgcagccccgagatggggagcctgtggtgacacagctgcatcccggccccatcgttgtgagggacggttacttctcacggccgatcggcagcacggacttgctgcgggcacctgcccatttcccagtgcccagcactcgggtggtgctacgtgaggtctccctcgtctggcacctctatgggggccgagactttggcccccaccccggccacaggtgaggaggagcgggtgcaggtggcagctggtgaaggttggggctcaggctggtccaggtctgactttcagcagctggagaccttgagccccatccaccccaggtgggcctcagtttcctcatccttccttatcccgcctgccttccaggactggggctagcgggggtctcttgtcccaggctaaaaggcccgctgaggacggggagggaatggggttcctctgagtcagcttggcccctgtccctcttcccagggcaagaactggcctctcaggtcccaggagctccccttcccgctgctctggccccaaccggccccagaactcatggcgcacgcaggggggcagcgggcggcagcaccatgtcctcatggagatccagctgagcaaggtgagtggggtggcgagtgcctactacacgtgtgtgtcatagaacaacgggccttgttctcgatgtcacgtgtagcaatgactaatgcagaggaaaacccctgcctttgtagtggaggaagccaggcagggaccaagatgtatcgagtgtgtccgatggtgaagagcgctcaggggagagtctgcaggggtggaggagacaggtgtgctggggagggtctggaaagtcctcttctgaaggcaccatttgaacaaagacctgaacaagtggggatgtgagccaggaagagttttcaggcagagaggacagcgtgaaagccgcaaattggggccaggcatggtggcttatgcctgtaatcccagcactttggaaggccgaagagagcagatcacctgagctcaggagtttgagaccagcctgggcaacatggcgaaaccccatttctaccaaaaaaaaaaaaaaaaaaattaaccatttgcagtggtgtgtgcctatagtcccagctactcaggaggctgaggcaggagagttgtttgagcccaagaggcagaggttgcagtgagttgagatcgccctattgcattccagcctgggcaacagagtaagactctgtttcaaaaaaaaaaaaaaatgctggaagctggaagcatcctgacatttccaggagcagcagagcctgtgcataaccagcgacccagaatgtttcttttgagtcttacaagagacgaacccctcagggcttttgaggagaggcctctgtggggtggggctctgcagcaatcagggagggctagtgagcaggttcaggagagcctagatgggggctggccacaggttcagctgcggatggggtgtgtgagatacagagagtggtacagagggttcaaggtttgggcctgggaaattgcctggggcaggggggtcccacttgctcagagtgagccaggccagtgctgggcttcccaaggagccgctagaggcaaagggcagaggggcctcaggctgctcgggttggtgggctgtgctgcaagaacctgcgggagatgagtgtcagagcagggggccaggggcctctctgagacctgatggccagccagcgggtgtgcaggaagagggggaaggaaggctctccacggagaggggctacgagagcaaagtcctgaaggcaaaacaggcctggactccttgaggggcagagaccagtgcagctggcatgggaagcaagagcagggtcaggtctggagggagaggcaggtccctgctgggcatagaatagagaaggggtaggggccgggcatggtggctcatgcctgtagtcccagcactttgggaggacgaggcaggcagatcacttgaggccaggagttcgagaccagcctggccaacgttgtgaaaccctgtctctactaaaattagctgggtgtggtggcacatgcctgcaatcccagctactggggaagctgaggcaggagaatcgcttgaacccgagaggcagaggttgcagtgagccgagatcacgccactgcactccaacctgggcgacagagtgagactctgtctcaaaaaaagaatagagaaggggtctggggccagcccttccctccctcttggggccctgcttacctggccaggcctctgtccaccccacaggtaagcttccagcacgaggtgtacccagcggagccagccacaggccctgcggcccccagccaggagctggaggagcgaccgctgtcccgtcaggtgttcatcgtgcaggagctggaggtccgagaccggctcgcctcctcccagatcaacaagttcctgtacctacacacgagtgagcggatgccgcgacgtgcccactctaacatggtatgagcgacctgcaccatccaccctggggcagggcaccagaccgttggggatacatcttcacgcatgcatggattcacacacatacacgcattcccacacaaacacccaggttgtttgtgagcctgggagaagggcagagctaggggctgtgttagcgaagggaacagcgtgttcagaggcagggtggctgggtgagctgtcagggaacagctgggtgagctgctgccccagaggcccagcaggtgtccagaactcaccctctgctcccagctcaccatcaaagcgctgcatgtggcccccactaccaacctgggtgggcctgagtgctgtctccgcgtctcgctgatgcccctgcggctcaatgtggaccaggtgagtggtctacgtgagggcagagcctagggtgaccccactgtctccaggcctctgagtctgatccacatctggacctctcccttgcaggatgccctcttcttcctcaaggacttcttcactagtctggtggccggcatcaaccccgtggtcccaggggagacctccgctgagggtgagaggctgggccagggaggggagcgtctgggccttctgcctcccaggacagcacaggttcccagtcattcctggccccatccccagtctgtgacctcccctcccctagctcgccccgagactcgagcccagcccagcagccccctggaagggcaggccgaaggcgtagagaccactggttcgcaggaggccccaggaggtggacacagcccctcccctcctgaccagcagcccatctacttcaggtaggctgctggactgcgggtggggggccctgggccagattgctgggggccaggccagtgagcaaagaaccccctcttcctgctcccctacccagagagttccgcttcacgtctgaggtccccatctggctggattaccatggcaagcacgtcacgatggaccaggtggtaagtggggcggtcggatggggtggccatgtggggtcagctgtggctgagtccctctgggggccaggtcttgcatccaggcactgttagcagccagggcgctctccagtggctcccatgggctagctagctccctgagtcccattgggtaaacctggaccccctccctctcccagggcacttttgctggcctcctcatcggcctggcccaactcaactgctccgagctgaagctaaagcggctctgttgcaggcacgggtgagtccccagcaccccagcctctctccagggtccctgatcttccttctgttctggtcctgactggttgtgtggccttggccaagtcatcacccttctcagggcctcaatttctcctctgtaaaaaggacgcagttggctgggcatgatggctcacacattcaggcattcgagaccagcctgaccaacatggtgaaacccccccgtctctactaaaaatacaaaaattagccaggcgtggtggcatacacatgtaatcccagctactcaggaggctgaggcaggagaactgcttgaacctgggaggcggttgcagtgagccaagatcgcaccacttcactccagcctgggcaacggagcaagactccatctaaaaaaaaaaaaaaaggacacagtccctctgcacatgactgggtgggaccacagggagggtagagtgcccacagtacttgccacaggggtactgagtcctcctgaccccacaatccctccatgtgtggctctgcctcaccttctgcctcctcacctccctgccctgccaggctcctgggtgtggacaaggtgctgggctatgccctcaacgagtggctgcaggacatccgcaagaaccagctgcccggcctgctgggaggcgtgggccccatgcactcggttgtccagctctgtgagtgtctaggtttggaagccctcgaaactgcttttacccttgggcaacctagaagctgccattgggaataagaggaggaggtgggggcagggcagcctcgggtgtctctgagcgctccttccccctagtccaagggttccgggacctgctgtggctgcccattgagcagtacaggaaggatggccgcctcatgcgggggctgcagcgaggggctgcctcctttggctcatccacagcctctgccgccctggaactcagcaaccggttggtacaggctatccaggtgagtgggtgccctgtatctgggctgtgcaggacagagcagctggagccctctgcaccacagctccctggttctgtcctcaaagctcctcagagtgggcagtctgggtatgacagccctactttatagagaaacagccacggagaggctaagtgacttgcctgggacctccaagccaggtctcccgaggcccacaggggctcccatgcaggagcgggagtgccccccaggccttcagagcccactgtgtctcctgctcatggcatgtcttgtaaaggggggtggaggacggctgtgtttgcagactaagaatctgaggcgcagaggctgccctggttcattcaggccatacgcttcgctaggccagaaggaccccagggaagctggggagccagtctcgtgggcagttgtcagatgaattctgtaggggatcgatggtcctaggcggctaaggggtgagtgcaggtgcatggtgcattctggaacctgcaagctcagaccccaacaggacagagggcagggctccaggggaggtgggagggatgcatgggcaccagggagcccccgggagtgttcagtcaggtgggaaagagtgatgccaggtgagatgctgggcagaggatctggcagacagaaggaaggatgggcctctgaccatctggcaggggcgtctggggggccaggcaaggagcggtcagtctcaggcgtgcagctgcggcagccatgtggaacctgctgaatgtggtggtcagcaggaagagaggtttgggttgagaagactttaggaaagtcccctgaggagtcccacgttcctaggttccctcagcagagtggcaggtgcctaggaaggggaggaagagtgggaggaagtggggagtgaggctgagcaggaccccctaggccagcacagtgacaggcagggaggctgagggctggtggggtctcagactgtcctgggggcctggggctgacgtgtgccccagccagctgtcctcatccagtgctcccatgtcccccaggccacagctgagaccgtgtatgacatcctgtccccggcagcccccgtctcccgctccctgcaggataagcgctctgcgcggaggctgcgcaggggccagcagcctgccgacctgcgggagggtgtggccaaggcctacgacacagtgcgagaggtgaccaggcccccgccctgccccagtcccccatgcccatctcctcacacagaccccgccctgacctctggcttccacagggcatcttggatacagctcagaccatctgtgacgtggcatcgcggggccatgagcagaaggggctgacgggcgccgtggggggcgtgatccgccagctgcccccgactgtggtgaagccgctcatcctggccacggaggccacgtccagcctgctcgggggcatgcgcaaccagattgtccccgacgcccacaaggaccacgccctcaagtggcgctcggacagtgcccaagactgagcctggggtgcccggcacccagagggtgctgcccaccatgctcctgagcctcccaagagctgcagcccacgggcccggcccggcctggcccttcaggggatggccactgtgaaggacgccttcccagcctgcccgttgccaatctgctgtgagaggggggcctccctgccttggggccttagccctggctctgcacttttcctccggggagaaaggacactgcccctcccccgacctgggcccacactgctgccttctcccaggacggaggcttttggaccctcggaccccatcccactcagccaagtgtctttctgtgtctggggggaggaggggatgatatccgtgtggttcgatgtattatttttaagctccgtgagtgcgtgggtcagtgtctgcatgaagtggaataaactgcccaccgccagcccccctctcaga

SEQ ID NO: 9435 - DNA, 4372 bp, Homo sapiens
agcccttccctccctcttggggccctgcttacctggccaggcctctgtccaccccacaggtaagcttccagcacgaggtgtacccagcggagccagccacaggccctgcggcccccagccaggagctggaggagcgaccgctgtcccgtcaggtgttcatcgtgcaggagctggaggtccgagaccggctcgcctcctcccagatcaacaagttcctgtacctacacacgagtgagcggatgccgcgacgtgcccactctaacatggtatgagcgacctgcaccatccaccctggggcagggcaccagaccgttggggatacatcttcacgcatgcatggattcacacacatacacgcattcccacacaaacacccaggttgtttgtgagcctgggagaagggcagagctaggggctgtgttagcgaagggaacagcgtgttcagaggcagggtggctgggtgagctgtcagggaacagctgggtgagctgctgccccagaggcccagcaggtgtccagaactcaccctctgctcccagctcaccatcaaagcgctgcatgtggcccccactaccaacctgggtgggcctgagtgctgtctccgcgtctcgctgatgcccctgcggctcaatgtggaccaggtgagtggtctacgtgagggcagagcctagggtgaccccactgtctccaggcctctgagtctgatccacatctggacctctcccttgcaggatgcccctcttcttcctcaaggacttcttcactagtctggtggccggcatcaaccccgtggtcccaggggagacctccgctgagggtgagaggctgggccagggaggggagcgtctgggccttctgcctcccaggacagcacaggttcccagtcattcctggccccatccccagtctgtgacctcccctcccctagctcgccccgagactcgagcccagcccagcagccccctggaagggcaggccgaaggcgtagagaccactggttcgcaggaggccccaggaggtggacacagcccctcccctcctgaccagcagcccatctacttcaggtaggctgctggactgcgggtggggggccctgggccagattgctgggggccaggccagtgagcaaagaaccccctcttcctgctcccctacccagagagttccgcttcacgtctgaggtccccatctggctggattaccatggcaagcacgtcacgatggaccaggtggtaagtggggcggtcggatggggtggccatgtggggtcagctgtggctgagtccctctgggggccaggtcttgcatccaggcactgttagcagccagggcgctctccagtggctcccatgggctagctagctccctgagtcccattgggtaaacctggaccccctccctctcccagggcacttttgctggcctcctcatcggcctggcccaactcaactgctccgagctgaagctaaagcggctctgttgcaggcacgggtgagtccccagcaccccagcctctctccagggtccctgatcttccttctgttctggtcctgactggttgtgtggccttggccaagtcatcacccttctcagggcctcaatttctcctctgtaaaaaggacgcagttggctgggcatgatggctcacacattcaggcattcgagaccagcctgaccaacatggtgaaacccccccgtctctactaaaaatacaaaaattagccaggcgtggtggcatacacatgtaatcccagctactcaggaggctgaggcaggagaactgcttgaacctgggaggcggttgcagtgagccaagatcgcaccacttcactccagcctgggcaacggagcaagactccatctaaaaaaaaaaaaaaaggacacagtccctctgcacatgactgggtgggaccacagggagggtagagtgcccacagtacttgccacaggggtactgagtcctcctgaccccacaatccctccatgtgtggctctgcctcaccttctgcctcctcacctccctgccctgccaggctcctgggtgtggacaaggtgctgggctatgccctcaacgagtggctgcaggacatccgcaagaaccagctgcccggcctgctgggaggcgtgggccccatgcactcggttgtccagctctgtgagtgtctaggtttggaagccctcgaaactgcttttacccttgggcaacctagaagctgccattgggaataagaggaggaggtgggggcagggcagcctcgggtgtctctgagcgctccttccccctagtccaagggttccgggacctgctgtggctgcccattgagcagtacaggaaggatggccgcctcatgcgggggctgcagcgaggggctgcctcctttggctcatccacagcctctgccgccctggaactcagcaaccggttggtacaggctatccaggtgagtgggtgccctgtatctgggctgtgcaggacagagcagctggagccctctgcaccacagctccctggttctgtcctcaaagctcctcagagtgggcagtctgggtatgacagccctactttatagagaaacagccacggagaggctaagtgacttgcctgggacctccaagccaggtctcccgaggcccacaggggctcccatgcaggagcgggagtgccccccaggccttcagagcccactgtgtctcctgctcatggcatgtcttgtaaaggggggtggaggacggctgtgtttgcagactaagaatctgaggcgcagaggctgccctggttcattcaggccatacgcttcgctaggccagaaggaccccagggaagctggggagccagtctcgtgggcagttgtcagatgaattctgtaggggatcgatggtcctaggcggctaaggggtgagtgcaggtgcatggtgcattctggaacctgcaagctcagaccccaacaggacagagggcagggctccaggggaggtgggagggatgcatgggcaccagggagcccccgggagtgttcagtcaggtgggaaagagtgatgccaggtgagatgctgggcagaggatctggcagacagaaggaaggatgggcctctgaccatctggcaggggcgtctggggggccaggcaaggagcggtcagtctcaggcgtgcagctgcggcagccatgtggaacctgctgaatgtggtggtcagcaggaagagaggtttgggttgagaagactttaggaaagtcccctgaggagtcccacgttcctaggttccctcagcagagtggcaggtgcctaggaaggggaggaagagtgggaggaagtggggagtgaggctgagcaggaccccctaggccagcacagtgacaggcagggaggctgagggctggtggggtctcagactgtcctgggggcctggggctgacgtgtgccccagccagctgtcctcatccagtgctcccatgtcccccaggccacagctgagaccgtgtatgacatcctgtccccggcagcccccgtctcccgctccctgcaggataagcgctctgcgcggaggctgcgcaggggccagcagcctgccgacctgcgggagggtgtggccaaggcctacgacacagtgcgagaggtgaccaggcccccgccctgccccagtcccccatgcccatctcctcacacagaccccgccctgacctctggcttccacagggcatcttggatacagctcagaccatctgtgacgtggcatcgcggggccatgagcagaaggggctgacgggcgccgtggggggcgtgatccgccagctgcccccgactgtggtgaagccgctcatcctggccacggaggccacgtccagcctgctcgggggcatgcgcaaccagattgtccccgacgcccacaaggaccacgccctcaagtggcgctcggacagtgcccaagactgagcctggggtgcccggcacccagagggtgctgcccaccatgctcctgagcctcccaagagctgcagcccacgggcccggcccggcctggcccttcaggggatggccactgtgaaggacgccttcccagcctgcccgttgccaatctgctgtgagaggggggcctccctgccttggggccttagccctggctctgcacttttcctccggggagaaaggacactgcccctcccccgacctgggcccacactgctgccttctcccaggacggaggcttttggaccctcaggaccccatcccactcagccaagtgtctttctgtgtctggggggaggaggggatgatatccgtgtggttcgatgtattatttttaagctccgtgagtgcgtgggtcagtgtctgcatgaagtggaataaactgcccaccgccagcccccctctcaga

SEQ ID NO: 9436 - DNA, 4362 bp, Homo sapiens
ggggccagcccttccctccctcttggggccctgcttacctggccaggcctctgtccaccccacaggtaagcttccagcacgaggtgtacccagcggagccagccacaggccctgcggcccccagccaggagctggaggagcgaccgctgtcccgtcaggtgttcatcgtgcaggagctggaggtccgagaccggctcgcctcctcccagatcaacaagttcctgtacctacacacgagtgagcggatgccgcgacgtgcccactctaacatggtatgagcgacctgcaccatccaccctggggcagggcaccagaccgttggggatacatcttcacgcatgcatggattcacacacatacacgcattcccacacaaacacccaggttgtttgtgagcctgggagaagggcagagctaggggctgtgttagcgaagggaacagcgtgttcagaggcagggtggctgggtgagctgtcagggaacagctgggtgagctgctgccccagaggcccagcaggtgtccagaactcaccctctgctcccagctcaccatcaaagcgctgcatgtggcccccactaccaacctgggtgggcctgagtgctgtctccgcgtctcgctgatgcccctgcggctcaatgtggaccaggtgagtggtctacgtgagggcagagcctagggtgaccccactgtctccaggcctctgagtctgatccacatctggacctctcccttgcaggatgccctcttcttcctcaaggacttcttcactagtctggtggccggcatcaaccccgtggtcccaggggagacctccgctgagggtgagaggctgggccagggaggggagcgtctgggccttctgcctcccaggacagcacaggttcccagtcattcctggccccatccccagtctgtgacctcccctcccctagctcgccccgagactcgagcccagcccagcagccccctggaagggcaggccgaaggcgtagagaccactggttcgcaggaggccccaggaggtggacacagcccctcccctcctgaccagcagcccatctacttcaggtaggctgctggactgcgggtggggggccctgggccagattgctgggggccaggccagtgagcaaagaaccccctcttcctgctcccctacccagagagttccgcttcacgtctgaggtccccatctggctggattaccatggcaagcacgtcacgatggaccaggtggtaagtggggcggtcggatggggtggccatgtggggtcagctgtggctgagtccctctgggggccaggtcttgcatccaggcactgttagcagccagggcgctctccagtggctcccatgggctagctagctccctgagtcccattgggtaaacctggaccccctccctctcccagggcacttttgctggcctcctcatcggcctggcccaactcaactgctccgagctgaagctaaagcggctctgttgcaggcacgggtgagtccccagcaccccagcctctctccagggtccctgatcttccttctgttctggtcctgactggttgtgtggccttggccaagtcatcacccttctcagggcctcagtttctcctctgtaaaaaggacgcagttggctgggcatgatggctcacacattcaggcattcgagaccagcctgaccaacatggtgaaacccccccgtctctactaaaaatacaaaaattagccaggcgtggtggcatacacatgtaatcccagctactcaggaggctgaggcaggagaactgcttgaacctgggaggcggttgcagtgagccaagatcgcaccacttcactccagcctgggcaacggagcaagactccatctaaaaaaaaaaaaaaaggacacagtccctctgcacatgactgggtgggaccacagggagggtagagtgcccacagtacttgccacaggggtactgagtcctcctgaccccacaatccctccatgtgtggctctgcctcaccttctgcctcctcacctccctgccctgccaggctcctgggtgtggacaaggtgctgggctatgccctcaacgagtggctgcaggacatccgcaagaaccagctgcccggcctgctgggaggcgtgggccccatgcactcggttgtccagctctgtgagtgtctaggtttggaagccctcgaaactgcttttacccttgggcaacctagaagctgccattgggaataagaggaggaggtgggggcagggcagcctcgggtgtctctgagcgctccttccccctagtccaagggttccgggacctgctgtggctgcccattgagcagtacaggaaggatggccgcctcatgcgggggctgcagcgaggggctgcctcctttggctcatccacagcctctgccgccctggaactcagcaaccggttggtacaggctatccaggtgagtgggtgccctgtatctgggctgtgcaggacagagcagctggagccctctgcaccacagctccctggttctgtcctcaaagctcctcagagtgggcagtctgggtatgacagccctactttatagagaaacagccacggagaggctaagtgacttgcctgggacctccaagccaggtctcccgaggcccacaggggctcccatgcaggagcgggagtgccccccaggccttcagagcccactgtgtctcctgctcatggcatgtcttgtaaaggggggtggaggacggctgtgtttgcagactaagaatctgaggcgcagaggctgccctggttcattcaggccatacgcttcgctaggccagaaggaccccagggaagctggggagccagtctcgtgggcagttgtcagatgaattctgtaggggatcgatggtcctaggcggctaaggggtgagtgcaggtgcatggtgcattctggaacctgcaagctcagaccccaacaggacagagggcagggctccaggggaggtgggagggatgcatgggcaccaggtagcccccgggagtgttcagtcaggtgggaaagagtgatgccaggtgagatgctgggcagaggatctggcagacagaaggaaggatgggcctctgaccatctggcaggggcgtctggggggccaggcaaggagcggtcagtctcaggcgtgcagctgcggcagccatgtggaacctgctgaatgtggtggtcagcaggaagagaggtttgggttgagaagactttaggaaagtcccctgaggagtcccacgttcctaggttccctcagcagagtggcaggtgcctaggaaggggaggaagagtgggaggaagtggggagtgaggctgagcaggaccccctaggccagcacagtgacaggcagggaggctgagggctggtggggtctcagactgtcctgggggcctggggctgacgtgtgccccagccagctgtcctcatccagtgctcccatgtcccccaggccacagctgagaccgtgtatgacatcctgtccccggcagcccccgtctcccgctccctgcaggataagcgctctgcgcggaggctgcgcaggggccagcagcctgccgacctgcgggagggtgtggccaaggcctacgacacagtgcgagaggtgaccaggcccccgccctgccccagtcccccatgcccatctcctcacacagaccccgccctgacctctggcttccacagggcatcttggatacagctcagaccatctgtgacgtggcatcgcggggccatgagcagaaggggctgacgggcgccgtggggggcgtgatccgccagctgcccccgactgtggtgaagccgctcatcctggccacggaggccacgtccagcctgctcgggggcatgcgcaaccagattgtccccgacgcccacaaggaccacgccctcaagtggcgctcggacagtgcccaagactgagcctggggtgcccggcacccagagggtgctgcccaccatgctcctgagcctcccaagagctgcagcccacgggcccggcccggcctggcccttcaggggatggccactgtgaaggacgccttcccagcctgcccgttgccaatctgctgtgagaggggggcctccctgccttggggccttagccctggctctgcacttttcctccggggagaaaggacactgcccctcccccgacctgggcccacactgctgccttctcccaggacggaggcttttggaccctcggaccccatcccactcagccaagtgtctttctgtgtctggggggaggaggggatgatatccgtgtggttcgatgtattatttttaagctccgtgagtgcgtgggtcagtgtctgcatgaagtggaataaactgcccaccgcca

SEQ ID NO: 9437 - DNA, 4365 bp, Homo sapiens
agcccttccctccctcttggggccctgcttacctggccaggcctctgtccaccccacaggtaagcttccagcacgaggtgtacccagcggagccagccacaggccctgcggcccccagccaggagctggaggagcgaccgctgtcccgtcaggtgttcatcgtgcaggagctggaggtccgagaccggctcgcctcctcccagatcaacaagttcctgtacctacacacgagtgagcggatgccgcgacgtgcccactctaacatggtatgagcgacctgcaccatccaccctggggcagggcaccagaccgttggggatacatcttcacgcatgcatggattcacacacatacacgcattcccacacaaacacccaggttgtttgtgagcctgggagaagggcagagctaggggctgtgttagcgaagggaacagcgtgttcagaggcagggtggctgggtgagctgtcagggaacagctgggtgagctgctgccccagaggcccagcaggtgtccagaactcaccctctgctcccagctcaccatcaaagcgctgcatgtggcccccactaccaacctgggtgggcctgagtgctgtctccgcgtctcgctgatgcccctgcggctcaatgtggaccaggtgagtggtctacgtgagggcagagcctagggtgaccccactgtctccaggcctctgagtctgatccacatctggacctctcccttgcaggatgccctcttcttcctcaaggacttcttcactagtctggtggccggcatcaaccccgtggtcccaggggagacctccgctgagggtgagaggctgggccagggaggggagcgtctgggccttctgcctcccaggacagcacaggttcccagtcattcctggccccatccccagtctgtgacctcccctcccctagctcgccccgagactcgagcccagcccagcagccccctggaagggcaggccgaaggcgtagagaccactggttcgcaggaggccccaggaggtggacacagcccctcccctcctgaccagcagcccatctacttcaggtaggctgctggactgcgggtggggggccctgggccagattgctgggggccaggccagtgagcaaagaaccccctcttcctgctcccctacccagagagttccgcttcacgtctgaggtccccatctggctggattaccatggcaagcacgtcacgatggaccaggtggtaagtggggcggtcggatggggtggccatgtggggtcagctgtggctgagtccctctgggggccaggtcttgcatccaggcactgttagcagccagggcgctctccagtggctcccatgggctagctagctccctgagtcccattgggtaaacctggaccccctccctctcccagggcacttttgctggcctcctcatcggcctggcccaactcaactgctccgagctgaagctaaagcggctctgttgcaggcacgggtgagtccccagcaccccagcctctctccagggtcctgatcttccttctgttctggtcctgactggttgtgtggccttggccaagtcatcacccttctcagggcctcagtttctcctctgtaaaaaggacgcagttggctgggcatgatggctcacacattcaggcattcgagaccagcctgaccaacatggtgaaacccccccgtctctactaaaaatacaaaaattagccaggcgtggtggcatacacatgtaatcccagctactcaggaggctgaggcaggagaactgcttgaaacctgggaggccgttgcagtgagccaagatcgcaccacttcactccagcctgggcacggagcaatcatctaaaaaaaaaaaaaaaggacacagtccctctgcacatgactgggtgggaccacagggagggtagagtgcccacagtacttgccacaggggtactgagtcctcctgaccccacaatccctccatgtgtggctctgcctcaccttctgcctcctcacctccctgccctgccaggctcctgggtgtggacaaggtgctgggctatgccctcaacgagtggctgcaggacatccgcaagaaccagctgcccggcctgctgggaggcgtgggccccatgcactcggttgtccagctctgtgagtgtctaggtttggaagccctcgaaactgcttttacccttgggcaacctagaagctgccattgggaataagaggaggaggtgggggcagggcagcctcgggtgtctctgagcgctccttccccctagtccaagggttccgggacctgctgtggctgcccattgagcagtacaggaaggatggccgcctcatgcgggggctgcagcgaggggctgcctcctttggctcatccacagcctctgccgccctggaactcagcaaccggttggtacaggctatccaggtgagtgggtgccctgtatctgggctgtgcaggacagagcagctggagccctctgcaccacagctccctggttctgtcctcaaagctcctcagagtgggcagtctgggtatgacagccctactttatagagaaacagccacggagaggctaagtgacttgcctgggacctccaagccaggtctcccgaggcccacaggggctcccatgcaggagcgggagtgccccccaggccttcagagcccactgtgtctcctgctcatggcatgtcttgtaaaggggggtggaggacggctgtgtttgcagactaagaatctgaggcgcagaggctgccctggttcattcaggccatacgcttcgctaggccagaaggaccccagggaagctggggagccagtctcgtgggcagttgtcagatgaattctgtaggggatcgatggtcctaggcggctaaggggtgagtgcaggtgcatggtgcattctggaacctgcaagctcagaccccaacaggacagagggcagggctccaggggaggtgggagggatgcatgggcaccagggagcccccgggagtgttcagtcaggtgggaaagagtgatgccaggtgagatgctgggcagaggatctggcagacagaaggaaggatgggcctctgaccatctggcaggggcgtctggggggccaggcaaggagcggtcagtctcaggcgtgcagctgcggcagccatgtggaacctgctgaatgtggtggtcagcaggaagagaggtttgggttgagaagactttaggaaagtcccctgaggagtcccacgttcctaggttccctcagcagagtggcaggtgcctaggaaggggaggaagagtgggaggaagtggggagtgaggctgagcaggaccccctaggccagcacagtgacaggcagggaggctgagggctggtggggtctcagactgtcctgggggcctggggctgacgtgtgccccagccagctgtcctcatccagtgctcccatgtcccccaggccacagctgagaccgtgtatgacatcctgtccccggcagcccccgtctcccgctccctgcaggataagcgctctgcgcggaggctgcgcaggggccagcagcctgccgacctgcgggagggtgtggccaaggcctacgacacagtgcgagaggtgaccaggcccccgccctgccccagtcccccatgcccatctcctcacacagaccccgccctgacctctggcttccacagggcatcttggatacagctcagaccatctgtgacgtggcatcgcggggccatgagcagaaggggctgacgggcgccgtggggggcgtgatccgccagctgcccccgactgtggtgaagccgctcatcctggccacggaggccacgtccagcctgctcgggggcatgcgcaaccagattgtccccgacgcccacaaggaccacgccctcaagtggcgctcggacagtgcccaagactgagcctggggtgcccggcacccagagggtgctgcccaccatgctcctgagcctcccaagagctgcagcccacgggcccggcccggcctggcccttcaggggatggccactgtgaaggacgccttcccagcctgcccgttgccaatctgctgtgagaggggggcctccctgccttggggccttagccctggctctgcacttttcctccggggagaaaggacactgcccctcccccgacctgggcccacactgctgccttctcccaggacggaggcttttggaccctcggaccccatcccactcagccaagtgtctttctgtgtctggggggaggaggggatgatatccgtgtggttcgatgtattatttttaagctccgtgagtgcgtgggtcagtgtctgcatgaagtggaataaactgcccaccgccagcccccctctcaga

SEQ ID NO: 9438 - DNA, 373 bp, Homo sapiens
ggaggctggtctcgcccaggcctctgtgggaagggccgccaggctgagtggagggccagccaccagctacggtgtcttccttcgcaggtctgtccccccaggcagaaggattccagcccagggatcccccatcccaccctgactgcatcctgagaaggggggacgccacttcgggaaggttgttggggcagcacaggccctggggccctgctctgtgaccttgggcggccccctctgtctctctaggcctgtatgcaccactggcaaagggggcagggcccaagtctactctaaaagctcccctttctctccagaagctttggagtctcccaaaatgcctgctgggtctctgcaggactggcacctgtcaccg

SEQ ID NO: 9439 - DNA, 385 bp, Homo sapiens
ctgagacctgatggccagccagcgggtgtgcaggaagagggggaaggaaggctctccacggagaggggctacgagagcaaagtcctgaaggcaaaacaggcctggactccttgaggggcagagaccagtgcagctggcatgggaagcaagagcagggtcaggtctggagggagaggcaggtccctgctgggcatagaatagagaaggggtaggggccgggcatggtggctcatgcctgtagtcccagcactttgggaggacgaggcaggcagatcacttgaggccaggagttcgagaccagcctggccaacgttgtgaaaccctgtctctactaaaattagctgggtgtggtggcacatgcctgcaatcccagctactggggaag

SEQ ID NO: 9440 - DNA, 373 bp, Homo sapiens; identical to SEQ ID NO: 9438

SEQ ID NO: 9441 - DNA, 373 bp, Homo sapiens; identical to SEQ ID NO: 9438

SEQ ID NO: 9442 - DNA, 1861 bp, Homo sapiens
caatggcacaggccaatgtaggctggggcttagagaactggagaaaaacgtgtttgtgtgtagtacctcaggtactccttgccttgcagtccaaagcaaatgtaccgcttctcctggttttctttctagaaactgcattatatataccctatttttatatataatgcttctgtattactcctctggagactagccttttttatagactttctggtagaatgttaattagaaaggaaaataactatcttcaaccaatttattcattaaaagttcagttttttccaaagagtcataatacataaactttttttttttttttgagacagggtctcattctgtcacccatactggggtgcagtgacaccatctcggctcactgcaacctccacctcccaggctcaagtgaatctcctgcctcagcctcccgaatagctgggattacatgcacacaccaccacacctggctaatttttgtatttttagtagagacggggtttcactatgttggccaggctagtctcaaatgcctgacctgaaatgatccacctgcctcggcctcccatagtgctaggattacaggtgtgtgccactgtgcctggctgatacacaaactcttaagaaaacaaatattgatatccaaaacattttaataattacattgaaattttctattgcagaaactgtgtttccaatctaaattattaattaatcctaaccctttcctgctctgggtttgtgtttttgaattcagtacatcatcttacagtttttgcttttgttaaaatactggaaataattttgaggaagaaaagaaaataagaagtgatatgtcaccttctaaattgtctttcctaacttagaagcaaattcgaatgtctctagtatggcttttctctccttatttcccctatcatcccttttctcacacttctctttatttaaaacttgtcttcaaagcacacagaatagagtcgataagagtctatccagccctgatttctcttggccaaggaatgaaaggctgttctctaaaccttgataggtaaggaatagccccctgtccacctccatcttagtctgtattgctgtaaaggaatacctgaggctggggatttataaagaaaaaaggtttatttggctcatgattttgatatctgtaaaagttcaagattggacattgacatctggcaagggccacaggctgcttccactcatggccgaaggcaaagaggagccagcattgcaaagatcccatgatgagagaggaagcaagagagagaggggaggtggcagactctttttaacaaccagttttctcaggggctaaaagagtaagaactcactcacctgccatccttacccccacagcccccaggatttctctattcatgagggatctgcccccatgacccagacccctcccattaggccccacctccaacattggggatcaaattttaaaatcagagttggaggcgacaagtatccaaactatagcacccacaaaccatctagtttatcttattattataacctgtcatcctaaaagttctcaaaatctggctgggcgcagtggctcacgcctgtaatctcaacattttgggaggccaaggtgggtggatcacttgaggtcaggagtttgagaccaacctggccaacgtgatgaaaccctgtctctactaagaatacaaaaattagccaggcatgatggtgggtgcttgtaatcccagctactctggaggctgaggcaggagaatcgcttgaacctaggagatggaggttgcatgagccaagatcacaccactgcactccagcctgggcaagcgtgagactttgtctcaaaaaaaaaaaaaaaagaaaa

SEQ ID NO: 9443 - DNA, 1861 bp, Homo sapiens
caatggcacaggccaatgtaggctggggcttagagaactggagaaaaacgtgtttgtgtgtagtacctcaggtactccttgccttgcagtccaaagcaaatgtaccgcttctcctggttttctttctagaaactgcattatatataccctatttttatatataatgcttctgtattactcctctggagactagccttttttatagactttctggtagaatgttaattagaaaggaaaataactatcttcaaccaatttattcattaaaagttcagttttttccaaagagtcataatacataaactttttttttttttttgagacagggtctcattctgtcacccatactggggtgcagtgacaccatctcggctcactgcaacctccacctcccaggctcaagtgaatctcctgcctcagcctcccgaatagctgggattacatgcacacaccaccacacctggctaatttttgtatttttagtagagacggggtttcactatgttggccaggctagtctcaaatgcctgacctgaaatgatccacctgcctcggcctcccatagtgctaggattacaggtgtgtgccactgtgcctggctgatacacaaactcttaagaaaacaaatattgatatccaaaacattttaataattacattgaaattttctattgcagaaactgtgtttccaatctaaattattaattaatcctaaccctttcctgctctgggtttgtgtttttgaattcagtacatcatcttacagtttttgcttttgttaaaatactggaaataattttgaggaagaaaagaaaataagaagtgatatgtcaccttctaaattgtctttcctaacttagaagcaaattcgaatgtctctagtatggcttttctctccttatttcccctatcatcccttttctcacacttctctttatttaaaacttgtcttcaaagcacacaaaatagagtcgataagagtctatccagccctgatttctcttggccaaggaatgaaaggctgttctctaaaccttgataggtaaggaatagccccctgtccacctccatcttagtctgtattgctgtaaaggaatacctgaggctggggatttataaagaaaaaaggtttatttggctcatgattttgatatctgtaaaagttcaagattggacattgacatctggcaagggccacaggctgcttccactcatggccgaaggcaaagaggagccagcattgcaaagatcccatgatgagagaggaagcaagagagagaggggaggtggcagactctttttaacaaccagttttctcaggggctaaaagagtaagaactcactcacctgccatccttacccccacagcccccaggatttctctattcatgagggatctgcccccatgacccagacccctcccattaggccccacctccaacattggggatcaaattttaaaatcagagttggaggcgacaagtatccaaactatagcacccacaaaccatctagtttatcttattattataacctgtcatcctaaaagttctcaaaatctggctgggcgcagtggctcacgcctgtaatctcaacattttgggaggccaaggtgggtggatcacttgaggtcaggagtttgagaccaacctggccaacgtgatgaaaccctgtctctactaagaatacaaaaattagccaggcatgatggtgggtgcttgtaatcccagctactctggaggctgaggcaggagaatcgcttgaacctaggagatggaggttgcatgagccaagatcacaccactgcactccagcctgggcaagcgtgagactttgtctcaaaaaaaaaaaaaaaagaaaa

SEQ ID NO: 9444 - DNA, 649 bp, Homo sapiens
aaaaaaaaaaaaagaaattctaactataattttatggcacagataaaacatttaggaccttaatttaaaaattaaaattctcagtgagcttaagataggcttgatcaagggcccaaagtttaagttcaaatacagaaaagaagacaagttcttacttgcctttatcttggttatgtgtgcatagataagtaaagttaaattttctacaagactttgatggaaaaaggataatttctagacaagagccagaattattctaggtcacttgggagagaatattatgtatgtaaactgaaagctaaaactgagggttttgaatgagccatttcatttaccataaccatttttagttgacataatcatggcttcagaggagaaagtgctttctacctttttcttaactttattctatagacagtccttcagtgagcggcatttacgcatggtctgcttcttcaattatgtatagcagttttggcaggcagtacatgaacttgaactctgttttgctttctgatcttctgtagctaataaaatcctaatctcacaggtctaggtcttagatggcattcccatccttacactgttcatatcttatatacactggacttcaagtgcagtgcccacttagggatcttcgtctgagttt

SEQ ID NO: 9445 - DNA, 415 bp, Homo sapiens
gcagtaagcatgcctgctctttgtccaagagggagacattacctagtctttcaaatttgctctgcaaacacaagcctaagaaaaggctccggtaaagaacagtgagattcttgtattcctgacatgaacagcaaaaatgtgccaggatgctcaggggccatggcagattacctctcccaacagtggatcccttgaaaggctcttgggacctttaaggatcctggaccatattttgagaaccactggtttaaccagattataatttcctgttagaaaaaaatcatattgcctttttcttagtaagttacttttcatcctcctgaaaaaatgtcatgttctaagaatattccagcatctcctcaggaacctttatttgtacatggaggtcctaatgcttcctcatcagttcttttca

SEQ ID NO: 9446 - DNA, 415 bp, Homo sapiens; identical to SEQ ID NO: 9445

SEQ ID NO: 9447 - DNA, 642 bp, Homo sapiens
aaaaaaaaaaaaagaaattctaactataattttatggcacagataaaacatttaggaccttaatttaaaaattaaaattctcagtgagcttaagataggcttgatcaagggcccaaagtttaagttcaaatacagaaaagaagacaagttcttacttgcctttatcttggttatgtgtgcatagataagtaaagttaaattttctacaagactttgatggaaaaaggataatttctagacaagagccagaattattctaggtcacttgggagagaatattatgtatgtaaactgaaagctaaaactgagggttttgaatgagccatttcatttaccataaccatttttagttgacataatcatggcttcagaggagaaagtgctttctacctttttcttaactttattctatagacagtccttcagtgagcggcatttacgcatggtctgcttcttcaattatgtatagcagttttggcaggcagtacatgaacttgaactctgttttgctttctgatcttctgtagctaataaaatcctaatctcacaggtctaggtcttagatggcattcccatccttacactgttcatatcttatatacactggacttcaagtgcagtgcccacttagggatcttcgtc

SEQ ID NO: 9448 - DNA, 1519 bp, Homo sapiens
tctgcctcccaaagtgctgggattataggcgtgagccaccatatctgttctactgtgaacattttaatgtgtttttttggactttttctaaatacatgcaaatattatgtatgtaggtatgtctgagttttttgggttttgttttgtttttacaaaaatgagatttcaatgttctctttacttgtcaaaatgtgtgtgcagatgacagttggaagagatgccagatgtaaatttacctccctcccctccctctgaggcttgcttgccccatgctgtggttctgtgtgacctcatgacaggagagatttctgtggcattcaggcaatgcagcaggggtctggccactgacacaacaaacttgtggttttcaaatacaagtcatacagccaagacacaggtgcttgggtttcagggcctggcatagtccagtgtctgattgatttttaaccagctagtgaataaatttgtaataaatgatccagctgaagatctcaatgatttaactgcaatgaaattgcaatgaaacttcccagtggctaaaattttgtggttcacatttgcactgctgttagcacaaaaggtaattatgatgtgtgtgaaaaatggtagtctgattagttgttcacacacacaaaggagtgcttttcacacatcttaattgcttttctgctaaagaaagtgtaactgcaagtcataaaattataacagcctctaacacgttaattccatttcatcagcggatgatgtatcttgaattttggtgaaaagtgactttagaactcatattgatgaggaaagttgaggttaagatactgctctcatagaagacaattataaaaaattatagttcatactcataaatacacacgtctctgtacagaagtatcgtgaattactattttgggatagtgtcttaggttttactttcttgcatttcgttacccacatggaccagtagattaacagaaaatatggccccagaaagaaagaggatacaggctaaagaagtaaatcaaagaactcgatagcttttctgaaggctaaggtagagaaaatcatcttgaaattcaacacttagaagagaagaaagggttttaaagctgcataaaactaagaagaacctgaaacaggcagaacaccagagtttctatcagagagtaggtaaaatggctagttttttcaccactaagaaaggagataaaagtttctccagcttaaaggagggagggattaaaagagacctgattagtgtctacatgctgcttgcatcccagagatgggcagcaggaaccccaaaaagctttaagaagatggagaatatggggagttttgtttctattctcattgtatagccaggggaaactgcaagtctttcagagaaatgccttgtccagcacagtggatgaggaaagatctgagtgggtggaactgagaggagcctcacccctatgtcagaggcagaggcgtttaaaccatagcaactccatcttgaataggggctgggtaaaataaggctgag

SEQ ID NO: 9449 - DNA, 246 bp, Homo sapiens
ccaggctggagtgcagtggcgcgatctcagctcaccgcaaactctgcctctagggttcacgccattctcctgcctcagcctcccgagtagctgggactacaggggcccgccatcacgcccggctaattttttgtatttctagtagagacagggtttcaacgtgttagccaggatggtcttgatctcctgacctcgtgatccacctagctcggcctcccaaagtgctgggattacaggcgcgagtca

SEQ ID NO: 9450 - DNA, 18370 bp, Homo sapiens
tctggggagctatctgtgggaaaggtcagggcctgtttttctcctaagctgctggctgttcaagggacctacctccttgtcccttcccagtcacaggtccaaggggcaaatagcgaattcccatggaggagaatcactgcactccaagtggacgtggctggtaggtaagtgtaactttttctgctgctgttcagtggtactgagagacaggaaagccccactgctcccgccccaccctttgtgatgggttatcaatgacagctaataaagccacctcactgcttcctcatgccagcccttgacccacaaacactggaggagacctgcctcaggtcccatcccccaccacaactgggctttagctgaaagttgtgggtttctgaacttcaggaataagtctttggggacattcgtttggccaagaattcattccctcatctgcccaagagcagctgccctaggtgataggcaaaagccacatgaaagccacatcccacagctcttgggcgtcatttattttttgcataggcataaattaggatctggagataaaaaacttaagaaccaatagtgcagcatttgtgacaggagagcgcaaaacaaaccctggctgcctcgggatggagcggggcggcctcaccaccactgcatccagcctcatgctccagagcggatttgaggctcagtgctgcagtgaaggcctgcccgccttcttgccccttccccgcagccagaccaccagacacagccggaaccagtgccccaggcccctctccacggccaggaacaagaaactgagtatcacccagtgccccacagaacggggctaggaatcaagcccttagcttttcagttagaaaaacagaccttgaaaaatatatacataatacagtggggcctgctggctctaaaagtcccctcctcccccttccctatccagggtaacttctgccagcctcttcccccagcccccaccaactgccccacagagaacaaaccagaagggcgactacctgaacaagagctgcaagagcccaagggggcagcctgagcggacgacccctacatcagggcctggttagatgtgggggccggtgcagacagacctcgcaccccgataccctgaacgtccccacaagagcccaggagttccatgctccccactcttcttgctataaccccagatgctaatggccccaaagacaggtctaggtctccataccctgggagaatgtggaaagcaagctcaggggcactggcaggccctagcaggaacagggagcagggtgggccccaacctagcatcaggagagagaaaagcaactaccgtccccagcagaggggaagcctacagggttggccctgggccccttagaagatcacagcagccagtcccctttagggcacaagaagccccatggcccactgctaccctccccgggacaaatacacacttttgtcgaaggccctcagggaccctgtggttcatgcttccctaggtggagggcactaaccttgtaggagagctgggcagctctccatcaagtgcttcctgcctggggaagtcccatcctgctctggagctaagcaccctcctcccagagggcctcgcttccttgcccaggggcagaggcagctcacctagcccaggccgtagcttgcccctcccacagccctggcacctgcttcatcagctcccaggcaccagcccctgaccccagccaagaccagtcaggtcctacctctcccaacttcccagtcccccatgatatgctacatatatacacactcccaggatgggaagcagacgccacgggcacagagggaaggaagaagggagctgctggagcctgctaaccgcctcgagccacctgctgctcaggagaccctgcccgtccttttcatctgcatggggccacaggctcctctcttgtgctcctagaagtcagagcgccgagcaagcgtgtgggggaagcggcggggtgctgttcacccactcccagatggctggcagcaggcaccagtaagcagggctagtgggcgggctccccatgcactctgaagcggtagatgcaggtgtactcggggtggccccagttagtcaggatccgcagctccaccacctggtacgtggccatcgtaggggcctgggtagagaagaaagggattaagagcatcagagacctgtgaggcctcactgacagagaaggtgggaaggggagacagcctcgcctagggccagatggctcccctgctccttccctggggctctgaagagaaccaggcttcaaaagctcctatctttagcctcctgagcagtgtttccagccagtgggttaaggggccacctgtagcacacttcatctgaaaccggaatgaattcatccacaatcgtttttttattgtgatcaacagatagaaccaccttcatagagggcttcatagatgctgatgtggggcacacttgattctttttctccagtgcccatcgggcctctgtctagccacagtgttgggaatggtgttagcagcatatcttacctgggcagatgccacaggcctagcacactcctggcttgtcccttctctctggcacatcgttctgtcctctaccctctttttttgtttttggagacagggtcttgctctgtcacccaggctggagtacaatggtgtgatcacagttcactgcctcaaccttctgggctcaagggatcctcccaccttagcctccccagtagctgggaccacaggtgcatgtcaccacacccggctaaattttttaacattttttgtagagtcgggatctcgctgtgttcaccagcctggtcttgaactcctgggctcaagcaatcccctcgccttggccttgcaaagtgctggaattacagacatgagccacctcgtctggcctctatactttcctaaagagaaatcccaacctctcttgcagcctagttacctcctcagagctgatgacaactcagttctttctggctcccccgacagctccactggactgttccataggtgcctcagactcagccagacctgccccctgctccacatcagcccccatcgcagtggcttcttcctcccaccccatccaactggacattcacgaccctccctgctacgtctttgtcctcactcccaacgcccctctcccccacctatcctgttctggctgctttccctcaaccacttcctgacgggtctcccaggcccaggctcgccccttcgagtcatatagtgatgttagtcaaatggacatagctttgtcacctgaagcacagcactgcctcccccaggtccctgagggcttatttcctgcctctctgtggcctcctcttcctgccactgtccctcgtccacctcccactatcccgccaacccaattcctcactccaggactcccccggtgtggggcttaggccaatggtttgttcaaatgcaggctcctgggtcctgtcagccctaaggaaccagactctcctggggtggagactgggaatctgcatttctaactgacttaggagatcggatgcccactgaagtttaagccgcatgcactgcctgaggctccagctggccatggtagaatgcccgcgccctggcatgtgctggcggcggctcctcgaacgcctctcccggccttcctttcctggccacccaacccctcttgtgtaaagcccacctcctggtgtccttttccaggaagcttccctcatgctgcccttctggaaggtgccttcccctgtgctgacgtctgcaggatgcgtgttacaccccatttggatatcacatcttgagctgtgggaaaggagagcagggcttccctctctgaaccccatgcctggcagggtaagtgcccagggagcacctgctgcctggatggggagtctgcgccacttctgctagcacagcagcatcccgtacctgaaagtgaaacgtctgaataggctcgccgtcctgatcgtaagtgaacttgccaaggagtgtcccctcctgctgcaggtcttcgtcaaacccctgcaaagagagcggagggaagtggggaggggctggagcagggagaacacccctccccactccaatccctgctcctcccacccagcaggtcaggcaccagagtggcctatgacaagtcacttcactctcttgtgccacagtttctgcctccaaagcctaaggtaacagggactgaagtgctgtctcccaccctagctcctcctcttccaaatccactcccctcccttccagtccaagggtgaccctgacttgatcctcagtagagaggcccacaggatccccctgcagcccctctggccccaccacaggacagatactcacaaagatggcgaagtccttgggggcactggagatagtgctgttgggtgacaaggccttgggcacatgctctaaggtaacggctgtggggcggatgcgggcagagaggcggaccacggcgaagccttgtggcccctggaaggcccagcagttgcctgggtgcacatctggctggaggagcagaaagtcatgtcaggacagggccctgagtccagctcttgctgaccccagatgggaccagccctcagtgtgctcagagcccccgctgctgtgcttgccaggtgcccacctggaggatgactcggggtgactgggagtggtaccacagggggatgccgaagaggctgaggagggccgtcttggtctcgtaggtctcagaacatcgggtgctgatgacgctggcccctgagacaggagaggaaggcagggtgggctcccgcacgggaggagggccccgctcaggccattggctgtctcctcgctgaaggtggacggcagatgccccaggcctagcctttaaccctaaccgagatgctcagagcagctttaaaggtcagcctctccctggcccaggatggtactcggtacgtcctgacttccctgaattgccacttgcctttgtcatgggtactaggttgggtgatttctgctgatcctgagctttgcttgctctgccccaccaccaacctggtagatgccaggggaccggccattgcggggtccaggacaaggcagagcgaggaaagcagagcacgtacctcctgactccagggcgtagtctgccagcccgatgcggtcctcactgtagcgctgcagggcctgcttcacgatgtggtgcacctgctgcaatgcaggcaccaggagacggttgcagcagggagcagacgtgtccccctgtcacctcgtggccgtgggccaaggacccatgggctgaccccttctaggcttgcactgtgctggtgcccaggcagatgtgggcacactgccacccacccatgccagccccacagcatgcaaagcctcctgcttggcacttccatcctggaacctgccagggagctggcagtgtgggactgtccagggctcccagggaggagagctgtgggtgggtgtgtggagaggggcatgtgggcctcacctcctctgtcactccaatcacaccttctttctgcagcgtcaggctcagggaggccgcggcttccctggccgacttgccctgcatctctgccacatgggtgaggatcttgctctccagctctcgcagctgagcttgcatctcctctctctgaaggagccccacgcggccccctccacctcgggcaaggaactgactgatccaggccgggaactgagattccacctataggaacccaaaggggtgtcaccctggggggcttgcagggacagcaggagctgctatgacagggctagtgcttagctggatagcagggatagggtaggagggaggccactggaggaaagagttatgaacactccatgggcactaacaaaaacaggaagaacgcctgtcagtgagagcccacatgtgtcaaggccaacgccacagtctcttgggcataacagaggctgcaggggcaaggggtgctgctttgcaggccccaggacacgtcgtctcaaaggaggaggagagggaccagcagggccctggtggttcccactcacgtcgtcccgcacggcctggatctgctggggcagcaggcccacttcttccgccaccgagctctgcttcagtgccagagccgccagctcctgctgcaggccggccagctggtcctccagccgcctcagctccttcacagagctctcctggaaggactcctgggtcatgctggtcccagagagagaagagtaagcctcggatctctttggtgggaggtaaggccacaccaaagatgaaagaggaccccctagtgggctcccgtcaggagagcgggtgcccagcactcattgtgaacctgagaaggggcaaggcctctcctgggggttctggctgcagaacccctgcctgtcccaaggagctaattctgagcctgctccctttctaagcccagagtccagaatgtactctgcctcagcctctcacatcctccacaagcatggacatctggggcatgagaaggcagttatgtgaggctgtaagaaaggatgctgtgtctataaatgaatcccggtcctctcacacagcctgccccccgccctcaggacccccctgctaacctccatggcacctcaaagacaggccctgggcaggggtcctgagctgggtttcaacccctccccctaccatctgcttggcaagatgatcagaactctctgctctgcggctctgctccccagtcctgcctggagagtgggtggggctggggaggagcaggccgaggccagctggtggcgcccagtacctttgccactctgacttcagctgctggatgcgagcctcggactcctgtgtaggaagaagggacaaatacaagaaatactcatctcagaaattggtgttccagagtaggatctgctgtctgttagcgtctttgcttaaccacacccctgcccaaggtctcttgacccctgcagcaaaaatcaaactggcctccttgtcaaagccctcatgagtctcgtccatgtctgacacactgaggtatctgttcacccacactcagcacatgcacaccagcatgacaggccgctgtgccctggcacaccccagggagcccctgcacagctctccaactaaggggtcgggggtcaaacagagaagtcagaggagggcactcccctccccatgcaacacccaaacagtccctttggaagggccgaggggtccgaggtgaacatgttggatggggtcaggacccagtcacaggccctgagtgccgcaagcccgctgacctgggaggcccggacgatcttcttgaagaggtcttctgagtcttgctgatgctctgctctcagggcagacagttcttcctgtgagacgggagtgagaggacaggttggacagagccatgcttatagggaccctcatgactaggaagtggcggaactggaattcaaacaaggtctgtttgcttccagagccctggctctcagccttctctgaaccacgcaagactcccgcttcagctccactgcacacctctgcggtgtcaggtaccatgctggggctttctactcgcacagctcactatgggggtgggggagacacgatggcctccatcaaagagcaggaaactgaggcttagagaaggtgaggaggcctggcgtggtggctcacgcctgtaatcccaggactttgggaggccaaggcaggcagatcactagaggtcaggagttcgagaccagcctggccaacttggtaaaaccctgtctctactaaaaatacaaaattagctggatgtggtggtgcacgcctgtaatccagctactcgggaggctgagtgaggcaagagaatcgcttgaacctgggaggcacaggttgtagtgagtcgagatcacgccactgcactccaggctgggtgacagagtgagatattgtctcaaaaagaaaaaaaaaaaagaaaaaaagagaaagggagtaactgcaaaatggcagagctgtctgatcccaaatgacacttgttctctctgctgctgggcaccttcacgctttcctatgggtgtcacccacctcccaccctgaggtattccacctcctacctggatgcgagcagcagtttccctgcggaaatcctccttcagggcagcttcacggcggctcactagcccctccagcagcgccagggtgtcctcgtggctcaggccaccaccacctccctggccaggagccccttgccgcagctccagacgttccagccgcatggcctccttctgccagttggaggaaaattcagcagcaagagcttccagacgccgctccagagagtgtacccgggacataacacgctgctcagcctggaagggcagagagagagccacggagtgagggacccttggatgatagtgcttcccaaagaccaccccgacacagccaacacagaaagaaagggaaaagattccagagacgttccagcataaggccatgcagggccggctggagctcgtgggcaggggctgccgacctctgagctgggtgtgctgggagccagggatcactgggtgccggccacagaggaaggtccctgaggacacagtaccgaagtctgatcccagaggaggaaggaaggtgggccggggagaaggtctgagtgcagggatggtccaggaggaggactggaagctgcaggatggctgcagggggccgtggaccctcctggcctgaagctcactccttccccgcctcctacaggggcaggggagccagggctgcgagttctgtctgtggactctcaatggctttcactccttccctaggtaactatggctaagagacagaataatttgaaaatacgttctttttcctctttagctggatgtcccacagagaaaatggaataaatgtcatttggactgagggtggcatttgatagtgtgtcatgaatttgagaatgttgttggcttaacaacaaaatcattgccaagagaagtgataaaaactgtcaaataaaggccagggagctactgagcagcagaggttctgagttttagaaattctggtttttaaataggcgctacatttgcatgactcaaaaagcacacaaacaggcgggacgtggtggctcacgcctgtaatcccaacactttgggaggccgacgcaggtggattacctgaggtcagaagttcgagaccagcctggccagtatggcgaaaccctgtgtctactaaatatacaaaaattagctggagatggtggcaggctcctgtagtcccagctacacaggaggctgaggcaggagaatcgcttgaacctgggaggcagaggttgcagtgagctaagatcgtgccattgcactttagtctgggcaacaagagcaagactccgtctcaaaaaaaaaaaaaaaaaaaaagcccacaaaaaccagcaaaaaatcctctgccccatcaccccagttgcctcaccaacagcctctcccagaccaggaagctgtttttattttaacttcatgcaaatgttgctaatacaagatatattcatttttttaacttacccttttttacaaaaaagatggttctgaaattgaactgtatttaatgtctttaatggtgaaaaaaggaaaagtcatagatgacatgtcattattttgtaaaataataagatcatggtctggtactcactttggcagcacatataataaaattggaaagaccatggtctggaaagtaatatatacaaaaatagatggttaaacatgtgatgccggctgggcgtggtggctcacgcctgtaatcccagcactttgggaggccaaggcgggcggatcatgaggtcaggagacagagaccatcctggccaacatggtgaaaccctgtctctactaaaaataaaaaaattagctggcatggtggtgcgcgcctgtagtcccagctactcgggacgctgaggcgggagaatcgcttgaacccgggaggtgtaggctgcagtgagcccagatcgtgccactgcactccagcctgggtgacgcagcattccagcatgggtgacttagcaagactctgtctcaaaaaaaaaaaaaaaaaaaaaaaaagtgatactatgccaggtgcagtgactcatgcctgtaatcccagccctttggaaggctgaggcaggaggattgcttgaagccaggagttcaagaccagcctggcaacatagtgagaccctgtctctacaaaaattttttttaaaaatttgacagacatggtggtgtacacctgtagtcccagctacttcacaggctgatgcaggaggatcgcttgagcccaggagttcaaggttacaatgagttatgattatactactgcactgcagcctggacaacagaatgagaccctgtctcaaaaaatttttaaatgaataataaaaatgtaataccaagttaaattcagtgagatgcaagtgcaggtcaaataaccataattagaaaatgaagagttttattaaaaataaagacagggcctcactgtgttgcctaggctagtctcgaactcctggccttaagtgatcctcccaccttggcctcccaaagtgccgagattacagatgtgagccaccaggcttggcttagaggtttaaattgtcagtatcagtacctgtgctcacattgctttctggttatgctgactgcaggctccttgagggcacagcctgggcctgattcatctttagactctggcagattataaaaatggccaccatccctcactcctccctgcagccgcacctctgtcatgtgaccttgtgggctctcttgctgagaggtgaagtctatttccctctccttgaatctggatttggctctgagatttgcggtagccaacagaatgtggcgggagtgacggtgtgctggttctggatcaaggcctcaaaggtctggttgccttggttctctcttgaaaccctgcctgggtgcgatgagaaacagctggggctagcctgccgggtgagcaaagtgcacatggagtacagctgtcctaggcaagggccttgaccagctggcccccagctgacccccccagccaactgcagacagacagatccacacaggcaagtacgagcccagccaagattgcttctcttttctcagaccagaaagaccacccagacaacccacagactcatgaactaatcaaccattgtagttttgagccactgcttttaggggtggattatctttggtaagaggtaactgactgggatattatcctagtcatagaaggtgcccagtaaatatttgtgaaacagcattgaaaaggaacaaagcagacaagataatttgttggattccttttctttctgttttctgtgccttgtaagatggcaactaacagtacgcctcagctttgtgtgtacggtgtgaggcaggctgagggcgcacccaccactttcaccgtcacctaattattgctaagctcttgggagctaccaccctcagagactcacctggaaatgtggcgatgagtctctggcttcccagccctcatccggcctcctgctgtccttcgctgcccaccaggaaaccaaagcagggtggaatgtctgcagcccataggggtagaaataccaagcacctgtgcacaggggagagggtgttaccccagctgggcctccagcaagaggcgcgcgccagggaggatggctacctgatccctgccagtgcttgtggcctgtcccactcgtggagctgtgcccttccagaggcatcagagggatgcaggtgcccccattctctgaggtggcaacttccacccaacaacctcagagcatattcattctcacacccccacgggaatccttcatctttctgtaagtggcaaaacttggagaaaacattttgaatgagttagggatgatccagggtacagcccagaggacctgatggtggttctcagccctgtctggtcgtcagaatcacctggggagattttagtacaaccaggtctggccctgccctctggagagcaagctaattggcctggggtggggcccctgcgtaggtgagtttgtaaagcttcctggtgactgtcatgggccgccatggctgagagtcactgcaacagaaagcaccaccccctctaagagaggctgctcgaggcccagacacgagcaccaagctgcagccacacagagacatgttcattctgttttcagggccatctgtttgatacctgtttactcctgagctctggggcaggtggcaggggagcgggggagggagggctttctgtcctgataaagctccattcgctactcaagcaccagaggttggcaggtgcaaaaggaagctcatgcccatggggcttgaagtccagcatggacatggccttcatgcacacactccccgagcaggtcactgagccccctccacgtgcatctccatgtgatgggttcacagcactgactacagcaaccccacaaggccatggtgaagctcaaattgaactgagataatgcacgggaaagtgctctctgggtacattgctatgcaattataaagaatcactgactgggccgggcgcggtggctcacgcctgtaatcccagcactttgggaggccgaggcgggtggatcacgaggtcaggagatcgagaccatcctggctaatatggtgacaccccatctctactaaaaatacaaaaagaaattagccaggcgtggtggcggccgcctgtagtcccagctactcgggaggctgaggcaggagaatggcgtgaacctgggaggtggagcttgcagtgagtcaagatcgcacgactgcactccagcctgggcgacagactccatcacacacacacaaaaaagaatcactgactgggcgtggtggctcacacctgtaatgccagcacttcgggaggccgaggcaggtggatcacttgaggtcaggagtttgagaccagactggccaacatggcgaaaccccgtctctactaaaaatataaaaattagctgggcgtggtggcatgcacctgtaatcccagctactcgggaggctgaggcaggagaatcgcttgaacccgggaggtggaggttgcagtgagccaagattgtgccacagcactcgagcctgggcaacagagcaaaactccgtctcaaaaaaaaaaaaaaaaagaagaagaatcattattattttaagggtggtgctcagttgccactggatatgaaccagctgttcttgtagcagcaaacacaaaaacgaagctaacttttggaaaagtgttctaccctgttattaataaaagaaatacaagttgaatgatattaagcttataaaacaaactctcaaaaaataataaagcatggtctttaattacttggtgcagtcattaaaattgagctgagagtcacataggcaattcatatgaaactagccaagctgtcaagtaaaaagctgaacacaaaatgtctatataaacaaggaagggctgggtgcagtggctcacacctgtaatcccgacactttgggaggccgaggtgggtggatcacttgaggtcaggagtttgagaccagcctggccaacatggtgaaaccccgtctctactaaaaatacaaaaattagccatgtgtggtgctgcatgcctgtaatcccagctacttgggaggctgacgtgggaggatcacctgagctcagaaggtcaaggctgcagtgagctgtgttcgtgccactgcacttcagctggggtgacagaagaagactttgtctcaaaacaaacaaaaaaccaaggcaggcctgtgctagcgcctgggatgattcaggacagctggtaagtgactggtgtaaaaagaggcacttatggccgggcacggtggctcatgcctgtaatcccagcactttgggaggccgaggcagctggatcacctgaggtcaggagttcgagaccagcctgacaacatggagaaaccccatctctagtaaaaatacaaaattagctgggcatgttggcgcatgcctgtaatcccagctactcgggaggctgaggcaggagaatcacttgaacctgagaggtggaggttgtggtgagctgacatcgcgccattgcactccagcctgggcaacaagagcaaaaactctgtctcaaaaaacaaacaaaaaaggcacttatttccctttgctgcttcattgtttttactttaaagacagctcaagatttaacttcatcttgtaaaaataactccctcatagcagatgtccctgttggagtggaaggaggatgactgctaatgataatgggagggcatcccgcttttcacccaatgttgcggcactagggtgtgctcctgcccagggcggcacaaaagaggctcaggagaggtggggagggccatgcagagatgatccagggtccagggctcaggccctgcccagtcacaggcacaccccacccagtcttgccccttccctgcctgccaaaggtcaccaccctctggtgaacacatctctgtgcctccctctgctctccccatgcaggctcaccatacgtcaggcacgtcagcaagagcagcggcagcaggaaccagaggaacgtcttcagggacgagaagcgcctggaccacgcgggagggcaggacgggggaggcggaggtgtgaggggagctccaggcctccacgttccacccagggagtaccctgagatgttttcctgggtgctgaactagagctaaggaggatagcttgagcttctcactgtgccagggccagcctggacacgtcagagcctttcctgctgggcaggtcttagagtgatgggacaattttgactgaattttactgatgttattaaaaatagtgtggtctttgaaaaactcaaaaatttttatatggacaggtcctctaagtatgcaaatatagaaaaaaaaagtaactccttaaataacaacaaggaacctgtttttggtgacacaaacccatccttgccccttgtttcagtatggccagctgtcccctctgcccggacctggattacggccagagggatcctgacttctgggttccgtgttcttctgcctaaggggcacattctcaaatcctggttctgctggtttagggacttggggaatgaacccatagcatcctcaggcagagcctctttgtggctctgaccatgagtggggaactcggggggttagattgtcccaggcccaagaaggaagatggactttctgggaaaccccacttcttgcctggagtcagtgggcctaccctgcaggaggaaagccatcgtgtgtctgagagccaggcacggctagactagtgtggcgtttagtagaatgtgtccaagaagaaataatctgtgctctggaatcctgcctcgaagggctatcaattcggggagaagaacctgactctgagtccatcctctgtcaggcaggggtgggctttggggaagctactccgtgatcgctaataaaggctccagggaaactggggaaaaccctcagagaatcgaccattacaggttgacacactttacccgtcccttcaccccagggccttgcgatttattggcaagggtggagtctcgctcacctggttaaaacgaagacgtcaaggagggaggcagctgtggtcaggcggtaccaggtggtgccagcccaccagtagagaagtctgaagagccggcctggaagaatgaccatcaagccgaaggctccatatggtgtttgggggcaccgctcctttgtcccgtctgccgtcctccctgcccctaccccacccccacctgccagtatgcctctgtcctgccctaccgggacccaggtccttggatcccacctgcccacaccctctgtcctgctctgcagctactccttcccttccacgcaagggggtccccacagctctgggctcccagtgattattctagaatgacctttccccaatggtcctacagtctctctgcatgggcaggatgcccaactgcagagagatgggtaagaaagcactatcaccaagaatggaagtaactgggcacgggttgcagcccacctggcgaagtggccaccatccagagtaaggagcccgcccgtgagacggcgcttcggagccgcgagctggaactctgctggtccacatccgagtagcctgcggggaacgaggacactggctcagtctctgtcactttcgagcctcttccttcactgtcttctgtgagccaagaccacaagtcacccaccctccttcacatccccacagccccacacaggcccggtgtgcagtaaggaatgaaatgggagctctttgacattctgtttcttctgacagcttcctgtttgcatccctctcctcaccagccacccctcaagctgctgttcagaactaggtgctggggtctgacatgcacaccactcagaatgactgagcacccaccatgtgtgagccccacaggaaagtgctggaatgggcctgaatgcaaggatgttggccttaggttgccatagactcgtggggtggggaggacagacaagtgaagggcagtcacagcccagggcaccaggggccaccgcaggccaggctggggcgcacccagggccgggcatgggaggggcgctgtgcctgccacatgctgccctctctccagctccccggggctccctgcccagccttcctgaggcctcccagcagcctcggatctgctcaggagggaggaagcatcgcctacccacgtagtcgtcctcagaggagtagcccgaggaagagcccaggaagtcctcggtggccttgcgccccacaagcccgctggccctgctgctctctgagccacccgtgcctctcctcctccgcacccgcaggtcctcacctgtgcagggaagaaccaggggctcttctgggcctccaagagcttctgaaaagtggggtctgggcagagaggtgctctgaggagggaatcccggggactgcaggggacactgtgaggagtatctcgcgggaggccgaggaagcaaagccccgggacggagggctccacactcaccccagttggcgtcaccatgcagttcctccagggagctcctgggtgggaaccaggactcgtggaccagcgactcactgtagtaggaggtgtgtgcatcagaggacgggcccagctgtggcgctggggacaggcgcttcatgttgctggatttcctcttcaaggtcctgtgggacaaccatgagggcagaggtagggagcagggaggtgagcccagccaggagcatgaaggaaagccacagcctgcggccctgcctagtgcagggtgtgggttcccttgttgctaggcaactcgcagctgccattcccctgactctcccaatgctggcacgtcctctcctgttctctctgaatctcaccagcagatgggcaagacgggcagcggcagctagggatggagccacattcaaactttacaacccactgaaaccagacagacctgacctggcctcagagctagccaaagcctcagggcctgtcttctgggccccatgcctgtgagccgggcaggacgaccaggcagctgctgccacagcccatttcccagtggcctgaggactgcgcctgttctcagccatgtcgctggccagctgctgaggccggacaggtggtgagacatgcaggcgtggggccaggaaggatggtaaggctgacacgcccgtccagagcagggggggttcctgtgagcccagcctgcagttttggggtttccggcctggcttatggttgaagctgcctctctccacttcctgttttctttctttcctttttttctttttgagattgagatggagtttcactcttgtcaacccaggctggagtgcaatgccatgatctcgctcactgcaacctctgcctgccaggttcaagcgattctcctgcctcagcctcctgagtagctgggattacagctgcctgccaccatgccgggctaatttttgtatttttagtagagacggagtttcactatgttggtcagggtcaggtgatccacctcccttggcctcccaaagagctggcattacaggcgtgagccaccgcgcccgacctaccacttcctgttttctaagcatgagggcagcagccccggctcacagtcggtgggagaagaatgggtgctgtgtgctcatacacatggagcaaggaaggaccccctcgaccggacgggggcccacgtccttcgatttccacccaaggttgcaacaagaaggcagggggatggctggaccacagggcgtgcgggcagtgaccaaaagcttgtggggctgtcaggggccgtggcactcccttgggtccctacctgagaggactgtctttaaacagggtgctctgactcccagccaccgagctccctccgctgctgctgctgccgtcatcgtcaccctgggagtagcgcg

SEQ ID NO: 9451 - DNA, 16951 bp, Homo sapiens
agggtagcagtggtgggcaacgtggatgctggcaaaagcacgcttctgggggtcctgacacatggggagctggacaatggccgaggctttgcccgccagaaactcttccgccacaaacatgaaattgaatctggtcgcaccagcagtgtgggcaacgacattctgggctttgacagtgaaggcaatgtagtgaacaagcctgacagccacggcggcagcctggagtggaccaagatctgtgagaagtccacgaaagtcattaccttcatcgacttggctggtcatgagaagtacctgaaaaccactgtcttcggcatgacaggccatctgcctgacttctgcatgctcatggtgagtgggaggcgccccaaggaggggaggcgtcagcagggctgcttgggtctggttatgtgcaagtctgaaactgttctgagactgaggcctgttggtttggggctttgacatcgggtgaggctggcgagttttgcaggggtgcccagtcctctgagtaatggtcttctcaaggcttgaaccttgatctctcccttacattagactagggaaggtatcctcttggtaaaaaccaggtacccttgaagacctgtcttattttttgcagaggcatagaggagggtttctcctgggccttacttgttaccttcagaaatgttttctgcagaggattgggctactttgaggaggtgacaccaggtaggtagtaccttcagaggggcaggcctggggaagaaacggagaagacagccataggaggcacaggccacagtcgagaggccctgagaggtggcctcctggagcctgggaggaggatcggccagtgcacagcccttgttgagaggctcctgtgtgtctggtactatgtgaggtctgatgatacagcaatgaacagggctgtccagaggctcccaaaaagcttagggtcgagcgtgattaaatttttaagcagctattcctgctcggaacattaaaaacaaccaaaaagtgtttaagcagctcatctaatagattaactgagaaagaaagggagcagagggctctgtgttggatctcattgctaagcttgcctttgtgacccactgatcttcctccctggacagacagtgggagtgctgaggggagcggcaaggcctgtaaccttgtgcacatctccacagctttcacagcaggagtaaggaagagggagggcgggaagggacagagtcagagacacacatgcctcgagtgttccctcggcaaggccttcccaaaacccttccccatttctcgattccttcagctgcctgtattaataaatgtagtaaacataagcatctgttcatagcaaacttgatcaagttgctgcacaaacacaggttctcaagcaaattctccctaaactggagagcagtaaagagaggcagagccgtgtgaacactcgtaggctctctgcctgaggcttttgggacctcagcatgccttcatttcccatttccttcaatgttgcaaagggccatgaccagcttcttgactgggctgaggaaagctgcttgccaggaagggatcttagtggaagatccagagggcgtatttaggggagttgttgggttgatattaagaagggtatagaaactggttgagaataagcatttttccagctgagctacagtgagtaagaccaattaatggaaatatcttcaccctggacaaaatgttacatatatattatctgactttttggttgtgatccaaatgttaacctttctgtagaaaacaatgaaatatttcattatagtcccatggcatttgacttctaggaaaaaatatttaaaatatatagaaaacagccgtagagcactctcttctccaggttgggaagagcaaaagcaagtctgcattgggttggaaaggtggccgaagggcacaggaagacgtcgggaagactgtggaagtgtcctggtggagggagagggaagtgccagctggggtgactcatctaggagccatggaaactcagtgggcgtctccgtgacacactggaatggatagggcactgtgtaaacacatcatggcagcttttctttcaaattttcttctggtttagtatggtacaaaattgtgaaaagtttcctcccagaggcaaccagtgtttccagtttcctgtgtacctgccagagatattttgtactcagatcagcaaatgtgtatatgttctctccctccaattttaaacattcagaaaaggtgaaagaatagtataaccaataccataaatccaccacttagatttagcaatcattaacattttgccatatttatgtgtctatatggtgggtacatatgtgtatatatgttttttatttattttaattttttttttgagatggagtcttgctctttcgcccagactggagtgcagttgtgcaatctcagttcacttcagcctccgcctcttgggttcaaatgattctcctgtctcagcttcccgagtagctgggattacaggcacgtgccaccacacccagctaatttttagtatttttagtagagacgaggtttcactatgttggctaggctggtctggaactcctgacctccagcaatctgcccaccttggcctcccaaagtgctgagattataggcgtgagccaccgtacccagcctgatttaatattttttaaagagacaaagcctcactctgttacccaggctagagtgcggtggtgcgactgtagttcactataacctcaaactcctgggctcaagggatcctcccatctcagcctcccaagtacctaggaccacaggcgtgcacaaccatgcctggctaatactaatttttttagagacgagatcttgctatgttgccaaggctggtctcaaaactcttggcttgaagtaatcatcccaccttggtgcctcccaaggtgctgggattacaggtgtgagccaccgtgcccagccaagtatatatgtttagtttggttttttttttttgtggctgaatcacttaaaaatagtggacatgtcttcatcccagacaaagtcacaatgtagacattgtgacttttcactgctaaacacttcagcatacagctcctaaaagtgaggcctgtctcctactgtttttacaatcaagaaaatgaagaatagttacctaatatcctcaaatatttagtctgtatttatattatttcagatgtttcccaaatatctttcagctgctttttttaagccatgaatcagtcaccagttatcccccactgccttttattttctttctttctttttttttttttttttgagacggagtctcgctctgtcgcccaggctggagtgcagtggcgcgatctcagctcactgcaagctctgcctcccgggttcatgccattcttctgcctcagcctcccaagtagctgggactacaggcgcccgccacgatgcccagctaattttttgtatttttagtagagacagggtttcaccatgttagccaggatggtctcgagctcctgacctcatgatctgcccgcctcggcctcccaaagtgctgggattacaggtgtgagccaccgcgcctggcctttattttctttgagatggagtctcactcttgcccaggctggagtgcaatggcgcaatcttggctcactgcaacctccgcctccttggttcaagcgattctcctgcctcagcctcctgagtagctgggattacaggcaactgccaccacatgcagctaattttttttttttttgtatttttagtagagaaggggttttcaccatgttggccaagctggtctcgaattcctgacctcaggtgattcacccaccttggcctcccaaagtgctgggattatgggcatgagccaccatgcatagctgaacactcacctctttttatgatagcattctatatgcaacttactttttttttccccttaaaagcatattttggagattagtccatatcagtagataaaaatttcttcttttgtacagcacatttcatacacgtgccctgatttatgtaaccagtccttacggtgatatttggaaacatttattgttactggaaggatagtaatagtaataacaggtgcaattgcttaaacacctagttcctgctagttgtgtgctggacacttcatgtgtgttgtgacatttaaacatcaagtgaccctctgaagtggatattgttatctccccattttacagatggggaaactgagggccagtgatgttaagttgaatccactttttgttgttgttgtttatgagacacagtctcgctctgtcacccaggctagagtgcagtagctcgatcatggctcactgcagccacaacctcccaggctcaagtgatcctcccacctcagcctcccaagtagctgagactacagcgtatcctgccacacccagtcaatttttcttttttttgtagggtgggggaaacagagtttcgctcttgttgcccaggctggagtgcaatggcacgatctcggctcaccacaacctccacctcccagattcaagcgattttcctgcctcagcctcctgagtagctgggattacaggcatgtgccaccacgcctggctaattttgtattttagtagagacagggtttctccatgttgttcaggctggtcgcgaactcccgacctcaggtgatccgcctgccttgacctcgcaaagtgctggggttacaggagtgagccaccgtgcccagccttaatttttgtatttttttgtagagacggaggtcttaccaggttgtcctgcctggtctcaaactcctggcctcaagtgatctgccttccttggcctcccaaagtgctggggttacaggcatgagccactgctcctgacttggattcattttgatggctcaggacagttgtttccctgactgggtttatcttttttattgtttgcaagtctcctccgattttgacgccccacatcatcgagtcaggggttaacgtgatttttgcccagcccagctttcatccacatctgcttttgagcccctgtgtccacccagcagcaatctctttctctctcgtcctgacacttcctttctgtgttggggcaggtgggcagcaatgctggcatcgtggggatgaccaaagaacacctgggcttggcactggcactcaatgtacctgtctttgtggtagtcaccaagattgacatgtgtcctgccaacatcctgcaaggtaagtgaagcctccagctagcagcagcccctctgattggggctgtcacctgctgtgccttcaggtggtctgctaccacggctttagcccagaaacttcttttcttttttatttttatttttttattttacaatatgtttatttttattatgtgctctacattgaacacttcagcaaagaaaataattataataatttcaaaatgcaatccctggatccaataactatcctttataatccgttacactggtcagtatctagaaatatatgtagacaaagttagctaatgaataaaataagtaaaatgactaggtaaactataaatttcaagcatgagggatcatgcatgatcagttaagtcactctgccactttttaaaataatattcacatttgcttcaatcacataaacattcattgcaggagttaaatttgactgctgataacaattgaaagctgtgatctttgttagcttaaaagaaaattcagcttaatacaaagacattcaagatgaaaatttcaggacccttgatcagaagctttcaatgtgtgttgctccactttgttgtaggcaagcttcaagtaaggctaagacagaagagtgtttctactgaagatgtgatctaagaattgccttctacagaggcgaattatattctgtagaaactagctagccaccaagatgttaccaataaaggattccttatactagcaactaaccatgtttaaaaggccttagccatttagagtaatatttatgagtacaagcataattggttccttgccttctacagataatcatctataaaatgataaaagcaggcttcaactgtgtttcttctctggggtgagaaggtgcagatacacatgggtgatctactgatttaccttctgaaagtactctttggaagcagctggatttggcttgattgtaggagaatccagtgtccagtttgctgggcagacttctccatgggtttctacatactggaacgccttcaccaagtggagggtttcttccacgcttcggcccactgggaggtcattgacgctcaagtgcttgatgactccattggggtcagttatgaagagacctcttagtgcaagaccagaaccttctaacagcacaccgtagtctcaggaagtttgctcaaatctgacaagagtgggatgttcatgtggtccaaaccaccattatttcttggtgtatttatccaggcaagatgactaaagtgggaatccactgagaccacaacttcacagttcacatcatgaaattccttagctttgtcactaaaagcaacagtttctgtaggaccacgaaggtgaaatccaaaggatagaagaaaagcaccaaattatttccccttaaagtcatcaaggcttaggtctttgaactctccattgacaatggctgtacccttaaaatagggtgcatgctgggcgacagcaggtgcatggtatgaggagctggtgctaaagaattttgcttgactggaaccagaccataatatgtttgtcaagctcgttcttccagaagcagcaagcttgagggctgcagtggcagaaatgccccaaggaatggcactcacatgtcgggcagccgatgctcagagtagccttcccacagcagctaccatcttcagtgcacgcgggcgaaacttcctttgtcttgtacttaggtcttggcctgaatttccatcagcccagaatcttctgctacttcctcccctatttagttcttggtctgaacacagcctagaattatcctcttccttgttccttctggttccaaatgcagaaatcttgagatcctgaatctggcacctcttttcaggtgaccccaggcagaaggagttgggctctaccagctaagctggatatatacggggaagtttggacagagggtctgattaccttttgccaccaaagctttgacacagggttgcaggactaagccttcatgcctttctccctcactgctaaagattgtagaaaagtatccctttgggaagcctcataataagggtctctgtagacttctaaatgtctaagagatcctttttgttggatgagatttttttccaggaagtagtgcattctgagaactgaagtgtgaagtgaattgtttttcttggggaccctcaagtcacatgcttacaggaggcaggtcgtctagacacaagagaaatctgccaggtttcagacgcagaaccctagaaaagaggccccatctgtgcttttcttactctagcagcacccaaagttttgatcctcctttttgcttctccaggcattgtggcatttaacactggtccatctatctgtctgtctcctgcttgcatcagtaatgagtggacccatcttgctcttaaagcctggccaaagagaaggctgtgtccccctaattctgttccattgcaccctttaagaaaccctgaagctgttacagcgcctgctgaagtcaccaggctgccggaagatccccgtgctggtgcagagcaaagatgatgtgattgtcacagcctccaacttcagctctgaaaggtaacgcgtggggagcgcacacttcagacaggcacccttgcaggcaggaccacagtgagtgatgggcctggaatggctgtcagtttgggcataaggtctcatgaaaacaccacatcaacacctctccctattcagagatcggaggaaatagaagcttccaatcttagcgcagggtctcccaagccagcattgttgcccaggggtaatatcacgtaacccagattgtgaggtgctggcattcctggggttggcatcccggctgagacttcagtgtccttatctgtgaaatgggaataacattcccttccctgtagggctcccgtgaatgttggaaatgaagtatgtagagcacttaatgccctgcctggctgatggatggtaaatacacagccatttttgtaactcagttttttatactgttgttcctcaaaagctcactaatcagatcagttttggcatttactcattaatgtattctttcattccataaatatttattggatgtttgttctgcgagactcttcatctagatgttgaggattcagagttgaattgaacacaatccttgtcctcaaggtgttcagctccttggtgagagatgctctctcgataatggtgaactctactaactctgcctgtttgcccagagcttggtctatagcgccaggcccagagcagcctggctttttgcctatgcctctgccctgatgtgatcttcagtaccatcagttagcctgcagagggggcacatttcagacagccccatttgagcttgttgatattcttgagtgcctattctgtgcaggcactattctaggagctgtggggaatgtgtaattcgtgatctcaaggattttaattcagtcaccctgaataggagcaatagaggccatttacaggactctgatgaaaaatcagatgcagtcatgtgtaatagagaaaaagctctccaggaactcagaggagtcaagagtgtccacccaggaaggatttcatggaagaagtggtatttgagatgagctctgaagggtgagagggcctggtagttgcataaaagggaaagaattcaggaaggaaggtcagagtgagcaaatccacaagggcagaaaagttccaaagttttaggagaagggagagttctctggtgtggctggaatataggaatttgcgagaagtgaatctgcagagatggctacaagcccaagccaaagggctgtgagtgttgggagagggatttggggtatcttctctgtggtggaaaggcggttaaggattttaagcaagcatgcgtgtgttttaggaagaagcagtcatgaggttccaaactagggcagtggtggaggacagagaggagaggacaggtgtcagagacagaactgagtgagagaagaaggcctcagagtagggctggccaggagcttgctaggtcagggcaaagaggtcaagcccttggaggcaggtgagggagaggtggagtcatgaatagtggcatctgctcctcgagccctgttgctgcccctggtctgtgtcagggcaggacctggtctcctgagtgcctctctccttttttccttcctcttctccctctgcttaggatgtgcccgatattccagatctccaacgttacaggcgagaacctagatctgctgaagatgttcctcaacctcctctccccccgcaccagctacagggaggaggagcctgctgagtttcagattgatgacacctactccgtcccggtaagtggctctgggcgggtagctgggtgggcacttcctacagtggcatcagggggtgggtctgtgctggggatgcacttatgaggccagggtcttctccttggcagggtgtggggacagtggtttcggggacaacactgagaggcctgatcaagctgaatgacacgctgctgctgggcccagaccccttgggtaacttcctgtccattgctgtcaaatccatccatcgcaagcgcatgcctgtcaaggaggtgcggggtggccagacagcatcctttgcgctgaagaaggtgagtagcgatgatactgaacgctcccctcagactccatcatgctaggctcttggccagatgccctgctcacccactctagtcctcatggctgctctgcaaggtcgggattactggcttcatttttacagatgaggaaactgaggctcagagcccagggacttgcccaagacacacagcttgtaagtgctagagcgaggaatgcctccttctaagctccgttcctccctctggtgcctgagcagggtggcctgagctcagtggtgaggtcaaataggagtatccctgctgtgcaaggatccttctacataggaccattgggatctgcgccacatcctcttcccattcagccttctatctcctggggtttggggtgggttgtagttcaggggtcacctacctttacccaccaactaaattaaccaggaatagtaggactttcttccccacagtggtcaggtcatgcccacctgttgttccccctgaatgcttgcctgcctttgcttcctcatgcgtccttcatggccgagcagctgaagtgctgattcccgcatgaagccttcctgacccccagtagtagtgttgagtcttcccatggagcactgagggtgctcgtgctgtccaccctagaaggcctgtggtccagttggtgaggaaaccaggcagagttggggtggtccctatccctagaaagactcttggtccctgggaccaggggtgaaaccagaaggcataattgtccctgagggctggggctccctctttctttcagatcaagcgctcgtccatccggaagggcatggtgatggtttccccacgtttgaatccccaagcctcctgggagtttgaggccgagattctcgtcctccaccaccccaccacaattagcccgcgctaccaggccatgggtaggtgtctaaggccctgccagcccaggaggccgtcgtgttagctcccctcagaaggtgttccagcaacccaggccccctagttccagctgcagctgggtggtaggcctccttcctgtttagtgatgccgttccttctgttctacccatgagccgcagtgttgattccttcccacaaacactgagggctgggctcttgagacccagacctgtcctcagggacctcacatgcaatccttcagcaaggtctgctgaacgctgctatgtgcccagcggtgttgctaaggtgctgggaacaaagatgaagtagatgggcaaggatccttccccgcagaagcccacagtccagcgaggaggtgcatgtgcagtgtgctgtaatcccaggaactgggacccttgtctgcccagggcctgggggtgggggatgacgggtgggcattagctggaggaaaaggtgggagatggtaaggcaggatcagagccaagaacaggcttcacgggggtctgtagccccagagataagcccccacccttccacagcttaagcgtatttcatgctttcactcactgcctcccgttgtcctgaagccaccaggtggctccagcctatcctgacctctggcttccttgacagtgcactgtgggagcatcaggcagacagccaccattctgagcatggacaaggactgtctgcgcactggggacaaggccactgtacacttccgcttcatcaagacccctgagtacctgcacatagaccagcggctggtgttccgggaaggccgcaccaaggctgtcggcaccatcaccaaggtatggccaggacagaccttgcctgcctccaggaagcaccaggggccactcctgttctgtgaccctgagtgcagggcagaggtttagtcactgccatgggagagctggacccactgaggtgtggcctcggtgccatctctctactcccttagaggtatcctgtggcctcctgtcctgggcagtggtggtgaccatggagaggagaaggtagggttagggtatgatcttcctccatagaaaactggtgacagaatgtctgggcccagccaggctcagcctccagggtgctgtcacaggttcctatggcctcactgggaccatgtctaaggtctcctctcagagcagaggtctggttggagtaagtgcagggggttatgggcgtgagttctcttggggcttaagctgttggtgtatcctggacacttgcccactgcagaccttgcccctggtcttggaggggcatttgatagaggggtttgacccctgctccgtacaaaggaggtactggccccagcctatctgagatcttggaatcagtctttggctggccttgcctccagaaaaggcccccatccatggtcaccctggggctacagatgtccttgaaggcctgcatgctcctgggactgctgagtttggccaaggctgcagcaaacactgtaatgtcctctgggactcactgggcttcttttgtgctttgtatgagatagaacttgggccacaagggaagatttcaagtcagttacttctggccaaactccagatgtttccagctgaggagacattcacttggtctcttcgggaggccctgagttaacacttgccctagacttgttacgggggcagcagcagcgtgctggggctggagctgcagcatgctctgaggagtctccaccagcttagcaatcaggagatcccggagctccacttgccaggctctgtgcaggctctgggctctgggggctggactgagcgggaggtgggagcaaggttcaccaatttctctgcaggaatagtagctgcagcagagaacaggatggagcctttctgggctgggcagaggcaggaagtgaggcatgagtccagggccatagcagtcctcagccactgagtggggatgagaatgcctcttcatccccactgcctcctgtcacagccttcctgccatctgccttgccctgaactggcaagatcaaggaatgaggagtctgtgggagaagggggctgagggtggggggtagccaagccagtgccactgccccgcagctccagcctcagcctctctccatggctcccacagctcctccagaccaccaacaactccccaatgaactccaagccgcagcagattaaaatgcagtcgacgaaaaagggccccctgacgaaacgagacgaggggggcccgtctggtgggccagcagtaggagcacccccacctggagatgaagcctcctctgtaggggcagggcaaccagctgcgtccagcaatctccagcctcaggtgagcacgggcccctcgcagcttcggcatggtggtgggggctgtggcttttactctgattcggtgagggtgacatgtaggcaagcctcaaacctggctagagggtctcctccacagctctggcactgaagtgctcctaagaatgaggcatttgtctctagaagctataaggcagtgcttccaaatcagggaatacagcccacctgaaaccagtttaattggccctaactagcatttggttttaatgaaataaaatagaacagaaaaatgtcgaagcttccctttcatagtaagattaagtattgcaagtattgctggtgtgagtgtccaagtgatatatgtgtgcactgcagtccagcaggtttgagagacactgccttagagggtcctcctctgtcccctccctgacgtgcacacatcctgaaggggaggtggctttgggatgtgccagtgcgcctcttactcggcatctcctgccagctgtctcccacaggcactctctcctggcgtgatgaaggcctggtgccccttgcacccctctccccagcatctttctccattgtcccctcattggaaaaggaggctatgcctggatctgtctgtccattctgttatctgtctcccatgggtctttcctctggttcgttcgcttcctttctctctctcctgctctgctttgtgcttctctgaacggccgcttctcacaccctcatcatgtgtgtcctacccaccctgtaaggaaggcagggcaggcactggctccattttagagacagaggggaggtgctgcatgcagagtgacccagtaaattcctggtcaggctagggtgaggaccacgcagcctgctcacgcatcttccgtccctgtctccccgctgctcagcacctctgctctctggccctgctcctgatgggccagtgcttctcaagctccttctctctctttcagcctaagcccagcagtggaggccggcgacgagggggccagcgccacaaggtgaagtcccagggggcctgtgtgactcctgccagcggctgctgaaccttcccctggcccaccctcaccacccaaggggtcatcatctctggccaccactccaccagatgggcagagcagctatgaccgccacccagccctcccgctcaggccacagccggagcctccgcattgcccccacccccattttccaggggggttgtaatttataagctgacgaaggtagccagacttccggaggactgaccatctctcactgtcctccccaccttcttcctcactcacacattttttgtacatctgggcccttagtttttattctgtttattatatgtctctgtctctctctattgtgtgtgtgtgtgtgtgtgtgtgtgtgtgtgtgtgtgtggtgcaggagtgccacccccagggccctgtcaacctctcttttctcctccatggctgtctgcctgcgtatctgtctctgagaatcctcggggcggtcaggggatgtcaggaggggaaggagccgccctccctatcttgctgctcctcttggcactcaggggcaccttccatggagccagaccgggtggaggggcttctgggatttggtgtctgctgctgccagagcaggaacccccagtctaggacttgggcattttaacagggagaaagtagtggcttcccttttctctctctcctcctttttccctttaagcccacagattcaggtcatgccaaaagctctctggttgtaacctggagacatgtggaggggaatggcgatgggattataggactctccccatctcgggccctgaccctgacccttgccaccaacccaaagacagctggtgggtttccccttggagacaatcctgcgtttgcctgggccggccctggctgccctcagctttcgctgatctgcccggcctggagcctcccatcaccccgcttcttgttgggcctcaggcactggttaccagaagggggtctgggtctgctcaggatcatgttttgtagcacctcctgttggaggggtggagggatgttcccctgagccaggctgagactagaaccccatcttccctgagccaggctgagactagaaccccatcttccccaccacgccacccctgtggctgctacaggagcacagtagtgaaggcctgagctccaggtttgaaagacccaactggagcgtggggcgggcaggcaggggttagtgaaaggacacttccagggttaggacagagcatttagccttctggaagaacccctgcctggggtgggactgtgcaggccagagaaggtggcatgggcctgaacccacctggactgacttctgcactgaagccacagatggagggtaggctggtgggtgggggtggttcgttctctagccggggcagacacccagctggctgggtccttcctcagccttgcctcctcctgtccccaaccctttcctttcctcctgcttgcggactgctggtcccctctccttccctccttccagctgtttctagttaccacctacccctggccgtggactgatcagaccagcattcaaaataaaagtttgttccaagttgacagtgtggtgctccctgcccagcccctccaggtggaggtgctgccacgggaacgcagttgctctgcctgccctggggcccctggcgacagctgggagcagggcagtgctgtgaggagcccagctttcccagtcaggcaggcatggcttccgtgttcaggctccctcaccagctggtgacacgggacaagcttacaaaccttctctgaacctcagttttctcatttacaagaggcaaagccatccatcaccttgtgtggattcagagaatgtgaggccctggggtgtcctacacaagggaaaggcttgctcagtgagcggtctgcacaccgttagccaccctgccacctctgtgccctgggcaggctccaaaggaaagctctggctgggactgccaggagtctcacacgctcctgttgacattcccagcagccgcccctgaggtcgatgtttgttctgtttttctttttcttttttgagacggagtctcgctgtgttgccaggctggagtgcagtggtgtgatctctgctcactgcaacctccgcctgccagtttcaagtgattctctgcctcagccttctgagtagctgggactacaggtgcacgccaccacgcccagctaactttttgtattttagtagagacagggtttcgccatgtcggccagggtggtcttgatctcctgacctcatgatccacccgcctcagcctcccaaagtgctgggattacaggtatgagccaccgcaccgggcctgttctatttttctagttaagggaactgaagctcagagaggtgtcaccagcaggtgttcattcccatgccagccttgccccccggcttttcccaggcaggctcctgcgtgcccactggctccagcctggtcctctgtctcttggctgcttcactcctgctctttgtcccgactctggccctgcttacaggggccactacctgctggtgcctccataacaagcgtctggcgttgagacccctggcatggcaggggctttggggtctggtttccacaaggcttagccatggcagaacctcgttttattttaactctttgcccctacaaacaaacagcagtacttgccagaaccattcttgggattcaggagctcgggcgactgccttggcctctggccgcacccaggagggtggggttggatctgtgtagttgccaggcccacacctgccagcagggggctgactggatccatgctttactgtgtttaatgggggtaacaggggtccctacagccctcccagctaaacatttggaacaaaacaccagcccttttgtagtggatgcagaataaaattgttaatccaatcacctccaatggcaaggcctga

SEQ ID NO: 9452 - DNA, 1139 bp, Homo sapiens
gtgactctggagcctcttccagggcgctttccacaggcttcccaattctcagtttccttgtctttatccttcatggtgctgagctccgcacaagccagaattgggtcttcctcgacctctgacaagtagcagagactctggtgcttctggtcactgcctgcacgcccggtggtccagccaccccacctgccttctccctagagacttctcccagtctcgctctagctgtgtccctttgctgacatgtgctcgttcatcgagggccccaacgaaccttgatggaaaacctttcccatgtagaccccacctatgttctttttttttttttttttttttttgagatggagtctcgcgctgcctcccaggctgaagtgcagtggtgcaatcttggctcactgcaacctctacctcccaggttcatgcgattctcctgcctcagcctcccaagtagctgggattacaggtgtgcgccaccgggactggctaatttttgtatttttaatagagacggggtttcgccatgttggccaggctggtctcgaactcctgacctcaggtgatctgtccacctcggcttcccaaagtgctgggattacaggcatgagccaccacgctcagccaaaaggatttttcttttcttttcttttaataatagagacagggtttcaccaagttggccaggctcccacctacgtcctgatggcgcttgcactgtctgtccccacggtgcacactgtgctgccacatcttggtaagatgatgataaaatggtaagtgtctgctgggaccgggctccttgtatacctcatttatattattagaagcaaggtaggtatcattactcccatctacaagggaagaacctggacactgaggcaatgggtaacttgtccacagtccccagcctgtaagtgccaaagccagggtttgggctcagctctgacaggctgtagggcctgggtctttctactcaggcataaagttttccagttgtttcaggaatgtattgaagattctagttgtgtgtcctcagctagaatcttttttagcctcacacatgcgcaaaacaaggctgtatacaaacttgttacacaacaaatatttgttagcaaactaacaaaatagggaggaggagggca

SEQ ID NO: 9453 - DNA, 1249 bp, Homo sapiens
ggaggaggtagcctggcaaatggcaactgagggagcaggggcctagggtcgggttcaggactcatacacagtggagctgacctggctgtgctaggttcttggaagtcctggctgaactcagagaactggttcttgggccatgccgggggtgcaggcaagtaagcctgcatgtgggtgaaaggtagccccagcagcaaggctgtaaggaaaagagggaatgagcacttagtgtacacctaccgtgtgccacaccccctccatatgttgcctcattctggccactccgcagcctctggtggtgcctcatgcccactttgcagaggatgagccacaggttctgatcaggtgctggaacaaaccacccttcttaagtgagtcccccacgaacttagaatttgagactcactcattggccaggctcaatggcctctgttctgctatcaagaggctgctgggatgttacccatggcagggatagatggggaagtcaccatattcaaaacaatcatgtgttgaaacacctccccagcttctgatctaccggtagtggcagcggaagcaaatacagcaaatctgaaacccgatgcctacagaacaggggtgtgaaatgtgacgccagaggcccccacacagaagtgggtgtggacagccacctgcctgtgagcaaccaggggaagctagcttggtgccgagtttacacagtgaatgttaaaaagacttcgaagctggccccagtgtattcgcacacagttgagaaaggccagggaggataacaagggctagaatatagggtcagctccctacagttgctgtaaccccctgggcagctccctttacttctctgagcttcagtgacctcctctgtaagtgaggataacatttcccagagtgaggattaaataacattatgcatggacctgcccatagacaatgacctagcaatggctcagtgagtgtcagtgatgattatccccaagtaaaataaatttgaatttaaaattttaaaaatggtcatttttgcatccattgtcttgagccaaatgggaaacggtttggttcagcctctaagcccctgcgggtaggccctgggtctttcagccctgtgtctgctggtacgcctggggctcaggaaatgcacatggtgtgttaaaaccaagtttgaatttgtcaaatcccaagtcaatccaggatgttcatttcttaaatgatacagtgagacaaagtttttttgaagaggaaaaagaaaaaa

SEQ ID NO: 9454 - DNA, 1249 bp, Homo sapiens; identical to SEQ ID NO: 9453

SEQ ID NO: 9455 - DNA, 1248 bp, Homo sapiens
ggaggaggtagcctggcaaatggcaactgagggagcaggggcctagggtcgggttcaggactcatacacagtggagctgacctggctgtgctaggttcttggaagtcctggctgaactcagagaactggttcttgggccatgccgggggtgcaggcaagtaagcctgcatgtgggtgaaaggtagccccagcagcaaggctgtaaggaaaagagggaatgagcacttagtgtacacctaccgtgtgccacaccccctccatatgttgcctcattctggccactccgcagcctctggtggtgcctcatgcccactttgcagaggatgagccacaggttctgatcaggtgctggaacaaaccacccttctaagtgagtcccccacgaacttagaatttgagactcactcattggccaggctcaatggcctctgttctgctatcaagaggctgctgggatgttacccatggcagggatagatggggaagtcaccatattcaaaacaatcatgtgttgaaacacctccccagcttctgatctaccggtagtggcagcggaagcaaatacagcaaatctgaaacccgatgcctacagaacaggggtgtgaaatgtgacgccagaggcccccacacagaagtgggtgtggacagccacctgcctgtgagcaaccaggggaagctagcttggtgccgagtttacacagtgaatgttaaaaagacttcgaagctggccccagtgtattcgcacacagttgagaaaggccagggaggataacaagggctagaatatagggtcagctccctacagttgctgtaaccccctgggcagctccctttacttctctgagcttcagtgacctcctctgtaagtgaggataacatttcccagagtgaggattaaataacattatgcatggacctgcccatagacaatgacctagcaatggctcagtgagtgtcagtgatgattatccccaagtaaaataaatttgaatttaaaattttaaaaatggtcatttttgcatccatggtcttgagccaaatgggaaacggtttggttcagcctctaagcccctgcgggtaggccctgggtctttcagccctgtgtctgctggtacgcctggggctcaggaaatgcacatggtgtgttaaaaccaagtttgaatttgtcaaatcccaagtcaatccaggatgttcatttcttaaatgatacagtgagacaaagtttttttgaagaggaaaaagaaaaaa

SEQ ID NO: 9456 - DNA, 1249 bp, Homo sapiens; identical to SEQ ID NO: 9453

SEQ ID NO: 9457 - DNA, 1249 bp, Homo sapiens; identical to SEQ ID NO: 9453

SEQ ID NO: 9458 - DNA, 522 bp, Homo sapiens
gaaaattggggtgtcttaccggaagtgagaatggaggctggtcaggcagaaacatcctgcatccaccattgcgacctgctaagacttgtgggctggtcattccgccactatgacctgctaagacctgccggctggccagctgagccatgtgttctgctatgcatcatcccttcgggtcagccccgtgaggtagagtttgttatgatccctattttgcagatgagaaaactgaggcttagggagacacagtcacttgccgaaggtcacactgttagcaaatgtcctcaaatcccaaatcagcttgacctgaagcccagaatcttaaccacatgctccactgccttacagcaatcagcaaagagtttgaagaggatgcctagggagcttggatggaggacaggctggcagaggagactggaggcagaggatgggagtaggaggcgggcgccacactggcagagaggagggatcctaagacatagagctgtggtgtgctaaagcccggctctcaacgcactgtca

SEQ ID NO: 9459 - DNA, 303 bp, Homo sapiens
atcagccgggcctggggtgtggtcaggctgtggttaagagcccagaccttgggaggccaaggcgggcggatcacttgaggtcaggagatcgagaccagcctgaccaatatggtgaaaccccatctctactaaaaatacaaaaattagccgggcgtggtggcgcatgccggtaatcccagctacttgggaggctgaggcaggagaatcgcttgaacctgggaggcagaggttgcagtgagcctaggtcgtgccactgcactccagccttggacacagagcaagactgtctcaaaaaaaaaaaaa

SEQ ID NO: 9460 - DNA, 303 bp, Homo sapiens; identical to SEQ ID NO: 9459

SEQ ID NO: 9461 - DNA, 522 bp, Homo sapiens; identical to SEQ ID NO: 9458

SEQ ID NO: 9462 - DNA, 303 bp, Homo sapiens; identical to SEQ ID NO: 9459

SEQ ID NO: 9463 - DNA, 522 bp, Homo sapiens; identical to SEQ ID NO: 9458

SEQ ID NO: 9464 - DNA, 522 bp, Homo sapiens; identical to SEQ ID NO: 9458

SEQ ID NO: 9465 - DNA, 303 bp, Homo sapiens; identical to SEQ ID NO: 9459

SEQ ID NO: 9466 - DNA, 522 bp, Homo sapiens; identical to SEQ ID NO: 9458

SEQ ID NO: 9467 - DNA, 303 bp, Homo sapiens; identical to SEQ ID NO: 9459

SEQ ID NO: 9468 - DNA, 2127 bp, Homo sapiens
cagagacaccgcggaaccctgcagatgctgtggccgacccggcagtgcgggccagagcccctccgcccccatagccacaattcagtagtcgtagggtaggtttgagctactaagcaaataccacactaaccactttttcgataattaaaagaatcatttgaaatattttttttaattgaaaaagatattttaatttcagctcttttattctgcaggtgtattattctgcatgtttttaaatgatataaaacatttatatagacaataagcaacttagaaaaaataagattttgcatttctaaaattataattgaaaacaaaatctgacattctctgctaagtcttatctgaatgcttcagataatggtagtgtagtcagtgactaaaatatttttatcaaatttcctctctgtagacgcctgcaggtattgacgtctgtcagatctcgtcacattggctggtgccgcagctgttggagagtatttttctttatgattattttagaaaaaaaattttcttttccacaatgtggttctcttagaagaatgacgtatcttcttttcctcagcgagttggacacattgtgcccagggcagccctgtccttgggcagcgaccgcacaccaaagctgggaggaggctggtccggggggcctgggcagaagacagtgatttgcaggggtggctcccagacaccctgcccagggatgggctgggcaccacctgggggcggagcgtgagctccagacgagctcctgcgtgcgcgtgtgagtgtgtctgcgcccagccatgtgaccccgctcgtcccgtctgaaggactctcctaggaggccaggttgcccctccagaccgctcccaacgtcagggggaaggaaacgttgactttcactgcactttgattcgtctctaaaccatttgctggggattcctgagagcagagctcccagcgggccctgcctcccaagtcccgccgcaaggctacctcgggtgtgtggatgtgcgagggcctcccccgcttgcgaaggggacatgcgtgctggaacctgtcggaactccatgccttcctcgcctgctcacctgctcgacgctggaatcgggacaggtgcaaagggacgcagacgtctgggacagctaaggcccgtgtcaccggagggctccgcacagtcgttctggtttcaacgaataagcaaaactcgggcaagtactgcagctatttggaaatgttttccaaaccacagtctctttagaactaagcctatttgaaacggtcggtgtaggcttactgagatcaggagacagggaggccccgcacatcacacagataaagtcagacaattgtaattaatacttttgctgcctcaagttgttttttaaataaagtactttgaaatgcatgagaatcatgctgcaatatgatcattctagagcaaatatatatatacacgtatatatatttcaagatgaaactaaagcagtttttaaataaattacttgaattttctgtgtatttaaaggaacgactgtttaatgtacttgatgggcctctggtcttgccgtgtctcctgccgctggtggcactttgtagattgtgtgtttgtgtccgggtggcagttgggtacctgctcacgcacggtgtgtctgccaggccacggtgtcccaggatcgcagagggctgactttcaagacttcaagaacattttctggatgtgtggaaacttgagaatggccttgtgaatctcgtgcttggacagggcaagtccgactactgaaagtgctgccagctttgctgcgagccctccggccagcgggagccccgtgggctgggcactgtggcccttcttctctgggggacggcacccctggcttcctcacctcggccgggcgtccgtggcagctcactctatgcaacttgatcctctagcggctttaagactgtagatcccctctctgagacctggctgtacttgtcaggatctcgaggcgcagctcccgtcttagctggtttctccggcttctcgtcctgacgactataaaacagttggaggcaagaaagcagcggatgtggggtggcagtggcctgacccgaatcaagatccgacccaaaccacaccaaatgtgggttcatctg

SEQ ID NO: 9469 - DNA, 342 bp, Homo sapiens
ccatcctgtcctgccaagtgtacatctcgcagatcctggtggcctctgcccttgggggcgtggtcgacgccgtggggactgtccgcgtcatccccatggtggcctctgtgggctctttcctgggcttcctgacggccacattcctggtgatctatcccaacgtgtcagaggaggccaaggaggagcagaaaggcctgtcttccccgttggccggcgaaggcagggccggtgggaacagcgaaaagcccaccgtgctgaagctcacgcggaaggagggcctgcagggaccggtggagacagagtccgtggtctgagccgcactcccgtttacacacattccag

SEQ ID NO: 9470 - DNA, 218 bp, Homo sapiens
agtaaggacaacaaaggccattcagtgccctccacatggccttgccacagtcactgtcagggtatgaacgtgccggaagccagtgccagccagggacaggcgtgactgttgtgtgctcctcggtgacaggagtcggtggctgcacactttgtagactcgtcaagctgtcagcacttcaggtgtttgcaagcaaagcccttcttagtgtgcaggtcagt

SEQ ID NO: 9471 - DNA, 1932 bp, Homo sapiens
cctgggcctcacaaagtgttgggattacaggtatgagccacggcacctggcctggtctcttaactggttccctaagacagctggaaatagagaatgtcatggagcattcctaaccatgggctccagcctggctttcattctgtttctcccctgaaacaacattcctttagtaatattccgaataacagcttcatcagtctgtctaccgaccactcttcaggcttcatcttatatgacctcccaaactgcactaagggttgtattagagaaaagtggataaagttcggagtcaggctgcttgagcttaaatgccagcttcacttaccagccacctgaccatgagtcagctgcttaaccattctttgccacagtttccttgtctatgaaaagggaaatggctcccacctcaaaaagttgttaacattaaattcaatcatgtattcaaagtcctgagcagaatgtctggccatgactgggacttaacagatgttagcatttattattagtatctgtcagtcttgaaatgttctcttcccttggctttcatgacattccacactctcctggttttctcttacctctctggtaatacctgtttgcttatccttctttgtccagctctgggatgttaccattccttcaggcgtgctgttttctccttaggcagtcttacacacactcatgacttccttccattgtcctccacacactgatgaccctaaaatcagtatctccagcctaaacctttccactgagttctagacccatatgttgtactatcaacctggcttgtccatttgaatgtcttccaggcacttcagactctcttctctagactttgctggactttcactcttccccctaaaactggctcctcttccactgaaacatgtatgtcattgagaggcaccaccatccacccagtgcctaagccagaaacctaggaatccttgatacctgttctctctcatcctgcatatccaagcctatcagttttatctctaaattatattttggtaggtttacttctttccttttctcccaccaccaccctgctccaagctaccatcatctcacctggatgtctgcaatagcctcatctcccacagccactctgcaccccctaatctgttctctatagagcagttggaaggagtgatttttgttgtttgttttgttttgttttagacagagtctcactctgttccccaggctggagtgcagtggcacaatttcggctcactgcaacttctgcctcccgggtttaagcaattctcctgcctcagcctcccaagtagctgggattaaggcaccggcccccatacccagctaatttttatatttttagtagagatggggttttgccatgttggccaagctagtctcgaactcctgacctcaagtgatccacctgcctcggcctcccaaagtgctgggattacaggtgtgagccactgcacctggctggaaggagtgatcttaaaaaaaaaaaaaacaaaaaaaaacttgactgtgtcactctgtgttgtctctcctaccttgtatacttccacaacttcccagtgttcttggataaagaccaaaatccttaacttggccaggcgcggtggctcacacctatcatctcagcactttgggaggccgaggcaggcagatcatgaagtcaagagattgagaccatcctggccaacatggtgaaaccccatctctactaaaaatacaaaaattagctggtcgtggtggcgtgtgcctgtagtcccagctacttgggaggctgaggcaggagaatcacttgaacctgggaggcagaggttgcagtgagcccagatcacgccactgcactccagcctggtgacagagtaagactccatctcaaaaaaaaaaaaaaaaaaaaaaattccttaatttggcctacagtagagccctccgtaa

SEQ ID NO: 9472 - DNA, 707 bp, Homo sapiens
cttcctatagcagccaccgtggctgcagttactgtaaatggcaagacggaatcagttccggacattgggttgttttagaaaattgcctgcaagtgtcagggtgataagttaaagctttgtcttttgccctcagaggagctatcccatagtgagtagaagccagagaagctgaccccaggagtccttctttccagcagcaggtcttgagctgcacttctctgtagctacaatccaggcaggaacaagccctaggtacctccggagaggagggcaagagaggaagaatgagttcagctactctagccaccaaactgattatgaattgccctgaaatctgaaaaatttcaattccaatcgtaagtttgttttgtttcattttgttttcttaaattgtatatttgaaagatggcattaactaaagatatatattcaatatagagtggaaaaaatggaatacttgcatagtatcttttacttataggtgatttatgatggggagtggggtggataggttggcagttcccccaagaagttggaaatgaagtttgtcctctgtgagttgaactaattagatccacaagtaatgaaagcagtattgtgttgtagttaagagcacactctagaaccagattgcttagtttcaaatcctggttctgccttttattatctgtgtactttgggcaagttacttgccctttgtgtgcttc

SEQ ID NO: 9473 - DNA, 279 bp, Homo sapiens
ggactctgaaaacattagaatggtttaatgtgaaggattagcagcagcacatggcaacattgtgcatcttatattaactatccaaatatatcaagcgtcatttgctatatataaaagtcatcaaattaggcactgtgggggatacggagttggcatactagcctggcctcttaattaattcattaattagcttatttatttttgagataggtcttgctctattgcccaggctggagtgcagtggcatgatgatagcttactatagcctcaatctcccag

SEQ ID NO: 9474 - DNA, 1118 bp, Homo sapiens
gaagcagctcaacgtaatctacctgccactgggcaactagctaatgaccctccacagtgatgctgtattgaggacttggtgttgatctctaccgctggtcagttgggcactcagcggtggctctagccaggtcagctttggtgagtggaagtccatgttgctgagccatgcataacctccatccctgtcaccatggctactttgttcatgagcccactgtggaatgacagcagtggctggagaaagaggctgactagtatcacagaatgggctctcctatttccttgatcattaaaatacctctctgctaagatcacctgttggtgagcattcacatgggacacaaatatcttcactataaaggcccagatagtaaatatttcaggctttgtggactacatattgtctctgttacatattctccttttcttctctcccctctcccttctattttccttcttctttatagccctttaaaaacataaaaaccattcttacattgtgtgctatagtttgctgacccccagcttacatgttaaaaaatgcaagattcatttaagtgaaaattgtattgggaaggaatccacatttccagataatgagggttgaggaaggcactgcatttattttaattataaattgggatttaaatctaagaaaacatgaataaagcacccaaaggtattataaaaacacacacttatgtatatgtgtctatgtgtgtgtgtgtgtgtgtgtaaagatacacacacatacaattactcaataaataattacaaatcacctaatattttataagtttattaaccaaagttactggcacaaactcagatgcctactaggacctggcagataaaagggcatttttgaagtggttaagtacacagtagtaactgaactgcttatatgtcagtaaattcaaacgttagcagaatgactttgccagactttgtgaggactgagtaaaacatggttccaaacatatatgtggcccctgggtaatcagtttttatgatcacctgtaaaagcagaggcttgtttctaacatctatacttttaagaaattctttttttctcttaccctggtcataagaaaaaagaaaaaaaagaaaaaagaa

SEQ ID NO: 9475 - DNA, 328 bp, Homo sapiens
attttctagaaggaagaatgcaggcaaaggcatggaaatatgaagtcataagaataggatctatgaaggcactggtgtatatgcagaatagcaaataactcaatttggctgacacaaagggtcagagaaagcaagcaataactgagaaaggcaagtataagcaaaataattgttaccctccaatgccaaggcaagatttggacttaaatctttaataagcacagctgaagtttttgatattaagtcgacatgatcacttctgtgcattagattataaaactaggtataaaactgatataatatgtaggcgtgaaggcaggggccaaag

SEQ ID NO: 9476 - DNA, 267 bp, Homo sapiens
cccagcagtttgggaggccgaggcaggtggatcacgaggtcaggagatcgaaaccatcctagctagcacggtgaaacccagtctctactaaaaatacaaaaaaaaaaattagccgggcatggtggcgggcacctgtagtcccagctactcgggaggctgaggcaggaggatggcgtgaacccaggaggcggagcttgcagtgagccgagattgcgccactgcactccagcctgggtggcagaagcgagactccgtctcaaaaataaa

SEQ ID NO: 9477 - DNA, 142 bp, Homo sapiens; identical to SEQ ID NO: 5400

SEQ ID NO: 9478 - DNA, 184 bp, Homo sapiens; identical to SEQ ID NO: 5421

SEQ ID NO: 9479 - DNA, 183 bp, Homo sapiens; identical to SEQ ID NO: 5243

SEQ ID NO: 9480 - DNA, 193 bp, Homo sapiens; identical to SEQ ID NO: 5245

SEQ ID NO: 9481 - DNA, 153 bp, Homo sapiens; identical to SEQ ID NO: 5246

SEQ ID NO: 9482 - DNA, 193 bp, Homo sapiens; identical to SEQ ID NO: 5539

SEQ ID NO: 9483 - DNA, 150 bp, Homo sapiens; identical to SEQ ID NO: 5248

SEQ ID NO: 9484 - DNA, 122 bp, Homo sapiens; identical to SEQ ID NO: 5588

SEQ ID NO: 9485 - DNA, 166 bp, Homo sapiens; identical to SEQ ID NO: 5608

SEQ ID NO: 9486 - DNA, 268 bp, Homo sapiens; identical to SEQ ID NO: 5616

SEQ ID NO: 9487 - DNA, 1090 bp, Homo sapiens; identical to SEQ ID NO: 5631

SEQ ID NO: 9488 - DNA, 1483 bp, Homo sapiens
ttttgaacaagtaatatgttcatgtggtttaaaatgctaaagttacaacattatacatagttaaaaaaaatctgtcttctaagtagatactccattgtcctctgtagggagaattggagttactagtttcttggctgtcattctatgcatttataaacagttgcatttttttccccttatttttactagcatattatgtatactagtttatactttgcatttcccatgtaatatagaatcttgagagattattctatactgtaacataaaagagcttccttgaaaagatattcttaaaatagaatattccataaaatattctataaaatactgctttgaatatttgcaccactatctttttttctttttttttttgagatggattctcgctctactgcccaggctggagtacagtggcaccatctcggctcactgcaacccccacctcccaaatctatgatctctttcatatttgcttacttttctattagattgttgatccttcctcttactgatttatagaagccctttgttaggtgcattagctcattgaggtatgagttgaatgtatccagatttataaattttaaaagagggatttacaaaagtcctctaagtcttgctttaagttaatggttagagctgtgaaaacctaattaagtcatttcacacaatgttctcccatgagaaaatccaaagtttgtttaaaattcaaaatttaccattttaatcattttaagtgtatagctaagtggcattaaatacattcacaatattgtataaccaccaccactttctatttccagaagtttttcatcacccaaactacaactctattaaagtaataactactcatttccttcccgtcctcccagcccctggtaacctgtactctgctttctgtctctatgaatttccctactctagatacttcatataagtgggattacacaatgtttttccttttttgtctggcttatttcacttagcataatgttttcaaggctcatccatattgtaagcatacggaggaataatctattggaatatttttatatagcatattatttacatataatattccatatggaggaataatattcaattttttgtgtacaccacatcttgtttatccattcatctggtgaaaaataatttgggcctaggcacagtagctcacgtctctaatcccagcacattgggaagctgaggtgggtggattgcctgagcccagaagatcaggaccagcctgggcaacatggcgagaccccatgtctataaaaaatttaaaaattagttgggcgtggtggtgtgcgcctgtagttctagctactcaggaggctgagatgagaggatcacctgagcttaggagatggaggttgcagtgagctgagattgcaccatgcactccaacccgggcaacagagaccctgtctcaaaaaaagttgatgaacgcatacatattaaaaaaaaaaaaaaaaaa

SEQ ID NO: 9489 - DNA, 465 bp, Homo sapiens
ggtttccctctcgggctgttgggaataatgctgctgtgaacactggcatacatactgtttgagtccctcttttcagtacttttgtgtgtttacgtaagagtggaattgctgggtcctatggtaattctgtgttcaactttctttttgagatggagtcccactctgtcacccaggctggagtgcagtggtgcgatctgggctcactgaagtctctgcctcctgggttgaagcgattctcatgcctcagcctcctgagtagctgggattacaggcatgtgccatcacgcccagctaatttttgtatttttagtaaaaacggggtttcaccatgttggccacactgatctgtcttctgacctcaggtcacccaccctcctcagcctcccaaagtgctgggattgcaggcgtgagccaccaagcccagcctccatgttcaactttttgaggaaccactattttttttaa

SEQ ID NO: 9490 - DNA, 1516 bp, Homo sapiens
gatttccctgggccattaagaaaagtaccttttaatgtgctcaagaattcagggtttagaaagatttccatccagattggctccttaaagaaaaaagatgcggtgcataatttattttactttcagttatctgctaacgcagctatgcaaaatgactcatttattggggagtgggtggtggcattaggtaaagtcttaccatattgtctattttgactgtttcattcttaatagaagtctacacattgcctgcaattgaggtataattttctttaaagggagtgttgtttcagataaggtagctgcgacctaagaaaggaataattctatattgattttaaggtctttagggaatggaagcactgtcttattaattggaaagtcccaactgatagcactgacatattcatgtgctttctttgcctgcctgctcatctgcagccctgatcacagaaggaagggagaagtagataagaaatagtagttatgaggatgaaacgtgcacatataggagccctctcacgttaggcttggtttggtgtctggaggcacgtgatgagaacagcagtggatctgtgggctcatgtttccttactcctgctctattaggactccagtctgaagggatgatctagtaccaaccaggagatgtttagaagaccgagatgtttcctgaagtattctgagctgtctcaggttgattacgtgctttcttatcttagatggctcctggagagctgtctgggtaatatgctctcccactttggtaattttggattttttgcagatgctttttgtaaaagaacacctatgagtgaggcctatggttttggggtttgcagtgcccaaccagtcaagctggtctttgccttttttgtggttggatatggaaagagtggtcagtagatttcccagtgctgtactcatgccattcagctcatagtcacataggtttccatatttgctagtaaaaataagaaaattcggaaaggggagtaggttggaattgtcaagttgaactgtgaatggtgtggatgagatattctggggagagaatggacagaccaggtttggcttagctactagttgagtgtccttctagctctctgggatttctttctaatctgtaaaatcaccattttgttgaagtaggcttgcctgtcctttcaattcttggacatttcagaacataagctatgtgtttttctggaaaaaaaaaaggatatttgttagaattagaatttacttgttatgaatctaaccttcacacaccaaacccccagctaagacagtaagttgcatatataattgtaataaatactatgtaagtctgaaaggggaaagagaacttgagtttgcgacttttcttataatcttgaagaagtaattcccagacttcagagtgtgtaagaaatcactagaatgctagtttaaaaaggcatggattcctataccccagttacacagttcttatggcctgggatagagcctggaagtctgcatgtcacaggtgaaa

SEQ ID NO: 9491 - DNA, 351 bp, Homo sapiens
acactcccaagccaacagcacaccactaaaaagtcaacgaacaaatatcaagaaacaaagcttcccagttggttgggaatgagaagcagccaggtcttctctcttctgttgcaggtacacgtcacaccaccatggaatcttctcttttgatttagtgagggagactggcgtcttctagatgtgcagtgtatgacaagcttctctcatccttgcatgtctgcagaggtgtgacatggttttgtgacacagcttctagtcttggggggattcattgtgctcaccctttttttcctggccagttgctaactcaaacctgtccccttctgggatttggaaaggattgtttgcagc

SEQ ID NO: 9492 - DNA, 1618 bp, Homo sapiens
tttttttttctctcctctctaaacatttatgatgtatgatacagtgtgtcctggctggatttttcctgttagcaggcagaaagaatccctcctggattccagaataataaatacagtcatgtgctgcttaatgacgttttggtcaacaatgggccacatatatgatggtccaaagcactatactgtacatcatctcattggaaaaccttatgaaataggagggcaactatcatcataatcatcttccttccccccaccaccaacttcagggagtgaggtcctgggaaatgaagggacactatccatgtgcttggatgtctctatcctggttccgtactctttccgctatgatatactgccttctatatatagataaaagttcaattttctttttcacaaatgagaggagaatatgattgagttttagtaaaattgatatccagtaatactataatgtatttagatcaagttagcacctaaatagcaaacctgcttgctctattaagctagtgatttttcactataggtgctaacaaccattacgtagcatctattctctaaaattgttgctatcggtctagcagaggagcagtgcactaatgtgggtgcagatattatagaaaccagaatacatgggtgatgactgttccactcaccatcttctcatatctctggggatctcattgtggagtaaggggcataatgttagtataccttttagagatcaaaggggcaagtcagcatcagctgaaagttgaatcacctcattaaagaattttatatccctttcagggggttgatttggaaaggaaaacagacataagatttgaatgtatcagtgtggctacttgtgaacatactgcattcaactaatggatagaaatttgaataaaatatttcagaagaggtttttcttgtgtgtgtgtgtttttaaaaagaattttgtaatgcacttcttccatgcatatcttatctactcttcagggaatacagaagcagatttacaaatgaagagacagtgtcattctgcttgagggtaatggtgggtgtcataatactctatgaccacgtacatccagtgggagcatttgctaaaacttccaaaattgatgtaagttattgttttatataaataatttcaaacgagtttctccatggaaaccataggattttattttatgataagagccagcaaaccggactctcacaaaactcagatttatagtttgtgaaatggtggactttcatctcctctgtccctgtgctgtttttcttgtggcctgtattcaggtggaatagaatgatcaaaggatgactatattgtctagtgagtacctcctggaaggcttctactacgtatttggcaatataaatagataattagatataaggaattttgagtcatatcctttaattcctttggccaaaggccatttcaaataaaatgtttatttcagaatgcatataaaaagtcagtagtgctgctgggcgtgctggctcatgcctgtagcccaagcactttggcaggctgaagcaggaggatcacttgagcccaggagtagaagaccagcctgggcagcatagtgagacccccatttctacaaaaaaaaaaaaaaaa

SEQ ID NO: 9493 - DNA, 1618 bp, Homo sapiens; identical to SEQ ID NO: 9492

SEQ ID NO: 9494 - DNA, 3532 bp, Homo sapiens
aaatgaagtaaataatgaattggcaaatcgaatgtctttgttttatgctgaggcaactccaatgctgaaaaccttgagtgatgccacaacaaaatttgtatcagaggtaagcattgcctaggcaggtactctgtgttgttatttatgcccctgttggcagacgtgatgtcagcaagcccaagacattaaataccatcttgaaaccaacagactcccagatgtatgtgttgagtcctgacttttttctgaggcccacatgtgcacacctgtccacgtatttgcagtttctctggagggatggtggaaacctcagtgatagctgatggcatggccaaaccaaactctgggttgcgttttctaaccctgccctttctttagtttttgctttctcaattaacagtaccagtgcaggcaaaaacttacaacttatgtcatcctaaattcctttcttttttttttgagacagagtttcactcttgttgcccaggctggagtgcaatggcgtgatctcagctcaccacaaactccgcctcccgggttcaagcgattctcctgcctcagcctccctagtagctggggttacaggcatgtgccaccacgcccggctaattttgtatttttagtagagatggggtttctgcatgttggtcaggctggtctcgaactcccgacctcaggtgatccgcctgcctccgcctcccaaagtgctggaattataggcatgagccaccgcgcctggccatcatcctaaattcctttctatacctcactccctacatgtattccatcaaacagtctcattggctttccctccaaaatactaatatatcatgaatctgaaaacttaagttgctttcttgccaccagccacatcagacttctcatctggattactgcattcgtgtcctgaccattcttacttcctccactcttgccccaatatagtcctttctccatagagcaaccaagtaatcttaaaacataaaccatgttccctccctcctccatgtaaaatgttcccagtgacttcctagtacccttaggataaaatccaactatttcatagcctataaaactctacacctttgaccccctgtctgcattgttgcagttgttcttacattgctggaatgcaggtgcctttcagaagagtcctgccttcgctgtcttgctcatagctgtatccccagtgcttggaacagttgcttagagtctagtgcattatttagaaaattaggagtaggaaccaggttttaaagttgctaatttttcatattacgctaaattttaaattgtgcttaagtaataacgtttgttacttttactttttttgttcttcatatacttctacagaataaaaatttaccaatagaaaataccacagattgtttaagcacaatggctagtgtatgcagagtcatgctggaaacaccgtgagtatcagctgatctttttcactttaacagtgctgttgagatgactgatatttcaaaacatgttcatatatgaacatgttaacatgttttatctggaaggtggaaagtaagtatattccaaatattgaatgttaatatatgaacaaacttaaaataatttggctatttaacgtaacttctggttaagtataaaatagagttagttggtcttcaggtacctcagaccactcagactgactcagactcttagttctcttctcagaacagaagtggtggtggtgttttggtggctgggatgtaggagaagaactttaaagttccttggttatacttaccataaatgttctttttccatatttagtaaagaatcttacccttttgccaaagggctggaattattcttctgtttatccctttttctctcaataattaattgtcactcttttcttttttttttccaacacgaacctgaattctgtttttttttctctcctctctaaacatttatgatgtatgatacagtgtgtcctggctggatttttcctgttagcaggcagaaagaatccctcctggattccagaataataaatacagtcatgtgctgcttaatgacgttttggtcaacaatgggccacatatatgatggtccaaagcactatactgtacatcatctcattggaaaaccttatgaaataggagggcaactatcatcataatcatcttccttccccccaccaccaacttcagggagtgaggtcctgggaaatgaagggacactatccatgtgcttggatgtctctatcctggttccgtactctttccgctatgatatactgccttctatatatagataaaagttcaattttctttttcacaaatgagaggagaatatgattgagttttagtaaaattgatatccagtaatactataatgtatttagatcaagttagcacctaaatagcaaacctgcttgctctattaagctagtgatttttcactataggtgctaacaaccattacgtagcatctattctctaaaattgttgctatcggtctagcagaggagcagtgcactaatgtgggtgcagatattatagaaaccagaatacatgggtgatgactgttccactcaccatcttctcatatctctggggatctcattgtggagtaaggggcataatgttagtataccttttagagatcaaaggggcaagtcagcatcagctgaaagttgaatcacctcattaaagaattttatatccctttcagggggttgatttggaaaggaaaacagacataagatttgaatgtatcagtgtggctacttgtgaacatactgcattcaactaatggatagaaatttgaataaaatatttcagaagaggtttttcttgtgtgtgtgtgtttttaaaaagaattttgtaatgcacttcttccatgcatatcttatctactcttcagggaatacagaagcagatttacaaatgaagagacagtgtcattctgcttgagggtaatggtgggtgtcataatactctatgaccacgtacatccagtgggagcatttgctaaaacttccaaaattgatgtaagttattgttttatataaataatttcaaacgagtttctccatggaaaccataggattttattttatgataagagccagcaaaccggactctcacaaaactcagatttatagtttgtgaaatggtggactttcatctcctctgtccctgtgctgtttttcttgtggcctgtattcaggtggaatagaatgatcaaaggatgactatattgtctagtgagtacctcctggaaggcttctactacgtatttggcaatataaatagataattagatataaggaattttgagtcatatcctttaattcctttggccaaaggccatttcaaataaaatgtttatttcagaatgcatataaaaagtcagtagtgctgctgggcgtgctggctcatgcctgtagcccaagcactttggcaggctaaagcagaaggatcacttgagcccaggagtagaagaccagcctgggcagcatagtgagacccccatttctacaaaaaaaaaaaaaaaa

SEQ ID NO: 9495 - DNA, 929 bp, Homo sapiens
aaagcgttctggaattagatagtggtggtggctgtaggacctggtgaataataaactgaaaatcactgaatcgtaccccttaaaaacacacaaagcaaattgacaaattattgggaggcaacataagagaatggggtgtgaactttggatcagtgcggcctggatatcagctgtgtggtgttcaaatagattgcataacctcgttgagtctcagtcttcccatctgtgaagtagggatcattcctacttcgtagggttggcatgagactccgtgagatgaagttggtgggtcacttggctggggcaggtgtcacggagcgggacctgtgattgttcagccacctactctgtgcccagtgctgtgttggtgaccaggtatgtatgaagtcagtaagccacagtcctgagttatggtgcagaccccacatgcacccagagtcagcttggcaagaccccttgacaccacgtgcgtggagggtgcaggtcggagagctcacctccatggattccgtagagctttgaggcgtatccacaaagtgtccaggagaggtggcgtcgcctccacttgatagaggaaaaagcagagatggaggcagccagaagcatggtgcagtggtggggtttggtcattaatttgataatcacatggaatacaagctaatgtttattgagtacttactgcctgcctgctactgtaactaagtgctttactcctgttatctcatttaattctcaaagcagccctgtggcactgaggtggctggagatggagggatgtgtggctgccatgtgtttgccaggaagcagcaggatgggagtgagggcacagacagacacacatgccaggacttgtttgcacgaagctgaggaatgggtgcccatcattcattatactcatctctctgttttatgtatatttgaaaaaaaaa

SEQ ID NO: 9496 - DNA, 1590 bp, Homo sapiens
atgattatttgaatttgtacttccctaagttctagtgaagttggacatattttcgatacattattgtcctttctgctttcctctgctgtaaattaattgcatgttcgtatcctctgctgtaaattaattgcatgttcatatcctctgctgtaaattaattgcatgttcgtatcctctggtgtaaattaattgcatgttcatatcctctgctgtaaattaattgcatgtgcgtatcctctgctgtaaattaattgcatgtgcgtatcttctgctgtaaattaattgcatgttcgtatcctctgctgtaaattaattgcatgttcgtatcctctgctgtaaattaattgcatgtgcgtatcctctgctgtaaattaattgcatgtgcgtatcctctgctgtaaattaattgcatgttcatatcctttgtccagtctccttttgggtggattatctttttcttagtgatttgtagattttctttttttcactctagagactaatcctttgtcagttcatgctattttatactctgcttttttcagttagcagcgtattgagaatgttcttctatgccaatgtatacatcattttattgacattccattgtggagatgggtcatttatttatttaggtggacgtgtaggttgtttgcacttttgcattagtaggaacatgactgtgtgtcggtcagctgggctatgctctggtactaatgaccctccaaatcttagtggtttgcagcaatgaagaattctttgtccctcaagtgacatgaccatcacctgttggttgtggctctgctctatgacgttgtccctcagggagccaggctttcagagcagccccatctgagacattgctggtctcatggcagagggaaaaaagatggtggaacaacataattctatttctgtttttcctctttagagacaggatattgctgtggcacccaggctgcagtgctctggtgctatcatagctcactgcagccccggaatcatgggcacaagtggtcctcctgcctcagcttcccaagtagctgagactataggtatgcaccaccacacctgggtaatttttactttttatatttttcgtagagatgggggccttgttatgttgcccaggctggtcttgaactcctggcctcaagtgttcttcccaccgcagcctcccaaagtgctgggattacaggtgtgagccactggacccggcaggaacaatatacctcttaaagcttctgctcagacgtgggaatggctatgtggtgcgtgtcagttcccctcacattgcattggctgaagcaaaccctggggcccaaccagtgttggcggggttagaagtagacccctcccatagggaggccagggagggaggattttgagccaagaccactcaccacgtgctgtgatgagcagttgcctccccctcctttcgtgtcttcgtgcctcctcacgtattcttacaagtagaattgctacattaggaatatgcatatttgtaaagtatttactatttattatgtcagctaggttttaactgtcactgcatttgctgtgaattataggtaattattcatcctgatgacc

SEQ ID NO: 9497 - DNA, 614 bp, Homo sapiens
tgaggcaggagaatcgcttgaacctgggaggcggaggttgcagtgagctgagatcgtgtgccattgcactccagcctgggtgacagagcaagactccatctcaaaaaaagaaaagaaaaattttatatatgtaatttaacttgcaaatgacaagtttttaatattttcttatttttgcttgtgtttgtttatgcctttaattccttgaccagaatgactgtagctaaattaactttggtagtgtattttcattcatttactatctcgtcatttccatgggtcaggagtctgggcacaccttagctgggtcctctgttgagagtctcaaaaaggctaaccagaaggtatcagccaaattgtatttatttctagaggttggagtgctcttccaagttcatggagttgttggcagaattcagttccttgcaactgtgggactgaggtagccattttcttgagggctaatggccagaaattgctctcagctccttagaggctattcacagttccttgccacgtggccttctcacagaccctctcagagcacagcagcttttacatcttcaagatcatcagcaggagatctgtctcctgctgcttctctcttacctcga

SEQ ID NO: 9498 - DNA, 456 bp, Homo sapiens
attatagtccttaaaaatccactttcataagctaaaagtgattttgtctttgggctgactcccctcatggttgcaaataaagtagcatgctccttctttttagtgggtaggaagtgctgttaaagtaagaaaactttttggaagtttcctcttaactccttgacctgaattggcaatagtttccaatagtcaggttaaaaatacgtaacttcaagtggaattatttaactaatttttgtatttccaaaattttacaaataacacatcttgaaactttttcataaagcaatcggatataatttaaaatatgtactaacatgcataatattttagacttgccacagcctaaaatcagataatcacacaaggtttttaaaagtatgaattaggtataaaagagagtttagacctttgactatgtactattttacctttttttttttttttttaaagaga

SEQ ID NO: 9499 - DNA, 101 bp, Homo sapiens
tggcggggcgggagggcgggccaggacaggaatgcagccgtttttaacagttctgcctacaaccaacaggttgaatgaggaattctagaaactgtctgctg

SEQ ID NO: 9500 - DNA, 1392 bp, Homo sapiens
ctcaggatatgagtcttcctatgtcattctttattctttcacatttatcatcttttatgatatgtacatatggcaaagattattcccactttacagatgaaggagcatttacttgaaaggatgcagaataaaaacagatataattcatatactaaaagacatttcatagacaatggcacaatgatttctccaaaccgccctacattatatgatttcttatcttcattgtgttgctgattaaacagtttaagtgatttatccagttcctcttaggaagtggcagaatagaaagctatgatggttaattttatgcgtcagcttgactgagccatggggtgcccaacatttagtcaaacattattctgtgtgtatctgtgaggatccttctggatgaaatcaacgtttgaattgttagactgaataaagcagatttctctccccaatgtatataggctcatcctatttgttaaaggtctgaaatgttgactctctctcttagtccgttctatgttgctgtagagagatatgtgagactgggtaatttataaggaaaggtggtttatttggctcacagttctgcaggctgtgcaagaggcatggcacaagcatctgcttctggaaagggacgtcaggaggcttccaatcatggcagcaggggaaagggagaagggcaaggtatgtcacatggcaagagaggaagaaagagggagagaagaagaaggtgccaggctctttttaaccatcagttatcatgggaactaatagagtgaggactcagcacaaagtcatgcataaaggatctgacccgtgatccaaacagtttccaccaggccccacctccagtgctggggatcaaaattcaacatgagatttgaagaggacaaatatccaaactatatcaccctcccataagtaagaaggcccctgtgagtgcagtgtgttttagtttaagctactaggaagggtgaggcaggaggattacttgttgagcctagaggttcaagtcctgcctaggcagcacagcaagaccccacctctaaaaaaatggagcccctcctgtcatagtacaccagatatttcctgtcttctaacttgaactgaaacatccatattttaaaagtctcaagtttacaaatcttgggactttttagcctccatatcacacaagccaatttcttataataataataatgatgatacaatatataggatatatattgtttctgtttcactaaagaaccctcatacagaagccaagcagcatcctctctaatgtcaaaatcagtgctttttctgtgacattcatgctcctctacgaatgaaaacctggctcacattttatgctaatactaaggagtaaaaaaacatccattacttattgtataccataaa

SEQ ID NO: 9501 - DNA, 1301 bp, Homo sapiens
gcacagaagtttgaaaagtaaccctgggaagaaatgaatgaggaggaaagaaaatgtacaaatgagaaggacccagtggatttgccatacaaagtaccttctgagtaaaaccactaaattactcttggggttgtggggaattgagatgccactggccatttttgccttagttgaccttttttgggtcagtagtttctcaaacatcaatgtgcctaaggatcaccttgtgaagtgtttaagattcagagtcctgagccaccctgagagatctggattaaacagatcaaggaatctgcatttttaactagcactgccagtgagtttgtggactacactgagaaaatggctctacaatgttaaaagcacacatattttttaaaaatgacaaatgccatttcaaacagacttacaacccatttatataggctttccctgcaaagtacacagttttgacttataatcaagcctacaggaatgtaactagcaagggagcaaaggagagcaggagattagaagaagaatcaataaatggctcaaatatgtgaaataaccttgttcatccaaaatacaggatggtggtgttctaactgtcatggtagggttcaattgcctcagttcaattttaggaaaactggcaatcatttcttttgcaggggacacaatttctgaagaacccagtcctttaaaaaaaaaaagtgagctatcaccccactattgagagagcagctactagctcagtattggtgtacccagatgggcagcctagcagccaaggaaacagaggtgggtctatgtactgtcccatcctgtcaccctttatcagtgagaccttgggcagagcctggctcatttcctggcatacaataggctttcctcatctgcacaatgaatatgcatccacatgttaaaccaccacttcgcaaattataaggttgaaatgagataataaagttgtgtccttagcatacagactggaccgttgagaagtgcagggggaaaaaatcagaaagatctgattttagatttttagtcaaactaagcaagaggacttaacatttcagcaactcagtttgcaccatgaatttctccactcaatttatgagaattactattcccttgaagtgatttaaggaatcattaagatttggcagtggaaggtgggactcatttcatataccattacccttaagccgagactactataagaagttggtacatggccaggcacggtggctcacgcctgtaatcccagcactttgggaggccaaggtgggtggatcacttgagttcaggagctcgag

SEQ ID NO: 9502 - DNA, 90 bp, Homo sapiens
atgagataccatctcacaccagtcagaatagcgatcattaaaaagtcaggaaacaacaggtgctggagaggatgtggagaaataggaaca

SEQ ID NO: 9503 - DNA, 2152 bp, Homo sapiens
tttctttatatatatatatttattatactttaagttctagggtacatgtgcacaatgtgcaggtttgttacacgtgtatacttgtgccatgttggtgtgctgcacccattaactcattatttacattaggtatatctcctaatgctatccctccctcctccccgcagcccacaacaggccccggtgtgtgatgttcccccttcctgtgtccaagtgttctcattgttcaattcccacctatgagtgagaaaatgtggtgtttggttttttgtccttgtgatagtttgctgagaatgatggtttccaatttcatccatgtccctacaaaggacatgaactcatccttttttatggctgcatagtattccatggtgtatatgtgccacattttcttaatccagtctatcattgttggacatttgggttggttccaagtctttgctattgtgagtagtgccacaataaacatatgtgtgcatgtgtctttatagcagcatgatttataatcctttgggtatatacccagcaatgggatggctgggtcaaatgctatttctagctctagatccctgaggaatcgccacactgacttccacaatggttgaactagtttacagtcccactagcaacttcagcaaagtctcaggatgcaaaatcaatgtgcaaaaatcacaaccattcttatacaccaataaaagacaaacagagagccaaatcatgagtgaactcccattcacaattgcttcaaagagaataaaatacctaggaatccaacttacaagggatgtgatggacctcttcaaggagaactacaaaccactgctcaacgaaataaaagaggacacaaacaaatggaagaacattccatgctcatggataggaaaaatcaatatcgtgaaaatggccacactgcccaaggtaatttatagattcaatgccatccccatcaagctaccaatgactttcttcacagaattggaaaaaactactttaaagttcatatggaaccaaaaaagagcccacattgccaagtcaatcctaagccaaaagaactaagctggaggcatcatgccacctgacttcaaactacactacaaggctacagtaaccaaaacagcatggtactggtaccaaaagagatatagaccaatggaacagaacagaaccctcagaaataatatcacccatctacaactatctgatctttgacaaacctgacaaaaacaagaaatggggaaaggattccctatttaataaattgtgctgggaaaactggctagccatatgtagaaagctgaaactggatcccttccttacaccttatacaaaaattaattcaagatggattaaagacttaaatgttagacctaaaaccataaaaaccctagaagaaaacctaggcaaaaccattcaggacataggcatgggcaaggacttcatgtctaaaacatcaaaagcaatggcaacaaaagccaaaattggcaaataggatcttattaaactaaagagcttctgcacagcaaaagaaactaccatcagagtgaacaggcaacctacagaatgggagaaaatttttgcaatctactcatctgacaaagagctaatatccagaatctacaaagaactcagacaagtttacaagaaacaaacaaacaaccccatcaaaaagtggacgaaggatatgaacagacacttctcaaaagaagacatttatgcagccaacagacacatgaaaaaatgctcatcatcactggccatcagagaaatgcaaatcaaaaccacaatgagatatcatctcacaccagttagaatggcgatcattaaaaagtcaggaaacaacaggtgctggagaggatgtggagaaataggaactgcaggttcactttcattttaggattattgaggtataatgtacatgcaacacgtattactatgtctaatgtacatttcaatgagttttaacaaatttatattgtcatgtaataatcaccatgatcaatttacagaacgtttccacttgctgtagtttggatgtttgtcccccaaagtgcacgttgaaatttgatccccaatgttggaggtggggcttaatgggaggtgttggggttattggagtggatccctcaagaatgccttggtgccatcctcgagg

SEQ ID NO: 9504 - DNA, 961 bp, Homo sapiens
gaggctgaatgagttggctcaggattatcttgtccatgttaaaaactgcatttgaacccaggtctgtctgactccaaaaaccaaatggtttcctcctcatcatttcagaaactagcaaaatgcttttatgtacaccatttgattttagaatcctgtacattttctaaatgagggcagtgagactcagaaaaatagtatgtccaaagtgactaaggtagtagagagaagattcaaaaccctatcccaggccttctgactcccattccaatgctcttccagctacatcacagatcttttgagcaccccctgaaatcgcacccaaactgatgttcacgtggcagatacctcaccaccctctcctcacctcacgccttaaattctcatcttcaggcccctctgtctcaggtgacactcatgctggtaaaatgtcctgtgttttctgccggaagtagccagcccagacaggtgcaggagaggtctgctctagagggatatattgcacagccttgtccctgcctcccctatttcaccgctgatttctgatgggacccccagatgagtatcatccccctcctggccatttacaacctgcaaagcaacttgagttcctccagagggactggcagctctgtcaagaccatatacgattttcccatgaaaagtacctttggaagaagatttcttcatcagtttccaccatgaacacagatggacacgtttctccagaatcttctctgctgtcatttgctgtcctgcaaagaacctgggattgtccttcgctgggacagagagggtcaggcccaggctggaagttctcggttccactggtgctctcggggggaaaaatgtggtatttttccttttgtcttttctgcttttgtttttcgctttgctccaagctgatgattctctcagcttctgtcttcatgatgccaacactaccaaatgaaaaataaataat

SEQ ID NO: 9505 - DNA, 630 bp, Homo sapiens
ggaaatataaaaatccctgatctttgaaccaataaacacagaatacctactgtgtgtcaagtactatgctaggtgttgaaacaaagataaagtactatggaaactattaacacacacacacacgcacatgcacacatgcacaaacctatattcttttttcttaccaaaaccccaaatcatgctcctaattttgaatgtgcaggtgcggtttttgggtgattgggttctttctttgctatgtgggaggactccggtagagtagggtggttgtcagacagaagcagatgctcttatcagccgggcattctcaccccaggtagaagtgctgtctgtggtcgctcagcagatcctcagcatccaacaagccatcattcggaagctaaagacattcatctttgaagggactgagctctctctgaacccaacctgcgctgtgttcatcaccatgaaccccgggtatgctggcagggctgaactgcccgacaatctcaaggtaaatgccagcagatatacatgtggggtgtgctttttagaatagaaacctctgggccgggtgtggcggctcacacctataatcccagcactttgggaggccaaggtgggcaaatcacctgaggtcaggagctcgag

SEQ ID NO: 9506 - DNA, 8371 bp, Homo sapiens
ctctgtttaaaaaaaaaaaaaaggagggaggagccaagatggccgaataggaacagctccggtctacagctcccagcgtgagcgacgaagaagacgggtgatttctgcatttccatctgaggtaccgggttcatctcactcgggagtgccagacagtgggcgcaggtcagtgggtgcgtgcaccgtgcgccagccgaagcagggcgaggcattgcctcacctgggaagcgcaaggggtcagggagttccctttctgagtcaaagaaaggggtgacagacggcacctggaaaatcgggtcactcccacccgaatactgcgcttttctgatgggcttaaaaaacggggcaccacgagattatatcctgcacctggctcggagggtcctacgcccacggagtctcgctgattgctagcacagcagtctgagatcaaactgcaagacggcagcctggctgggggaggggcgcccgccattgcccaggcttgattaggtaaacaaagcagcctggaagctcgaactgggtggagcccaccacagctcaaggaggcctgcctgcctctgcaggctccacctctgggggcagggcacagacaaacaaaaagacagcagtaacctctgcagacttaaatgtccctgtctgacagctttgaagagaggagtggttctcacagcacgcagctggagatctgagaacgggcagactgcttcctcaagtgggtccctgacccctgacccccgagcagcctaactgggaggcaccccccagcaggggcacactgacacctcacacggcagggtactccaacagacctgcagctgagggtcctctctgttagaaggaaaactaacaaacagaaaggacatccacaccaaaaacccatctgtacatcaccatcatcaaagaccaaaagtagataaaaccacaaagatggggaaaaaacagaacagaaaaactggaaactctaaaaagcagagcacctctcctcctccaaaggaacgcagttcctcaccagcaacggaacaaagctggatggagaatggctttgacgagctgagagaagaaggcttcagacgatcaaattactctgagctatgggaggacattcaaaccaaaggcaaagaagttgaaaactttgaaaaaaatttagaagaatgtataactagaataaccaatacagagaagtgcttaaaggagctgatggagctgaaaaccaaggctagagaactacgtgaagaatgcagaagcctcaggagccggtgcgatcaactggaagaaagggtatcagcgatggaagatgaaatgaatgaaatgaagcgagaagggaagtctagagaaaaaagaataaaaagaaatgagcaaagcctccaagaaatatgggactatgtgaaaagaccaaatctacgtctgattggtgtacctgaaagtgatggggagaatggaaccaagttggaaaacactctgcaggatattatccaggagaacttccccaatctagcaaggcaggccaacgttcagattcaggaaatacagagaatgccacaaagatactcctcgagaagagcaactccaagacacataattgtcagattcaccaaagttgaaatgaaggaaaaaatgttaagggcagccagagagaaaggtcgggttaccctcaaagggaagcgtgtcagagtaacagcggatctctctgcagaaaccctacaagccagaagagagtgggggccaatattcaacattcttaaagaaaagaattttcaacccagaatttcatatccagccaaactaagcttcataagtgaaggagaaataaaatactttacagacaagcaaatgctgagaaattttgtcaccaccaggcctgccttacaagagctcctgaaggaagcactaaacatggaaaggaacaaccggtaccagccgctgcgaaatcatgccaaaatgtaaagaccatcgagactaggaagaaactgcatcaactaacgagcaaaataaccagctaacatcatcatgacaggatcaaattcacacataacaacattaactttaaatgtaaatggactaaatgctccaattaaaagacacagactggaaaattggataaagagtcaagacccatcagtgtgctgtattcaggaaacccatctcacatgcagagacacacataggctcaaaataaaaggatggaggaagatctaccaagccaatgaaaaacaaaaaaaggcaggggttgcaatcctagtctctgataaaacagactttaaaccaacaaagatcaaaagagacaaagaaggccattacataatggtaaagggatcaattcaacaagaagagctaactatcctaaatatatttgcacccaatacaggagcaccaagattcataaagcaagtcctgagtgacctacaaagagacttagactcccacacattaataatgggagactttaacaccccactgtcaacattagacagatcaatgagacagaaagtcaacaaggatacccaggaattgaactcagctctgcaccaagcggacctaatagacatctacagaactctccaccccaaatcaacagaatatacatttttttcagcaccacaccacacctattccaaaattgaccacatactgggaagtaaagctctcctcagcaaatgtaaaagaacagaaattataacaaactatctctcagaccacagggcaatcaaattagaactcaggattaagaatctcactcaaaaccgctcaactacatggaaactgaacaacctgctcctgaatgactactgggtacataacgaaatgaaggcagaaataaagatgttctttgaaaccaacgagaacaaagacacaacataccagaatctctgggacgcattcaaagcagtgtgtagagggaaatttatagcactaaatgcccacaagagaaagcaggaaagatccaaaattgacaccctaacttcacaattaaaagaactagaaaagcaagagcaaacacattcgaaagctagcagaaggcaagaaataactaaaatcagagcagaactgaaggaaatagagacacaaaaaacccttcaaaaaattaatgaatccagaagctggttttttgaaaggatcaacaaaattgatagactgctagcaagactaataaagaaaaaaagagagaagaatcaaatagacacaataaaaaatgataaaggggatatcaccaccgatcccacagaaatacaaactaccatcagggaatactacaaacacctctacgcaaataaactagaaaatctagaagaaatggataaattcctggacacatacactctcccaagactaaaccaggaagaagttgaatctctgaatagaccaataacaggagctgaaattgtggcaataatcaatagcttaccaatcaaaaagagtccaggaccagatggattcacagccgaattctaccagaggtacaaggaggaactggtaccattccttctgaaaccattccaatcaatagaaaaagagggaatcctccctaactcattttatgaggccagcatcattctgataccaaagccaggcagagacacaacaaaaaaagagaattttagaccaatatccttgatgaacatcgatgcaaaaatcttcaataaaatactggcaaaccgaatccagcaggacatcaaaaagcttatccaccctgatcaagtaggcttcatccctgggatgcaaggctggttcaatatccgcaaatcaataaatgtaatccagcatataaacagagccaaagacaaaaaccacatgattatctcaatagatgcagaaaaagcctttgacaaaattcaacaacccttcatgctaaaaactctcaataaattaggtattgatgggacgtatttcaaaataataagagctatctatgacaaacccacagccagtatcatactgaatgggcaaaaactggaagcattccctttgaaaactggcacaagacagggatgccctctctcaccactcctattcaacatagtgttggaagttctgcccagggcaattaggcaggagaaggaaataaagggtattcaattaggaaaagaggaagtcaaattgtccctgtttgcagacgacatgattgtatatctagaaaaccccattgtctcagcccaaaatctccttaagctgataagcaacttcagcaaagtctcaggatacaaaatcaatgtacaaaaatcacaagcattcttatacaccaacaacagacaaacagagagccaaatcatgagtgaactcccattcacaattgcttcaaagagaataaaatacctaggaatccaacttacaagggatgtgaaggacctcttcaaggagaactacaaaccactgctcaacaaaataaaagaggacacaaacaaatggaagaacattccatgctcatgggtaggaagaatcaatatcatgaaaatggccatactgcccaaggtaatttacagattcaatgccatccccatcaagctaccaatgactttcttcacagaattggaaaaaactactttaaagttcatatggaaccaaaaaagagcccgcatcgccaagtcaatcctaagccaaaagaacaaagctggaggcatcaccctacctgacttcaaactatactacaaggctacagtaaccaaaacagcatggtactggtaccaaaacagagatatagatcaatggaacagaacagagccctcagaaataatgccgcatatctacaactatctgatctttgacaaacctgagaaaaacaagcaatggggaaaggattccctatttaataaatggtgctgggaaaactggctagccatatgtagaaagctgaaacttgatcccttccttacaccttatacaaaaatcaattcaagatggattaaagacttaaacgttagacctaaaaccataaaaaccctagaagaaaacctaagcattaccattcaggacataggcatgggcaaggacttcatgtctaaaacaccaaaagcaatggcaacaaaagacaaaattgacaaatgggatctaattaaactaaagagcttctgcacagcaaaagaaactaccatcagagtgaacaggcaacctacaaaatgggagaaaatttttgcaacctactcatctgacaaagggctaatatccagaatctacaatgaactcaaacaaatttacaagaaaaaaacaaacaaccccatcaaaaagtgggcaaaggacatgaacagacacttctcaaaagaagacatttatgcagccaaaagacacatgaaaaaatgctcatcatcactggccatcagagaaatgcaaatcaaaaccacaatgagataccatctcacaccagttagaatggcaatcattaaaaagtcaggaaacaacaggtgctggagaggatgtggagaaataggaacacttttacactgttggtgggactgtaaactagttcaaccattgtggaagtcagtgtggcgactcctcagggatctagaactggaaataccatttgacccagccatcccattactgggtatatacccaaatgactataaatcatgctgctataaagacacatgcacacgtatgtttactgcagcattattcacaatagcaaagacttggaaccaacccaaatgtccaacaatgatagactggattaagaaaatgtggcacatatgcaccatggaatactatgcagccataaaaaatgatgagttcatgtcctttgtaggtacatggatgaaattggaaatcatcattctcagtaaactatcgcaagaacaaaaaaccaaacaccgcatattctcactcataggtgggaactgaacagtgagatcacatggacacaggaaggggaatatcacactctggggactgttgtggggtggtgggagtggggagggatagcatcgggagatatacttaatgctagatgacgagttagtgggtgcagcgcaccagcatggcacatgtatatatatgtaacctgcacaatgtgcacgtgtaccctaaaacttaaagtataataattaaaaaaaagaaaaaagatcttgctgtctagactgttgcgatctagtaaagggaaataaaaaatttaatgaaacaaataccaacgtgctaaaagtctatagtagaagtacaaaagatgcatcacaaaagagtgtataattctctttggatgatgaataaagatcaggaaatataaaaatccctgatctttgaaccaataaacacagaatacctactgtgtgtcaagtactatgctaggtgttgaaacaaagataaagtactatggaaactattaacacacacacacacgcacatgcacacatgcacaaacctatattcttttttcttaccaaaaccccaaatcatgctcctaattttgaatgtgcaggtgcggtttttgggtgattgggttctttctttgctatgtgggaggactccggtagagtagggtggttgtcagacagaagcagatgctcttatcagccgggcattctcaccccaggtagaagtgctgtctgtggtcgctcagcagatcctcagcatccaacaagccatcattcggaagctaaagacattcatctttgaagggactgagctctctctgaacccaacctgcgctgtgttcatcaccatgaaccccgggtatgctggcagggctgaactgcccgacaatctcaaggtaaatgccagcagatatacatgtggggtgtgctttttagaatagaaacctctgggccgggtgtggcggctcacacctataatcccagcactttgggaggccaaggtgggcaaatcacctgaggtcaggagctcgagatcagcctgtccaatgtggtgaaaccccatctctactaaaaatacaaaaattagccgggcatggtggcatgtacctgtaatcccactcagctgctcaggaggctaaggcagaagaatcagttgaatgtgggaggcagaggttgtggtggccggagatagcgccgttgcactcagcctaggagataagagtgaaactccatctcaaaaaaaacaaagcgaaagaaaagaaacctctggaggtacctacctgggggtaaatttattcctccatccccttgggtggaagtgataagagagacccagctacgcccatatccacggactttaggacatggtctaccccctgttactaatgcattctgactggtgccctggaaacttactcagatggaccacttctctctgagaagagaaaagagtcagagagatgcttcaagtggctcctcccatctaggtcaacataggccagtgaaggccaagatagaatttggatccacatttctctctctctttttttttgagatggagtctcattctgtcccccaggctggaatgcagtggcatgatcttggctcactgccacatctgcctcccaggttcaagtgattctcctgcctcagcttcctgagtagctgggactatagccatgcgccaccatgcccagctaatttttgtatttttagtagagatagagtcttaccatgttggccaggctggtctcaaactcctgacctcaggcaatttgcctgcctcggcctcccaaagcactgggattacaggtgtgagccaccagtcccagccacatttctcattttttactgcccagtatttgtaagcaccccctgcatccatcccagccaacagccatattagatcgtcacaagcagctttcacaatgccatgggatagtagaaagcacccaggcatggtgtcaggaagcctagattctagccctggctctagctctaactgggtgactcaggcaagttacttctcctctaagatctaagataataatgcaatagctggtgcatactgaacacttactatgtgccacatactcttgcaagcacttcagttgcattctatcatttattctcatgataactctatgaagagggtaaagttagtctgttttgagatgaaagaatagagatctacaagggttgtataacttgcccatgctagtcggtagcaaaacaagaactcacatcaagatctgtctggctgggcgcggtagctcacgccttaatctgaacactttgggaggctgaggctgttggatcatctgaggtcaggagttcaagacaagcctggccaacatgatgaaaccccatctctactagaaatataaaaattagctgggcctggtgttgggcacctgtaatccccaggtgtttgggaggctgaggcacgagaatcgcttgaacctgggaggcggaggttgcaatgagccaagatcgtgccactgccctccagcctgggtgacagagactctgtcttaaaaaaaaaaaaaaaaaaaaaaaaaaaaaaa

SEQ ID NO: 9507 - DNA, 913 bp, Homo sapiens
ggcatgggcaaggacttcatgtctaaaacaccaaaagcaatggcaacaaaagacaaaattgacaaatgggatctaattaaactaaagagcttctgcacagcaaaagaaactaccatcagagtgaacaggcaacctacaaaatgggagaaaatttttgcaacctactcatctgacaaagggctaatatccagaatctacaatgaactcaaacaaatttacaagaaaaaaacaaacaaccccatcaaaaagtgggcaaaggacatgaacagacacttctcaaaagaagacatttatgcagccaaaaaacacatgaaaaaatgctcatcatcactggccatcagagaaatgcaaatcaaaaccacgatgagataccatctcacaccagttagaatggcaatcattaaaaagtcaggaaacaacaggtgctggagaggatgtggagaaataggaacacttttacactgttggtgggactgtaaactagttcaaccattgtggaagtcagtgtggcgactcctcagggatctagaactggaaataccatttgacccagccatcccattactgggtatatacccaaatgactataaatcatgctgctataaagacacatgcacacgtatgtttactgcagcattattcacaatagcaaagacttggaaccaacccaaatgtccaacaatgatagactggattaagaaaatgtggcacatatgcaccatggaatactatgcagccataaaaaatgatgagttcatgtcctttgtaggtacatggatgaaactggaaatcatcattctcagtaaactatcgcaagaacaaaaaaccaaacaccgcatattctcactcataggtgggaactgaacagtgagatcacatggacacaggaaggggaatatcacactctggggac

SEQ ID NO: 9508 - DNA, 1196 bp, Homo sapiens
agaaactttcccttcctgattctgtgcaagcacggctgtgagcgaacagcctccgtatttcaacaaacatcctacttgtatggtcttaggatctgtttccagacagtcacctcggggctcactctagtcctgaaagcatcttcccatccctttgtgatgttcagtctgttgcgggcattcccctctgacaggtgtccttgccctgctgcttctacagggtggcaaagagcaagggcttcagctcccaagctcagctgcagggcacttaggccccgagtgtgtccccagtgaccctgacttgagggacacactgggcgctgcagccacaaggcactgctcctgtagtcatggtgggcagccagcattgccccaggccacagtgctggtgtcccaggctcctcagggacctgaggacagggccaagtgtgccagtccacaccaggctggccctgccagtccacaccaggctggccctgccagtcaacaggtgcacatacaggtcctgaaaccacctcaggtcaaataagggatttgggggcacacaggttgcattctgcctcttgggaagatgatgcaagggaatgacaggcaggctggttccaacgcattgccaagcgccagctgagcgggctgggagcaggcacattccggtaaccaggacagaagtgggctagtgatacctggtcatgtcttttcccaagacaaaaccaggaagactggcccagcccgtttggtgtgttacaggctgaactgtgcccctccccaaatgtgtatggtgaaggcctaacctccagtacctccaaatgtgacctcacttggagagggggtgtttagagaggtaatcaggttaaaatgaagtcattagggtgggtcataaccccatacaactgctgccctgatatgaaggggaaatctggagacagctgtgtagaaaacaccatctgaacaggaagacagccatctacaggtcaaggggagaggtccgggaccgatcctccctcccagcccaaagcaggaactgaacctgacacctggattgtagacttctggcctccaggacagagacaatatgtgctgctgttgaagctgcccaggcagggttcctctgtgaggcagccccaggggactcagagtgtgccccaggagtcctgtgggaattgccccacccttcctggcacactcctgaatgttctcga

SEQ ID NO: 9509 - DNA, 1196 bp, Homo sapiens; identical to SEQ ID NO: 9508

SEQ ID NO: 9510 - DNA, 709 bp, Homo sapiens
ttagcaactcacttctttaatttcagaatccacagaggtaagtccagcttagaccagggggctgagttctctcaaatgaaatctgtgccaatatttactccaggaaggcaagagcccagcccttcaaggctcctgagatcaggaacggctggtggttaggaggcgctctcctggccgctctagctgtgtggggcaccccctgcatatgtggggcacacgtggcctatgcacaccacccacctacaagcttgggcggctccagtgggaaagacaggagagggaagcaacatttgattgaatctgagccaagagggccagaggctgaggaaggcacccccacagcagcctcctgagcaaacagcacctgggggctctacccagttgggacaaagggcgaggctcccagcaacagtaagggagatggcgtcctctgggagagggtggcctggggtggggtgacagggcttccacgccaccactgcaccctcggcaagaacgagcagatgtggagaagaggaatgccatcaatgcgccccccatctcgggtccctgtgctccccaccccacagttcttcctggagggccctctgcactcctcccagcaggctgctcggctccttgggccgctctgggatcccgtctggtgccactcctgaggtcggcacgtctgcatctgcactggctgcaggaggagaggctccctgcaggg

SEQ ID NO: 9511 - DNA, 1403 bp, Homo sapiens
taatttcaatattttaaatttatttacacttactgtagggcttaatatatggtcaatttttgtaaatgtcctgtgtatgcttgaagagaatgtatattaagcagtcccatggcacacagtttttgtttgcttgtttgagatggagtttcactctttacacaggctgcagtgcagttgcatgatctcagctcactgcaacctctgcctcccgggttcaagcgattctcgtgtctcagcctcccaagtagctgggattacaggtgcatgctaccatgcccagctaatttttgtattttttgtagagacagagtttcactgtgttggccaggctggtctggaactcctggcctcaagtgatccatccgcctcggcctcccaaagtgctgggattacatgtgtgagccaccgcacccggccccatggtgtactgtcctatacgggcctcaatcaggccaattttgttaaggagtttgttcgaatcttctacatccctcccaatttgttccatcattttcagagaaagatatgctaaaacctcccaaatatgattgtgaatttgggtgtttctccttttagttctttacattttgaggccagcagaggaaaaaatggattttttttttaacccacaacagtgttaatacaaaataaggcagggaagagaagccccctcggaagaggtgggacaaacaaaaagcacaaagtaagaaagtctgttaaagcctcaataaatcagtcagtcaattacatttaaatggattaagggctcccagttgacgagcaaaatctgtcaagatggtttatgagataaaatccataggttgtgcataggagccacatccaaaacacaaacccgcacaaaggttaacagcatgcctgctgctcttgaccaagcaccttcagcggggagcagtgaatcgtggttcttgcaccccgcaggccagcctcccttccatcaggacccctgggggtggccagaaaataataggggcacgaggagcccattcattcatattttgaagcggaaccttcacatgttcctgcctgctgggggactctggctggcagactgggaaggtcgcactcagatcagccaggacccgttcggctcacccaggatggaatgagcagcctggagccttctctgcccccaattccaaaccctggagctcctttgagttcaaaaaggtccttcagtttctcccatcaaagggaccacatttcctcttccaagccacactgcacagttcttaaaggagatgggcacagtgccaaagacctaaactgcatctagattttccactagatcaattctagaaggcgtttcagtgactgtggacaggtcctggagacctagacctagggaactgcttctgcaggaggaacgcagctgcagaccatgg

SEQ ID NO: 9512 - DNA, 709 bp, Homo sapiens; identical to SEQ ID NO: 9510

SEQ ID NO: 9513 - DNA, 1403 bp, Homo sapiens
taatttcaatattttaaatttatttacacttactgtagggcttaatatatggtcaatttttgtaaatgtcctgtgtatgcttgaagagaatgtatattaagcagtcccatggcacacagtttttgtttgcttgtttgagatggagtttcactctttacacaggctgcagtgcagttgcatgatctcagctcactgcaacctctgcctcccgggttcaagcgattctcgtgtctcagcctcccaagtagctgggattacaggtgcatgctaccatgcccagctaatttttgtatttttcgtagagacagagtttcactgtgttggccaggctggtctggaactcctggcctcaagtgatccatccgcctcggcctcccaaagtgctgggattacatgtgtgagccaccgcacccggccccatggtgtactgtcctatacgggcctcaatcaggccaattttgttaaggagtttgttcgaatcttctacatccctcccaatttgttccatcattttcagagaaagatatgctaaaacctcccaaatatgattgtgaatttgggtgtttctccttttagttctttacattttgaggccagcagaggaaaaaatggattttttttttaacccacaacagtgttaatacaaaataaggcagggaagagaagccccctcggaagaggtgggacaaacaaaaagcacaaagtaagaaagtctgttaaagcctcaataaatcagtcagtcaattacatttaaatggattaagggctcccagttgacgagcaaaatctgtcaagatggtttatgagataaaatccataggttgtgcataggagccacatccaaaacacaaacccgcacaaaggttaacagcatgcctgctgctcttgaccaagcaccttcagcggggagcagtgaatcgtggttcttgcaccccgcaggccagcctcccttccatcaggacccctgggggtggccagaaaataataggggcacgaggagcccattcattcatattttgaagcggaaccttcacatgttcctgcctgctgggggactctggctggcagactgggaaggtcgcactcagatcagccaggacccgttcggctcacccaggatggaatgagcagcctggagccttctctgcccccaattccaaaccctggagctcctttgagttcaaaaggtccttcagtttctcccatcaaagggacacatttctctctccacagccacactgcacagttcttaaaggagatgggcacagctgccaaagacctaaactgcatctagactttcccactagatcaatctagaaggcgtttcagtgactgtggacaggtcctggagacctagacctagggaactgcttctgcaggaggaacgcagctgcagaccatgg

SEQ ID NO: 9514 - DNA, 638 bp, Homo sapiens
tttttgtattttagtagagacagggtttcaccatgttggccaggctggtcttgaactcctgacctcaggtaatccgcccgcctcagcctcccaaagtgctgggattacaggtgtgagccaccatgcccagcctaatctttattatttccttctttctgctagctgtggatttagtttgttcttctttttcttgttccttaaggtgtgcaggtaacttgtttctttgagatctttcttattttaatgtaagcatttccagctgtaagttccttcttagcactgcttttatagcagcccatattgtgtttttgtttttattggccatgttgtgtttttgttttgttttgttttgttttttaagacggagtctcgctctttcacccaggccggactgcagtggcgctatctcggctcactgcaagctccgccacccgggttcacaccattctcttgcctcagcctctcgagtagctgggactacaggcgcccaccaccacgcccggctaattttttgtatttttagtagagacggggtttcaccgtgttagccaagatggtctcgatctcctgaccttgtgatccgcccgccttggcctcccaaagtgctgggattacaggcgtgagccaccgtgccctgc

SEQ ID NO: 9515 - DNA, 279 bp, Homo sapiens
gacggagtctcgctctgtcgcccaggctggagtgcagtggcgcgatctcggctcactgcaagctccgcctcccgggttcacgccattctcctgcctcagcctctcgagtagctgggactacaggcgcccgccaccacgcccggctaattttttgtatttttagtagagacggggtttcaccgtgttagccaggatggtctcgatctcctgacctcgtgatccgcccgcctcggcctcccaaagtgctgggattacaggcgtgagccaccgcgcccggcc

SEQ ID NO: 9516 - DNA, 283 bp, Homo sapiens
taagacggagtctcgctctgtcgcccaggctggagtgcagtggcgcgatctcggctcactgcaagctccgcctcccgggttcacgccattctcctgcctcagcctcccgagtagctgggactacaggcgcccgccactacgcccggctaattttttgtattttttagtagagacggggtttcaccgtgttagccaggatggtctcgatctcctgacctcgtgatccgcccgcctcggcctcccaaagtgctgggattacaggcgtgagccaccgcgcccggcc

SEQ ID NO: 9517 - DNA, 138 bp, Homo sapiens
ttttttttgagacggagtctcgctctgtcacccaggctggagtgcagtggcgcaatctcggctcactgcaagctccgcctcccgggttcacgccattctcctgcctcagcctctccgagtagctgggactacaggtgc

SEQ ID NO: 9518 - DNA, 265 bp, Homo sapiens
ctgtcacccaggctggagtgcagtggcgcgatctcggctcactgcaagctccgcctcccgggttcacgccattctcctgcctcagcctccccagtagctgggactacaggcgccccacaccacgcctggctaatattttgtatttttagtagagacggggtttcaccgtgttacccaggatggtctcgatctcctgacctcgtgatccgcccgcctcggcctcccaaagtgctgggattacaggcgtgagccaccgggcccggcc

SEQ ID NO: 9519 - DNA, 285 bp, Homo sapiens
agacggagtctcgctctgtcgcccaggctggagtgcagtggcgcgatctcggctcactgcaagctccgcctcccgggttcacgccattctcctgcctcagcctcccgagtagctgggactacaggcgcccgctaccacgcccggctaattttttgtatttttagtagagacggggtttcaccgtgttagccaggatggtctcgatctcctgacctcatgatccgcccgcctcggcctcccaaagtgctgggattacaggcgtgagccaccgcgcccggccaattt

SEQ ID NO: 9520 - DNA, 145 bp, Homo sapiens
tttaagaggagtctcgctctgtcacccaggctggagtgcagtggcgtgatctcggctcactgcaagctccgcctcccgggttcacaccattctcctgcctcagcctcccgagtagctgggactacaggcgcccgccaccacaccc

SEQ ID NO: 9521 - DNA, 129 bp, Homo sapiens
gctggagtgcagtggcgcgatctcagctcactgcaagctccgcctcccaggttcacgtcattctcctgcctcagcctcccgagtagctgggactacaggtgcccgccactatgcccagctaattttttg

SEQ ID NO: 9522 - DNA, 261 bp, Homo sapiens
tcctcccctgacaaatagggataataatgttactgctctattatccacaattatggttataagaaaatatatattttttttcaaataaaatactctaccaaagcctgaggtcaatcatgattctttgagccattcattttccaaagagaactttattgagcacataccatgtgctggaactcaaggtagttgttggcaccatagccataaagcaaggaaacacagaatggttgccctcatggggatcagagcctggcaggg

SEQ ID NO: 9523 - DNA, 131 bp, Homo sapiens
tcacgcctgtaatccgagcactttgggaggccgaggtgggcggatcacgaggtcaggaaattgacaccagcctggctaacatggtgaaaccctgtctctactaaaaatacaaaaaattagccgggcgtggt

SEQ ID NO: 9524 - DNA, 5070 bp, Homo sapiens
ggggccgggcgcggtggctcacacctgtaatcccagcactttgggaggccgaggcgggtggatcatgaggtcaggagatcgagaccatcctggctaacaaggtgaaaccccgtctctactaaaaatacaaaaaattagccgggcgcggtggtgggcgcctgtagtcccagctactcgggaggctgaggcaggagaatggcgtgaacccaggaagaggagcttgcagtgagccgagattgcgccactgcagtccgcagtctggcctgggcaacagagcgagactccgtctcaaaaaaaaaggttttttggttgtgtttagcaactatatactttgccagtggtcttcatcgtaataatcaggtgattaacttatagatgttctagaactcctccacacattctgatgtgattgtatattttcattattcttccttttattaataccttatggcagtcgtagcaaaccacaagccctatgactaagtattcttttcttatactctcttgtcattcagccctgccaccattatctcttacctcaccacctccacaacatccactgctgtggctcatctccctgtcatccccctgaccaccattctgccagctggccggaaagaatctggtgaatcttgactaccaagttatttgctgaatccaggcattttccttgctgtcataacttcatcacttgttatgttctatcctaagatgcttcatctattcagtgcacttttattgctttttggctctgggcagtgtgatgctgggagtgcagtggtgagtaaggcagcttggaagctgccttacttccatgagctgtgcttaaccatgcttagaatgccaggcccagaccacggctttatcgctggtgtttaggcctaagccaagcacaagttggagtcttgaattatgatgaaatctagtatgctcagagtctttgaaggttgaacaactgaggtcatgaaccccaacctggtagattgtagggtaccagctgccgtcattcccaactcattgcttaaaagattcttgtattcctgggagtggtgctaggatgacagagctgaaggggtgatagctgtccccacacctctaggaagatgtggtctgaacccacagatcccctcactgacatgctgcccttcctcctccaccaccacttgctctccagtgttggagtagcatcataactcatccccacaaaaagattagggattcctttttaaggctgaagtgtaccactaaccattttatgtgtatttgttccccacactccaccctataatacttttaagattgtgaagggtcatcattttaataaaaatagctgccagccactttctattttgcttagactggaatcaaagggaaggggcttattatatgtgccaggaagacatttgtttgttgtttgtttgtttcccccaggaaggaattttagggataaaaagaacatcataacagggatgatttggaatagtttacaggtaattctgattagaggcatcttagacacacatgcctttctgttgagcagttttttgcatgctaggaatgatgtgctgacaccatttgcatgctcattttcactggagggtgggcagtggcacttagaatataagagtaaatgtttcacttggatgtctggctctagttcattgtatgaagaaagagggcatggaaatgtattaaataatacatttagatttgaggattgtcttaatttacttactgcctagtctttcctcacattacttcagataattagaaattgttgctattctaaatagtattaccttccacattttgaaggtagagatttctgtctttgttctgctgtatacaatgccagtgtctgacacatagtagaggctcaataaatgctggctgaaggggtgaatcagtgggaaattttagacctagacaccatcttggataaatcttcaggaaatcctgctgtgcctgactcttggatctctcaagtcatccattccagtcggttgccgggcccaccattttcagcaagtggtggttatggcaggtttagtttggctgattcaggtatgtggcatgttgacaagcactatactggagtctgtcaccatggcatttcaaacacatcaacagcattcataggcatagcagtgatcctgatggacatttgggctttggggaaaaacaggaccatatcattacattattaatgtttctcatagaccaacaccatcttctgaattcttaggaagctattcttcttgtagatatatactagatacataaagttttaaccgatacacttgaatttgtatttctaactgattcataatatcagttagcttaaaaacataagaaataggtgaatgatttctgctattgaaactgaagatataaattaataatagctgccatttattgagtccaagctatgtcccaggctctaggtgaagtagtttacaaatatctcagtagatcctcaaaatgatcaagcgtggaagaagtattgtcctcattctgtaaatgaggacatggagactgagaggaataaaataatgtctgcaggatctcccatttaatatgtggtggagcctaagttagaagcctcagactctagcctgcgttcttaacaccacaccatgttcacactttctgtgctaaccagtgaaatgaaacttcatgatgacatggcatataaatgatctgggttgttcatacagtccaaaggatggtagagctagggcagttatttgggtaattttaatattgtaggcagccaaacacattgcatcaggaattatgcagaatccactttgaattgtttttattgtggtaaaatatacataatagaacatttatcattttgaccattttaaaatgtatagttctttactttgactttttttttttttttttgagacggagtttcactcttgttgcccaggctggagtgcaatggcacgatctcggctcactgcaacctccacctcctgggttcaagcgattctcctgcctcagcctccctagtagctgggattataggcatgcatcaccatgctcagctaattttgtatttttaatagagatggggtttccccatgttggccgggctggtctcaaactcctgatctcaggtgatccacctgcctcggcctcccaaagtgctgggattacaggcgtgagccaccatgcccgggctgacctttataaaataaaattatttacatggaaacaattgtaaattgcctttacagcgtgtagccaaagtgaagcatttgtatttgaggctggaagaagggaggatagaggagttgtttgtcatttaaacaataatgtatgtttttctggttgcaaaaaggatacatatactacaggaaactttgaaaatcccaagaaatcatctaaaatcccactactctgagagatatattctgttaacgttttatttcatgtattctttgtctatgtgtatatgtgtgttttatatgatttatatttatttatattttatgtttacttacaaagttggaagccagacctggaaggacttcccctaccatactaaggaaatttaatttaattttgagtataaaggagaggtgctaaaggattttgatcaatgaagtgatagttctagtacccttacggaaagtggattagaggaggctaagaatgaaagcagggaagctggatgtggtggctcatgcccgtaatctcagcagctcgggaggcggaggtgggaggactgcttgagttcaggagtttgaggccagtctgggcaacatagcgagacctcatctctaaaaaaaagaaagaaagaaagaaaaaaaagaatgaaattaatcagggaaatcaattaaagatgatgggaatccaggtaaagactaatttgtgagaatctgaataaggccatgtgtgtggtaggtaagattctggaatatttaggacattgagtctccaggacttagtgactgattggctatagagaagataactcccacatgtgtgcttgggctggctgactgggttgtattactttcaccaaaatggtaatacaaggacaaatagaagattcagaggagacaagacaatcttgttttactttgttgagtttgccgtgatcacaaggggatatctattggccaatgtccagacagtggtctcttgagtaccccagcctagcccttcagcctcagcttgtgccctccgcccattagatctgtgcagccttgccaagctgactttctttcactcaatccagcggtctctggttcaacatcagcaagagatttacaatgtttctgctatttgccaggtacctgggcttcccctcttcaccgcagctcctagccctttgcctagtttaagtctactaagttcccaggctttggctttaatgtcatttcctcagggaagcctcccctgcccactccagcccctcaaccagattgaattacacccctagcatatgagctccccatgcatcttcatagcagttgtcaaaattataattagttgtatagatattggtttattgtctgttgtctttgttagccatctacaagaggaagagaccttttctatcttgttcactgctagtaggatctagtatagtatcaggcacacagtaggtgctcactaaatatttatgtagtagatggacaggtgagtagttctagcacttagtacagaagtgtggtctggggatatagattttgcagtagcatacaggtgttagtttaaacatttggaaggtaaaccttttagaaataccagacatgggctgggcgcggtggctcacacctgtaatcccagcactttaggaggccaagtcgggcggatcacgaggtcaggagatcgaaaccatcctggctaatatggtgaaaccctgtctgtactaaaaatacaaaaaattagctgtgtgtggtggcgggcgcctgtagtcccagctactcgggaggctgaggcaggagaatggcgtgaacccgggaggtggagcttgcagtgagtggagatcatgccactgcactccagcctgggtgacagagcgagactgtgtctcaaaaaaagaaa

SEQ ID NO: 9525 - DNA, 1152 bp, Homo sapiens
  SITE (1110): n equals a,t,g, or c
  SITE (1112): n equals a,t,g, or c
  SITE (1120): n equals a,t,g, or c
atctagaataccatctccactggttcactcagtaccaagtttttgtccttctttgacctgaatatttggaaattttgtcattagatcaccataagctttatttgtgtttgttccaccttctttccaaacctcgggaagaaggtttgcacaggctctgtgagggctcttgtactgtagctttgcccctcttcccatctttaaacttttctctgaattaggccttgtgtgagtaaaagattatgtcttattaaattcatgtgtttctgacaggttggatttgtctattaagtaacgggtttttctcaggctgtttttatagcatgctattttctccctgcagcatgcctcttccgatgtcgaaagaatgatcctgggtaacaaatgtgatatgaatgacaaaagacaagtgtcaaaagaaagaggggagaaggtaaatgtgaatggaatggataaaggttggaatctactcacattaagcatttcttttcttcatattatttaattattgattttttttaaaatctgtgttttaatccctttaaattggatatcaacaacaaagagatgtaatccatacttgaatggtgtgaattagtattcgagatccagctctctatactgtgtggtcatgactcattcctaaagaatttgctaatgttttctgggagatacaaattggtcctttctcagattcctgcagcttagagttcaggctgtttcttccagatctgtgtgaaaatgcccagttttgaagttaaagtaaacattctttttgaaaaagaagttatagggataggtgaagtttcaacaggaatcattttccaattcatttttttccctaagaatattttactacacattagcgttaggttttatggataaattccttgtaactgatcaagctatggatgtcatttatatgttgtttatgggcatgggcatttctctcttttgtgtcctgtaaagcaaaggaatattttgtgtacatatttacttctgtgacagattctaaattgacttagaagcttcactttttaagtcttggaattttgctttagcctttaaaaaaattatatatgcaaaatgcattttcttttctttttttttttntntgagacanagtcttgctctgtctcccaggctggagtgcag

SEQ ID NO: 9526 - DNA, 890 bp, Homo sapiens
tgtgtgccctgcattccaaggaatgggccaagggtttagatgaccctcatagataaggaatgaggctccaggctggccactcctggatttcttagcttggaactccaaaaccagcactcttcttagaccacagggccagtctcagggtatgtttaagttattgctgtcaggtgcatctgccatacactgtgtgtttgtgtgtgtgtggtgcagtgtggtgcatgtgcgtgtgtgtgtgtgtgatgtgctggagttgctgtgtgtgctgagtgggagagctcaacttcattccttgggtgacaagggagaagatactgatgggaggaggcgaatcacaggtttgcatttctgaaaatttagtctggagaaagacggacaggctatggggacatggagcaaagctacttcagtggtccaacaaagagatgatgagggtcagagtcagggacgcagctgggggaaaaacgtgaaaaatactttggagataaaatggtcaggaccagatccttgcctttaactattcagtgcctgaatatatccttgatgacacagtagactgagaaaggaacaatctgcacaagaatgagaaccttggtggggggtggtggcttacgcctgtaatcccagcactttggaaggccgaggcaggtggatcacaaggtcagaaaatcaagaccatccttgccaatatggtgaaaccctgtctctactaaaaatacaaaaattagcctggtgtggtggtgggcacctgtaatcccagctactcagaaggctgaggcaggggaatcgcttgaacttgggaggtggagattgcattgagccaagatcgaaccactgcactccagtctggtgatagagtgagactccgtcttaaaaaaaaaaaaaaaaaa

SEQ ID NO: 9527 - DNA, 1429 bp, Homo sapiens
tttagatgctgggccatatcactgagtgactatagttgattctcaaaacatccatgtgccaaatgattaatgaagtattaatatttatcaaatctactgatttatcaataacttgatttaaggaatatgcatctggaatatatcatatatgaatatgtacttttttactcagcagtaacttactattctttttctatttactgctccttcctactgggtctctctctcttgctctcgctctctctcgctctctgtctctctcttcttgaggtattttccctcctctttctattcaaagctttattttcagtctttgctttcttacagtgttgagttgtttctctgtattcctgtgtgcagattttgttatttttatataatttattcctttattctttgaagctgatctacccctgtctggctcccttttattgtgactagactctgggcagctttttattgacacagaaaccatttttttttccacacacccactcccactccatatcattcgtaccttttgaaggaggaatacacgtctgaaatagtacttctcacacagcacagcctggttcttgtcttgagccaagtctgtaacttggcttaagcagtttcctcattagataaaccctggctcttaaatgaaaaacaagcaacttcattcaatccccaaaacagcctgccgcagcacgaagagcagccacaccccagtggtgccagctttcttctcttttttttccatgtctgccctcttactagcttgcaccagttctgctgctgcatgatgttgtctgtggagtgatttttttaaaaagtatcagctgcttctttccatcctccttcatcatgtatttcctttaggagactttgttcctctaatccgttccaaaaagtaaaactattccaggctcattgcctcagggggagagtcaggccggtggaaaacaaggagggaatggaggaaatggtctcctcttaacacgttccattccagaagtccaggccctttcaggaaagccacgcgttactggcatgcatgaaacatttgggcgacaacctaaattagagcagtgcatcctcctgccatatccccttccccagctgaggagaggaggcagtttctgaagaacaaggaaggagagcatagattttcctaggctttgaggaagaagacctgcatcctgtttggctggactaattgtagggaggcttgtgggatctaaggagagaaggaatggctgtctcccttgctgagaagggtcacagggaggcagccagaacccagtgggcagcaacgacttcatagtgtggctgaacagcgagggctccagacagctcttccagaggccttggtgtccccaaggccctgatacagtagagagagccactgaaccaagggggcccatgcagacaggcacatagggagccc

SEQ ID NO: 9528 - DNA, 937 bp, Homo sapiens
tcagtggctgtccacatcgccagtgcttcacctgaggaggctggcaaggtgtgtcctctttcacctgcctcagttttcctcattggtgaaatggcctcatggctttggagcaaagagaatgacagataaaagggacaaatgacaccgggatctccatttgtttaacaagtacttattgagaacctactgtgtgcagggcaccaagccaagctgtggagaaaacagaagcaggtgaccagatgggagagctcgagaagccgctaggaggaggaggcagttgagctgtgacctggagcaggtggaggggcctccctgggaagatctgggtgtgggaagcacctgccagggagggggcacctcaagtcaaaggccctgaggtggggacaggtgagacaagaccaggacaagccccgctcttgctgttgtctggaaactaaggcacaaagagaggaggggacggagccaaggccatgcagctggcagaggtggagctgggatgttaggggaggaacagaggtcacaacctccacaggcttcttcccccacccctcactctcagccagtcttccttcccttcctgagccgccccagctgtggcggcgcgctgctgtcctggttcccttgtttaattacaagcaacatttttcaccctcacttaatgatgcaacagacacccgtggatctgccaccatctggccccactttctggcttgagatgatgagtcccagtgactttgagggctgagaggggagcaagggggaggcacctcgactgggagggtgccgagcttggcatggcctcagctctgtgatgtacctggccacgtctccaagtcctcatcagcagaattgggacaattgagggctggcgcgagggtctgtgagacaagagctgcttggcaaagaggagccctcagccctaaagggggcctcgagg

SEQ ID NO: 9529 - DNA, 129 bp, Homo sapiens
gggcgtggtggctcatgcctgtaatcccagcactttgggaggccgaggcggatggatcacgaggtcaggagattgagaccatcctggctaacacagtgaaaccccatctctactaaaaatacaaaaaaa

SEQ ID NO: 9530 - DNA, 1155 bp, Homo sapiens
aaaggattgttttttgttgacttagcaaaaacttctccttacaaaacctcttgagtgtgctgaattgtgaacaggaaattgacttggggtaaggggagagagggaaccagggcactcttaaagagaaaaagacccctgggtcgataaccaagtggtcctgggactggatctggctattacatgcacatcaacaatcttatgtacttgctgattaacaaattatatatattctgcatgtttgcacaaacagttcttgtgctagagagtccacatcatttaaactttgtgggagaattttgcaaatgatccaatcctagaggcttgtactctttcttgagccccactcacctttcctttgtacctcaaacctcagtctgactcttccagaaatataggggatggttcccttctcttctcccattccctacataaccctgagtttaaatacaaacactcagtttaattgtttcataaggcttatttttggataaagatatttcattttccctgcacattaaacttttatcacacttactgataaaatgccacagctcttgtattatcaactacaagttcagtcttctacttagataccaattaatttctgtttctttgagtatcatggactgaattttgtcccccactcattcatgtgttgaagacctaacccacaatgtgtttatatttgacatagggcctttaaggaagtaattaatgttaaataaggccataagggtggagccctaatccaacaggattagcattcttgtaagaagaggaaggggcaccagagttttcaagcacacaagaaaggccatgtgaggagccacaaaaccacggctgtctgcctggcgtcgtggcacacacctgtaatcccagcactttgggaggccaaagtaggcagatcgcttgaggtaaggagttcaagaccagcttgggcaacatagcgagacccatctctagaaaaaatacaaaaattagcagggtatggtggcaggcacctatagtcctagctgttgtaggggctggggtgggaggatcgcttgaacctgggaggcagaggttgcagtgggctggaatcaggccatcgcactccagcctgggtgacagagagagaccctgtcttttaaaaaaaaaaaaaaaaaaaaaaaaaaa

SEQ ID NO: 9531 - DNA, 1156 bp, Homo sapiens
aaaggattgttttttgttgacttagcaaaaacttctccttacaaaacctcttgagtgtgctgaattgtgaacaggaaattgacttggggtaaggggagagagggaaccagggcactcttaaagagaaaaagacccctgggtcgataaccaagtggtcctgggactggatctggctattacatgcacatcaacaatcttatgtacttgctgattaacaaattatatatattctgcatgtttacacaaacagttcttgtgctagagagtccacatcatttaaactttgtgggagaattttgcaaatgatccaatcctagaggcttgtactctttcttgagccccactcacctttcctttgtacctcaaacctcagtctgactcttccagaaatataggggatggttcccttctcttctcccattccctacataaccctgagtttaaatacaaacactcagtttaattgtttcataaggcttatttttggataaagatatttcattttccctgcacattaaacttttatcacacttactgataaaatgccacagctcttgtattatcaactacaagttcagtcttctacttagataccaattaatttctgtttctttgagtatcatggactgaattttgtcccccactcattcatgtgttgaagacctaacccacaatgtgtttatatttgacatagggcctttaaggaagtaattaatgttaaataaggccataagggtggagccctaatccaacaggattagcattcttgtaagaagaggaaggggcaccagagttttcaagcacacaagaaaggccatgtgaggagccacaaaaccacggctgtctgcctggcgtcgtggcacacacctgtaatcccagcactttgggaggccaaagtaggcagatcgcttgaggtaaggagttcaagaccagcttgggcaacatagcgagacccatctctagaaaaaatacaaaaattagcagggtatggtggcaggcacctatagtcctagctgttgtaggggctggggtgggaggatcgcttgaacctgggaggcagaggttgcagtgggctggaatcaggccatcgcactccagcctgggtgacagagagagaccctgtctttaaaaaaaaaaaaaaaaaaaaaaaaaaaaa
